United States Patent Application Publication US 2015/0240253 A1 - sequence listing, part 17

SEQ ID NO: 77727 - DNA, 615 bp, Zea Mays
gttccaccaaatctatgggcaaatactatgtagtcgtctgatagatagaaggtaaatttgagggcctgaagttctgccatgtggaaaggggctgcaatgtggaagccgatacagtctcgaagcttggttatagcagagctcaagttcctccaaacgtttttgtgcaagaggtacgacgtccaagtatttcataggagtcagaagaagagtgcaaggcagtagggaacaccatacttatcacggagctagacccgagcgactagaggttgcctattattagatacatcaagaatgaggaagatccagatgataaggcgactatcgagtgactcatccaacggtctgctaaatatatgcttattggcaatgacttgtacaaacgcagagcttcaagggttttcatgaggtgtattgacatggctatgggaaaacacctgctggaggaaatccattccggacaatgtggggttcacgtagcatcaagaacactactgggaaagctttcagagcagggttctactagcccatagcaaagaaggatgtagccaacctagtccagaggtgtcaggcttatcaattcctagccaaacaatagcacttgtcggcttagcgatt

SEQ ID NO: 77728 - DNA, 484 bp, Zea Mays
actgtgttatgatggattctttcattgacaccctgtgtgatgagttgagcaaaatgaagattgaagtgattccttctggtgctttgtctcacatttttgttgagccagctttgcaagaccagatcatcatggcccagctcagtgacaagggagtgcaaattattaaggagaacctccatcagaagaacgagaagtatagatgtttccgccaagatggaaagggtatattgtggtttgaaagcagattggtggttcctaaaaataaagatctcaagaataaaatcttggatgaggcccatctctccaaattctccatgcatccagggagcaccaaaatgtaccatgatctgaagcccttgtattggtggaccagaatgaaaagggagatagcccaatatgtatcagaatgtgacacctgtcagaggataaaggcaagccacttgaaatcagttggagctttgcaacccctatctataccttcgtg

SEQ ID NO: 77729 - DNA, 380 bp, Zea Mays
agcgaggcctcgatacagataggtcggatatgctctgtcttttagcggctgaatattcttgaaaacaaagtcagcgaccacagcttccacagtcagacccctttctttcaacaatccaacttcagcaagcagagcccctgcctcagccacctcctggtccgtgggggattcggtccagctcgaagtgcgaacatctggctgccttcctgaccgtggggggagagaattcccatgattctccatgatgaaccattctaggcgccatcccttgatgctgtccttgagtgggatgtcgaggtagtcagtctttctcccacagcgcatctccaagctcgcgccccccaccagctggtgctgccctccgaccatcccaggccgac

SEQ ID NO: 77730 - DNA, 1148 bp, Zea Mays
gttccaataggggatattattcacaacaaagaagccatcggaagaatagccaagtgggcctgtgaactgggagctcatgacatagagattcggccttacacggcagtaaagactcaagcactagttgacttcgtatcataatggactgagcatcaggttccagacaacccagaggctactgaagtatggcgaatgtattttgatggctcgttgaaactgcagtgagtaggcgcaggaatcatcttcatttctccaggaggtaaacaactcaagtatgcacttcagctatcattcccagcattaaataatgcagcataatatgaagcactgatccacggattgaacatcgccatgtcactaggcgttaagaggttgatggtatatggagattcactagtggtcataagccaggtaaataaggactgggattgctcgactgattccatgggcaagtactgtacaaccgtccaaaaattagaagacaagtttgaagggttggaattccatcacgtggaaagagaccgcaacgcagcagcagacgcgttgtcgaaactatgatccagtcgggcctaggtcccacctagaatttcgtccaggaagtatcacgcccaagtattccctcggattagacagaagaatgcaacaccttaagccaaccagaatcgaaccctaatgactagagagagcctatcatcaggtacataaagaatgaggaggaaccggatgataaggctgcagcagaacgcatcccaagacagtcggcccactacaccctcataggggcgcactgtacacaaggggtgcgacgggagtcctcatgaattgcatttcctcaactactgggaagcagccattggatgaaatccatgctggacagtgcagagtacacgcagcatccagaactctggttgggaaagttttcaggtttggtttctattggccaacggcgaagagtgatgtcctcaagctagtccagagatgtgaagctcgccagtttttgttaaagaaacaacatttacaggcacaacagctgtagaccatacctgtaacatggccatttgcatgctgggggctggacatgattggacccttcaagaaagctcagggaggctatactcacgtgttggttgccactgacaagttcacca

SEQ ID NO: 77731 - DNA, 301 bp, Zea Mays
ggcatggcgccgccgcccagctcgggttcgtaggaagaaggaggcccctggccgtccgattgccagtgggtggtttagatcaaatggagtatccgtgtgcgccaaataaaattcgagcccttggatcgtagacgcatggccaggattagatcgggcaccatagaaatctagaccatcggatttcgggtgaacggactagattagaatagatcataccccctttggcggatctaatcggtgccgcatatcggagatctgacggcccagatttgagaatacctcttcgcccgtggctttttag

SEQ ID NO: 77732 - DNA, 721 bp, Zea Mays
tgggagaaggtgctttatgcttctagtcatcttactggacccgctgctgactggtgggattcttatactgctgcccatgacgctgctaatactatcacctaggcagaattcactacatagtttagaaattatcacattcctgttggactgatgaagattatgaagaaggaatttatgtcactaaaatagggcaatatgtcagttagtgagtatcgtgataaatttattcagctatcacagtatgctccggatgaagttgcagatgctgaaagaaagtgagaacacttcatggaggggctcaatggaccgcttcaatattcactggttgctcacactttctcatcatttcagaggctcttagacaaggctctagctattgaacacaagcgtgttcaactgtgagaaatgaagaggaaggccattacccaggggtagggtaacagcgtccttgctaccttccgccccagggtacaccagctcgtcctagaggaggaccgtgcccagctcagtatgcacctcagggactccacatacaccacacactcgtcaggctgcccccactggcaccccggcgagacccgcaggacaaaggacaggccccacatgcttcaagtgtagtcagattgagcactatgcaaatgcttgtccaatgggtaatgccaacacacccgctcagaacaagcaatagactcccacctctgacaagggatttagcattgtc

SEQ ID NO: 77733 - DNA, 548 bp, Zea Mays
ggccgttacagccatcccgacctgcctcgctagtacaaagccaccagccacgaccgctgcggcctccccgttccatcacatctgagctggaaccgagcgccaacacaaaatcgatggagaagaaatcgggagagaggaagaagtagtcaccattgtcgcggaccaaggagaggaagagagagattgagagcttgcgagcgacgccgtcaccgcactcacatcgtgtgggttcggtttgtcgcggattggagtcttcggtacgacaggaagcaaaccaagacccctgcgcgcacatattgggttgcggcgctctaaagttcctcgtcgtcatcgcggaatcccaacctccacccatccaccggggccggagaacctctgctgcgcaattaggtatgagaaaccccgttaattcctcggtttgtcggtcatataccacccaattagccatggctcgtgtgtcaattaggggtagcgggtgatgctggcgcggtgcattgagggtcgggtcctgcgatggatggcggcagcaattaatgggtgaatcaggc

SEQ ID NO: 77734 - DNA, 1358 bp, Zea Mays
aacagatcacaaagttaatatggcaacatccttcactgtgaatgagattagcagtcagcagagaacatccggaaatagagtaaagtaggtcagaaacaataatgcccatttcaatcacttcctttttttccgtgtagttactcacgcttggataacacaatcagctatacacgccacgctttcacaatcgtccaaaaccccccaaatacattagctacactacacacaagaaaaagaaaaggttagaattcacggtttagcacatgccgcgtcgctgcacataggggactcgaggtttatggggactttacgagtaggtgctcatacagtttggtagggttgttgtgtataattgacgggttcgcgtcttccaggcgctcggcaagggatctgagcatggagaccagatggcgcgtgttcttcgtgcatcggcacactaggtctaagtattgcatggcctcctgaggaaggagaccagtcatgaagaaggggaagagcttcgagtgtgtcatctccattgtagatactgcctccgaagcccatgcagaactggacctgccagaaaccttcccctcctcccgctgcatccgtcttacttgttctagccgtgggagaaggtcgctctcttcttctttgaagtgctctttggtgcgatcctgccaatgttttgataatatcagagatacaccgaacgctaacagatagaggtataaatttacaagctcactgcctaggagttacaatggctcattgagtttattttataggacgcgtccagatatggagtgtttggtattatcagcagacctctttactaaatagctagtaggatattctatagacaaggttctcattatccatgtaagtatgcaccagtctacaatactatattaacaaaaaatatcaaaacaaacttcaaaggccgttaagagcctaaagtttcttagctggttcagagataaattgctggctaattttgcctgaccatttgttaacccatgctatcagtaaccagctcaaatcaacataagcccacacactgaatgcaatcaccaaatttacagtttgcaacaaggactgtctggtgaccacagagatgaagcatccatggaatgagagtgctcgctacgattgcaccatttatggtaaatggcctccggacctacgtcaaattcttttcaaaagcttggtaagaacatgtgagatagggccagctgtaatgagcacaaaatgttgaaacctttattgtcaggtaaagtaatcatttcttaattgcttgggccaggctgcaccctacaatcttccctcgactttcattacacaatacacatcttccaagtttccaataaaaaggagag

SEQ ID NO: 77735 - DNA, 455 bp, Zea Mays
gctaggtcatcgacctcagcaccgcctgcaccagtcattcaagctcctgcacccgtaggcgacgacctagacgactctggggacgacgatgttggggatgaaaacgacaacgaggacgaagaggaacaagtcaacgaggaagccaactatgcccagaagaactacttcatggggtttgggtctgtcaccgaacattacacattaatgttcaatacggggcacttccccaacctgctgcaagacgtgctgcacgcgttaggaacctacacccgacccttgtacgagacaaggcaagtgagcgagcctccccgggcttgctactacatcactcgcattcacgtcagggtgatggatgcaggggatagaggattccagactctatcagctcatgagtccctgacatcgctatccacctacgctgcttcagtcagcaatgctatcagacggactctgtg

SEQ ID NO: 77736 - DNA, 332 bp, Zea Mays
gctttcagtgaaatggatgccacttgcacctaacaatagcaaatggatgtcactttctatttcacagactgctcacttctaatacacaaacattgttagcggggaatgcttttgcacttgctaatataacagtactccctccgtcctaatttataaggcgtaaccacttttaccattatttttacactactttgctatcaagtgagccaaaaacacttactaattattcttcactcatgcccattgaacatagattgtttgtggattgctaaaccttttatgctcactcctttctaatgtactaactttgacagctaataaaacacaaaaaa

SEQ ID NO: 77737 - DNA, 590 bp, Zea Mays
aaggaactctattacctttgttgttgtcagcaatgcgatcagcttgtatttgatccacttcgtgaacttatcgatggccaccaacatgtgtgtgtaccatccttgagccttcttgaattgtccaatcatttacaatccccagcatgcaaagggtcaggagacggatagtttgtgactgttgtgtggacaagtgttgttgtttggctaaaaattgacatgcctcacatctctaaaccaggtcgactccatctcgcttggttgttgaccagtagaacccctctataaaagccttcccaaccaacgttaatgaggctgcatgaacaccacactgtcccacatgaatcttcctcaacagatgcctaccactagatgtatcaatgcatctcatgaaggttcccactgccccacgccaaggctttgtcgatcagagtgtggttggcagactacctagcaaggcgctcgacaacagcttttttgtctggctcttcttcattcttgatatatttgatgatgggtgctctccagttagttggatattcttctacaagcagtatctcatgctctatcaccttgcactcttctctcgagtc

SEQ ID NO: 77738 - DNA, 390 bp, Zea Mays
gacaaccttcactacgagatatgggttatatgagtttttggtcatgtcgtttggactgactaatgcaccagcatactatatgaacctaatgaataaattattcatggaatatctagatcagtttgtggtcgtattcattgacaacatactggtatactctccgaatgaagaaacacatgaagatcatctaagactagttctacaaaagcttcgtgacaaccaattgtatgcaaagttctcgaagtgtgatttttggctgaaggaagttgctttcctaggacatattgttactgatggtggaattaatgtagatccgggaaagataagtgaaatactaaattggaagcaactaaaggatgcgtccaagatcagaagttttcttggattggc

SEQ ID NO: 77739 - DNA, 823 bp, Zea Mays
taatcagccgcatgcggggaggatagcttgggggatcaagtcagtgacacattgggcccactcgtcgttccccgctccgtccgctcttctcaactgaatcagccgcaccactggaggaccgagcaatctgcagctcaacgcgattcttgcgctagaccccaaccgaccccgtgactcattcctccctctgctgtcttctcgcgcgagccctttccccagggcagcagctccctgctcgccgagcggctcttccatggcgccttgatctggcgactccgctactccctccagccatctcctccctcacggctccccgcagaccggaccccagtaccctcctttgaaccagtcctccaagtgctccgtgtctatggactctccaccgccaccgggggagcgaggtaacgccgcaaccatggtccggcatctccgcctcctttcggtgtccatggtggggtctgggagaatctccagggcgagtggattgtgaccgggcatgtgcttagccgcggtggcattcggtgtccagtgaatcactcgccgcagctccaaggccgccgcggggtcacgcatctccgtgggcgtggtgaactgcttcacaaatcacggtaataatctctcccctgtctcctccaaacccttgatttgggatagcacccattccgcgatgcgtagggccgcgcttgtaccgagattggggagctcgccggcgagctccgccgtgatggcgagttctgtcgcctaccggccgcgtgggtagggaagaacaaacatgggtcgtcgattgttttagggacggtactgattagatcctaggttaccc

SEQ ID NO: 77740 - DNA, 548 bp, Zea Mays
aaatgaagggttaattagaaataagcctttgtgattatagtaaataaggtaaaacttacactaaatcataaaaattgagtgggggccttagccccactgctcttaacgttggtccgccctggctgtagcggtttaataagaagaaatatgtttgcgcgtgtgggtggtccagtcgtacttagacaagcgctaggatgcatgcctgtgtgttactcgctaacaatgtgattgtgctgctgatcgtcgtaccagtatgtagtctatagtccgtgtgtgctttctttaattcttttggaagacgtatcttgcattgccatagcaaaattggctagcgcttcttgcatctatttcagtgccgtagtcatggtctgatggtcatgcatggcgcttcctttttcaaccacatatgcatgcatgttctctgagccggacggggaaccgtaccagctgctggaagcttggcagccagcaggggaggcagagcgagagaccggactgtgaaagcatctgaaagttctgaacccgtccaggactgtctgtctgtgtac

SEQ ID NO: 77741 - DNA, 289 bp, Zea Mays
ttaggatctaccggtctaatgatatctactaccagtttgctcacattgttgagaactttgtcgaatttcctactgcatctttcaagtgatctagtaaatcgatcttcatcttgtcttactgattgaggagcaccacaaatccataaaaacagacctaaagcctctattgatgacatccttttagtgcttttcagcctatttgaatccaccagcaagctatgtaatttttcaaacactatcctgctcatcctaaacatgttgtagcaactagttctgtttgctagtgttt

SEQ ID NO: 77742 - DNA, 1642 bp, Zea Mays
caggccaccacgttcccttcgctcctctcatcgccttccaccaccgccttctgcaccgcgcagctgtacctgaatatcctcaagacacgggtcacgggggatcgctagtggggttattctggtcgacgaagcgctgaaggtgttcggtcaaatgacggtaaggagcgtcatcacctggaaggctggaagtaagtgtcatctcttcgttcttgcggtttggtcgcggccacgatgctgtgtcctggtccagggagctcccgagaagcggcgatgcattgtcagatcagatggctcgcttgttgccgtgttgcctgcatttgggcttggcaaagcaagttcatgagaaaattggaacgggttccttctcaacaggtgaaaatgcactgttgaattcgtactgtacttgaggtgctctatgtgtggcagagaagctgtcgatgagtttagagatgcgatgcacaaataaactcatgcttcctgttcacctacaatggcattgaagtaaaaggggcagaattcacttggtttgcttggaaggagcaaaatggtcaatttcctgccaaaataacaccccactaacagcacatggacggaaatggtgctgagggaatctgttatttcatttgatggcaccaaagagaaattcaaaaaaattcaacggcatcgagagaagcgctataatgtccagggctgggccatggcatggctgttgtaagggacagtgcgtcggtgcgtgtggtgcatttgtttaaagagcaaggcacaattccagctttatcctttggctcccacaccaagcaaagcaaagaacctacgtgccttcacactgtagtgaaactgtgaaagcagcgagagcagaatttaaaggcaaagtaagaagtgacatcagaagctccctgcagatttgcatcaaactacaccatcgacagttagcaagttcctcatcctccacactagggcgtcttcgcaatatttctgctgtagcgctagcattgggtagtggacacgacatagctgctcccaaggtacctactaaaattcatcgttttcatgtttttttctcgaacacgcaggagagctgaatatcattatattaataagttcctgcatatcattatattaataataataagaaaaatacaaggtccaataagaccgaagtacaaagaaccacctcacggcggccagaatctaacatacacaaaaagatcgatctaccaaccaatgaactaaatcacctctagaagggggctgcaaggaaggataaccccttggccccagaaaactcccatatccggcgctcctccccaacatgagttataactgcagcaatactaggagagatgccatcaaatacacatatatttctatgattctatagcacccaaaataacaagggaattgagaccatccctgaaaggggaccattaacagtttcactgacttcttcccaccatgttaattgtttgtttggataaatatgcacatatttgaagatattaatgttagttttgaaattttgccacgagtatatgtatacttattttttatatatgtaataggagagaatacatgttttatttatgctcttattggctttgtccatttgcatgcagacaaaagacacatagtgcaacagatg

SEQ ID NO: 77743 - DNA, 514 bp, Zea Mays
ggaggtcctgatccatgtgtcatgcatggctgcatatgtttctagggttgttagtatgatacatactatagatcaggtctagaatgttcatataaataacttgttgtttatttggccttggtttcagtttatggtgtgggtagttctgatggtttttggctcgttactgtgcctttagctgtacgtgtggcacgcgtcgctctaggaccagtaatgttttaaaacatgctctagtcagattttttctcttttcgatagttaccaatggatgtttacatttatttacttattctttatcaacctggaaaagatgaggccatgctctgcagagtgcatatattattgtgtgagacatagttttgcactataaactgcactatttatacaatgtagtttgaaatagagagtggaataggggtgagaaggaaggttgctggagagagcctggcaatcagcttaagagagtcgatcagtgcaactagcatgggccgatccacacgatatggccaaaatt

SEQ ID NO: 77744 - DNA, 557 bp, Zea Mays
cgggcatataaccacgaaacatgacagggataatcctctccattaatatatggaagccatggctctttaacccagttagttttcccgtttcaaattcacagctcttttcaagcccgcagcatatccatcgggaaatttaatttttttcatccatctcattacctcgatcttgtctttagaggtaagacaaaacaaggcacgtggcggcttaccgttggcattgagcacttgggttggtcggtcacaaagcattgctagatctcttcgagctttcagattgtcctttgttttttcaaaatgcatgcaggtgtgtatgagggcttcagcaacattactttcttggtgcatgacatcaatgttgtgcacaagaatcaatgacgacatataagggagtcccatagaccacatatatgtgtccagttgtggtccactctgaatccttcatacttgtcccccttttcatttaaggcaaggttgttcagctgagcatatatttctgctgtgttaagacgtttaggcggtcctttggtgaccacagtgttctttataaagttttt

SEQ ID NO: 77745 - DNA, 330 bp, Zea Mays
tttcgggaccgtcacgggagtctgaaaaggtaaatttttcagaaccagtgcaccgactcgaggcacccccacgcatggcccaacagtgacattaagtacgatggtcacgggccagtcagccgtgggaataggcatagcagttggcatggccataggcgggccggcagtaattgcagcaacaggcacgcaggagcaacggtccaaccgccaatcagactctggtcccacctgcaggctcgcatccccccttgaggtgggcccggggaccactgtcggtaccctgaatcagaggtaccctcttctatggtatgaaggcgctgcacccgtacc

SEQ ID NO: 77746 - DNA, 469 bp, Zea Mays
ggctgattggctcagcaagggcgcctcgggcgagtactgacaggcttctgagtatccaaagttgtatcaacctctgggaggggcgccaccaccaacgccccagcaggagcagcgtcggaagaatcctcagccagcaaatcaagcatagcacttatctctgcatcactagggttcaagagcacctcaaaatggacttgtcgttcatcattaggaatctccccaagcgaagcaaccaaggcactaacttcatcagcagagggtcgcactctaaggcccaaactgccatcagtgacaggtggattcgacacaaaaagggtgaaggctttgggaggaggcaggttccaggccgagtatgccactggagcaccaacatttgacactttgcccctaaggatcatctctagtcggctcaccaagtctgcagagggaattcttctgttggtaacccgagttgagtcggctagccctc

SEQ ID NO: 77747 - DNA, 414 bp, Zea Mays
tgccttccgacgctgctataatgggagccgagccatcagggacagcaagtgaagaacctgatggggagttggaccttttcaggcccctccttccatgaaccatgctgacgaacggtctcctacagcaggaaatgaagcaaccaaggatgacgaagactagaatagtatagtttagctgttatacttatgtaaaataagtactgaagtcaagttgtacgctggagtctgtataattattacattttggtaatgtaatatgattgtgtgctagcatgttatattttttccaaatgtttctttgcctcagatgccatcacggactcgtgcacatgatggtgcggggacttcccatggtcgggaagatactcccaacccaccaccagtaccaccgacgttggccaaggctatcgctgc

SEQ ID NO: 77748 - DNA, 768 bp, Zea Mays
cgtcgaggcaggaaagctgagtatctcggcattcctttcaaagacagtattaagggatggcgcttcgagtggtttactatggaaaatcataacaagtcccttcctgctcgatcagggaggtaccctgacgtccaaacgcctagctggacagaagtccctacagatttagagcttgctgagtctaggatgttgcttgcagaaatatgtgcgttgaaggacagaggcttgactgctgagactgttgttgttgattttgttttaaaaaatatccagtctttgaaggatagagtctaccctgcctacctgtacactggtgttaatgaccctacttgaattaccaacaagatttctaaggaggacatgctgagtcgagttgatttgatgctggtgctcccttttcgtattctgcctagaatcttcccccacagagactcttttccaagttcgtatccaacccacctgtccaagacgacagtccaaaccatagagtgtgaccctcttcagaagatattgaggccttcattgctccataccgaaatttccctaaagaagaaagacagacccatctccaaatgcaaacgactgatgatgagacttcctcttagtatgctggtgggcgagtcgtttgactctgcccattctgagtcagcgagtgctgcagctgggcacgtcctcggcgaggatgaaggagcttatagtcctggaagtgtccatcacaaacgattgcgtcgaatgagtcatctagccacgtctgccgaggggaagaaa

SEQ ID NO: 77749 - DNA, 402 bp, Zea Mays
aaggtgtagctcaacccgtatcgggtctgcactgtaaagctggtatatgaaagcgtagagattgagtcaattggagaccttggctttggtggggattgttggaattaggctcatttgtgtgtggcccaattcaataaggaagccaaggtggtgtgtagggatggcatgggactttagtcccacatcgcccatctagataggacagaaccaccttatatgtgggagtgttccctactcttcacaagagacaaataaagggctatggagactgccacatacgcgcgctcgctcgcatttcgagtttttctgtgttattcaacgcgtcacttgtgacttgcgacgatgcgcgatcgcgtcatgttctaaacaatagtttaatttttgccttttgtttatttggtt

SEQ ID NO: 77750 - DNA, 720 bp, Zea Mays
ttcatccgcctaaagatccaatgctctctacaagttgattctttgttgctccaacaaagtaatccgctcacaaccatgtgcacgtcttgagccaggtcacctacaacctctctggatgatcaccgcactccgatcaccatcaaactatatagtatcaagaccagcaagagtaataagcacaaactcttcatgacgtattggtctaacagtgtacctattgggcggtctaactacatgcaacgaggcttgttttgtttgcaacagctagttcacttcttagaggttatatatataccaccccaaccagtcatttgagagttatgggagctgagaaacattccaagtgatttgagacttattcctagtaactgtagacatccaaatgcacaaatatcactcgattattagcataggtactttacatagtgctaaggctagttaaacttctttaactagtgcttgctctaggttttgtcgtagtgatttgaagtgaggtaaagacacctcttgcccctttgtgttgtgtgtgccattgtattgagttgtgttgggaggagcttgtagttttgcgatatcacaccaattgtggttgtagtgtggtcgccaccgtgtattagagaaaacgagacatgtcctattttagttgcaaactcgatagtgaagacgatagagagcgtctaggagagctcacactgtagcaccacttacacatggtgaagg

SEQ ID NO: 77751 - DNA, 282 bp, Zea Mays
gcttcgggagtaagttgattaaggtatatcccaaatgtcttcaatacttcaaccaacatcttgtgcaagggaaaacgaaacccagccttcaaaaaactcttaaaaaccactacttcgttttcttcagaaagaggaatgatattctctcctccaaccctcacaatggatatgtcatggaaatatttccccttcatcgcttcaatctgtccttgcttaatagtggactttccaaaaacaacatgacttggcctccatggtcgatcatcgatttcttcattatca

SEQ ID NO: 77752 - DNA, 554 bp, Zea Mays
atcggttgggagatagactggaggtgatgggggcgggtcagcttcgactccaggagcaggcagactgcttggctgcggtggttgcagggaaggccacagaggagagggtccagagaacgcaaaaaatggaaacaacacatgaggtggtgaggtgcatggctagggatatggaacctgaggaactgagttgggagggtcctcgatctagcgaacaagggcgtcggtgtggtcttaatgctcaggggaatggaggtactgcctactcagtgttcgatgaaaagtctattgaggagatggtacggggtactgaagtattacttggctacaactcacatggcctattgcaacatgattgtgagagggatgttgtgcctgaggttccatggatgtttgttggaatgtcacagcaagtaagtacatacccaatgtccagggaaataggtcttacagtggcatgggatggggagatgcaagctgaaattcacacgcatgaaggattactgcagcagcttgctcaaggtgaagaagccttaaaagaatcagctaagaaggag

SEQ ID NO: 77753 - DNA, 749 bp, Zea Mays
atttgctaacgtgagtatcaaattaatacgttacctgctgccttggttgtttcatgtcgcagatgaaggagatgaatgcaagaacggaaaacacagagccaaactcaaacgtgccaaatgaccaacacgttcactatacgacaatcgaaatggaatcttctaataccagccaagcaagaaaaaattccaaagagaaggtcagcgcaagagacatctcgcttcttgcaggtacgttgggcttgggttcaggttttcatgctatggtctatggaaggtggattatttaatttcgttaaaaaagaagtgtgaaatgtttaatctgtttctgtgcccaataaagtgccctgttcgggtttatacatgagaaattagtaaattaattcgtcctcaaatatcgttttaaagtaaatccaggatatgatattattactcatagtagtactgaagtgctgaaaaacctaatgataatacttccaatagacgagccaaatgttgttatgaatatgtaagatggagcgaattggctggtgatgtcaaatgtagttccttttctatcttatcttaccataccagttccttaccattaggatataaatctgtcgtccctttttgtcacaggagaaggagatattacaaggaagttagtcgaacctataaaggttttctctgagaaggacctactaagggagataggaaaagtagtatctactttgcagccagataatgagtggtcaatccggataactgca

SEQ ID NO: 77754 - DNA, 595 bp, Zea Mays
gtgcgccgaagatgatgcggtccttgtagaaggaggccggggatgggcaggcgggggagggcggtgaggagaagtgggacacctccgagtgctccggcagcgggtggaggaggtgcgtcggcagcagcggctccgtgtccatgacgcacgggctcccctcgcaagcagagagacgggccggggtttggactccaccgattccttgttcgtggggacgctgcgctgtgggaggggttgaggaggaggaaggcgtctcaggagatgttggaagtctgcggccgctgatgccgtcttcttctggtgtgctctcctgcttgacgacggcgaatcccgtttttcttgcgttttattgttattttttcctaaaaaagagggaaatcattaattattgggaggagaggagatgagatcagacgagcccaaacaaatcctctatctccactctaaacattgcagataagacgagcccaagcagcgattgtatcctcgtctgggtgacgcaagacgtcacaagcgccgaacctttcatctcaaagatgagcatgtgctattctccttccttcgaagttctaagctgaagagaaaggagtgaacg

SEQ ID NO: 77755 - DNA, 399 bp, Zea Mays
gaattaaaccttgtgccaaaccctagcttccgcggcctctcttgttagcctggagatcccttccacattcccctccctttctcccttctcatctccttcctcactccttgcctaaccagctatttgctctaggtcatagttgaggcatcactcaatgttgtcacatatcatctatccctatattcaccctataacgggctctaatccatccttcacactggaccgattccccgctcttccgtgtcctggagagctactccactaatcatttggggtggttatcttccactggttgtgctccctgccctctccatagtaacctcttcgatcatgcctcgccctcccctcatatttcatgttggcatgggctactcttgcttgcccactgctagatctact

SEQ ID NO: 77756 - DNA, 458 bp, Zea Mays
tttaaatattagtatagatagcagtagtagtagtaattagaagtagaataaagtagtgttagttagtagtgtagtgtaagtagtagggtaatgtagtgtattgtaatgtagtgacaggagtagaagaggtcgactcataatgagtcggcttcgagtttgtgttaattcccccattatgtatgaaggatgaggttactccaccgtttacttgctttttgttcatgtgcttgaaagttcgttcgtgtgcttgacagtgacggcattttagaggtaatgcctgagtgacgattgaagtcctcgcttttccgagttatgatctgccactttagaggtaatgcccgacttaaggagccaacttatactcatgccgacgtgccttcttgagtttcgaaccctaaatcttactttgtgctctgtcgcttctccgctttctgaattcccgagcccgctcattccgc

SEQ ID NO: 77757 - DNA, 413 bp, Zea Mays
cctagttaattaatgaccttcaaaaaagataggaaacatccatcttgggccaagaacacatactaatagcaattgcgggttaggagtttgtttcctttatatttggatttgggtcaattacaaaaacagatcgttcaagtcatggtttatgcctctgcattatccttgtttacttgcacgggtccaagaaggctatatgatctaggcctttctttaagaagtatttgacctccaacctacataagcaagagatacattcaaacattgaagatgtagttgagataatatcacgcgagtagggtacttacatataccatcatatcactatttgtcgagggaaagcctctaatagaaacaagacatcatactcgacccaattggtccattcatctttatgaaaacatggtttcgat

SEQ ID NO: 77758 - DNA, 501 bp, Zea Mays
cctgaagaggaccgtgcaacgaccctcgatggcgaccatggagccatcgtcgaattgaacagtctcttggacgccagtgtcaagctcggaaagaccatgtgctcccctgtcatgtggttcgtcgtgccaatgccgaagatccagcgctttatctcgccaccgcccttatcctcgagctagacgaagaaatggttctggtcgaggtggatctctagcgtcgtggttggggccttctttgcaggaggtggtttgatgtcgctggtagatgccagagccatgaacgccataggctctggctcagtgaatgtcgatcgtgtgctacctcttcccttgatctagacgatgagtgcatctctagcccctagcgatgcgatatccatcgacaatgatggatttgtggaagacaactccatcgatgccccttgatcgtctcttctttatgttgtgccatgatggaggcaaggcctaacatgaacgcccctctagtgggctcccctagca

SEQ ID NO: 77759 - DNA, 292 bp, Zea Mays
ctgccggtgggcccctgtggcaggtccatcttctccgtatcccaacaaacttgccacggccgacgcatccgcgaccgcggggcggaactccaccgatccgagcacaacgggatcgcaataacctgcagtgtcgctaggacttctccctcgcgaaggctgcgtgtaccaaattagagttcgttgaagaccttccgtgatctccggcgctggcccatggtggaggatgccatcctcgcctccggggtataaaaatcgtagaccagctctccctgttccccattgcaagctccca

SEQ ID NO: 77760 - DNA, 359 bp, Zea Mays
ctaggagtgggattgttaccaatgggacaatccttgcattgatgtcccttctttcggcatatgtagcataggcgatcctcaagtcttgaagatttcttatttcttgtttctttcttgctacatggttagtgaatattttcttttctaacattatgcctttttgttttaaatggggacaagacctaaacaagtgtcccttcttggagcatttaaaacaaagttgatcatccttgttaataatcaagtcatttttaatatagggacatgacttaatagagtgccccttttcaaagcattcactacacttcttacttctcttagtgtgaagtgtaacttgattattaccttggatgttacct

SEQ ID NO: 77761 - DNA, 534 bp, Zea Mays
cagtagtcaatgcgaacaatgcaaatgttgtgaacaatgcagaagagcagttcagttatcagttgtcgggtcttgaggaccttccttctgatgaatcggtgggctactttaacgatatcattatccctcagggagtccagtttcatcaggaggaggaagccccggtgccgactgaagcaattctcgccttgccagcattccctcctgaagaataattttggagggaaataacgaccagggagaagacgacatgcaaattgaagataacatcaatgtgggcctcatgttacatttggagcagtccatccctgatcctgcttttgaagactatatggccagaaagcgttcctcttcttgggctgatttattccctgacaatgctggccttgtttctgttccaaaagtctgggctgctttcttcatgggcctactaatcaagccggattcttttgactgggccaggaaattactgttgtcaggagctatctctgccttcatcgagcccagcatggacaccatttcaatcaagattcc

SEQ ID NO: 77762 - DNA, 621 bp, Zea Mays
tactgctaagctgcctcctcctggggtgcctgctgctcctgctgagcacatcttccacctctgcgcctgttctcagacatctgtagaaagcacgcacacatccgatatgactctgcagtctttcagcataagaaaagatatatggaaatcttcatagcactgaataattgatcatcatcactgactctcaacacagcttctcagataaagaggaaagtggaaataaagggattgcccaattaaataactaactttattaataactacacaaagttgcaggggatgcccacaccttgatgacaatcattacaaagatccaacttcattacgagttcatcatgacaagcatcaaaacatatgataagcaacctaactctaactaagactaactaagactaagacactgaatttaacattattatagactccgactctgtcgatctatgactccaaatctatctgggtcctgcagtcaggggtgtcgtaatcaaagcgaccacggggcgcgcgcgcggtaagggtgctgaatcccgacaagagcaagagaaccaccatcctgatagtggtgcgctgcacgctcagcacgcaattccgcaacctctgtccgaaccttgcccaact

SEQ ID NO: 77763 - DNA, 587 bp, Zea Mays
gtacatgtcacctatttctatcggtatgtcttacatgcatctcatacgtaagatatgttgttttgaaattgtctctttttctgcggtctcaaagcgaccaacaatgtgatatttatgatgagccacgagttcgagtgagatttcaacgtcataatcttgttgttctccattgcactacatttgtgcatgagatagagaacaatgtggccatgctgctgaaatcatgttcgacctccgtatggtcgtaataaattcacgttatgtcggtcgttcttgttctaaggatcaaatataagtgacgatcgttgatggatgtatgatggttgaagttataatagggctttttttgaaaaagtggatggtcaagactcataaacttatcgctcatgcagtgtctttgtcaatcgttgatattgtaaggtatcaatgtagcaagtgtttctattatctatgtcatgaaaagataagactgtcaatggacctttgcagtttggttttgtgacaagttataatatgtgtgtgcactatggcgagtcacaacatcaacatgtaaaagttgaagaacatgatatggcagaccataatag

SEQ ID NO: 77764 - DNA, 466 bp, Zea Mays
accatggggttccccacgtgatgcttttggactggacggtgtcattgatggtgactcgatggtatgtgtaggtgcacgtcggatcacacaagcgtttaaacaggttcaggccgctgaagtgcgtaacaccctacttcctatcgaggctgagtatttgagtatctctggtgtacatggattacagatgagctatggacgatggatctagtggtggcttggttcctgtgagagggctgatgagctatgaggtggtgacgagtagaggtgtgatgtgctgagacgagatggtctgagtcgaggggcaccccctcggccttatatagacgaccagagggttatccctttacaagtcatgatcactctctaactctacctaaatcttcccttttccgaggcatgcattcctgcttattcggagtttagttgcccttcatccaagtcatctccgagtatctagcacttctgg

SEQ ID NO: 77765 - DNA, 364 bp, Zea Mays
atcaaaatgaatagaatggaggtgccccccagcctagatagacaaagggactatacatgtaccatggattcatcgccatgttattccacatttgggtaggacaatataccgacgatgaataaacgggtggaaagtaccctggtctcataggatgaacagacgatgcttgtcgcgtcgccttttgggccgttttgttcgcccgtttcgttttagtaggtgaccggggtttctttgttgaccgatcatgtggaacggtctttttactagcatttttggagagaaactgatcaaaagtagggtcggctttgatcagccgactatatgtgctttgaccttgcgtctttttccttgcttcgtgtagagg

SEQ ID NO: 77766 - DNA, 489 bp, Zea Mays
aggatatatattattaggagatcatatgatgtgggtaagttagaatctctgttaggttagaacagaggggttatgcaactatcgggtggttaatatagttttttttcgaggccgagttggtcggtcattcttaatttagtgcatagtgaattaagttaaaacatgtggatatggtctaatccatttcgccagtattaactaacctgtttgagtaaatcacattgggttagtttagattagatgggaactagattagtttagcataactagatttgactaaataagacctaattaattttgggttagattaggttgaatggggtctaggtatgaccagattaatctagataagatctagaatacattgatatgactggtttagtctagataagatccaattaatttggattggatcatgatcatggtgggataagtcaagtggttttagtcacgcaaatataacctagatctgatctcattaattagatc

SEQ ID NO: 77767 - DNA, 490 bp, Zea Mays
gttgaagcatccaatggaagaactaggaagagcggggaaacaagcactaggggcactcggctgatttgtagaagtgggggcagtggcaggacgaatgaaaacaggctgtttgaaaggataggaggatggacaaggcgaagaacgattctgattaaaaggtcatattaccaacctggttcgcttctcaggtccctgagtagacctgtcacctccaaatccctttgattttccatggcctgtgtttttggcttctacggccaatgtcgtgctaacagctctgctgtaagtaagatctaggcaggtgtccattttcctctaaagcctatcgttgagtcccctcatgaagcaattctttttcttcaagtaagtgttcatttggtcaatagcatattgggataaatggttaaacttgttgagatactgcattacagtatctcccccttgctttagtcgaataaactcctcttgtttcatgtgaagcactccctct

SEQ ID NO: 77768 - DNA, 539 bp, Zea Mays
ttagtggctggttcgtgcatcttttcagcttctggcagcagttactaaaatgagcataactccttattggaacgtcaaaataatcaaccgtttgatgggctgaaaagtagacttgaaggtgcttccatccacttatagaacactttctaactccttgtattctgtccgcagtgatgcttggaattcataccatgtgtcagtcatctagcttctggttgcattcccatgctaaggtgatgaaccaccattttattcatgcacaccataggcttcttggttcagatgtctagaggcttgaatccatcttgatcccatgctggttcatatactccatcattcctaaggacattgaaacaagaactcaaaagcataggctcattcaacatagactgattattaaacataaggttagcgttcacctgagaatgaatttccttctgcaattgtttagctctactccttgtaattggaccagctatatcaagtggagtttcatttgaagatgagtgaatgctaggcatgtcctcattagcctcccc

SEQ ID NO: 77769 - DNA, 1068 bp, Zea Mays
cgggcgacgtgtcgggtggtgagggtgccgcgcgggtgcacgtagtggtgtcgcgtgtgggggtgttccacgtttatgcatacggattttgacggaaacgactgcgtaaatgggcatagtgggggtgccgcacgggtgcaccgggatcgtggtggggtcgggcgtgggtcgcgcgtttatgcatgcatattttgacaatagtggctgcgtaaattggcatagtggtgtggtcgggacgcggtcgggggcgtttatgcttgcataaattgccgataacaactgcatatccatctgatgcgtcgtgtgtggtgaggtcgggtagtgggggtgccgcgtgggtgcaccgggatcatggtggggtcacgtgtgggggtgagccatgtttatggtgttgtaacacaattggcaagtaatcgtaaccgtgtcgactcacggaaatctcgcgacatgcaaatcgcacgggatatttggaacatgtcatgaatatcggcaaagatggttttagcgaatatagtaggataactccaaaaaaaactgggctacacaccgccgccgctttgttcgatgacctaggagaggtagggtatacacgatggcgatggccaggggatcggtgcagtgtggagaggctacaacgacgacgttaccctgtgggtcagatggtcggcatgctgtaactccaccggctgcgttaccagcgccaggattccttgaagacagcaacgcagttcatccaagtttggtgggagcaactcaccggatacccatgaggacaattggtgatcatgagcaggacacaccacacattctccaaagccatgtaagttcagtaagataatgtcagattttgtgcatatttgttatactgtccgtgcaagttatgaagtcctagaaattcagcatgctataagattattttgtatatgtgcactgcatgacgactccattaattgaataggatgatagtatagatcaacgattggtaccgaaggtcggtatgacatttactaatgtggacgaggcgtactaattctatagccgatatgcatatgaagttggatttccgtt

SEQ ID NO: 77770 - DNA, 568 bp, Zea Mays
ccccgggcgcaaggcttctgcgtgccccatccgcggtgagtttttccctaattgcttcgccatgatgtctgcatcgatttgcaccccacccctggctaatcatcctcgtgaatgctgggtcggtgtgctccggcgtgctctgccaccgtgggcagggagcgccgcctctgcgcaggtcctatgggaagaagacgggtctcctgccgttgatcgatggatggacgcgtgggattaaatctacgtataccggttcgatgtttcactctggaccgtcgatcgtggattcgagggctctgatctgataagtggcgtggatagatatcaggcgtggatctcggatccatcggcccatgtgccgtaccggttcgcggggatttgagatttaatctgggcccttgatcagtgatcgggcggccaatcttcaccgatacctcttcgttctggttcttttgcataagagcccctcgtctttcacaaaattgaacccgccatccatatagggttaacctgagtctggggagatttgcgagcttgcccctgatctcttgagaaataatgcgcccagtcc

SEQ ID NO: 77771 - DNA, 1309 bp, Zea Mays
gagaatttaccctaggtcaccacatcagatttgtaaacctatcaaaggagaacaattttgcttaagagtgtaagcaaggttgttatgaagaatttggagataattaaacctaaagtcaggctgtcaggctgttaaagtctgaatttcagactgacagtgcaactgcagtgactttgggcatgaattcaagcaggattgagcaagaatttgcttaggattgctataacaatattgtagctggatcttagagctaaaactttgctaaagggtgatgatcatgttacggcacaaaattgggagtaaacagccatgcaaatcgctctgtcaggtgactgaatgggctttcccatggtacagtaacctgaaacagatcagatcaagcgctcagctcaccgccgacgatctccaccgcaattcgtgtcgccggcgtctcgattcgtgctcggggtaagtggataacgtctcggggtagaaagatcatcgccttcgttgagctggacaccaatccagctagccgccgtacctcccccttgttcaccgatcgctcgggtaggatctcaccgccgttgatccctcactgccgtccgccgcgtgtccaaacactttaccacgtcgcggctaactgtgctacgcacgttcggtaatcgccggaggagcagccacggtaatagccacgttgcgcggccaccagtgactcacccagttcatacctatcacaatccgccgctcaaattcgttgtactcatgatcaatctctataaattaaagccaccataagctccgcaaggtcatcacacacccatccactaagaatcactagcaatcgttcgtcagagagcttgaattttggttttcccctaaccaagtttccgccaccgcgaagaacacctcgtcgtggccagccacttctaggtttgttcatgccctctgctaccttgtttcagcattagtgtgcttccctgatgctcatccatccacccaattgagctagaccgccaccaatcaccgggaacgcattgttctttgggttatccgcactatcatcgtggtcagaggcaattaggtagccattcatgcaattgacttaggggaaacactggttagggcgtgaattcggtttcgaccgaagtagggcactagtctttgccccgtttggccggtccaggagctccccagagctctgccgcgccgctcaccgtcggggacctcggtctgcgaagggatagaaccagaggggcttttctgcatctgtcagtgactcagttaaacagtgacgtgaccccgcttccagttattcagtaagccaagg

SEQ ID NO: 77772 - DNA, 472 bp, Zea Mays
tgcacttgttgtgtcaaaaaaaattattattgttggtgtctagtagcgcaaaccctatcaaggccatgtttctttccataaatccttgcccctaaaacttcatagcattcctgttgatcatccagctgatcttgttgcctacctctcatttcacctcgatctagtaaatctttacctttgtgaatcgtgtggtgactttatcatccgaatctctggatccttcattgattctgcctcgttctctggttatcttctataacccactctcaagtattaaatgtggatcagtctaatatctcattatgatcgttctcatactcgttctccgaggatcatgacgttgttttatcgattttatctatagacagtgtatccatttggttcaatggatgttgctgttgtctttagttctctcatgtctctaaaaactcaatgatcttgatctcatggtcagttccttctcatatcaaat

SEQ ID NO: 77773 - DNA, 685 bp, Zea Mays
agagggtccaaagagtcaaccacatgtccacccccaattaataactctgaaagtatccacatgcctacagaagataaatagccgtgatctaaaaataaacttttttcgcaacggattaaatcatgggtatcggtccaaaatgaaacttatggaattatccaaaaacaattctggtgaagaccaaattttcgaatctaagagaaaggttaagtaactagctacaaatcgaagtatttaaatacctgatcgagtttaccacatgtatagagttgtcgtgcaaagtcaatttaagcctcttttttttccttgttccgccacctacataccacgaagattcgaccacaacacagagttaactgtatggtacccgtggtgcaacgcaagagaagagaacataagccaccaagaggaaagtagcattttgatgttgtcaaggtcaggcatgtaaatggcaatgcttacttgctgtcatgtaatgtaaacacattttttctgtgatgattgttctgaaagtatttttaagctatttgcctcatgttcgacgtcaggtccatgtccatggcaggcttggagagcgcagcttagtagtagcgcaccatcggcaggtacgtagaaatgcgaaaggccttatggaggctcacatggtgatggtgtgctgtcttccggatccggacaatgaccgccc

SEQ ID NO: 77774 - DNA, 634 bp, Zea Mays
cccccggcttggtgccgcgtggtacattcggggaaaggtgcttccaaggcagacatttcctttctctagttgaccgccgggcctgagtcgctagagtcattctcctggcgccctcgctgactggcaggccctagggaccgaggatcttattctcgacaaataacatactcagtgacaccatagcagtttctgtaaatcaacataatgtttgttgatgtagtcgttttgatcatcacaacgtagaaatgtagcagcgtcgagcatcgagaagtagcaagaaggaataatcacatctgtcaagaagaagatagagcaaccatgtggaacgcacttcgaaaatctaattattggtcttcacccaagcatataaacaccgagcattgtgtggtttcaaaggcatgctctccctattcctatgcatgttggaatctagtcaggaaagctccaacatcataacaacaatgagattgtgttttagttatgtttttctcacgagaataagagaagaaatgcctccatttatacaacaacaaaggaagatgaagagtcaagcacgtgaagaaatagtgatcatcataacaacgtttgttattagtaatttaagaactgaccaatcaaatgtttataggaaaac

SEQ ID NO: 77775 - DNA, 393 bp, Zea Mays
cgctgtcccaagagagagaccgcgcctcgccttgggacctccatcaacgttgggccgtctgatctgaatctgatcatgtttactcctactaccacttatcattgtgcggtttttaccccccaccccactagaaacggtgctatgcatgtgtcatttctagcgctggtaaaaagctgaaaaaaattgctctggtcgtgggctaaagtggcgcacgtataatgcagcattgtatgtttcgccgtcgtgtcttattttaaggaatcacgttattcaattcgtggcgggggacactggacggtgcacggtttgactagcagcctaggaggcagcggagagatacagatggagcatgagctggaaatcacgttattcaatcacgttattgtatgtttc

SEQ ID NO: 77776 - DNA, 555 bp, Zea Mays
gccacgtggcgaagggaagggacgtgctccagatacacgcaataggtctggacctactgcgtggaaggcaccggaccccgcgcgtgacaggtggacctccgagatgggtcccggatccctccgagtggggtccggactaatcaccgccgggtcccgggattctggggcagggaatacccggaccctgccctggaaggggtccgaggacgacatgtgtccagacctagcctggtgcgaacccgaccacgcaacgtccctattccctagtcaggcggaggcctggtgcagtcaagcggcctactatgcatgatgtaagcgtacgagatgggcctgacgtaaagccgctgggccacgctgcccctgcatttattgtggaaaggacgcgccgtctgactacctcgctgacaggagatgtgcccttcagcattaaatgcgccctgtccacccaactgacagggcggcgcccaagccatcctacagacggcatgtctggctattcccgttggccaacaatacacctacgtcgtggcatgcgccgcacccatcataactcgc

SEQ ID NO: 77777 - DNA, 500 bp, Zea Mays
attttccaaaagtgcgaggtaaattgggttcctcgatctgatacgatcttcttcggtactccatgcggacaaacaatccttgacatgtgtaactctactaactgggctctcgagtacattgtctttagggtataaagtgtgccactttagtcaacatgtccactataacccatatggaatcatagccatcacgagtacggggtaatccaactatgaaatccatgtcgatttcttcccatttccaatccggtactttgagaggttgtaacaatcctactggtctttgatgttccgctttaactccttgacatacgtcacaaagttcaacatacgtagcaacatctcttttcaaaccgtaccaccaatacttttcctttaggtcctagtacatcttagtacttccagggtgaatagattaagccaaatcatgatctcctcttaagataagttggcataggtgctcgatttttggtatacagattctctttttaaaccacacg

SEQ ID NO: 77778 - DNA, 370 bp, Zea Mays
cgtcaatgaaactgactgctagctccatgtggtcagacgtcgtcagaggatgaaagagttggcgcgtgcatgcccatgctagcaagcacctgatcgcctggatggctcgtagtttaatttgtggaattgttgagcggctattggagattgttgttggtttctgtcgtcgattgtgatgggctcgtgtactgattccacgtgggatattcatgaagagcaactatagtgcaactgtggctatttggagtgcctcactagtgtggtttttactatgtcctaattgtgggtttggtgattgatgtcaattagcatgtgaaccacatagcttggactcgccacaacgaggtcgtagattgtcgacaagcaactg

SEQ ID NO: 77779 - DNA, 758 bp, Zea Mays
tgtcgctcacactcgacctcgcgagcttccactgatcactcggacccgcgtgctagcctctgtgcgcggttcaccgtttctccatcgctgtcgtgcgccacttccctatggacccagcatgttagtggctctccctgcgtgaatcactcattccggcgtaacggaccccgcaatcgctggccgccaccgctattcccctacttccgtgtacgtcatggcttcggcccttatatgacgacaccatgactactatgccttcgtggctaactcagagagggtgagaaaacgccaacgccgtgagccgtgggaggggaagaactcgcaccgccaccgtcatcttgtttgcatcgccgctcggagcctttgacagggtcagggtccatcaccgatgcaccctgagcgcgagggtggaggttgtgggcataatagttggaggcttccctaggaattgctcgttggagctttcactgccgtgtcatgccttagtccatcgcgggctgagctaccgcatgggccaccttcggtgagtacatgctcccttgtctctatttgatcggagtggcatgttgcgaccgtggaatggagtgtagggcattagatttggaggatcgcggtcatcggtaatagcgcgccgccatcacgcccctgtttcgtcactggcagcaggtctaagctacgtgttgaggctcgatcgttgaatttgcgatgggcgatcaggattagatctgggcgcaccgtttcgcttgattagatctcgg

SEQ ID NO: 77780 - DNA, 500 bp, Zea Mays
accgtgttcacactataaatagcaaaagcagcaagtaacaagcaatgaaaagactgaagtttgcaggggagtcaagctggtttacaagaactgtatggctaatgggttcccgattttaaagaactggagctacgcaaactaaaatttaatgacacatatttagagccatggaaccatgaataacctcagtaattagttgctggcgttgccacaactctatggaagaaaaccaatatcagttgaggtaatatctacagttggtagtaagttttttattaacatgaaccaaatatactttatgtcaggtggcactggattcaggaattgccaaatgtgtagctttttctaatcctgtcgggcacttagaaataaaacagccagtttgcagtagatggtagaactgagatgtcaaagaaaccaagccacaaacacaattcaactcgacaagaagaataaagcagacatgcatgtaatcgttctgcttttcaaatggataaaca

SEQ ID NO: 77781 - DNA, 331 bp, Zea Mays
agcaacaatcaaagggcttcacatgggacaatgcacatcacacttcgctcaagagccaccaagtactcactttcacatccacacttggtgcaatggaaattgatcataaaggtattagaaagaggagacgttccgttgtatggatttagaggcaaaagaattcacgcaatggaaagaatagtactcttagtctcatttggtacaatagacagtacaaggaccaaacatatagcattcgaggatgtggagatgcactacccctataactgtatctttggcagagaagcaccaatgcttgtgagaccatcataagccactcatgcctatgcat

SEQ ID NO: 77782 - DNA, 972 bp, Zea Mays
gttgtaatcatgaaatccgtgttatgtatctaaccttgcgcttagttcaaggcctcgcttgatgatgaataaggaacaaatcactaggaacctggccaaagggaaagagtccacgttctcaggggtggttcagggtagctgcttagcctagtttcgtatcgtaagcctacaccctccaccactccataacagctgaccaagtaccatcggctaggtacctagaggtccagaccatgtctagatttaagggctagtcctaaaactaggctcagtaagattcaactgcatgattcgggggattgaatgcaacaaggtaggggtcatgtgggtacgttggtgagcttcgaccctaagccatatataggatcgacctctagtctggtgtttccctcagacaatctaagctacctcctagaagagccaaaataccttggggccagcaaaaaaaatcttgcccttgagccaagctacacttgcgtgggtcccagtccggtaagacctatgtacataaacccggcctctggcaccatctgtggtctagcccgataggggtcgtccttgtaagctcagtccctagtgattttcgtgcaatatctcgcatatctagtaaatgaagaaatgttttgctctcggtacaacccttaggtattggctccaccatcatattcttaacctaggtatgattctctttctacctcctgctcgagattctcacttttgttgttatcatgaaatctgaattatgtaactagcattgccgcttagtttgtgatccccttaatactgaaccaggtatagactaataggggcttgatctaaaggaaaagtctacattctcaggggtggttcgaagataggtagccacttagtttggtcttgtactataagcctacactttccgccgcctagaatagctgacttagtactttttggaccaggttcctagaggtccacgcctcgttcaaatttaag

SEQ ID NO: 77783 - DNA, 647 bp, Zea Mays
gtaactatatctttcataaatctaaaggcaccaatctttggatggtggatatgggcagtttaatttgcttgcaccctcaaaaacatccatcaacattggtacggaggacaggtctgagtgccaagtcgatggacaaacaacaccatttattgctctattccaaatagaagtctcgtctctgcttgcaccttcatacttctgatatagtttgaatattaccttctctctagcatagctagtcataaagcaaacatgtgtaccaagaaataatttatcctcatttagtaagagatttgtcacatcaagagcgtcctgaagactacaccaatatcttatatacaaatccagatacgttggacggcttgtattggcactgcaaaggatcgtttctgggagactaagaaattcatccacatcttttcccattgaaccatttcttgctttctttggctttttaacatgtaaaacgtggtcttcaataaatttgaaaccatccagtgtaaaggcaccattccaactacagcccttagcaaatgctgttgtaaggcacttcgtccatgatgacaggaattgacaccctattagtgtcatctgtagggaaacttgtccatctgggaggacaaccctttctgtgaagttgttgctgc

SEQ ID NO: 77784 - DNA, 789 bp, Zea Mays
tgagaaggctccgatattagtaaacacgcccttcagtttttcatagcaatgggtggcaacagaataacaccgttctttagaattctgaagttcatcaacgttcctttgaacgctgttacgctcagtttcggctattttacatttttatttttcaacttctaaattttcgctaatttcatcaagcttttcttctagtttcagcacttcagatttgtgcagaacttaggccgatagtgtagattccaaatcagcaatacacttcaaatatgctttcttttcatcttctagttttgaaattattgaactctctttgaaatttagccaattcagcctggctctccttcagtttgtcgaccaaagaaagcaaaattttatctttctcaacatctttatgtcgtagatctataacttctgagcgtagattgccaaaggctatccgagtactttcgtcctcggcatccttttgcgcttttaaagccttgctcagaataagcctctggcgaatatctttaatagccatttccccgacaggctgtcggacgtaagtttttgttggaacggatcccgaaggatcagccacatccaagccaggagtaatctccatattaatagccatctttggctcgcgaatatctttagagatcttcgacgttgtaggtggtgtcatctttgtaggcctcataatagcttctagcacattggccatcctttttcctttcctaggagttcctactggggcagacaccatcctcagctgatcttgcatctcaggctattcttctttcttcg

SEQ ID NO: 77785 - DNA, 989 bp, Zea Mays
cttctcctactcgctttaagatcaagaaaggtccaatgaagcgaggggacaacttccctttaactttaaatcttcgcataccccggaccggtgacacctttagatatacgtgatcaccctccttaaactctagtagccttcttctattatcaacgtagctcttttgcctggtttgagctaccctcaaattctcccgaattatacgaacttgttcttctgcctcttgaataagttcaatcccaaagaactgtctttctccagtctgattccaatatagaggagtcctgcacttcctgccatataaagcttcaaatggtgacatcttcagactggcctggtagctattattgtaagagaactccgcatatggtaagctcttatcccaactaccaccatgtttaagggcacaagctttcaacatatcctccagcacttggttggttctctcggtctgcttatcagtttgaggatggtaggctgaactgaaattcaacggtgtgtccaagcactcgtgcaacttgttccaaaaccgagaagtaaattgtgatgctcggtctgacatgatattcttaggcaccccatgtagacaaactatctgagtcatatacaattctgctagcttggctcccgtgtagttagttctcacaggtatgaagtgagccacttttgtcagtctgtccataatcacccaaatagaatcataccctgcaggagtgcggaccgggtagtccaacaatgaaattcatgcctatttcttcccacttccattgaggtatcttcggtggatgcagtagtccagctgacctttgatgttcaaccttaactctttgtcacacatcacacatagctacatgtgcagccacatctctcttcaatccatatgtaatatgccaaaaaatgttgaacaaaagttgatcttcggtgcgtggatgtgggaaaagggttgtgggacgttagatgttacgtcagaagtcatctaaggcgtcgtt

SEQ ID NO: 77786 - DNA, 651 bp, Zea Mays
catagatacactgcccccagctgaagattgggcctctgagtcagtggttggagtgtagtctgcatcgtctgcacgagggcgctttgatttgaagcgactggcaagcttcttccgaagaccacctagaccactgcaatagatgtgagaaataaccatagatgaattgttgataatgccacaatcatagagaaagaaagtgcaacttttttgttagggtccggactatctgtgctagggggccggactgtccgcgccaagggtccagatggtccgcgcccacctggcggacggtctgcgaccgtccaggggcgattttttaggaaccctagtcacccaatcactcaaacaacgattcaacagaaaataaccatccaaagtcgttcaaatttttgcaccacattcacaatgagtagcactaacaatcccaccaatcagatttgtgaatctattgctcaattctagatcagagagaaaatccgaagaatccccaaatttgaagaaatttgatgaaatcaataagattatgaaataccgggatgaagacatgtttgttgaacttcccacaagctttcggacagtccgtgcgcaacttcacttcaccgtccgcacacaatcgacaaaagtgacctttaggcgtgaggagagtgagag

SEQ ID NO: 77787 - DNA, 466 bp, Zea Mays
ggcactctgtggtcgtagattacccagccaacggccgggatgagatcaagcgtcgcggcttggctggtgccgttggatctgttgtagaaggataagattagatcttggattcattaaagcttgtccgttcatctgcaatccagtggccacctgtgcgtaccgcttcgagatctactttaggccgttggatcagcgatgggtggataggattagctccctgtttcattaaatcatgaccgtcagatccagatctaacgatgggcgctgcgtaccgattcagtgtggtgaccgatctaatctaggtcgtccagtgaggatccgatggccagatttctcccatacccctttggcctgtcagtttcgcaaaagagtccctagtcttgttaaataataaacccgcggtccaaccagcagtgctttgtgtcttaggaagttttcccccgagacccctggactttccagaaat

SEQ ID NO: 77788 - DNA, 464 bp, Zea Mays
tagaaataaaatggagggaacgggaccgtcggctatggtttagtcagcctagagggctgcatgcacagggcccctaccgatgggagaagcgcagagggggtgctgtccacgtcgctccgtggatccgcgaccacgaccaggctccagtcggatgcggtatcggtatgctcccgagttgcttgaggtaatccccgaggccaaagcgacgacaagattatgactttgatcacgaaagatctctcctctctacctctcgcggtggtggtggccttgctcggttgttgggtaatgagggtgtcgcaccccaatatcggtacatatacctagagcaagctaggggaggttggtggttgcgtaggtggcggccggttgttacggagatccacgggcgcggtgttcggccgaggttgttctttctacgcaaaagtcggacgcgcctgtgataccgtgaccaagccacaatg

SEQ ID NO: 77789 - DNA, 393 bp, Zea Mays
tgcagcacacgtgacggtgtccgagttctcgagtgcgcacagacttcgaggtgagaagatcggtcggaggaccctcccgagatggatggcgcggccatcaaaattcagctaggagatccccattctgtgtaggtgtcgcgaggaagagatggctgaccaatggggcccgcacgtaagcgacaccagaaaggacagaaggaaaataaaataaaagaatggggaatggagtgggctttgtgcggtgaggacgtgaggtcaaggtgggtcggctgagtatggttgctgggccggcggggtggagatccctagcccaagcgtcatttcctttccttttttactttatgtttttcttttcttctttattttcttttctctatttcctttttagatttc

SEQ ID NO: 77790 - DNA, 1395 bp, Zea Mays
ggcccataggaagtcgataagggcgccttcttgcttgtcggagagtgctgcaccgattcggacaagcttggaagggtcggcatcgtcaatctagacatccttagtttcttcagtggatttgaatgtgctggaatcggccttgggagcatatggttcggccttggagttagcaccccttcgtagctctgctaattctctcacggtggcttgtgctgaggcgagctcgcagctagcttgctcacatgcgtaggccgcttggaaggaagcgaacaccgtaatgaccccatggggaccgggcatcttcaccttaaggtatgtgtagttgggaatggacatgaacttgacgtagcccgacgtccctaatatggcattgtaggtccctaggaagtccattgcctcgaactgtagctgctcaatgcaaaaattataggggtctctaaacataactggcagaacaatctgcccgagtgggtgggcgccgtggccaggcgtgatgccgtgaatcggcaaggttctagggcgcaacacggagcgtgcgatccccaaggcataaaaagtctcaacatacatgatgttcacaccgctcccttgtccatgaggactatggagagacacttcaggccgacgattgtctcaatgacaaggggtaggttccggtatgcgggaccctgctcgggtgatcgcatcggtcaaacacgattggtacttctagcctcgaggggcacggcgagccggaggaatccaccacgtacacctcctggttgctagactcgtgggggcgcttgttgctgctcttccgctgatggttggccgcggcctcggatgtcagtgatggtgcctgccccactcgccacctaaaggaggcaactagttggctagggcatccctcaagagcagcgacacacttctcgtggtgtcgcttctacgacctgctcctggtggagcactcgggcgccttactcgcgacgacttgtgcatctagttggtgagatggagccctacagcagagttggcgaggaagtcgaggcagtcgaacttgatgctgctcccaggggtgaaaatcccatctctatcagatgctgatgaactggccatcagagcaggtaatgtcacttggcacgctaatgttcccctacctggtgcgccaactatcttggttttagaaactagggggcaaatagtgaatcactagaacttgaatggtaaacatgggacacggggttatactggttcaggcaggagccctagtacggtgtagtgcagatcatagtattgcaatgaaatgtgttacaacttgtgtgcctgtgtgcgagaggaagaggggccttcccttttatatctcaagggacaaaccttatattgttctctcttagaaagagagagaaagagagggag

SEQ ID NO: 77791 - DNA, 480 bp, Zea Mays
ggagaggctcatgctcaagggacaacaaaccttgtaatcaaacactagaacacccattcacacttgtgcaccagatacttgggaactcatccctctctcgccctagtacagactcagacaaggtaacacgagcaacacaaactggacatagggacattctactcaaactagtataaatccttgtgttctattggcatatcattcgcttctaaacacacaaatcatgataatcactagatattggtatgaaacatcacatattgtgttgagcgtatggtgcgactcatcgtcataccagtccaacatccactaaaacctctcgtcactacacagaatccatcggacccatccactttggaccgacgaggcaactactcactgggttcgacaatcctataaaaggaacactggcacaaatagtgccacaatatgatctaatacatgttgtcggaccaatcgaaaacacctatgaaactctca

SEQ ID NO: 77792 - DNA, 333 bp, Zea Mays
atttattcgcacagtagcgttctcgcagctgccgatctagcaacaaaccccgtgcatttcgcaacaacctcctcttccgccgttgcaccgccaccggcgaggagtcaaagtttgtttatgaacggtgtcatatatttatgaatggagggagtatttgtttcaccagttcaatatctggtatatgaacaatatattcactttgacattaaattcatttattataagtatttttatgtggagggtccattaagactgtcaagtgtcgcttagtcaccaaatcaatatcatcaatgtggttgggtaccgtcgcaaggtattagactagtctctatc

SEQ ID NO: 77793 - DNA, 495 bp, Zea Mays
cctggaggtacattatcacctaggaaaggccaatgtggtagcaaatgccttgagtcggaagttgcaatgcaattgtattctgatggattctcgtattaacaccttgtgtgatgagttgagcaagatgcaaatagaagtgattccttctggttcgttgtctcacatttctgtcgagccatccttgcaagaccagatcatcatggcctagctcagtgacaagggagtgcagattatcaagaagaatctccatcagaagattgaaaagtatggttgtttccgccaagatgaaaagggtgtgttatggttcaaaagaagattggtgattcctaaaaaccaggacctcaagaggaaaattttggatgaggctcatctctccaaattctctatgcatccgggaagcaccaagatgtaccatgatctgaaacctttgtattggtggaccagaatgaagagggagatagcccagtatgtatcggaatgtgacacctgtcagag

SEQ ID NO: 77794 - DNA, 468 bp, Zea Mays
gttttccgataggggatattcttcataacaaggaagccattggcagaatagccaagtgggcctgcgagctgggatctcatgacatcgaatttcgaccttgcactgccatcaaaactcaagcattggttgacttcgtattagaatggactgagcaacaagtaccagagaacccagaaactgcagaaatatggcagatgtattttgatggctcgctgaagctgcagggagcaggcgtgggaattctcttcatcgcacctggaggcgagcacctcaaatatgccctccagttgctatttccagcctctaacaatgcagccgagtatgaagctctggtccatggattgaacatcgctatatcattgggcatcaagagattgatggtatatggagattctttggtagtcataagccagataaacaaagaatgggactgttcgagtgattcaatgggaaaatactgcatcgccg

SEQ ID NO: 77795 - DNA, 600 bp, Zea Mays
attttatgtcgatgatgcagtggtcttcataaggccagcaagaaatgataattattgatgagggagctacttgtgttgttttgtcatgcttctggacttcaaaccaacctatccaaaaacttggtttctcccattcattgttctaatgctggtcttgccatcatagatgagatcatgtcctataccattaatgattttccatgcacataccttgggctccctctcataattggtaaacccactaaagaaatattgctaccattgattgataaggtagcaaattatttaccaggatggaaagcaaagcatcattattgaataaggcatgaagattggtaatggttcaagcagtattgatagctgctcccatttaccttttgattgccatggatttggaaaaaaaattgggttctaaaagctattgacaagagaagacgaggattcctttggaagggataagagagggctaatgatgacaattgtttggtagcttgggaaagggtacaatcacctgttgattatggcggccttagtattatcaacttggatcttctcagttgcgctgtaaggattcattggctttgggaagaaagaacttat

SEQ ID NO: 77796 - DNA, 616 bp, Zea Mays
ccgcggtgccgcacctcaccatggccagggctgtccgcgctaccaaccgaggtgagaaccccctttccgtaatcgccatcaccccctctaggtttggcaccggtcaattttaaggttggggcgtccaggcttcgaattgcaagtccgtggtgatgctccgccgtgtcgctgtgctgcgccgccgcggcgtgagcgaggttggggaaaacgatgccagccgtaggatgggatatcgacgatccagattagaaaccggggttcggttaatcgggaatcgtggatgcaggatctaagggcgcagattcgatctggggttggggcaccgtggtccgtcgatcttagatcgggtggatcctgtcgcgtaccgtttcgggttaagttagatgtaatctgagccgtccgcactggatcgtgtgtcccagatgtgtggataccctttcggctctcgaatcttactaaagagtccctgggcaatttaataataaacccgccgtccaccctgactgtactcagagtcttaggaatttttacgcgccagcccctgcacttctctgtatttgaggcccgatccagaaacttgggaaaataggaaattaatattagaaatcgattttta

SEQ ID NO: 77797 - DNA, 448 bp, Zea Mays
aagagagcccgtgtgacttcggtacgcggcggggtcggtgacaggagcgccctccgtggcagagtgcttggcacgagagtcaacaggcgtcgacgtcgagtgacactcggccatgcccgccttctaaagaaggttgacagcatactgtcgctggctgaggaagagaccgtcggaggagcgagtgacggatatccccaggaagtgatggagctccccaaggtctgtcatggcaaactcagagtgaagcctgtcgatgagtcgtcgacgtagagtagccgaagaggctgtgaaaacgatgtcgtcgacgtacagcagtaagtaagctgtggagctgccctcagtgaagatgaagagtgaggcgtcggtggcagaggcgacgaagccgagctatcgaaggaacgtggcaaagcactggtgccacgcccgaggggcctgcttgagcccgtag

SEQ ID NO: 77798 - DNA, 790 bp, Zea Mays
caattttgtaatatagaccgaaattgaagaaaaacttaggaattccaagatttggacttgtagttgatctaatttaaagattcttcataaagagttgtctcacctcaaggtacctattgctgcaatcttgtttcattttcatgcacatcaattcgttcatgatttagggattaaattcaattaattagggatattttaaatattttttgtagttcatgtgctaggattttcaagattcggatttctagttgagctaaattaaagattgtatttagagatttgtctctccacaaggtacctctcgatatgatcttgtttcactttcatgtacatttatttgttcatgttttagggatgaattcaattaattaatgattttattgacgttaatcaatatagggataggtaatgaaccgaggttggatgtacaatgtgccaagaccacatccatcgtacattcgaaatttgagaagctttattgaagcggccaacaagcacgcgaatttgcgaaagagtaaggagatattatgtccgtgcatcgactgtgataataaggtagcttggagagatacaggagtaatccaatcacatctgctaaaaagagggtttaaaaacaattacacgatatggacagaacatggtgagttggatccgtgtgaagtgcctagtaatgatgagagagctgtcagaattttagataaagtggatggtaaagtggattatgtggatgccaatcaagattttgaagaatttgattgcgaagagatgttgcgccatatggaaccagaaa

SEQ ID NO: 77799 - DNA, 587 bp, Zea Mays
gttggaagctgctcatcgagatatcaaggtcttagaaaacgaccgtgaggtcatgaaagtgtggtgtgataaggagatggacaaggcggtccaggctggccatattttgatgaagaggtccggcgtcgtggttcctgaagaaaccattgttgatgttcttaccgcatcaggtacttctaccaaggctctagcttctagcaatcccgcgactgatgcccctcttgaaaatgctcctacatgacacactgtaatgatgggaagtggaatattggttggttaagcaaggatgcgcttcctcctttgatgaatgtacttgacaatttaatttgaatatgagatctagaactgctttgcttgtgttccataatgagttttggggagaaaaggaatttagtgtttttccctgtattttgctttgttttctttggtgggatttagcatgcattctttttcgcatacaattgtatctgtgtgtttgaagcatcgactgaaccatttcttgattcgagctgatgccattgttggttgggcatagtatgcgccctttgttttgtaagcgtgagcatgtgacaccaacttaagccgtt

SEQ ID NO: 77800 - DNA, 1170 bp, Zea Mays
ttaagtacttaagccttggtattgtacaaaattaggagttaaatggttctgaagtttggctgtcaggctgagaatctgtgtggttcagaaaatccagtgatatagggccaacttcaggatctggtggagctcgatttattgggtaattgtctaagacctttgtagcaagattaaagttggattataggggagtaactttggtacagttatcttctctggttgttgtacaaaaattaaagaaacaacagcccaaagttgctctatcagaactgtgttgagccactgaaactgaattctagaacaggaatggtcgcagtggaatggggccgaattggaagctccatatctttgaatccattcagttttgacccaaggatcctatagtaagtttgaagattgatgttcagtaaacaatctttgttaatggagatcaccatgttcttaacacaaatcaaaagaaaaagagggtgaaagggggtcggttcagaaaattgctgaagatcaggacaccgaaatatctgaaaaagtgaggataaagatcagggcactgtagaatcggatgtgtttgagtgaattggggtaaggatcgaccgcggggaggtagctttcgacgtgtcgcgtgctcgcggacctagcccgagcctagccagagataattcaccgacggccaccgcggctcggtcatttccaccgccgtgtcgctcatgccttgctcctccctcactgtgtcccttctttacgtggtaaccatgcacgaacgatgtaatccgtggccatggatcgctagccagaccaccgggcctttaaatagccccgccacccacggcgaagtattcacatcatcactagtgagctcagctgaagcacaaattcacggaatcctctccacctctcccaaaattggtagtgcacggtgaaaccatagtcctttgtgaccgtgtagccccaacctcacctcctaattccgcgaggacccgtcgcggcaccgttttccccttttcagtcaccagcgagcgaaaatcctccgctctccatggccagccactcccaggtctgctcctgctcttcttaatcgtgtttcagcacccatatacgctcgtgatactcatcggctccgccctctttgcttggccacgctcaattacccggaacacatgaaattgtgttcgg

SEQ ID NO: 77801 - DNA, 918 bp, Zea Mays
ggttgatctttgaaagcataacagaggccgaagcgaccaggctggaagatgtcgatgtactcgaagaagagcggctgaatgcaataattcaagcggcacggtaccagcagactctgagacgctatcacgacaaggccgtgcgacaacgatccttttcagtaggagatctcgtcctccgccgaattctaatgggggagggacgacacaagttatcacccttatgggaaggaccattcatagtagcagaagtcactcggccgggatcatatcgtctcactcaaatggacggcatagaaattgggaactcctggaatatagaacacctcaggaagttttatccttagccgtatttcaaaagctatcgggacaacgatgtactctgtaaaacaggaaacatgtcatcaataaaaaagggcttcaaagatactcagtttgttcatgattgacttgcattcttacttagctcgggtgaccactatgccctgctaacggagcaatcggcttaagtcggcaacgacttaaggcggtgcaacatgctcgcgcttactcggggtgaccactatgccctgctaacggagcaatcagcttaagtcggcaacgacttaaggcggtgcaacatgctcgcgcttacttaactcggggtgaccactatgccctgctaacggagcaatcgacttaagtcagcaatgacttaaggcggtgcaacatgctcgcgcttacttaactcggggtgaccactatgcccgacctaacggagcaatcggcttaagtcggcaacgacttaaggcggtgcaacatgctcgcgcttacttaactcggggtgaccactatgccctactaacggagcaatcggcttaagtcggcaatgacttaaggcggtgcaacatgctcgcgcttacttaactcggggtgaccact

SEQ ID NO: 77802 - DNA, 365 bp, Zea Mays
cagctacccttccaagatagaacacaagcacgcaacatgtcttccaaggtttggatagttcgctccgactgaccatcagtctgagggtgaaaagcaacactaagagaaagcttggtacccaaagcgctgtgaagactctcccagaatttggatacaaatttagagtcttgatctgaaacaatagacttaggcaccccgtgaagcctgattacttctttcatatacaagggaaccaactctgaaactgaatttgtggtcttcatgggaataaagtgcgcagacttagtgaagcgatccactacaacccatatagcatccttgcctcgaggagaccgaggtaagccaaccacaaaatccatggtgat

SEQ ID NO: 77803 - DNA, 983 bp, Zea Mays
atttaagcagcataatgaccctcttctaagcttatgataaagttatcctcatcccaaagagcaccactaatgtcctttagtttgcaaaccttgacccacctagacctccacttacgaaggtgattgtacacttgttggcctgttacttcttggccacagaactcagagacatttttagcaacagagttaaggtggatttccttaaaacccttgtcagtcttaaccccatttcctatcaagtcaacaaaacgacggagaacaaacctagacattacagcagtccacctaagagcaggcctagccccctaaccagcaacctcagagaccatgtcagccatagctggaacaagtaaaagattagggggaagagtaacatagtagatgtaatagagattagggggaagagtaacatagtataagtaatagagattagggggaatagtaacatagtagaagtaatagagattaggggggaagatagtacaaatagcaaagatagaagtaacagagatagtagaagaaacattgaagtaaaaaaattgcagttttaacttattacaaatagctgagataggaaagttcaaagaactgagcacatcacataggtaagtaatgacataggaaagttcatcattgctagtcgacaatggtatcatgatgtaagtaatgtcatcattgctaatagacaatgttctcatcatgagcaactgagcacatcacataaaggaacttagcacaaagaaagtgtgttcaaaattggagatagttcatcattgctaatagacaatgttctcagccagcaacttagcagaatacataacgaccactatcccctatgtgaggccctattctaccacatttgttgagcccaattgtccctggtagcagaccaggtagcattgtccatgacaaggtcatggggagcttcctcatgaacttgatttgcaacccatgtttcttcttgtggaatatgttcatcattc

SEQ ID NO: 77804 - DNA, 412 bp, Zea Mays
cgaaatgtggtcctgtctgcgatcgagggcgttgcagaatgcatgtccgggtttgtctagatgcaatgcaaagctccacccttccaccaacatgctgatggcggcaagatcctagatttaatcacgcataggaccatacgttttgaatgccattattatagtgtttgcccacttttaaaggtggggtttgtttcaacttatttccagcttctggtcgtcataaactgcagcagactgttaaatgtctagccttttagtccgtttttatgagaaccgttttgatgaaaagcgtctaaaattaacgtgaacataaaatctaccgagtcgttgtgtgagtagaaattcgtcactttatagattctaaaccctatgaaccattttatatttctccacgcgtaatcttcatgatact

SEQ ID NO: 77805 - DNA, 685 bp, Zea Mays
tgtaaattaagttattgtaactctttccacttttactccaatggtatgtaatgtatgtgatgtgggatgaacgctcctgggagatgtgaaggagatacgagaatctggttctgtcaagctattgggtgcacctgtatgactgtataaggtccttgggacatggacatctgtaggtgggcataatatcatgggaggttccataacagatggctccgcacatagcctctcggaagttataacttccgacatcctcgtacaccggctctcagaagttatagaattagcctaacgtcgcgcccatatcctctctcacgagcgtctcctctgtctgatatgcctgcacctctcctatttcctacacccgtgccattcttgctgccagccccacctccgcccaccaccagcctaccaccacccaccgcagcagcaacaccacccaccaccaccgctcaccaccgctagcacaaggtccccacaagccccaactcccctcactagcaacagccccaactcctccatgccccggggcctcctctcaacgccgtcttgagcccgagttgtctatcccaagcgccgcctcccgcttcttgtcaccctcgaccattaagtttcaaaatcaacgtcgtcgtcccccgcctccctcagcttgccgtgacacctccccgcaccgaaccattgccccaac

SEQ ID NO: 77806 - DNA, 583 bp, Zea Mays
atttatattaacctatgtgcaagcatgatagttttgtttagtccatgttcacttgatttctttgtcttggtactctgtgtataccaaaacaagaaatccatgttgtgtctctaatacacccccttgagctatgaggtgcatgagcaaaaggagtcctaaattggtgagaacaggtactctcactccacactacctaaaagtttggatctcatggtgttcaggtaaaaggcaaaggtatggagtagggaactatgtaattcattgaaaatcttgaagttccattgattgtgatcatagttgttttcttgccttttgattggtagtatcttgtcttaggtgctttatgctttaatatgttgtttcctttcatttggtgtacctacgaaatttctttgtaatcagagtgtgtccaaatctcatgcttagatgttgttctttcaatatctgatcctggctttttcaattggtatatgtgttgcaatgatcatcatgcatgtagcatgcctatgttacttttaaagcgttatatctcttgaagcatgctttgtctccattaggcataagttgtattatgtcatttttt

SEQ ID NO: 77807 - DNA, 489 bp, Zea Mays
ccgggagctgcgcacatctctagcaactccccaacaaaatgaccagaaaccctcagccccaaatcctcaggtgttgtacctaattttctctttctggcggccgcacccggagccttatcccgtgaggggccttcatcggccaagggccttgtttgcttccctcggtgatcagcggtgtcagcagagtctccctctgggtaatcgccatacgacaaatggttcagctcaaaaacgcggttcaacctagcgttggaaccgcgaatatcccaactcctcaaagtatctgtcttcggcgcgtacttcccaacaatcttgacggcctcggccacgacttcacgcacaaacgtggtcttgtcccgaccgcgcagatccatgccgaaggtaggacttcgcaccagctgccccctagtgtcggcatccggcaggggtaacctcacctagtgcccaaccatgcgccaggggccacaccccggaggcaatgaattcctc

SEQ ID NO: 77808 - DNA, 531 bp, Zea Mays
ctttagaagcactttatgaaggtgagtgtgtgtccatttcctcttttctacttttttctaataggctatgagttattatacctatccagatatgttcatttttgtaggtagtgtggctatgggagacttaaatttcacatcaagacaacaattgcctccttatgctcctatacctgttgatatcttgctccccctactattgttcctcctcttgctcctcctcctagcattcctcccgctcctacttttgttgttcctttagctaggagtacgtcggaacagactctccatccattcaatacaaatccatttgatttggatggacaagagatgacaagtgaagctcaatctatatcagctattcatgaagcaagagagggagaaggtagcaaaagcagaaagcgtaaacagagccatgttggagcagctctcgaagactatgtggagttcaaaaagagccaaactaacaagacacttgatgctcttaaagaactttccatgaggaagtgtatgaaggaaatggaagcaatg

SEQ ID NO: 77809 - DNA, 450 bp, Zea Mays
ggggcacaattgtttcagaagccgagggggtcacatgtcaatttcaggacctctatgcaacgattctatcagcctactagactgcgggttattttaataagagtgcagaggttctttagtgaaaccgacatggcgaaggggtatgagtaatcactggtcgtcaaatcagaaacccacggccacgattagatctgactcccccgaaccgctggtcgttagatcaaagagcgacgatggagatttaaataacgaggatcgcttctcacccgcccgattgaccatcaacgacccacaatcaaccctgaggcgacacgcccaggagctgatctaagccgcacgttcaccatctcacggaccacaatgcttcatccgaagcggtatcctaactctgatcttggccgcacctttgagatcaacggtctaaaaggtccttctcctacctcccgtgca

SEQ ID NO: 77810 - DNA, 336 bp, Zea Mays
cacacttcaccacagaatggcaaggctaaacgtgttctctgtaccctcaacaactctgtgcgtaccctgctccttcatgcgtccatgccacccaagtattgggttgaggccctcgcagctgccacatacttgcttaaccgcatgccttcctcctctatacgccatgaggttccgtacacccgtctgtacaatacccctccttcctatgagcacttgcgcgtctttgactgtctctgttatcctaacttacaggccacgtcttcgcataagcttgcgcctcgttctgccgaatgtgtcttcttagggtacccttctgctcacaaggggtattgctac

SEQ ID NO: 77811 - DNA, 570 bp, Zea Mays
cacctggtgtcgtgctgcccataggaccatgcgtagttgtacccctagtatcgcgcaccgtctcgctcactcatcatacggatccatgtagcgagtccactgctaatatctttgtagtagtgtgtggtggatattgtggatcagtcccacgacacgatagcacgtagcgtagcttcacctgtcgtcatgggcatgcgtcacttgtcggcatgcatagacatacaccaggtatggtgtattcgttacatctttccagatattctggtcactgtatacatttagatgctgagatcccttcgactaggattgactggtcctatccgccggtggtagttcgcgtgaaacaatatgtggtgaggtgtcgtctaacatccgtcagagacccttgaacattgtacccaaggcctagacgaagtttggtgatgacccatcttgtcccactcacatgggctcgtgtcattgggtcggccttctcttacgctagtctttcgtaaggttgctcggcaaagacttggtcgtctgctccgcctcgcaaggtttactcggcagggactttgtcgtccgctccgc

SEQ ID NO: 77812 - DNA, 419 bp, Zea Mays
tggcggctataattttgcgtatcgcaaggatacgaaggctccagttctcagctaccgcaccaaatggccaaccggctggaaaggtgaatggttttatatcaaggccgatgagaagaagagggggaaactaatgatgatggtcatgtgcccgctgactttaaacttcggaatgaccaggcccctgtgcaacatgcagctagggtcagcatgccagctggccgaagtagaattcagggtggtggctgaacaaatcggcaccagggacttggtacaagaatacctagccaaccgaacatacccaacgtcaagtgactgggtgatgccgaagatgaagggaacaaagaagaaatatgaacttgttcaattgccttatcactttaaatttgagaaacagttcaaggagccttgccaagaatggc

SEQ ID NO: 77813 - DNA, 542 bp, Zea Mays
aggggatgaaatcagggcactgttactgctcagtcgttgtacccacttgcgctgcgacttggctagacggtcatcgccgtggagatctccgttcaccgtgattgcaccacgccgtagtagattcaccacgtcgtcgcaagctataaggactcggcagtgaccaccgtagatagttagccagttagagccacgttagcgacctccggtgactcttcccccttctcaccgcgaacgcctccccgtccaaattcgccctcctcacggtcgtcctctataaattgatgcatcgacctgttccgtctacttgttacgaacccagtgaaccactcctcgcgcccgatcgtccaccgtagcgccctaatttggaatttctcccaaatccactctccgcgtcgccgtgagtcaccctgtcgtggtcagccatctccagatccgctctcaccctctcggtccatgtttcggcactctcgtggtcagccatctctgtggtgtacgtggaatgaactctagaatggtgtttaggttaaattagttactcccag

SEQ ID NO: 77814 - DNA, 497 bp, Zea Mays
atagacacttgtcccattcctttccttagtgtagtgcacatgctcgcaacatgtcttccaaaatctgatttatcctttctgtctggccatctgtttaggggtggtatgctgagcttcggatgatatgggtcccaagtgattcttgcaattgttcccaaaatcgtgccacgaatggtgctcctctgtccgagactatagtcttaggtatctcatgcagacgaattatttgatcaatgtagatctctgcatatttctctgtcctgtgggtggtgtgcactggcaagaaatgcgcagtctttgtcaacctgtccacgataacccaaatagaatcatggtgcctggaggtattgggtaatcccactatgaagtccatgcaaatgtcctcccatttccaagaaggtatgggaaggggttgcaaagggcctgctgccttcaaatgactagctttgattcgctggcaggtgtcacactcggatatgtacttggcaatttccctt

SEQ ID NO: 77815 - DNA, 422 bp, Zea Mays
gggcattaaagttgggcaccggccccacagccaccagatactcaggaatctgcccattctgaatctgcccattctgcagcagggcaccatgaatgtgaccagaagaactatccgaggataggtccgaatgggggttgctgacttgctgctcttcaggtggctggtccggatggggctgctgaggctgctgaacaggaggaacattaacaatccattggtcccagtcaccttgaatgttgtctgcaggctgagcttgaatgttgtcttctggtgggaaattaagatcccaacccaccgccggcacaggttgacccaaaccaaaaaactcaaaaggaagctgctgaccatccgccggggccactggcaccgggtcctcatcttgaggctgacctcccaacaaagtttgctggatgatctcacac

SEQ ID NO: 77816 - DNA, 857 bp, Zea Mays
gaatatgcgatccaaaacaaatcacacgttgcgcctgcgacagaggagaatcacacaaacaaaacacgacagccgttcctaccattcaccgactatcatgaaagccgcaccaatatgcaatctatcaatcgccaaaatcctcccctggaaaaacctacacataagaaacgcacaatgccacatcaagcatactcacctaaacatgcaggaatcttctggcctccaaacgcttacttcctaggatcccaaaccccgcagccaaggagccgccgccacaaccaagagcgctccccgatcacttctgctgcggtcctgccggcgcggccgtgaccatgcaccacgactcctaccagccaaggaaaccaactgtacgagcagacgccgggccgcgacacctgtaatccggcaaggggtcgggggaggtcgcgggatgcatgtcatcgtggcccgtgacctatttaaaccacggaagggcacaactgtcgcgcggaggggaatagtttaaggaagaaacgtctctcgctagaatgaccagtggcgttcgatccgcatctgcatgcgtcagtcaccctgctccggctggcaaggttgaccggggcggcgagcgagttagaggggggcatgtgctgtgcatactgcgcaggaggaggtgctggggaatgggagcgttcccgatggggatggagggggatgtcgtggtggggagaaagtgggggaggagtaggagcgcacatacggtgctgtcagcgacgcgaattctggttttttgactcgattacatggctgagcgttggtcaaatgcatgcatgcgtccacttcccggaattgactgtgtcatccctcagcctataacgtat

SEQ ID NO: 77817 - DNA, 524 bp, Zea Mays
ggggaggacaaaaggcatgaactctccagcggcaagttcatcgggatggatggcgccgacgcaaatctttccgccgaacgccggcgcatcccatccaagcaggcggtataccatgtcgagcactcactcagtctgggcatgctcgggatgaacttacaaggccatggcaaactacggcaacgcaaagcagagaccttgaaggcaaaggggcgcagaaagctcgaaggagagaggacgccgcgagtgggagagaagtaaggcatggctgctactcaagggacgaacccctctttaaaggcagactcccccgctcccgcctcgaaacaccgtgagaagtctcccccgatgcacaccagggtatccatcctatgacacgggggcctagtcccacaagtcatatagctggcgcgttggtcttcgagtgcgaagaaggcgaaccgtcacacaaggagcgtgctaccgccccgcggttgtgcaccccttcatcttcgccctgaccaacggccaagaaggtgaaccgtcgc

SEQ ID NO: 77818 - DNA, 309 bp, Zea Mays
caagggtgtgaaggtatccagccatgtagacgatggtgggatcatcctcaataggatctcctcctgacagggcctgaagtcttttcctccaggtgggggtattcttgttgctgggtggaaagtagcgaaggggggtttcaaagatcactttgttgtagttctggcatagttgtcggaggggtgttcgggcaacattctggcaagtatctgggaaacggtatccggtaaaggtgacttggaaggaaggatggttcggatagtttcggctttctcccaggtagactgccatagagcatttctccattccgc

SEQ ID NO: 77819 - DNA, 634 bp, Zea Mays
catatctcgaccagaggcagaccgcaaccgtcacaattgcacttgaccacgaaccgtttctctctctccacacatttgagaacaccttgttgtttgcgcagttggagatttagtttcgagcgcggactgtccgggagaatccttgaagctcatcaacaatgtctttctctcggtattcaaattttttcaagcgatttgttcaatattgtgggttttagggtttctacaaattgatctctgatctatttttggatagaaatttcacgaaattgatttgtggaatcggttatggtcatccttatgaacttagtgcaaaaatttggtttaattagaatggatattctattcaaattttgtgattgaacatttgaggcgaattggggtttgaaaatcgtccctggacagtcgcggaccgtctgctagggtggcgcggatcgtctgccccctaacgaggaccgtccagcttatggtagaatagcttattcatcttgcacatgttttcagttattgtcttctgattgttgggattctttcatatattattacagtggatttggtggcagggcgttttttatccaagcgtcgtcatgtggatgacacagactataaccgtgccactgattcagaggcccaa

SEQ ID NO: 77820 - DNA, 286 bp, Zea Mays
ttcagcttttgatgcatacttttttccagttttaactaaatccttttttgctattcgtttccaagtgttggtcaaattggcagcaaatagttaggacagcaggtgatacgtcgagaccagtcagcacttgacttgaggctctctcacaagtcgcaacacaagccacggcggcagggactactgggcaaggcaagtatcagaatctgtgatgtacctgtagctttttgaggtttccggtgtctgggaagccttgcgttaactgcacgcacggtttagcaccatacaa

SEQ ID NO: 77821 - DNA, 645 bp, Zea Mays
cagagactcagagcactgttgcactggacggcgggttgattagtaaatactgtaggggttcttttgtgaactgagcggtcgaaggggtatctacggatctgggccatcggatcaacaccggacggcacaaattagatccgacgtccatcaaccccgcgagcaaccctagccgttggatccaggattcacggttctgatttaatgactcgaaggggtacgccaagattcgatctaggccattccctgcacgatcaacggttgagggccaactttcccctagatctaatcctagccctacagtgattggtcaacggttgctggccttcttctaccccacaggccacagcgtccagacccagctgattgtgcaccatggcgggactgccagcgcttgccgccgatcccctccaaagtacaggtgacccccaggctccgcccgcgccttaccccgccactaccgatttgcagagtaataagattatccctagaatgcttgacagggaaagggaaactgagctcaccggaggttagtgcgccagggagaggggatgctcaccaccgatgacaagcgacccgacgctgggacgaacgccgccggtgtagatctcttctctcacctctcgttctgattgcgccgagtggaaa

SEQ ID NO: 77822 - DNA, 920 bp, Zea Mays
gcttgggatgaacttcagattcgattctagctcaagggagtaagtaaatgagcaaggtctctatagtcgaattgtagttgatatataacaacaactttgttacggaaggattatcaggttgtcacacaaaaattggagaaccaaggcctttaatctactctgtcaagcgatctgataacggttccaatggtacagtgactggatagaatcagattccatgaacttcgccgccaacgacctccatgcaaggattcacgctgatcgcactgattcgtgtagaacccaggcaggatagtaccgggaggatgaaaagattagaaagggagtggatttgatcgcggattgaagcttatcaaccgcacctatagccacgcaacatggacggatcaccggtatcaccgtggtacgctgtcgaccccaaatatgccatgacgtagtcctttaccatgctgtagtaatcgtggcgcatctggatttaccacctcaagagcaattgcaccggcaagcgccacgactgagcaaccagaaactcttccccctctccggccgccgcgcgtcttctccaaattagccgccaccgctcatgaatcctataaattgagtgtgctctcagctccgataggtattcaagcacctagcgcacccactcatgtctcaaatcattcaccagagaacttcaatttgggatttcccccaaatcaatcaaaaacaccgtgcggtgtgagctcaccgtggctagctcgttacatgtccgttcatggcttccttgctctcgtttcagcgtctctgtgtgctgtagatgcttagccacaaggccaattatgctagatttggccaggtcactgggaacaccacagattgtcctatgtttgcgctgtcaccgtggacagagcgatgtagagttagaactctgcaattga

SEQ ID NO: 77823 - DNA, 442 bp, Zea Mays
tgaggtgcagatttttcaaatgaatgctttcgtcgcggagtccagtccacacgcatgcgtgcaaagacgtggggcttattataatttgatgccagctgcatgcattacttgcccgggatgccgcgtgatctaagtttagtttgcttgacttgctaaagaaaccaatgaacacgccaagatatcataccaagaaaggagcagccgatggacctcgtacagtcagatcatttcttcagagattttgccgactccattaccagatttttgcagccaattcttcaaagtatccagcatcttctccaacttctggtcttttggcttgagcatcatgtcccacctctgcatataagaaatgaaactgtacaaagaaatgaaactgtacaagatcatttctgagctgctgggaaatttcttttctattgccatcctgtttctgttgccc

SEQ ID NO: 77824 - DNA, 368 bp, Zea Mays
tcatcaattttaaccataccatattccaaattagcagtatacttggggcaatgaacatctagtctataagcattgcaaggtttgaacctaataacatggaaatggaatagtatgagttagaacaaaccaatgatatactaatagaagacaaaaactaagcttactaagggggtcggttgtcgttatacccctttgttgtagattcaaactatgatattcaataaatcaatatttcctaccaataccaactccaaacaatgttactgcaagagggcgaaggggaatcaaggctaggctaaacaatagtgaatattggaaggggaaaacacaaaagtaccttagaccagggagtggtcgaggggatctgc

SEQ ID NO: 77825 - DNA, 472 bp, Zea Mays
gcagaatgcagatacatcgacagtttgagtctgcaacatagtctaaaattgttcaccaacctagtgacagatggacacataatcacataaataggaaagcatataatgcaaaattgagatacaatatgattacacaataaccaaaaagaataatgaatgttatggtattcaatgcaaggctgtggagaaagcaatcgataagaaacccatcaaccaaagtacatcatactatcagatcacttttttgtttatatcattcatgtaaagtttcatagttaccattttacacaatcattaagaacagaaaacagaggagataaaaaaaatataagctcaaatccaaaagaagagatggtgtggcagcttgttcgaggatgtcacagaacagatagaaatctgagcagcacggagaactacacttttgttgtagccaaccttcaatgcaaagatcatcacttatatggcgcctttg

SEQ ID NO: 77826 - DNA, 463 bp, Zea Mays
tgatgactttgccgaagcagcatcctataactaggatagtccaatcatgtcgtgaggaacctcaatgtcatccttgtccccctcgttctccttgtcctcctcgccagcaaaggtttcccgcgtcgaatgtgatgagttgtgtgcagctgtagaaggtccaagtcctagcacgatggcatcatgtcgctgcacaggaggttgtacgtcaattctggcgctagacctgcatccacaacaagcagcagcatgacgtagccgacgtgaatcctctattgttcaaaagctagttagccaccaagttttggacattaaaatgtatgactttgctactaacagttaggacttactaagaggaaggcaagcaccctgttgccagaagtgctctgtgagaaacgctcgatgtcaaccacaaagagcatcatagagtttccctatgaagtggtccgtgagaaacgctcgatgt

SEQ ID NO: 77827 - DNA, 555 bp, Zea Mays
ggaggctgtcgtgatcgaggacttcttccgtgggtctaatgactcagctttcatctgagccatcctccagaaagctctagccattcagaacaacttttctgagaggcatacatctacatcaccgctgacgagcaggcccaggacctcatcagccacacgaagcctacaccccatgcgtcgaagaaggaagggaaccagcaggcggacaagcgctagtacaagaggccgagagattaagtgcgtgatgttgggccccaggcggcttggccccgcggcatgccatgaggcaacgtacagacgttggatgagatcattgtcgtccagtgcccgtaccacaaggagatgcgccacaccctacgtaattgcagggacttcaagaactgagtcggcaatgaccaaccatttcaaccgctgacgctgccccaccacgaagagaataagtcgtacaagaacaaccatcgtaacagaagtggggtggcggtgcaccttcccgtgcattgacagggaggtcaatgtcatcttcgggggccatgggtcacaggagagcaaaagata

SEQ ID NO: 77828 - DNA, 1568 bp, Zea Mays
aaacatgacccgtcgggcgataacttcatccttttcaaaagtcctgtcgagcacggcactgtacaggctatagatgccgagataagatcgcatacaagttgacttgacccgctgcctggaaaacgataagcttcgaacgaatcatgcccacacaacacattccgcaagattgattgataatcacaaagaaccaaacggggatttggaaatgaaaatccaacactggtagaccattcaatcatctgaattttgtcaccgcaggacacaggtggaacatcggccgggaatatctctgtccggtttcgctgagagatactctaggattccgaggtttgacacgtcgcaacaaccttgtccagatcaaacaacgacggcggtgcgctaatagactaacgggatggaagcagaaaagtgacggcaagtaaatgacgagtttgacggactcacggtctcctcttcaccggcggtcaagctaagcctagtgctattctgtggatgtaacggtgctgtaaaagggtttataaaccccataggaggtcagccagctgagtatccagtttaaagttcagagttgaaactcacagcaccaagcaaaaaggaagcagatcaagggtagccgagcgagcagaggtaccccggtctctctttctccttccgtacataattatccaattcagtttgttacttgttaagagaattcgatagtaagtttgtagtaagcttggtcactccttgaactcaacgtagtactttctccgtaatacgccgccaagagatcattctttattttttgcaggttgtcaattacgtgccttaatatgagtcattggaagcagccgtcgaaactcgccatgcttgtagtactgctgctgctgctatgtcatgcagtggacaaagtccattgctcgacgcaccataacaacagccaagattttcattccctgcttgagtttcacaagggcatcaccagtgatccgaacgaagccttgagcaattggaaccccagcatccacttctgccattggcatggtgtgaactgcagtttcactcgaccatatcgagtcacggagctcaatctcaccggccaaaacttggctggccaaatcagctcctctcttggaaacctgaccttccttcatacccttgatcttagctacaatagcttcagtggccccctacctcttcttaacaagctccgaaacctggacgtactctttctgggaagcaaccatttgggggatgttattcccgattggcttacaaactcttccaacttagttgatctagatctctctgaaaacaatctcaccggccatattccttcaaacataggcttcctaacgaagctagaaggtatagccctttacaataataatctcaccggtgtcatcccaccaaccttgggaaacatctccacactagaggtagttgatttttcagcgaatcaactaagcggaagcattcctaataaagtttggcaaatctcaaacataacaatgttaaatctaggacaaaataacctatcaggtggaatcccagatactctctctaacttctcttctcttaca

SEQ ID NO: 77829 - DNA, 449 bp, Zea Mays
ctgcgataacgacattggaacgatgaattgttccataggaagtttgaaatttgaaaagaggcaagaaatgatgtggaattgagtcgatacttcacagattggtatctatgagtgagtatgagtgaagtgtgtgcttggtttgaaatttggaggagaaaatgaatttgtggcactcggctgagaaacaaacgctataaatgggaaatagtggaatacccgatccctgggatatcggataggcgtgaattttggcgaggaagtttattagaagtgtcaaaagggtgctggaaaaaggtggggtcgatttgagcaattttagctggtttgggcatttcaccgagcacctggcgtgcggggttttagagaagcggtgaaatggttgttttagtttttgaaacctcccaaggggagagataaacctgtaggggagctctagggacacacagaca

SEQ ID NO: 77830 - DNA, 407 bp, Zea Mays
ccaaacttcacaacaaggcatcaaaagttgctaattgatcggtttgtgcctcattttaacaattgtataggggcgatagacgacactcacattccagttgttgtacccgcatcaaaacttgttcaacatgtgggtcgtcatggatacccgactcaaaatgttttagccatatgtgatttcgatattaggttcacctttattgttgcgagatggtctcgatcggtgcatgatatgagagtattcaatgatgctttgcgcaagtacgacactatatcccctcatcctccacccggtacgattattttagcgcaacttaatttttttgttgtccgcacttcaaaactgtgtttctcataatttgtttggaaatttgcaggaaaattttaccttgtggacttagggtatcc

SEQ ID NO: 77831 - DNA, 463 bp, Zea Mays
ctttggtccggtcacttacctttggggcccaccatgtcagctactcgaccccacgcagtcctacaccgtttccatttctcggtcacttgcgtgtgggcccctgtcggacttgtcctcctcatccggtcgaccggttgcaacaactccacgcggagcagccgcggagctagggtcggagtcttccgcgccctgggataaattcgaggccccgagggtttctgctttacacctcctagtccaaccaccctcaaggtttcaccgccatcagccctctcaatcgcgtgcaggattcgaagatcgatccaccaccaggggtgaccaccgttggactcacctggctactgtcatcgaggccttattcacgaactagtgaacatcttagacgcgccaagaaccaaaccgaagcacccacacgcacaaagtagtcagcaacgcagtggaatttctcaccgacgccacgtga

SEQ ID NO: 77832 - DNA, 932 bp, Zea Mays
ctcagggttcactacgtaaaaatctgggttctattgcaattactttgcacaagccgaggatggcgggttcataacaccgaaccccaaggactcatatgcaaaaatgcagccacgaaggggtatgactaagttctggctattcgatcagaaaccgacggccaggattagatcgcagttctcatagatggatacgataagctcaccatggggtctatattggatggttcacgttttatgaagcctgatctaattttgcccctccgattagatctcaacgacccgagtcccacccaagtgaacgggtacacacttcaattttgtgcgttgatgatagatcagacagtgcacgacaccgagacgaagggggaagtccgcttttaatcctagacgtccatccccagatggacggcagtcgcaccatcttccccctctcgccagcacccgagctccacatcggtgctttgaatcccgcgacggagcactgccggtgagatgccccaaccacccaatcggatgcaattacactatgtgcacaccaatgtgaattacatggagaggcccttaccgtctctggtggtgtaagtagcaatgcctcgatagcccgaggatccgcggcgacggtgcaccaacggcgagaaatcgacggtcacccccgccacaagcacgcgtgatttcaccggggacgcacaggcccagacctcgcgatgcccttcccccgaactaatcctgcgccaaacacggcacgacgagcaagagatggtggcggcggcgcacactgcacccacgacgatgagtcactaaaggtggtcgggatcctcggtgtggtatgagatggaagcagagggggagggccaagggattacttatattctccttggagtccgagtcctagggaagcgcccaggtcgcggtcgatcgccggggaaatcgcg

SEQ ID NO: 77833 - DNA, 709 bp, Zea Mays
tgggcatagtggtcaccccgagttaagtaagcgtgagcatgtcgcaccgccttaagtcgttgccgacttaagtcgattgctccgttggcagggcctagtggtcaccccgagttaagtaagcgtgagcatgtcgcaccgccttaagtcgttgccgacttaagtcgattgcttcgttggcagggcataatggtcaccccgagttaagtaagcgtgagcatgtcgcaccgccttaagtcgttgccgacttaagtcgattgctccgttggcagggcatagtggtcaccccgagttaagtaagcgtgagcatgtcgcaccgccttaagtcgttgccgacttaagtcgattgctccgttggcagggcatagtggtcaccccgagttaagtaagaatgcaagtcaatcgtgaacaaattgagtatctttgaaaccccttttttattgatgacatatttccactttacagagtacatcgtcgtctcgatagctttttgagatacagctaggaataaaacttcctgaggtgttctatgttccaggagttcccgacttctgtgccatccatctgagtgaggcaatatgatccgggccgagtgacttctgctactatgaagggtccttcccataagggcgataacttgtgtcgtccctcccccgttagaattcggcgaaggacgagatctcctattgagaaggatcgtcgtcgcacagct

SEQ ID NO: 77834 - DNA, 336 bp, Zea Mays
ttcaccacagctttcagagggaattatattccactaggcttaatggcaatcaaggtgtcataattcatgaggttaactcagggcacacaatcagtgatagagtatctacatgctttcaaaaatctgtcacgctacgcacctgactatgtggacaccgaggccaagaagatcgctagtttcaagagaggcttgagcccaaagatgatgaaaagtatgggaatttcctcccgcacttccttcaataatttcgtcagcgactgcttgactcaagagaacaacaacaatctctacgcaatggcaaaggggcgtaaaaggcctttggaatcgggaatgtca

SEQ ID NO: 77835 - DNA, 464 bp, Zea Mays
gtactcatcatcctcccccacttgaattgtagtcgtccttgactcaggccatggaaaagggggtggccgagcaaccctaggatgtacaaggcctttaagcccaaaataggtgtcgctgatttctagcaaatcctgaatgccatattgttacgtcgttcccatcaaatccgagcatattttcacgtgggactagttgggttagaaagcttatctccttagctttccaatggaatctagaacatcgaaaatagagtttgtatgtggctagggcgtccatttttatgagacccactcctgcagtccgaaccagattcacgaataaacttgacttcgactccccttgagtttgggactctatgaatgattgggctttgaacatatagttaacgtccatgtactcatcattctccccttcttggttttcagtaatcctcgacccaaagtagttggttcctacatcaggt

SEQ ID NO: 77836 - DNA, 698 bp, Zea Mays
ggttcacctttggggccttgtaacttccaaacaaaaaggattttgttctatgtcaccacatcaatttggtagacctatggaaggagaataactttgctatagaaatcatcccttggtaccatgaagaattctgagataaatgagtttgaagttggactgtcagactgcttgaaatctgaaattcagattaacaatggaatggcatggagttagggctcgaatttaagcatgatccagtaagaatttgttttggaatactataacaaagatgaagctggtatgttggactacaactttgctacagaaccttggattggttgccaagcgaatttaggagaaaatccagcttcaagttactctgtcaggtcaaccggagatttatgccatggtacactaactgaagaagataccgattcatcccccctcactgccgacgatctctacgccgtgattcacgccgtcgccgcgattcgtgttcactggcgggtggataactatggtaaagtaaagatctgggcgtgggatcagctcgagctcggccgcggctaagcccgccgtacccccttgctcatcggtggatcaggtaagacctcgccgccgttgatcgatcactgtcgtgcgccgcgtgtccagacactttactacgtcacgattagtcatgttaggggatccggtgatcgccggagggagcgccacgg

SEQ ID NO: 77837 - DNA, 940 bp, Zea Mays
caacaggtgttgctgaatgagcttaagcatcaactccctttgctgaagccaagtaccaaggtctagttgagtagaagcatcagaaatattgagtcccagatggcgtggtgcccttccatacaacacttcaaaaggtgaacgccccaatgaagaatggtaggtcgtattgtaccagtactcagctactgacaaccaagaagaccacttagaagggcaggcatgaacaaaactcctgagatatgtttccaaacactggttaacatgctccgtttgtccatctgtctaggggtgataggacgtgctcatcttcaatgtagtacctgacagccggaaaagctcttgccacagtcggctagtaaatattcgatcccggtctgtcacaattgaaacaggaagcccgtgcagtttgtaaacacagtccatgaatagctgagccacctttagtgcagagaaaggatgcagtaatgggaggaaatgactgtattttgaaaaggtatcaacgaccaccagaatggtgttggcattggcagaccttggaagaccttccacgaagtccatactaatcacctcccacgcttgcttgggaattggcaagggctgaagcaatcctgggtatttgctgcgatcaggcttggcttgttggcaagtagaacaagaactcacatactgcttgaccatagtcttcatagatggccaagaaaaaatttgtttaattcggcgatatgtcactagaaaaccagaatgacccccaacagggctatcgtgtaatgccaacataatttgctgctgaagatgtatattattgccaacccatacacgacctttgtaccggatgatgcctgaattcactgtatagtgtcccaagtcattgggactaactgttaaggcgaccagcaatttccgagcctgatcatctcccatatagccctccataacctga

SEQ ID NO: 77838 - DNA, 908 bp, Zea Mays
gggagagagaagtctgccacgcgggcatcatgccggtgtcttctcaccgcgttgggagtaaggtctgggcgagttgttgtggcacactgatgatgggcataccctcaccgggagagattggtggcgaggccgcgtgggaattgcttgtcaggatcgctgagtcactgtcatgccgcatctcgtcgtggtcaggcacctacatggctccaaatctttggtaagacacattgggattgttcacgtggacctcagcgagatatagcagtatgcctcggggcagagagtacaccctggcgtggtagcgcatcacgtcagtgagatcaacgccgcggcgctgtgaaacaccgtagtcgacatggtcgtggtatccatcgccggtaggtggtcttcctgggagatcccagtcatactcgttgttttgcggtgatgggatcgagctttgggcagggggttcaggtttggatcgaacggtagcgttctagattaggaacacggataccccttcgccccataaaatccgggtcgtgcgaaagaatctaggtgggtcggattaggtgtgtggcgtggtgaatcctcgatcgtctgtcgcaaatccaacgggcatggttgcgtattgagtcagagttatgtggatctaattatggtcatccgaatctaatccaatggctagaaagccctcatactcctttggccagggaattatgcaaaagagatctcgtagatttattaaatcaacccacagttcactcgtagtcaaaagaaattaccactgagcctcgatgtttacaaatagaaccccgtactttctggtaatgatgtgtgcaatccactgatctcataaaattgaacaaatagtatagtaaacgaatttttgtataaaaataatttcagaaacttgtataattcat

SEQ ID NO: 77839 - DNA, 1101 bp, Zea Mays
cgagatgatacccggaaatggcaccaaactgggaagcagtgaggagagtgcggcccctaagccatacatgatgctgaggcgatttcccccgtccatgagcaccttggagaggcactttgagcccataatcggctcaacaacgagggggtaggtcccagggtgtgggatcctctctagattgtcccccattcatgtattaagtgaaggcacttaccatgtcggtgtcggtggtgtcgggagttcgttcctcttctgggagaacctccggatgtaatccctaaggctttccctgctcttttgggtgcatcgcttgaggtcccaagaactcctacggcatttctaggttccctagaaatttcctaagaaggccttcctgaagtcggcctagtcttggatggtgtcgcccagcaagtgcacaagccatgcccatgccccctccacgaggtggatagggaggaactagatgatcagacggtcgtccttgattcccgccatgcagcaggcaagacagtaatcttccaaccatacatcgggattcgagaacccgtcgtacttagtgatggttgctaacgctcgcaccttttgtaacgccctgaatttgggggtataatttttcttctccaatatttaccaaatttaggctttactctctttttctcttcttgtttcgctcattcctcctattttcaaagcaatatagagactagtgttcgtatcgcgtgtaaacggaaccctaagttgatattgttgttgcatcatgcgagagcatatttattttgtctgatgttgtgcctaggcatgcgttcgtctagttgtggttttcgattcgcggaataaacttgattagaagcaagcgagatcgagtagaggaaattggccccgcggtccagcccgactcgcggcgcggcctagcccagccctagcgcgcgcccaggtgcccctgcccttccccatgcgcgccccctccccccattctctttcccgcgcagagtaaccaccctctccttgttcctcttctctctcacactctccatgccctagggtggatcctagtgagcagttgatgtcgtctgtcgagtccgtggtgagtttcccctctcc

SEQ ID NO: 77840 - DNA, 591 bp, Zea Mays
gagggcacaacgccgacgcacgacggcaatacagagacaaagacgacgatgagtcagccatggaggaggaccggatgagatttgagagagcctggaatgggaccgtgctgggtgctgcggccgccgcccgccatggcgccatcggaccccacagcttgctcccctatagccactgaccccgggaaccctagctactgtggctgtcctgcgcgggtgagagaagtctcgtatctggcagaccatactgggtgagagaacagagaagtcacgtactcactcgtcactcatgttcacgggctcaaggtctcaatctcatggaacggttgggtcatgggccatggcctcatgggctcccggagtcacaatcgggctaggttgtaacgtaatgttggactaggttctttattgttttcgaaaaattccaagacttgcaaccagtaaatttagattaaaattggcaaccgatgaaattggtcggtaatacaccacactgattctgatactgattctgaatcaaaatttctacaaccggtatcatttccgaaaaataacgttaccgatgaatccggtcgaaaaaaccagaaacagttt

SEQ ID NO: 77841 - DNA, 673 bp, Zea Mays
aaaagctactactggctattacaataatgatatcacatcacgtcatttaagaagtttaagtttatggcccctaagccttcatcacatgcatcacgagatagactaataataattattacaaaccggtgttcattacataaataaaaggtactgctaagagaagaaaccttctccccctttttggcaacaagaaccaaaaaaggagagagccaccaagccaaagatcaccagttaggaggaggatgatgcggagcaaagaaatgatgcgccaggttagatgcaaattggtcttccccagactgatctgggggaggatagcttctagatggatcctggggcggaggatgagacgagggattgacccggatccccttggtagggaggcggggcaaactgctcacgatcatcaaagtatgcttcttcttcttcttcttcgtcgtctgctaacataaaaggcaccccgtaggcttgctggtgccactcattgatctccaggggaggcggatgaagaggcacgtcaggcgagcgaggggcaaagggcatacccatagtggaagcttgacgacgaagattgtcgtcagtctcccgctgacgccttgccagctcatgcacatcagcagaaatatttcggcacatagagaaaaatgctgtaatcccatgggccaagcgggca

SEQ ID NO: 77842 - DNA, 467 bp, Zea Mays
cgtgttatctgcggccttcggaggccagaagaagaggttgaatagagttttcgatgctattgggtttatgtaccctgactaccgctacccgtcgcgggggcagaagagaaagagtgcaacttccgggaaggatgctgccctagctgctccaagcgagcccgtgccgaagaggaaaaaggtgaaggtccttactcaccggtcgcgatatattgaactagccgaagtgccctaatttggcggcgagacctcttcggctactaaagccgaagaatctgccctcacatagaggaatgaagaatcggctacaatgccgaaggcatcactagccaaatcaggtgagccaaaggccattaatattgaagaggcagaggtcgaaaaaacaaaaatattagaagttataagcccttcggcagaggtgacaatgccgaaggcgcaaaaggatcttacaacgacccccaagaggaaaa

SEQ ID NO: 77843 - DNA, 616 bp, Zea Mays
ggaagagccgttgtgaaacttattttgagtattatgctattccggttgagatgtggatacgaatggcggtgatgcattttgagggctcggcactctattggttgcagtccatggaagctagaactagagaaatgaactggggagaattgtgtttggcactaatcactcggtttggtcgtgatcagcataatctgttgattcgacagttctatcatatacatcaaactggatctgtttctgattatatagagcagtttgatatattactgcatcagctattggcacatgagaaccaactgacatcgaccatggtaacagcacgatttgtggatgggttgagagatgagattaaaatggtggtgatcatacaacgtcatgtggacttggatacagcttgttcactagcactgttgcaggaggaggtgatgaccagtacagtacgcaaagatcaaaggaagtttgatgccggattgttcaatcgtgcttcctccaaatcgggaccattaccactgcctttgcctcctggtctaggcaatcgttcagcaggctttcctgtcaaaggggaggacagcaagatggctgcgctgaaagcttacagaaaagccaagggactatg

SEQ ID NO: 77844 - DNA, 359 bp, Zea Mays
tggataggcttgggtaggacatagtagggtaaggaaagactccatcatgcatagtggatcttgattcctttggaggtatggcttgactcttattattccttcaacgagtttgatctccttcttctcgagtcttggtgtcctcatccggattagggacaagaggttaagatagatctgtaggtaacacattagtaggttgagtagctagtttagtagatagttatgagttaaatgagattagtgagaatctggtttggttgttttgcttctgaatggtttggataggttatgtaacctattatgtaggtcaagttgttgggtatgaccgagttgatctaagtcaccaatttaggctcaag

SEQ ID NO: 77845 - DNA, 564 bp, Zea Mays
accgattgtctcagttgtcagaaccacacatggagctttcaccctcttggatcactctctgtcatcttcactatcgagctaccgaccaaaccactatggtcctcattactctgatatacagtggtggccacaccgcaaacatggttcatgtagtctctgaagactacaaacccctctaagtataataatgatgcacacaagcactgagtggtaagaggtatataaacctcactaaacactagacttaaatctagagcaaacacataaacgatggtctacctagcctaatcacttgagaaaacatctacactaatcactatatgtagcgctaaacattatacaagtggagagcactagaatggataaccaattctttttatatgtttcttagctctcacccacttcaaatgactgattggagtactatttatatgcctatccaaaactagttgtttgcaaaagctgcacactactgtactagacatgtccggtaataaacacagaacttctgataacccgtcgattaaaatttaaccactgtattgcttttcagtgagcatcgaa

SEQ ID NO: 77846 - DNA, 862 bp, Zea Mays
gattatcagtcccacgtcaaatggaatgagcaaagtgctcatggtccaaaatgaagatgtaatgccagtaaaacttactgcaattggtttgtgccaaagggatacacgcagctaaatctgtctgcagaccatctcctcgctgacttaatgggatcaaattggggccatattgagcatcaggaacacttggcacgtcatcgatagcacaaccaaagtcttcagggggacggtctactacaactagacgcaccacaacctgcatgagttgcaaatgggtcttcatagccgaagtaacataattatcccaatccagttgacaatcaattgggatgactcgtcttatgatatttggtggatgaccaatattaagcactccgtcaaccgcaatgtcatcatcttcatggtaacctagcttttgtttagcctttgtaaacacatcactcaacgagggtctaccatcgaatagtaccggcacgtgtcgcatgtcaatgaacttggcatttccatacggatcttgttccacattgcctccatgatataagctcaaaaaattgtccatctatttcaaacacgaattaaacattcaatataaactatggatggttattgcctaaccacaacccactaattactagctacataactataaatataaccacaacccactaaaatactaaccaccttataactagctactaaataactaattataaattttgacagcacctcccctgcgcggggaggatataaaaacccgcacattcaactcacattcatcatattcgatcaaattagcatttatcaaattcattttcacgacaatcacattcaacaaacaactttttatagcaacaaaactaac

SEQ ID NO: 77847 - DNA, 1010 bp, Zea Mays
gtcggatcgtctgtgtgacatctccaccaaatcgatagttatcttcacctgacggaagatcgggcacccccgttcctttcaaatggtattcaaagactcaggtattcccgttaggcttaccctagtttagtttaggtttttcatcctataactctagataattgccatacaaaaaaaattccgctgtcctataaccctgtttagccttgcaatttcgtttcagattgctttgttgaatttgtgtccatgttcgagtcttgttgctgggttaggtcgtgtcgtaatcgtagttcaaccgctccatcgctgttatttgtttccgccgctatcccatccacctttcccagattacaagtcgagacaccacattactcgatttgccctcgctagccaccttgtgtgaactctcgccaccctagccctagattaggttgcaagccgccttgcaatgcagcccctccttgtttcatcatctagcgcttacctattgcttataccagggaggtttgtgcccctatgctctatagccgccgctacgattcctgccaatttgtgctcttgaaaaccataacttgaggtaccttccataaaacgggcgtaacttttcgctcggtgctccgtttgagctcaattttttacagcagattcctgactccattctggggtgaccctttggcctgtttggttcggtcaaaaaattcaaacaaaattgggaagataattaaaaaaaattgttttatgtgttttcaggaatttcagagattctttgtgattttctttaggccacaatacaactctgtttcaagtgaaattttgtgtgcttccatcttttgtgattttggatcagtgataaaaaattcagaatatttcgagctcttttgctggtactcttttggaaacgtacctttgatttctactagtgctgaaaaatctgcgctatttacagaactgccattctgctggttatttaagtttttgtccaccgttccttgttacctttaccttgttgt

SEQ ID NO: 77848 - DNA, 1275 bp, Zea Mays
cgagatgatactcgatgcacttaggaaaaagttgtttgacaaaagcaagaagctcgtaggaaaatggatcaaggaactaccatatgtagtctggagcctacgaacccagccgagccgggctttacacggaaaaacccattcttcatggtgtatgggtcggaggcagtgttaccagtagatctgatctttggagcacccagattaacattcgaaagcatagccgaagcagaagcaattaggctagaggacatcgacgtactagaggaagaacaactaaatgtggtcattcagttggccagataccagcagaccctgaggcgctatcacgataacgcagtgtggcattgatccttcgctgcaaaggagaagaacacagtgttacgataacgcagtgcggcattcatcgagtattgacgggagaagaacggcacaaattgtcaccaccatgggaagggccattcatcgttgcagaggctacctagccaggatcttaccggctcactcaaatggatggcaccgaaatgggaaattcgtggaatattgagcacctcaggaaattctatccataataatgcctcaaagctcttgggggtgagtcgtactttgtaagcagaagatttcattatcaataaaccttccatgttccaaggcatacgagttcttgatcaacaactgacctaggtcggtctcaacttgaaatcggcgcggcactcttacacgacttagggtgatcactataccctactaatggagcaatcgacttaagtcagaaacgccttaagtcggtgcgacatgatcacgatcacacgactcagggtgatcactataccctactaacggagcaatcggcttaagtcggaaacaccttaagtcggtgcgacatgctcacgcttacacgactcaaggtgatcactataccctactaacggagtaatcggcttaggtcggaaatgccttaagtcggtgcgacatgctcacgcttacaggactcagggtgatcactatacccttctaacagagcaatcgacttaagtcggaaacgccttaagtcagtgcgacatgctcacgcttacaggacttagggtgatcactataccctactaacggagcaatcggtttaagtcggaaatgccttaagtcgacgcgacatgttcatgctttcatgaataggggtgattactttaccctactaccgaaacagtcagcccaaatcaaggaatgtgtcaaagtaaaacaacatgctcacatattcgagggtggtctcagcgccctgct

SEQ ID NO: 77849 - DNA, 400 bp, Zea Mays
gtcgttcctgttaagtatatggctattttatggttgttatagatttagagtacatgggtcttacaccaaatgagggaatatcaacactgttaaccaacgaaatgtgcttccaaatagatagataagtggtccatactaatagatgtgatgtttttttactgaaggtctcatgttcatgttcccttcaaagtatatgaggttgcatgcatattgtcaatcgcagtacgggatctaatcatctatgctaatgttgctgattttaatttcccattctagcttgctctatctaggaggtctgatccttgagagaaagaaaaataaagaaaagaaaccaaatgttatcctataatagataacataactgattaagaaacaaagaagcagcctaacatatattcag

SEQ ID NO: 77850 - DNA, 733 bp, Zea Mays
tgagttcgaagccaaaaacgaataataaagtaaaagggcatgaaatagaagtacctataatcaatgcacgtttggcggcttcttcagcttcctttgcctctactcgggcatcatgggattctttttcatttttctttattgcttcgtcggctatctcgcggccgcccttcatccaaacatcggaataaaatttcccacccatcagggtagcttcggctgaaggctcctttgtatcgtctatggagaagatgacttatgcctgggctgcagctttaacatgttcacaaccagttttctccaaaactgctgcaacccctcgggcaccggtgaaggcacaaaaatccccacggtcactaagtatttcttcaaaagctttaacttctttgtcgatccattgaataactccttcgggatcgcctctaataaatttttgctccgatgagtatgcacccacctttgcaaaactgtattttagtttgtttgcgcaatccaaggatttctcatagcatctttccttggattcacaaagctcctccacattcttttgcaatcttgaacttgtccattcacttatttcttgccttgcttttgcaacttcaaaattttcattcattttggcaagctttttccttaggtcttcgacttcggctttgtgagcttcggattgtgcattaagtatctcttcgttgctcttcagcttatccactaaggaaagtagtattttatctttttt

SEQ ID NO: 77851 - DNA, 378 bp, Zea Mays
aggccagtcatttgaaggcagcgggccctttgcaaccccttcccataccatcttggaaatgggaggacatttgcatggatttcatcgtgggattgcccaatacctcccgacaccatgattctatttgggttattgtggataggttgactaagacagctcatttcctgccagtgcacaccacccacaagacagagaaatatgcagaaatatatgttgatcagatagtgcatttgcatggtattccaaagaccattgtatatgacaggggagcactgtttgtggcacgcttttgggagcaattacaagaatcacttggaacccatgtaatacgaagctcagcataccatcctcaaacagatggccagacagaaagggtaa

SEQ ID NO: 77852 - DNA, 514 bp, Zea Mays
agagtttgaactcgaggcgctgagcttttacatgtgcgtggatcaggacaagatttgttcattcacgcaggtcagaatcgtgatttgtgcatccttgacatcctggatcgtgtttgtgaggctgtgcggttcggggtggctctcgccattgcgcagctacactttggtggtaatctccatgacgccattggcctacctaatggatcatcggtggcagatttagaccttttagtatgtgatttcaacgcggacgtgaacaatgtactggggtagtgtcaatagaggaaataatccatgatctcccatagctccatttcatggcctgatcgccttgctattgcaacgtgcatgggtttcaggtcccctagatcccagttggtttttgggattttcttggttcgaggggcacttttcgtgcggctttcacccgtccaccaaactcgtgtagggtgagcctctgagtccctactcgatacagagatccgacgcacgatttcccgtctttttgtcttac

SEQ ID NO: 77853 - DNA, 585 bp, Zea Mays
tgttcatttgtttaggttcatacccgattgagttcaagtttagttccacactaaatatttgtgatacaggttcgtgacaaaaaaaatgtggtaaaaatgttaaaacaggaaaatatagttcatgcggactcaactcagtcgagtacgtacgtcgtacgtcctgcacctgatgcagatgtggatgcatggaccatgcatgcatataatgatcatgttatctaagtggggcgacaggaggcaggaaatcaaagatacaccgtacggccatgactgcaaccgtgcaactaatttttttgtaacagtacctaatcggcggccaaattaagccctgctttgccgcctgattagtgccatgcggcagatcggttgcagaacaacagggacatcacatcactcaccgtccatcttttctcctcccctttggcccatgatgtcgtcggggatgcaaatgtcgctgcagccaacgagctagctctccttgctaatctccatggatccatggattccatgcccttcctcctctcaccgttgttgccttccctcaaaatcgaaaacctacgttcgcatcaaacagctgcatatttg

SEQ ID NO: 77854 - DNA, 498 bp, Zea Mays
cccatttggactaaaaatggaatttctatgaattttacaagttctagctttgtttttgtattaaaaatgtattttctaattcatttaatctgattttccccttttctagattgtgccacaataatcagaaagttcaggggcctcaacataagttttcctaagacacagagagatactagcgaggatggcgggttgtttttagataaacagagggactcatatgcaaaacttacaggtcgaaggggtatcgtccgtttcaggccacccgattacaactgaacggctcagatctaatctgaaccggtacacgctcctgaccgccagatctcgatctaacggctacaagttcagaactacgcgatccaatctaacgcgtgagatctcgatccaacggttcctatttggctacccccagatttaatccaaaccgcccaatcgttgatccgacggcaagcggcattcttctacatcagaccgaccggccgccatggcgttcac

SEQ ID NO: 77855 - DNA, 377 bp, Zea Mays
tgcacttgcatggacggacgcaccggcttcgacccctgatgccgttgaggacttggattattttgcagcgttagatgtggctgcagcggagccttcgccacgcgcggagggttccgaggagcttctgggcgcgagtactgggtataggcggcgaagggcggtggcgaaacggagagtgagtgaattgtcgcgaagtggtaggcgttatcgaagagagatggagagtggtcatcttcgcgtggatgggactggtaagcgagaattgttgtcctcgccgattggggtgagtgtaggtgagggggagctgcgaaatctgtttgagggtgaggaattgaggataatgctgttcaactacagggagatgggtatcatcccga

SEQ ID NO: 77856 - DNA, 548 bp, Zea Mays
aagaccactcggaggagtaagttgcttgatcctcgaatggaggataccatcagaaaacttttaaagactacaaggaaaatattcagaaaacagaatttggatcttcaagctgattgtttctcaactcaacttgaagctcgatagcttgtgtgggatggatatcccctgggtccaaatgagacgtattctctacatgggccgaccgactgactcaggcccgaggccaacgaactgaacaaacttggcgcacaagacaaggactctattgtaatctaaaccgtctaggagatatataaggaaactaacttgtaacccaagccacgccggattatatagggcgagctagggatccctcccaaggcatatcttaggggatctgatcttatacacgcccctcgctctctcatcaaacatccaaaccctagccctcattgtaaacttccagatatcaaatcaatacaacgcaccacaaataggatgtagggtattacacatctcgcggtctgaacctatataaattgtgtgttttgtcgcatcttgaagcaaac

SEQ ID NO: 77857 - DNA, 464 bp, Zea Mays
gaacttttggacaatgcggtttagtatatctgccactagcatgctcagccagactccttgacaggctccaagtgcagcggccacatattcagcttcacaagatgagagagaaactactctttgtttttttgaagaccatgttattagattcatgccgaggagaaacataataccagaggtgctctttctcttaataaggtcccctgaacagtcactgtcagtatacccgagcaatgacaactttgttcctcagcttttcttgagtctaactccataacccaaggttccagcaacatatctaactattctctttactgcagcccagtgttctactccaggtgactccatgaacctgctgaccatgccaacagcaaaacatatatcaggtctagtattgacgaggtatctcacgctcccaacaatacttatatattttgtttgatccctttcagttcccttttctg

SEQ ID NO: 77858 - DNA, 1091 bp, Zea Mays
tttcgctctgtctcgcgagctaaacgagctcgtaaacaagccaaaccgagctggctggatatccagccctaattctaccttgccatagtttctctgtatggcctgtgtatcggctaagtgtatattcaaagaaagcacgagttcctccgagacaatccatacattgcaacgcatggtagtcccagaattaatggtatcatctgctcagtccaccacacaattggttccaaagtcatacatgatacatgcatccaaatacctgttgatatctgcacagttcttttttccttggtcaatataagtcctatactatgctcatatccaatatccatccaaacaaaagtacgtacactggagttcatctttacagctgttgctgctaccttcattaacaggatcctgggaagatatcctgacaaatctggtaagtaattactctgtttcagaacctgacgttcatgctggcacgtagtttaattagcatttgtatcaccgtattgtgcttccaaaatagatctagtattgtcgtctgtgtatcccagcaagcatcaccgggacataccgtaatgtcactctgaaggagtatcgtgtagttcagcataccaagctattccacaaaatgctacaccgaattttttctgttcttgtgccatgccagttgccagatgtaaacgcccctacgtggctgcacacatcacaccgagactcactgccattcccatcccattgttatgtttcaactttgaagtgcctccagtcttggatcagttttcagtttatggtaaaggacaaaatctttattttttacgaggataaaatcttataagcaagaatttatgatcagtgtgggataaattcacaaagttcataatccgatggatgggaaccatgcatcaagtaaactgcagcaggttcatgtttatatctgttagtgacaactctctgcattacataactatccaactacaagtacaagaagttttagccaaatattgtagaacatgttcttctaggaaagccataccagtgttttatcatgggaacactgaaactaaagggttgacaacaccaaaaacaaaattgtcaccaac

SEQ ID NO: 77859 - DNA, 395 bp, Zea Mays
gtgggtactatttccttgaatgacagggggctctgtgaaaaattcaggacatatgtgctttagtcttcgcttctgtgtggactgcgggttcaatccttgatattgcaggggctcttatgtaagtttctcggccgaaggggtatgtctggatctcggccgtccgattagaaaacgagcgtcgggatccaataacacttaaaacgaactggcacgccacatgggccccaggatttagatccaacagcccacagccgatctaaacatcagtcgtccgatccaaacgattgttctcgatctaaacaaacgaacaggtacgcattctaatccgcaccgttcgcgtagatccggcggtcacgatttaacgcgttggaatgatacctaagatctaatcccga

SEQ ID NO: 77860 - DNA, 363 bp, Zea Mays
catagttatcaccatgagaaggaaatcatggtccactaaagccattggatttttggtcacatagcatatgaccaacaccccattgggcacatccaccatgtggtctcacttattgaggcttaggaacctgatgccaagcacctctaggcctagccacacacctctgaatataagggatatgcacaccatgagaagggtgatgcatgttctaactgctcacctcaaagacctctcactcatctctcttccttcctaagcaaaacatgatcaagtgaccatccctcttgcaataatcgtagtggtacatcacttctctcttaggtgtagtctttttgtaggaatgagtcatcttggatgattgtg

SEQ ID NO: 77861 - DNA, 388 bp, Zea Mays
gatgtgccgatttggactcctgcgtaccttggcaagaaggcgacgagaggggtcccagatcctcatgactctgtgctcgacctccacgcgcgaaccgttctcatctagctgtcccaagctgatgatagagttcctcaatgcggggatgtagtagactccggtgagcagcctgtgctcaccagacgcggcggtgaagacaattgagccggcgcccttgatctctacgccggaggcgtccccaaacttgacgaagcctcggacgctagagtcaagctcggtgaagaactcccgtcgaccggtcatgtgatgagtcgccggtgtcgaggcaccatccttcgatcatgtctttgctggagccgtcgccgaggaaagtgcgtgctttcgactc

SEQ ID NO: 77862 - DNA, 358 bp, Zea Mays
agtgaagagcactcaagagcaaccaaattttctctaagttaaaaatcagccctcttccaaagatcagagatgttcacttagttgctggtgccaaatccttaaggttcaaataacaaaaaggagccaaattacccaaggcacacccttgaaaattttgaaactaaaccagaaccatttgacatggtttgacattagtttggtcgcgggatgaatagtgtcgacaccactgacttggcgccaccatatctcccaaaccaaacccaatcttcccttggaactcacatgaactaggtagccctaggtacaaagaagagatctcacaaaagtcttatggtgagattcacacgtttggctgctc

SEQ ID NO: 77863 - DNA, 276 bp, Zea Mays
gtcccacaaggcagagaccgtacgcggggtgtaccgtcacgttgatagggactttccggtacctcttcggtatgtcgtgccatggtcctgacatagtttggtgacgacgcgtcctgttgtggctgacgtggatcaatagtactggtttggggcctatgtctcgctgaattgctcggtagggacttggtcggcacctccgtctcgctaagttgctcggtagagacttggtcggaacctccgcctcgctgagttgttcaatagagatttggtcagcac

SEQ ID NO: 77864 - DNA, 477 bp, Zea Mays
gcagtaactccaaagaggaggagaatggccagcgtactagacgctgttatggagtcaacaaaggtatcaactcctgcctctatagaagtgcccagcacaagtgggaaaaatataaaggagaccgtcgaagctgttacagctcgtgttgaagctaaagttgggccctcagttcccgcagaaataaggtctacgggaactgttgaaaagaatactgatcaataaccttcggatactacaaaagctccgttattgttagaaaaagggagaagcaagaaagactctgaatcccctgcccctgatgcctctaatgagggattggctttatagtgtgtcatgcggcggggaagaagctatcaggggaacatattgccgaagctatgcattattctaaggatctgaagtatctcccaggatccttggtgtttaatggtattgatgaagatgattttctatactgtcttctagacaacaaggaaa

SEQ ID NO: 77865 - DNA, 366 bp, Zea Mays
tgttgaatttgggaggtctacaattaaggctgaagatctgattgtgatgaagaaactagaaaattttggggaaaatgatgatgaactggttcgctttgctagagaggaaataattctagagccgaaggaagatgaagttgtggtattcaagagattcttcaaggcagggcttcggttccccctttacgaaatgatatgtgaagttttaatgaagtttgagatctatctccatcagctaactcgaacgctattgtcaggctcagcgtttacatctgggttctttgaagccaaggaaagagcgctaacgccgaaggtttctgacgggtacatgagcttcattaccagacgaaggcaagggctattgcc

SEQ ID NO: 77866 - DNA, 342 bp, Zea Mays
catgaagtttatagaagagcgatttactgaaactgaggagatcctatgtccatgtcgaaagtgcttgaatcaactttataaaaataaatcacaagtagaggatcacttatatattaatgggatggcgagcacatacacaacatggatacatcatggggagccactattgaatgccagattaaatgaaaatatgttgaccatatatatgaacaacatagcttcaatgaggatgcttgtatgaatgagtttgaacaagataaccttgatgataaattactggaaatggtgcatgagttgttcacatatgaagaaggtgcacaaaagtctatgtttgcagttgtt

SEQ ID NO: 77867 - DNA, 863 bp, Zea Mays
ctcggtgccatgttgaaagataaacaaaggggtgttggctttggcttcaacaaaccccacagacttctttttaaacaaggttttgatttttggagtctccttcctctcttgtcttcccattggtttcacttggtctcctatacatcatcacgcttccaccaagcttcccccatgtcaaattggctacgatcctcggtggatcaagggcgcctgaaggctctcattgtctgggcttgttggataatggtggatgactacttcccgatgccgaggagatcctgactcctccttcggtttacgtggtttcgttcattcattttcatgaacgaggctttgcccttcctcttccccccttcattgcggctcttttcggttatctccaggtgcaacttcatcacctgaatccaaatgggattcaacatattgtcgttttttgcgttgtgcgaaggttacctggggttatagccccattttaacttacgacgccattttatccgtgtcgagctattgcagagaagggaggagcagaaggcgttggagacgtggccaatcgggtgtgcaagaatctgtctccgcaacgggaggtcgcgatatattctgatcacccttttgttgtcgaacaagtgatggcatcagcaatggtttttatttgcgagatgcgggcaaaaggaccatgttaggatccaggctccctgacttcgctctagaggccccgtctgaagcccctcgtagttggagttgggatgttccgcccagtgtgaggggctagatcttctactaccttatggctatgctcatcctatgggagagaggcgtcacgagtatggcatcattagctcctatctctagcaaggattagcccc

SEQ ID NO: 77868 - DNA, 638 bp, Zea Mays
gattattttgcggcgttggacgtggctacggcggagactttgccgcgtgtggtgggtgttgaggatcttccgggtgcgagtactgggtgtaggcggcgaagggcggtggcgaaacggagagtgagtgaattgtcgcgaagtggcaagcgtcattgtggtgagatggagagtggtcgtctttgcgtggacgggactggtaaacgggaattgttgtcctcaccggctggggcgagtgtgggtgaaggggagctgtgaaatctttttgagggtgaggaattgaggataatgttgttcaactacagggagatgggtatcatcccaaaggttgagccaatgtaatatgtgatgccctcgctgtgtgtatgtaaccataatttgtatgataaggctgcgtgccttcgttgatacagccgcgcccataggcgacttctgcacggagagtcttttgggaacgacttcgattgtgcgcacctattattccggctgcacccttagacgactttggcacagagagtcttttgaaaaagagttcaattttgcgcacttgttgtgctattccggctgcacccttaggcgacttttgcacggagagtccggctgcacccttaggcgacttttgcacggagagtcttttgact

SEQ ID NO: 77869 - DNA, 340 bp, Zea Mays
cttttgcaaagatgcaccgccgaagaggtacggatggattctggccattggatctcattccgatggccacgattagataacgctttggtgaaccggtacgccgctatccgccattgattcagagatctgtggtgaggatttaattaaagcgagatctaaccgtgcccgcacgatgtggatccaacggtcaagactccaagccgcaaggggtatgccatgatctattctacaccgaccatttccagatcaccggtctaagaagcgtctccttccttgagtcacgccgcggcctagcgagcacccggtaggggcgttcaacaccgccggcgcgcccgatcgc

SEQ ID NO: 77870 - DNA, 391 bp, Zea Mays
cgggcaaaaatcgcctacggacgcggctggatcaacgaaggcgcgcaaccttatcatataaattacggttacatatacacagcgagggcatcatacaacacattggctcaaccttcgggatgatacccatctccctagagttgaacaacattatcctcaattcctcaccctcaaaaagatttcgtagctccccctcacctacactcaccccaatcggcgaggacaacaattctcgcttaccagtcccgtccacatgaagacacccactctccaactcaccacgttgccgtctaccactttgcgacaatccactcaccctccatttctccaccgcccgtcgccgcctatacccagtactcgcgcacgggggctcctcggaaccctccgcgcg

SEQ ID NO: 77871 - DNA, 622 bp, Zea Mays
gttcatttttgctgaaggagagttcagggtctgacacaatcatttaaggggcttgctcatgtgagacctagagatagaagcacaattcttctatggaaggacctatggaatacttagatcttgagtgaccaatttgcagagttattttcctttgctagggaccaaaacatcactttgaagcaattaaaagtgtagcaggaacctcatgatctttttcattagccactatctaagcaagccttcttgcaaatcaatcagctacaactgatttgtcacagttcaacacatcaaggttttgatagggatgtgtggtcatatatttgggactcaacaatatacccctcgaggagggcttacatttgcctcatgggtaccaactcaccccatcctatgacaacatgtatctaggcttcctcagcacaattaaaacacattttttttttcttttggctacttattaataatagattaaacactagaaagctttttcaaaggaaaagcttctctttaggttcatatgactgtgaactctacattttacacaaagttgaaccagaggatcatttattttttagatgcaactttgtaagactagtatattctactcttcacatgtcaacca

SEQ ID NO: 77872 - DNA, 760 bp, Zea Mays
cgataggtgtctacgtgaaaagtgtttttgttttatgcatgtgatcagcgattgggatagtcgaggcgaatgtggagtatgattaatcttgttggggtcactggtgtggttgatgtcttgtgcgtagtatggggacacgtatgtgcgtgtgccgtggtgtattgtagtggtggtggcgtaagatatttgattgaggtgtgcgggtatatgccgtaatatggttatactcgcgacgaagaaagatgcatgtattgtgtaacccaacgtttaggttgctgtcgtataatcatgcgaaggatgctcatgatggtcgtgtgattgaggaggtttgtagtggcaagcgagaagtaagttgagtttttcaaacggttagtggatagtatctatcggtgttgtcatgatttttgttgtatggtaatgtgatgcttcactttatccatcattacattccatgcccagtggataaataaatgtcttgttgattggttaaaggttttatatgagcgttatcgcagcccaataattattggaggcgagtagtgttcataagtcgatctttgttaaaattgaagaacaatccgataagatatgcacataagtgctttaggtccttcagtagcaaatgtagtcttatagagttttatgccatgtgttaatgcctctatgttagaccccctaaaatgtgatattttaggtgacttgtgtgttaactaatttaagttgagcaatggttaaaaaacgctgattaatctgctccaac

SEQ ID NO: 77873 - DNA, 469 bp, Zea Mays
ccgcgcacctccagcagaggaaagacaagaccgacagcaccaacccgctggggaggacaaaagacacgaactctccagcggcaaattcaccggggtggagggtgccgacgcaaatccttccaccgaacgccggcgcatcccatccaagtaggcggcacaccatgtcgagcacccactcagtctgggcatgctcgagatgaacttacaaggccatggtaaactatggcgacacaaagcagaaaccttgaaggcaaaggggcgcagaaagctcgaaggcgaaggggcaccgcgagtgggaaagaagcaaggcatggcttctactcaagggatgaacccctctttaaaggcagactcccccgctcccgcctcgaaacgtcgtgagaagtctcccccgatgcacaccggggtatccatcctatgacacgagggcccgatcccacaagtcatacagctggcgcgctggtcttcg

SEQ ID NO: 77874 - DNA, 580 bp, Zea Mays
tgattttaaatttaaattcttaaaccgttcgggatttggtgaaattcggcagtttctcgccggtttcccgttctcggccgtgggcagtaaatgaacatcgaacgggattgtaaaccctggtggagggacaaattttgagccatggtgggctagaactttgcgccgagatctcaggactatggttaaatttgtttctattgtgggtctagttcttccttttcttctaaagagatggacctagcgaaagaagaatcttgttctctaggagtgtccttgagggatgacctagcatgtggtggattggactaccatagagattgggcttctcctttggcatggatgcttaaaaactttcatggtgctagtttcagcgtttccgtcttgcttttgccatctttgatgcacggtcacaacagcactgtacatcacttcgacgaccacgcgtatttttggcggccagggcttagccgccgaaaataagtctttttaaacagccgtcgagctcctccttcttctctctgtttcaatctcacgctgccgccgcaagctgcttgcctcgccaccgcgcccctaccccgac

SEQ ID NO: 77875 - DNA, 929 bp, Zea Mays
ggaagacatatgatcgttaatgatattacaaatgtgaactagctcaactatacaagttcaagcaaacggataccgttgtcacacgcagatgcagcacgtattagtctaagagaccaaaaaagtttgcaatgacctcaaaagctcaaaatcaaacactagaaaactgtttttatcaggggtcaacagatcacgactacttttgtcgtcttaattgtaaaccctaaggcgcgcttatagatattccaggtagcacagtagaaatcaaaagcaactgcaccatatagcaacgagttgcattcttagaccaactccagcactcaccagtcaccaccgcgcatctacattttacacacctgccagctagctgtgggtcttactagaaacagatgcctgttatctagcagcatccgcatctgtctgcgattcaaagcatccacatgcctcgattattcttgcacccgcacaacagagttaacacgatgggtcgattgcggggaggagagagaatgcgtggaaaacgggagtgcatgttgctccgtctattttgcatgttgcgacagggagtttgctaggaggatgaatagaacacgtgggcgtgcaaaatacggatacagagccgtttacgatgtccgctggagttgggttttttcacttcttggattactttttcttttgccattatattacaagcacatgataaattagctacttgacacataaatagttgaaaaggttggcatccctcatccatgtcaattagcattgtaaaatggtacgcttttgcttgcttaagccaaagatctcgatccttataatagattaatattttttgtgccatatccagcaggcaaaatgctttgttaggttggatgcaccaaccataactagtgcaatctaaaatcagtgagtcctgagattttagggtccag

SEQ ID NO: 77876 - DNA, 339 bp, Zea Mays
tttggacctaaaattatacaagaggctgaggagcaagtctagcaaataagggagaatttgagaactgcacagtcaagacagaaaagctatgccgatacccgaagaaaactgctagagtttaaggagggtgattatgtctatttgaaagtgtcaccactcaggggtatgagaagatttaaagtcaaaggaaatttgtcccctcgctttattggacccttcttaatcttaaagcgagtgggagaggtggcatatcaattggagttaccggatcatcttgcggatgttcatgatgtttttcatgtatctcagcttaagaaatgtctcagggtacctaaagag

SEQ ID NO: 77877 - DNA, 607 bp, Zea Mays
caagaaaagttgtgatcgataaacaaataaggttgtcaagtatttttcagtagtgaatttacatgaggataatcacgagatcaagaattaagattaaaggcacaaggacacaagaatttagactggttcaggttctcgagttgagataataccctatgtctagtatgccatggcaatttcttcattgtaggaaaacaaacaactttcagcggtccaagttaattttggcggctcctggttaaccgcaaaaaacaacgccattgttttcggtaacctatggcaaaccgccgattctaactattttttggcgactgttccaaagccaccgaaagtaacaggctaaactttggtaggctttttgaaaccactgatagtaattaattttcggtggcctcccatgtggccatcaaaataaccctgttctttctggtggctccatacaaacctccgacgtttatgcaattttcggcagccacaccataagccaccaaaatttagccctttttcgggcgtgatttccttctctcgtccatgctcgctcttctctttcctaccatcgttgtgtcgttgctacatccacgccatagcgtctccggccttgcttcac

SEQ ID NO: 77878 - DNA, 288 bp, Zea Mays
cgggaattcacttgcccgaagaaccttgttgcccacttcgcccacaaaggagtggacacggattacaaggaaaaaggaagcaagcaaggtggaagcttgtcaagttatccttccgacaccttcaccctcaaagaaggacataaaggaattcatcaccgtagcaactcctttctaccccgacgtcctcttcattagggggagattggagtcatctcccatctccgacaacgagccaaccatgccaggggaagaacctccccaacgagaagctcgacgacgaaggaacag

SEQ ID NO: 77879 - DNA, 626 bp, Zea Mays
gtttgcggcatattgcaaatactggaagaaaatgaataaaaaggtatggttcctacatctagtcaattgttttagttgctaactatgtttgtctaagtgatagagatcatctcaagtcgtgtcaaaagaaaccgaagaagtttgacataaaagaagttgggttggtctaggcagcactgagtagtccggtgtgcacaggatagttcgacgattgtacgaccgaagatgccgctctcgggttcaaccaagcctcttggctataattcaccgaatggtccgtgcagagcgcacagacagtccgatgtgatagttagccaatggctatcagccatgtcagcagactccaatggtcagatggcgcaccagacaatccagtgccccccattggacaaccagtgtgtgtctgagaaggaaagtggccaatcagtgatcttaccgttaaactgtgcactgtcccgtgtcaccgaacagtccaatgccccatcggagagtctgatgcccgtctaagaagaaaagtggataatcagtgatcttctgaccgttaaactatgcaccgcccggtgtcaccggacagtctggtgcacacgcagacagggaaggctgggagcttccaaatgaagctccaa

SEQ ID NO: 77880 - DNA, 444 bp, Zea Mays
tctgggtacaaaaaaccattttgcatttcccttccaattacgcttgagtaaattatctttgtaagcacaacaccactatgtaaataccacatgaagattttaatcttcaaaggcatcttagccttccaaatgtctttgtgccaccctacattgacattagttattagccccttgtacatcgaatgaacactaaaggacccgtccgccgataagtcccaacgaaacgtgtcactcgctgtgtttaatcgaacatgaacaaggtgagccactaaatccatccattgttcgcgtagctgccccactagacctcgacgaaaagaaatattcagcggaatggtttggaagatattagcaaccaccacattttttcgtcgaaccaatgcatatagttgcgggtatatttcttttaggatccctatcctcaaccatttgtcctcccaaaac

SEQ ID NO: 77881 - DNA, 554 bp, Zea Mays
cccgcctccttgctcgcccagttcccctcaccgccgtggacgcgcgaaccaacacccaaaccgtctgttcccaacagataacaccctcggctgcggcagctgcagcgccctcgctgccggcgcaggtccggcgaggcggccagccaagttctaggcctccgcctccggggccaaccctagccaccactcgcaacgccagaggcggggggcgccatgctgttccaagtgggagggcagggcgcgcgacccaccttcttcgagatgtccgccgcgcagcagctgcccgccagcctccgcgccgccctcacctattcgctcggggtaaaaccgcccgcctccttcccttgctgttgctcgtctccgattggatcgatcgagtctctgaggttgtatgcctggttcgggggattgtctaatcgcgcgtgcccccgttggtatggctagtaggatggtgcagcttggggcagcgcattgaaatggtctagcttgaggacgatcaaatagctcgagcacactttctcgtttgactgtttcccccctcttttggagggttc

SEQ ID NO: 77882 - DNA, 540 bp, Zea Mays
atcatggatgcgatgaggatccatgctgttaagaaatgtcaggggttcctgtggaccggttctgatccaccgacttgcatcggctcacacgccccgctaatctccaccaggacgcctttcccacggtcccaccctcgtcaccctctgctgctggcacctatggaaacgtcacaacaaccttgtttttcgaggtgaattggtcttcggtagttgctaccctccgtgcttgccttacgaatgtccgcctctgggcataccatctaaaggacaatgagtctgcacaagtgatcacttggtgcggatgtctttctcacgtcctctcatacttgtagttctcaatgtttttccttttggtgtgtttacttggcctccaagaccataatatatccggtggttttttctgctgtgcatttggttgtaatgatcaaacgggatgagataagacgatcacttaaataaagttgtttgattcagtgtcatgagttaaaacatgattatcttagtattgtacctagttgtattaaaattggagggtcgaaa

SEQ ID NO: 77883 - DNA, 407 bp, Zea Mays
tgcctggtaactagattgaggggcactcaatcggtcttgtacgggaggtgccaacctgtcaaaaatgaatgattagggtacccccaagtggggtattgtggtatcccgtatggatatggtggcatagcccatatctgattcgggacatatggtggtggggtatgtaagcataatgatatgacacgggtgcgtatggaggcggaggtgtccatgcaggtacattaggtcgtaattgaacattatgacatgtcgttcttttcgattggtgaggtgatccaatcggtcctatctgctgtcactcccaagtgggtgagcgaggtcgctttggctcccggtcacttgggtcggccttatttttcacatatttagacaataattgatcaaaggtcaggccggatttcaccagt

SEQ ID NO: 77884 - DNA, 470 bp, Zea Mays
gtcgcggtactattctacgtttcactgacagttacaaaaacacccctccagttctaattcttcacaacgtcacgttctcgatgtcgcacggcggcaaaccgagctccggcgagcctgtaccggccacgacactcaatgaccagtgctctaacttggctgagacctaattcaacacctaacaaacgtttcccctcgataaattgcatagttcgagctctaaatcaccctatccacggagacagtgcgaacaacggatgagtagaagtgttcccggcgatctagggcagtctagcttaatcaaatgagtcgaggagcatcaggggcatgtaagggtgctgaaacaagagagcagaggacaagatcgaacctgaaacgagctagccacggcgaggacctttttacggtggcggaaactcgatttgggggaagtgagcaattcgggggctcaagtgaacaattaaaggcatgag

SEQ ID NO: 77885 - DNA, 495 bp, Zea Mays
gcttaatagagcaaacaaggcctaataagagagaacttcaaaaactcaattgaaatagtcataaaatgtcaccatgaatagactcaaatgacatccaaaccctagaagtaccaaaaaaccctaaatagaaccctggacagccctagactaaaaccctagggggctaagtgcaaaactagtgcacttttggactaaagtgcaaaaaccaaggcattagggtaccttaattcatatggttcacataattggggattcccaagtcaaaagatgtgaattggactgatttgcaaaaggaccacccttgcgctcaattggttaagtctgaaaatagtgaagtagggctgactttagggctctgtagatccaaaaatattgagaatttgcctagggtcaacacatcaaacctatagagctatgaaaggagaacaattcttgttaagtaaccaagcactgatgctgtgtaaaaattggagaaaagcaagcccaaagttgggt

SEQ ID NO: 77886 - DNA, 432 bp, Zea Mays
agcaaagtggtcctcgtcggagttggctgcctaccgaccgtgcgccacgtgccttagggcgttaccacatcgtagtaaaccactgaagcatgtctggtcatcgccggtgaccctgccacggtgaaagccacgaatcctttgcgccagtgctctcccctctctttggctgccagcacgccatgcccaaattaggagccaccgccctcgggccctataaattaagtgtgccatcagctctgctaggtaatcacacacccaatgcaccagcccatgcctcagattatccaccagagcgcttcaatttgggattccccccaaattagtcaagaacaccgccgtgtgagtgctcaccttggctagctcgctacaggtccgttcacgacctcctcgttctcgtttccacatccctatgtgttgtagatgcttatcaac

SEQ ID NO: 77887 - DNA, 384 bp, Zea Mays
ctaacgaaacgacactccattctttgtcaacttgtggagaggtgctacaatggtgctgaaatcccgcacaaatcgcctctagaatcatgcaagaccaagaaaactttgaacctgcgtgatcgtggtcggaagtggccagctcgtgatggcaacaatttttgcctcatccatctcaatgccctgcgatgtcacaacatattcaagaaaagacacacgatcgatgctgaaggcacacttctcaaggttgccaaataaatgtgcatcacacaaaacatcaaaaatagcacgtaagtgttcaatatgatcatcatgagacttactatagataagaatatcatcgaaatataccaccacaaatttaccaatgaaagcacgtaaaacctc

SEQ ID NO: 77888 - DNA, 605 bp, Zea Mays
tacaaactctacacaatcgtgttcgtgtgtttacacaacttgtgtatgctgtatgattatcaaagctagatcatccatgagaggagagcacaattcacatgcgttcctttcattttattttttatttatcaagagacctcaatcggattattgaaatatcctgcaccaagacatacagttcaaatgaaacaaaggcattccatgtagaagcgtatttctctaataataaacaaagtacaataaaagagagacaaaaaaaaaccaaaggttccaccgggatttgaacccaggtcgccagattcaaagtctgaagtgctaaccactacaccatggaacctcttgtttctctttctcctagacaaattatatatattctaaaacaaaaactactctctggcaactgcagctgatagcagaatgcgtgttaggaattgctcaatcagatcccacagtttgcatcatctgtacatttattttctgtttactatatgagaatgaattctcctcgattttagttaaaactatattatatatgctcactctaactcttcttcaatacatgtctatatatccacataaaacaaatatatgccagccagttcgcc

SEQ ID NO: 77889 - DNA, 555 bp, Zea Mays
gggagaacgcgctctcataaggcttcgttcggccgggcacgtgagccctcgaagtaaagtgcgaccgagcagagcagagtagccggggcgggacggaattgtgaaatgacgggggcatcgagatctgaatcgcagcggcggagatccgaagcccaaattcagatagcccgttttggattcgcattgcatctataactaggatatccgtattcggcatcaaattacagagatacattactgtaatcacacccagggatttagcgacgatgagcaccgctcccggtactctccctctcacgaagttctctgtttacagaattccaaggtagcaactagaaatgaaaaccgctcaacactctccagatccggacgcagccggcctatctgtctcgtccagccaattgtctgcctcgcctaaccctaacgaagctggcaaaaggattaaatatactcccctactgagtccagtccggcccatacaccgctctgttgggcttgtattgtcgtttggtccttctcggttctgggctcccaacaggtcttgtgacattctct

SEQ ID NO: 77890 - DNA, 956 bp, Zea Mays
gaactttgcgccctaccctagtcatcaaatctgccttccaaccaggaagctgatctgcaatcttgtcaatgattggttgcacttggctcttagaaatcttcttcaaggataaaggtaaagccaaataactacaaggaaaagcagaaacctcacaagggagctgctcattcagaattgcaatgtcctgatcatcacatctaatagggtaaacattgctcttctagacattattcttaagacctgaagattccccaaaagggtgcagaatactgagaatcatctgaatatcactataccttggatgcaagaaaagagcaacatcatctgcatacaacgaaatcctctgcggtaaggatctagtagaaagaggttgcaaaggcccttctccttcagctttagataccatatcaccgagtatatccatcaccaaaataaagagcattggagacaagggatctccctgccttaaacccctttttaagtaaatgttctttcccgagattccatttaaaatcacttgcatggaagaggcagccaataacccgctaataatatctctccaaacgtgaccaaaacccaaattttgaagaacctccagtaaaaaaggctaggagactgaatcaaacacatttgtaatatcaagttttaagagcagccgaggtcttttttgctgatgtggtaacctagtagtttgttgaactaacaaaaaattatcttgaatgaagcgacctttgatgaaagcactctgttttggagacactatacagtgcaacttgctagccaacctgttagctagcagttttgtgattaatttggcaatgctatgcaccaggctaataggtcgaaaatcttttacctcagccacattcttcttaggaagaagagtcacataagttgtaacataagttgtatttagccgatcaaagttagcaaacttcctactccatactgctgaa

SEQ ID NO: 77891 - DNA, 289 bp, Zea Mays
tttgcatattgaaaagacaccgaggctcctgtgattggttaccacaccaagtggccgaccgggtggacaaatgaatggttttacatgaaggctaacgagaagaagaggaaaaagcttatgagtatggtgatgagtcccttaaaattgagtttcggcatgactcgacccttgtgtaacatgcagctggggtctgcctgccaactgactgaagtggaatttagagtcgtggcataacatattagcactagggacttggtgcaagaatatctagcaaacataacgtttccaa

SEQ ID NO: 77892 - DNA, 300 bp, Zea Mays
gcgcccgctgcttgactctgcgtttcgtgcctatgcctccgggactgcagggggaggagaaagatgtcgtcggtagctaaaaagtacagggcacgacaacacagttatctactagcttatctttcccttccccggtttggcagtttatctgacccctcatccactactgcgtgagtccctcatctactactgcgtgagtaacaagagtaagtagcatatcctttcaaaaagcattaaactgaattatgtgagtgaaaaaggttttgagagactctgcctgttcgattcaatgcagttgtg

SEQ ID NO: 77893 - DNA, 702 bp, Zea Mays
gtaaatatagttaattttcatgtgtttttttgtatggagagagtagaccatttatttgagacatcagtaagaacaaatttaggtgatccaaatatgttttcagtgatgattgatcatgcaattttgcttgtgcggttcctggctttgtgggcacatcgctgcagaatacctgaacactctgtgcgacttgcacgtggtcaaagattcccggccggcgaggaaagagcattgtgtggaagcgatttcacgtgcagcttcggcaggctcccgtgcttaatttctggtaaaagcctggagcaaaagtatctatagtgtagtagaagcatcagatagggagacgaaaaatgcatcgcgatgtcaaagaggcaaattgctgaagccttcgttgctgacattcctgaaggaaatgcttcgaggggagacccagacagactggttggttggtagtaacgtgaagtctaccgttcctagctttctattctattctatataacgaactcaggatctctccgatccatctccctgcaacgtactcacaggatctctctcccaactgattcccatgcgcgctaggataggagagtgagtgaccggtgacggcggccaggtgaacaacctctcctgtccatttattctaacgtgtacgccttgcccggatgttccacgtccacgtcatcgatccgtctcgagagtatgaacgag

SEQ ID NO: 77894 - DNA, 300 bp, Zea Mays
caatacaaaaaaatcatcttcatcactcctaggggatacttcaaatccttggcataatgtatagcttcagcaatatgctcttttgatagttttttccctgccacgtgacgcactatatatttcaatccctcagtagaggcttcagcagcaggggatttagactattcgttagtttttgtagcatctgaaggctctgctttgatattcttttcgacaacctccgtaggccccgtttctgtgggagctaagggctcagcttcaatttcaaacttggtcatgacggcttcggcaatttccttc

SEQ ID NO: 77895 - DNA, 1136 bp, Zea Mays
ttgaagctggtttataggagaataactttgatgtagtcggatcagtggctcatcacatagaaatcgaagaaaaagggccctaaagtcgctctgtcaggcaccctgaatcgaccgtggcatggtacaataactggaaaagatcaaggattcagagcacttcgccaccgatgatcgtgcgccatgatctgcgtgatggttgagatgtgtgcgtgctgtaacgtgaaaatatcgatggggagggtgaaaagaccatcgagggcgtgaacttgggccctgaagcaagcctgacgtacccacttgccgacgacgtggtcgtgcgaccgtcgccgtggtggccgccgattatcccggccatgccacgccatagaccaggttatcacgttgtcgtaggtcgtagtggacaacccatttactaccctgagactttaccccattgaacgccacgttagatgaactccactgactcatctcgacatcaccgtgagttcatccccgtccaaaattcggagcaaccgcagtcggcctctataaattgagtgccctccctgcttcgccttcttattacgtgcccagagcaccactccttgcctcaaatcatccaccatagctcgcgaattccggatttcccccaaatcggtcggaacgccaccgtgaggcatcgcaccgtggccagccgttcttaggttcgttcacgtccctctgatccatgtttctacatcctctagtgctagtgaaactcctggcctcagccaattgaacactaccacaccgtagcctagggaacgccgccgtggacatggcccatgtcgaccggccgttcctggttgtctccatccaagtttgcgcgagcaacgtagtcctagaaggtcactgattcgttttgagtccttggattgaatacaaccgactcgggtaaaccgaaacgggcacgccggtgatcttgctccgccgttgtcgtggatatctacgatttaatgacgaactggtcgaattaaacctatgggtgtgttcgggtagcctccgtgatggcgtccttgtactcgacaccaccgtaataggtcactgtcggtgagtattcgcgtctccgaccaagtattcgaccggagcgcagtcggggacttgagttatgaagaaat

SEQ ID NO: 77896 - DNA, 1435 bp, Zea Mays
atgcgagcctaacgaattcactttggcatccgtccttacctcctgtactggctctcaaggcatacaccaacaccagattaagcaagtccatgcttttgccatcaagaaaaattttgagttacacatgtttgtagggagttcccttcttgacatgtatgccaggtcagagaatatccaagaagctcggagggtgtttgatatgcttcctgcaagagatgttgtttcctataccaccattttatctggctacacccgactgggccttgatgaggaagccctgaacttgttcaggcagctgtacaatgaagggatgcaatgcaatcaagttacgttctcagtccttctcaatgcattgtctgggctttcttctatggattatggaaagcaggtccatgggctaattcttcgtagagagttgccatttttcatggctttgcagaattctttgattgacatgtactctaaatgtggcaagctgttatactcacgaagggtgtttgacaatatgcctgagagatcagtggttagctggaatgctatgcttatgggatatggaaggcatggcatggcatatgaagttgttcagctcttcagatttatgtgtgataaagtgaagcctgacagtgttactctattggctgttttgttgggctatagtcatggtggtctggttgacgagggccttgatatgttcgatcatatagttaaagagcagagcacactcctcaatactcaacattatggatgtgttattgatcttcttggacgttctggacaacttgagaaggcactacttttgatacaaaagatgccatttcaaccaactcgagcaatttggggttcattgcttggtgcttgtagagttcatgctaatgttcatgtcggtgagtttgttgcgcagaagctttttgacattgaaccggaaaatgctggcaattatgtgatcctttctaacatttatgctgctgctcggatgtggaaagatgttttcagactgagaaagttaatgttaaagaagactgtgataaaagaacctgggcggagctggatgattcttgacaaggttattcataccttccactctagtgagcgtttccaccccaggaaggaagatataaatgttaagattaatgagatatatgctgctattaaagcggctggttttgttcctgatctgagctgtgtacttcatgatgttgatgatgagcagaaagaacgcatgcttcttgggcacagtgagaagctggccataacttttggactgatgagtactccttcagacttgaccatccaggttatgaagaatcttcgcatctgtgttgactgccacaattttgcaaagtttgtctcaaaagtttatggaagggagatatccctcagagacaaaaatcgctttcatctaattacagaaggagcttgcacctgtggagattac

SEQ ID NO: 77897 - DNA, 504 bp, Zea Mays
cacttgagaacaagtctccaacattacccatgttctgttgtatttcaatttaattttccagattattcaagcactatagagattgatacagctgttatgccccttgcgatatatataaatatatgatgccacacaacactataaaaaaatatataggcaaacaaaattgtttacgaaggttgcgcataatgtgacttcaggggcttgaacaacccaccacaatccacgcgagtacaagctctagcgtatctggcgccaacgtgtgtgtggccatcagggccacgacaacacaacaagccttcgtaataagtgcaacagacacaattatggctcggtaatcggggtacacgataagtccacgcaacatgcgcaacgggcgcaattgtggctcaatgatcacgacaaacagacagtgcctacagggcatgccaaaaatacgtgactcagtgatggtggttcgactcaacgggagctgtccgaataaacgagagtgctacatagtaa

SEQ ID NO: 77898 - DNA, 447 bp, Zea Mays
gatagtcataccaagcacacacactccatgttccataggaacgcgacaaatgatgttgtggatatgttgtactactatgcttggatccaggtgattactcaagctatgctgagtaattaagggaggtgtccaacaagtaagactgaggcgtcgcagtatggactatagatgagtgaggaacaatttctttacataaatgatgtattttttgtgttggaacaatttgcttctagatgttagagttactgtctttatgaagcattccattccgtggatagtcgccaacgatgctgcttggcgcgcctgatgccattattgcactttggatgagttcaaggctaagtctatgcgagaaagttccaatcgtggaacagagtcgtatcgcagataaggaggtgatgaccactttcatttatcgaaatggtatatgtgattgattcaattttt

SEQ ID NO: 77899 - DNA, 708 bp, Zea Mays
ggggcagcactagaactctcagcctcatgatcatgtgagcgtggaggcataggaggcgaaggaggaaccccaaaatcatcatcatcatcatcatcaactgctgtagcctgagtgtcgaactgatgaagagctgcatcctcggcctgagagtcaaaaacaggagcagaagctggcacaggagtttcaggtgcaggacggtaggatccaaaaacgaggcgtgaggcctcaagggtgccctgaaaccgaggaggctgaatcagctgcgcaaagatgtggcataagtagtgagcatatggcaactgccgacgagcacgaatcccatccaaaacggtgtcctcgatctcacaaataaggaagtcaacgacatcaaactcagagtgagagaccagggcaccaaggagctagagctggatatgtgtggtagcctccctgtatcccatcctcggcagaagagtccgtctgatgagctcatataaatatttggctgctgtagtaaaatctgccggtgaatgttgcgacccatctgagaagggcgggcggaacagagccgcgacgtgagctgtacccggagccacaccgccgtgagggcgacgaggagggtcagaggagccgtagcagaggctgtgaagacgagtcgtcgactcggggaatgtggtgaaatttaagcctggaatctcggattggcgtgaaatttggcaagaatgttac

SEQ ID NO: 77900 - DNA, 488 bp, Zea Mays
gcctcgctaataattcttggtgtagagccctttgtccaacttcttgaattccccggcttggaagcgtggacaatttcatcctgcaattgagcaagaacaaaggcagtatccagatctttttggcactgaatcataacgacagatttaattgtggtgtaaaccatctaggaaacacatggtataatatagaggatcaaacatcacttgatagctattgagttgatcgaccaattgtgcaaactgatcgataaactctatgaccgacccacgctatttgatatgcaataagttcatgactaagagggcatgctaatcgttcccaaaattttccatttgcattagcccaaattcagaccatgtcatatgaactagcttaggctcaatagactgtaaccacctagccacagcccccaaaaaatgcatcatggtcgtggccaccttgacccatactcgacgatggacctcatacattgagaagtagtcctcac

SEQ ID NO: 77901 - DNA, 327 bp, Zea Mays
caccatgcttgacattcgtcaccaccttaagtcaaagctgtcgtccttcggccgaagcttcggcattcattgttaacgccctcagataacatcttcgtcttgaggaccttcagcagggaagatgatcctcaacatctctttgccaatgatatcttcgtcttgaggacctttggcggagaagaagaccccaacaatactgttgggggccatcgtctttagaaggtcctcaaaaatagggctaaccatttgttttcagcatactactaaatattataggagctttgtcaccagaaaagcattgacataactcgagaagtacgatgaagc

SEQ ID NO: 77902 - DNA, 846 bp, Zea Mays
tgacaatctttgtcatgaactagacaactttcaaggtttcctctacgacgaagcttccccattgacactagagctacagatgacaccctggacactgctatacagcccccacaatgccaatgtatgatggcctgactgatccaaagcaattcctcatgagttacgaagctaccatatcttcatatggtggtaactcagcagtcatggcaaagtccttggacatggcagtcagaagtgtgacccagacttggtactcacctcttcggccaaggactatcacttcgttgtcgaagctcaaagaaattcttctcactagcttttagggttttcattcgaagcccgttacctcgtaagacttgttttagtgcacccaggagttagatgaatatattcagtcgtttgttcgaaggtttctccagcttcgggcccaggcaccagaagtccaggatgacatcgtcatcgatgccatggtcaaggggcttaggcctggaccagcagcctagtattttgcaaggaagcctccccattcctttgagaaattgctgcaaaaaatggacgaatacataagggctggtaatgatttccgctagagaagggaagagctacacagatgcgcagaagcagctagggcttcgggggaaggttccaccctaggcatgttcgaagcattcacaacttgatgcagggtgaagaaaagatggcccagtctcaagctcagttgggtctcagcaagcaagctcccaacagcaaccttcacgtaagacgtttcatccacctgctttgagaggcggaaggggaggctgaagtttcggtggtaggttcaatgcacccctaaggaagccattc

SEQ ID NO: 77903 - DNA, 285 bp, Zea Mays
tgctgctccaagtaaaccgtcttccccttgacctgcctgaaggggcgaggaggatcctcgtcatctcctccccctggcgccgacacattctttgtgcacggcatcctgacctaacgactgcaaatgagagagagaagctaagcacaagtcgataacagccgataggatatcaaaagaatggatgtctacttggaaatctcacacgagaggtgaaaatctaggcaggacaggagacggctcacgggcaggcaaggtcactaaaatgacagaagaggtgagcacgta

SEQ ID NO: 77904 - DNA, 571 bp, Zea Mays
agagtacggaccgttcgcctgacaccatcatggacatatagtcgttgatctgtcagttctaggcgttggattgtcggttatgtccattgatctgtcagatctagcgttgagagatatcatactatccagatttatggaccatccggaagtgcgcataaattacaggaagtatacaatggctatatgtgtggttgagggctataaataccccaagtcagtccattcaaggtatccaaaaattacattcactctcattcaatacaaaagctagaacattcacttcaacatccatttgcaacaactcaaagccattcaaagcctctcaagtgccactttaagtgaattgagctagaaaatagataatgccttgttgtagtgatttgtgttgagtttgttgcttcgtttttatgatcttgagtttatttctcactctcactctcattctcattcttgtaagggctagcgagactctgagtttgtgtggagatcctcgtggagactacaatctcttggtttaagaaaggatactcaagctcgatctaagtgatcgcttgagaaaggaagatggttg

SEQ ID NO: 77905 - DNA, 424 bp, Zea Mays
gacagttcggcttccaaagtcggatggtctggcctttcacaaaagggttcggactttaagaccgaacatatatcacagcaaaaggacagtattacggataatccggtccccgagaccggaaagtccgccgtcacacaaagatcatttaattcctctgtggggaacatgatagaggaattcagagatcttgataaactaggacaggggtttacatcggccgatcctttggaggagattgacataggagatggtaaaactccaaggccaacttttgtaaacaagaccctagagaccaatcctagagatgagatgatcggtctattgaaggaatattcagattgctttgcttggaattacactgagatgcctggattaagccgagagatcgtagaacatcggctgcctattaaatctggtttcagac

SEQ ID NO: 77906 - DNA, 1380 bp, Zea Mays
atagggattaagccttggtgccatgaaaatttttgagaaaattggatccaaagtcgggctgtcaggcaaccctaagtctgaatcctcactagcagtaaagtaggatgaacttagagcttgatttagagttagattcattgcttgattgaggatagttgccatagttgatttgtagctggatcatagggccacaagtttgctgcagacggattggcatgttctagcacaaaaatccgagatctaggcgttgcaagttgctctgtcaggcgtctgaaaggagtctgattgtacagtgaactgaacatgatcctaggttcagcccccctcgccaccggcggcctttgcgcccgaaattgcgctggcaatcgcgattcgtgcctcgggcgagtggatttcgctcagccgtgaaaagatctcgtcgcggatgggtttgggttactatggcctcgctgtccctcgaccacttgcaccggtgacgtggccttgcggccgtcactggagtttgcatccttcaccgctgttatgccatgcctcaggccattaaccacgtcgtagtacatcgccttagtatgtctactcgtcgtcggtggtcttgccacggtagcttccacgaattgcttgcgccagtgacctcttccttctccggccgccaccgcaccatcccaaattcacaggccaccaccctcggagcctataaattgagtgtgtcgtcgggtccgtagggtagtcaagcacccaatccaccaagttgtgcctccaattgctcaccagagctccccaatttcggatttcccccaaattggtccaaaacaccacgccttatgacctcgccgtggtcagcgtgctccaggtccgctcatgcccctgctctttcgcttcagtatccttgtgtgttcttgatactctttgacccatccaatggagctagaatcctttggatcatcgggaacatctcggtcggtccattcctcgcgctgtcaccgtgggcagtatgattaagagctcgaactctacaattgatggaagggaaatggttgggaggggtcaaatttggtgtcaaccgcatcggagcaccggtagttgagtgatccggccgatgtaggctcgccggagctcggttctccgcccctccccgtcgtggacctcgggatgtaaagaaatagaacttgaaggggggttttgtgaatgtcactgacacagggaatagtccgttggacgcctttcaagttatttaaagcatcgagggcctttttgcaaaaccagcagcgcaggcgcgggcgcgcgcgtgctttcccccttctgtaggccggttgggctgaaatcagcccaacactattcattgtttttgctttttctttttctgccaagattagagaattt

SEQ ID NO: 77907 - DNA, 561 bp, Zea Mays
gttgacagtaaatagtttgagtgcctttgagaatgaagtctttttattcatgatgtatttcccaatttacagaatacaaggtcgtcccaatagcttttgaaatctagctaggggtaaaacttcctgagatgttctatattccatgagttcccgattttcgtgccgtccatttgagtaagacgatatgatccaggccgagtgacttctgctactatgaatggcccttcccatagtggcaacaatttgtgccgtccctcccccgttagaattcggcggaggacgagatctcccactgtgaaggatcgatgtcgtatggccttatcatgatagcgccttagagtttgctgatactgggctgactgaatcaccgtattcaaccgttcctcttctagtatatcaacatcctccagcctagtagcttcggcttcagctatgttttcgaagatcaatcttggtgccccaaacttgagatcagcaggtagcactgcctccaaaccatagaccatgaagaagggagtgtttccatgcaaagctcggctgggttgagttcttaggctccag

SEQ ID NO: 77908 - DNA, 321 bp, Zea Mays
gattggtaagatttgtgggacccattttctttcgctattccggggaagagatcaggcttcgtatcgcaccctttccttgagagtgcagattgagctacatgctgctttgccttcttgcgtctccctttataaacgagagttttttggtgtcgtcttcttcattggctctctcttggtaggaagagggcattctctttcctctattttagtccttcatggattcgggcaatcgttctacggacgaccgctccctggctctaaggcccttacgacaacgcctagtcgagtttgggcgcgagccctttaatcattgcagctttc

SEQ ID NO: 77909 - DNA, 713 bp, Zea Mays
gttcttaatgtcactagctgagaccgagaattatggctgaattatagcctttgcatgctcacagccagctttctcgaggagtgagatggctcctcgggcaccggcgaaggcgcagaagtctcctctattgctaagaatctcatcaaaagcttcggctttgccgctaatccaccggataacctcgtcaggatcaccacggataaagttctgctccgaagagaatgcgccaaccttagtaaaactatttttcaaattattacaatattccatagcaacattgtagcattcctatttagtctgacgaagctccttgacatttttctgaaccctcaatcgttccatattagatatctcgcattttgtttgttccacattgaaattttcagttacttcatcgagcttcttctccaatccttgcacttcggatctgtgcaatcccacctgaatagatagtgcatattctaaatcagcaatatgcttcgcatctttctcttgcttctttttaaactccttgattttttgatctgttcggaaaggctagacagcctagcttccctagattttaacctctcaaccaatgatgtgtcacgatgcccgatcttcacggcgtaggatcaatcttcagataactagcttcaaagaagccaagataacttgctgcaagcagcgataactagtgcaacctgacaaataaaactcggagccaaccatcg

SEQ ID NO: 77910 - DNA, 393 bp, Zea Mays
tgaccgcaagcaccacgggcaatccagcgcgttcccggtgatctatgaggttctagctcaattggacgggtcggtgagcatcaagagcaagcaagggtgccaaaacaagaatgcagtgggcgagattggacctaaattgggctggccacagcgaggtcttttctgcggcattcttgagagatttgggggaaattcaaaattgaagctctctgatgatcgattgagggcacggtttgggtggcttggtgcttgactaccctacggagctcacggtggcctcaatttatagtaggcaagagcggtgtccattgaatcggacgacgacgcgcgacggtcggaggagtgggaggtcactagcgtaaggaattcgtggcatctaccgtggcagccctc

SEQ ID NO: 77911 - DNA, 339 bp, Zea Mays
aagttttgggcaggttatataatcaaggagagcttccccatttccgctggccgctggccttataaattgattgtaatcggatctttgaaggcaagcaataatcagttgtctctcacctttctacctctgttaagcctgtggttgggaggcataatccccaccggagaagatggctgacggctacgaactacgtagccgcggtcagccgagtcaagggtacacagtccttgacagcttggtatcagagcaccgtcatcgacgccctgtccagacgagacaccgaggagcacgagctgctggcgtaacaacacctcgtttcgacttcatcgagcgtctatg

SEQ ID NO: 77912 - DNA, 1093 bp, Zea Mays
aatgctttcaaactcatctatgccattctgattaattaaattgaatggtccttgacatctagtcgtgagttgagtgcatacactatcaagcacccaatgccttcctccacccttgtaattaacctacaaagataattcaatttcttttagatacctaaactcattgtgatacacccagcccatgtggggttggccgaggcccaacaaattagggttgcccggagcccaacagttcattatgcacacccaactcagggaaaggcccaatcgccccaaaagactagtccaatgggcgaagggtggctctgccatttaaagtggcttcctcctcccaagttaagcgaggtgggataattctgaggctcacacggtcactgtccgactacaattgggccaactgggccaattgcgtctttgccaatgggtaatagtggaggatgtcctcatcattgccaccttcttaaaatgggccctagctctgataccagatgaatacacccagcccaggtggggttggccgaggcccaacaaattagggttgcccggagcccaatagttcattatgcacacccaactcagggaaaggcccaatcgccccaaaagactagtccaatgggggaagggtggctctcccttttaaagtggcttcctcctcccaagttaagtgaggtgggataattctgaggctcacacggtcaccgtcggactacaattgggccaaatgggccaattgcgtctttgccaacgggtaatagtggaggatgtcctcatcacattgggtcctccaacaatagtaactaggctcttgggcacccagattgtcttcttctttggaccaatagtaggttgttccaatggacttaggttttacaccactagtattttggtaagaaaatagcaaaaaccaaatctaatggacgatatagatttgttcttatttttgcattattttacaaatttcccaacttattgacatttaaagaaaaccgaagattactcctcacaaaactagtcatatgtgtagcaaaggtcacatttccatttaagtgagtatagcccaatctctctttgtagagagaaagtcttttgctac

SEQ ID NO: 77913 - DNA, 640 bp, Zea Mays
gtgagttccaaggggagatgtggtcgggttagagagatatggggtgggaagttgtctctgtcctagctgtccaaaccgagacaaaacttgtgccaagtcgtgtcaaacgatttagggttcggttcaaacttctccagggtgttctagaggcattttggcgccactttgtcaaaggggccaaatggttttaagtttgggatcaaggtgaacatgtttgatctttaaaaagggggtggttttggacttagaagaattctgatttttcttttgtgcttaaccctttggtgaaccttttggggttttttctgaattctttttggggtcactttcttactatcacttgtggggtatcaagtgtactacatcttttataattggcccaagtcattatcatgtggttttcatacccttttgtttatgcttacttctagtgctccacttgtccaaaaggggtttgaattagggcttgggcaattctccccattatatgtgcataacaagccaaggtatgactgggttgcacttacttaggatcttgagctccaactttggtgtacttttcccaacttaagtaacatgtgatgatggcttacttgtgtagtcttgagtgaaaaccctaagtaacacctggggtgttaca

SEQ ID NO: 77914 - DNA, 870 bp, Zea Mays
caccacgtggtcgtggtcgtggtcgtggtcgtggtcgtggtcgtggtcgtggtcgtggtcgaggtcgtggtcgtgggatgggagctcgactggcccatggtattgcagccttcttttccatgtgcaggaacatatcttccgatgtgcatgagctggcgaggcatcagtgggagactaacaacaaccttcatcgtcaagcctcttccatgggtatgccatttgctccccgctcgcctgatgtgtctcttcatcctcctccaccagaaatcaatgaatgacaccagcaggcctatggggtgcccttcatgatagctgaagatgatgaagaagaggaaggatattttgatgatcgtgagcagtatgccccgcctccccaccaagggaaccgggtcaatcctcttcatatcctccaccccatgatccatcgggcagctatccccccagctcagcctggggaagaaaactttgcggctaacttggcgactcaattctttgatccgactcctcctcagtggtgatttgtggttgatggttctctccatttttggtgctagtttccaaaaagggggagaaggtttgtcagcttggcagcttggcttggtagccctcaggggcttttaatttttgtaatgaacatctggtctgtaataacgttattcgcctgactattgtgatgcatgcggtgatggcctagagccattaacattttaatgatgtgatgacctttattgtaatagtcagtaccatttcatatcttatgctatacaatgatggatttgttagagtaatgccatttttatatcatcacatcttatataattctgttgcatccctcagtgtttgtgtattgtgttgttttttcactctctc

SEQ ID NO: 77915 - DNA, 607 bp, Zea Mays
ttcaaaactgctgtttagatcattattaaatgtgatagcaagagttgtctttgacaaagtttggtttagtgagaaccatttagattatatagattatgtgaaacttttttttctcggacacgtaggagatctatcgtatcctaaagaaactaacatacagaggagctgttaggaaagttatcccttttgctactgctgcctcccagagatgtctttcttcaccagctagaatctgagcagtcgtgatattatgtgaagtaacatcaaacacacatttgtttctatgaattcagatggtctatgcccccccaccagaataatcaagctatttaatcccatgtcaattgttcatccaccaagtcattgtcactactagacctgagaataaaaacggaataccgaaaccgaaatttagtacagtgttcagtttctactttctagtgcggtttaaaccgaattgttactgtccaagttgcacctgtccgtgggctggccatgcgagcttgctgctttcagtcttctcacgccaaagtcaccagccacggcccgcgggacgctagatcgccggcctaggaaccaagcagacagcaagcgtttaaacaatacg

SEQ ID NO: 77916 - DNA, 988 bp, Zea Mays
ccgctagcgatgaactgccgactgtttttccgagtcaaaggaacttcatcttcttcctcctcgtcgtccacattagcaacacaggcagcacacccattgggatcagcaacagatggagcacccacattgggatcagcaacagattgggtacacccattggggtcagcgtcagtaaatccagtcataggcacttcttcagcagcaggaaccgaggtaccaacgtcccgatccaaactagatactcgtcggaggcgtctctttttctttttctgctcatcagcagaaggatcaggttgactggctcggcaagggcgcctcaagcgagtactggcaggcttctgagtatccaaagttgtatcagcctctgggaggggcgccactaccaatgccccagcaggagcagcatcagaagagtcctcagccagtaaatcaagcatagcgcctatctctgcatcactagggttcaggggcacctcaaaatggacctgtcgttcatcatcaggaatctccccgagcgaggctaccaaggcactaacttcttcagcagaaggccacactctaaggcccaaactaccatcagtgacaggaggattcgacacaaaaagagtgaaggctttgggaggaggcaagttccaggctgagaatgctactggggcaccaacatttgacactttgcctctaaggatcatctcaagtcagttcaccaagtccatagagggaattcttctgttagtaacccgagttgagtcggctaggcctcgatacagataagctaggtatgccctgtctttcaacggctgaatattgttgaagacaaaatcagcaaccacagcttcagcagtcagacccctctccttcagcaatccaacttcagccagcaaagcacctgcctcagctacctcctgatctgtgggggactcggtccagcttgggatgcgaacatccatctgtcttcccgaccgaggggggagagagtttccataattct

SEQ ID NO: 77917 - DNA, 435 bp, Zea Mays
caaacacccactttatttccaacaacaaccatctttgttgtgcgcatcgtcatcactacgcgagagctcatggacacatcaccgccaccgttatcatgcgcaaggtcgaggtgcgtcacccatgcctccgacgcaatgcacgacaccagggatcgatatgccactcatgtcatcgttgtatgcccatggcattgccaccatcgttccacacgtggtcgtgcttaaagaaaccagaagggagagaggtgaagctagggatttaatgagatatatgtttatatagtgaatccaactaatgaaatctatcttaggccatccaacaactaaaaccaattgtatcacgtcatgtcggtccattaatcgtgttgtgcttgtgtcaacactgcaggtcgaacctcaggcatggctctagaccatgtccatgtcagcattgac

SEQ ID NO: 77918 - DNA, 507 bp, Zea Mays
gaagaaagcaagtgatcaaagagcaagtgaagagaacaactatggcaagcaggctatttatagaagccgggtgtgaccatccacttcctaccctgctcgccgaacagtcgcaagaattcaataagcaattcaagccgcctgaaaatgagtcaggcaacaggcaccgcttcatgtaacatggcaccggttggacctaagtcaactgctcaggcaaatgattacacctctccgtcacatcaagttactactccaggatagcgcgataaacactctgcacaccaagacaccccttgggcacacccattgggtgtgtcaaccagaattttcaaagattttctgaagaagtgatatccacaaaatatacgcaatgaatgtaccacgacaaaaggaggagatcggctgagatggaaggaagtccaaatgtggctactgaagtgcaagtctaatcaacagaagcattgaagcacagagcagggtgatgtccagctgagagccatctgcctcaac

SEQ ID NO: 77919 - DNA, 506 bp, Zea Mays
cgagcgtactttatgcatgagacccctagttactcaatagataccctgatggaccctagaggggcatgattgataagacaactagaccaactaacttcctattttgttgtgcactatagttctcaccagctttcgagtgttcgggcccacgtatcaggacccaacatttcgtgtccaccatttgtgctatgaagacaaaccccacgatggttcccaggaaaataaacactagggccaactcctctccctaagacgaagtcatgaaggcatccctcgtcgcaaatgctaagaaagccaaagtcgccttcgctgacaaaatcctaccatccccataaaaatcacccctctgccatcaacaaatcggaaggcaagactcatcaactttcccaccaccacaaagagcaacccactctagagggaactgtccacaccaatagctcagagaccacaagccatgcccctttgaacccacagagtcacttttaccatgccaaaatctagcctga

SEQ ID NO: 77920 - DNA, 404 bp, Zea Mays
ctagggatgatcaaggactatgacctagaggtacactatcatccagggaaagccaatgtggtagctgatgccttgagtcggaaatcacaatgcaactgtgttatgatggattctcatatcaacaccctatgtgatgagttgagtaaaatgaagattgaagtgattccttctggtgctttgtctcacatttccgttgagccaactttgcaaaaccagataattatggcccaactcagtgacaagggagtgcaaatcattaaagagaacctccatcagaagacagagaagtataagtgtttccgccaagatgggaagggtatattatggtttgaaagaagattggtggttcctaaaaataaggacctcaagaagatgatcttggatgaagctcatctctccgaatt

SEQ ID NO: 77921 - DNA, 618 bp, Zea Mays
acctagtacatttatgagattaatgaatcatgttcttagaactttcattggcaaatttgttgttgtctattttgatgacatactaatttatagtaaatcccttgatgaacatgttgaacatatctgatacgtacttgctatccttcgagaacaaaaattgtatgctaaccttgagaagtgcaccttttgcaccaacaaggtagtgtttcttggatttgttgtatcaggacaaggtgtggaggtagatgaagaaaagatcaatgctatacgcgactggatgcctccacaaaatgtgagccaagtgagaagcttccttgggctcgctgggttctaccggcggtttgtaaaagactttagtactgttgctactcccatcaacgaattgaccaaaaaagaagtacattcaaatggggagaagcacaacaaaaggcatttgaagaattgaaaacgaagttaacaacaaccccagttcttgcactctcagacttcggtaagacatttgaaattgaatgtgatgcgagtggaattgggatcggaggcgtgctcatgcaagaacgaagaccaattgcctacttcagtgaaaagctaagcggtccgactctaaattattcagtttac

SEQ ID NO: 77922 - DNA, 315 bp, Zea Mays
gcgtagcaccctacttccttttgaggcggtgtattggaatttctctagggtatgcagattataaatgagctatgatggtgctcaagtgtcgttgatgagggctagtgtatgatgagatgaggtgttttgtaggggtactctctcggccttatataagtgacgagagagttatccctttacaagttgtgatcactatctattctacctatctcctcctttatcacgacatgtagtcctgcttatctggagttcaatcacttcctcagccgagttaacgccgagtgtttagccccttcgggtttgtgtaacttcttc

SEQ ID NO: 77923 - DNA, 653 bp, Zea Mays
atgaaatcccattgttgttgttcccgtttatatctacctcatgtagcacgtgttagaaggagtggttgagcgccagaacaccagttcagtgatcgccggtggggggggggggctccaccggatagagcgcggcgccgccgcctggcgtcgttgggaggaagaaatgcgtgcgtcgcagatccacgaaggaacggtggagattagatcgtcacctacccctttcacgcaaccaaccacgaccgttgattggagattgtgcggacaggatcagatctcggtgttttatatcgggtgcgttgatgcaggatccaatggtagcgattgagtaccggttcagatggattagatctaatttgatccgttggatctagatcagagggtatgcgtagcgtaccgattcagtgtggtggccgatctaatctgggtcgtccagtgaggatccgatgaccagatttcttgcgtaccccttcgcaggtacatcttactaaagagcccctgatgaattaggcaataaatccgcagtacccctcactgtgttctgagtctgtggggttttgcagattaaacccccgactctctggattttgatgcgtggcccgagaataaggaaaccagataaataatatcagaaattgattttcaacacaaaaata

SEQ ID NO: 77924 - DNA, 499 bp, Zea Mays
cgcctggcatgcttgtatatcattcccaagggcagtagatggtctcctaatgccgaagagagaccatataggacgttgaataatccccttgatatcctccctttcattcaggtcattcttcacgtagaaccatttctacatccaggcccccagccatctcttccaaaatgtgggaactggatagcttgtctcagagcgaggcacgaagccataacaaccaaagttgttgtgatactgctcctttccggtagccttcgtctcataagacagctcatggatgttgtagaagaattttgcatttggctctagtccctggctcctcatggcccatataaagatccccaccttgatgatagcttcgggagtaagctgatgaaggtgaatttcgaaggttttcaggacttcgaccagcaatttatccagagggaaccgaaaccctgccttcatgaagcttctataaactaccacttcaccagcttcgagcagagggacattattc

SEQ ID NO: 77925 - DNA, 315 bp, Zea Mays
tcgtttattgtccgttttgttgacgaggacgagtaagaagaataggaagtccccttaattcagaagaacagtcggtgttacagagtcagtggggggagtagcgatattccttctccagctttgtctgctcttgttggtctgcaagaattatccatagcaaattttgatcaggctctcgaagatgtcgttcctaaagatatgttgtccgaaccagctgatggtgatatgatgtacgtttgttctgacattccagaggtgggattagagttatcccgagcagcgtctcgtgcctcgtcgaccttggaaggcggtctt

SEQ ID NO: 77926 - DNA, 305 bp, Zea Mays
gccccgctcaggctcctgtgctatagtggcactatagctggagcgttcgttgaaaccaaacaaaaatcaatctagctccaccagctctactagaggagagaggagggatgagggaggaaaagatctctagctagctgaaaccagtgagagctctgccacaagaggcctttaattgctgatgacatgtccccttcttacactggctcgtggaccacaaggcaccttgcaacgacaagcatatgacagtatgtcacttaatgagaacactaaggaccaacgacattgctgcaatagcgatactcagg

SEQ ID NO: 77927 - DNA, 590 bp, Zea Mays
ctaaaagctgactctaaagctacacttgaaattggtatagcaagcacatcacgagctaagcaagatagaatcggaaacctttgctcagatgccttccgccacactagaaggtcaagcttcatttctgtgtcttcagtttcttcagcaagatatttatcaagtttagacttgttattgctattagaaccagttcctagcttcatccttttagcaattacttctttcagtttctctcctctacctccctttgatgcaattgaatcacttacatcggttgtctcttcacttgacaaatataatttcctgtattcttcaaaaaggtcatgaacacaattattaatagcttcccaaactactttccccctttcctcaccaaatatctcttcaacagttatctttgtgtacatagataacttgtatcttggatcaagacaaccagcaacaaagatgagtaaattcatgttttccttctcctttccctttcctcttcctttctccttatcattggcattcccattgacgtttttgctagtgtgccaaagtccccagtatttatcaaatttctcttccattcttttgaccattggtgc

SEQ ID NO: 77928 - DNA, 929 bp, Zea Mays
tagtttagttcaccattttcagttgtttctgttcaattactaaaacctttttcttatagaggcatacatacattccggtacccaaaatactccggacccgactatgccaacttcgcagccgactacggagttgacaggcacccagttcgaggaaatacatgaaatgcaacaacaaatgcgtcgtgcatttgagggctgccctgatgatttggacgttactgcgcccatggagacgaactcatactcaaactctaaaaagcaggtattatatacaatctcaccattgttacattatatgttaatttcccactttgcatccaaatcttagacaaaaccataatcatgtcaacaggattaccattttaatgttggcaacaaactgttgagggacataaacatcccacctcaacatataccagactgcaacattatgagctcatatacgtcttcacacttaccgatgtttgatgccacaccgcaaaaacatgtatgtgtttcatatttgttttatccttttgtaatctcaattttccattaaatgtaattcacacctgactaaggttttaaacatactatcattgatttttagggcagggaggtgacattgatgcatctcatgacactcaaacttacacgggcaccctttttgatcagacacctaatggtcatgtaagtactctaattatacatttatgaccacataacttcacgtaactcgatcataaactagtatactctctacatgcattgtttttcaggttgcatctggagaggaaacacacaccttgcacactacacatgtgtactcactgccacagttcacagagatggactatgctcggttgctccatgattttttgtgctccccaaccattgacccaaacaagttttagtcttcaactattaagacaaacagaacatgtttgttg

SEQ ID NO: 77929 - DNA, 485 bp, Zea Mays
acatctcgtcctcgagctagaattgtgggaacttgtcgcggagcgtgtcgacgtcctcccaggtcgccgaagccggtgaggtgcccttccaatgtatgaggacctgacgcacggcgcgtgccaggcgcgccttgacaacgcgttccagttcaggtgtgaccacctcgtgccggactggagggaggggtggaggcgcttgcggaggttcgccatggaatttcttcaggagttcgacgtggaagacgtcgtgagttgagcttgcggtggtagggcgagacgaacatcgacgtcgttgatgatctcgatgacacggtaggggctgtagaacctaggcttgagcttgccacctgaagcctggggaagagacgtagctgcgcgttgccggaggcggagaagaacccagtcgcccacttgataggtgatcgaacgatgagcccgatcatagtggcgcttctgcaccgcctgggcccgctctagtcgtagac

SEQ ID NO: 77930 - DNA, 603 bp, Zea Mays
gatacacgtggtcccaattagatcaattgaagtgcaaaccaatgcgcaatgtgggccgcccgatctgggatcagcgggtcacagcgcgccatgccatgatctaactggaacctatggattaccatccggcggccacggttttaaacgccgaaggggtaccctcccgtctaatcttaatcgcccgctgtataatcaacgatcccgtgctgttcttcctcaacaacgccgaccaggtagcgtcgcgctgcccttgcatggcggggtctcaccgacgacggcaaactggtgcccaagtgcccaaatccgacaaccaatataagaaatagggagagaccactacgaacatgatatatagagggatttctcaccttagattttgggagagatgactcgggacacagccattccatgatgcatggtagtccggcgacgacgcccgcgctccgatgtggaaaccgttgacaccgaccgcccccaatgcctaaccggtcaggcacacaagcggtggagcaagccaaactccccaggcgccactgttgagtgacttctcatccaccgtgaccacaccatgtgggactattcccaacagaagcatcacggcaa

SEQ ID NO: 77931 - DNA, 676 bp, Zea Mays
tatcttcatacttcatgatattagattgattttgcaccatcacatgcatatctctttactggttgctacattccacgacatgctaactgcacatgtgcacacgataactctagaatccgatatgtatgtggtactttgcattacatggttagtctcgttgtttactctagttggacttctttggaggtcctgatccataatcgcgtgtgtgattagcagttcttagcggtggatgttcctaggtttatcagtatgatacatgtagtggatcgtatctaggatggttctatatatggtttgtcgtctatttggccctatatttggttaacgaagtgggtaataatggtgctcctctgactcgttgctccctccttggccatgcacgtatcctgcaacgctcttgagtaagcagccgactcaagcatgctttaggcaagctctacttccgtcatcgttcacttttagtgcatgatcatatttattgttacattaataggcgactcggaaaagaaagtatcatcgacacaaggaaccgatcgaggcaaacgacataggacgattcctgagattcgtatgtaatttaacattttactggttattgtgcatatgcagagccatacatcgacattgacaccccttcctagttgcaagtccatataggtggcactccctaaac

SEQ ID NO: 77932 - DNA, 530 bp, Zea Mays
gagcagtcaagcacgtgagagtaatgcagcctgccgcatcgcaccaacatagttatggttgtggagaccagtgggctaccaaatcctgccacaatgaggctggtgccacacgagcgtagtactaacatcatgggacacaagccaaataatacactttcagatcgagaatgatctagtagactactttgggaagtcgaactagcagagtgcattggggagggattaagagacaccttagtttatgactcatccaaatatcgatccatgaggcatcacaaggtctaggccaaccttcaagaccacctctgtagaaggcttatgtgccattatcagcacttggggaaaatcatagctgccactagcatgacatgcacaaggatcttgccaaaggaagacctgcacaatatgagtaaaaataccaaaattatcctcaaaattatgtgtgagataggactccttaggcatccctaaggcccccttctacctcagggcacctagtaggtagggtccatcgaggccctaggcacccg

SEQ ID NO: 77933 - DNA, 550 bp, Zea Mays
ctggtttcttgtattctaacacaaatgtttctgcttacctcctttgttggagtcttatggacactttctatcaattgacactttgctcataatgctgctacttatctcattgtgtgagtttgcactacgtctaaacacttctgttgcctgcttcaactgttgatgatcaagtgatgagcaattaaatgctccaatgctatgattggagttattctcctatgattcccaagtttgaagtctgatgatcctgtctttataccattgtttgccatattctgaacagaatggtaccaaaaaacaatgattgtcactgttctctttgaaaacttcaagcattttttaattgagcgtcatagcactgtgattatcctatttcagtattgttgtattccttaccaagatacataggtagtttttcttgcctgtttccctggtcagatgatgagtatttaactgcaacaatatgatgggtttattctcctgtgattccctcgttttaagtctctgatgaccccaccacatttttctgattttctttgcattctgtttg

SEQ ID NO: 77934 - DNA, 947 bp, Zea Mays
ggaaaaatgactagaatacaattagttatgggtttgcacccaattttgatcatgccagtggtggtcagagcagtgtgtatgcatggcggggttcaggagacgatgttacttgatgtgcatttcaactaggttgaatctatcactcatcaactttttatatacatgcaatcgctttaattaggtcgtgcttggtttcggacgagctaggtgagggttgagaagaaaacggtttcattaggttttcttttagcgaggtttaatttagtgtcatctctcaacggacacgtacatataccttcatcttggtcgtatatatatatatataccccggccggccctaagaatgctctgaaaattgtatgcagacagtaaggcttcaatttcacgtgaagtgaaatgcatgtaaaccgcataattaaatgggtgtgtctgtattgtagtgtagcgacatgtaagtattatttgggtcgatcaaccatcatttcgggcgtttcatcgatctgaataaatcgagctgtagtaggccacatatcaatggttgcttggagatgcatgcatgcatatgtatccgggcctccggtagagtatatatggacaaattcacgtgtcacgggggagaaggatgggaagccagcctttcggcttgctcacgttacgtaacttttttttgtccaagtgcatgccttggaatcgatcagtcactgatatatggttgtgaaagctagctagcctagccagacagccctacgtcgtgctcgtttagttattagtgcttggagttggactcgatcagtcatcagcctgagactcatcaagtatatatatatatacgatggcgatgttaattcatatatatatatatgatagtagctagtgtatatgcaaagcgtcctcctaatctaatctaatctaatccgcgcgcttgcttcgctttgcttgtcccttac

SEQ ID NO: 77935 - DNA, 292 bp, Zea Mays
aaattagggaagtttaacttaggacaatgctaaagtgacctataacttggaacggagggagtatatatttttttagaacgacgcaagagagctgcgtggcatttcattaaggaagaaaataccaatacaacgagaagggaaagccctcccaacaagacaactcacacttacaatacacaaaacaaccacggccaagcagaaccatccaagtggcaggagctttccaaaggaggagctcttaaaggttagaagctccagccaaacaccacaagtgatacaccatcaatcctac

SEQ ID NO: 77936 - DNA, 313 bp, Zea Mays
gagaggggtctgactgtagaggctgtggttgctgattttgtcttcaagaacattcagcctttgaaggacagggcatacccggcctatctgtaccgaggtctagctgactcaactcgggtcactaacagaagaattcccgctgtagacttggtgaaccggcttgaaatgatacttagaggcaaggtatcaaatgttggcgcccctgtcgcatactcggtctggaacctgcctccttccaaggcctttgctcattttgtgtcgaatcctcctgctgctgatggcggtttgggccttagagtgcgaccctctgccg

SEQ ID NO: 77937 - DNA, 706 bp, Zea Mays
agaaaatgaccaagctttggtttagtgtttgaactaacaatgacataagtacggtgttatgtgatgtctcttatatcatcatgcacaactatggagcacaaatacggtcgacaacattggagaagattaagcaggttctatcgatggactaaaagtggtgaatgatggacgaaggcttagagaaagagatcgagagcagaagaatggactacgggtgtataacacccaagcacatcggcgagtaagtgtacttgtggagctatgaagatgacgttgacaaagtcaagcgagaacacatgacatggtgatcgtttggtcgagagtagactgtgacacacgtcatggttagggaggaggcatcgaggatacgtttctctagatgattggtggtttgggcctcaaaacgaccaatagatagtttaccgagtttgtgcctcaaaactcgagatgaagttcaggatggacattggggtggcacatggacatcatcacgaagcttgcatcaatgcaaagcaatgtcgtgaagagcttgtgatcatcagatgtataaatatctacttggaccattatgccacaaggcattagtggttcacaacaaatatctaagggaaggcatagaatgtatatggctctataaataagacaagaggctacccaagcaaacccatctctttcagtgctttcatttaagcgtctagacttcact

SEQ ID NO: 77938 - DNA, 1865 bp, Zea Mays
ccatttgatatgtggcgacactcggttgctgtatttcttggacgaaaacctaggtgaaacttgagctcgactggaccctagctttgatagtgcgtcagccgctgcattgcgatccctttccacatggtggaattctaatccttcgaacttgtcctccagcttctgcactgttgcacagtatttgttcattgagtcggtcgagcaatcccagtctttgtttacttgacttgtgaccaccagtgagtcaccgtacaccattaatctcttgatgcggagtgaaatagcgacacttagcccatggaccagtgcttcgtactctgctacattattggatgctggaaacaagagttggagtgcatacttgagttgttcacctccagcagtgataaagagattccctgcccctgctccttgcagtctcagcgagccatcaaagtatatcctccatatttcagtgacctctaggctttccgagacttggtgctcagtccactctgatatgaagtcgaccagtgcctgagtttttatcaccgtgcggggttggaactctatatcatgagctccgagctcgcacgcccacttggctattctcccaacaatttccttgttctgaagaatatcgcctattggaaatcttgtgactactatgactttgtggtcgtcaaagtagtgctggatcttgcgagcggttacaagtatcatgtataatagcttctgaacttggggtaccttatctttgaggttccgaggacttcgctgatgaagtaaactaaatgctacactgcatatgcgtgcccttcttccacccgctcgactactaacgcggtgcaccacgtgagtcatgcaggagatacatagcagcaaatcttctgtcggctgaccgggcgtagcccggcgtggtggcttgagtactggcggagtggtcaagaatttctttagtgcctctagagcctcctgtgcttctgtggtccactaaaatttgtccaccttcttaagcaatttatagaatggcattcctttctcgcttagccttgatatgaatctgcttagcgctgccatgcatccagtgagcctttgtacctttttctgtgaccgtggcggttccatcctcataatggcctcaatcttctctggatttgcttctattccccgatgactgaaaataaacccaagtagctttctggctggcactccgaatacacatttttttggttttagcttccatcggtagcatctcaagctgttgaagactagttgcagatcctcggtgaagttttctaagttttctgtcttgataaccacatcgtcaacataagcctccactcgcttgtctagtgatcgactaagcatgtctagatggctctctggtaagtcgctccagcgttcttgaggtcgaaaggcatggtggtatagcagaaggctccaaatggtgtgatgaaggcagtctaggaaggagagcatagagcagccagtggtcgaatcaactacctgatctatcctagggagttcgaagggattcttcgggcagtgcttattgagatcaatatagtcgacgcacatgagccaatcaactttattctttttgagtacaagaatggggtttgctagccactcagggtgcagtacttctctaatgaatcctgctgacactaggcgagctaactctgcacgaatagcctctctcttatcgggcgtgaaacgatgtagcttctgtcggatcggtctcgcctaaggatacactttaagtttgtgctcggccagttctctcgggactcccggcatgtccgcaggttgccatgcgaatacatcccaattatcttgcagaaaccagacgagcgcgctttcctatttgttgtcgaggctag

SEQ ID NO: 77939 - DNA, 635 bp, Zea Mays
gggaaacctcggtagggtagtccgccgccgtgaggaactccaattcaccatcgttgtgccgtccggttctagtcagaagtcttctcctgatcccggggaaccgttcctatgcatcgtgggggtgcgcgtgctgataggggtgctgggattgctcgccagacttggaggagggccgcccgaccgccaatcgccatcactgggggtttgtgtggtccgatagctggtaactatccccctttcgatcgccttgtcctgttcttaacgtagaatcgattagtcgcaagattcgcataccgaggctcctgcgcacgtttgtcggccatggctgccgcgcatgcgtcctgtgcgtcgccgttcgaggggaagggttgagggagatgagcagtggccattgatccttggatcgacggtggggatggggttaggggataacgtttcagtgggggcgtgtggaccatggatatcaccatgtgcggctaagatttgatcacgggtacattagtgcatggatgtcgatctatgatctggtggccacctatgtgtaccgcttcacgatctattttgaaccattgatctctgattcatcggtcgaggttgcatgagcacgtctctcgccagaatgtttggctaaagag

SEQ ID NO: 77940 - DNA, 396 bp, Zea Mays
gaaaatatgtggctatataagtaggccatataggccaaccttagaatagtagggatgccctagcagcactcctctgatcggtgagaagacgttctttccagcatgcatgcattataaactagaagttaagaaaaaagtgcatcagataatgagatgagttggagtagacaaatccaatttaacccacctccttttaacaacccaggcacacgtttctccttaccactaccatgacacttacatctaaccctctttcacatatgacttcacccacccctatcaatggaggagacacttgcttcagttttgactacctttcccatgagggttttccctccatcttatgggaggtgctctgctccgctggttaccctacaccccctctgtatatggtgc

SEQ ID NO: 77941 - DNA, 901 bp, Zea Mays
atgaaatgtcaccctcatttggtcgaggaggattgaaatctctggaacgagatctgcctatatgggttaatgaaggcatctggtgctcaccatccccaaaacctagctgaatgtatctggtgtatttgccaaggaagggaaatgtttcttcctgagagctcgggtcaaggttttggtggttactatggatcccgacgacctagtggtgtagggagactgggaaaagaatgtgggtcgtcgttgacgaggttggcttggcgattagccgaggacgaatgaatctgagaaaaaaagtcatggtatccattccctccgtgcgccatggattagattgagtggggtggtgggggagacatgggaatgaagaaggcgaaggaagtaccacgtcgatcttctggacgacggtcgcaaaaagacgatgcggcggtggatccgccttaccggaggagctagtgggagtgtgaccggaccgagaacttggcggagattcgaaggagtcgcggctgatgaaaccgtagggagacaatgcgaccacagatcctgcttgacgaagtggacgcgctcacggatctggcttgccgatggacgacgctatttgcaaagtgtagtttaaaataaaaagtaaaatagggatgagatatgtattcagttggagatagcctaagatcatgtttcttgcgggtgagctcaccttcattgttgaaatattgtttttggctttcatttcataaagcggtttacaagtgagactaaaactgttttttaaatgtttgttaaaacatcttttcatgcatcgaaatcctatttgattctcatgaaccgagagaaatttgaaaatgatctgataattaaataaaaagcatttttaatattaatttcaattcatgaaattcatatgacc

SEQ ID NO: 77942 - DNA, 975 bp, Zea Mays
cttcgagttcggccagttgtggccgttctacctgaacggcaggtcacggtcgcgttcggcggctcgacggtgggacggcgacggtgcgaggtacatcttgtaggaatgatactggaatttcttctcgtctgaatcagagaatggataaattggggaatcttcctattattgattggattgggggagttggtaacaaggtttcacgtatccaggagcgtggtttttccccaacttataacatggaaaggagtagcatgcatgggtgcgggactgaggtgattaacaagcgagctccacccaagcttgcaaaggaatccatggaggattttctagatgctagtttggtcagggagacgatgatggaagggacaaaggaggaagtctgggagcgggaatccatgagcgggttaccgacgaaaaaaggcatgtcatcggcccaagtgtttgggcactcctggaggcccatcaaccccacgtggtgctgggttccaagaagcggaatccacactaagtcatgctaccctgctcgaccggacgaagtgcgtaggcttcggctctctgccaagtccgtgtctagggttagacatcaatccttggaggctcgttcctatgcccaagtagtgagggaaggcagaatggcttggaggagggatcatggagggagcaattggaaacggcgccaagatgaatggatggaggaagatgaccttctggaaggggatccctgcagagaacaagatctgcgcgctaaacttcagaggggatcaggagattctactgacaggatcccagcagagcaggtacgtgccatgccaaacattagacctgcgggtaactttgggaattggaaaaagggtcaaggaggccgtggttttgctgccaggggaggctttggaggtcgacggggtttgggacgctctgaatttgatggtcaaggaagtagacagtttgagacaaaggaaaaattccgtggtg

SEQ ID NO: 77943 - DNA, 777 bp, Zea Mays
ttaggtctgaattttcagaaacagtgaagttagatgaacttagagctcgattttaagtaagatcctgtgactatttgagggtgcacaatgtaacaaagttaaagctggtttattaggcttcaactttgatgcagagtgatggttgggtcaccacataaaatatggagcaaattgaccccaaacatgctctatcagaccaactgaagaagctacgtgatggtacagtaacccgaaagatctgttggttcagtgaaccggccggcagcgactctgcacgtggattcatgccggcgaggtgattcgtgcttactcaggcccagataacgccttggggtagaaagatcttcacagctattgagctaggggcactgttccgtccggccgccgtgtccgcttagccccggtcgctttggatctaccctcgtcagagttagacacctcgcggccttgcgccatgtgcctcggcactttaaccacaccgccgtgactcatgtaacttatccagtgatcgccggtgaggttgccacggttatggacaccaatcgtatgcgcagtgcacctcttcctctctgaccgccaccgcgcaagttcaaattcaccggccaccgctcaaacacgctataaattgagcacaccctcggctccattaggtattcaagcacctaatccagcaactcgtgcctcagattgcccaccagagcgtgccaatttcgaagttcccccaaatcggttttccgccaccgtgaaagggctcccaccgtggccagtgcacttcag

SEQ ID NO: 77944 - DNA, 517 bp, Zea Mays
gtggcgacgacgacaagggcgacgacggtagtggtggcagtgacggtggcggcagcggcggcaaggccagtggcataatgccactggtttaaatattaggatagatagtagtagtagtaatagtaactagcagcagaataatgtagtgttagttagtagcatagtgtaatgtaggtagtaagataatgtaatgtagttgtaagggtagaaagagttgactcataatgagtcggcttcgagtttgtgctaccccctctattacgaatcaaggacgcggttgctccaaatggttatcgttgttttgctttttcatttgcgcgcttgaaggtttgtccatgcgcctgacagtgatgacattttagaggtaatgccctgcagtttttacttttctgagtggtgatctggcactttagaggtaatgctcgacctaaggagtccatttatacccatgccaacgtgccttttgatttccgagccctatcttcactttttccctctgccacttgtctgctttcgc

SEQ ID NO: 77945 - DNA, 405 bp, Zea Mays
acgatgcaagcttgcagttgcttgtcactacagttgacggcggcctcctttagatgttcatactgctgcatcgactttataaatagattcgaatagccaagagattctccagttcgtgaaaggcactgcgctgcttcttgtgcacctcttcttgtagaacagaaaataagtacagacttcccccttgaatgttgcatcagtatatctgtaatctatatttcatttatatttctgcttttgaattgtaaaagtatgattggcatgatgtgcaatgcagctactgagtgaacaaaagatgttacttaccataaataaaactctgcaacctctacaagttcaaacaaacaaacaaaattaagcagtcagcattatataaaatccaactatttggcacaatatgataca

SEQ ID NO: 77946 - DNA, 1058 bp, Zea Mays
ctcatttccttcagtttcttgtgtcagaacagccctaatgaccttatcttcagctgcaatgtataatcggaatggtactcctgctcgtggtgcttttaatacgggagccgaagacaagtattttttaatgagatcaaatgcttcctgctgctctgcccccaagcgaattcgacatcattcttaagccaaaggatatgggtgaatgcatcaatattcccggctaggttagagataaaccttcataaataattcaccttgccgagaaacttctgcacttcgaccttacaggtcggaggtcccacattccgaatagacttaattcggtcagggtctatctctatgccatgttcatggatgataaatcctaaaaacttaccagccgacaccctaaaagcacatttacgtgggttcattttcaaaccataccgacacattttatcaaaggctttgcgcaaatcagctatatgagaactaaactcagccgatttgactacaatatcatcaatgtagacttccacaatttttcctaacaactcatggaaaatcaaattcatagccctctgataagtagcaccagcatttttaagaccaaatgtcatgacaacccattcaaataaactaatgaagcctggacatatgaaggtcgttttggacgcatcctcttcggccataaaaatctgattatatccgacattaccatcaaaaaagctaataattctatttcctgatgcattattgattaatgtgtcggctatgggcatgggatactcatctttaggagttgctctatttaaattgcgaaaatcaatgcataatctaagcttacctgactccttctccaccggcataatattggagacccattctgcgtatctgcaaggtctaataaaatcagcttctagcagctggtggatttcgtccttgatccgtgggagaaggtctggatgaaatgttctagctttctgcttgaaaggtctgaaaccggacttaataggcagccgatgctctacaatctctcagcttaatccaggcatctcagtgtaattccaagcaaagca

SEQ ID NO: 77947 - DNA, 639 bp, Zea Mays
tgtttggtctggaatcaatttgatcggtgacaagttggaaatccagccagtcaaaacagggagcccttggctggacaccactcggccatgtactttaatgcctctactgattggacttgtgctttggggaccgcatttggacttcctcccatttcagccgatcttcccctttgtcgcggtatattcattgtgtatatgttacaggtatcactacttcagaaaatattgaagaatccgggcagtacacccaaagggtgtctgcccagtaaaaggtgtctttcgcgttgcctgaagtagtaacttgacatgacggagaggtgtaatactttgcctgagcggttgacttgattccatctggtgccgtgttacacgaacaacgccagacgctttactcatttccaagcggtttgaattgcttattgaattcttgtgactgttcggtgagcggggtaggaagtggacggtcgcctcccggcctctttaaatagcccgcccgccctggctgctttctccacttgttcttgatcacttgccttgtcgttcttcttcacttcctctccttctgcgcgaccatggccagaggcaagaagggcaagagagcgctccaccgtgctgacgggaagcgcaagagctcccccc

SEQ ID NO: 77948 - DNA, 955 bp, Zea Mays
ctgccatctccgttgatagtggaacagatgctcttgatgcaaactcaggcagtgcaagctattgggcagaatctggcgaccatgcaactaagtggagaatgacctgaacaagtgaattaggtactacccatgttatccgagtcgtagtgcaattggcaccattgtctcaccgataggtgaaggcaatcttaggttcagggttcaggtcaaccttgttgtggtcctaaccacggagctggaccatgccctggacaagcagagtagagcttgtgagtagatgtgacaaatgggtgtagagttggtagatcctatctgcgctaacaccctattccagtcatcgtccgacaccacctccatcccgacgcatgaccctgtttaagcccacccccttcttgttgcctctacccactcatcatcgtcgtgacgccgacccacccgataggcctaatatggctcgtcgtgacaacatggcccgtccttggtggccaacaagcttggtaaaccgtagctctcagccagcgacgtcactcgaccatgcccccttcctgacgcctccgcacttcgagtagatcaacattcgacaaaatatgtatggtttcaattcggtggttgctttttatttgattgactgattgagtgtgacaatgaatatttggattagattggaatatccacttttattgtaaattggatattagataagtatttgatgattattgctcctctttgtttagataaatgaggaaattttttcaaccgcttttaaggtgttctacggccggtgatcaggacaataccaatgtaaatgagatgcttattgtgcgaaaaaaaatcagaacaatcaaacgttgggagggcatttagtatagataaaatagttgcatatccagcattaagaatacaaattgatgatgaggtcattattcaacaaccgatgatgagatgttcagatcca

SEQ ID NO: 77949 - DNA, 518 bp, Zea Mays
gcgagatccaagtccaaccaagggctctctacgtggccgcggacaatccgccccctaccacagatgatccagtgacctattgtggatagtcaaatgacctatcgcggaccattcaacatctcgcagagccgaacctaaggtcctgctcatcacgaggataccatagggctcatggctatttggccctaagaagacatcatcatagaggtggaattcaagaccatattgcaggtagtgttatttgtctaacatcttatctaatcttacaaagatgttcaccaagttctcattctccacgagcaggatctagggattatcagtatgtgtgatggtgtgtcgactagatgcaacgggttaccgatggcttccggtatggtgcttgtggagcgatagtggttggtggtggttcagtagcctagaggtggttgttggactacacgaattgtgatctcaattgaactagtcgttgcctttaattaatttaattgtttgctttgttcttggtgcctttattgctt

SEQ ID NO: 77950 - DNA, 1292 bp, Zea Mays
gggtagcacggccactgctcgtccgtcgcgtcgcagtagttgctcgccggcctgatctcctccttgtagcacaggcaccacgcgtactggtcgtccggcgccgtcgcccacccgcctgtggtctcgtgagagatttgcgcgagggccgccgtgacctcgcgtttgcgggtgctggggtcaccaggggcaggcctcctccactgcccagggccgccgtacctcgcctctgctacgcggatgacaaggaaagcgaccacggaagcaacagtccacaaggcgcaagaatacgccattgtgtctgacgaccagctttgtgtgtactttcattgttctgcctcacctccgcttagatcttggctagcttcttaggcttctcttcctcctggccgtaaaagagagggactgagggaagagatcttagctagcttcttatgcttctatttcgcttagatccttcctgttcgtcttcgttgtgggctactcgctcggcctcctgtcgttgtccagtagcgcgtgaaaaagcatatatgcgcagggagagaaagatgcggagaaattacacacgtcaaatttcccttgctcgacacaacacgatccttaaatctgtccctgtttattatattctagtccaggatcaaaactcacagcctcttccgtttttctttttttaaatacagcctcttattttctgctgcttttttaaaaaaaatattcatgattttccataataaagctatttgggatcgatcctctgttgcttcagcgtcaagagagaaacaccacacgagtcctcggccaaatgtgttgttcatacgctaaactgcacacatcacactactctcctacatacttttattttttgttagcaagctagctaggatattaatattgacgttgctactgaaacctttagaaataattcatgatcgatctcgttttcatgcctatttataaattccttgtcttcctcttcactcggtataaattttatatacctcttcctcttcttcttcttttttgttaccatgaacttgacttattagcttgttattgatgactatattatggtattatattgtgcactagtactccagtagcgcaacttactatgaattgactatattatggtattacattgctaagaattgctaagatcctcttccaaaaagcagcatgtttaatcattgtttctgctctagctagcagctactgtgtaataatatataggtttgattaagttttgcatatacaatggctcttaacctttgatttgttatattatgaaatttatt

SEQ ID NO: 77951 - DNA, 590 bp, Zea Mays
atgcacataaatgacaaggatgagtcatcttccaagagaaaagacttgactctcaaagccaatcaagaaaagaaaggaaaaactaaagtgcaaattgaggaggaatcctcaagttgatgatgatcttgatgctaacattgctttgatggtgagaaagaccaccaaaatgttaaagaagctcaatagagaaagcatcaagtttgactcaagaaagaagaagttcttctccagtaaaagaaagcccatctctgaaatggactgctacaattgtggagagcttggtcatcttgctcatcaatgcaataagcccaagaagaacaagttcaagggcaagaaagatgatgacagtgatgacgagaaaaaggaaaataaattcttcaagagaaaggatgggaagcacaaaagattccataaaaataaaaatggaaagacatacattgttggtgactggctcactgacattgagtcctcaagcgggtcttattcaagtgaagaagaaaatgatgaaaaagttgtcgctatcgctggggacttctcttcaccaccaccatcaccctcatccacttctcacctatgcctcatggctaaag

SEQ ID NO: 77952 - DNA, 921 bp, Zea Mays
gggagatggaaaaaacataggatttccgaagcttgaagttggcctttctgctatgtcaaaggatgacctcgcagacagccttgcgtacaatagcctgaaggtacataagttatggacttataagcagattatttttttgtctcttattcttctgctgatcctttttctcccccctttttgtagggcttaattctgagcaacgctttgagagcacagaagattgctgaggatgaaagctgccatatagcccttggtaaccttcggtcagaggttatcaaactgaggaatgaagctgcagagaatgataaaattctgctttccctagtagacagtgtcaaggctagtgaagccaatcttgccgcgcagtctgaagctcatagagccgaaattgaaaacttgaagaaaaaacttgttgagaagaatgaagattttgaagtggctaaagcaaaacaggaaataagcgagtggactagcacaagattgcaaaagaatgtagatgagcttcacgaatcaaaggagagatattacgaaaaatccttggattgtggcaagaagctaaaaggcagttttgcaaaggtgggtgcttactcacttgagcataaatttattagaggcgatcccgaaggaatcatcgaatgggtcggtgaagaagccgaagcttttgaagagatccttactgatcgtggtgatttctgcacctttgctggtgccagaggagttgcaacaattttggaaaaatctggctgcgaacacgttaaagctgcaacccagacggaggctgtcttcactatggagaacacgaaggatccttcggctgaagcgactctgatgggcggaaaattttactccaacatttggatgaaaggcggccgagaactagccgacgaagctataaggaagaatgagaaagaaactcatgaa

SEQ ID NO: 77953 - DNA, 308 bp, Zea Mays
gccaagtcggcctgcgagcctgcaggcaaggagctgcttgcgttcgcgctggttccgtcgacggaagggctgtgaaagtagtagagcaactgttacctcgcgctcgccttgagactgtccgcaacgcaaccgttccccctaaatgttactatgcagccacgtcagcaagattccatcccctatattcactcgtcccgcaaccgttccccctatattttcccttatatatccctctactcattaaatatacatttccatataactaacttaaccaacttcaattttgttttcattttatttatttgcac

SEQ ID NO: 77954 - DNA, 538 bp, Zea Mays
cagtaccaccgcatgcgatcttcacctcgtcgttggcttagccttggtgggtgcctaggggtcatctccggggatccattgagtcatgcacatgactctcctgcacccgtgtccattgtgcgcgcacaaaattgatcgccgtagattttccccaccagtcgagccaccattcatcgtggcccgctcgccccatcactctccatcaatagtatgtgttcttatcgatttcgcctctcccttctcttctctaatctcaggtatatgtggggggtagggcgcggggcgccggttggccgaacactagtgaagggcgccatcgtagtggtctgcgccgtcgcatggtgccgaccgaatgtaggagaggagtcgtgtgctgtccgatcgatcattgacagtggagcttagaagatggtacctttccagctcattttgatcgaggccgtagactttgggatggacggtcgagatcataagccacatactagtttagtctagataagaatcgggtcattggatcccgatctagcgacccataaga

SEQ ID NO: 77955 - DNA, 404 bp, Zea Mays
gttacatgccataaccattgaagaggcatgctactctcttgatgctgacttttggaaggaagcattacatagttattaagatggattcaattatgactaatggaacttggtaagttgtcaaatgtcctgggaccagtcgcttcatcgagaacctaattccatcatcttaattgctcttctctatcattccttgatgccaaacttttgtgtgctataagttttgggggatgggttgattttcactttcatcctaggttaacacgagcatgtcattggccttcaagtaatgaatattgcatgcaaagcattccgggccagagatacacatggagcgcttatccctatccccgatgcatgtacaagacttgcatggaaactagatttggaatacaaaagtgccaaac

SEQ ID NO: 77956 - DNA, 527 bp, Zea Mays
cttttgagttttgagcagttgagctggaaaggaagtactgtactatatgtgcagtgcagatagtgataccacgcctgctagaaggagcagttgcgtcagtttcacttcatttcagttattttctttttttcttgagagggggtggcagttgcgtcggttggagaatgcgatgtcagctgtgactcaaggagacgcgacaactgcagctgcaggccgccaccttcgacatcatcaggagaatgactactcccgtaccatgggaagcccgaaacgtgacgcttgaaatcaaatgtagcagttcggtccaaccctagccacttgaaacccaattgcactgcggattatctttctgctggtagacaaacctgcttgccttgggagtcaattttggagtgagcggttgccaagtccaagcttggttcaggtaatcgtaaagagatgatgagacaggggagggagatgattgactaatcagagcccaattacattaggcgttccccccaaatcgcccaacttttttggatttt

SEQ ID NO: 77957 - DNA, 922 bp, Zea Mays
ctttggaactccatatctcataattcttgaggattttgctcttggtcaacatagcaaacttgtagagctatgttaggagtacaagttttgttaagtgaataggcattggtattgtatagaaattggaaataaaaagacttaaagtcgggtagacagtcagtctttggactgaatattggctagcagtgaagttaggtgaactttgagatcggatttgaccatgatccagtgattgtttgactatgattactatagcaagattaaagctagagtatagatcaacaactttgttacaggaaagttaacaagttatcacttaaaaatttgagatcaagatcctgaaacctgctctatcaggcgcctaaatcaagttcccatggtacagtgacctgacgaagatcgctagattcagtgtttcgccgccggtgatcccgcgtcgtgatcatcgccactgttgcgattcgtgctcagtgaagtgcagataactactcggggtaagaaatatcgtgttaaggatgaactcgagccactgttccgccctgttgccatgcccacttgcgccggcgacgtggccgagcgaccatcaccagaatatgcaccattcaccatggttgcaccacgccttaggctatttaccacgtcgtcgtgagccgtagtgactgcctagtaaccgccgtagctcattgcccagtgaccgccacggcagacccctacgatgactcactctcttttccggccgccatgcgtcttctcagaattagccgccaccgccgatggaacctataaattgccgccccagtaagcaccgctaagtaatcacacacccaacgcaccagcccgtgccttagattgtccactagagcgctccaattttgaagttcccccaaatcagtcaaaactccgccgtgagtgagctcacagt

SEQ ID NO: 77958 - DNA, 277 bp, Zea Mays
gagaagggggtatgagaataaacagaaatgagagatttaggcaagatcaacatccgatacttgagaacaggttataggagataaccagataacggggcagaatcattaagggatccagagattcggatgataaagccacaacatgattcacaaaggaaaagattaccagatctaggtgaaaagggaggtcatcaaccaagatggcttctgggttgagcggaggagaacttaatgaagtttttggacaaggttcccaaaaagaatttgaggctagata

SEQ ID NO: 77959 - DNA, 390 bp, Zea Mays
cgacaactcttgttccattgagtttgacccttttggtttatcagtgaaggatctgactaccaggacccttctcgctcgttgtgacagcttggggctgttgtacacactctggctacccgcttcctccaccgtcgcgtcttccttgcatgctttggctactaccacttcgtccatcacttggcatcgtcgtctcaaacaccctaggctcgattccatgtccaagctatctagccgttcagacatcttgtagcaagagccattttgatagtctatgccatgcttgtcagctaggctgctatgctcgcccccctttctctagttcctcctctcgggttgatcaggcctttgatcttgtacattgtgatctatggacttctcatgttttcaacc

SEQ ID NO: 77960 - DNA, 742 bp, Zea Mays
caagaagtcaaaagacgtgaaaacgacgtttgacagataaatagtgacatagggggtttggaattcgaaatgaggcacgaaatgatatggaattgagccgagacttcacgaataggtttatataggtgaatatgagtgaagtgtgtgcttggtttgaatttaggcgaagaaaaaggaatttgggcacacggctcggaaacgatcgctcaaaacgggaattttggtgaaatttaagcctgggatctcggattggtgtgaaatttggcaagaaggttactagaagtgttgtgaaggtgcctgaaaaatttgggttcaattggagcatttttggctggtttgggcatttcaccgagcatgtggcgtgcggggagctagggttttggtgaaacgaccatttgaggtgggaataccctcccgaaggagctaaaagcttgcagggatacacaatagagacacttgaactcattccaccaattggattcatttgatttcacaggaatttgaagaatttgcaaaggggtggaaaaggtgcaaactcaacttcagggaactgagagggagaagaacagagggggatgttctgctcaccgagggagggaaggagaggggctcggtgtcgccggagcacagtcgaagacggtggccaccggtggagatcgccggcggggggggggggggggggaaatcgccactggacagagagctgcgggcgctggggaaaagagtgagcctctggctcggc

SEQ ID NO: 77961 - DNA, 653 bp, Zea Mays
cgattcgccagtgctcgcacacgctggatgtcgtcgtccgagtcactgtcaagtgggacctacgttccaggatcatctcccacgataagatcttctcgaaaccgaagcgtgagcatggattctgtaacaaactctactgccgacgggagaagttgttacaagctcggatcaactagaatccagggtataatactaggtccacaaaatcgtctctccatgtgcacccatgagccacgttgtccgtagtcaccgccctcagaaaggaggcgacagagagaaagagggtcgtgctcgctgtcatgggtgtgtcgctgaatacgccgtcgtcggagtaacatgcgggtgccagggcgcatcatggggacacgaagaatattttcgtgtgtttttctcacgcggagatagacccgagcccacggaatctctcaccgtagttcttcggcaccgcatgacctccgcacaccatggtaggccatgtgtcatctctggatgccggtaaggttcccacctcatgtccgcctcatctcttccgtcacatgtaccaggtttatctcggattggttattaggatgccgggaatcgcttagtgcatgggtagtgccgctactcaccatggtcgggtgacggagcaagatacttggggctatgtggag

SEQ ID NO: 77962 - DNA, 487 bp, Zea Mays
cgacaacagtgctaatttttcatcaaggacttctcaagatgtcgtggatgggttaagcgatgaaagtgatggtgaaactcaataaaaagaagagaaccccaagacatgggagaaagaaaaccaccgctgaaacatcgtatggcgaaggagaagaaaaccaaatcatcactgaacaagcggtcgctgaagagactaaagaagttaacatgagaggccgcaagaagggtaaatatgtacaaattggttgcacttttgcagcacttaagtttctaatatgctgcggttttcatattttattcgactgttaaccttaccaagtcacattttttctccgttctgttacagctgctattgttgcaagcttagaagaggagaagggtaaggtcaaggaaccaaagaagaggggaaggagaaaagttaagattgtagaggaaatcaacaataatgatggagagcatcagagcaaagatttgatgctttatagtct

SEQ ID NO: 77963 - DNA, 620 bp, Zea Mays
aaccactcaggctacgggtcgtgggtgcaagggcaaagcagcctagcgctcaccaacgccttcagattcacattggtaatcaaggaaatgggccacgggttgcgagaggaagaatgctcaacttctcagccatcggagctaaggaagaagacgggagaagtgtgcaagagtttttgcggctaaggtagaaggcggctagggtaggaaggcaagagtgggaagtaaagaaccgaagcgcccctctcgaatgaatttatagggacgggcggagtcgccgagacatgggccgagccgtcctgagtccaaaccaggaatgggccatgtcacttcgaattccatgcgcacttgcgctgcaatggttggcatgcgggccaaagcgtcgtggcacattaaatgtccactcttcctgatgtcagccagccaacgccgcttcacatgacgcatcaaaaggtgtttcccctctccctctctccctctgcctcctttttccactacttcacatgtagcagaagaaagcgcctccacctcagacttcctccctcaagaaggaagagaagagacatcacctactgctcagtggtttgaaagtcgagccctcggtgaggctcgggagaccgccc

SEQ ID NO: 77964 - DNA, 397 bp, Zea Mays
gggaattacaagggcgagcgggccccgagcagtcaaacaaaaaatttgcggagattatcaatgttctaggaatgctccaattcttcgccggatggcgtcgcgagcctgtatgcgctgggggacgccttcgtcttgacgatgaaagggccctcccacttgggctccagtttgccccaggactctgtccgagcggtccggacgagtacgaggtctccttcgctaaattccctcgggatgactgcgtggtcacgccatgcttttgtttgggcttggtatttgtttagagcctgtagtgcgaagacccggtctccgtcgatcaggtcctttgaagtgggctcgtccacatcggggacaactgacgagactgtccgtggggacccatgttttatttcttgcg

SEQ ID NO: 77965 - DNA, 511 bp, Zea Mays
tataaaaggaatcattcatactcctattattacaagctttgaatataaaaagccaatgtgttatatcaacttcaaagctcaggctgttatagtttctttcaatgttgtttgcacacacattggaacaatggatcttgttctggagtttttagcttttaagacatggccactagcgactgaatgggagatgccgaagattttctaaaaaagacgctttagacgtggagcttgggttgatcagacttcgctacaagtataaatttgaagatggatttggagaacctagtgacgagtggttacattatattgagcgaaaacataatgaaatacttggtaattatagcaaacctgagtccgaagctttgcaacgggcttttgcgcctcgaaaaaggcatcgattaaaccatgttttttatgttattggcttcttctatcctgactatcccaacatggtacatgattcgaagaagaggaagagaaaagtgactacaaagcaaagcaaagtcccgaa

SEQ ID NO: 77966 - DNA, 310 bp, Zea Mays
aatatagggacaaatacattaatggcaagaaaaattcaggaagcatctcacccctagtataccactacaaaaatggttaacaccccaaaccatcacagtaagtgagttgaacaattaaaaattgaaattggcccatgcttcaaataaatcaaaagaaagcctaaaaatgtgcaacaatgggcaaaccaatttttacccaattacttatgatgtaaaccaccaggaaaaaatatgaaactaaggtaagaacatgatgtaatacacctcacttcttattccatgaaaaagaccatatataccaagaaaggct

SEQ ID NO: 77967 - DNA, 1243 bp, Zea Mays
gtcaacacattgacttgtagagctactgtaggggtacaacttcgcttaagtgattaagcattgttgacatacaaaaagtggagataactagccctaaagtctggctgtcagaccaccctgagactaaatactgactagcagtgagttctaaggaactttgggctcgattcttgctcaagcgaataagcaaatgagcaagatccctacagatggattagcaagttctcacacaaaaatccgagatctggccactgcaattctggctgtcaggcgctctgaatatgaattccgatggtacagtgctacacaaatatcccaggttcaaagaacttcgccgccggcgaccgtgcgctcggattcatgcctgacgctacgattcatactcaacggagtactgatagttgctcgggtagtaaatatcgtcttgtggatgaacttgagccactttttcactccggccgccgtgtccgcctgactcacggccgattcggatgaactcaccggagttagccacctatcgaccatgtgccacgtgccttggtatcttaccacgtcgcagtagctcgtattactcatgtccggtgatcgccgatgagctcgccacggtgaaagccatgaattccttgctccagtaacctcccctctccccggtcgctagcgcttctcctccaaattgagcaccaccgccgttgcgtgctataaattgaagcctcaggaaaatccgctaggtaattacgcgcccaacgcaccagcacttgcctccaattgtccaccagagccgcccaattgcccatttcccccaaatcgatctaaataccgccgcgtgagcacctcgccgtggccagcgtgctacaggtccgttcatgtcctctgctctcttgtttcagtacccttatgtgtccttgatgcttattgacccgaccgattaagctagaacccattagatcgcctggaacacttcgtgttatccgttgattgcgcggtcaccgtgagcagagaggttgggagcttgaaccgtgcaattgatcaaggggaaacgattgttagatgttgaattaggtatcaaccaagttagagcaccgaccattgcgtgtcttggccagtacaggctcgccggagctcggtctgccgccgttctgcatcgaggacttggcgtagtgaagaaatagaaataggaggggtattccataaatatcagtgtaacgcacgaatagtgccgcgactctttttcaagttattcaaa

SEQ ID NO: 77968 - DNA, 528 bp, Zea Mays
cggaggaagaggctacctgggagactgaggattttctgccctcaaactaccccgattgtctacctaaggaaatcggtacgtaaccataccccagccccctgccctttgaatctaaatataagaaagatgatcttaacataaaccgagttaggttataaaactaaatcaaaaaggacttcctgctgaagttgcaaagaggatggcattcgaagtgcaggtttttaaaggaccttaataaacaaacccacaccatgaaagcaagccataaccttttcctcacccctgaggatcccgacccgaatctcaggacgagattcctttaggggggaaggctgtaacacccaggtgttacctaagatttcttcttagtacccaaatggtggccattatcacatgtaaacataattgagcaaaagaccccaaaacttgagaagcaaaaatttgagtgagtctttttatcttaaggatcataccttaaccatatcatgcaccacaaagtgagaaaaatgctcaaaacctaaaataacc

SEQ ID NO: 77969 - DNA, 691 bp, Zea Mays
gttaaacgtaggctgcagcctagctgcttggacgacaagtgttgctgctgcttgcaatgtggcgggtgaccaatgaaaatcaaagctacctgctgttgattcctcgcctgtttctttgctcaggttgcaatctagggatagattagggcttcaaatgcgcatttccgacgccaatttggcttcaatgatgcacgcctgatgagggctactacctactaggacgcctatagaattttgccattttggttttaacatatgggcatgaaatgccaggtatcctagttgcgctggtgctcacgtatagaacttaacttcatactgtcaccttgcctaaaacttagaagtaaaccaaactaaggagaatgaatccttcgtccttccacatgtacgtgcaggtacacacactatattggggaatcacaaatttctatgcaaaactcaagaacttacccaccttgccatgtgtgatctgtgatctttgttctataactcttttccctctttaatgaaaggcagaggtcctgccatttgtgtttcaaaaaaggtgttcaaagttgcatctcttatcaaatagcaggatttaaagatctgcttcttttttcttggagagttggagttaactctaatactccttatcaggttgatgtagattgaaccctcacgttgcagataaataaggcgattcttagac

SEQ ID NO: 77970 - DNA, 607 bp, Zea Mays
atttgggggaacagagaaattcgcgggctctggtgagtaattgaaggcacgagtgggtggattggatgcttgaatacctaatgaagctgagggtgtgctcaatttataggctccgggggcggtggcttatgaatcggggatggcgcggtggtggccggagagaagagggtgtactggcgcagtgattagtggcttgtaccgtggcgagctcaccgacaatcaccgaatatgcttaacgcgacctactgcgacgtggtaatacgcccaggtacgtggcaaacggccggcaggcagccaacgccggcgagcttatctgtacaggccgcaaatcatgggggcacgacggctggccactagagttatccctaggtgaagatcttttgtcttggagtattatccggtcattggggagcgtgaatcataatggcgacgacgattcacggcgaggattcaccggcggtgaggttcactgaacctgactcgaccagggcactgtaccatgggaatcaccatcagagtgcatgacagcccatgtttagggttagatttctcttaaatttctatggcaacttgtccaaagttctgtaacaaagttgtagatcaaaga

SEQ ID NO: 77971 - DNA, 623 bp, Zea Mays
gtcaaggtcggaggggaggagcgagggttagggtgaatgcatgtgtgagggatgaggaggagcgagggttagagtgagtgtctgtgtgagggatgagtaacgggtgggggtgggagacaaggacacacctatgttagtcccagtaaagatctagtcccccgctcaattctcttttgcaggtagtaaagtctaaagttttaccatgaaatctcatgatcagcagcactagatgctcctattttggtgctcaatattacaagtataccctcgctctcattttatcttgggtccgcgtctggtcgaagacatacatttttaatagttttttaaaagctctgatgttattttttagaaatatggttaacagaggtaaaaaaaaaatctatatacaggcgcaaaacacggaaccgttccgctggccgctgccgcctgctgtagtgccgtagcccgcgtactgccgtgttccactgccgtgcagaccgcagccccgcggcgccatcactgaagcaactgaagcagcggtttctgtaaagcgggcacgctccccttcgccccccctcccgttctccagtccactccactccactccactcccgttcccctcccaattcccaaaggccaaa

SEQ ID NO: 77972 - DNA, 618 bp, Zea Mays
gtcgacgcacatgcgccaatcaactttattcttttttagtacaagaaccgggtttactaaccatttaggatgcagtacttccctaataaagcctaccgataccaggcgagctaattcagcctgtatagttctcttttgtcgggcatgaaacgacgcagcttgtgccgcatcggctttgcttgaggatacaccttgagttggtgctcaactggctctctcgggactcctggcatgtccacatgttgccatgcgaacacgactcggttatcttgtagaaactagacgagcgcgcttttcctatttgttggtaaggcgggagctgatgaccgcagtcttgcactcgtccgagaacctgaggttgatcctctttgtttcttcaatcggtcgcatagaggtcgtggtcgatgcttcgttcgagggaatcgtgaggccatcctctgctggcttgtcgtcgctccctgtcgggagtgccactgagggtccagtcgtgagagtcgttcggatggccacccggaagcactcagcggctccctgaaagtcggcgcggatggtgatgatgccctggggacccagcatcttgagaatcatgtacgggtagtgcgggacggccatgaattt

SEQ ID NO: 77973 - DNA, 695 bp, Zea Mays
gttggattttgacaaacaaccgatgaggggtcatttcttcataatcatccaggtctctaatcatttttgccaaatccatatctttttctttgcaagctctcatgaacaatctggtgacctttgagtgattccagtcctcgcttccaagcacccttattttgttgtcaagaatcatcagccgatcaaagagtgactatagtgactcaccttttatgcagtcataccttgctagttcactttccagggactcaattcgatgtcttttgctttaggatcaccttcatgtgacatctttagaatactccagatctcatgagcatcctcctgtccctacactttcctgtactcctctgcactcaaacttgctttaatgttgctcacgacatgagcatcccagtgaagatcttgcatcatttctagggtcatctcctaaccaaacctaggcttgcatacacctacattcacaatctcctagagacttggatgcacaccgattatatgagacttcatctttcggcccactcatcataattcaactcactaagagttggtagtttttcgagtggtgccaaagagaagtttggtacaaattatctagaataatcaaatggaactttattgaattcataactcttactattacttggtgactcctcgatgttgacattcattttcctcattaccttagacactag

SEQ ID NO: 77974 - DNA, 892 bp, Zea Mays
ccggaactataatttgtttcacactattcagtgaaattatgccgtctttatgaacatcaaacgccgatatataaacttaatttgcgcaaggaaaaaaaataaattcaggaatgcatatcgcccgagccccttaatttattagaccgatcgagcggcagcacaaaagtcaaagaaatggcgtgtgcggccaggaattcgatcggacgagtacaagcaccatgaatggaacggcggccggctagctatctcaacagtatcctgcatatatgcatatccggagccattaggggacaacgcatcgttgcaccattactcctacctttgaattccaaccagcgacatggctattcaagaacagaaaggacggcagtagaagacaactgaccgatcgagatatcgtgcggagacggcggcagccactgcagatctgccggccgaccgtgtcaccgtgctcctgtgcctcgctctccttggcgtcacaattccatgcgtcttcttgctcttccatggcatctcatctctggcacacggcggcggtgcttgtggatcaggtctcctcagacttcaacggtaaccctgaaagggaaagaagaaaaacaaacgaggagaggaagaagcgatttggtaaatagatctggtcaaaaacaccatggaggggccggactacggatccgcatccatccgggtagattcctgacgatgccgctgccatataccaggttccaaaggttcatcaatggcacagtgaataaatccgccgccccgggaagggagtaaaaaaataaatgtgatggtatagggttcctcggaaagacgaacgggccgggggcgtcgtacgaggccgaggaagaaacaaacaacgagaaaagtacggcagcgagaaggaagaaat

SEQ ID NO: 77975 - DNA, 1162 bp, Zea Mays
atttgtatgtggaaacctgcagctggcatatatcaggcctcaacatttttggacaataacatcaagtgccacaacaaagaacagacactatgcactggcaacaaatagccatatgcaccatcactagcctcagtaccatcgctggcctcactacaatcacttaccactgaaaagaacaaccctcagttttttggacaaaaaacatcaagtgtaccatacaattgaatattttcaaggaatcagcaacaaacaaccatatacaccataactagcctcagtaacatcactggcctcaatagaatcactttccacagcaaagaacaaccctcaactatttttgacaaaaaacatcaagtgtagcatacagttcaatattttcaaagaaagcatcatagggcaaagcaactatgaactatctcacatgtatcacaagccttaagaacagggctgctacatcacagggctgctacaaatctcaagaacaggtgtcacaacattaaaacaacactcaggttatcaaaaatccatcacaggactgctacaaaccacatgacacaaatatcagaaggcaccatactatatcattacgccccaaattgcatcacaagacaccagattgattcacattgcatgtttatggcccaaattgcctcacaaagcaccatctcattcagttaagttttcagaacacaaacctgagagtatttggccaatgtctcctgagcacaaacgatggctacactggcatgttgatacgaacacatagcacatttttccgcctccacagcggattcaagaacatcaagcatcaaaaccacatggttgcctactgatgatgtggcgcagagatcaccagctatcacacaggcggcagtagaagcattgatggtgtcacgagctgcttcaacgaccgcggagaacttctaggcacaaagctcagcgacagattccatgccgaattccatggctgtaaaccctatggttatagaggtaacaagtggaaaacgataggagatctcaccagcagcggcggcgcatgatccgccctcggcgcaaggagatctctgacgagagaagggaagggaagcgcgttggggaaatgatgaactcgaacaaacacagagagcgagagatagaagacgacgcccagggtagatgtcaa

SEQ ID NO: 77976 - DNA, 392 bp, Zea Mays
gccaaaggatacctccatttctggtgggggaggaggccggggagctaagatatgttagtggggttacaactttgatgatatcgtctgtttcttgaaactttggactcccagggaaatataaatcaatatcttctctgcccctagtaaactgtctttctgcttctctgccctaatagtttatatgtgtgtccatgtgcagagatatccacacaaatctgagctcactagatgctgctgccccatatacatgcatgtatacagtctagctagcaatctagcaggcacaatctagctggatacatataataatgttgtgtgctgggtgccatgtgatgatgcccaagctaaactttgggattgtgtttcctagattccaactcgcaatatgcaat

SEQ ID NO: 77977 - DNA, 1012 bp, Zea Mays
ggttctcgaggcttctagtgaggacctcaatgagtcgagtctggttggccagaacttgggctaggtctagtggcatctccagaggtgcggggaggtgggtctcacccccttctccaccatcctctccttcgatacctaggggagtccttgctccaatccctgaggcggtaggcgtggttctatccaaggccatctgccagaggggaaaaaggattactactatgcatatgtcattttttttgcaaacatgttattttattcatcacaccagttcattacaagcataacaaccaccacggattacactacgaacgagcgtttcctactaatgtgtccccaaattccctgagaagatcatcaaggctagctagggacatttcctcgacgtcagaaaggttctctatccctagggaaggcagtgctggcggggcttcttccttcgggtcagcctggcatccttggcttttgaaacgcttccaaaacttcttgacaggggcgagcctcttcagcctcctagcatagtccatcttcaggggtccggtatgcctcacgagtgttggcttcctcgccatctgccatctcgagactgtcttgaagagatgctttttcttccttcaattccttgatttgctgctctaggctttccacccatgagtttaggtgggtgaagtgggagaaaaggtcatccaagtggttgtcaagggtgtggagatatccggccatgtagattatggtagagttatcttcattatgatctctccctgacaaagcctagagtcttttcctcgatgcagggttatttttgttgctgggtggaaagtagcggaggggtgtctcagagacttccttactgtagttttggcatagctggtggagggctttttgggcagcattctggcaggtgtctgggaagcggtggccagtagcggtgatctgaaaaggagggtgatttgggtagcttcggctttctcccaggtagactgccatagagcacttcttgactccattctca

SEQ ID NO: 77978 - DNA, 407 bp, Zea Mays
ctgccttggtcaatgcgaccgccaacaatacccgctttttacgtgaaatggcgggaaatcaattccagcaacatggtggaagggctcctccgcagggaccacgtgagacttcatatctggacttctctgaaactcgaccccactcttcgttaaagccgaagaccctctggaagccgacgaatgggtacaggttatggagcaaaaaattggactaatcagctgtaccgaaacccagaagctattgttcgctgctcaacaattaagaggccctgccagtacttggtggggaaattttgtggccattcaacctgccggacatcaggtcatgtgggatgaatttaagttagcatttcgtgagcactatattccagaaggggtgctacacatgaaacatgaggaatttatgc

SEQ ID NO: 77979 - DNA, 458 bp, Zea Mays
ctacaaatgaaactggaagagttcatctgactgaagcaagggggagattctgtgatgcagtgtctcaataaattcaatcacctctcccagtacgccattgatcacgtggatacagacttgaaaaaggagaattgttttatgaggggactaaatgatagactctagcgtaagatggcaacatgtttggacctcacatacagcagggctatcagtacagcactggcagttgaagccaaaaatgcgggagacggaaagtcaaagggatatgcgggtgaaagatcaattcagggacctaaaaagagaacaaggttggtaatccgacctttcaatccaaactgttcttcacgtcgcccacctacatatccattcaaacaacccgtatttattcgtcccactcctgcccccgctccgaccaatcagccgagtgcccctggtactcatttccctgcccttcccag

SEQ ID NO: 77980 - DNA, 865 bp, Zea Mays
gtgcaacagcgtaatcacagtacactactagcccgcacctaattacaccaaaatatctacctacctgagaacgtagactgtgggcccgctctaggcccgacaggtgggccctctttgtcttgcactctccgccccctatgttgtttcggggactccgacctagaggtcgaggtcatggtgcctttaacctctgctttccttcaccgccatcgacctcgagatctaatgtattcacaggttcccactagcatgacttgtgcgaaagggtagtcgacatcgatgcgggcgtggtgatcttatgtacggctttcgtcctcgaggtgactagcctgtggcgagcaatcttcgctctatcggtgttgcgtatgaggggggtgcgaggctcccctgcgtcgtggcccgcaccagccatgtgggggacccaagatctttgattatgtttgggttcgcgcccacaaataggatttgtttggttccagacgaagtcacccgatggttggtttgaggtctggttcggtcttcgtctcaacaccagcgaatagtgacgtgtaaattcttccaaagaaaacatgaccacacgcctatccatgcaagtatacaaacgaacagagtttcagaggcctcctgtttcaacaacacgtgcacgagatcagaacgaagatagtagagagcagcacaacaacactggtgctcttatctatatgttctccttttgtgaataagagaagcagtgtcctttttatgcagccacaaggaatggcgaagatgaaaaacgaggcacgtcaagagataatgttcaggtagcatcatttgttgcgaatcatgaaactaatagtctgttactagtaacgaaaatcactaaaag

SEQ ID NO: 77981 - DNA, 555 bp, Zea Mays
ctgagacaggcgcgcctgtgtttaacgtagtgcagacagacaacgtcgttacacggtttgtttaatggcaaggcggtaacacatatggtaaaggcgcagaattatagggattagtttcaacatggaaacgagcttgctatgttacgtgggcgcggaatttatggatcttgcatggggtgtaatggcggcaggtaaatataaagtagaatgcgattttgaaagatatggcataaaagcgatatagccaaaaagttgcataaatagtatatatcgtttggcgtaaaatgttgagtcattgtgcgtaaatagtgtattagggatattagttttacattgacatcgctataatatcgggacggtttcagaagtaatgggaataccctggaaacgtggatgttgttacttgtatagtatccgtgatttcctttcatccgaaaaaacaccacaaaagcctgcataactatttggaggtggagatggccggctctggagagtcgccggcgatggtaggagatggcgttcgtcttgatccagagacagagggaggagttgatg

SEQ ID NO: 77982 - DNA, 490 bp, Zea Mays
ctcagttttggtcctgcacctttacaccgaggacttgaaatacctcggctgaagttatcgagattgttctatgtgcaaaaaataagtggggtaactggtgggagttctggttttatgtagcgccaggcgacgttgaagggttgcccagttttccccctgctatcttgtgctctcattgttatgtggcatttccacagtttaaggtggcgaagggggacaaagacgaggaggccttcgctatgcagcctgtctgagcagtggacgtgacttggtggaagagttcattgcttgtggagtgtggcctttgtcgcatgggtgggccttgggcgagattatacctcgcagatgccaaccttgagagataaattggtgcgaagcccaaccttcgtcgtggatttgcgtgggtgggatgcgggcgctttcgtgcgggaactagagtcggaggctgttaagattgtcggaaaatatgcgtcgaagactgaaatgttaa

SEQ ID NO: 77983 - DNA, 520 bp, Zea Mays
agaagggaggaagcctacaaatactctgagatgaccaagggcttcggagaaggcttcatccaaggcatgtcagaacaatccacaatcctagtcaaaacaaagacaaaaacaatcataatcaagggcagcatcacagctcccagtcaacaggggcgcaatagagctccttcagaccgccagccccaagaggcagcggaggacgaagctttagcggaagatacaactctcaaccaagaagacttttctgcttattctatggagaggacaaggggcatacaataagaacctcccaagttacgatacaaaaacagaaggaaatagctgaggtcgaagcacgcagaaccaaccgaagcaagttcttcacaccgcttcgtgctactccccatacatcccagagtatgtgggtaaccaacaaccattctcacaacctacagcttcggttgcttcggcaagtcactctccaactaggtgggtcttaccgcaaccacctgcattggttccaacttcatctcataatcag

SEQ ID NO: 77984 - DNA, 376 bp, Zea Mays
aatcctggaagccagacattatgccaaaaaactgaaatatccgaaaggagccttagtgtttaatggcactaacgaggacgattcctatactgtctcccggataacaaagaaatatccgtttgtcgggagatagctaaaagtatgggatttccaaagcttgaggaaggcctttcggttatgtcgaaggatgatcttgctgatagcctcgcgtacaatagtataaatgtatagaagttaactttgaagttggaaatgaagtatcttattgtcaaactcaattctttcttcttttttgcagggcttgattcttagtaatgccttgagggcacaaaagagcgctgaagacgaaggctgtacaatagctcttagcaacctt

SEQ ID NO: 77985 - DNA, 718 bp, Zea Mays
ttctttttttgtgggggtgtggatcagtggatgtgtgaaacggatggagaaaaaggatatgaagacgtatacaggttggtgtgaactgctgaaactttccgatggtatcattgagcgtgcattctgacctgcgatataaagctcttttatggccgcgcctttgctgctgcgacctttattttcctgcccagtcagtgccgcgccgtgcccatctggcatcaggtttggttcaacacatgccataatcaccactcactgccgtggatcatttcagtggatctggtctggagagttattatgtagtagcagcgatcgcagctcggtgcctcggtccgacggaccctcttcacccgttacctgtgtgcggcaaggaatcttctgctcagcgatggcatgccacatcttgttgcgagctttgatgatgatgatggtgctaaccgtgtgaggagccaagcgccgttgtttgctaccaccattacgtaggatggcagccaattataggcagggagacaccggacaatgcaggttccattttatttagggactgatattttgtatgtcgtttgcaacgcaaggggatttgactagtatgtatatataatacaacgctatccggcggaagggacaagagctagcgtccggggaaaacaattcagacgagaggcaacttttctcaagtggggatctagggtttctgcgacaaatagccatcgaccta

SEQ ID NO: 77986 - DNA, 602 bp, Zea Mays
aagacagcacaacaattacttaaagacgcagccgaaataatgttgatcgaagtctatctttacaaccacactccgcacaaagccgcccacgtacgtagccggaacaatacaagcgtatgaaaacaaccaacaggccacaccaccattagaactacataaacacggcaagggcatcgcctattacacatacacggcgagggcatcacatattacattggctcaaccttcgggatgatacccatctccctgtagttgaacaacattatcctcaattcctcaccctcaaaaagatttcgcagctcgccttcacctacactcgccctaatcggcgaggacaacaattctcgcttaccagtcccgtccacgcgaagacgaccactctccatctcactacgatgacgcctaccacttcgcgacaactcactcactctcgttttgccaccaccctacgccgcctatacctagtactcgcgcccgggagcccctcggaatcctccacacgtggcgaaggctccgctgtagccacatctaacaccgcaaaataatccaagtcctcatctgaagactcctccgtccacgcaattgaactcccagaatcatca

SEQ ID NO: 77987 - DNA, 932 bp, Zea Mays
ttgttctaatatggaggcaacaaaactacaatatagacacgaaggacttgtttggttggtggtctgaaaattttgtgtggcctaggcatgcactccaggcatccaatttctcatgcctcgggttggattttgttgcctcgcagacacatctaggccagaacagcaaccaaacaggtccgaagtaaatgatagatggagtgttagagggagctatgcgcgagggtgagatgggctggtggggcctagtgaggcccctcccctaataaaattatttatttactattttaaaacacattttatgttttttggaaaagatcttcacttgcggtcttattagctcgacgcgagtgaaaatcaattttcacgggcgattttctcaacccgaaagccaataacaattgattttcactagcggttctcagttacctgtatatacaaatatttttttctactggcccctagcactagcggttctaaaaaacgtcagtacaaatgtgttcacaaccgcctgatttttactgttgttttcttagggcgaccgatggtggaaatcgatattcacggggcgatcttagttacccacctgcatagataattttttattgttccctaacacttttggttctgaaaaacggcagtataaatatgtttacaaccgtatgtatagagcctctatcaggggcggatccagagggggtaaagtgggccatgaccccctctcaattatgtacaatcttttaaatataatgaccggttaatgttaagttaagtttagaaaaaaccaaagttttgatgtgatatagtgctattctaaacctctaaactaaataggtagcgactaaaattagccgaaaaatttagaatgggtcaactaatttttagctatacctttcaaataatcattaattgttacctcaacctagctaaaacca

SEQ ID NO: 77988 - DNA, 920 bp, Zea Mays
gctcgctgcactggttgtcgttgcaagcggtggtgaggagacgaggcagaagctgcctgctggcagtggcaacaacgatgaccactcagccattcttagccgcctgtccaacatcattgatccgccacagagctggcctacacacgctgatgctgtcatggtgaagcggtgcggcggtgtcggtgctccaccgccttgctacaccagcatccaggaagccctggatgacgcaccacaagaagccgaggaggacaagtacatcgtgcatgtgctctctggcgtctacgacgagaccgtgaacataactagaaggaacgtgatgctgatcggcgatgggtcggtgccaccgtcatcatagggaacaagagcaatgcaactggcgtccccatgaacatgacgacgacagtgagtgagtaactctggcgatcgatatttcactgcagttgagttgtcatgcatgcatactgtaaatcagaactattaatttgttgttgctgctgcagatgccttgggtcacggcttcatagcacagaacctgacaatcagaaacatggcagggccggaaaggaggtaggatgtggcgctaaggtaaaattcgaacaagtcggtcgtctaccggtgcagcatggaaggtcatgaggacaccttgtacgtggagaacgggatccagttctaccttcagaccttgatctggggcaccatggacttaatttgtgtttggcaatgcccaggccatgttccagagctgtccgctgctggtgcgcctcccaccggaaggcaagcacaatgtgatgatggtgtagggctgcaacaacgccagctgcgagtctgacttctcgttccatatgtgcaccgtggaagcagcgccacgcatggaccttgacggcgtggagacctaccttggctgcccctgtaggaac

SEQ ID NO: 77989 - DNA, 341 bp, Zea Mays
ccatatgcagcatgtgtgcttgaccttttgaacacaatctttgcttggcttctcgattatgatattcagaagttttagtcaaagaaaaacaatgacgctgatgcaagacccaccaaacatcctgcaagtgcagcgattttgacctcagagaaggaaagcagtgcgccttgtataagtcagaggcaaaggtagaataaacatcgaaacgatgactccgacgtgtctccgagtatacgtgtctgaaacagcagcgaaattataatcaaagcaggaataagactatcataaacttcagaaaaacacaagcacttagccagaagtttgtgtcaaggagcatagtg

SEQ ID NO: 77990 - DNA, 610 bp, Zea Mays
ctacgatatctgtatctgtggctgaggttgttgttgcacctgctggatggctatcagggtctgcacaattgactgaactgcttgagtttgcatgaggaacatcttctccattgtcatcggggatgggggaggcaactgcgaatggggtgcctcatcctacgaatcatgttgctcttgctgggtacgtctccctcctctacgcctatggtcagacatctacaaaagtcaatcatacatcagaactgatcttgcaaacctttcagcataaaaaaggtagagttcttcacaacacttaataaacaagcatcttcattgactctcaacacggccaaactaatcttctcggataaagagaaaagtctaaaaaggcttcccaactaaataactaacttcattaacattaataaaccaaaatgcacaggatacccacattctagtgacagtcaattagttattttcactacattaaaaactatggttactggttggtgcttttgaaagtaatcaaaacagatactacttaaattatgatattgtattttatcatatttttctgtgccacaacttcaattgagcaaatggtatccaatcattgttaagtgattttatc

SEQ ID NO: 77991 - DNA, 795 bp, Zea Mays
ctttttttgacggctatgagttgcaaaaaatagagtatttaccgtcgaaaataccttattttcggcagcaaatactctattttcggcggctcgtgtccgttaaaaatgactgtcaaaaatgattgtatctcttgtagtgtagtactggtacagtgacatcagcaagataggccggcatcatcagtacgaatgtgttcgtcgatctgctttttccatcacgtaagcatcacctaactaacgacgatgcatctgctgatcggcatatatatacatgccagccgtcctagtttccaagcttccagctgctcacgtacgtacgtgtcgacaccacgtgaacaatgccactttcatgcatcatcatttctctctctcggcgcgatggctgcggaagcgacggctcctcccatgcatcggtttagatggacactgtcaagaacgtacggtgacgcatccatgctttgacgacgcgacgaaagctagctaggttttagacatgctagaaagctatagcaaaggcagctacgtgtcgacaaacaagtgtgtgtggccgccaagtagtgtaaccctcactacaactgtgcatcgatccacaacaattttgtagcacacatcgatctcggtcatatgcaattttgtatgtaaggtcatccagcttttatcttccctctctcacttaattagagcttctttggttaggagtacatcgagagagattggaagtaattatgggcctttatggctaactgtgccacaccgactaacattagtcgttcgaattgaataactaacactaga

SEQ ID NO: 77992 - DNA, 728 bp, Zea Mays
gctggataatattattgaacttcaagtgttgccaccttaattaacttgattagctcttctgacatgttgtgcaatagaatgtgatgtcgcttcatgttgaacccctctatttgttttaccagtttttattgttgattggaatagtggcacaaacaacttgcagttcgtaccaaacaatttatgtgatatccacattgtaaaacattcttgcatatatatgacatctattttgtactattgttacacattcagcatcattatgtatggaagttttttgacatattttttcatagtgcatatatttaccatcggccgacacctccaagcactttcgtaaaagatatttcaagatcctcaaatttgtcgcttcaccattccacttcccgccaacttgtacaactaaaataatatattgttatttaccatcggccgatacctccaagcactttcgtaaaagatatttcaagatcctcaaatttttcacttcaccattccacttcccgccaacttgtacaactaaaataatatattgttgtcacctactttttaatttcacggcatatttagcctccactcatagcaaatgacaatgaaaaaggtattcattgatgtgttttccataacgcgcaggatactctctagtttgttagtatttcaacactaacatcttgtttgaagcctgaggccaaaggatcttcagttaagttggttatatagtataaataaca

SEQ ID NO: 77993 - DNA, 459 bp, Zea Mays
taactgcttgagaacgaaggttgatcatctttttaacattatgttgccttattttcaactgtatatagcaattgggaacatgtaaccaacattcgcgcccacctccggtgaactcattaacgaccaccttcgtcatgccgccaaagaaaataacggtgccaggggttgttcttgctcctctggacaccaaccaagatagaattcttttaagagaagctcgaagccaaaaaaggaaggctgctagcccaaccccacatgaggagctggacaaagaaatcagcaaccttgaagccatataccaacatgtggaaaagagaagagaaaaatgattcgattgtctgagttgcaaaagaagatcgatgaagcaacggaagagattcgacacattacgcttgatactgaacatcgagtatcatcaatgccaaagagatcttcggtaggaaggccccaaccacgaag

SEQ ID NO: 77994 - DNA, 421 bp, Zea Mays
aaaaaaatagaaaagactagtttgaaagaccagagaagataggagaggctaaaatctcctccaaaggaatcttgtatttcccatgagagtacgtctcctaagaattacgtggcattataaaaatttcaatccgttaggtacaaattctcccctcaagttgtcatcaataaccaaagttcagccgttatggtgaattgttttaattcaccatcttataagtatataaaattcaaaagaaaaatgagtgttcatgttagattgagaaggaaatcaaatgttggagagtattccaaactgcaagcccacaaggaggaacgagaagcctgacaaactccaccacggtcgattcatatccgagcaccacaccgcaactccctcatagcaactttggtgatcatgccagaggaacctatcggcgagc

SEQ ID NO: 77995 - DNA, 315 bp, Zea Mays
gtcctacttgctctagcagcacatggtaactggtagattcatcacatggatgtaaaaacagctttcttgaatggtgatttgagagaggaagtatatgtgtcccagccaccaggcttccaagatccagggaaggttaaggtcttgaaattacacaaggccctatatggtttgaaacaggcacccagggcttggaatacaaaattggacagtgaactgatctctttgggttttgaaaaatgcagtgtggaacatgttgtttacagaaagggagctggtgaataacttttggtggtgggagtatatgttgatgatctc

SEQ ID NO: 77996 - DNA, 3748 bp, Zea Mays
catagcaatatatgcagaatttactctgtccaagtttatgaagttcctactccatactgctgaaattgcattgagcacctccactttgatgatgttccaacaagccttgtagaacctccctatgaacccatctggcccaagggccttatcgaaatggagattcaatatagtttcccatacctcctgctcagtgaaagggacgtccagagtagaggttatgagctgggagaccaagggcttctaggtcgatggtactttccctgaaatcagactgaccgatgagattggaatagaaatggtccaccagattagctttgtcagcctggctagtgacaatattatctccatctctcagcaaggtcaccaaattttttcttttccgatatctagcatgcatatggaaatatttagtgtttgcatcaccttcctttatcggtttatccatgttattcttgatcttaatcttgccatcgttctttggaaggaggccaacaacaaggactgtttcttgagcttatttttaagccagttttcagccggagtgagtggtctgtgatcctgagcaatttcaagtctatgcagcagctctcttgccagacaaagctgacaaacaacatcaatcttagcagaatcaaccaaaactctcacaacatcttgtctgaccgaagatttaagtcctctcacatttcagaaaagtattttagaaggatccattggataaactaacagggaaccaactgaacagatgaaaacaagccctaggactttaagtcttctggtgtagaccacccaaaaagagcagctaaggcatcaacatgagactggataagtgggtgcttgaaaagcaaagcatactccattatagcttcacgactaatcccatcagaatcgttgattatatgcaaggccctcatagccttcctggaagccctgctacactaatcttgcatggaaaactcgaatgtgatactgttatgggtgttggcccaggatggaccagcctgagctgggtactgtagcacagcctataccgcccttgctaaagaaggaataaggattaagaaagagataggtgacgtaccaagaagaagaaagaaagaaaataaagaaagaacaaacaatacaattccccgaaatactctaatctctctccaagccaattttacccagctatcttcctggaaatggttatcccacaatgacccaaggatcataacagatacacacgtatacaaatttattctgatttagtttaatttataattataatcaaccaagctacaaagaaaatatttctatgacagctttctatatcttcacgttccaaggcatctgggcaaaaaaaaacccattctggctgaataacaatgttgcctagcttgtgactgaggaaatgtacccacaagacatatggaaaactctgttagcttcatgccaaaatcatacttttaataaatcagaaatccaagaagatccacaagaaatgtaacccatccatacagaaacatgttcagagagaaagatgacaagaagcaaagtccaagagtagcactaaataattttcttaattgcatcaacaagaaaagctcataatcagcacaacaagaaatcccagtctctttcttaagcgccagtgaccagacaacaaaccaatactctccatgtctgtaaagcaagttcattgcatggaatttaaccttcttcatcatccactagggctaagagagattgaagaaagctaatcaggtgcttcatcaggtaattttctgccatcacatcaatcaactaagcagaagtgttatttataattgcatcttttttcgagtacagtctgtttgaactttatgttcctatgcaactttgagtttcatctcctaaattttggacgcatcaacatttttctcaacaggagatgctctacgagagttcaagcttataattgccaatgtatgactttacaagccaagtaagcactacatctatacacaacattatgaacataaaacaaggtcactgcaacttttagatgaattattccacgtttcatgcactagataaagttgtgcttttgttggttagttggtcttggaaataacatgtagctgccggtgaactttgggattacttctgggattgttgcttaaaaggaattcaatgattgataaccaaatgcatatttctttaatcaacttcctaaggggaacgaataaaaaaaatcatcaaacttaggaggaacttatgtggcactgtaaattagaagtagggacataaatttgagtcaaacaggactaaagctatgaggcacaaagtttcaagatagctaatgagtgagcaggactttcactgttctgttgaaagaagaactagcagcatgctgaccacttttatcttttctccgctgcagctactaaacaggacatctcagttgtgaaggtacattttggcaattatatttattttgtaaggcaaatccctctatgcatggccaagaaacaaaagtgaaaggtggtgtctatcttttgtagatcataaacttttcaagaaaacaaggtccgtggatctctaacacaatggaaagtcctgagtactgtgagataaactcaaatatgactcttgactacataaaccgactgttaatggaggagggcactgatgagaaggccagcatataccaacaacttgatgcacttcaggccatggagaagccattttatgatattattggacagacatatccatcttcacctatggagacaatgatcagtagagataaccaagtagattgtcctcaagacaattatagtaaacaggcacgccgtggttgttttgtcagtgatattctagagccacaaggtgtgcacctggtagccaatgattggacttatgaatgtgatcatttttctttgcaatttgagagaggtgctgaagaagcaaataagttagttcccaatattgcaaaattggctgatctggatagtaatggcctttctgattccaatcgaatgatagaggcaacaattggacaaaagggcaagcatggaagcaaaatacggagtcatcctcatgtggacttggagtttttggaagcgaggaacagtaagcatttggccatctcagctagtgaaacaacccgggatgaaatgtttgacagtgttctgctctgtgattgtcgatttaattgtgatgctgctcatattagagaaatcaaggcaaaagaagcaaacaacagttcacagaatgttcggagaaaaggatatggtcaacggcaagtgaaatcacgaggtaagaagaaagaggaggaggttgacctcagggctcatctcatgcagtgtgcacaagcaatagtagtaaacaaccttccatttgccagtgagctactggagaagataaggcgtcacgcttcaccatatggagatggctctcagaggctggcactttacttggcaaatggtcttgaggcacgcttggctgggacagggagccaaatgtataaagaactgatggagaaacaaacaagggccacagacatgttgaaggcctaccgccttttcaatgcagtgtgtcctttcgctagggtagcatactacttctccaaccaaacaattgctgacctatcgaacggacaaccaaaggtgcatatcattgattttggcatcacacttggctttcagtggccatcattaatccagcgctttgcgaagcgagaaggcgggccccctaagcttcgtatcacaggcatagatgtacc

SEQ ID NO: 77997 - DNA, 352 bp, Zea Mays
ttcggattagatctaggcatgataaagtttgggtcatttgatctctatcaaatgatggagatcgagtaccagttcagttttttatctgtgggtgtcggtttatgtccaacggtccatcttcacggatacccctttggtcatgggctttttcatatgagcccccacagttttagtaattcaacccgtcatccataatagttcaaagaacattacaacctggtcccaaatatttacaataggacccctgatcttccgaataattgtggctgcaatccatcctggctgagaaaataataaaaacgagtatataaatgatttcttgcgtaaaaataattacaggggcttagaaaat

SEQ ID NO: 77998 - DNA, 620 bp, Zea Mays
caaaaactcattttctaattcatttttctgatttaataaccctctggattgggccccgaattccagaaaacacaggggtcacggtgtaagagtttctaagactcagaaaaccccaggcatggacggcgggttgttttcaggtaaaccgaggggctcctgtgcaaaaaggcctgggcgaaggggtacagggggatatcagccgcaggatccagaatcgagggctaggattagatctggcgcccaacgaaccggtatgcgctattggccgtgggattaaaatccgatggcccagattctatgaaccccgatataaccacaaccgcatgatctgagatctatggctcccgcttgatctattctgtgccgtccgatttccatctaacggccaaccccttttcttctaccacgggcagaccagaccaccgcacaaacaccgccacggcgaggtctcctaccaacggagctaatctccggacttcgggcacgagacccaaattcaaccggtcctcaagctatgggtatgaaagcgggtctgggtgagtggttcgtaccgaggattgtccacgctagcgagctgaccacggagaggaggaggttccgccctgacgcgcactccggcg

SEQ ID NO: 77999 - DNA, 544 bp, Zea Mays
acattgaaccggccatagtgcctgagtttggtggggaaacctcttcggttactgaagcgaaagaacctgctcctcccacgcagaagattgaagagccggctgcaatgccgaaggcaccctcagccaaattagctgagccgaagactgataatattgaggagacaagagtcgaagggacaaaaacattagaagttttaagcccttcggtagaagtgacaatgccgaaggcacaaaaaggtcttgcggcgacccccaagagaaaaaggatggccagtgtgctagatgtgctggagacgataaaggcttcaagttctattccttcagggaaaattgtcgaggattcgaaaatacaaatcgaagctgaaacaagaccggccgaagttgatggtgcagtgagccaagctagtgccgaagccaggccttcagagcctattgatgaacaaccttcggaaattgagaaaaaggcagcagaggaagaggctacagagcacagtttgcctgagaaaactgtcactcctactcccgaagttttgaaggaaaatat

SEQ ID NO: 78000 - DNA, 612 bp, Zea Mays
agttctaaagtgtacctctgttctgtagggactatctgtctggaggtgaaagcttcagctgggccttacagtcttgtgaactgcaaaaaggataaaatttgaaccatgatatgtatttataacacaggtgattaccaaaacagtcgctgcacacacacatacacgatgctcagtacaacagacaaactcgacacaagaaggaaaaggtaagacatgagtagaagtgaaaagacgtagcctcaaaactaacaaattcagttatacagctagttattttgcaattgctctatatctaacttgtagtctattttattagacacaactcttaggctccaaatttccctgatcctagccgatgttgagatattgttggtaaatatggagtgacaatattttatattgcaccaacacttatacgcttatttatgcgtgatggcattgaggtaatactgcttggtgtttgtttgatatttaatcatctgagaatgccaggtgtgttattcagctctgatgtttatgctacaattccaagatataagaccaaaaagaaataacttaatatttgttattcataaattgattgcagttgatctataatgacttacaggtttt

SEQ ID NO: 78001 - DNA, 578 bp, Zea Mays
gggcaagtcatcaccaacacctagccaaaataggggaggatagagctcctgccatttgtttcaaaaaaaataggggaggatagagaggcatgagaatacccagtacatgtaaagcttgtggtagtcttgtgtgaatagacataggtctgtacatcagtacatgtactcttctagtactagacacaattcagtaccaggcaacccagtcattttatgcatatccaggaattagggctgtttggatagtagcagtccaacaggaattttcaggtacatgtaggaaccaatacatatactgatggattcttttttggaggggttgtgtgatccaaactggagaaaattgttggttgttggatttgtttagatgcctttactcaatatgcatgtagtagaatttcatttccattttagctttcgacagcttgatcaccttgattggttttcagtcctaagagtacaccagctataatgtggagtggggactgtcccttcttctatggtgggctcttcattccaggtcttttggcacactaacagcttgtcggcacttcacaactcttatacactaaatttgc

SEQ ID NO: 78002 - DNA, 701 bp, Zea Mays
ttctaggaattttacaagtttctgcaattaatttcatactaaaaatcattttccttgatcatttattcctttttactgacttctggactgcgtgcataaaaacaaagaaatgcagggtctctggggtaaaatttcctagattcggtgaataggatctgtggactgcgggttgaatcttgaataacccaggggctcataaggaaaaacgcgccagcaaaggggtacgggtggcgttggaccgttggatcccctttggacggctcggattagatcggtgcaaagaataattgtgatcaaatctgtgccacccattatcctaccagcggttcagattatcccactcaatcccacgcgtccagcagccgatcaatgcaccgaattcacccatccgaaccggtatacaagattctaatctacaccgtccctatgatgatcgacggcctctcaactaaccggtacgatgcattaatctaggtcgtccattatgtaatctacgaccgccccccccccccccttcttccccaatccgcggcgaccggacgcgccgccgccctacatccgcccgccggcgagccgaatccaggtattttgaagcgtgaaatacaaattggccagactctacatgatgcggggataagaatgaattggtaggggagatcagtaccagtaatcggagattagcgcgtgctgcccaccgcggg

SEQ ID NO: 78003 - DNA, 627 bp, Zea Mays
cattgcatttaatgtacaatgcgctaatgagcaatggggctatcattagggaaaagggcagctagagtagtaagattccgcttaaaatcaaagtttttatgtggtatcatagaaaaggggtggtgctaacaaaggacaatcttgggcataggaattggcatggagataagagatgcgttttttgttcttgcaatgaaatgattcaacatttattattcgactgtcattttgctaagttcatatggagagcggttcatattacatttggcgtctgccccgatgagtataaatcataggtacggtgattggctacatggtctcaatagccgagccaaatcacggttaatggtaggggttgctgcattatgctgggcgatatgacttagtataaatgatatagtctttgaaaaatgttcgcctaaaacatatatgcaggtgctttgtaggggggacacactggtgccggttctgggtgcagttgaagaggcgttacaaggacaaaaaggccctgagagacgcatgccgaaacttggagacgacaattgtgcagatcttcacttcctcgggatggcgtttctgttataggattgcatcgtcctaattttgtttcaagtattagcattcttt

SEQ ID NO: 78004 - DNA, 541 bp, Zea Mays
tgaagtccggtctgctgctcctaaccatatagagaatgctttgagagatgtacacaagagagccacccaaatacttgcccaacaagcagtgggaaatcagctccagcttttgattgtaattcttcctgaagttagtggttcttatggtatgcatacttgcctcttgttctgggtcatacacaccttacagtttattagaatttttggtatataaatgactcctacttttgcaggtaaaattaaaagagtctgtgagactgacattggaattgtatctcaatgttgcttgccaaagcatgctagcaggccaaacaagcaatatttggaaaatgttgcactcaaaatcaatgtcaaggtctctcaatacctatattttttacattatgcttttttttattttggttctttcctgcaggaatgtaacaattcctttcgtcgagcaggttggtgggcgtaacacggttcttgagcgagccttttcacacgatggtataccttttgtctctgaagtcccaacaatcatctttggcgcagatgtcac

SEQ ID NO: 78005 - DNA, 536 bp, Zea Mays
gagatgaacggacacggtcgtcggtgagtgttcggatggcgaggtacgacggcgagcggcgtggatgaactccggcgagtctccacggatggcaggcgattgtcgaacggcgtggtcacagccacgggatgctgcgcgaacggcgaagctccggtggggaacgtggacggtaactacggccgaaggcgagtgacagtaacagagaacatcacacaaggcaggggaccgggcaggaaacaatttgggcgagattgacgcggtgccagagaatagagcagcaaggcacgatgacgccgccgagcagagatgaggggcgagggaggagaggctcagcgcgggctccatttataggcgatggaggagagggaatcactgtagaattggtgccgattgaattcgtcgacgactaaaaacataccattaatggtgattgaatgggaagggagaaacggcagccgttaatggctcggcatcaatgggcggaaacggtcgagttaacgaaggatgaacggactgagcgcgacgtttcggtttcc

SEQ ID NO: 78006 - DNA, 703 bp, Zea Mays
ggaaagtcctccaaaaagttcaagtgaaatagagaaaaaaatagagaagaaaagctaattgcatcctatctaggtgcaccagaccagctacaatactagtccgatggtgcaccggaccgcctccgtacgtgaacagacgaccttcaggaattatatttttataatttatcggaccttgatcagttcaagtctggtggtgcaccaaacctcagcccaacaactacttcgcgggcgtgctagctacccaatggctaggtgacgtggcacccgatccggtagccgccagaagggaaaggcacccaattagatcatagagtccgactacatgactcagtctagtggcgcaccaaaccggtccattgtccccgatttatgtgtagtttcctggttttgattccaacgactatgagaggtcttggagctatacataggccctcccacaacctcagcagtacacaattgataccctaaggtagcaaataattgtagaatcattctctgtccctctctattatattttgtgttagttttagtgcttggcgcgtgatgtagccaaaacatagagttgtgcgactatgtagaaaggcgagcaagatcttgagcatgttattgcgttgtcgagctatcaacctgtgatagtcgcaattttgatatactacaacattgaccagatataagggaagactaagcaaatggaggaaag

SEQ ID NO: 78007 - DNA, 435 bp, Zea Mays
ttcggctgctgctcgagcccctgttgcttccatagctgctcatggaggaaaaggtggctggacgttatggctcactgtttttctttagatgtcctatttggctctggtggacagaccaagaagaaaattattaatccttctagttttctgtttcatccggttcatattttagacagctttatgtttaataaaatcatagcttgaagcgttgatgtatgcaacttcatttgtagaaacactcagatggcttgttctggtgattgtagtagtagcagctatggttgggattcagactatatactatcggcctaaaggtttagaaaaggtgaaatgaacaacttgaggtgagttactaatagcactaaaataactctcttgttctagatagttaaatgaactatgggttacattcgaactgcataaggtaacaataac

SEQ ID NO: 78008 - DNA, 865 bp, Zea Mays
gccgatatgatcccgaccgtgtgacctctgatacgatgaacggtccttcccatggtggtgacagcctgagtcgtccctcccccgtttgaatttggtgaaggaccaagtctcccactgcaaaggatcggtgccgcacagctttgtcttggtagcacctcaaggtctgctggtacctggccgactgaattactgtgttcaatcgttcttcctccagcacatcaatgtcttccagcctggttgcttctgcctcagctatgttttcgaaagtcaacctcggcaccccgaagattagatcagcaggcagtactgcttttgacccataaaccatgaagaacagggtatttacatgcaaagctcgactgggttgagttcgcaggctccagaccacgtatggcagctctctaatccattttcctgcaagcttttcactcttgtcgaataccttctttctgagtgcttctagtatcattctgttggctctttccacctggccattggctcttgggtgcgccactgatgcgtacttgatctgaatacttctttgttcgcagaaatcaaagaattcagagctagtgaagttggatcccaggacagtgatgatgctattcggtatcccaaacctgaatattatgtccaggataaactccactgctttggctaaggtcaaggaggcaattggcttgtactctatctattttgtgaatttgtcaatggcaaccagtatatgagtatagcctccctgagttttcttgaaaggtccaatcatgtccagcccccagcatgcaaacgaccatgttacaggaatggtctgcagctgctgcgcggcaagtgttgttgcttcgacaggaaaattggcacgcttcac

SEQ ID NO: 78009 - DNA, 967 bp, Zea Mays
ccgaacgatcattccagggtcgagttcagaaccggcctagggcgccaagacttcgccatgaatcgagccaaccaagcaacttgatgttcccagtgtggaccgatgccttcccctttttgtggcccgactcaatgtcccatggcttgaggcagcgttcgccagctagttgccgcacaaaagaggggggatggttcttgcgatcggttggaggcaaccgcatccctagacacatgacgttcgtttgaggcaaaacagaggtcgacaagcatgttgcctctgacctcgtgcactctagttaattataccgtatcgcttaaagggccgatgataagcggggaccgatcgctccctgagggttggggagcagccggtcctgggaaggaaaaaggttctgctctctgtggcctttcattttcctagggttcgggccccctcccagacgacgtcgtttggcgtaagaaatctttgagtaactcgtagtccttataggcatgttggaatgagccttgatggttcgaacatggggcttcaagtagtttttcaaagtgattaggggtttcctcatctgcaggccttcctcccgtccggcttatcgtagctgttgatgcatcagctcattgtcgtcgacctcttctcctttttgcgttgaggcagtcgtcgacatcttcatccgaccccctatcgtgcttagtcctccatttgcgttgaccaacgatggccctctctacgtcctctcctgatgcatggccggtcgcaatgtcgaaaagctcctttatcgttcgcggggtcttccgtccgagcttatgcaccaaggttttgtcggtggatccccaggtgaaggcaccgataacgtcagcgcccatgagattggtcagttgattgcattgttgcgaaaagcaccggatatagtccatcagggcctcgtccgacttcttccaacattcgttaaggtcccatgagtttctcg

SEQ ID NO: 78010 - DNA, 716 bp, Zea Mays
ggaggatgtagcttcccaccagtcttttatgctggagaagtgagtagggtcagcctgggccgcgaggctcaagccctcccaaactagaatctgatgccacaccgcacgggcaaaagggcaatgcaaacaaaggtgggggccagtctccaaggggccattgcagagggagcaaattggttggtgcgtccaaccccaagtggcaagattgttagcagtaaggagcttgtcctgtagaagaatccaagcaaaaatcttgcacttttgctctacccgtgcccgccaaacaaaattagaattaatgtggttgtacgatccgatgaattgtgcattgtaggctgattttaccgtgaagacaccatcggggttccatttccagataatggagtccgacacctgtggttggaggtgaaaatcatggagtctaaactagagggagacgaattcctcgatctgcaccatggaggtaatcttgcctcgcaacgacctaatccaattctcgtcattgatctcaatggcaactgacttgttctttcttgagactagctcaaagaggtgtggtgctatgtttcttggcgccatgccatcaagccaactgtcgtgccagaatttgggtgtcttgccatctccaacagtgacgatggtggaggcgctaaagaggagcctgtccgcaaggttacaaggcacatcaaaccctttccaagggtgatcctctgtcg

SEQ ID NO: 78011 - DNA, 401 bp, Zea Mays
ctaaaaccaaccaagtgcctaggtgctttcaaatttgatgatacccgacacaaaggtctagaccggtaaaccaaaccaccccatgtaattcatctagcaactcatcaatgacatgtaaagggtacttgtttttcactatgaaagcattaaggtgtcggtaatccacgcaaagtcgccaagcccttgtcttattccgagtgagaatgactagtgaggcaaaggggctacaactgggttgaatgagtacattttaagaagatccgttatttgacgcccgatttcgtccttctgggctagattgtaatgatatggacgtagacgaaaaggaaaaactccagggatcaaagatattgcatgacagtgtggtcgggcatgtggcaatccaattggcttataaaaaa

SEQ ID NO: 78012 - DNA, 588 bp, Zea Mays
atctagtaaggcacccgcgcactatttgtttgtctcactgacctttgcgaaaaacccccctgcgcttcaattccttcacaccccgaggtccacgacggagagcggcggagaacagagctccggcgaactcataccgaccaagatacttaaggactggtgctctcatttggctaagacgtaattcaacagctatcaagcgtttcccctcaatcaatttcactagtggagctctaaatcgtccggtccacgtagacaacaaagacaaaggaggaacagaagtgttcctggtgatctaggtcaactagctcaatcgaacggttcaaggagcatcaggaggtcctaaggatgctgaaacggaagagcagagagtatgatcagacctagaacatgctagtcatggcaagggctctttcacggtggcggagaacagatttggggagaacgagaaattagagaactatggtggctaatagaaggtgggaatgattgctctagctttgtgataaaatggtgtagcagaccgggccatcaatttataggggcgctaagcggtggccagtgaatttggtctcgcacggtggcggccgg

SEQ ID NO: 78013 - DNA, 502 bp, Zea Mays
cgggtcaagtcggagttaaaatggatttaatatgaattatctaaatttctatacatttttacatttaagttttataccttaaatagtttccagaactaaactgcaaaagccaggggcctaacagctaagtcatctaatggtggggggatggcgggttattttcaatgaataccgaggtctcatatgtaaaaagtcctcaatgaaggggtacgggtgaagattggccgctggatttgagatggaaggctcagattaaatcgagcaccaccctgaaccggtacgcaacaggaacccttggatctaaaatcaagggcagggatttaaagaagtcgagatccccctggattcatccgatccacgacacacggccacgattcattgagacgaaagggtacaccaaatcaaatcgtggccacccatatctaatacgtcgctcaggatttatttcgtctagatctaatcctagtcgtttgctattggatcaacggctagatgcctccca

SEQ ID NO: 78014 - DNA, 556 bp, Zea Mays
cataaacatctcattgcctgaggaagtaaacaaaaaacaaggaagcacctaggcatgagagttatccctactagcccacgtatgagtagcccatttatccctcatatgggctcatgttgcattgtcatccatagcaattccaagataattaaacacattattgtttggcactcaagtcatttacaatggaacaactttactattcatgtgctagaatctagttatgcaatatgcaacaagcaagcactagtttaacttatgtcttgaatggatgaaatggtctattgtcaatgatgcaaaaatgattctatctctagcatataccctaaacggatgcacaaattcattttccacactcgcactcaactatccaccttctagcagagtgtagatgaggacacgcaaaatgagtgcttagcctcacgacaacccatatctacgagtttatctctcctccgttagtctatatatgcatctgcatgcacactctattggaagcgtcctcttttttgtgtgcacacatccaccctatggccggctattttgcacatgcaca

SEQ ID NO: 78015 - DNA, 442 bp, Zea Mays
tccatgaatcagagcttcatattctgctgcattgttagaggctggaaataacaactgtagggcatatctgaggtgctcacctccaggtgcagtaaagaggatccctgcgcctgctccctgcagctttaatgagccatcaaaatacattcgccatacttctgcagtttctaggttatctggtacttgttgttcggtccattctgatacaaagtcaaccagtgcttgagttttaatggcagtgcaaggtcgaaattcaatgtcatgagatcccagctcgcaggcccatttggctattctcccaatggcttctttgttgtgaaaaatatctcctatcggaaatccagtgactactatgactttgtggtcgtcgaagtagtgacggagcttgcatgaagttagaagtactacatataatagcttctgaacttgagggtattttttc

SEQ ID NO: 78016 - DNA, 396 bp, Zea Mays
tgtattgtgacgcatcaggcagtggtctaggctgtgttttaatgcaagagggccgagttatagcatatgcttcaagatagttgcgccggcatgaggaacattatccaactcatgacttatagttagttgttgtggttcatgcccttaaaatatggcatcattatctgctgggaaatatctgccatatatatatagatcataaaagcttgaagtacatttttacctagtcagaactaaatatgaggtagaggagatggcttgagctgattaaggattatcaattagaaattcactatcacccaggcaaggctatgtggtggcatatgcactaagtcgcaaggcttcctgccattgtcttatagtgaaaacttcttacatcacattatgccaagaaat

SEQ ID NO: 78017 - DNA, 699 bp, Zea Mays
ggtggtacacttagccttttaggccaagtttggttaggttaaatggtcagattattttagtgttccactgattttcttttttatgttttagtgaaaatttattataattcccagctgaattcattgggggtgagattcattattcttcccaattttctctcttctttcccttttctcttatgttttaaggtggatttgaactacaatctagttttataaatttccaaaaattttgtaaaaattacagtagcttctcactggtgtataactctctgtctcaaaaattgggattcaaaaagttaagggttctctctatacaaaattataaaatcttagggcagagggggtgctttgaactacaactctcctctaacagtggattattccctaaggctcatttttgctggtatttaggtgctataatatgactttgtactaatttttagtcactaatacgtattggttattttactgtgattttctaaagttgtttggccaaaggggtgctttctactaccactatacttgaaaaatgtcaaacaacatattcctaattttttctatcttcttctttgtgcaagagcaatcattctagaatttggcattttttttgcttaagggaagagggggtagaaattcttggactatatggcctttttcatggggtagggggtaatgggtgttatcttatatttttga

SEQ ID NO: 78018 - DNA, 379 bp, Zea Mays
actcctaagcatagaagatgatgaagatttaggattcaaggttacttacattagcaaacgcattgctgagttgttgcagcaagcccaccagggagcgcctaacgttgtgtggcttcactagcaagtagaaatcctttactgaagtgataacgtgtagaagcttcctgttgcaaaccttcaactgggcacataatgaaaaactcctttattacacgtatgcccatacccacacacacctaaattggctaccacaagattgcaatttaactcagaagtgcaaatcaaattgaatagctacaacaccaatgcgaacgaactccaattttgctagcgcatccaaatgtgtggttgaatttcacttagcaagctgaaaaccaaa

SEQ ID NO: 78019 - DNA, 888 bp, Zea Mays
ttctctgcagcagaggaggattagaatttggataaccaaaatcgagaacttagtaggtaggcaactctttgtttttagttaactgtctttttgctttcctcggggaattggattaagaatcggctagaagaaacagaagtgaaagcaactgcgctcaatgttgcctgataaaaaaataaaaaatgtatgaggtaggcaacccagattttcatcacacaaggtcttttctatagaaatccaggtttacatgcatgcaacagccataatgagcatctctatgaggtcaatatgtgcagtcaaccaataatttgattttctcctattttaggttcagctaaaagcttttatatgctacaacacataatgaacactacatggatgtagtgcaagacatcctcatctgtcacttgcacggttgggtgggacttgaggctgacagtcgctttgctgacctgaaatcacagagccgaaatctccaaagggtaataagatatcccaatggaatctcgctttttcgcaaagccacctttttttaaagaataaggaaggatgctttgtctgtgactcatgggcaatacaacaaacatgtggcatgacgacaaattagcatgatcttgggttcccctaataagatatcccaacggagtctcgctttttcgcaaagctaccattttttaaagaataaggaaggatgctttggctgtgactcttgagcaatacaacaaacatgtggtatgccaacaaattaacatgatctcgggttcccctgaaaattccctgtgagagcccttcaggaatcagcagaaaagaagttgtacagagcagcgaccaaacaattatcctatccttgataaaaagaggtggtgataaatataacatatatatttc

SEQ ID NO: 78020 - DNA, 611 bp, Zea Mays
cgttgatatttgtcccggaggactaataaggaaaggcaaattctatcggtgacagtaaccatccagattagtggagcagttggaacgagccgtagcgttttacacagcctgctgctgtaggttccgtagtgcttgctccaagcgtcctctctttgggaaaaccagttcacagagacacacgagtagacgacgatgtcatatataagagcgcagctgaagtacgtaaagtaacaccgtcgtcgatcatgcaacggcaacggcaacacggcatatgtatgtgaagaacaggcaggaacgaaaatgcaagttgtattggtagctgatgtcccggcggtgaagtggcgctcaaggcttgtcgtacgtgtgaccagaccagctcttgtgagagttttgtctttgactcgatgtggcttacgtacagctagctgcgccacaaattaaagagcccaccagttgctgcccggtacaattagttaattcattaaccgaaggtttgcccagttcagaggcgtataaaagctgcacactttcagctaggctgggaatgagacgaattcttactgtgctaagtcgattttaacacggacacgtacgtcgggcgtcaatcagga

SEQ ID NO: 78021 - DNA, 961 bp, Zea Mays
aacaatttactaagtgctagaatcatacctttgttccttccatacaataggatttgcaatatacacaaatattcacttttcccatgtttctcaatttgcctttcaaatacctgtgcttatgctcatacatcaagatgttagtccaatacaatgtgttaaatatttaatcatcaaaacaaaatagaaatggtccaagggcacatttctgtttcactaattactaattaaacttatattttgtagtcgccttgtacttgtgtgagttagtggcgtccaatcttcaagtgtggcaacaacttgtgaggaattaaatacaggtgcaggtgggagcatccagtgttttaggaacacaaggtgtagtgccaagtggagaaggtggagctggcacagatggaagacctctttacagctaggaatgtccagtattgtacctacgcaacttgttgcgccaagtgttgtagctactccatcatgccatccaattattgcagaagcaagtggaggaggtggacctggcactggtcctcaaatgcttaaaaagaagctcacaccaaaaaaggaaggcatgggcacctgatatgtgaacgagaatgtgttatgtgaagctgaaacactatgttattgtgttgtgtaaaacaatatgttctttgaaacactatgtgattgttgtgttattgtgatagaatatgttctgtgaaacactatgtgattgttgtgttattgtgaaacaatatgttctgtgaactagttgttacttgtttctgcaatagtgaacacactatgcaactgtgtaaacaacattgttttatttctactcttttttgtttgggagctggttgttacttgtattggaaacaggctgcaccagcttgcaggctatatgttgttttttctgcaaacaccaccagtcacaaacactataaaattggaatttgcagacaaaaacagtctaaaagtgcca

SEQ ID NO: 78022 - DNA, 1062 bp, Zea Mays
gaagacccatcttgtaccgataggatggcagttagaaggaggtggcaccaaaacccaaacctgatttctttcaaaattttcaagctcctcatgcatagcattaacccagttaggatcagataaagcatgtccaacatctcggggctcaaaagtagcaacaaaagctgagtgagcaaaatgagaaatgtgatgtgacctagagtgagtgacttgctcatgaagctccccgatcatctgttgaggtgggtgacggcgctgaatatgctgtggagcctcccttgaggaagtggcctccccctcaatagtagcttcaactcctccagtctcagcaggagctggctcgagcggaccccaagtggtggaaggagtggggtcgggttcgtcagccgtagtagtggaagcaggctcgactagggcggccggtggagttggctcgagagcaacccaatcggcgtcgtcgtgctcctcctccataaagatggtctatcccatctgatctagacctgcaggctcaaagacaggggatggataaggtgcagtctcatcgacctcacaagtctccataatgcagctagtctctaggttaagaacacgataagcatgagaatgtaatacataaccgaaaaaccccatcagaagactgggactcaaatttgtctagattaccctgttttagcacaaagcatctgcagcctaataccctcaaatggctgaccttgggtggtcgtaagaagttttgttcagaaaagcccaaagaaagatacgactggacacatggcaagcagtgttgatcgcttcggcccaaaaacgcctaggagtcctatgctcatcaagcattgtcctggccatctcaacaagggtccgatttttgcattcaacaataccattctgctggggcacatacggagaggaaaactgatgctcgagtcctaaagaagcacaaaaggttgcaaattgagtatttttgaattctgtgccattatcactgcatatagctctcatagcatttttaggaaactcattttgcaaccgaagaatcaaatctcgagcatgagtaaaagc

SEQ ID NO: 78023 - DNA, 570 bp, Zea Mays
gttaatttccctataacacagggacgtctttagaaaaccgtatcggctgaacaagtgcactggattggagccgtctgatgactgatccaggatcaagggctgaagtctcccaacaccgaaccggtacactgttgctaatccagtcgttcgtgctcaaattggtgaactggatttaaaatgctgaagcgttcactggctatctaatcatgtccgtacattcagatcgaacgactggtgcatcatcccctacccctggccatatcggcagccaggcggcgccatcagtccacgacagagctggcaccgacaaaaggtgaaggtgaactaactaccctttgccccaatctgaatagcgatacccataaccgagagcggatttaatagcaaacataatagagggtgcctcaccaaaggtgaagcgaagacgagcatgacgctgtctgtggccttcgctattccccgatgaaccatatcaggctccccctgcacgatgatgccacaagcacgcgccacatggacaaggtgtggtcccaggtgagaagtcgttgtggtccatatatatatatatat

SEQ ID NO: 78024 - DNA, 757 bp, Zea Mays
ggattcgctcggcgccactgaattcgttcatcgtgtcgcctatcagggggaaccaccagtcttcgggcaattcttcaccgaagtctggacatcgctaccgtccgctactcttcgtggacagcaccctctacgcctccatcactggtacgaagtccttctctggattcgccatgccctccagttcgtgtagcgctagtcgggcagtgtttgaaggtctcggggcgcgggatgactatctccggcgacaactccgtcgtggggagctcctggcgccgtcgctcggctttgacagaggtggaagatgacgcgcctgcgccgttgatctattgtcgaatggctcggattagataggagttaccccccttcgctcaggtgaatgctgaccgttcgatcgcgatcgggcgagccgtggcgatttcaggtgtttttaaatccaagccgtagaatgctaatcgggtgattcctattgattaccggttcataccccttcaccatctaatctcatccgctgtatttcgatcgtgcggctaggattgatggtcatagcttcagccgagcgcttttacaaatagaacctccagattaaagagtatcaacccgccgtccacaggggcagtgcgttgagtcttggggattctttcacgctagcccctgcacttctttgtatttggcgcccagttccgagagagctgaaaataggaaattaatattagaaatcgatttttaatacaaaaataaatctagaacttgtttaatt

SEQ ID NO: 78025 - DNA, 374 bp, Zea Mays
gtttgagcaggagagtgttcctccgtccgattttgtttgggcggtctagattaggtggggagtgctgagtaattcgggtcgttgatctcctgcacaacagccgagattagatagttcttacccgttcgcacgattggacagatactgttgatccgcgatccttcggttcagattaggtctggtttcattaaaccgtggacgtggatctcagatccagtggcttggattgcgtaccgattcatgtaaatctagatctaatctgggccgcaagtacgtaatcgggtggccaggagcagaggataccctttcgaccctagcaaaattattaaagagcccctggggttctaagcaatcaacctgcagtcctctgcgca

SEQ ID NO: 78026 - DNA, 427 bp, Zea Mays
ggagagcgaaggacgagggagatcatgtggggcagccacgacgacggcatgagcaggccagccatggcgacgacatgggtggggctgcctgttccagccaggagtgtggtttgtgctcgtggacgcaggtctgattccggtcccctgttctggtcccttctatccccaatccccttcccagtgttgttcgccacgcgctcttaggcgctaaggattgactggttctgagttctgtatgcgagcattcactttacattttgagtatactgtcctcacgtccctagatgcgaatttatgttgttaaatcgtgttgatatctccaacttttataagttggtaaatgggtcaattggtttaatacactgttgaattgccttagcacacatggtaaataatccatttcttcattacctttagtctgttgctg

SEQ ID NO: 78027 - DNA, 445 bp, Zea Mays
agatagctctgcgagtgcaccgccttttggatcttccagcttttctgcttgcagccggtgctgactctgaggcgcatctcacctatctgcctggccttctgacccttctgactatcagcggcagatatgttgaggagtgggtccgagtcttctatgcctctgtttggattgacccggatcatcactggatgaggtttcgctttgagcgagaggatgtcacgatcactgccagtcagatccgtcagctctttggattcccagagtcgacgactcgccttcacagcctctgctacggctcttctgaccctcctcgtcgccctcacggcggtgtggctccagggacagctcacgtcgcggctctgttccgcccgcccttttcagatgggtcgcgacgttcaccagcagactttactacagcagcgaagtacttatatgagctcatcag

SEQ ID NO: 78028 - DNA, 365 bp, Zea Mays
cgggggctgtgtcccactttaccaaaaaaatgcgggccatgtaggccaaggatcccacgtcgtcaagtggtgtacacgtgggccgtttttactaaaactcatctgtgaccaatttatttcatcattacgtcagccaaacaaggcaaattagcgatgacgatatcaaatctaatctgtgacgaaattgttgcgtccaaaatttgtgtctatgacgttcctttcattttcatcattaatattcaagtctaatctttgtcacttgtatttgttgacgaagatgtaaatttggtcatagaaaggtatcaatctgtgactgaagtcaccagcatcacgagaaaatcgtcactgatgatcacattctttag

SEQ ID NO: 78029 - DNA, 517 bp, Zea Mays
cgttaaatcagttggctagctcgtcggtggtgcctaaatggttggaagaggttatgcagggttatgagaatgatgcccaagcctagaaaatacttggagtgctagcaacaggggtgagttacctccgtatgagttgactgatggggtgatcagacataaggggcgagtgtggttgggccataacgaatcacttcaaacaaaggttatgcaggcactacatgatagtgctctgggggccactctggttttccgtaacctacaggcgagccaaatccatcttcagctggccagggatgaaaaagcagataaaaggcctttgttcaatagtgccatatctgacagagtgcaaaacctgatcgtgcaagtatccagggctgctagttccactacatgtgccggaccactcctggcagaccatcagcatggacttcataacgagcctacccaagtctcgcaggtacaactgtatcatggtggtagtggacaaattttcgaaatatgcgtatttcattccttt

SEQ ID NO: 78030 - DNA, 367 bp, Zea Mays
gtcgggtctatcttctccttcctcgccgcatcaggaacatgccgtagttcacgcaggaaagtctgcctcgcccactcgaccaacccggactacccttcctaccgaacgcgcggacgttgcgggttcggcaccgcttgacccgcgcaactcgttgggagtccgtggccgggaatcacgcgcaggccgtggatatataagcatgcgaccgggggtatcgccatggttggtgtggtaagctcgtgaagatagcagcagtaagccagttgcctcgtgaaactcgctctgtgacggggagcatcgtgtgacctgtgcgctcgctggcggcagaccagggttgctggcggaggccgtttgatttcttgccgga

SEQ ID NO: 78031 - DNA, 449 bp, Zea Mays
aaaattgtttttgcgaattacaagggcgaatcggccctgatgagttaaacaaaaaatttgcggaggttgtcaatattccaggagtgctccaggtcttcgccgtttggcgttgcgagcctgtaagcgctgggggaagctttcgtcttgacaatgaaggggccctcccacttgggctctagcttgcccctggactctgtccgagctgttcggacgagtatgaggtctccttcgctgaattccctcgggatgactgtgtggtcgcgccatgcttttgtctgggcttggtatttgtttagggcttgtaaggcgaagactcggtctctgtcgatgagatcctttgaagttggctcgtccacgttggggacgcctgatggagctgttcgtggggacccatgttttatttcttgtggggtcatggcctccgatccgtatagaaggcgaaaaggagt

SEQ ID NO: 78032 - DNA, 727 bp, Zea Mays
tctggattacgtctcagtggagacaaccttgcaggatcagattatcatgacacaactcagtgacaagggagtgtagattatcaaggaaatgctctcacaaaagctggagaagtataagtgtttttgccaggacagtaagggcgtactatggttcgaagatcgacttgttgttcccaaggatcaggatcttaggaagaaaattctagatgaggctcatccctccaaattttctatgcaccccggaagcaataagatgtaccatgaccttagatccctatactggtggactaggatgaaaagggatattgctaaatatgtgtcagaatgcgacacctgccaaagggtaaaggcgagccacttgaaagtagttggtacccttcaaccactaccaataccatcatggaaatgggatgacatcagtatggattatattgtgggattgtccaatacatctcagaaacatgattccatatgggttatcgtggatagacttactaagacgacccattttctcctagtgcacacaacttattcggcaaggagatatgctaagatatatctggaccgcatagtttgcctgcatggagtgcccaaaaccatcgtttctgatcatggtacacaatttgtagcacgcttatgggagcaattgcaaaattcccttggcaccaagcttattcgcagctcagcatatcacccccagaccgatggacagactgaaagggtgaat

SEQ ID NO: 78033 - DNA, 360 bp, Zea Mays
ggtttatttatcaaaaactaggggtctcatatgtgaaagtgacacagcgaaggggtatgggcgatcgtgagtcgttagatctcatgtcaacagcccaggtgagatctactcacttaacgaatcgatacgcacaaggcaccatcggattgaagatccacggtctggatttaaaacgactaagatcgactttcgtccacccgatcactaacctacgacccagatccggtcggcaaaggggtatgcgatgtcataatctcgtccacccatcgacgatccgacggccaaaacactacaaggcgaatcgttatccgaggttttaatctcagccctccatctagatctcagcgtccatgagctatc

SEQ ID NO: 78034 - DNA, 369 bp, Zea Mays
tatctaacaattctaggatctgcagaaatgtacctatctatggtcgtgtttggttcgacttttcagccgattctggcggccataagcgggttttgctatccaaacgtctagattctgaggtgattctagccaccgccgattttctgagaagcaggttttcaacgatggcggagaagcagctcagcacccacgtccgtgagaagtctcgtgaatcctggtctcatctgcttcgtacgtatgtctgactctctctttatctcaacccgcatcgattatattactggtaaatacgcactaactgtactaggacgatcagtaatcatcaacactttagccgtgatgttaattacgagtgttatattagataga

SEQ ID NO: 78035 - DNA, 824 bp, Zea Mays
gggaccgccgtctgctccagatggctgcacctttggcaccttggcaggcgccttggtaccggaagttgaggggtccctccctccgtcgtccgggcgagcagtttctgtcgccagggcgtgcagcttctcgacaaccgtaagcacagcggcatggtcgccccgcacggtgaggaccccagcaggggatggcatcttgaggaccaaatacccgtaatgggcaatggccatgaaccggtacagggttggcctgccaatgatggcattgaaggggaggttaacctctgcgacgtcgaactggacgttctttgtgcggaagttttcctcggtcccgattgtaaccgggagtgcgatgctcccaaggggatataccggttgtgggcccactccagagaatggatgagagggtcccagtcgagaccctgagatctgtagctgcttgaatgcagtgtggctgatgacgttgagcccagccccaccgttaatcaggacgtaatgtagccgcatgttggcgatgatagggacggtgatgagcggtagtgtaccggcccctgccatgttttcggggcagtcggatgccccgaaggagatagtggtgctcctccaccgctgatgtggagcagccttcgggacccctgggaccgccgaaaggacctcttggcgcagggacttgacgttcgtgcgggaggtgagctcccagctcccgccgtacatcacatatagcttcttgcggcggtcgttgtcatcactagagtcggagtctccagtgaaaacgtccttgaggaccccctcaggtgactgatacccgaggtcccgttctcccgcgg

SEQ ID NO: 78036 - DNA, 848 bp, Zea Mays
taaagcacacaatcaaagtacataatataaatatagaagattaagtgcgatagtgatacaaactcctatcaatgaccccggtatttttaatgaggtattgagaagcacataagtttcccctagttcttattagatcctctcgcaaggattcccacatgagggccaaggtccttgtcagataactccatggataaccctaggccttgtccatgtgcaaatagtgctctagtgtggcatcacgtagaagatctctgtcatcttcactatcgagtttatgattgaaacaccacaagcctcattccatctaatagatggtggcggccacaccacaaatgtagttggtgtgatcttgcaagactacaagaccatctagtacaactagcccaatggtgcatgcaagcatcaaggggtaagaggtgttctaacctcactcaaacactagggctaaacatagagcagtgatgtaactaccccaagcacttcacaaagcaccaacactaatcatcgagtgatcttggagcacttgggtgtctataactgttagagattggcctaaactcccttcatatgttccttagctccaaaacctcattttggttggttggaatcctatttatagcccccaagaagagatataattgttgcaccctccacatccaactctacataccatcaaatcatccgatggtacactgtcgaggcctctcaacggctatagtgctagtagcatgtcagcactagctgttatcgatcgttggagtggtgtactatggtgtacagttcgatgcctagcgatggactagtccaacatcctgatttcatgtctataacctttttgttcaatgtag

SEQ ID NO: 78037 - DNA, 665 bp, Zea Mays
aaggttgcaaaggaatgtagatgagctccgggaatcaaaggaaagatattacgaaaaatccttggattgtgccaagaagctaaaagacagttttgcaatggtgggtgcttactcatccgagcaaaaatttattagaggcgatcccaaaggaatcatcgaatggatcggtgaaaaagccgaagcttttgaagagatccttagtgatcatggtgatttctgcacctttgccggtgccagagggattgcagcaattttagaaaaatctggctatgaacacgttaaagttgcaacccagacgaaggctgtctttaccatggagaacacgaaggatccttcggctgaagcgactctgatgggtggaaaattttactccaacatttggatgaaaggaggctgagaactagccgatgaggcaataaaaaagaatgagaaagaaactcatgaggctcgagaagaagccaagccagccgaagaggctgccgagtgcacaaggcgcatatgtattttaactgtttcaaagctttatcattttttggcttcagattaacaagttattacttctactgtagctgaactttctccgccacctaagccctatgatctcgaagctgatccagcaatgaaggcggcactagaaactataagaattgctgaagaagttgttg

SEQ ID NO: 78038 - DNA, 733 bp, Zea Mays
atgactttgcggctgtcaactattatggccgccctgtggagggggcattttgactggttgatgggattgcgtaggggtttttgcttattattacaaggtaccacctcattaaaaacctcaccccctttgggaggaaaagagtacgggcctcaatgttcgaaagtgttagtgtattacaaaggctcacgtggctcaacagaagcgaagtccatttagtggtaaatttttctcaaattgtagaaattcgaggagtgttcgagttcgacttctatctggcttgatagtttgtaggaacttggcgaagtttttttgattatgaacggaccctctcactttggctctagtttgcttttgttttctattctagcgactcatatgaggacgaggtctccttcttcaaactctttgggcttgactgctttgtccctcaatgtcatggtggaggcttgatacttgtgtaatgattgaagggccggtgcacgatcgctgtctaggaaatctttcatcattgcctcatcgatgtctgactctgcattgggggccattcgcgacgatccatgcttgagttcctatggggtcatggctttggctccatacatgagtctaaaagggaaaaacctgttacgcgacactctattgtgttaagcccccaaaggatcttgggtaattgctcaacccactttcctttttatctttgagtaaccttttcttgatggttgtgaaaatttttccg

SEQ ID NO: 78039 - DNA, 276 bp, Zea Mays
tctccatgcccttgtcagactgaagctaaatcaactaattctaattcatgctctcctgagaaaaagtgtttgtgaaatttctactttaaccccccaaagttaatagagttaggtggcaggggtgcgtacccagcgaatgtagagcagtaagggacaaagagaataattggatgagatatgcttccctataagccaattcccctaggtgtgctaagaactggcttgaatgctcgtgcgtgcttttcttgccttcaccgaaaaatttatagaaatccg

SEQ ID NO: 78040 - DNA, 370 bp, Zea Mays
ggggcatataggcaaaggaaagagcatttagctagagttctccactcactcagtctgacacttgcacctgttgtaacacgttccacagtgaatactacgatcagcactacactgaactagggcactagcctgaaccggtataaaccctctgtttgagtcacccgtgattaaccattcaaagtgagtccacgctatgctccccaaccgaacacaaattttactttgtccccgatttctgaagccactatagttggcgcgccaggtaggggatccgttagcgttccaagcgactttgttcactctgatggctcagtcatcctccttcactgttggcgagactttcgcatggggaagccacatcatctttggc

SEQ ID NO: 78041 - DNA, 503 bp, Zea Mays
ctatgttaggagctgtaagaagtgtcttgtcctgtgttgttatgatagtcttgattaggttgtgttatgtgttctccttgccatgctgtctaggaggtacggtaactatttaatacattttgcctctaaccaataaaaattgttgcctgttttgcctataaaagaccccccactttaaccagcctagtggttagcaagtgaaacctcttaaaaaaatcctgcttgtgttggtattttgtaacccttgtgtgttttacccataaagttacacttgcatagcttagagacccccacagcttgaccgctagaccgacccaagtctcctttgtgcacttgttgtgtcaaaaaaatgttgtttggtgtctagttgcacaaaccctatatatcccattagtaaggccatgtttctttccataaatccttgccacaaaaacttcctagcatttctgttgatcatcctaactgatctcgtttgatgacctctctttttcacctgaatctgg

SEQ ID NO: 78042 - DNA, 704 bp, Zea Mays
ccagaatggagttaggaatttgctgtaaaaaattgagctcaaacggagcaccgagcgaaaagttacgcccgttttatggaaggtacctcaaattatggttttcaagggcacaaattggcaggaaccgtagcggcggctatagagcataggggcaataggtaagcgccagatgatgaaacaaggaggggctgcaatgcaatgcggcttgcaacctaatctagggctagcgtggcgagagttcgcacaaggcggctagtgagggcaaattgagtaatgtggtgtctcgacttgtaatctgggaaaggtggatgggatagcggcgaaaataaataacagcgacggagcggttgaactacgatgacgacatgacctaaaccagcaacaagactcgacatggacacaaactcaacaaagcaatctgaaacgaaattgcaaggctaaacagggttgtaggacagcggaattttttttgtatggcaattttctggagttataggaagaaaacataaactaaactagggtaatcctaacggtaatacctgaggctttgaataccaattgataggaacaggggtgcccgatcttccgtcaggtgtagataactatcgatttggtggagatgtcacacagacaatccagcttccaatcaacacgactagaaccccacaattgcagcaccacttctcctctggtcatcaaccgtg

SEQ ID NO: 78043 - DNA, 378 bp, Zea Mays
gagtcataccggttcatggtgctctcgtgtctgtcgtggagaagagctgaggtcgtctacctgcacccctggtcggcggcgacaatcagcacccaggttgaggcagccacctgcgcaccgtacgtgtttgagcatatgatacgttgccatcttcaaatcagacaggactgttagacagcaatacatagaaggctatcaccttgtatagaaacccatcaccaggatatcaatcctctagtttcttgcctgcctacccagatcctgtttctataaactgggctagtgcttggctatatattgtaatgccctcattgatattaatcaagtcagtacattacccatttcctgtacgtcttcatggtatcagaaaaggtcccg

SEQ ID NO: 78044 - DNA, 449 bp, Zea Mays
cttggtgcacgcataaaacaggcataagcataatttctcaatgaaggtgtaccttgtttcagcatccaccagctttcggcttaagaaggtcaccacatgttccttccgttcggtcttctgtgttagaacaactccaataactttatcttcggctgcaatgtataacctgaatggtacacccgcttgtggtgctttcaatactagagctaaagacaaatattttctaataagatcaaatgcttcctattgttctgcccccaagtgaaatcgacatcattttaagctgaaggataggagtgaaagcatcaatcttcctgtctaagttagaaataaaccttcgtaaataatttactttgccaagaaacttcggcatctcaagcttataggttggcgctcccacatcccgaatggacttgatttggtcaggatctatctctataccatgttca

SEQ ID NO: 78045 - DNA, 526 bp, Zea Mays
ctcaccactagttgcctctatagcatctagctagtcatcatttggttcatcaaattagcttctgtatcggaaggtatacttgagatagaccaagccaccttgactagagccagcggaaacctccttcggcatttcccatccacttgcaagaggccatactctgtaagcaatgtgctcttgaaccaagtctcttgtgccaatataggtgcacactgtgttgaaagccacctgtcatgcttgcacatcattcccatgtacaatgggtggcctcctaatgccgaagcaagaccatatagggcgttgaataatccctttcacatcctcctctgactcaggtcattcttcacgtaaaaccactcctgcatccaagagcctggacacgttttccgaaatgtgggcacagggtaacttgcctcagatcgaggcacgaagctgtaacaaacaaaattgttgtgatactattcttttctggtcaccttcgtctgataagacaactcatgaatattgcaaaagcatcttgcatctg

SEQ ID NO: 78046 - DNA, 454 bp, Zea Mays
gtcggcaggactaccgacgaggggcggatctagtggatagtctatatagaccacgacacaccctaagaatgtagaatagtaattcatatattggtgtaagtattgtatcttgaagttattcgagtcttgataaaccttgttttttgttactgtccaccactattaccgaccgatagggttgatataaaccacattggaccatggtctatgtcaacatgaggacgatttatctaaccatccttattccctcactgcataacctctcttttcatacccatatctttatcttttgtatctccattgttcttctatagatgcccctcctctttttaatgatgatcctaccaccgatgctcctcctcccatagatgctcctaccaccgacgctactgtttctctaacattcattcatacataccctcctacagccacaccattgccccaagcagcgata

SEQ ID NO: 78047 - DNA, 1085 bp, Zea Mays
ccctaacttggctaacaccaaatcccacacctggcgatcctaatttgtcccttaattgcacgaatccgacctggagtccttctgcccacgacgacagcgaaacatgaggtgttcttggtgattcagtgcggtctagttcaatcaatcgggtctatgagcaataggagactcatgggatgctagaacgccaagtagagaagcatgaaccaacctgcagatggctggccacggtgagaagctcacagcggcgcggaaaaccaatttggggggaatcgcgaattgaggagctacagtgaacgattggaggcgaggagcgatgcactgggcgcgtaacaacctagcggagcacgctgaatgctcaatatatagtgatcaatagcggtggtgcccaatttgggtaagacacgctggcggccggagagagagggaggtcacagacgcgagttatcgtggctttccctgaggcaatgactcaggcgatagacgtgctatctactgaggtctactgcaacatggtgaaacgactgatggcatggcataaccaagggaaacggtggcacgacggcggcggtcgcgcagacatgtcgccggtgcaagtgggtacggcgaggctggttctatccattcccccgcggatctttttacgtctatggtaatatcctgcccgagctaagcatgaatcatggtggaccacacggatcgcggcgcggcgatcaccggtggcgaggttcagtgaacccaagatcttcttcggactactgtaccataagagtcttcattagagcgcctgacagcggtagttagagggcttggttctccaacttttgtgtgacaacataatcatccgtctgtagcaaagttgttgatctataatctagctttgattttgctatagcaaccataaaaaaataatcactagatcctagctaaaattgatctcaaagttcatctcaggtcactgacagtcaaatttcagctttagtggtgactgacagcccaactctaggtccatttatctcccttttccatgcagcatcaaggcttagttacttaatcaaagttgtactcctatcatagctctacaa

SEQ ID NO: 78048 - DNA, 451 bp, Zea Mays
ccggggggttcgcgatgcttctagttctagggacaccaacgacgccaggtgtcggcggacagaggataccacgcgaagtcggacacaagacgcttgatattgaacgctgattggccatcggacgacagtcattttttaagattacgtggctcaacgacgtgggagagttgctcccacggttaatatagtgaatctggaacacccaattgcagctgcacttcagcaagtaaatcgcagagagcaagattattggcaatagcactaatcgataatgaaccctggatatcaagaatccatggctggtttgtgatagcttctaatactgttcttttagtggcccttcttttaggaaagagagcatataggctctagctcctcaattgctgaacaaccatatatatctttccagaataacatgttggtgctatcatcaccaacctctgcaacaact

SEQ ID NO: 78049 - DNA, 310 bp, Zea Mays
attttccttaggtttggtacaaaggttatgatcgagttactgcatatggggataatcagttgcccctagtggctaatacaccatgttaatagcttaaatcgcttcaaggttttataactattggtatagcaaatttacaagtcaacgctcttgctagtttgtgctgttacaccttgaaaaaaactcgacctgcaggataagaccgtccccatgacattataataataagatcttctcacgtacgtcgagaaaacccccgaacctaccccattcatacacatcggcaccatagcctatgtgaccaacttag

SEQ ID NO: 78050 - DNA, 778 bp, Zea Mays
ccaccgtcctcgcacgtgaagaagaagaagtcgccaccgcggaccgaccacccaggccaccggctaaaagcagtggcaaccatttctagaaactgacggactcgtcgtgtcagaaccatggcttccccgtccatcacaagatttgggagtgtgaactcctaaaggtcttcatctccaagccacccaccaaataggcaaagccggaggagccgacaaagccagcggagcaggaggtctccgtcgaggatttccctgaaacaacaggctacttcatgatcttttgcaaagcagaggcatacaacgacaagcgccatcccgtggtatctctggtggttggagttccagatcgtctttgattgtcgtggccacctagacagaatcccacatcctggcttaccccctcatcgtcgagccagtcataggctcgaagcacctcaccaaggtgctcatggatgggggagcagccttaatatcatgtacattgagaccttcgacggactagggatcgcatgctccgcgttgcgacctaccacgacaccattgcacggtgccatcctcgtccactaggcctacccgcttgagtagatcactctacccgtcatgttcagtgaccccaccgaacggctgcagttcgaggtggtggagtttctgggtcctacaatgccatacttggaaggtcatgctacgccaagttcatggccgtgcctaactacacatgtgaagatcaccctcacaacaacacaaacatggagacaaagacataggtaaattgtccacg

SEQ ID NO: 78051 - DNA, 375 bp, Zea Mays
ggcaacaccctcgggggctgggcaaccgctggcaccatccttgaggactaggttctccgcaacagccatctctaaggctgaaggactttcagtcacctccatgggaattgaacaaccctgaccaacctcttggctccggagatcgccttccaaggtcgacgaggcacgaaacactactcgggataactctaatcccacatctggaatgtcagaacaaatgtccatcatatcaccatcagttggctcggacaacatatcttcaggaacgacatcctcgagagcctgatcaaagttggctatggataattcttgcagaccaacaagagtagacaaagctggagaaggaatatcgctactccccccactgactctgta

SEQ ID NO: 78052 - DNA, 668 bp, Zea Mays
gtaggactccactgtattgggatcaaactggtgaaaggcagttgtttgggcctgagattatacaagaagcagaggagcaagtcccagcaaataagggagaatctgagaactgcacaatcaagacagaaaagttatgctgatacccggagaaggcagctagagtttaaagagggtgattatgtctatttgaaggtgtcaccactcagaggtatgaggagattcaaagtcaaaggaaagttgtcccctcgttttatcgggcccttcttaatcttaaaacgagtgggagaggttgcatatcaattggagttaccggatcatctcgcggatgttcatgatgcctttcatgtatctcagctgaagaaatgtcttagggtacctgaagagcagttgccaatggaggaccttagtgtttaggaggatttgacttatgctgagtacctcatcaagattcttgatacactgactcgtgtcacgaggaataaagttataaagatgtgcaaagtgcaatggagtcaccacggagaagatgaagcagtttaggaaagagaagaagagcttcgcatagattttccccatcttttccgtagtccttcctaaatctcgaggacgagattcttgttaaggggggtaggatttgtaatactcaaatttgtatacaaagaatatag

SEQ ID NO: 78053 - DNA, 1304 bp, Zea Mays
gtaaatgttagtgttggatagtttgtcatcatgcatgtgtagggtttatttttaggcctcgagaattaagtttaatttgaggcatcttttgttgactagatatactaaggtagtagatgctattctatatggtaataacaggaattggattttttgtgtggggaatgccaccttgctaatttgtgtatgcccaataatataggctgggatcttttcgcagtgcctctgcagggttcattgggccagttgatattagctaggttgctcattgctctgttaatacagagattaaaaaatgcggccgattgggacacttctgctacagaaaactttttcgtaattgatgcttcaatatatgttgtccttgaggaaaaaaacaagaaaacattagctagcacgcttggttctgcatagaagaggaacaggacgcatgctaggatcacaaggctgttttttttaggttggtgtcatgtctacaaaatagggttggtacgtacttacaagggcatgggtcaccgctctcatgactaagctagcataggaggtcctagcgtggtgtgcggactatctgagaatgtgatgatgatgacatgatgcagggttaggttggtcctggaatatgataccgtgagggtctagatgcaatgctcaaggcaattaccatgtgtagtctaatcttcgcatgattcaggtggatgtgagcgttgcggtagttgctcgttttcatatccaactttgcagcttattctctgtcgccgttgtcacatctgagccatccaaatgaaattcatgtaggacagtaggaggcttgcattcagaaactacgtacattactactaccttttcttctcttcttcatggcaaagtgcataggacactctgcccacaccaacaataagataagataggaaaaggacccaataagtttagggatgacaagacccacgagcacatagtttataaactcgtacccacaaaataaatattaaatccacacccgttattggtgacagacacaatgtatcatccgcaccaactactcacaggtgccacaaactcacgtgtatactcggaacaaacagataaacaaacaaacacccaaaactcaaaaacacctcccaaaggcaaagaacataggaaagtcggcctagccgatgttaggggtccgcctgaatagctttggggtctgtagagggcaagcctgacctagtcggaatgcaaaccctagcatactcaatagtccaaaaccaaactcctataaggtgaaatatattcaaacgaagtccaatttagctcattttttg

SEQ ID NO: 78054 - DNA, 576 bp, Zea Mays
agacaaatttagataggacgaggaaaaaataagtaagcagtagtattacatacaaggccatagcggtatcccaacctgttgtctttgtctctttattacataaccacttgcctgcatgtccaggccaatcctctacctcagaatgcactactcgattggacttatttcattgttttgaggtgtcctggtgcctcgtgcacgtagtggtggattttggtactaatagtagtagcatataagtattttggacaaatggtgttctccagtctccacccagagtaaacggaactaacgaactgtcacacaagaaatccccaatcttactatgtaggcgtaatgcagtcaaatcatgtatgaaaactatcagagaatttagctactgcacactaaaaataacctatctttgttgatggatactaaaaataataagatttgctggagaatactttgtttttgctaaatttgatggtggacatcacgtctaataaaatatttgtttgttgtttcttgctaaattttaccatgtctcttcctttccctctttccacacccatggcgtgatcacaaggccacgct

SEQ ID NO: 78055 - DNA, 568 bp, Zea Mays
cccaaagccaatataataggaagacatactttatcttaagaggaagcatatttggaaaatgtgggactcattagatagaactttagtgcggctaaaagcagcactcctgtaacatgaagattattcatgatcagaaaacagaaaacacggtgagaaaggatccttacccactctcaatgccaacgatccagcccagcgtctatcacgttgtcgtgatcgtggcggccacaaggcgagagtgataggtggtatcagagacatccttcctcggtggtgtgtggcagcggtgtttggtggtgtcagatggtagggatccttcgagcgttgaagtttcaccttcaccgacgacctcacctttgcttcgttctacctccggtgtctctgcttggctttcacgatctgagtttctcgagttagcagcggttattttctactgtttgttgaggtctggtctgagaatctcacaatcacaacgtcgcctaagccttctccgcaagcactttttctgcttgatcatatggcagatcaccaccacctagtttatggaacgtttggattgcatactttc

SEQ ID NO: 78056 - DNA, 980 bp, Zea Mays
agccgctttatttaaaccagcctcctgagccgattcaggtcaactgttcagacctcgctccaaccacaacttcctggcctgatcagtctatccatattccctgaaaaaatgtcaagggaagggattggaccggtggttcaaccatgtatgggttagctgcacctaagtatgagtgatcatcacttgtcgatcggttgtgcgcgcatgacgggatgctgaaacgacctggaacctgcgagcatgctcatgcatgcatgcatgcaatgggctttagcacatgactgccgtagtgggcacagcaagaagacatgggatgggatgaagggactcgcggccgcagcatgcatggctacccattttcagcatgtttcatcagcgacctaggattccgttcctatacggtctcattcgtgaattcttcagtagtggatcagcagaaagatgtgcacgcagacgcagggcagcttggttagctggggtagggtagcagagagacactagacagcccagcagccagcatgactatgagcagcaggagggtatggtggtttcagctgcagcaaccaaaaagctcacacatcccacaggcttgtcttgtccaacggttcatccgccaaatggcggcaggccgcaggttgcgatcgacacgacacttgaaaagatgccatttgcagaccaaaaaaaacacgagataaagggctgggtccagccaatctaaacacgggccaaagaatcatcccagcccgcctgcaatctagtctttaagcgtaagcccatttcaacaaggaaacagtagtacttgcctcgtgatgcgctgcattgggccctttcagccgccgagcccaccaaaaggagaaaagcgggtcgaatggtcgctggcaggccggactgggccaccgtgtcaattttgccggttgccgctgctagattgtttatgcatagcaaactactactccgacacacggcgagctgcagcctgc

SEQ ID NO: 78057 - DNA, 584 bp, Zea Mays
catcactcgatttagccttcattttggtcgggtgccgaaggcagcagtcattaactggtcctcctccttggtgtagttgccaaagattttattgcacattgtttcaatcatttctaatcactcttggcatgacttcttgaattctttctcaaacttaaaacagtaagggagccaaacaagttcgtgctttttgcccccatccttcttcttgggcattccccagccactagaggtcggaaatactctttttgttaagtattcttgcactatatccctagtgctgacttcggccgctaccactctgaattctacttcggctacttggcatggagagccaagttgtatatggcacaagggccttgccatcccgaagcttaattttagtggactcatgaccatagtcatcagcttctcccttcttttctcgtctgccttcatataaaaccattcacttttccaatcagtcggccacttagtatggtagctgagaactggagccttcgtatcctttcgatacgcaaagttgtagtaatcgaagttctcatgaagaccatccgctctagcctttgtttggtaatgcagct

SEQ ID NO: 78058 - DNA, 785 bp, Zea Mays
agaggtcacacgaccgggatcatatcggcttactcagatggatgatacagaagtggggaactcatggaatattgagcacctcagaaagttctacccttagcgatgcctcaaaactcctgagggaaagttgtatgtcgtagcctgaaggtttcatcatcaataaagatttcatcttccaaaggcattcatactcttgattgacgattgacgtagattggactcggctcgaaatcacatgacttagggtgatcactataccctactaacggagcaatcggcttaagtcgaaaacgctttaagtcggtgcgacatactcacgcttacttgacttagggtgatcactataccctactaaaggagcaatcggcttaagtcagaaacgccttaagtcggtgcgacatgttcacgcttacttgacttaggatgatcactataccctactaacggagcaatcggcttaagtcggaaacgtcttaagtcggcgtgacatgctcacgcttacttgacttagggtgatcactataccctactaatggagcaatcgacttaagtcggaaacgccttaagtcggtgcgacatgctcacgcttacttgacttagggtgatcactataccctactaacggagcaatcggcttaagtcagaaacgccttaagtcggtgcgatatgctcacgctcgcatgatttagggtgatcactataccctagtagcaaaatagccaactcaaatcaggagtacttcgaaaaaggaatatttcgcttacagtgccaggggtgttttttag

SEQ ID NO: 78059 - DNA, 672 bp, Zea Mays
gttttcgtcaggacagcaagggcattttatggtttgaagatcgactggttgttcccaagaatccaaaactcagaaataaaattttagacgaggctcatctctccaaattttccatgcatcccggaagcaacaaaatgtatcatgacctcagatccttgtactggtggaccaggatgaaaagagaaattgctaagtacatatctgagtgcgacacttgccaaagaatcaaagccagtcatttgaaggtagcaggcaccttgcagcctctccccataccatcttggaaatgggatgacatttgcctggacattattgtgggattgcccaacacctcccagcaccacgattccatatgggtcattgtggataggctaaccaagacagctcatttcttgcccgtgcataccacccacaggacagaaaaatacacagagatctatattgaccaaatagtgcgcttgcatggaatcacaaggaccatcgtatcatatagaggaacaccattcgtagcacatttctgggaacagctacagatttcacttggaacaaccgtgattagaagctcggcatatcatcctcaaactgatggccaaatggaaagagtaaatcagattctcgaggacatgttgagagcatgtgtgatacactatggcaaaaattgggacaaatgtc

SEQ ID NO: 78060 - DNA, 514 bp, Zea Mays
aaaaagtattatctgaaagactacaaggtaagaccatggagcagcaagatagaactatcataagagcacaactgaggggggtagttcctttttataacttgtcgtgcatgtgtgcagaccaataggccgggttcatgggggcagaccccactgggttgtcatacacgtatgcgttatctagttacaaaaaggggaacagactcgaccccttagtcttgctctatggatagaacttacagagatgtttggcatcggggtaaggtactcctccagtcgtagctagatggttgcccctgggtcggtgcactcccgctacttcgaagggtccttcccagctgggggagagttgcggagccctccttggtatgctacttgccgtggggctaggtcccgacccagggttcccacctgcatttaacacgggagccctcgtccctggctgcgattacttctgcatgtacctgtctacagcccggacccgcgggggatccggaagggcctccggaggaaggcg

SEQ ID NO: 78061 - DNA, 623 bp, Zea Mays
gggaggagatggtgcgtggattactatcgatcgggcaggtggacagggtgtgcgaggcttgccaagccggcaagcagagaaggacctcattcccgatagaagcagagtaccacgctcatcagcgcctcgagctagtgcacgcggacctgtgtggtccaatcacaccggcgatgccacgaggtaacatgtattttctgctcatggtggatgatttcacccgatacatgtggatagccgcaatcccttcaaaggattgtgctgcggctgccatcaaggagatacaagcacaagcagaaggtagatctggggcgaaattgagagcccttcgtacataccgaggaggagaattcaccacaactgaattcgcgaagtactgcgcagctgaaggtatacatcggcagcacactgcaccttacagcccgcaacaaaatggagtcgtcgagcgcagaaatggctcagtcgtagccactgcaaggagcatgctcaaggccaaaggtttgcccagctggttctggggtgaagctgtaagtaccgctgtttatgtgttgaacagatgcccgacgaagagcgtggacggcatgacgccattcgaagcatggcatgggaagaagccagcagtgaag

SEQ ID NO: 78062 - DNA, 695 bp, Zea Mays
gacatcccgagtatcaggtctatgctgctttcttctaatactataggtgtagaccaaaattcccttcccataattgtcagtgttaatccgtatgtcatataatttgcttcaataggccctttagggctaattactaccagtggtttttgcataatttgaagtggtaattaatttgtggtggcatagcaagcagaaataaatgaatgtgtagctccagaatcaaataatatggttgctagaactaaattaatgtaaaacataccgatggtgatgtcagctccatcagcagtagcctcgacactgacttggttgaccctagcaatgctaaatcccttgctagaggttggagtctattgcttgttctgagcgggtgtgttggaattccccatcggacaagcatttgcatagtgcccaacctgactacacttgaagcatgtggggcctgttctctgtcctgcgggcctcgccgggtgccagtggaggcagcctgacgagtgtggggtgtctgtggagtcccctctggagcatactaagctgggcgcggtcctcctccaggaaatgctgggtaccctagggtggaacatagcgagggcaaatactactgctaccctgcccttgggtaatggccttcctcttcatttctcctagttgaacacgcttgtgttcaatagctagagccttgtctaagagcctct

SEQ ID NO: 78063 - DNA, 474 bp, Zea Mays
tttggattgtaagcatcgaagacacttcctgtgtcggggtgtcggatgtgggttttctcttcaacggtggcgtcagagttttccactgctgccgccatcaaccatgactccatcagttcctcgctattccctgcgtaccttgcctccccatctactcctacttattgtccacgccatatcaatttggaatcatatgtaagatcctaccgatcttatgagatcaggatactatgaaatttaagattcatgtttggttcggtatcgttttggcttggtagaatcatagtatactaacattctaggatattgattgggataccgagaagtgacaaacttgctgtcacatacctgaaaagcagtcatacaaggttcagatttgattggcttaatttctttggaagtatgatgactactaatgtactagtaacttactcgcaccctgtgcgagtggtagtctacacggttaaaacatgg

SEQ ID NO: 78064 - DNA, 575 bp, Zea Mays
cggataacggctggcggtgaaagatcacaatgcagagaagggttggagccttatcaccggcctgttcaccgtgccatttgccacgcgactgaccgaggtgtcctcgccggagtacgcagcccttcgtagtcgtgccacatacttagaagagttaccacgtcgcagtagatagtcgtaggtagtctgtccatcgcctgagacattgcctcggtgaacgccacagtagttcacgccggtgactcaccccctctcctcggccgccagtcttccccttccaaattcggagccaccgctcttggacactataaattgagtgcgcgactagctccgctaggttgttacgaagccagagcacccaccctttccctcgattggccaccatagccaaagaatttcattcttcccccaaatctgttgtctgcgccaccgtgagatgtcgctccctggccagccatctctaggtccaccctcgctctccttgtccgtgtttcagcacccacacatgcttgtgatactcatcggctgaacccattgagctagaccacgctcaatcgactggaacaccttgacttgta

SEQ ID NO: 78065 - DNA, 404 bp, Zea Mays
cccaaatttctagagctcggagtgtgggttcgagtgctcgctctgcacttttttttacgcggtgtggtagttgcgtgggtggggtcgggtgctgagtaggcatgatagctggctgtgtgggcggtgggattcacagggcagtagttgagagaggggcggaagaaccagtcagagagcgtggagcgggcctaaagtgtcagcgtgtccacagggcagagaggggcaggagaaccaatcggggcatgtggggcaggcccagagtgtcagcatggagggtaggttcttaatagagtagtatagataaataggtattgaaattattcaaataaaattattgtctatatataaacactaagatatgtgtggtctggtggttatctccaaatgtttggagtaagggggtg

SEQ ID NO: 78066 - DNA, 745 bp, Zea Mays
tggacctatgatatataccttgactcatgcacgcaacctcaaacgtcactcttagacgcttatgcatgtgaatcacataccgttgcttcaattcccggcctgtcatgtatagacccatgcactgccttttttttgtctcgaaaggaatatcacgccttatctttgtgtttaaaacaacaggaacatctttggaccatttagccactaaccaacactcaagatcgaaatagagaggcggctagaatggagaacgtatgtagcaatgatcgatgttgagacatgcgcgcgagagtgacaagtgccgctattccaaatttgcaaccgcgcgcagaggacgagcaaaggacccactgcatgcatgcccacctagtacagtgactagactagcgtggcatggagggaccatgcctcacgacgagcattgcaacatactccgccgctcgtatttcgttttccacacggatcggagggggagggagggggaacccatgcactcgcgtcacacggctccattccactcccactactagtaccgctgcttgctacccacctagtagctagtacgagcacagcacagcatcggcgcgagcaggagagcactgcgcagcgcgtacgtgctccgtcgtcgacacccaaacccctataaaaccccccttccacagtaaaaccccgatcacctgtcacacggtaaaaaaaaaacagaaaacgcaggcagctccctccaggctccagctagcgtccgtcc

SEQ ID NO: 78067 - DNA, 350 bp, Zea Mays
tttgcaaaggagttttcttccaatttcatgtgacaacaggtccaagtctctgcatcaaagttgtagtgctacataccagctacaactcaactatagggattaaacttatttgagcactggatcaaggttgaattcatactcaaagttgaccctgttacactgaaaagctgaatttcagaatgaatccagcctgacagccaaagtttgagcatgattatctccaaatttttcttaacaactgagctcacatccttaagcaaagttgttctcctataattgggctacaattttgatgtggtgacctaatatgaattctcactattttgaaagctacacagccccaaagttgg

SEQ ID NO: 78068 - DNA, 387 bp, Zea Mays
ctgggaggctggctggccgtctacaccatcgctgcccgagctgcaggggcaaccgaggatgtgatgaccgcgtacttgcccatcgtcctcgggcaagacgcactgcaatggctgcgacacctaccacgacactgcatcgatgactggagtgatttcagtcgacgcttcatcgccaacttccagtccctctccgacaagccggcgcaaccatgggacctaaaatccatcaagcgccggggggacgaaactctcaggtcatacctcaaaaggttccagaccatgagaaatcatatccccgaggtcgcggaggcagcagtaatcgaggacttctacagaggctccgatgacgcggccttcgtccgcgccatattacagaaggcgccaact

SEQ ID NO: 78069 - DNA, 338 bp, Zea Mays
agtgccatcctctctttaatttgtctgatttccgatttgtccatgcttgggaaagaaagaaagaaacgctaggcggctagggcttgcgtgtcctttacatgtttgaacgctactgctcgttcggggggctaccagcatcttgatggatgctttttttatttacagagaagctacatctcgctctatatctctcggccgagcaattcactttctccagtttttcattccgtttgaacaccaatagaaatagattaacaataagcaatgtccatgcacgacctcattagttcttcgtcgatttatgacatgtttgtttaccttctaaattatataagttg

SEQ ID NO: 78070 - DNA, 312 bp, Zea Mays
tttggctttttagcttcggtacttgttttgtggcttcaaactaatcaatttttcctacttcagctgaactacctccgccgccagaaccgtacgatcccctagctgatctagaaatgaaggaagcgctggacatcataaacataactgaaaccattatcgacgaagtcgtcaacaaattactgaacgaagttgcagagaaagtccttaaagaggaataagttttattgtaatgatagctggaatgtatggaacaatttaagtaagattaagtttctattgtaacaaaactatgtgacatttaatgtatgtaac

SEQ ID NO: 78071 - DNA, 354 bp, Zea Mays
ggatggatccccaacgtacgtacgtacgtactattgcaatacagtttcgaatattccatgtcgcaaaattacaaatttttatttgctccttttttcaccgtttccgagatagcaaaagcaactggtgtctgctagtggatggaaatcaaagttgaggtgccaaaaagaaaatctgcagtctgctgtgctcggtggtgatttttatccaggtgtagctgacacatgcacgcaggcacgtcgcacgcactagatagtgagatcgtgtcgtcagatcatcggatcctgggccatccatcatatatatttttcagagagagagaaattaaaaccacagcatcgatattagacatgttt

SEQ ID NO: 78072 - DNA, 1087 bp, Zea Mays
gaggaattggccccagtgttgactttttaggagccatcatgggattggtctttagagcacaaatggtgggtgccaaatgttggttccgacaggtgggccccaacactcgtgagtaggtgagaagctcgaagtacaacaaaacgttaggtagggaactgttgcgtctcgtcgagcgtgtcctgtccaactacaaggtggggatatttatagggtaactggggtcaataacctaaaatgcatttgtgtcgtgcccctggttaccaactacatcccaagaatatgatgtacaacgggataattacagcgtcgtaacgctcagggtcggacgcaccaaaatgttcacccgattactacactgacaagtgggtccatcgaagcggcccacaaagccttgggcgactctgtggtatctatgcttcccccaggtctttgtcctccaagcgccctcacacctaatggttgggcacctcagcaatgtccatgtgggaggtccgtgaagggagccttcatcctcagggcgtctagctcaatacacgccagcctttgcttggttgacatgacgtggatacttcatttcggctagcccatgtagagatgtctttgtgaggttgtcgtcggccacggtgaatggaggctctactcgtagcatgagctcatcgaagtctctggtcttcgcctagcttggtcgatcaacggagggttgactgaggtatggttcggcctccgtcccaacaagaagctccatctccttggctgcctctacatctagttgaactgtcatgagtcacccacgcttgcccatttggctatagcctttgttgttaacgacttctcgtcctccttgcccaacactctcatgtggcttgttgggtccccgggctcaacggtcggctttgcagatgacaacaacgggcggtgagtctagcttctaggcgtggtcaccgtggcagatgagcgccaccagaggccgaaccacactggtatgaaaacacagagaaaacagagcttggtatgcgcaactgccgcaacatattttctaggttttactacacttaagtgttacatggacctaatacccggacctccc

SEQ ID NO: 78073 - DNA, 502 bp, Zea Mays
ccacatccagttcaccagcagccacactaccactcacacctaatttaccaccagacgcaccaacgctagtattaggattaggataaggattaggattggtttcactggccctagacttggacaccattataggacatctcctcaccatatcgactcacatgaaacacgaaatcaggattcaggacctcggtctgcaaggctaagatagaaggggccggatttatagaactagcaatctgagaatcaaagcaacacgcggacgacgcctcaggctgtcgcgtcatttattgtgattgatcgctacgatgaccatgcaggcgacaccatgggccacggatcgacacgacatgattagcgagagacgagtagctgcctagggttcaaacttccaagcaagggaagggcgaagggcatgtggaagatgaagagtgaagaactgaagagtaacctatacgttgtaatggcctccatggtcccagagtccgggaagctcaccttctat

SEQ ID NO: 78074 - DNA, 291 bp, Zea Mays
acttccgtcttcttgacgaccttctggtggtgatctaccttgaagtgcgagaggtaccacttttccgccaccttgcttatttgagccagttgtcgttggaagtccccgtccagccttttcatacggtcttctaatttctcatcctcatcggtcgacgagttagtcagccttgtgttaatgtctaggacaacattgttgtgatctttgggattggtcattgcgaccgatctgataggtctaatttaatagatctgatctaatggatcggatttgatagatctgatttttcgt

SEQ ID NO: 78075 - DNA, 371 bp, Zea Mays
cgacgaatgtatgtttggatgataggtggtttggaagagtaagtagaggatgacgtggaggtggaaggtggtgttatgagaatgagaacattagatgtggatgtagaaggtgatggttcagcggtaggaatggaaggaagacacatgaaagaagtagattctgtgggataatatgaggagtgagtagactggttgtgaaagaagggtcaattttcattgaagctcacatctctagaaattcgaatacgatgagtagatggatcataacaacgatatcctttgtgttcaggactgtatccaaggaatacacactctacagattgagcagtcaatttagtccgctcacgaggtggtaacaagacataacatat

SEQ ID NO: 78076 - DNA, 773 bp, Zea Mays
attggttagtataaatcatatgagaggttattctataaataattatctcaactttaatctaagtcattatttgattaaagatcatctagtcaaattataaccataagctaagaatgctatattaatattaaagaagttaatccaatagacatagattaatccaattaatataggataaacaaattaattatttacaacatgtctcatgataaactaaggttaccaaagtgtagataattttattacgaagctaacgcaactagaacgggtcaattcggagttaaaatggggacgttatgaatttctgaaggttttatgtatttgatacaaaattaattaagagataaattttaatacagttttcatgttaaaccagagacactatgtaatgaacaatattattacaaaattacatgaactggaataggctaaaaaggagttaaaatgaattttatatgaattaaactagggtttggaattgtttttatactaaatatccattttctatatttatttacttattttccctgtttcgtggactgcgcgcacaatacagagaagctcgggggctaacgtataaaaatatcccagactcagatttaacccgcggtggacggcgggttctatttctactaagcacaaggatccatttgtaaaagggctcgacgaagaggtatcggtggagatggaccgtcggatctaaaatgcatggtccagattatagcagtcgacgacaaacttccatataacccagagccgtccgatcgagtctc

SEQ ID NO: 78077 - DNA, 982 bp, Zea Mays
gtttatttgagtgggtcgtcatgacatttggtctgaaaaatgctggtgctacttatcagagggctatgaatttgatctttcatgagctgttgggaaacactatggaagtctacattgatgatattgtagtcaaatcggctgagtttagttctcatatagctgatttgcgcaaagcctttgataaaatgtgtcggtatggtctgaaaataaacccacgtaaatgcacttttggactgtcggctggtaagttcttaggattcatcattcatgaacatagtatagagatagaccttgactgaattaaatccatttggatgtgagacctccgacctgtaagcttgaagtgcagaagttcctcggtaagataaattatttacggaggtttatttctaacctagccgggaagattgatgccttcactcctatccttcggcttaaaatgatgctgaattcacctgggggcagaacagtaggaagcgtttgatctcatcagaaagtatttgtcttcggctcccgtgttaaaagcgccacaggtaggagtaccatttagattatacattgcagctgaagataaggttattggagctattctgacgcaagagaccggaggaaaggagcatgtggtaacctacctaagtcgaaggctggtggatgctgaaacgaggtacacttttatcgagaagttatgcttatgcctgttttatgcatgcaccaagtgtagatgttatttagtgtctagtcattgcatcgttgccagtcaaaccgatgcgatcaaatacatgctgcaaaacccaattatgagtggtagaattggtaaatgggcttatgcactcatagaatatgacttggcctatgaaccattgaaatctgtgaaaggctaggtcgtagcagattttattgtagaacatcggattgatgatactcataaactagacatatcatacctcactgttactccctggactttatattttgatggatc

SEQ ID NO: 78078 - DNA, 1368 bp, Zea Mays
cttcgtctcgcccgaggtcgcctcagcctagtccgtctcgcctgagccagccttgtgcagataggacaaggacgctcgaaaataggtaggggactggtgcatttaatgtgtgtgccaaactgcaccgtggcagtggagcacaatggtggataagatagcgatcacgtctaagcgtagcggcatgattacgcctatgccaaatagtgtgcgcacgccacttggcaccctccgatgggacgcctaaatacgacaagccgagaagacgagtcttcgagcgctccgcctcgctcaacccaagctcagcccttagacaagctctccgcctcgcccgagctcggcctcggccagtgactacgccacgaatcccacagacaaccactctgccctactgtagcgcacgtcgagagatggctcggctagcgccttgggaagacttctgcatcaactaaacaaaggctcttatcttaatgaaagttgaatagaatctcgacacatcacgtgccaggacgatgacgtaccccgtaaacgacccttggcccatatcccggcgctgttacaaccactacggcgtgggcggcctctccctcgggaactcgggcgtacggacgaccccttagcttcggctctctacgggaagtcagcacacacgaatctactgcacggtccgccgtcacgtcaggtgtcagggcatctctccttcaaaatacaagacccggcctcaccaagggcgctcctctgggcgtataaatagggtaggggaccctccacgaaagaaggaggatcaacatctacgcaaagggacacacgtagtcgagttcttgttttctcactttgtcttagatattggcacttgcctcaatcatctctagggacttggggacttcccctctctcactgtgcttgtaaacacctactataggcaccaaggtgccagtaatataagcctcatcccctctgctggaagtagggccacgagttgcccgaaccaggataatcgcttgtgtcatgtcgcacaccatctagagccggccacgcggcacatttactggttggttaaggacccacagtccaaacaccgacacccgggtaggagatgcagtcatgactcacgtggcgggagatgcagtcacgactcccgaggccaaccccaggcaggagatacaatcacgacttgcccgaggctaaccttgggtgggagatctagtcacgactcgtccgaggtcaacctcaggcggagacgcagtcatgactcgcccgaggccaatcccggcgggagacacattcatgactcgcccgaggccaacctcgggcgggagacacattcacgactcgctcaaggccaatattaggagtacatggagttgtttt

SEQ ID NO: 78079 - DNA, 722 bp, Zea Mays
agacgatagaggcatcaggcttgtcattaaggcctcaagggcagtggtaaagctagagaaaactgaaggggtgcatataagatgaaaatttacttattataactggtatcatactttttaggggtgcagggtgtatgcatcctcggttgcatcatcaagcaggtagtcagcgacctcaagttacaacaaatgttggcaccggtggcctcacatatatagttcattgtagttgtaaaatagtcatttgcgatgacgctcagtcatctcagcaggtgcgaggtaacataactagtgtaagctgcagatagggttgccattggaggtagtgcaggcagcacaactgtggccacgatcgtagtagttgtatgttgtgggtcgataacaccaatggagggtgctagggaggacaggagacccacgacactagggctgacatggtgtttgtggtgtggcgctcataggcctgtaccaagtgcatgcccgactgcaagtccttgtgttcttcgaccatgatatcgatctgaatgtgctctgaaagtcatctgatgaagatgtggaccttttggatgacagaatgttaagtgggacctaacgggggctagcccccctcccccaacccaatccaaccaaaaagttcttttttacttgtatatctatgaaaaaaataaaagaattattttataataaattagaacttattatgtattgaatacatatatatt

SEQ ID NO: 78080 - DNA, 484 bp, Zea Mays
gccgatcgcctcgcctggtagaggggaagaagtgagcgctggacacaccccaatattaatgctcccatggatcataatcgtcgcatatatacacccggacgactatgtagtctatgtatcaatttcaacaggagacaaacgacgttctgtgtggccatacatggcacacgtttttatggccaaacaaaaaatttcatgttttggggtggtaagtcatttttggccacccgtgagctatatcagatgtttacatggacgaatagtcatttttatgtctccggtctgttactcacgttttcataacctaaggccggtgaggctattttagcctttgtaacctataacacacgtctttacgaccaaacaacattcttcatgcctgcaatctgtctcctacgtttttgttctcttaagacagtaaggctgtttttggcctcatgtgacttataaaatatatatttttttcgtcgaacaacgatttcat

SEQ ID NO: 78081 - DNA, 1164 bp, Zea Mays
cttccactatagctgatcatttagacctctcatgaaacaattcttctttttcaggtccgtggcaacttgcgttatggcataatgggaaagatggttgaacttggtaagatattgcatcatcgagtctcctccttgctttaagtgaacaaactcttccagtttcatctgctgaacaccatttggaatgtaatgttctctaaacgcttgcttgaactctgcccatgtaacaaggtgaccttcaggttgaacagctacaaagtttgcccaccaggtactggcgggacctctcaattgttgagcagcaaatagaggcttctaagtatctgtgcactgaaccagtccaaatttttgctccataacacaagtccattcgtccatctccaagggttcttccgctttaacgaaaacaggtggatgagattccgaaaactccatgtacatggtgtctctgggggcttggtgttgacctctgcctccctgctgatgaatttgcttcccagccatttcttgaagaaaatgagtattatcaacagtggcattaatcagagcagaaatagcctcaaccagcatgggaggtacaggcggcgggattagagtttcctccccaccacaggaagttccagccccatcatgagcacgagttctggatggcatctgaataagaaaacatactggattattacatgtcacaattacacagcctctgttacattattccaaacttgttctaattatacatacttaacttatacaactcacttttccttatttagattacataaggaaacaacctacaactacactagtctagtcatccacgtccttggcttctcccgctccactgctagcttcaggagaacgatcatcctcgatgttcatggaaagagggctccaaagagattcaactccccataaggtcctccgccagctactcctgatgcaccagctcccatcaccacaacctccggtggcatgttcggatgtagctggtcatatagcacatgcacttcctcgtgcagagcattattatacgcttgcagattttccagggctacgcttagctctcctactcgggctcgggcagtcgcctcgcaatcccaggctatagatcatgaatttacagcccagtcaatagccctatcccgctccacaatctcccactgc

SEQ ID NO: 78082 - DNA, 542 bp, Zea Mays
gcagtgtaaggcctgatgtgtatagagcagtggaggacacagaagaaatagtaacacagtttattctactgaagctgttgatggttctggaaaaatttctgttggcacgggcttcacattcagatacacgcttcacattcagatgcctgtataggtgcaaactgtgcatgcctattttgttggtgagataatatagatgtaattttattccaatacaatgaagcaggctactgaaaatcttgacggattccatgcttgtggtgttattccgacaaaagctttactgagtaaattggtgacaacagtgatagccaagaccaactatttctaatccttgcattaaaactagattatcattaatcctcgcctcgcaacttaaaaaactatcatgatcctattgtgtaaaagctatatcaaatggaatgtacaatgcatctcaacatagtttacatagttttgtactattgctaagtaaacttcaatacttttatttacgcaattaactggaaaatgtttatattcaaagtaggttcagttcatgg

SEQ ID NO: 78083 - DNA, 778 bp, Zea Mays
ttttaaccatttggatttccatatctatatccttctcattatccataccgaccatccgtggatgctcctcctcctacgaccgacgctccttctcctacctgtgaagttccatccactaaagctccttgtcgaggaatttctcgatagtgaatttatgtgggcggattgcgcgtgatctagagaagaaagtaagaacacatggacacaaataattatataattatactagtttgggctctcctaggagataatatcctacctcaagtggctgtcggtgatctcctttccatgaaacgtctgataccgccttttatagtctaaggaagcaatcagttataggaagatcagataaaaattcttatgtaaacctatccttatctaccaatccctcgtatctcgggttctattgttacaacaaaaacatgtagatgagttaatcgtcctgcccacagatccattcttgacgtgagatcttgagagttccgtccgagtccgagttgggagcggggactaagttaggccacaagttagtttcgtgaatattgacgtgttcaggatagccatgatgtctatcttttacaatagcctctgacttttatcagagtgtttcgggcagatgaaactcttctattgaatcttgtgaatgtttctgaactatctgcgtctgacttgtttttatctcctgatcgagttccatgtcggttgtcaagtgctaagtatcaaaggtgccaactcatataggtttgaatcttgaaaaacgtaaatatgcacctctcgt

SEQ ID NO: 78084 - DNA, 314 bp, Zea Mays
aagtagttaggtctgagaagacgtctagaatgaacatgcatcatgattgtcgcatcattgtctcttgtgcaccaacatgcttctctcacctttattccaataataagaaattgcaaataatgtgttgtatagctattttatgaacttcaaaaatgtcttatcctgtgtcgttttggtaactttaataggttgtgttatgtgtttctcttgccttgctatctaggagatgttcttgttgttcaaccctttttgccccctctaaacaaccttgagtttagcaagtgaaacctcttgttggggacttgttctcaaat

SEQ ID NO: 78085 - DNA, 464 bp, Zea Mays
tgaagttgatcccgctggtgatgtacctgttgaagctgaacccaatgggtgtgatcctgttgagactgacccaaatgggtgtgatcatgttgagactgaccctagtggatgtaaccctgttgaagctgaccccaatgggtgtaaccatgttgaagctaatcccaatgggtgtgatcgtgcaccatctcttgtccgtatttttgatgaggacgaagaagagtaagaagaagttccgctaattctaagaatagcaggtgtcatagaggtagtaggggggatagtgatattccttctctagctctgtctgctcttgttagccttcaagaattatccataacagattttgatcaggcccttgaggatgtcattcctgaagatatgctgttggaaccaaatgatggtgatataatggatgtatgctctaacactccaaacattggattagaggtatcccgggcagtatc

SEQ ID NO: 78086 - DNA, 643 bp, Zea Mays
tgaatggctacccaaatgtctctggccacgatgacagtgtggatactccaaagaacgatgcgttcccggtgattggtggtggtctagttcaatcgggtgggtcgacgagcatcacgggttcatgagagcactcaaacgagagagcagagaggatgagctaacctgtatcgcgctggccatgacgaggtcggttctgcggtgttcttgagtgtgtttgggggaaattcaaaattggaactcactagtgatcgactgggggcaatactgggtggctgggtgcgcgatgatcttacggagctcacggtggcttcaatttatagagactgaccgcaagcacaacgaatttgagcggcgggttgtgatcggtatgaactaggtgagtcactggtggccgcgcaacgtggcctttactgtggcggctcctccggtgatcaccggatatgcatagcacggttagccacgacatggtaaagcgtttggacacgcggcggacgacagtaacggctcaacggtggtgagaatctatccgagtaatcagtgagcaagggggggtacggcagctagccggaatagtttactggccgggcttatccacggcggcgtgactccgagcgtcatttgatcaacccgagcacgaatcgag

SEQ ID NO: 78087 - DNA, 529 bp, Zea Mays
cgccgccatgtctcgcgggcggcgccaccgtgttctgcggactggctgggggaaagaaggtggtccgttggatcatggttatgcgatgagataagattaggggataggcagttctgggctgtttgatcttgataaggtgattctggggcaaggtagaagtattttaaatccgcgtcattggatgttgatcggacgggtgggaatgcgtaccggtttagatcagggcagatctaatctgggcggtcagatgctgatcggatggtcggcattcaatcataccccttcggtgcaactgctttgtaaaatggtccctgagcttttgcataatgaacccgcagtccctgatagtgatagaagcactttagaaaggccctataatttactttttaaaccctgagctctcaggattttgtacccagcgcccatggactttagtaatttatataaatgtttatagaaaatgatttctaatacaaaacaatactagaaaattgtataattcatagaaaattcatctttgcttattttt

SEQ ID NO: 78088 - DNA, 1370 bp, Zea Mays
cttttagactgttagtgtcaaacaatttgctctgctattttaaatgatggctaacatgtttctcattcggactgttcagtagcattgtatgctttctaggtaggatgccaaaacacagaacacaaaacttggttccatttcgtatgttcttagaccttaatgcactgaatttgttagattgatgaaactgtgtggctattgtggagcatgccaattctcgccttcctaataaatgacttctctggcctgagtgaggcagttgaggagtaagtagccatggcccagtttccttgtctcaagagtttccagaaggcacgagcagagtttctagagcattagtttcccatggttgagaacgaccatctgttccatggtctttcccagaaccagtcataaaacaagactagaaaatggaggcgccctatcgggcgccagaccagagacgatatgtaaaacatcgttgcatattgagtaacacaatatataactcgagtggtaaaatcatacaacggtagcgtgtcaagagatgaacactaagacaatcaagaataacatgtgactacggaatgtaatacacatctggttcaaaaagcgacttcagttacataagtatttaaacaacacaattgtgtacccatacatcataaaggtagaaggcaaagggcctaggcataaggcgtctcatgaacaccattcaactgcagaggcgatagctggctgagcggttattcacttgatactgatagatatgcaaagaacaaggtgcagaggcctagaattgaagggaggaaaggtcatatggtggcctgcccgttatagcaatcgagtaccacgagcaaaatgatgacctgtagatggacagtagtgtgacagcgttagaatgtgtattgtgtaaaaggaaactgcttagaataggttgttgctatgaatttagttagtaccacaaagctagttttatgggtcacctgaaaagcaaagtgagcaagtaatacaattcataggcctggaaaaaattacaagaaaacaaacactccattaccatgattccaattataattcttcgtagagcggctaataatcatgattgaaaattgatgtagttacgtggatctaatgttctataacagtccatacaacacgaagtatcacaaggcacacagaacaatcctataattcaaggacaccacatctacggggaaatgaattttgcataagaaaaaaactgatactgcaattctacaagttcatgtggatgtctatccatgcatcccctgtcccattagccagttatatttgttgaatattcaatcggttaacctacacggggaatcaaatgacatttcacttgttttatttgttgaatattcaag

SEQ ID NO: 78089 - DNA, 444 bp, Zea Mays
actcaaacgaggagcagaaggtatgagcagacctagaagtggctgaccacagcgagatcaattcactcggtattcttgaaggttttgggggaaatctaaaattggagcttgctggtgatcgactgagggcaatacttggtggctgggtgcatgatgatcctacggagctcacggcggggtcaatttatactatgcgagagcggtggccgggaattcgagtgacgacgcatggcggtcggaggagtggaaagttactagcgtgcggattggtgtcctattaccgtggcagtcattccggtgatcaacagagagtcacaatgggtcacgacgatgcggtggaggtgctcaggcacgtggcacaaggccaaaaggcggcagtcaccggcaaggttatccggagtgaccgtggtgagtgcagtacggtggccggatttgtttactggc

SEQ ID NO: 78090 - DNA, 805 bp, Zea Mays
tccgcgccgctgtagagagcaccgccagacggtaaaaccctaagtgtttggtcccgaatcagagacaacaaattttttggcaacttcgctggtgacataattaggtgtgacctagtatagatcgcctacatatgaccggttcaaaggatcactctgatatctccccgagaaacataatccaaccggctatatctccccgagcaacatcatcgagccggctgtggagagtctatcggctgaagatcagtagaaattcgaggagcacaagaagcagttgatcaaggtaggccgaggcgaagtacctgaccaatttcaaggtggataagtatcagaaagccgtctagcaacgggagactgacctggcatcgttccgacctattgcaaccgccccaatgtaagtaacacaaaggaagtacaaactcttagatctttatgtagatgtatagcgagagcaaatgcaataagtattgaggggtatgcaggaggattataggagactagcatgtacgtttgaaaaatgtatcgttcccaatttaccatcatatgatgctgacgctaaattcatcaactgcaaatgaatgttcgcatcaccaaccatcatacggtatgccgatgaactcctataccaggcaaccagagccacctccaccaatctaggataaacccatgggccggtgtgaaaaaattaacgacaactatgtttagggagttgttattgagttgccaaatctggagagtaaatgtggttagatagtaagtaattaaatttagcaagttcatttgaataactattggagaaacgtct

SEQ ID NO: 78091 - DNA, 598 bp, Zea Mays
ttcatccgctcgactcccattccatctaactgcaacgcaatgaaagttcatgcaggaagagcaagtgtcatgctcaccaaaccatttgaaggcggcctactcagctccctctccccagatgcctactgggctgggctggcttctgtgtgaggccgcaagtgagaaagcaaacacagccagaggagccgccaatccgatgaagacgagaaacatgtggtgttcgattcccaaatgccgacgtttgactcgacctacccggcccaacgccatgccgcgccattatctgatgaggaaaattagcgaggcagcaacccatgtgcatccgctgccggctttcctggggcgagctggtggaggtggagaggaatctttgcgtcctcccctgcttttaagcgtctgctcctgcatcagcatcgatctctcaggaggaccttccaagtccaatcactggttctggttgtaccccttttctccccattgtttcaacccaaagcaaaggcaagaaccacctccctggcgccttcctcacctgaaaacacgtttcgccgctcagctggagccaagttgtgaaccatgtgggcgaattcgctggaagcac

SEQ ID NO: 78092 - DNA, 800 bp, Zea Mays
cctggaaaaccctaaacctgaaccctagggggctaagtgcaaaattagtgcacttttggactaaagtgtaaaaactatgatgttaaatcatataaaatcatatggttcacatttatgaagatttgcaattcaaaccctgagttttggacctattggcaaaaaggccctatttgggttctaagactaagtctgaaaatcagtgtttgggctcaactttggagctttgtaattttcaaattataaggtttttgccctaggtcaccacatcaatattgtagagctattaaaggtgaacaactttgttgaaggggttaagcattgttgttatgaagaattgagagataattaaacccaaagttgggctgtcagttgggttactgactgaaaaatgaccaccagtgttattggtcgagctttcgaattgaaattatgtaggatctagtgctcaactgagtttagttcctatagtcgaaatgtagctggtttgtaactctacactttgccatgaaaactttagagaaaatccaccctaaactttggctgtcaggagcactgaagaacattgccatggtacagtgcccgggaggataagcttcagaccctcgctgccgacaaccaatccgcgccgtgatttgcgctagggtcaggatgggcgcgcggcgtgcatctcctcgcaaagatctccttgatccgggtaagatcgccgcggtggagtatgatgattccggccgccacgcggccactaatcactccggccatatccggtcatcggcgccgctcctctccgttcatccacgccc

SEQ ID NO: 78093 - DNA, 423 bp, Zea Mays
gcgaggcggaggaataggtggagcggaagagggagcaggagcagtggaagctggtgtggtggaggcagggggcacagtaggtgtggtggaaggctcgagagcggcaggagctggcatagtggaggaagctagagtggtggttactaggactgaagggtcgaagcgagcaggtgtggagcgagcccgagacgagaggcgacggactcggaaggcaatctgattggaggcgatcctcaactgaccaccctgctcttcctgatctgctgttgcggcaattgctacatgagtggctccatccaaccttcactttttcttgcctccctgctgctcaaggtagacttcctcacccttgtcgtgtctgaaatggcaaggagggtcctgatcatctcctccccctaacagtgtgacattctttgtcctcac

SEQ ID NO: 78094 - DNA, 528 bp, Zea Mays
cttaattgctaatttgaccggtcgaagaggtatggagatggctgggcccctggatcgtcgcccgaacgtccggattaaaagaaatgccctatggatcatcaagcgcgggggatcgtcggatttatgatggacgatctagatctaccgaggtggatgccacacactaacacatcgggaccgcacaccctagaatttacggtttagatccgatatcccagcgtctaatcgtggccgtcggaagctagatgggcgatcacgccacaactcagctacacctcgctaatcgacgacgatgcaagcacccaggcgcggtggcgccctctccggagtagggcatcctccctatttccaccgcgatttcgcaattaactttcgctacattaccctaagatcgtggtgagttgatggggtggatacttaccgacggtaaaggtgcgaggcggtagcgctgcggcaaggcgcggcggaaggtctaagccggctccggtgaggaattccgagctcccgacttgtctatctcaaccggca

SEQ ID NO: 78095 - DNA, 303 bp, Zea Mays
gctttatcttctccatgatcactccactcactttgcacattttgatcaccttactccttgtgacacaagtcaaagtatcaaggaccttgatagggtattccgtataagtcagatcatcttgaacactcaattcctccataggcacttgctcttcgggtaccatgagacacttcttcaactgggatacatggaagacatcatgtacatccgctagatggtcgggtagttccagttggtaggcaccgctttaggattttgaagggtccaataaagtgaggggacaacttccctttaacattaaac

SEQ ID NO: 78096 - DNA, 373 bp, Zea Mays
aacaaagtcttcttttgttatagagtatgtatgtaggtttggtagtccatatagcccttggtaggatttattaacagctattacacatgtgataattagcacagacaaacgtaccaaatgggctgctccgtacgcgtcgctgtgtattctgtgccattctttgctctcaggacttggcgtctctggacttggccatgtccgtctacacggacccaggataagatcttctaggtcgtcttcttaaaggccgaaacagtcttcaggtaaaagaaaacagtgctatatcttctgataccattttctctctatataaataaacacgataaaccttcagccgtgtgttagaaaaaggtttgatggagactctaattta

SEQ ID NO: 78097 - DNA, 561 bp, Zea Mays
cgagctatgggacagaaggctccaacattaattgtcaccgatgaggatgctagtatgagagcttctattgctattgttcttcctaacacaatacaaagattgtgcatgtggcacattatgaagaagttgcctgagaaaattgatgctcatctactaaaggacgacgagtttagaaaaatgattaattcgtgtgtatgggattcagagactacaaaagagtttgagactagatggcaagcttggataacaacatatcacttagagaataatgaatggttggttggacggtatcacatccgtgagtcatggattccagcttattttagaggcatttctcttggcggcattcttcgaacaacgtcaaggtcagagagtgcaaattcatttttcaactggtttattggtcgtaagcttgcactaattgagttttggatacgattcgacaccgcattgaaatgccaacgacaagaggaactgctagatgacaatacttctctgcattcgcacccaaagttatatacatcatgggatttagagagccatggtgcttctgtttttacg

SEQ ID NO: 78098 - DNA, 603 bp, Zea Mays
gggctgagtcgatgacaagaaatccccgcgccaccgcccatgaattgatgattcgtacgccttcgacacacatcggtgatactccagagcaccgaattggagttaagcgccgacaacaaggactggtcacggtgcatggcctgtcggcgtcaatttcttcctctctctgctagaatggcgctcgaggagagggatctgggcaatttgattcggcacgatattgcgtgggaggggataaggagaagaggtcgcggcctgggttttagcgaggacgagcctagccaatccgttcccgaggtcagcgcggatcctggagaactggtgaaggagttcgcgcccgcccatgagttccgttgagctagctccgattgagaagggaaaaggaacagtgtggcgcgggtcgcattgcgagcccgacgggaacattgaccacgcgaggaagacgggagagctggcgagatccgaaagctgcggaagatcccgacgaaacggaccgtagaaaaaatcgttgcgtctgatgcggtggagaagaatatcctaacgaagggtgcccaccagtcagcgactcaatgcattttccagccggagagtatgcggatgggg

SEQ ID NO: 78099 - DNA, 326 bp, Zea Mays
ggagctgcgcgcctcgaagaaacttgtctcgcaggagttggaagtcgctcatcacaacattaaggccttagaggatgaccgtgttgtcatgaaagcaatgtgtgacaaagcgatggacaaagctgttcgtgctgggcgaatcctgatgaaaagacctagtgttctggtgcctgagtacatcgttgctgacgttcttgctacatctactggtgcgaggaaaccttcttcctctggtaatcctgttggtgaggtcccctacaagaatgctcctgcacagtaatttgcgtgatgaagacaaactttggataagaaacacttttcattga

SEQ ID NO: 78100 - DNA, 451 bp, Zea Mays
atttgtgattctaggttaattatgtgtgtttttagattacttctattagactcaggttccatagtgaacctctccacgatcaacttatcagaaccatactaccatttcaatatctgtattggccaaaagtgggagcaaaactgcaaagtcagatatccatgtcgttcttttttatgtacattgtccaattccatatcagcggtcgtagccactgtctgacaaggcatcctccatacacaatgtagagtctaaaaatcattgtcgccataatgaacaataataatgtctcctcaccgcttctcctccaggatgccggatgcaggtgcacaacaccatccacgccagcgctgtttccgtcgttgacgaccctgccgtccatacgcgtcaccattggacaatgcttcaaatcgctcaatgcgtcgtcgagacggaggcgcacgacatcatccac

SEQ ID NO: 78101 - DNA, 808 bp, Zea Mays
gtagaacgtccctacatctagtcttcagtggctcacactactggcaccttatttttcaatgctcgtagtagaggttacaagcagacgagaggaggagttcccaagtctatgcgtagtggattctaagggacaatgtatcgggtattcgctacctagctaagctgtgaaggtgttgccgctccatcgttcatgtcgtccttctagctttgccccctgagtcaatgctgaccctccccttttatagacctagaacatgactgattacaagtggcttctcgtggaaggagttactacgtcggggtagaatgaagtgtttactcctagtgaaacatgttcgtcggtatttacctcggtcatctgagctttctggtcggaatctttaagtttgactacatgtgggcgtagagggacctaggcatcatcattgcacatacccctgaaatttgtagcctaagccttggagcgacacgtcgtgttgcgggtcctgtagatcgtcaggggactcaggcctaggcccgatagaccataagtgggtcgaaggcctataacctcatggtcatgagtggggttctagctcgagtttgcatgtcatgagtgaaaggaggaccgacttcccccgtgccgggtgcggaatccacttgagtagcttcctctcggctcgctcgacccctttctggctttgcctcgccctacaacgggcttggtgcctcggggttactcgggggcgggtccttccagaacggactcttcctccatccttcctctgactcgtgggcctgaggggcatggggatcttatccccaacaag

SEQ ID NO: 78102 - DNA, 997 bp, Zea Mays
tgcagtacttcctctgtgtggctttggaggaaagcatataacagcattcggtaaaatactaatggcaattacattcagccatattcataacacaagaactgaggaagttgtgttcgacatagttggcatggagtatcccgataatgcaactgttggaagagggacaatgaatgcctttaaagtcgtgctacattcaacatacctttacaggataatccatccaatcaaggcccaatttccatatttggaagtcaagaatctacaggaaaagtcgaaggaaacttgacagactccaaggtcattcacaacatagatgaagccgaagcccaaaatcaacagaagcacataagggacaaggcaacttcggcggatcagccaaggctatacttctttgtgaagatatagccgatcagaaatcactctttggaacacaattatcagaagagcaagaaaaaagcttaaaagttcttgttcaacaatagagacgtatttgcttgctcaactgatgatttacgtggagtaaatagaaacatcattgagcactctctcaacgtggatccttcaaccagaccaagaaagcaaaaactgagaaaaatgtcaaaagacaaagctgaaggagcaagagcagaagtcaaaaggcttctaagtgttggggtaatcaggaaagttacttacctagaatggcttgccaataatgtaattagatctgatcatgggtcacccgacccgaccaacccaacccgctcaaaaaaagacttggtctggctcgatccaaccaatgcaacagacgggtatggattataatttttgacccacaataattcatgggccataatttttatccaaaacccgacccaacaaaaaaaaaactcgacccaaagccaacaaatccgacccaacccaaaaaaaacttaactcgacacgtcaaacagggaggcacgggccaacctgacctaacattagacacgagtgaggtacgggtcgtattaaatgaccc

SEQ ID NO: 78103 - DNA, 520 bp, Zea Mays
gtaggcaaggctatctgcaagctgatcctttgtcatcgcagataagccaagttcaagctttggatatcccatgttatccatcatttcacggcaaacattgacctccttactatctggtagacagtagagaaagtcatcttcattatctcctccgtataccaaagacccctgggggtatttcaactccttatcataatgttgtgtttcagccatttgctctgctgatagttgttttcccgaagcatgtcgaacaatataattcaaatcaccctggggaggtgcttcgagagcaggtgatgcgggcttttctagaacactttctcccactagttttactagcgcaacttctaaaggtctcgcttcagcatgaacaaaagaaaatcttatagtgaccacttctctggcatcttcagttttcccgccagaagcttcggtggaagcaagagttggcattttcacggattccaaaacagcatccaaaacactagccatcctcctcttccttggagttgttgttgca

SEQ ID NO: 78104 - DNA, 572 bp, Zea Mays
gcgttttcaagaaatgcaagtagaaacgcaaccattttctgtcaatacaatagaaatagcaagcaaaaaagtccagattcgaccggaagtggccgttaagggcaaatgcaaaaacatcgtcattgttgatcctcacacgtcgaatatgtcgcaaggagggattgctcggaagactccggataggaaggctaacaagtctgaaggcgctggggatcgagcagctgagcaaagctccttgactcaccagcgtagacggtccgacacatgtgcgtggacagtccggtgctcaagcagacgatctgtctgactcatctggacagtccgcccatggcgagaggtgtcgacctccacaaagcgaaaaaggggacatgggggcaaagtacatataatgcatatggttggttggtcaacgttggccctacttttgatcaattatcctccaaatatgctagcaagaaggtcgttctatcgatcggccaacaaagaaaccccgatcacccgctaaaacaaaacggcccgaaaggcaacgtagcaagcatcgcctattcatccagtgacgactggatactttc

SEQ ID NO: 78105 - DNA, 546 bp, Zea Mays
ctgatgaatatgagcaagaggaaatgccttcaacaaactaaatacttcaatcaggtttttccttcatgtggaaaataaacgttagactggtagttcacttgttatatttaaatggttatatattgctgatagcataaaggacatagattgctcccgctgaccacaaagatgaccactacgaatgaaatgtatacatgtttagccaaacagttatttgacatgaagaagaaataaaagtattcaacgatctagagatgtgaaaattgcaatttgtaaactctaaccaagcagggactatgatcatataatgaaaaacacaattaatgaaacacaatttacatatcacataaactaattcagaacatcttttttgcttacctgtatgctgtacaaatagagggtgacaaggcacgaaaagatagcaatggatttggttcaaaaagataaagggcatgttaagttgtagaatccggaaacaaattctctatgactaaccttctagtgtcatgaatatgcttaacttctaaaggtttatgcttcaatact

SEQ ID NO: 78106 - DNA, 836 bp, Zea Mays
aaatcatccttttatcttcgtcgaatgccttagagttcagcattatatcgccagctttatgctttagaaatcagcatacatttttgtctttgagatcaacaacgcggtctacccatgttctgttaggttttgaaatttatttgatctacgacagattggacatccagtagatggctcttggctggtcttcatttcgctttgtgcttcaatgctcctgttgattagacttgtacttcatcagctatttttggctttcctccgatctccatcgatatcttccttctgtcttgatacattcattgcgtatactgtgtggatgtgactgcttgggaaaatctattgaaaattcctggacgtccccccaatgggtgtggaaaagggacggcttggtgcgctgagcgtttagcaaactgtccctgagtagtaacttgacgtgaccgcgggtgtagtcatatcgtctaagtagttgacttgagtcccaatgggtgtggccctgctgatgctgaactcaaagggtgtggccctactaatggtgatcccaatgggtgtggccttgctgatgctgaaaccaatgggtgtgaccctgccagagctgatcccaatgggtgtgaccctgtgccatatattgtccgtgttgttgacgaggacgaggaagaagaagaggaagtccccttagttcggaagaacagtcggtgttacagagtctgtggggggagtagagatattccttctccagctttgtctgctcttgttggtctgcaagaattatccatagcaaattttgatcaggctctcgaagatgtcgttcctgaagatatgctgtccgagctagctga

SEQ ID NO: 78107 - DNA, 674 bp, Zea Mays
actacatgaaaggtctaaactactggtgagcttggttatgaagtcaggtcctggatgggcgagacgacgatgccaagtggtggaggtggtggtggagaccaggacaggaggcgaagacgcgccactagaggaagcctggagcgtgtagaggggtcccgagctgtcatagtgggcgagaggggtcttggtggccagatcctttacaaaaaaaaccaaaggggtcaaactcaatggaacaagagttatcggcggtgaactgatgaacaaaaagaagattttaagtgatatgaggggctactagaacatcgttgagatagaatggcccaaggagaaccgaggcacctattgaggtgaccgacagagtggaaccattttcaacgatgatcaaggaggtatgggaggagtggaggagatgggagcaaaagagtgtacccacattgaaggtggtgtggtaggacacactgaagtcgaccaccaagtcagaggggttgggtcatcgccatggtgctgaaagcggcggcaagggaggcatagtcccaacctccggcgaacagggaccaacgcatcgaggtggcatcaccggcggcgagagctggggtggagcctgagtcgtcgaggcatgtcgtagggaggcgctgtcaggaaggtcagtgatggaggatgggaggcactcg

SEQ ID NO: 78108 - DNA, 384 bp, Zea Mays
gcgtgatctgggcaccgcggcaatggcgccgccgctcagcttgggggcgccgccgccctgtgctctggtgaggggagagatgagggtaggatggggggaaatctgtgtgggccgttagttgaatgatgaacgctccagattgcaacgatatcgcgcccttcattattgcgaaccgaccgttgatctggaatcctggggccatgatcgcaaaccggttcgatgttgatgccatctaatcagcaccgtccaaatctgatcgtgcggccagaaacaactcacaccccttcggcctgtgcattttgcagataagccctcggggttctgaaaatagaacccgccatccatatgggggttaacctgtgtctggaaacttttgcagagtag

SEQ ID NO: 78109 - DNA, 394 bp, Zea Mays
attgtatcagatcttcattatggagattgatcaattgtggttcacatttcatttatctgaagaggtgctgttaatttcttatcattgccttttgtgttcccgttatgtggtttaatgtttgattttatagtttcatcttgcttgtgttcagaataatatggtttaatggttaagcaatatgcattaaacttctgagcttatgtagtgtcaatgttgttggtgcttaaggagtagtgtcgaagttggtgctaaaggcagtcgaatcactagttgctggtcattctgggtagaaccgtgtagcaaaaagatgcattttcatcatcagatctcaaaatgagacatctgcgatttgtccagtgagtaattgaccatcaatgtgtgtgatctgttctag

SEQ ID NO: 78110 - DNA, 461 bp, Zea Mays
ggagaagaggcctcgcgaagaagttcatgccgctggaccacccgtctctcgtgcccgaggggcaccccgcggaggcgaacgaacattggacgacatcctcgacgcccaatgcccataccacaaggacatgcgtcatactcttcggaactacagagatttcaagcactccgtcgggaatggccgacccttccaacctctaccacctcccccaccacgaggaggacctagagaacctcgacaacctccgcagcaggaagggggaggaggcggagcgttcccgcgcgtcgatggagaggtcaacgtcatcttcggcggacatgagtcgcaagaaagcaagaggcaacagaagctcaatgatcgccagatactggtggcggccaccagtgctcctgcccgtatcgatggtccgaacacccgatcaccttcactcgggcggatcaatggctcaacttcgatcatcc

SEQ ID NO: 78111 - DNA, 555 bp, Zea Mays
taagacaaattccatgaaatcccagaaagactccgggaagggtttggtagttttcaagaacatcccacaagtcaagggtattataagtagaacatctttacgaatgataaaagagaacaaaacattaactgcattccttgcatctgcacagagcactttggcaggcacttcagaggtagccagtgaaaaggactcacaaacacccatgttagttccaactaaaccacatcctggacctttctcagtcaaaaaacgatattctccagcagtggtttcaattggatcactttcttctcctagctgttcctccaattcatcatccagtgcaaagggcaaggcagagcctaggcagtggatggaacctgatgttgtacacttctctctcccaaatactcctgcagagggctttgaatttcatttctcacgtgaaggcttgcagaccacttggattccaaaagatagaaaagaggagctggctctaaaactagtccagcgcttgggtgagttaaagctggaggtgcaagtctggacagattgggctaatgagagggtgat

SEQ ID NO: 78112 - DNA, 418 bp, Zea Mays
ctttgagatagaagtgaatgcttgtgacaagggggtgggtgctgttctccatcaagatgtacatcttctagcttttgtcattaagtctttgggcccttgtcatcagggtttatccacatatgagaagtggtgtttggctattctaatggcggttgattactagcatttctatcgcactagtggcgagttcataatttgtacagatcagcgtagtctcgtgcatctcgatgatcaacgcctcaccaccccatggcaacaaaaagctcttactaagttgttggatcttcaatataagatatgttacaaatagggtcatgataactgggtggcagatatcaagactgcccttagatcaaatcttggttgtgtctacatttcaaccctcttggttgtagatggtgtccgatacttatgccaa

SEQ ID NO: 78113 - DNA, 597 bp, Zea Mays
aattacctcaactccatcctaaaaggggtaaaacttggaatagatgaactagcaatagtcttatagtttggataagttctaaatacccctgcaaacatatttgattcatctatagaggttggatagattagtttcaatgaaacaccattttagagccaatttgagctagagaaggaatatgagttgaagaatttaaaaacaaccaagttctatgacttagactggtggaacagtgtgacaggggttcggtgcgccaccggactagtactgtgcaaggtccggtgtgatgcagaaaagtgcaattttctctactcaattccaacagctatgtggggcagttggggcaataaatacactcccaatccgcacattgaagacacaagtggtacaccaaacaaccatacatcaagtgcaacaacacatatgcatttaaagccacacaagtgcgcatttaatcgatttgagtgaagagagacatagttcttgtgttcctgagtgttgcaatcttttgtgctcttgatttgggttttcattctcactctcaccaccattcttacaagttgtaaagctaagcaagcgactcaatttctttgtgtg

SEQ ID NO: 78114 - DNA, 700 bp, Zea Mays
ctgactgtcagtcggtcagtctggcagacaccggttgaaccggtattgggaatcggttgaaccggttttctgcagcctgttctaggcctttttgaccgtgacccccttcttcctcttcacttcatcccacattgacagcaacccagccttcagtttgagcgcagaacctctcccacctcaaatttttcaactccagatccccgcaaatccatctattcaaactcgttcaaactttgagggattgttcctcaagggtttctcctccattctccaaaatcttgtgcaagttcttccggtggatattcagatcgaggtatttccttgtttttcattatttttccccgatctacgattctagccatcaatttgtaaatccattcgaggtgtatgctaaactatacatattgaacattcccttcaaaagtttacccttgttcttcacatttgttgtggtatagtgtgtagggtgttcatggccagttgaattgtttatatgaatagatgaactgctcgtaccacacaccctctcctagcatttgttatctccttccttgcatgaaaccatctcagtttatccattcctttcttcaatatggtttgacgtaggaatccctcggtggtggagttcagcagtgatgaggatgagatttaggaggaatctcccgttccttaccccatgcctcgtcgttccctctccaag

SEQ ID NO: 78115 - DNA, 851 bp, Zea Mays
cataagtcgttctagagctgctgctaacgctgatctagctcatgaatgttgtccctagtagagagtgactcaaactagctagagacaatacccatgttatcctaaaagctttgatgcatgttgttcattccattcattataggatcatgaacatgctcttggatgtgatcgtgaagcttagaaaactcagagttcatgccatcaaagcaatcatcaacaacctcaaccatttctctgtgttgtgcatccacatgagtttgcaaggccttaaacctcccatccatatgagtcatcaacccttgaaactggccatccatatgatgctgaagccattattgcatctgcttaaaatatggatcaaaatatcctagggttggctgctgatactgctcatgctactaaggtggaggaggaagcatctattgagctgcatcaggcagaggagcatcctactcatcatcatctgcatcatgctcctgctctaggaaaggagtcaggggcatgtggaggaagacagtgtcattcttgaagggtctaagcagagtaagagctacctcacatctcctcccaaacctggtcctctccttgatcaatgccatgatgtaggaataatatgtcaaattttagttcttgtccatctttaaatcattcaactgtcacgtcatgaatgtgatcaaatccataacctcaccattcatcacatggtggttaatgttccaaaatttgtcccttatcttactcttgtccccactcttggggaggatggtaacctgagttatcttattgatgatagttgggtgatgcctgagccctggagtctcaccaaatcacctggcaattcctaacctcgc

SEQ ID NO: 78116 - DNA, 447 bp, Zea Mays
ccgcctccgcgactccgattcctcaacggtgagtgcggtaccaacctaatcggtcggcgaccttaccagaaaaaagagaggattagagagggaaaacaagttgaatgtatgcgaccaaaacgacaaaaagattacctacacagccagagcaccaaagaagagaggaagatggagatctggccaacagagcttgtgacttgaccactgtcgggtatgacaattaggggtacctagactacaccctaaaaagcgcttaaaaccctaaggacactatcatagtatgtcccccgaggtcaaggaatcaagaactctacctcgcctgaggtccacctcaggggtcttcccaaaaactccacctcgcccgaacccgatcttggacggggcatgagctcgggagaacctcaatcctgaccgaggccccatcaccctaggacagccatatccgcc

SEQ ID NO: 78117 - DNA, 371 bp, Zea Mays
gtcgaaccttacatgtggattaaggtcgccactatgcatttcgtgggcagagcggcgtgttggcttcaatctgttgaacgccgcctccgttacatgttgtgggcagagttttgtgcacaaatccacgcacgttttggtagggagcagcatgaatcactgattcgacagctatttcatattcgtcagactgggacagtagcggaatatgtcaagagattttccactttgattgatctgttggcagcttatgagtcaaatactgatcccttatactataccatgcgttttgttgatggcttacgtgatgatataaaagctgtaattatggtgcatcgtccttctactttggatactgcttgttccctcgccct

SEQ ID NO: 78118 - DNA, 1088 bp, Zea Mays
tgccttcatccttcggccaaggggaaggtatgaactgaagcttgtctcattgatagtggtcagacacaagtctgatgcagcctgaaatgtcaatgagctgcatattgttgattcaatatagttgagccttattgttcagtaaatgaataggtagcttatagcagcatagaaagaaaagaaagtgtgcgtacatactttgtttgagcatatgaatacaagactagacataatattgcttttttgtgtcgatgttgcttgaatatataattttgtagggagctgctgtgcgcgcaggtaattttagcctatgaaaacaactatagtatccctaaaagctggttttggggctgacttttttcacatgctcggctcctggagttgctctgtccgtcccttcttttgcggtcataaaattctacacaagcagggtatttgatctgatcctgaccaaactctgctcaagcgaagtccaagcgaaaaccttgcatcccaaatctgattttgcactccaagctgaggttgcctttaatttgcatatttgagctactagtgaattgaattcggccgtccacctctaaagttgctctatctgttccataccctggtactgtgagtctgagcaaaaactttttgaggaatcataatgactctttactgatggttcttcttagcccaaggttcagccattgtgacctggacacccataggccatagacaagaactttttctttctttcaatccataaacatgtgcccagcatcctccgctcagattactttggaagataacttagtgtgttcagttatctcagtttggttcatgctttgtttgagcatatgttttgtccagaaggttggcttcctgcctgaacttgttcccttgcatttgcagtcaccatgtaccatttatgtgagacatagtagacctgtcttgactttacagtaccattttttagatgtagttccagggaatggatacttttcaaacatgatgatggatgactacgttgaaggagaatttgataataatagcaatacatgtcctgatattcagccacaatcaatgcaagttggaccaatagtccccac

SEQ ID NO: 78119 - DNA, 378 bp, Zea Mays
gtagtttgtcagctatgtgcttggtactgcagctgagatattaagaagggttgcaggttgtgtcgtttttctaaaaaacgacagtgaagacgatagcattttgccgaggtctttgaatggagagctttgccatgcaacttgtggtgtgctgctacaaatgcttcacgttccgaaagatctccccttgatggatcgactcttgtgccaatgctatcaaagttgacattgatggcttcagacctctcatcctcgacaatcatattatgcatgatgatacatgtggtcataatatcagaaagacgctccctatcccatccgtaagctggcccacggattatggcccaccttgattgaagtactccaaaggctctctcaatg

SEQ ID NO: 78120 - DNA, 769 bp, Zea Mays
ttgaacatagtaattcagtcgactagataccagaagaccttgaggcactatcatgataaagtcgtacaacatcaatcctttacagtgggagacttagttcttcgccgaattctaacgggggaggacatcacaagttgtcaccactatgggaagatccattcattgtatcagaggtcactcggccgggatcataccggcttactcaaatggatggcacggaagtggggaactcatggaacatagagcatcttagaaagttttacccttagcaaggcctcaaaagctctcgaagcaacattgtactctgtaatcggggacttcatcatcaataaagttgtcgttttcaaaggcattctgactcttgactatcggctgacttcgattcaattgaacttgaaatcaatatgccaactcggcttagggtgaccactataccctactaacggagcaatcggcttaagtcggcaacaacttaagacggtgcgacatgctcacgctaactcagcttagggtgaccactataccctactaacggagcaatcggcttaagtcggcgacgacttaagacagtgcgacatgctcacgctaactcggcttagggtgaccactataccctactaacggagcaatcggcttaagtcggcgatgacttaagatggtgcgacatgctcacgctaactcgacttagggtgaccactataccctactaacagaacaatcggctcaagtcgacaatgacttaagtcggcgcgatatgatcacatctacc

SEQ ID NO: 78121 - DNA, 489 bp, Zea Mays
tgtccgaagcattctcctccatcttagaagggagttttgctcaaagagtttttgccagaagctcgctctaaaagcggtattcggatgaaagcttcggtctcagaggaaaaatcagcagcaggtagatggggcacaataaatgtaaacctaccctcgcacactctcccacttttataccgaaaataggtgtggggcatgaaaagtttgcacgcacgagaagctacatctttatctcctcgctgtccagtcgaccatagacatacatctatttatgtcgaagcacttgcttctgtcattttcattaacgagcccaggaaggtgtttttcggaccttcaacgcaaggcctccctgatatgattcgcgacctatggtcgttataaaaactaccttattccacgaggagctattgttgggggagagccttcattgccgaaggttcaaaagtttcaggtatatgtttccacctccgttgccaaaatgaagctgac

SEQ ID NO: 78122 - DNA, 577 bp, Zea Mays
tcaacacctctagctgcggctctctagctgcgcccctctggctgcggtttatgaggatttaggaggatcgatgggagcgcccctctagctgcggctccctctcggggcgccctcctcctggagctcgccgtgggtgactgcacgccgccgccgccgcctctcctagacctaaacctagcaagcccacacactccctacaacggatcgaagagcacgatctagttgagaaggtttacctagggaggatcgatgggagcgatgcagtgcgcagatcaccggtgtcgtatgtcaggcgtcaggactggcggaggtgtgtcgggagggtgagaggagatgtgtggggagggtgagaggagcccaattccatgtttagaggctggaatcactcgtggacttcatatgcaggctaggaaagtgggtggaaagttgatttccaattccaggtacagcctaacaagcttggcaggaatcaaattctaatttagcccaattccgactaaacaaacaggccctaagtgatatatctgattcagatatggtggcaagtaaccttctcaaattgcataaccaacatcca

SEQ ID NO: 78123 - DNA, 322 bp, Zea Mays
gttggccacagatgggttcaatctctatggaatgagcgctccccgtacacatgttggctcgtgtttgttatcccaatcaatctcccccctggtgtgtgctttcaaaggcagaatatattcgtgtcattgataattcccggacacccggggaataaaatgggcatgtacatggagcctttgatcgatgaattggtatgtgcctgggaggaaggggtatggacgtatgaccgagctacagagacaaactttagaatgcatgtttggtaccagtactccatgcatgacttaccggcttatgggccattctgcgcctggtgtgttc

SEQ ID NO: 78124 - DNA, 581 bp, Zea Mays
aggcataatgtccccctcgcgtgggaggctcgcgtaagaagattgaaggctgaagaccacgaaagcctaaagattgaagccacactgcaaagtgcatagggacaactcgtgtgcgaagactcaggtgttaccttcaccccggtcaggccgaggtgaagaccaccaaggactccggagatcgaacaatcaggactacgaagaccatgcattgtaatctgccacattgtaaaagggggcccgtgtatagttggcacttgctacagggccccgatcgtaggccgccacgctagaagggccgatggagggtttgcccatgcttgtaattgattatgctgtaatgacccaccataacccctcagaggggaatattacaaggataatgtaggtaactaagggtgtaattgtctttggtgaggcaggtccggccctcgattacctatagatacccccctaatgtaccattgcgagggacggagaaaaacattgttgccctaataccttgcgtttactagtatcaaactgtttcacattctctacttgtttgagcttggctgaccacgagttagtcagttccaacagcc

SEQ ID NO: 78125 - DNA, 442 bp, Zea Mays
taatcgtgcaccctttagatggggatgcttagaaggctctcgacacgtttgatccagactttgcagctgatctgaggaatgttcgaatcggcctcgtgaccgatgacatcacaccgtttggtcaaatggcatcatcatactcatgttggcccgtctctgttattccattcaaccttccaccttctctttgtatgaaatatgaatttatatttctttgcttaatctttcctggcccagactatcctagaaagaaactcaatgtcatgttaaaacccttgattgaagagttgaaggagctttggaaagaagttgaaacatacgatgttttaaaaaaacagatattcaaactttgagttgcgtatttgtggttggtgcatgacttcatggcatatgctatttttaccggttggagtacacatggtagattgacacgtccatattg

SEQ ID NO: 78126 - DNA, 505 bp, Zea Mays
caggtaaaccaaaccgccgtgactggacccggcagcatcttcctttgacatctcccagtcactcacgagaggccatactctgtaggaaatgtgctcttggaccaagtctcttgtgccaatcaaagtgcatacagtgttaaaaatcctctgacatgtttctatttcatttccaagtgcagtggctggtcttctaatgccgaagcgagaccagatagggcgttggataatcctttttatatcttccctttcaactaagttattcttcacataaaaccattcttccatccaggatcctggccacctcttccgaaacgtcggaactggatagctcatgttagagcgaggcacgaagccgtaacaaccaaaattattgtgatactgttccttcctagtagccttcgtttcgtaagacagctcatgcatattgcagaagcattttgcacttggctccagtccttggcttctcatagcccaaataaaaacccccatcctgatgatggcttcg

SEQ ID NO: 78127 - DNA, 435 bp, Zea Mays
acactttcagtggcattctccccatggattgtgcgctatgtagttcgctcatgggccccacccgttagggtcatctccatcttctattgcgttcaccaccccggcggacgccatgaaactaaatctcaacagtgaccgagaaaaccgtgtgatccccgttcgatccccccacacgccttggactcaatcccaataaaatgtgggcccctcatgaactctgcaagccgttgggagccaccatcgacgagcagagaagggcgtaggtcatcactgtcatagggatcgaacgtgactgcacctctatccatgaatgagagccctagagcatcactggtccatggcacaacttctcggggcggtgggactcacgagggaccaacggggtggccggaattcctccccatcgcttatgcaccgccgctaaacgcacctcac

SEQ ID NO: 78128 - DNA, 596 bp, Zea Mays
tacttattgcggtgtcttgagttgtgggcaaccgggagcatgacaattgctcatcgtaactccaccaccactgtagtccacacctccctatggccgagcctccacttcatcttctgacgatggtaagcacctccgttaagttcccctcggtcccctatatgaatagcttcatttggactagaggattagtcaccacatcacgatttcgcgcaacgccggtgatggcgccgccgcatgggctcgagcaccgccgtgtatgaccgtcgtcaccgatagggaggggacgatagccctggaccgttggatctggggccagcggacctgattaaaccatcccataccccttcgcacattagatcacgaccatagatcgagcaaagggtagtcaagattagatcaggaaaccattaagccccgatcgtccgacgctagttgaacgcttgggatcgcgtcgtgcatacccctgcgcgcttctaattccgaccgtggatctcagttccaacggctatgggcatgtaccggttcacggggctcaggctataatctaagccattgaaaccagatcgggcgactcacgatgaccgatacccttttgg

SEQ ID NO: 78129 - DNA, 773 bp, Zea Mays
ccagtgtctagcacccacacaccttcaggacatataacatgaattactttttcttcagaaagatggactacttgtgatgttccatgcactatactttgcacttcagctaacaggagtgcacctgtttctacacaaccagcaccaacaatcatattggcttctggctgttgcttgtgttcctttcctttctcctttttttggacgtttgcaatcttgtgcgcagtgaccatagatcccacaatttcgacatcttcccttccttcttggtgtgccttgtgaagtgagttttggcttactgttacttgagtttctagaaatgttaccatcagatttttaatgcatctttcctttccaatgaccattgcctccagtgccattctccttgtgtgaatttgcttggaaatggtgtttatgcttttgtagccactcttcttcagccagcagcagacaaccagctctgtcagtgacttgttcagctttatcctcaaatcgatcttcaactgcacgaagtcctcccaccaaatcttgaacagtcaaggtctttatgtcacataacatttatattgacacaacaacttggttcaaccggggtggtactacacgcaaaaactttttgacaacatgagtatcttcaatggtttcaccaagggacttgatgtttgccacaaggtttgtgattctcttcccaaagtcctcaacactttcaccctccttgaactctatgttttcaaattctttgagtagtttttgcacattcacctccttaacccggt

SEQ ID NO: 78130 - DNA, 382 bp, Zea Mays
catccactacatcgatggttcaatcaggaacccgaagacacttcttcaattgagatacatggaacacattatgtactgcaaacaatgtttctggtagttgaagtctatacgccactggtctgcattgttcaagaacaggaaacaggccaatgtatcggggtgccaactttccttttaccccgaatcgattgacacccttcattggtgatactttcaggtatacatgatctttgacttggaagaacaaaggtcggcgtcatttatccgaataatttttctaccaagactgagcttctttcaagtggtgccttattcgttgaactttttcctctgtttccttgactaaatcaggactaaaataccaccgttctccaggttctga

SEQ ID NO: 78131 - DNA, 466 bp, Zea Mays
agtcaacgtaacaatcccttggtgaagctccaccagctcgacctcctgcgctgcttgggagcaaagaaggtatgaaggtttgagcatccctagagagcggagagatatgaagggtggagtgagtatcatacttgatgcacgggcctccacgatggctaaccgcgcttgaagacccgcgatgccaacatcggatgtcctcacagccgagcgggacgcctccaacctgccttgcagcttggccattgccaacaggggaaagaccgaggttttgtgccactgggaaacacatggcaggaggggagggagccgcgacgaccctcttgcataggatgatgcgaccgtgttggggaccgacaccaatctgtcctatggacgccatgggacgaccaacgatggctgagacactggtggcatcggccgccatagatgacatcgtgggctcagcgccgctagggctgacccttca

SEQ ID NO: 78132 - DNA, 710 bp, Zea Mays
tatatgacattgtgaatgaggtggctctgtcaaacattgtgtatacattctcactgtatagcttcattcatcatcgtcgagttgttgtacagcttcattcatcgtcgtcgagttgctgtacaacagcttgttagtactatcgagtacagatgctgcaaatgtcttcatttcaggctgaaacgaacaggcctaattctgtagttttgtattgattccagtccagatacggacctattattgaccaggtttcagtttcagtgaatcacctggatccactttatttagcccaggaacagaaacgtgcatgtttttaatcctaaacaaacaaacgagccctaggtggatttaaaatacatagcaagtcaaaatctctactaatttttttaattatatccaatccatatggtgtaggaataattgaacaaggctttattaattccaaactcacagcagttaccacggcaattacccaccgagacatacagggatataagtaaacacccttactttatttaactcatagtttatttaaatgataacttaaaagcaagtaaccgactataaaaagaatggtaatcagaaacgaaccactctggtggccttagccataaacagtagagatttgggtagttgacagttatatgaatccttcttcacataagttcacgagcattacttgttgctttaggacacagtactggtcactttgc

SEQ ID NO: 78133 - DNA, 907 bp, Zea Mays
aagatgaggtgacgacatgccgtagtagtcgtcgccttctctatgttttcgagtcggataaataccataggcaattaattgttgatacccaaggattgttagaaacaagtagtcgtgctctacctattgcgtcaaaggaaatatgatgtgttgattaattgggagctaagtgacctgatatagaaaagtagttaagaaaactaatcgaattatttttaactatattttaagttaagatgtctaaaatagtgaaactagttttgttggtctcatggtgttatgattgagaaaaatatgaacttgtgtatgaattactatttttttatgctgtgttagccaactcttgttaaatagaggaattccattgcgttaagtaattgttatatgtaaatgtttccagtacttcaagtggttgcaagttaattagtagattctctagtgactctttatcccgaaaggtgttaagtctgcgcataaataagagataagtgtattttgtgtagtgtggattgattttgagtgcatgtgtcgcaagaaaagaattagtgcgcatataggcgatgaatgagtgtgatgaaatggtgacatgccttcgtagtcatcatgtcgtcggttggtgacttaactgaaggtcgtagagaaaagtcgattgcctgtgtattattattgtcaccttgtggttctgtatgaattgcaacgtgaagtagtaggctctgtatgtgatgctagatgtctaggtagacgttcgggaattgtggtgctcggaccatcgagatgaaggttaagtcggtcgatgccgattaagtagttaaaatgattaagggaataatcatggggttaaactagaaactagtgttctcgcaccgtttgggatgttgcagtctaaatgcgtatgtttatggtcgcg

SEQ ID NO: 78134 - DNA, 657 bp, Zea Mays
gctgggtcttgccttctttgcacctttcttgtaccagggctgcgctgactgcgctgggtgatgctgcaatgtagagcagtagtggtagtgcgggatctgggctggttagtgtcgctaaatcagataaatactgctttaaggacttgaaggctgcagcttgctctaggccccaagtgaagtccttggctccgcgcagtatttttaggaatggaaggcttcgctcggcggaccgagagataaatctgtttagtgctgctagtgttcctatcaactgttggatgtctctggttgactatggtggagccatgtccattatagcctgtaccttgctcgggtttgcttcgatacctctgtgtgatacaaggtaaccaagtatttggccttgttggactccgaatatgcacttctccgggttcaagcgcagtctggcttcacgcatgttggcgaatgtttctgcgaggtcaaaagatggtcttatttgtttttgctcgcaacgattatgtcctcaacatatgtgaaaatgttgcgtcccatcttaccttcgagaatgcttttggtgagccgtgaaaatgttgaccagtcatttttaggactattgggtaggaagattagactatttctaaattattgtttttgtcacaatatccaaagttgtca

SEQ ID NO: 78135 - DNA, 504 bp, Zea Mays
gcctcggcgtcagaagcccaccataacgcctatataatgaggggcgggggcgcggttaagacataacctaattcgccacctgcaaatcagcagccgccgctcgcctctcgccctcgccaagccgccgtcgcgaacctagcagttcggtacgcggcgcttcctccctgtacgtgtggatacctcggaggtgctgcatctggagcacttggacgaaccgtgcgaggacgtgaaggacgccggcgactgcacagcactgctcgacgcgttcgtctacatcgagacgtcttccactgctctgcgcgtctagtggtaattccatgacctataaccgcagtagttcttggtattatggggatgaaaattttgttttgcgctagcgtagcctccccgtaatcctacagtaagagcacctgacaccactttatgtcaagaaatggaaaggttgaatctggggataatccaacaaggaaccttgacgaatttgaagcttgaatcagttcttct

SEQ ID NO: 78136 - DNA, 448 bp, Zea Mays
gcaaagtatagggtaagttgttagtagaaagaagggtgtccttgtacaggagcacaaagaacatggcattaggttcactcaattcttttagatcccccttcctagtcatcatgactaatccctcttttcccggtgtcttggacattggaggctgtggagttttatttggctgtggaaactcttccttactatttttgtggatcactctcaagtggttctcgctctcttgatttttcttctttagatcatccttcataatttcctccggtgtcaaagaaagcaaagagagtcgatctcctttgtacaagaaagacaacttgttggttctcccaaaaatctagacatcatgatcatataaccaaggtcggcctagcagcaattgacatgcttgcatagggaccacatcacattccacatgatcattgtacttcccaacagaaaaaggaac

SEQ ID NO: 78137 - DNA, 281 bp, Zea Mays
aagaaattggagaaaatggagcagaaatcacaacagtattgcatacctcatcatactaattttcttttgatgcatcacattacatttcatactcatgttgcgagttgcgacggcacataattgaggttggtcaagccgatgagagcacgaacaccacaagtggcaccagaccgggggcatcgcatcgtaggggcccctgcaacgggcgggccggcgacaaggtgggtgaagttacacttcacaaagagtgacaacaaagtcatttagtactttaatgtgac

SEQ ID NO: 78138 - DNA, 826 bp, Zea Mays
gtaaaacaccgctcttaaattgggataggaaattggagatttcagataacgggcatagggtaaacaccaaggtaagatcgagagatgagaaaggtggaggcaataagaaacaaaagcacaacaaaggacgggattacaaattcgcgagccaaagaagaggatacgaccaagagaaagaaggtatgagatggaagaggggcaattttaaagggcaggtacgaaacaaacatcaatataggatatagaggtgtcaagggtacatatgataataattaaaagaataacaaagggtatagttaaggcaagactcgtgaagtgacaaagtggagaaaacaatcaagggtaagataggtaaggttccaacagaagggttgatgtaaagattccttaccgagggagataaaatgatcgttcatggattgttaagaaacaagggtagtcaagggcatgttgaatgaaatatcttaaacagacattgggttataaaggtaagcatagaaagataagagtatgaaagatttcaaggagatgagcataccaataccaagagacaagaaattgccaaaagatagcgacttaacaacagaggaggaaagggtctcaaaagacaggaaggtcatggacatataaattgaaatgtttaagtagagagtggagaatcagatgtaagtatttgaaacacgagtattgaagaatccagggatatgtgcatgtcaatactaagggaataaagatagtcaaagggtagcaatttaatgacagaagaggaataaatcccaaaaggcaagaaggttatggtcagggggcatctacaaagatgtcccaa

SEQ ID NO: 78139 - DNA, 474 bp, Zea Mays
ggaaaatatctcgtactctgattgaggtccgattccaagaggaaaatgccaaaaatggccgcccaatgtcgacacttttccacctgccacctgctggtgttgtctgacatgtccagagcttagctctataaatggcagcccatcctcacccatcagccatctccacttcttcccccacgccatcctctctctcccacacggcagaaggcagagcgccatctacctagcaatagctccccttccttctcccctgcaccttcttccctccatggctcagggtgcccctgcatctcgccctcccgtccatggcgccctaggatagcagtagggcacctccctggctgtcgaccctccctacacctccccttcatggcggctgcaccctccccctgcaacagcccctcctcttctccatggacgccaaactcgccttcaacctccgtagcacctcctcggcatcagccatcgcgcaac

SEQ ID NO: 78140 - DNA, 924 bp, Zea Mays
atctcctagggtcctcacgaacgcagaaacgtgtcatgggccgcacgatgggccacctgatggtttgcttcgtgagatgaaccaacgggctacaatcaaattgggcgaacctgatccatgaagacgaagactgggcgtccaagttatacgctgactgaagcgttgatatcttaggtaaggaagttgtgcacacccaaactactatacattcggaattaactcggctgaagatgtaatctaactccgaataaggaggactataggccgcgataaaggagataggcagagtagatagtgatcacaacttgtaaagggataactctctggtcgtgtatataagtccaagggggacccctacaaaatcatctcatcttgtcccatcacacaccagccctcatcaatgacacctgagcaccatcacatctcacttgtaatcctcatactccagagaaattccagtacacaacctccacatgaagtagggtgttacacattctagtgacctaaacctatataaatccttgtgtaagttcgacgtgctcctgcacataccattgagtcgcagtcaacgacgtcgtcctacccaaaagcatcacgtgggtaaccccgtggtgcgctgtcgagtcacaaacaccgacagcgagggtgcaccaaacgcgtgggaagatggcagttgcgtatagctactagagcatgacggacgacgccacgatcgcacacgcatgaagcctgaagccaacgatcattggggcaagctgcgagagagagatgggctctagtgggttgttgaatacgtagttttttacatatacatgtatttgtaattatatgtatttattttagtactaaaatcttgggttttcatttgaatacccatgtatctgtagtaggcctgcccctactcaactatctcgtagccgtcca

SEQ ID NO: 78141 - DNA, 541 bp, Zea Mays
ggacaacattattgaacaagcaatattggtgccttggtgggatgggaccataacctgcatcacggattcccagactaaaggagggcaactttttatgtgggttcctttcagttagatcttgcttttgttagtttcagtttacttgggtgattggtgttgtacctagacttaagattaacattgttctgatctctaaaaaagattactattgcgctgttcaatggttcaaccgattatcaatgacatcaagcaggcaaggaaacgaacttttttacgtgcgaaaatctaggattaggtgatgtcttgttagagcacctccaagagtaaatgtaaaacaacccccaaaagcttttataggatcaaaaacacttttttagccatccaacatactcttcaacttttccccaaaatattcgcatcccgaatccacagctccctctcccgcaaatattctccctctcccgcaaatattcgcgtcaaccaaatctccccaatcagacactgcacgcgcagggaaagttgtttcgcgccaagattttgc

SEQ ID NO: 78142 - DNA, 825 bp, Zea Mays
ttccaaattgggttttctaagccccaaaggaagcccaagatacgtgaagggcaaagacccaaccttgcagtggaacgtatttgctagaactgccattttctgctctgaaacattgatgggataaatattagatttgttataattcacatggagcccagtagagtcagcaaaagaattaagcatcgctttaaggaagaagagttgtctagggcacgcttccaaaatcataattgtatcatctgcgtactggataatcggaaagtggtggggaaattggaagaccaggctggcgagacaaagcaccagtctagcttttcaagcaaaggttgacgttgcatgtttgaccaagtgaaagtttgccctttgagaggaatttcttgtaaacccagctgactgattgccgcattaaaattgagcattctaatagggtcaccacccagcttgttgcgattttccggtatctaatcatgttgaaatcacccagaaaaattcaaagcttgtcttcatcaatttcaaggttagaaaaccaggcaagaaagacttctcttccatgaggggaacaaggggcatagatgttggaaagccaccagacttgaccatttagattagatcagaaacgaatagtatgcccaaacgcattctggtcaactacctcagcctcaaagagggagcctttccaaatagtgatgaatcctccagaagctccaatagaagggccatgagcaaatttatctaaattccgattgcagaaaagacgaagatatgagtcatcgaaggattctttttttgtttcctgaatacaaacaatgtcacaattggattcca

SEQ ID NO: 78143 - DNA, 1102 bp, Zea Mays
tctatcaagtgcaggggctgtttggagaaaatacagaccttatggtaatgatctttgtatacagatggactgcgcgttggtttttaaattccaggagggctcttttgcaatagtgtcaggccgaaggggtatgcagccacctcagccacccgatcgaacccgaacggtccagattagattttaaactcatgtgaattggtacacattgatagccacaggatcgaagatcgacggtttgtatctaacgaaggccaatccattcttacccattcgatcccgatcggacggatcaccgatcgtctagacgaaacagtatccaacttctaatcatggctgcccactagctgatcaatggctacggcatgatcttctacccccgacacaagggcacgaccatgcaggggatccatcccatggcggcgccttcgctagtgtttggcaaagctggcgtcccgtgcccaatcccaaaaccgtctgtgcaataagtgccctacggaagatggtgagtgccagggatggattcatactagagtctagggcgtgaagcaacccgaccacaccaggcatagatttgtgatggtggaagaaccacggtgaggaatcccgatgggtttgaagcttctctcaaagaattcagggctcccgatgtctccccacataccctcagatcttcctgacctcctcccgaagctcaaacggtgctatgcacacgggagccgacagcggcatcatggtgacattcattcacaccatcctgcctcttcccagctcggatatgggggcggtttggttgcgccgtgaatcaagagagaaggtaagtgcttatatttggttccggcacccagcatccggctacgagcgcaacaacctagtccgttcggcgcggaggcaatagggtaaagtttcatgtatccgttacagtgggagaaggagatcctgactgcacgggcccatgtgacagcgtgaagaggtggcctgcgttggagccctggccacggtggccctcctatcggcgcacgagagggcaaactgcgggacccacgggtacagtgagacaggcgtgtgcgagttctctatcgggccacgtagcggaggcagggca

SEQ ID NO: 78144 - DNA, 421 bp, Zea Mays
attccaccagattttactcaaagcaggagagtcccacaagactgccttccagacacacacgggccactatgagtttcgggttatggcatttggtctcaccggtgcaccgggaacatttcagaaggctatgaaccacactctagcacctctacttcgtaagtgtgctcttgtcttcttcgatgacattctagtgtacagtgcatctctggacgatcatacccgtcatctgcagcttgtcctcgaattattggctcgagatcagtggaaggtcaagctatctaagtgctcttttgcaaaacagcaagtgtcttatctcggccatattattgatgcacagggtgtctccaccgatccagtgaagatccaagctattgctgagtggccaacgccgaatggtattcgcgatttacgcagttttttg

SEQ ID NO: 78145 - DNA, 610 bp, Zea Mays
ttgctttcttttctttgatgcttagtgttgttcttgcttgtaggaggagaggcgatcactcattgcttcttgtgacaatctagacagactatatcacgacgccagcaattccttgactattctagagaggagtcaccacttcaccatgtcggacttggatcatcatcatgatgaactgagggcgtcccagtctgaagtgtcccgacttagtaagctactgtcttccaaagattctgtcatcaaggagctgtgtgcttcaaagaggctcatcacgcaagagctagaggccacccgcctcaacatcaaggccttagaggatgaccgtgtcgttatttaggcgatatgcgacaaggccatggataaggttgttcgcgccgggtggatcctgatgagaaggcctggcgtcgtggtgcctgaagacattatcaccgatgtttttgccgcgcctgctgttgtgagtcgaccatcttcttatactgctcctgcagccgagacttcctgcaaaaatgctcctgcgcagggattagtttgaatcgaaaacttctctttattgagtcagtacttcatagtgaaatagtgtactatgaattccgtgtgcatgtaattgtgc

SEQ ID NO: 78146 - DNA, 544 bp, Zea Mays
accatttcatagtcaacatcatctaaaggcataagttcatcattaatgttattgccttcaagtatttctaagtcattctaattttgcacctcatcatcctcctcattaacaaccatttcaatatctaatttcattctcctggtaaggtggagtcctgttgaatatcgactagcccaagattagaatgtgtctgtctcatcacttcagggtcaaaccaatgatatttgaatatcactagagtaagaggtttggaaccatgaaaattgagttcatatatttcttcgattcgtccaaaatattctaatatcattggtttttcgattgggccgactttggtcatagcttgttatgtgaaaacggtatccattgacgtcatacccagaatacttcttggccctataggcaaagccattggctacttgtctcaactcgacactcatagacgaatctctttggccctgtaagttcaaagacgctagattgttatagtattcgcacgtaagagcaacttcaaataacaaactaagcacgtaccttatgtttg

SEQ ID NO: 78147 - DNA, 534 bp, Zea Mays
tggcggagccacggcggagattagtcgcggcgaggaattccggacgccggtctcaacctccaatcttgattcttcgcacacgcactccatacggagtgccgaacacctacgaccccacaccggcctccaaacgacggtgaaggtggagacacggctccgacggcggacggaccacacgcattggttttctcggtcactggggatgacggctgggttcgtgcggttttaggatctagggttctcgagcgagcacgtatttaacgtcccgaaccgacggaatcggagtcgaccagcagctccagaagaaggggaaggagaccgcccgccatgcgcgggatccagttgaggaggaagctgacgacgccggccgttgcgctcggtttgttacggacgcgagcagggtgacaggtgggccccggctccagtgatacgaacgcgcggtcaaaggaggtatccgcgcccgggtgaggatgactgacgagcgggccccgcagttcagtgtcagagcgcgggcgcagagagaaagggggaatg

SEQ ID NO: 78148 - DNA, 467 bp, Zea Mays
aaaaacccgaagtctatcgcgaagactatccgcgcagaagtcgcctaagggtgcagccggactaagcacaacaagtgcgcaaaaacccgaagtctatcgcgaagactatccgcgcagaagtcgcctaagggtgcagccggactaagcacaacaagtgcgcaaaaacccgaagtctatcgcgaagactatccgcgcagaagtcgcctaaaggtgcagccggactaagcacaagtgcgcaaaaatccgaagtctatcgcaaagacttcgcgcaagagccgcctaagggcgcagccgacccagtacaacaaaagcagaaacgacagcaagaccaattataatcatactggcacaacataatcaatcacaccagacaaagtacacagcgccctcgcaggcacaggcacgcgagggcacacaactccattttacaagcccttacacatacacaagcgagggcaccacgccct

SEQ ID NO: 78149 - DNA, 295 bp, Zea Mays
gcaacgtgtgttcgcccgtgttcatgctagagcctagctgggcccttcctttcatatcttctttgatagcttgttgggctttatactagtactacatatacagcccaatgacaactacggtccacaccagcccatatcagttcgattgcttcttctccgttcacatatacgcccacagatgaagccgccgttgagccttgagttgccatgttcattctacaagctaggggtagggggtctcgggggtttcagaaaagccggtgcctgctaccttgctgtcggtgtagcaggcaag

SEQ ID NO: 78150 - DNA, 696 bp, Zea Mays
ctcggatctgggggccggcgttgacataagctacgactgctagtgcacgagcgacggcagggtcacttgcctcatcgcgccacccggagctattggattcccatgcgatggctcagcggcaagggcttcatttggaaggacaacgtgaggatcagcaggcaagagtactcgtccgggagcttgttcaagaggtgcgtgaacaaaatttgctccgtcgctaaaattctaggtggtggtttggtctactagttgtgaatttggtggtggctcattgctaacatgatgatggtggaggaggaccagatctcgttcccgtcgaacgcgcacgacgtgctcattttccaaatcctcgctgctcatcagccaaagtggtcaaattcttcctatggagaggtggccaaattgtcgttgctcgccctccgagcgccttcctgctcctcccggtactcgattcagtgtctcttgcgatcagagtagccatggtcggccacatccccatgaaggagaacccagccatgtattagcaccatttgtggcactagatacagctggacggtatggacctgaggcctggacggtccggctcacggacggtctgcccatagacatggatggtccgtgaaaagatcgaatcaagtggttaaaactcctatctcgttgcgtgtttagctcctaatcttgcgacagctgttggag

SEQ ID NO: 78151 - DNA, 769 bp, Zea Mays
cctacttatcgcttcgttttcttaaaaggtctttctaagaaaataaatttaccgtttaaattattgtttgagaaattatttaagcaaaaactgttttctgtacaacatttttttgttatcttatatggagagtcatcttcgtcgttatctttgttagcaagaaatttagagtaaatgatatttactgcccgttcgttttagattataatttttttgaccaaaagggcagtgccccctattttattaagaaatagaacgatagagtttttaccaccaacacaggtcacgaggcccgccactcaacaaggatggcacatggctacatcccaacatagcaacgccaaaaaaaggatcagggacacagaaatccagacttacaaccttatttagatcaactaagtcttaccaaacacttaattaattgtctacagccgaccactctcagctgcctagaaccaaccataaccgatcaaaggcaagctaactgacaatacacacctagcaaatcagaagaccaagcagattgtaagacagaacacaatcaccatgtgatacttcttgtcaccggagcccacccatgcgcgcgattaaacacctctcttgtcgtctctctgattcgcttgcttcctgcctccaacatcttttttgttctccctgtctgcattagtgcccagtaatccaaaagaaaacaacacatgaagattacatcagtggggtcattatggagctttttattaaagcaaatggaatttctggacttccagatcgc

SEQ ID NO: 78152 - DNA, 1015 bp, Zea Mays
tctctacttttctccttgataatgatttctccctattaaattcttacacttttgctttcgtgccattgtattgccccctttgtgcaatacttaccttgttatatattaaacctttgcctctctacttttccccttgataatgctttctccctaactcactttatctccttggttgtataatttatcctcactttaacagttcatggttatcttatttcactcttggccaccaacaaatatgtcttgtctaactccttgctatttcttacctgactccttgactttataatatctttcttattccaaaccttgtctcaccttttgttttggttgaatgagtagaattggattgtgttgtgctggtatgcttgaattcattgtcctttgtgttcatgtttgatttgcttctttgaaatgatcgttggtgtattgtgtgacttttgtccacaatgacatcaattagctaggaaaaaccttagatagatgagttttctctgctctctataatctgtctttactcaaccctttcgtcccttccattcttccatacccatacagatgtcagaccttggaatgtcaactacaagtgatgtcactaagtgcaaagaatgtggtgtgttggcaagtcaaaacaacactataaataaaacagctgatgaacagacattcaagacccaaaaggatgcaccaccaaaccaacagacaagtgaccttggaacatgttgttgtgagtactatggaattccttgtcgccagatcagtacaaacgaaagtgaaactacaaaacagaagaactggattttattttctggcataaacagacaaatgtctccccaagaacatctaatagcagattctctcgtacctaatgcactatcagatgatgaattgcaaagtattccaaaaaggaaacatcataaggatgcacaaccccaagaagaatcacaagagtgttacattgatggatggactattacttgcacacagtttcagcctcgtcgtcacatcagctcca

SEQ ID NO: 78153 - DNA, 443 bp, Zea Mays
ttttaaaaatatgcaagaattttttattactattgggcggagaccgaacacgccctcgatcacaaagcgaagaccatatgttttgtcttatgctaaccatacaggcccacaagcgaaggggtcctcgactcaaggatcaacagttgacgagaggcccataggcgaaggggtcctcgactcagataacaatcgctgacgagggatccacaaacgacgaccgcaataggtcggcaatagctaagaccttcgccaatacgtcgactaaaggacttccatcattcagccaggcgtagcgaaggctacaaattagctccatatgccactggtccaccagaagacatctctagggcccaactgttagcgtagcgtgtgggtgtgttatctggtgtgcaccgtctattatacgaacaacactgtaattacactgttacatggaatatccc

SEQ ID NO: 78154 - DNA, 922 bp, Zea Mays
tttagctcaattgaacgggtcgaggagcattaggagagtctagggatactaaaacgggagagcagagagcatgaacagacctggaacaagctagccacggcaagggctctttcacggtggcggaaacccgatttgggggaaatgagcaattcgtgggctctggtgagtaattgaaggcacgagcgggtggattggatgcttgaatacctaacggagccaagggtgtgctcaatttatagggctcttgagcggtggccagtgaatttgaaggagacgtgcggcggatggagagggggaacagcactggcgcaagcgattggtggcatttaccgtggcgggctcatcgatgatggccggatgtgctacggtgagtcactactgtgaagtacatcgtctaggcatgtgtcatccgagcggcagatggctaactccggtgaacttatctgaattccgacgtgagccaagcggacaggacggccaggcagaacagtgccctaagctcaatagcggtgaagatctttccaccccgaggcgttatccgggcaccagtgagcacaaatcacctcgccggcatgaatccacgcgcgggagtcaccggcggcaagttcactgaaccagtagatctttttggttactgtaccatcaaaaatttcttcagtcagcctgacagagtgaatggcagggagatttgctccaaattttatacagtgactcgatcatctcactatatcaaagttgtagcctaacaaaccagctttaactttgttgtaatgttcaccatcaattagtcacaggatcttactcaaaatcgagctctaaattcatccaacttcactgttactgaaaattcagacttaaggctgactgacagcacaactttgagcttatttttctccaaactttgtatgtaatcaaagcttag

SEQ ID NO: 78155 - DNA, 366 bp, Zea Mays
cacgactggcgtacccagctggaggagcgcaccaaggcggcgtcccaccagttcgtcttcgagcagtccgagcttgagcgagactgcaaggactacaagaaggacctccagaaggtgtacgcccgggagctggaggtggcccggaaagagaagaggctagccaagaaggaggagcacttgaaccagagggaggaggtcgtcacagagctctaggccaagctgagtgccttcaacaaaatcctggaggatcagcgggtcgagcagaccgcggctgtggagtcgctgcagaggctacaacgagagctcgagggcaaggctcgcgacgccgcccacgccgaggagaagcttaaggcgcaaggataatcc

SEQ ID NO: 78156 - DNA, 685 bp, Zea Mays
gccgtactcccggtataacgtcgtatgttactccggctcctatagcgagtccatcgcaacgtctttgtagtggtgcgcagcgggtcccactgatcagtctcattcactcttcgtcacctgtcagcgtgcgtaggtatacactcggtatggtgtgttgtttcgtccttccgatgtatgggttactataaagaccccagtgcccatttggtgtgttgtgcgtatgtacagacgtggctggatggtgacgcgtctcatcgtagctgacgtagattagtagcgttggactcagatctttgcctcgccgggttgctcgacggtgagttagtcgtccggagctgattggcggagagtttgtcatcaaagatggtcatcggagttggtcatcagaaagctagtcagtcggtcttcctcgcagagttggtcggcggagttagtcatcggagggttggtcagtcggcccgtctcgcagagttggtcgatggagttggtcggtggagttagtcatcggagttggtcatcgaagagttggtcaaccagtccgtctcgcatagttggtcagtggagttgtttggtggagttggtcatttttgaaggggctattttgggtacccggttcccgagtactcgatagcatccctcgagcctttgtgtaacaccttggagttgcatagaggctttcgttgag

SEQ ID NO: 78157 - DNA, 668 bp, Zea Mays
caccccttgtgctccctcaacactagccaccactataacctatacaacaatctggtaccggagatgccaggacatgacgacgacaacaacctggtggtcttctccgttgtcgtctccatcgccacagcgactaccatcgactccactgtctcccccgccatgtatgactcctagtacgctaactggaacttccagcgcttgatcatgcaacagctcatgtcgctcttggcacgactgagtgcaatggaagcacgatagtccatgcagctcgctttcctggaagctcggcagatcgccgcctcttcaatcgtctacctgcctggcttttcttttgggccgcctaagtacgacggcataccagtgacctctagtataacactagctacgtggctatgcccacacttctctctaccacctgctgcgcctccacttctgattccatttgttgggagccatcaggcatcctcgtcggtgggcgccataccctaggactttccctatgggatgtctgggtacgaaatgatgacgttcccatccttctccacctctaggtccctatcgtaatggttaaggcttccgagtacgtccgcgccaccctttggctgggctgttgtagagtggatggtgacggcccgctagtaatgatggccacggttcggagattttct

SEQ ID NO: 78158 - DNA, 453 bp, Zea Mays
aaggtggggaactcatggaatatcgagcacctcagaaagttctacccttagtgatacctcaaaagtctcgagggcaagttgtactatgtaatcagaagatttcatcatcaataaagtttcatctcctaaaggaattcaaactcttgattgacaattgacttagactgggctcgactcaaaatcagcacgacatgacttagggtgatcactatgtcctactaacggagcaatcggcttaagtcggtgtgacatgctcacgcttacatgacttagggtgatcactatgccctactaacggagcaatcggcttaagtcggaaacgccttaagttggtgcgatatgctcatgcttacatgacttagggtgatcactatgccctactaacggagcaatcgacttaagtcggaaacgccttaagtcggtgcgacatgctcacacttacatgacttaggg

SEQ ID NO: 78159 - DNA, 735 bp, Zea Mays
ccgaagaccagggcatttctgccttgctcgatctccaaccatagaggggtcagggacctaggaacttctacctcaccggactcctgaccacaagggggcagaacccaaacattttcacctcgaagctccacctcgcccgaccaccgggggtgaagggtcggagactttgcccaatcacctgaatgtgagattccctaggccatactgccttgaccactacgaacatgaagacatgcgagtcaaactctatcacgatgtggaaccggaacgacaacacgagagcatgtgtgtcaatatgacgacgtcatccatcagggcatggagactaacaccggcgcaaccactcccacactaggaagtcaaaagtgaacactagctaacctgttgtaatacatgacttaacacaatgacgattgccgagatggatcacacatggcaatagtgccatggctgacagaggtagatgtcatccatagtgcaacttgacaagtgagaatctcgacaaacgatagagcacatgatgtcgcccaaccctcatctgttcgctcaaccttgatcatttgtagcagggcttgctcccgcattaacctataaaagaaggggagaggatcatgatggacactaccaatctatcattcgaacactataacaatcattcacacttgcacaccagagatctgggaacttgttcctctctcacccatttgttaccacctactacaaaccagtgcaaag

SEQ ID NO: 78160 - DNA, 876 bp, Zea Mays
gaaatcatcttataagttttcttcagtagcttcacgatttaaggtataatgctgcacattactgtttcctttatttcctctgggcatattttttttgtttttctagatttttcctttatttactgtttctgggttatttatctttacttttctggtcagtgcatattagatatttgtttacagctatttgtgtggtacaaataaatgtctattgattgcatgctaacaataaagggaaacaggaaagaagcaggcaaaatcatagttcaaaatttattgtttcagatatataatttttgagcttttaaggaactcatttgagtttttgtcttgaatatctctccccctcctttcttcctatgtgttgtggagacttgagagtaattctttgaaagccctcaagaatagtgcatgctatttttatttttatttgattatacttatgatatggtcagttatctaatcccaacagcaacaactccaagcactaatggagacacttagctccacggagcctcattacatccgctgcataaaaccaaattctctgaattgccctcagaagtttgaaaatggcagtgtactacagcaactgcagagtggggttagttccattgattctgctttcacaccctaatgtataagtcttttgaattttgattcctatcaatgatttctcatttttccattctgtttaactcatcttttttatatgcttcattattggaatcactgtgctactaatttagtttatttatttggtttcattacagggtgtacttgaagctattaggataagtcttgctggttatcctacaaggagaacatactctgaattcatcgatcgctttggacttcttgtgcaagaatatatgg

SEQ ID NO: 78161 - DNA, 532 bp, Zea Mays
agcgccccatctggtcccgcttcggcctctgaaggccgaaggtggaaattgatgacgttgttgaagcatgtcagagggtttttagcactgtttgtgccttcattggcacaagggaattgattcaagagcatatatcctttagggtatggccacttgtggaaagctgggatatgccgaaggagaccaccaccgattctagtgatggtctggtccgactgaagtataccttcagatttagggagaagtttgatgagccaaacaacgactggctaaagtgcattgaagctaccagtgatgagctacttggagcctactccatggctgaagataatgctttgtccgcagcctttggaggccgagggaagaaaagactgaacaggatctttgatgcgattggcttcatataccccgattatcgcttcccgttgtgagggcaaggaaaaaaagaggaaggctgccgcttcggccaccacagttgtgccgaagagcaaaaaggtgaaggttctgacccaccggtcgcgttatattgaac

SEQ ID NO: 78162 - DNA, 409 bp, Zea Mays
gcccacttcacagcgtctaaacggtcgacagcctgtttagacatcgtttaaatgctacacagtcatatgtagttttcatgtaatcgatcgtttactgtttatcctgtttaaatggctgttatgcctgttaagttggctgtttagctcaggcaatggctaaacgacaagtagccgactgtttaccttttaggataacactacttcacaggaaaccaaacatccactccgatctctggttttcttttcctttttggatgcccaagacagtgggtacgaagaggagaggagagaatgaggaagaccacaagaagctgtctgtccctcctgatcttctcttccactgctgccaccgttccaagaaccatcggaacttggtaatatcaggagtcaggacggagagctgaaagca

SEQ ID NO: 78163 - DNA, 473 bp, Zea Mays
atttaggctattattgcatgaaattcgcaaaaaggtgccatgagtgacaaatacatggcaactttatacaccaaccacatgaaccgttacatcccactagcatgtcttggccatttgaaatgtgggggatggatgtagttggaccaattcacccaccatcatcccaaaggacataaatttattttagccgccattgactatttctccaaatgggcagaagttgtggcattaaaaagaggtaaaagctaaaaatgtagaaaatttaataagaactaatctcatatatcgatttggtgtgccgagtagaatgatatatgataatgggtcaaattttaggagtaaacaagtcgagaggatgtgtgccaaatttaaaatgaagcacagtttctctactggatataactcgtccgctaatggtcaagcgaaagcatttaataaagtgttatgcaaatttcttaaaaagatggtctcat

SEQ ID NO: 78164 - DNA, 468 bp, Zea Mays
gatcgtaaacgaactgagtatctttgaaatctctctttattgatgacatatttccactttacagaatacattgtcgtcccagaagttttgaaatacagctagggataaaactttctgaggtgctctatgttccaggagttcccaacttctgtgccatccatctgagtgaggcgatacgatccgggccgagtgacttctgctactatgaagggtccttcccataagggtgataacttgtgtcgtccctcccctgttagaattcggcggaggacgaggtctcctactgaaaagaaccgttgccgcacagccttgtcgtgatagcgccttagagtctgctggtaccgtgctgattggattactgcattcagccgttcttcctcaagtacatcaatgtcctccagcctagcggcctcagcctctgctatgctttcgaagatcaaccttggcgccccaaacttgagatcagca

SEQ ID NO: 78165 - DNA, 353 bp, Zea Mays
atctcttcggcaccaagtgttctctacatccatctctagaagaacaatgaggacaacgatcaagctcagcagaatgatactcctcatcgccatcagggctgtcatcagaaggatttggcgcttgctgcactcttctagacacaaggaaaatttgatacaaaagcgccatcctaaaatctgaaccaccccctcaatgttcataggatcaaccacccctaactccataatctctggaattgcagatggatcagcacatcatccaaatcatctaaagcagggtaaatcctttagaatcagagtgctctggtgtatctcatgaacccaaacagacagattgagttgctgttgcaccg

SEQ ID NO: 78166 - DNA, 333 bp, Zea Mays
cgtgtgatggatgctgaagttcttcccggtccgagtgctgggcgtaggcggcgaagggcggtggcgaagcgtagagtgagtgaggtggagggtggtcatcttcgtgtggacagggctggcaagcgggaattgttgtcctcgccggttggggcaagtgtgggtgaggaggagttgcgaagtctttttgagggtgaggagctgaggataatgatgtttaactatagggagatgggtatcatcccgaaggttgaaccaatgtaaggtgtgatgccctcgctgtatgtatgtaactataatttgtatgatgaggttgtgtgccttcgctgatccggc

SEQ ID NO: 78167 - DNA, 564 bp, Zea Mays
ccataaagtgcttcaaacggtgccatttttagacttgcctggtaaccattgttgtatgagaattttgcataaggcaaacttttatcctagcttctaccatgctttagagcgcaagctcttagcatatcttccaacacttggtttgttctttcagtttgcccatccgtttgtggatggtaagctaaactgaagtttagcttggtatccatggactcatgtagtctcttccaaaagcgtgaggtcaattgggttcctcgatctgatacgatcttctttggtactccatgcagacaaacaattctggacatgtataactctgctaactgggctcctgagtaagttgtcttcacaggtataaagtgtgccactttagtcaacctgtccactataacccatattgaatcatagccatcccgagtacggggtaatccaactatggattttcttcccatttccattttggtaccttgacaggttgtgtaatcctgctggtctttggtgttcggctttaactcattgacacacgtcacatagtgcaacgtgagtagccacatctcttttcaa

SEQ ID NO: 78168 - DNA, 786 bp, Zea Mays
gcttggggtacctcccaccatcggaccagcttgctaggttcctctgacgaaatgattagattttcgtcgaaatgtccccaagctagggtgagtctctaagctgatttggcaaaagggcaaagcaatgccaaatggatgcatgtctctagtggcccattacatagagcaaagtgatcttggtatggccaaccccttttttgtgtccgtggtgagacctttgtccattgccattgtccatgcgaaaaccttgcacttgttttcagcatgtgctctccagattaggctggaccagaaaggcccgaaggagcctctaaactggatatggtatgctaagagagagagaagtatgttccgtctgtcgtccatctctagagaatggagtccctcatgccaggtgtaaggtgggtgtcctggggtctgatccaaagggagacgaactccagtatatgggttgtagtggtgattcagcctcacagcacattgatccagtgattatcccggacctccatgtagactgatccgtttttcatcatgaacatcgcaaataggttaggagctaagcgggtggtgcctccatcaagccaagtgtcatgctagaatcaacatttatggccatctccaacgatgacccttgttgaggcagtgaaaagtgctcgatcaatgtcatccattggggtatccatgccaacccaaggcttggtatcatccacccattcctgccacaaccatcgaaggcgtaaagccctgccaaatttatcaaggtttgcaatccctaacccacccaag

SEQ ID NO: 78169 - DNA, 451 bp, Zea Mays
aaaaaagatggccacctgccttaatctctcctacagcagggctgtgagcacaacgctggaaattgaagcaaagaacataggcccagggaagtcaaagggcttcggaggtgacaggtccaaccaggggcctgaaaagcgacaaagcttggtaatccgacctttcaatcaaaaccgttcttcacctcgtccaccctcctaccccttcaaacagcctgttttaatccgccctgccactgcccccacttcaacaactcagctgagtgcccctggtgctcgtttccccgccctcccgagttcttgaaccgactgcttcaattgtgggaagtctggacatttcaccaaagactgcccatatccgaggcagaacaaatccaataatcagcagaacccagggagttcaagccaaggcaagggaaacacaacaaataatttagtgggcaaaaatataaag

SEQ ID NO: 78170 - DNA, 692 bp, Zea Mays
attgccttgcaccactgaatctgacgtacagtattagctaatatcgtataaaacatgcttcgagcattgtacaagcgcacaaaagagtaactgcactgcaggcaatcgaacgcaggtaaattgtactccgcacaaatttgggcataatcccctcgctatttatccgccatctagatagcggttgatgcataagcgtgcactgaagaacagcatgggatccaaccgccagtcgggcgtcgacctagagaattttgtactagcaaccaaagggtgggctgcgcgtgggagtggacggataaaaaatagcgaaaggctgtctcaaatcagcgggtggaaaaccgcaggccgtccggaactccggattcaattcgcatcaggtcctctagctacttgcttcaaaatacagttgagggaatgttggcctaaccgtaatctgggacaatcctaaatgcatataagcggaggcggagtacggtgtggtagcctctatcctttccttcgtcgtgttcaccaagcgcacacgtcacggtctggtcccaggatatagcacagataaaatttgctacctacgctttctgctctagccggcagacagacactggtgcaggcgtgcagcagactagagatgcaacgaggtgcaggcggaggcggaaagccgccggtccggtcaaacacctcttggctcgtccctg

SEQ ID NO: 78171 - DNA, 411 bp, Zea Mays
ggaagatttacaagccaaaccctaagttttggattcatttgcaaaaaggaccccaattaagatttcactctaagtctgaatttcagatttgtgggctcaacttttgagccttgtaactttcaaactctagggtctttgccctatgtcaccacatcaaagttgtagaacaatcataggagaacaactttgcttaagaatgtgagctcagttgttaagaataaattggaaataattaagcccaaagttggactgtcaggctattttaagtctgaagttcagattaacagtggtactgggacatctttggagctctacagatcaagaacttcaaggaattttccccaagttaatataacaaagttgtatatcctttatagtagaacaactttgctatagatgtttgggcttggt

SEQ ID NO: 78172 - DNA, 964 bp, Zea Mays
caatcaactcgatcactcagtatttagagagagaaaactaggcgtcaatagcttttcagtcttcactcaaaattttgagtccataagccatataaattctggccttcttttccaactcctaatggtcaatcaatataatcaaatcacatgcatacactttccatttcagaatttttggccatcgtttacacgtccaacagagttatcttgttcaaaaatccagccaagtgctcagaaattctgagcaagactccccaattcaataaaaaacaatcataacttcttcacctgaactgtttgaatgaccttagactttccgaaaagcttgttcaaaggaatacaccatccacttaaataattgatgcaaaatgcaatggatcgacctagaattccgatccaatatccatcccgcaactaggtgcatatcgagaaacctttttttctaaagcaaaccaactttaaaatatctacaatgtatgatcaacatctttaagccttagtcatcattcggaaaccatcttaaaggcttctgtctcaacttacaaccaccactcgattttagcaacctattcaaaactagattggtcaagtgccactagatgaccaatgtataaacaagtttgcctctcttaatagtatggttacctgctttaaattctatcatatacttctctatgcaagatttgattggtgaaatacaactatctacaaatatagttttgtcttgtgtgttctatttcatctcatacggcggtgatgacacacaagcatccaacatccgccaaaaccacgtgtaattaaaacaaatcaacacttggcatgatcattcgtagatgatatgacatcacatggctttattggttcatcaaatataacttcgctttctcttaacagatgcacctagtctctcaacgtcaagtttttgctttagctttatcaccacactgtccatcataccccaagc

SEQ ID NO: 78173 - DNA, 478 bp, Zea Mays
cttgtagacctaacaaaggagaacaactttgcttaagagtgtaagcatagttgttaagaagaaatgggagataattaagcctaaagttgggctgtcaatttgataaggtctgaatttcagacagacaatgcaaccacagaaactttgagcatgaatttaggtatgatcaagcaagaatctgcccatggttgctatgacaaagatgtagctgatttttagctctccaactttgctgcagatctttgggggagatgccatagaaaatctggagaaaatgggacctaaacttgcgctgttaggctatctgaatgagacaccatggtacagtagcctgctatggatcagaacgccagcgcgacagtctcgccgctgatgaccgatctctgccgcgattcacgccgccgtcgttgcgattgacgccgccagtaactagataagcctgccaggtaatagctcgtcgcctgaggataactccgat

SEQ ID NO: 78174 - DNA, 409 bp, Zea Mays
gtttgcgctgttactatggaagatgaggaggaagaaaacgaaactccattaactcggaaaaacagtcggcagttcgtcgctagcggtggaagtagtggagttccttctcctgctttgtctgcccttattggtctgcaagaactgtccatggccaattttgatcaaactctagaggatatggttccggagaacttgttgtcagaacctgtggatgttgatgcgacagagacttgtgcggccgtgccagatgctgggttgaggtcatcccgtgcctcatcaaccttagagcatgatttcgagggtcgggatgctgacctggattgtcctgatcccatggaagtagctgaaatcccgtcaaccttagaagtggttacagcagagagcttggaccccttgaatagtgctgaca

SEQ ID NO: 78175 - DNA, 584 bp, Zea Mays
gccaatgtagcgaggagataattttcccttaaccttaaatcatttaattcctctcatcggtgaaactttaaggtatacgaagtctcctacttcgaatatcaactctcttcttctattgtcagcatagcttctctgtcttgattgtgctgtcttcaaattttctctgataatctgcatttgcttttctgcttcttggagaatttctagaccaaatacttgactttctccggtctgattccaataaagcggtgttctacactttcgtccgtaaagtgcttcaaatggtgccatttttagacttgcttgataactattgttatacgataattctgcataaggcaaccttttatcccagcttctaccttgctttagagcgcaagctcttagcatatattccaacacttggtttttttctttccgtttgcccatccgtttgcggatgataagttgaactaaagtttagcttggtatccatggactcatgtagtctttttcaaaagcgcgatgtaaactgggttcctcgatctgatacaatcttcttcagtactccatgcagacaaacaatctttgacatgtataactct

SEQ ID NO: 78176 - DNA, 795 bp, Zea Mays
gtgcctttcagtgaaaagtagtgatgataatttaggatgtaattaaaggggggaaatgaagacgatcatggtgcagttcagactttcacagcagtattatgcaaagtatggaaaagaacactatgcggcaccaatccagggtacattctattggagcatactactctgaacaagatttttttaggacagaacaggcagtgtagccatgagagcatattcctaaatttctgatgcattgtggatacttgactggaaaaaaatcaatcatcgcatacttgattggatacttaaaaccaagaaaatggcatcaatccaactaaaatacataatcgaatagaccacgagtagtgtggatggtaattaaaggcaatactaccagaatggagttttcatgttaccatgacagaaacaaacgtcaattaaagttgtgctagactcttaatagagtagtataggtatgtgcctatgcgatgtcacgagaataaaaatttagtatcaaacatagatacaaaacgataaacatcattatgatatacaaaatatgtgtggcaaaatatcactgtaaaactaatattatattggagatataaatacgtcgatccaaatatattgaactgatgcctaaagaatcaatatagaatgtttaatgatagacaaatttatcgacaacatgtaagtaatgatgtgcagattcactgttttgatgaggagatgttaaggagctttataaaataatatctgttacgttgtctattgttcacatcaatgtgttgatgtgcaaaagctcacaattga

SEQ ID NO: 78177 - DNA, 785 bp, Zea Mays
ataaaaatggacaaggttgcttttctttggagttgaaaaaagaacttttggagtctaatcagggggcatgagtggatctaggtcgtatatcttgaatattggagggccatgaaaatttggaaccatcctcaaaataactcaatctaatgtgagggctctatcagctggaggccactcatgcatgaccttcctcgtcgagataaagcgcaaatatctcatttgagaaggcatgggatttagaggtgaaatcatctccaaaagctccaaagacgattgcttgtaaaccatatccaacactttctcctcgtcggaataatgccctaggttaattagaagagcagctaacatgaaagccaaaataggctagctccctcgttcacagtgcattagtagtaagttatgctgacccaaggaaagccagctttcgctagacttcaagatgaagtggatcatttccatggtgaggagtggacatccctcatagtggccagggtagtccaatataatcataccatactcagacaaaatatggtatatagggatttcttcctctttagtcctgaaattcgagatcatgaatgagtgatcgcgaaattttcgagaagatctgttgcaatgtctgtaatttgagcatcgaaatggcccccttccacctctttcagggagaaacagtgataaaaaattgaaacaaaatacaataatctatgagtcaaagatgcaaagcaagtgtaactccatgtagctactcattgtacatgtactattgttatcatcatatatgttca

SEQ ID NO: 78178 - DNA, 432 bp, Zea Mays
ccctccgtagcggagcttgactggtcccacaaggccaagttggggtacattaacggccatatgtggtgaagcctcatcacgtttacagagactccccgtcactccttcgatgcgtcgtgttgttggtccaaacgatgtttaatgacaacgtggctttattgtggctagagtgggtcaacagtgtctagctcgtttttataccggatgggtgcaagcatgcgcctacaaggtgtatgacgaggatgtcgtggaactagggtccacagatgtactggtccttatcgtgagcccttacttttctgtctcgtagagttgctcggtggagggtggctcagcttatccgtctagcaaggttgctcggcgagttgctcgacctgtctacctcacagttgcttaatgggaagatgtacatgttcacctcgaacagttgct

SEQ ID NO: 78179 - DNA, 492 bp, Zea Mays
gttctccgaactttagtctcaaagattcgataaaaatatcactgagttgttattctctctaaatgaactcgacattgatcagcgtgtgtttcccaacatttctagatgtagtgaaatctaatctcaatgtgcttgttcttgctagtatgggttttgataagagatatggatgctttgttgtctaccttcagcattggtggcccccctttaacgccggctagctcctccatcaggtgcgccagctaaatgccctggcttgtcgcactgaggcttcgataattggtggtatcaacctctagtgtgttccccttcttgctgagacagagatggttctccattcagatacgagtcaagttgttgtcgccaatactagcttgctcgatgatcttccctttatctcaccttgatgcgtaggtaataattagggtgccaaggtcgttaatcctgaatcagctctacatctcctccttgaatgtgtcgagcatcttcttg

SEQ ID NO: 78180 - DNA, 489 bp, Zea Mays
gacaaataatgatagtcgttaatgatactgttgcaaagtagttatctaataaatacaggtttcgatataataaatcaatgtgttttgatataatccctatgtgacgttgctatacatgtgattctcatacgatttcatgtatagtggaacatctggttttgtccttaaaaccgggtgtgactgtttagcgacggtacttacaaccaccatctttataggttgctaaaggtctttatcgaacgtatgtaggatgctaaaggctcatttagcatccaacataaagtagttgttagtgtaccgtcgtgtattgatttttaacgcacatatgaatattgtgcagttgcacgctggagcagtattacgtccacgatgctcgctgactgctcgaggaaatgcctagccttaagaaatttgtcctgatgtgtcgtatgtgcgttattcgctccatcgtcttcgccttcgtgtttggacagcttcgacatgttgtcg

SEQ ID NO: 78181 - DNA, 618 bp, Zea Mays
ctcggcgttacgactgcagctcgaccgtttcctctccccttctcagtggcagtttctaccatcaatgcttgcagccgtttcttcgatggagtaatgtggttcttcaattcagcaatgaagcgcataaatctggctgaacccctctcctcccctctctaaaatgcagcagcctctcccttctcccaccatcacgtccgccttcaatatccgtttctgacgactgctctgcttcctgcgaccagcgcccctcgccctcctccttcggctataaaaactacacccaatagagtcctcctccctcaactgctcgccctcttctcgtgcactcgcccctctgtctgctcctcaatgtacaacctctcaccggaattcctcgcactcgatctccatgccgctgtcgccatgactgaaattgggcgcctctccgagcctcaccgtcatcgaaacctcgctactcgtggttgcgccatcgcaccagcggctgttccatcgtcgtgccacgtcaaccatcgtcatcaaagcgttgtcgcgtccccatcgatcatgtgttccgctgtcttcctgtggcattcgaaggtagaagatgaagtcacatttacaaactatcccctctcgtct

SEQ ID NO: 78182 - DNA, 464 bp, Zea Mays
aaagtatgctggcattattggatgaataggcgatgcatgctgcgtcacctttcgggccgtcttattcgatcgttttgtccagggtttctttgttggctgattgtgtagaacgaccttcttgctagcatacttggagagcagttgatcaaaagcagggttggctttgactagccgaccatgtgtgttacatgtgctttggccctgcacccccttctttgctttatgtggaggcccgtgcctctggccatgggcggactgttcggctgggttggccggaccgtccgcatgagcttcggaccgtccgcgcgcaggtgccagacagttcacgatgttcaaggcagggacctttgcttgactcctcgattgagcctgccccccctggcgcctccggacttgttattctttctgtctggagcattccgagcaattcctccttgtgatacatttgacgtgcgaagatcact

SEQ ID NO: 78183 - DNA, 398 bp, Zea Mays
ttactgttcatgtgtctgatgtggcaaccaacccaacaccaggcacatatagtgagtcaggcccaaagcacttgagtcatggccctataaatagctcctatatagtggcccttatctactgcacactaggtgtgatggtgtgacccacaaacatgaaatgtcgtgcttcaagctctagcctggctggccagcggaaactaccataaggctagatagtccattgttgattttttccggtgaatagggccaatgtcagtccgatgccaaaccctaggcttagtttggggctcgtgaacagttttccatacaaaggttggatagtccaccattaccaaaacaataacccttcaaggctactcttcgttgtttttgcaccatggcttttgccaccattctca

SEQ ID NO: 78184 - DNA, 568 bp, Zea Mays
gtgtttgggctggtatttgtattccgtacaactttccaccttcaatgtgcgtgaagcaataaaatttcatcctttctttgttgattcctggtcgaaatggacctggtagtgacatggatatctattttcaaccccttgttgatgatctgctagatatgttcgtcaatggagctagaacttatgatgcttcaaaggatgaattcttcaagttgcgagctgcactattatggactattactgatttcctaggtctaggatacacatctggatctgtcacatctggtgaagcagcatgtcctgattgcaactaccacacttgttcacttagacttagtaatggcagcaagaattgctatatggatcatcgtagattcttgcttgatgaccatccatttaggtttgacattgatagatttggtaaaactgagtttagaccagcacctactccgctttctggagaacaaattttagagtgcactaaagatcttaatcaaacttttggcaaggatccatctagaaagaaaccggcaaacaagagacgcaagaaaggggattataaaggtgtggc

SEQ ID NO: 78185 - DNA, 724 bp, Zea Mays
cgccacgggggcagaaaagaaagggtgcaacctctggaaaggttgctgcttcggctgctccaagcgagcctgcaccgaagagtaaaaagttaaaagttctcacccaccggccccgttacattgagccggccgtggtgcccgagtttggcggggaaacttctttagctcctactccaaaggaaccaattccttctacacagaaagctaaggaaccgaccaccttgccgaaggcaccctcacccaagtcagctgagccaaagactgataaagctgaggagccaagaatcaagggaacaaaaacattagaagttttaagcccttcggcagaagtgacaatgccgaaggcacaaaaaggtcttgcggcgaccccaagagaaaaaggatggccagtgtactagatgtgctggagacggtaaaggcttcaagctctactccagggaaaatggctaaggcttcgaaagtgccaattgaaaccgaaacaaaactgaccgaagccaaagctacaatgagccaggatagcgctgaagctgggccttcagagcctgccaaggagaaaccctcagaaattggagaaaaggcagtggaggaagaagctatagaacagattttgcctgaaaaagctgccgctcctactctcgaagcaccttccgaagaccttggttatattattcgacatgcttcgggaaaaagattatctgaagaagaaatttttgaagctaaacac

SEQ ID NO: 78186 - DNA, 867 bp, Zea Mays
ctgttacgggtttagaatttttagggattttttttacaacacccctaaactgaagttttggagaacaattttttagcaatattttggatttgctcttatgcatcaagtcggattggtcttgccccgtaaaacaccatgtcacataccgtgctgctcccataccaaaataacagactttatgctgcaggctgtatgtatatctatatctataatattacaagattttaatagttatgtactaaaggcctagtttgggtacatgaggcacacgttttatactttgttaaaacatgtgcatgcgattagttacttctcataaggtggatcgcctcaagaattcgatattcaatgtacttttgtaaccatcagggtgatagggctctaaattttacattacaaaattcaagaatcaaatcgaattaggatcagaccatatttttatctaattttaaactaaaattaattaagggcttaaataaattatgaagatcaatttggatcatgatccattaccacctgttgagcactagatttggtacctgggcatgactacacagttcgactatgtggctcggatggtacacgccccgaacgatccacatatatagtctggacggtctacgattagataaactcggttgagaatctttgtgcttgcatatccggctaaccacgtgggaatttgttgggacattcccctatatatacgaaggggtatgaccgattggcccacaacacaatcgatctaaatcaatctattcatcagtttctttacatttcttgccctaggagtaacattaattagtcttcctcatcctcaatcttcacctctcctcgactttacgttgtctagaccctaagatcttt

SEQ ID NO: 78187 - DNA, 295 bp, Zea Mays
ccattttgaatccttttggccaaagttggatggattccaggaagttgtcagtgaaggagtctgcccagttctaaactttgacaggagattaaaagccactgcgagatccttgcagaaatggagtgggcaaaagattgggcatgtgacctcacagttagctttagcaagagagattcttcacagccttgaaatagcccaagatttaagacttttgccctctttggaggattggctgagatgtggactgaaaaagcactccttagcccttgcctcatttaagcgcaccattggacgt

SEQ ID NO: 78188 - DNA, 352 bp, Zea Mays
gacaaaatgacttaaacaaataccttttttggacggttataaactaacaacgccttatgtaatacctttttaagacggtttgcaaccatcttaaatgtgggacatcttttacgactccatcaaatttggacacttgagaaacgtcttaataagtgaaaattaaccgtctcatataataggatctgtagtagtgttgggcccacatgttggggctcagtacccttgtacgtgcccccctttagctataaaaggggaggcatgcaccgttacaacacaagctctttcaggccaacttacactcaagcacacttagacgctcacaagttcatacaagctctcgagctcaatacat

SEQ ID NO: 78189 - DNA, 435 bp, Zea Mays
aaaagttctcagccgaaatacaccgcaggaagcactagtcacggtgagtggcgaagcactggtcactgagtcggttactcaacccgcaatacaccgcaggaagcactggtcacggtgagcggcgaatctacgacttcagctggacaccggcatgaaattgggccgattcaccacaccggctacgctggtgcaccgtcgtacagggtccccggctgcggttgagcccctccggtgatgtttaggcgcgaaacggcgagaagacagcagcggtgctcgatctctcctcaccaagacttctaacggtgcggaattacctacgtggtatgggggcgcagagagtggtgagcacgagggaaggggttgtgggaggtggatccgcttttatcaccccgagatgcggagtcgtggagtgccccagctagcgcagaagaaggg

SEQ ID NO: 78190 - DNA, 656 bp, Zea Mays
caaacatgctcacccttccctcgccccggtaccacgtctctagtaggttccacctctagatgcatcgactagtcatacaaatatagaaccttgccctaccctcataccatttatgcggcgcccctatcattggatccactggcaagattcatagttgtgctaatccctatgccatgtcatcggtggagagatttgaagatacacttacccccgcaccaacctgctaccacgtttgaggtgtctcttgccaccgaatccaacgacgaaattcacatataaactaatccccaacgcaccctcctgtcacatatctaatggatcccacaactagatccatcgatgccatcagttcacttgacaaccaatcagatttagtcccctacctctacctcacccaactatatttctctacctctagcagcttgtggtcaccattgcccaaacaccctgcccaccaaccacttcatctaccaatccaactagttgttgtcgacctccctttacgttcaacaaacttcaataggcctaatcccaaaccttacacccttaactgaacccagaaaacctaagtttattaagtccactagatttagtgatgatgcacaatcaaatgctaagaaggagctaactcgctagagttggcaacacaatttgtt

SEQ ID NO: 78191 - DNA, 708 bp, Zea Mays
gactgctcctgtcaagttctagagaagaatataagctcaaagggacaaaataacttaatttggaacccaaactttcaaaggagactccaaagaataccctcaaggacaaacaaaaagttttgggtcaaaatctgaaaaattggcgaggaatagtgccgctcgacaaaattttgtcagaacaccctcaatttttgcaggcagcaagggttgagggagaagaacatatttgtgatgtttgagcaaaaggggataaaaaccttgagcactagtgctgcgcaagcaaaacttcttagagtttcctcgaatttcacaggtagtttgcgtagagggaaagaagatgtttcatgaagttcgaacatgaacaactaaaaaatccatgaacagatcagatttcctgagaaggttggggttttgttggggttttctcaaacgaactcaaaacaagatcaactcggatcacgatcaaaaactgcaccaacagggcgtatgaagtgatccaaagagtgtatctcaccaccaatcaatccccaacaacacccataacacaagaactcgatggttcttcacaaatccacaaagcgaaggaagagaagaacacaagaacaaaatcgactcaaaaattccagcggagacaaaactgagtaaacgagtcgaatcggccctatggatggatccaagcaccctttctttgaatagaacagtgaagat

SEQ ID NO: 78192 - DNA, 921 bp, Zea Mays
attgacatgtttcaaacacttcttgcacttgaaaacactatgcacatgcaaaaatcatgacactgctagaattcacgccaataaagaaccaaaataactctctactgttttaataaaggaaaaaagaaaagtgaataaaagaaaggataacacctaaattttgagtaaagagcaaagaaatttttatacccaaaattcagggtgttacaataatccaccgacttgaacgtgaaccaagtgctctaggagttatacaaaccgttggggttgctctgtatgtcgtttggaggctcaatgtctcatggatttgcaaaggaatcaagcgaagaagcttgaggtgctccaatggagtgagataggaagagggagctgttggttgtagttgggaagagaatggtcaggatgactgttggggacgaagaaaggggaaagaaatacccctttctgccaatggtcagacgacaatactttaggtggcgtttggtttggatattataatggtactcgattacggaccgtattgtattccattgcttcgtgtttgtttcgaccctctagtgatccggtcacggcgtaattagatatcgttgtatacaaagtcgataccgctctgaacccctcgcaatcggatattcctaccctaccggctggcaaccaaacaaaacatgtcaatcgttacacgataatcactagcagtgggacctgattacattttcattaccgctccactgggtaaaccaaaagcaccttagtccctactacagaatgagaaggatcaccaattgataaagatgggttgtaggaagattgagtcagccgctatgaaggtgttcgcgaaaaacaaccgaagatttattaatagaattacgttatagatgttgccttgggttttatttccttcttcctaactggatcaaaact

SEQ ID NO: 78193 - DNA, 850 bp, Zea Mays
atctgaatcagaagccatagcaaagcgtaaggctccgcttcattcctaaattcaggactattggaggcaataaatccatctccaaattggacacgtgacctgatcgcaggatcaaccacaacatcaggaatatctcctacaacatggacctatatacaagaataaactcacgacaatgaaataaacgaagttgtcatgctccaaaataatgatcaagtgcaaagaaaacttactgcaaggggtttgtgccaaagggctaccatcatgacaatctagttggaggtcatgagtcccacaatcatttctaggctcacttcatgggatcatattggaggcagattgagcattaggcacggttggcatgacctctacaccacgatcatagttttcctctttaggttgagagccaactaccaaccgtcgtaccaccacctccatgatttgcttttgggttctcgtagctgatctaacataactatcctattcccgctgacactcaattgggatgataagtctttccacgttgggtcgaggacctatgtttagcactccatcaacgcgcgatctcgtgaacatcatgccaactgatcttctccttagccttagcaaccacctcactaaatgagggtctatcatcgaatagcgtggccacccgttgcatgtcaatgaactcagcatttccatagcgatcttgttccacgatgcctccatggtatatgcccaaaaaatgtccatctatttgaaacacaaatttaatgttcaataaccaattatgatggttagtgcctaaccccatctattatgactaactaataatgaattactaactaatacctaactactaactaac

SEQ ID NO: 78194 - DNA, 342 bp, Zea Mays
cgaccccatgtttcttggtcggcaaggtgttcagacaagaattctattggcccacgaccatggccgatgctaagcaggttgttcgcacttgtgaaggctgccagtactatgtgcgatagacccagatgccagcgcaggccctgcaaaccaaacccatcacctgaccgttcacaatttggggactggacttggtcgggccattcaaaaaggcgcctaggggctgcaccctcttgctcgtggcggtggacaagtttacaaagtggattgaagccaagccattcgcgaagatcaggtcttgggaagacgccgccttcttccgagacatagtctaccagtttgggg

SEQ ID NO: 78195 - DNA, 394 bp, Zea Mays
gtcaaagaggcggaagagaaagttgcactgatccgcagaaggttacttgaagctcagagtcgacagaagagttatgcagacaacaggcggagggaactcagatttgaggaaggagacttcgtctacctcaaggtttctccaatgtgtggtgtcaggaggttacaagtaaaaggaaagctagcactgcgtttcatctgtccctaccccatcattggcagggtaggacccgcagcctaccgtctggaattaccggaatccatgtccgacatccacaatgtgtttcacgtatcccagctctgcaaatgcctgcaaacaccagaaagtcacatcgaagaagaggcagtgcaaattcagaaagaccttcagtaccgtgagaagccagtgaagattcttg

SEQ ID NO: 78196 - DNA, 414 bp, Zea Mays
gattatttgtcatcgcggtgatcgccttgttgtcgaatagggaaggccagtcttgtgccctttttcgacgtgttcggccgtgcttctctttgtgggggattttcttgtttattttattacatggcgccgcctcattaaaaacctcgcccgatgtgaagaaaagagtgtaggcctgaatggagcaatgtatcaatcattttttacaaggacgcgaaggatctggctatgcattgtcctattggtagtatttttctcatattgtctacattccaagaatgttcgaggtccacccctgtttgatttgcgagcctatatgaattcagggatgtcttcttcttgataacaaagggtccttcttgcttcggttcgagtttgcattgtgactctattcttgctgtcctgataaggacgagg

SEQ ID NO: 78197 - DNA, 755 bp, Zea Mays
ggaaggatggcttcggccctataaaccagaaataacatagtctctccgacaacacgattcgatatggtacgattagcctagaggagcaacatctcaagattctcactctagtaagctatgtgcttcttgaagcaattgaatgtctaggcgttaaggccctagacgttttcattgtttgctctctcgacctatctttttctttggatggtgtgttttggtgtttagcaccggaaacacactacgagatgtcccacgtagtgcttttgtggttagtgagatcaacaattagctcgatggttcatgcaaagcacgacaggactcgaagatctatataggttcgtgccgctgagatgcgtaataccctacgttgtgtgtgctgctgagatggaattgctcttgagtttgaggttacggagtggatgaaaactatgctctagctatgcctataagaggatccaaccgttttgtaggggtccctaaccctccctatatatccgatgtgactagggtaacacggttgagcaggtcactattgccacgcatacatccgtgaagccgactctgactaacacacaaacgtgtgattctctgttagattatctttgcctctgcatacgcgagagttggttacgaagccttcatgtccacgtcttcgagtttcatatcatcttctagtcaggtttagctgattagcctatgaggctcatctgcccaacctattgaggtcctttaacgtcccacacactgaatttggt

SEQ ID NO: 78198 - DNA, 490 bp, Zea Mays
taggattctcatggattaaggtaacaagagtagcattacaagaagtaaacaaccttagcatgaggttaacaacttcgttgtccatccacttcttacttctgtagttcctgatctcgttcaccatggacatgagtcggttgtacatttattaaggcccattctcctgtgttcatggcgaacctcccaagctccacctctaggagctccatcttcgtgatcttggtgatcttgtcacctttgtacaccattttgagtgtatcccaaatctccttgacgctttccaacccattcaccttgttgtactcatccctacacaaagaagcaagaagtattgtggtgccttgtgagttgcggtggatgatttgctccgacttttcgttttgtcactccactaagagcaccatcaaagtgtcctagttttctgagtggaaccgaaagcaagggagtagtattatttaaaggaatgtgaaaataattgaatggggtacaa

SEQ ID NO: 78199 - DNA, 1214 bp, Zea Mays
atatttttcggatccctggggctaaaaccgtaaaactgacccatatgtaatgattctccttcatgcgtggatggcgggcttatttcaatagaacccaagggcctctctgtaagtgtagcagggctagttatgcgcgtacagatctgaacccttggagcccatatcgacaccaatgaataaaccacgagggggtacgcggcctaggccgttcatcccaagatctgcgtcgcagatttaatgaagcttgatttcgcatgggtcgtttgatctaatatgaacgttcaggatttaaaatgctgatatggaatcctgcacacccaatcccgatccaacggcgatggacgagcacgggtgaaacgttaccttggtctaatccagcgagttcaccaggagatcaacggctggaccattctctcctacttcactattgcgcagctaccatcaggtagtggcggcggcgattcccaatacgcgacggcgccatcacctgtgtttaggcgatccgaggatacgggctctagattcgccatttcttcgcaaaatgtggagaggagggccaggcgaaccttaagggagggttcctcattggtgatgaatgatgtgacggtctgaccacagcacctcgcggcactgcgacggtgagcaggagaaccagacgaacgagtaggcgcaatcgagcatggatgagttctacacgtggagcgggtagaggtgaactcggaagtcgtttgcttactggtaaaaaaacggttggctcctgttgacgatggtgcatatacacatggcgacaacctgccaacaacggcgagcaattcaggctcaccgcgaagcctgccatggcgacaaactccctgcacaggagaaacacacaatcacgaatttccccatgcacaacatcggcacagggcgctgacatagctcccaaatcacagcagcgcccgccatcatcacggcaatggcaacccagttcttaattttgatttcatggtggtggtgaagttcgatggggatcccacggtaacttgttggatgtgcaatgtgtgaaggggctcggtatttatcccaagcaaggaagcacctagagcccaaggatcccagttctctgttacttggttagcgccggatgcggaggggggggggtttgtaggggacgggataaacccgataggcatgacccaccagtcaggggaacgacttgagtctgcacgcaagga

SEQ ID NO: 78200 - DNA, 526 bp, Zea Mays
tacagacaatgtttctggcagttggagtcagtatgccactggtccacattgttcaagaatgggaaacaggccaatgtatcggggtgctagcttcccttttaccccgaaatggttcacaccgttcattggtgatactttcaggtacacataatctttaacttgaaagaacaagggtcggcatcgtttgtctgcataaattttctatcgagcttgagcttctttcaagtggtgtcttatctgttgaacctttgcttctgtttccttgactaagtgaggcctaaaataccaccgttctccaggttcagaccaatttaagggtgtccgacatcatcgtccatacagttcttcaaatggtgccatcttaatgctctcttgataactattgttataagaaaattcttccaacggcagacattcataccgtttttgcgggaactccaggacacacgcccgcaacatgtcttcaagtatttgatttactctctcagtttgtccacttgtttggggatgataggccgagctgtgg

SEQ ID NO: 78201 - DNA, 304 bp, Zea Mays
gcgggagcaatggaccttcggttcctgctagagggggcacgacgtaggctggaaatcctggctaatctgctagtggcatggtcttgttttaaccgcaggcttgtgaggctggaggtggaagaagagacaaattccttattgctataaccgtgcagcatagctgggtatatatggccgtcggccacctacaaatggagcaagtctccttgattttctctagcctgattgattgcttctttcctattcttatccctctttcctaatctcagcccctgctatctgtggctgatttgcagcacctgat

SEQ ID NO: 78202 - DNA, 317 bp, Zea Mays
caaggccgcgtgacatgtgtgaggttcctgtgttcgaacactgcaggctgagccatcagtgtgctgtgtagggtcggtcattcagctgtctctttcatagtattgttaggctccagtcacttcacaaaatcaggctggtattttttggcgagccggttaaaacttgaacgctgagcaaaaacggcacgtttgcaagctgagccccggccatcgctcctaccacaatatcttgccaacgaaaagactgcagctatatgtacagcgtgcagcgaagacaacaaaatagtacagatgggcctggtcctggtgctccgctg

SEQ ID NO: 78203 - DNA, 1147 bp, Zea Mays
ctaatctttgactttctgtggcgtgtacgtgagtaccagttagctgggaatggggacatctatctctgactttctgtaggggacggcaaggccgaatgtagcagacggttgactatgtgatcccagttcaggacgtctttgaaacttgtttctctattgaaagtctaaattcttcagtacccattctgtagccgccatacagaatttgtcaaaatgtttgtttttgcggttcttccataatccatacagtgacattgccgtagtatatctgtcgtttctcgtttcttagccttgcaaacattcttttgtaatcagaaggattcttggcacaatctcagaagttacgatgcatttaatgttgcagacagtttacttcatgcgtgaacatgaacttcagcaaatagccaacatagaccggaatcttttttattggaccttgcttaatcttcctaggtatgacaccgtctactacgtagtatgtgtaccttgaattgacaaaggctagacaaagaatgagcaggtctacagttgtgaccttttactatggccaggattgggacttcaccaatgcctcagtgaccgatgtattgaattcagcctttgctttcaatgttgcagacagttactcccccgcataaacttctctgcatcgagcaattagacaacaaaggcaggaatcttgtttctattgaatattgcataatcttcctaggtatgacattgtctacgtagtatgtctgtgtacctgagttggacaaagtctagacaaagaatgacaggtctacacgcgatcgagtaaaagtgctagtgcaggagataggcattcagcggagtaaaagtggaaggagttggttagttgaagaatgacaggccctttcaagtaaaagtcttcatctaacagcatgttctatggtttgagatacagcggtccttttgctaccccgatcgagtggtatgttgtatctatggatccatggtagtgcagtgcaggagataggcattcactatcgcgcctcatccgtcctcattagccactccttccacttggtgctggtgctgctgccggccggatcactttcttcatcaattgtacatccttggctacttagccacagccacggccatggcgaaaacattggtatcagat

SEQ ID NO: 78204 - DNA, 1343 bp, Zea Mays
ttcccccagtgcgagcagctggagcccgatcacccgtctttcaaagctgaccaggaccatcccctttaagatcatcgccatcttcatcccccaacaggtcatcttcatcatcattgaaccctctctcatcattatcagtctcagacagaagccccccattcccatcttcaacgcggaaggacagaaggtatacttcctccccaatgaccacgtccaccgtgctgggaataagattagcatcaagaatcataacttgaactctaccaacctcaaattgcctggtgtgtttcatgtccacatcaatagatgtacccagcaaactgcccactgcccaaattgttgggaaagtacgatacaccaacggtatacccaacacctgcacccagtagctgttcaccaccttgcacggtttttccgattgcttttcctcaaaatgaaaaagaacccctttcttctttgagtgaaccgttccccattccaccagacgctgtagctcagttgtggaaggaaaagctgtccggaacacgttagactgaaccatttgcaccttccaatcctgtgtcccaggtattaggcgcttcagttcagcagtaacttccacctcagtaagctcgccctcggtaactctgatcactgcgtcaaggccctccctctttgccggattcttgacagtcactggaatatggaaaaaacccagccccacagccgcgaatccgctgagatagatgcatccgggtctctgtttgagatgattaaaaaccagacacctactcttaggatgatccaaaatcttatctttatctaagatcggttccaaaatcttatcttgaagttccaaaaccaggcacctactcttaggatgatccacactatcacagacctcagattcaaaagtcacaagaggaaaacatcctatctttccataaaaaatgcataccccattcccatcaaatcttgactgagcagtcgcacataagaacattcctatcaaaccataaaacctaaaccctacaagcctagttgtaattgcacataacacagtgtagcggtaagtaatcaagccagggacggttgtgacatagtaaatcgtagcattttcgtaatgtcaccctaattattttcagtctccaatataaaacaaacattcgataatcggtcgtgcctagacacttgtccaaattgtgtcgcaaactttcatataccgatatacaactagttctggttacctatcctaaaactagaatcatatatccttatgacagatggagttgtaatgttttaatgaccgtgaagttgccatcatacccgagttcaaagatgaaaacaacaaaattagtttcgta

SEQ ID NO: 78205 - DNA, 1318 bp, Zea Mays
aagtaagattccagcatgatgcataatttagtggcatatcatttattaattatttgtttttaaatatgatattcacatgtgatgataagtatagatcacaaaatattgggctctcctctattttcactatttacatttttgggtattacaggccgcttgcgggaggctgggaaatgccgaaggaaaccatcaatgattctagcgaaggtgatttggtctggctgaaatacaccttcagctttggatataaatttgatgaaccaaatgatgattggctgaagtccattgaaactactaacgacgagttacttgaggcgtactccaaaaccaaggacaatgccttgtccgcagccttcggtggccggagaaagaaaatattaaacagagttttcgacgccatcggcttcgtataccctgactaccgctacccgcttaggggacaagggaaaaagaggaaaacttctgctccagacagcccagataatcctgtgctgaagggcaaaaagttgaaggttcttacccaccggccgcgttacattgaaccgaccgtggttcctgagtttggcgcagggacatcttctgctgccgaaagaaaagaaactgcttcaactacacagagtactgaagagccggctgtaatgccgaaggtgcctatagccaaggaagttgaaacgaaggttgataaggttgatgaaccaaaaattgaagaaataacgaaaatgccatatattttgagcgctctaacaagggcgacagtaccgaatgtacaaacgggttctatcgtgactcctaaaaggagaaggatggtaaatgtattagatgtattggaaacaaccgactccataagtcccgctcccacagggaaagttgccgaagctgacaaaacacaacccaaagctgatactaagcaaatagaagttgaagctacaataacccaggctgaaaccgaagcagggcccacagtgcctactgagacgaagcttgccacagctgagcagagggccgaaggaataactccagatactaatatagcttttgataaaagtgtggccgaagaagccgaatcccttactcccgaagtactctccgaaggttttgattatatcgttagacatgtttcgggaaaaagactatccgaagaagaaatttctgaagccaaacattatgctcgggaattgcagtatccgaagggggccctagtgtttaatggtacgaacgaagataactttttgtactgccacccggacaacaaagaattatccgtctgccaggagatggccagaagtaagggttttccgaagctcgaagctggcctttg

SEQ ID NO: 78206 - DNA, 543 bp, Zea Mays
atatttctgagaccataatgattaaagatgtcactaggagagtagcatttgctcacatatgagtttgcatagaaatgcagcagcccactcctcctttaagtgaccggcaattatgtcgagacatcacaaattaagtgttctaataaaaccaacaatgttttcgtccactgatgctgctaactgcatgcgaaggcaataagcttcattttattttcagacttgtgtctccgagctttggtagtgccagtagtgtgttcaacctagtgaagctgtccaaggacctttcatctccactgatatttgattcactcccatcatctacatcttcaggtggtacactagtatggagcctgggcttccttggctgagcttgtgatccagttcccttgctagcaacagatgacgacactgacaagccagcagccttgtcctctacgtcgagaaaaagacatatcgttgcacagtcatcagttttggaagttgggtatttaaacctccatgcctgatttgctagatcaacgatagaacgagctgcagacgaac

SEQ ID NO: 78207 - DNA, 436 bp, Zea Mays
cttgccttggtcagtgcacaaaacctcttctcctccctataagctaccgatcttgtgtgggggtcataagatttgacctgctggtttcaaagatttggagctctgaagtctggtctatctcccagcccgagcccaaggcaaatcttcggttttgtcgtgtctagggcttgcgtcccaatgccatcttctggcatgtgacagaggggttagttagacacatttttgtcaatgggagcattaggattagagctaaggatcaaggtgaacgcactcggttttagttcaaaggctgaaaattcagaaatctgaatttcagatttccccaattgagcctccacttgaatggcttgtttggagtttttaataaactattttggccaagctttcataatctttattgtagcttatttagtgtatttcaatttttataattggc

SEQ ID NO: 78208 - DNA, 472 bp, Zea Mays
cgagcacctattgctccctgccccaccaaattctaccctatcttcagctgttatgggcatcaatttggctggcacactccgataacattctactcatgcgcacaacagaaaatgcaatgtcgagcccacgttcccactaaatcacgcccggattggtcaaatagttgccatgatgagattcatgggcacacagggctactaaaacaatacgtgagaagcgcagaatcataccagaattgtccggccacggagcgcggagaatttgtgctcgctggtgactaagaagggggaaaacatcattgcgacgagctcgagtggaattgggaggtcttgttggggctatacagtcgcaaagggctactgattcaccgtgcacactcaatttggggagaggtggagaaggcagtgcgaattttggcttctaccaagttcactggtgaaattgtgagtgcctcgccgtggtccatggcgc

SEQ ID NO: 78209 - DNA, 389 bp, Zea Mays
aaatccgcgcgcaagattgccggcggcgaggtgcactgcacctatgattatatccagtgcactgtaccatcagtttctcattcagccatcctaacaaaccactttgcagagcctagatctcaaattttcatgtgaatacttactaatccgtctttaacaaagttgtagctcaaccaaccagctacaaatcgactatagtaactatcctcaatccagcactacatcctattccaatttgacccaaaagtcttgccaatgtcactagtgaccttaattcagttatcagtgtgactgacagcacaactttgagctcatttttctccaaactttgtatgtgatcatagcttagttacttaagcaaagttgcactcctattatagctctacaag

SEQ ID NO: 78210 - DNA, 620 bp, Zea Mays
gaaggttgtttggttggggcaaggaaaaaacgaagggttcattttgcatgaatgtcaagcttggataaaaacaatatcaaatgggtgttttgtatgtgtttttctctatttaaatttgggtaggacaagccataatggaccattagttgctagcattagcattccacttctcgtgcttcgcgtgtaggaatttttccaagagctctgagtgaatgttagaaatcctatggaatcaacacatgaagagataaaatcctatggaatataattggtgcatcatgccagccaaactataggataggaaactttcctattccagcattattccttcaaaattcctgtaatccaaagaagcccagagtgggcttgacgcaaatgctacgacggtgatgccgcgccaagacgaccaattaggcaaaggaaagtactgtaactgatgcatttttttcgccctttttgtctgatgtggcgggatgaggcggcgagcgtgacccggtggcccgtgagcccgccgtgcatgggctcggtccatgtgggcgagatggaatgccatcttattacaggcgctgaggtgcatgtgggcctggagcctcgcatgcttggtacacagactgggccgg

SEQ ID NO: 78211 - DNA, 305 bp, Zea Mays
caagctgcaaggaccagtacggagcgcgaagcggatctggtacgcgatggtgggaaacgcatcggccaggcagaacgggttcctctcgcagacgtgcgcgacttctggcgcgtgggcacgaacgaccacgacgcaggcacatcgtccgacgtgggctagctggcacgtgcgtagaagcacatcgacgatggtagtttatcgcgcatggatcacagaccgtatcaagaacattaaacataccgatctattctgtagaggaaaaatcgaagtctctcgcgtaggagagttcggctaggccggagacc

SEQ ID NO: 78212 - DNA, 1440 bp, Zea Mays
tttatggtccacctggaacagggaagacctctcttgcttcttcctgtgcctatgatgcaggggtcaacctttttacaatcaatggaccagagatcattagtcattattacggagaaagcgagcaatctttgtacgatgttttcacttcagccaagcaagcagcacctgctgtggttagattttctttgaataattgactgcaattaccttcaccgttatgttaattgcaaaaagaatcctgggctcctagtagcagtagagttaccttttaaagtgttaataccagaattcataactttgaagctacccttttattaggacaaaaaagtctttagtttgtaacgatgcctactctgggtattcaacatgaagtgtgttcactagcaacttatttctggtaacactatgatattgagcccaagctactcttttttccgcaacgacagagccaaatttcattacttgacagcaacaaaattacaaaagttagcatccgaaatacgcaaagaccgagcccacgctgctctaatattttgatgggttgtgcaacctgaagcctaaaaaactatcttctattcaaaattcatgaaattcaacttgttatgcttttcactattttgcacgttcagcaggcaaacaactatgcctgagcctgactatatgtcttattgtcctctgttcttaatgtgaattgctcccagcgattgagtgatgctgaattcttcactgcatgttctatgatgcatacaagcaacatattcagttgaagcctgtttctaatgctatgctcattaagcatcaatagttgagcattgaagtgtcttaccaaagcaactaacttgcctatattaatattgcattgctcctatataggatcatctcctactttctcctcacaattgcaactctgatttttatttaaaaactttttttccaattatggttcaggtttctgactctgttaccaagttgtctgattcatcatctctgaaacattgcatgagtcaggtcaaatgttgaaatgtttgcacaccgattatccaagatgatagcttgaactattttgttagcaaggagcactatatatttgaagtattggtatcctaattaggatccttaacccatcatcttagcattcataacagtatcatgtatctttgttgctattagatatttatcgatgaattggatgcgattgctccatcaaggaaggatgggagtgaggcgttatctattagaatggtagccactctgttaaaactgatggatgagattggccctagtgaccgtgttctcttgattgctgctacgaatcgacctgatagcattgatcctgcattgcgacgtcctggaagattggataaagaaattgaaataggtagaatgctctgatgctatccatatattttcaacacgaatggctgtggatgcagtttactc

SEQ ID NO: 78213 - DNA, 732 bp, Zea Mays
ggatcagatcctcatctttagggagtgcacccaatagctcttgttcaattacttcacattggattgtctaagagaatccctgaaaacccctccgaaacacagaagactatgaattgcaggacctcttctagagaaataaccctggcacgcactagcagtatcgtgagattagcattatccacttcccacatgataagtccccaaattatccaatagcattctttatctatgtgattggttggttggccggctgcctccaggcccgcgacgtctcgttgaccttgcgcagcgtctgtttgattaactggagaggagggtggcagcctgcacgcagcataggcattttttcgcttgattgcctgcatgcgcagaaacacacctatcatgcgtacccagcggtccaggttagctggagaccggcgctcgacgccaatcaaccaatcacgcagcatgtgttcttgcaaatcccacaatcatcagccaatactccctgttgaaattcactgcccgaaagtttcatgcttcattgtgtctgattacaatgaaagtgaaaccatgtgctgcccagccggagatgcccgatcagcagcagctagagcagcaacaacgtaagtcttcagccgggggaaatttttttttgcctgcagcagcgatgtaaacccacggccggttgcagacttgaccaccactccaccacctgccacagcaagtcccagttcccacgggacgatc

SEQ ID NO: 78214 - DNA, 456 bp, Zea Mays
gtgatgggcttgtcttgcactggtctagacatattcgtcgagtgttccccttctaggcagcgaatgttacagatgctgacattgttggtcccatcgggcgtgctagaatgtgctgccacccgaaacccaatggcgagagatggcaggcaacacgaggagtcgggaggcctctaagacgactagtgggccctggtccctcggtcaatggcctagatcctagcacacgacctggcttcgaggtttgcctggcatgtcaccagacctatacccgattaggagggcgtcgatgtgctccgagttggtttcctgcgtacacaaacacatgcaaacatcagtccaagtcttattcggctccctgggtcatattggctgcaagaagttaatcgttccccgggctcacatcggttccgtgcgtcactgacgcgtagagccgatggctctcgagaccctactccg

SEQ ID NO: 78215 - DNA, 776 bp, Zea Mays
gaacctcggttgctgcgcaggttccgacgtttgggcctgcgcaagcaaccgctgctggcaatactgattttgtggcggcctcaaccgtagtgcctgccgatgataatttatttgtctctggatctgagtgttttgagtctgatggtgagtctgggagttcattttcctggacggaggagtcatcggatgaaggcttggattattttgctgcgttagatgtggccacagcgaagtcttcgccgcgtgtggagggtgtcggggctgctgatcttcctagtgcgagtactgagtacaggcggtgaagggtggtgtcaaaacatagtgtgggtgagttttcgcgaagtggtaggcgccgtcgtatggggatggagcgtgtccgtcttcaattagaccgggttggtaaacgagaattgttgtcctcgccgattggggtgagcataggtgagggggatctacaaaatctttttgagggtgaggaattgaggataatgttgttcaattatagggagttgggtatcatccagaaggttgagccgatgtagtatatggtgccctcgccgtgtgtatgcaactgtgatttgtattgtaatgtggcctgtcggccgttttcgcacgcctgtgttgatccagctgcacccgtgggcgacttttgcgcggagtgtagattgatgtacttgttgtgctattccggctgcacccttaggcgattttggcacgtagtgttttttcggcgcgagacttcgatggcgtattttattgtgcctgtccggctgcac

SEQ ID NO: 78216 - DNA, 443 bp, Zea Mays
ccggtatccaaaggactcagagtccagtgaacgccagcctggctgtaggggatgaggctccagagtcatcctcaccctacagcggggcactcggtgcttctcgaactgctgcagcgcgtactgaggaggcgtcgtgtatccggccccctgaagtacctcccacaaaatacggggaaagccctctcgtgcaagcccgtcagtgtgggacagtgcatttctgtcgtctgaggatccgtgggaagtcatctgtgtacggttaagcgtaagtaaaagaaaaagaattataaaagaacaagaaaaaaaataagactcagcttctctccaactataaaaatggtactggggtacttagttggtcatcattttgtatttaaatctttactcaattatccatttatttaatttaagaatgcatgcatgctcgtcctgaacgacctcacaac

SEQ ID NO: 78217 - DNA, 300 bp, Zea Mays
tcggcggtgaggattccggcctatccaaggcagtatagttcaatataacgggtcagagagcttcactggatgctagagaagacgtaggcgcgaggaattggaaaatggcttaccagatagctcggttcacgtgcggtggcgggtgaccgaagtccggcgagggtgattctgctcctccggtgaggcaatgcctcggctcaagcttggtgaagcttcacagggtcttggggaagctatccaagggcttggtggaggctgaaggcctctagaaatggctggccacggtgaccggcgctcggg

SEQ ID NO: 78218 - DNA, 357 bp, Zea Mays
ccaatccaatcgcccaggagacaactcgcctaaatagtatgctcgcccgatcctggccgctggttccgaaatccacagttagctagacttcttgcccggcacgacgctagggtactgagacgaccgcgcgccacgcagacggccacgccaacgctcgccaccgaccaccccccaagagttcaccagcggcactcaggctccgagtccgctccctacctcgccttccctaatcgcccatgacaacccgttgaatcctaggataccacagagggaaggatggaactcaccggagtttagcgcgctgtgttgcccgccaccgtcgaatagtgacccggctatcggaatgaacgctggcga

SEQ ID NO: 78219 - DNA, 316 bp, Zea Mays
tccaggttggtgttgagtccggccactacaccagctagggtgttgaggcgatcctcaccagcttcacctggaacgatgctggtctgacttcctccactcagacgcagagggagatgcctgaacttcgtgtgcagctgttgccgataggtgtggctgagagaccacagggtccgtctggcagcatcgctgaccaaagcaacgtaggtggatagcggcgttagggactcatgagcagacagagtcctgaatcccctatcccctgcatccatcaccctgacgtggatgcgaatgatgtagtagcaagcccagggaggct

SEQ ID NO: 78220 - DNA, 1713 bp, Zea Mays
ccatagtggtgacaatttgtgccgtccttcccccgttagaattcggcgaaggaccaagtctcccactacaaaggatcaatgtcgtatggccttgtcatgatagcgcctcagggtttgctggtatctagctgactgaattactatattcaatagctcttcctccaatacgtcaatgtcctctaatctggtagcctctgcttcagctatgctttcaaagaccaaccttggtgccccaaacctgagatcagcaggtagcagtgcttccaaaccatagaccatgaagagaggagtatttccatgcagagctcgactagattgagttcttaagctccaaaccacatacgacaactctctgatccattttcctgcaaacttttcattcttgtcaaagacttccttccttagtgcttccagtatcattccattagccctttctacctgaccgttagcccttggatgtgctattgatgcatatttaatctggatgcttcgttgttccgagaaatcaaagaattcagagctagtgaaattggatcccaggtcggttatgatgctattcggtatcccaaacttaaatattatatcttgtatgaactccactgccttggctgaagtcagagaatcaatgggtttgtattctatccatttggtgaatttgtcaatggcgaccaacatgtgagtgtatcctccctaagctttcttgaagggtccaatcatgtccaatccctagcacacaaatggccatgtcacgggtatggtctgcagttgctgtgctggtaaatgctgctgctttgataagaattagcaagcttcacacctctggactaactcggttgcatcactttttgctgtcggccagtagaaaccagacctgaagaccttcccaaccagggtcctggatgctacatgtatcccgcactgtccggcgtggatctcatctaacagttgcttcccagtagctgaaagaatgcacttcatgaggactcctgttgcgccccttctgtacagtgcatcccaatgagggtgtagtgggctgactgccttgcgatgcgttctgctgcatctttgtcatccggttcctcttcattctttatatatctgatgatgggctccctccagtcattagagtctgactctggctggctcaaaacgttgcactcttctgcttgatctgaggaaatacttgggcatggcacctcttggacgaaaactccaggtggaacctgggtccgactggatcctagtttcgacaacgcgtctgtcgccacattgcgatctctttccacatgatgaaattccagcccttcaaatttgtcttccagtttttggattgctgtgcagtacttgcccatagagtcattcgagcaatcccattctttatttatctgacttatgaccaccagtgaatctccgtataccattaacctcttaatgcccagtgatatggcaatgtttaatctgtggatcaaagcttcatattctgctgcattattggatgctgagaataacaactgaagagcatatttgagttgctcacctccaggtgcaatgaaaaggatccctgcacctgccccctgcagctttagcgagccatcgaaatacatccaccatacttctacagtctctgggttgtctggtacttgttgctcggtccattctgatacgaagtcaactagtgcatgagtctttattgcagtacgaggccgaaactcg

SEQ ID NO: 78221 - DNA, 461 bp, Zea Mays
aacatcctgaaggtacagaatttggaaacttaaagtttgagaatttgggaataaagtttttattctcatgctaaacctctatccttctttttcgcagggcttaattctaagcaatgccctgagggatcataagaatgcggaggatgaaagctgcacgatagctcttggcaaccttcgatcagaggtgattcagctgagaaacaaagccctggagaaggacaaaattctaatttcattggtgaataaagtgaaggaagatgaggcgagatacaacgcccaggccgaagctcataaagctgaggttgaagaccttcagaaataacttgccgaagccaatgaaaattgtgcggtcgcaaaggcttgccaggaaattagtgaatggtggaagaccaagctagagaaaaatattgaggagattcgcgaatccaaggaaagatgttttgaaaaatccttggattgcg

SEQ ID NO: 78222 - DNA, 4469 bp, Zea Mays
gcaccatgttagaagacatgaaaagcaaaaaaaagaggaaatatagaacaaagaatacacacacatgtgtgagtgtagagagagacagagagagagagagagataatgtacctgggaagcatttagttctggaagtccaggtgcaccaaagcgtcttggtagggtgttacgtattatttgatgctcaacttcatgtcccaaaaggtggtggtatatgtatctgtgtgaaagaacagacagtaaaactttgttaatagtgatacaactatgacaaacacttcagaagaacaaaattataaagaatgagatagaatggatcttattataagaatattcttcagtatgcacatagttaaccaatgaaacagtgtgtgtaacagaaacaatcaaatatctcgccgactaataatatatgaagtggtttaggatttgatggagttgttttctatcaaagagccttgttcgattataatgacaacgatatgtcgtaaccctatgcacagtatcacatattatactcacccactgacacttgtctcgtccacagcaaaagttttcattgctccttgcatcctatcaaaactggtactcttccaaacgaaatcaacactgaatccaacgtttagctcagtaggcaccccctgaaattcaaggaaattgttaaaataggctgagtggatgctaaaaaggaacatgagaaaaatcatactgccttatacggttatacctgacttgcacgaagctcaagtgccacctcctcttgtgcagtgagcttaatctgaaagaacaaatgtccttagcatagccacaaagataaaactggcccaattaagattatcagcaggtttctaattaccacatgtcccacagattgccatgtgggatgtgagctatcaccaggatatctcaagcgtagctcatctccaggcacaagcctcaactcattgtcttcctaaaatacataattgtttcccgtgttagacaatagagtatcacgaagcaataccgaacatcatcaacaacagataactatacaattatggtattaattcactaatcccatatatttcacttcttgaacagacctttggaaagacaaagtaagctacacgcttcttgttcaacccaatatcccaccggacagttacattatccttgctctgtgactctttcgtcatctacaacaacatataaaacagtaacacaactcagttttgtgatggaaaagataaaaaacatgatctcttaatcagaacacagtaccttgtcataatcagcctcaagttttatcagtggcgcaaaaacattttggtactggcaaaaaaaggggggcaggatatgctagttaggtcttagatgcaaggtaaaaatatgggctttgatatttgagagtaggaagtaaagcaccaacaaaaaagtaaactcaagtaacagaatacagaactttagaaagttttaacctggtaagcatcttcatacttcaaaacaactggctgaggttcatcatctacgccaggcttttcaagatcttcaagagatgcatcaggatttgtcttccaaagctcttccactttgttaatttgctgtgcactaatttgccgagctcttagctgctcctgctctgaaggtacctgaagaaagtaaattgtccaaccatcagaaagttcctagctatgcacaaatgcatgacagaacaacctaagaaatcatcatgagacccttgcctttacaagccatgacaagaaacacctgtcatcaataagagggcaccactggctgagatcccaattcatatccttcagtgcattaacacttaaacacggctctctgcataaaagaacgacaacattctccaattttgctgagataaacccaagaagaaatacattccgacagccacagttgtagcattcaaggattgtttctcccaaagggctatccttgtgaaggcacacttccttatgctttgccctaacctgcaaatgataaacatatggttatgaccatgtatactgaatttgtttcatttaaatgggtaaaggtaggtggattcttacacaataacacaataagcatatgattcagaatgagtgatctagcctacactcaatgcatttatttgtatacaaagcttatgggtgactgtaggtagcaagtatatgcttataatcaactaggccaaacgttcactgttagagcattgacatttgacatcgtagatcaagctagaaattttgacgcattgccaaaccactgaagcttggtttacatatatatgttcttttcggtgagaagaatcatagtctttctagaactagataaacttgataggatatcatcactgttctcccaccagactctctccatccttcatttcacttctaaatggacccatgcctcagcttttgtactaagcatttttcaggatgtacttgtaccagtccttggtttgcttggacaaccaccacaacacaatgccaaaacatcaaaagtgtgtccactgtccaaggacaatggtgtgcttgcatgctgcgagttgcctaaaggatagcaaagctgcttatgaaacaccacagagcctctcaataaggaatcagggttgcaatataataagttgtagaaacagatgtgttgacaattttttttaacaaaagttatatccatgttgctgtcataatgttgtgttctacactcctactcatacggtttgagatggtcttcactgaaaattaaattaaactgatagcaaactatttagacagtataagtgacaccttgcaaatgggacttaacaattaagaccctagataccaaataggaacgaaatgtcttcactgcaaatacagctagcttcctaaccaactatttaaacaatatgtccaaggaccctttgcaaatgggtctgaacaataggaaccactttcacaaaatgtatcaaccattccattagcacaaaaaatcaaaagttaatactgctactgcacaacaaaaccaaatacgcacatctagcaatcgtcgcattcccattgcaatgtctcccacagatacaacagtatactacaaatttgcttattctcaacctaattcaagagataattaacatgacattctcctcagagttattttatctatagttctatacttatttccaccagaaaaccttccaagtctaaagccacatcaatgcagcatggctaacaaattacagcaactagatacaccgacactatggcataccatgaaaaatacaaaaactaactaaccgactcatggcatcaatttaccaattttaagatggtaccgatcacctccttagccacccccgcatataatacgaaagacatgctgctacttgctacaacatctgagcaatagtttacttatagagccataaagtgcaccccaataaagcatgatgtcttcttttaacaactaaaaggcctagaattgattcaaagcagactattgtgaaacagagcccactaagttcgttcctaagcaattatcaacaaatttgtacgacaaaatctcactcgttcagtttctaaaaaacaattatcaacagacttgtatgacagaactctgattaatcagtttttaagcaattctcaacaaattaacatctgagtagtcttaaattctaaatgagctatgccatgaaaaaagataagtaaacaaaccaggtggttgacaatgtgggagccagaggtgttcccccgcgagttacagaaccacttgcggcaggagggcacgttgcacctcgccacgcatgcaggattgtggatcccacagtaccggcaggcgtgttccacgaagtctcccttgccgtagtcgtacccgtcctctccggcgccggctccaacaggatcctcgaagctgagtgcggctaccccggaggcgagcccatctgccgcagccaacgagcgcgccttggaggcagaccgcggcgacggcgaggaggaggaggccggcggggtggggacgtccagagacgtgagatcgggttcagcggaggccgcgtcggagggcggcggcggcggggcaggccacgacgaggacgacgcgccagcgccggggatggaagacgtcagcggcgtcgatcggggcggcggttgagaaagctccggaaagtcggggtagtcgaattcgtcaccctgagtgttgaactcaaggaaggtgtaggcgtcgccggcaacggaggcgtccggctgagaggccgtctcatacatgtctatcgcggcagcggaggaggagtgcgactgcgtcgccatccccgcggttagggttagggttttgtcgctagcggcaaagcagggcttgggaagacagggcgaatcgggaaaaaaaaggggagaggtagcatggtgaaggtgtggggccggggtttggtttgttgaggttgaggattccactgtgcacggaagaagtggagaggcaccggtatgccttccctcctcgagcctacgctc

SEQ ID NO: 78223 - DNA, 297 bp, Zea Mays
gcgggaacctatccgcatacgttatcaaagtatcttgtaagactctagtgtcatgcactgaacctggccaacccgtgacaacaaatgtgaacctcgtatcaaagtcacaaacaaccatgacattctgtgatgcgtatccgtgacaaccaatatactttgcttgctctgtggccgggacagacgtggggaagtggcttccatcaatggctcctatgcaatccttgaaatgcggccagaatctactctctcgtaatcgagggtgaatctctatgaaatttgtgtccttcggcttgatta

SEQ ID NO: 78224 - DNA, 539 bp, Zea Mays
cagctttagtcaggctgagaagtgagtgccatgcatgcaatgcaaacgcaacgaaaagccttcttcacagactccggcctgcttcagtcgggctgaacaggccgtatgctgtatgcagtcaggccagctagtgaaagatttcactgatgggccgaccgtgattgtccccgtccttgtaggtttattgatacatactgacctgacttaaactaacgaagatcacggcgggagcagagcgatacgagtttctttgggggtgattaatcagtcagtatctagtgcaaatcccccgagcctgcaacgtcgtgcaaaatactgactcctttcttttgcccaaatttcaagaaatgaagtagccagatagtggtcagcatgttcagtgccttccaaatgtgtctagcccaaccgcttacaacacgacagaaagaaaagccgacagtgacaaaaaagcacacttcggcattttggcatggttctttgaatttatcttttctttctcccggtctgcacaaaggtcagaccatcacactcggtgaaga

SEQ ID NO: 78225 - DNA, 301 bp, Zea Mays
gtcctctcctgctgccccacgagagacgacggtgtggatttttgccgtgcggatccttgtaatgcctcctcgcgtccagttattgttagctgctctacagtagcgtatactgtttccgaccagctgattggttggcatcacaatgcttcgacgctagcaggtatactagctctcgatagagagacggcgatgggtagatagcgatctgccgctcgcttttcaggagtcgataagatcagatctacccaccactctcgttgccaggggaatggcttagcttgcttttctagttatgtgttta

SEQ ID NO: 78226 - DNA, 349 bp, Zea Mays
gaaaaaactaagatacatcagggtaggatattatttaatcaagtccgcccaagaccgaagatctaatcctaaacctaggtttgagatcccacggtcgaggcacatcctcaaccaagatgacgcaggatggcggcgccgccggccaaccacgacggcaacctcaccggtgcacaccaactaggcaaaatagagacctaatcgacactctgactagtgctatacgtagagtagaaagtaacagaggtgatgaggtacttcttaccggcgatctagcagtgaagcaggcgggccacggcgcgaggggttccgcggcagagctaggacttctgacgaggaattccacgtgcgc

SEQ ID NO: 78227 - DNA, 558 bp, Zea Mays
cccgataaggttgatggtcctattgtacttttctaaaaggtgagggaggaacttatgtgtccatgctgcctagtagaatgagtaggggcggagcgcccggtatggccgggtatggcctttgccatacctgcctttgccatgccttggtctgatctattagcagactaagcatcaatttgttgtgtctgtgtcttgtctttcctcttctccgctgtccctcatggagccaccacatgcccgcagcccgcttgtccgtcgtcggccaccattgttccagacttctagctctcggtccctctctagctcctcccgcttctccgctcgtagctcacctgctctggcgcaacgctccgccctctttgatctccagctcatgtgcttgacctcatgaaccaagcccagtcaggcgacatatggtgcacgaaagaacattaatagtgtgtcgtgcttggttgcaacctttgtggaatgaggtcgtgtggcttgagaggacctaggatcagctcagatcgcaaatatgaacttgtagacgtcttgccaccactattcaatggttac

SEQ ID NO: 78228 - DNA, 443 bp, Zea Mays
taaaactccaaacaagcttctcaagtggggattcaatagggaattctgaaattcagaattctgaatttcagcccttgagctaaagactaggcgtgttcaccttgatccctagctcaaatcctaatgaccccattaacaaaaacgtgtctaactaacccctctatcacatgccagaagatggcattgggacgcgagccctagacatgacaaaaccctagatttgcctcgggttcgagcagagagacagaccagatttcagggctccaaatctctgaaaccagtaggcaaaatcctatgacccccacacaagatcgatagcttatagggaggagaagaggttttgtgcactgaccaaggcaagagcaggctcggatgaatgaccacacgcgccataacatgggcagaacgaatgtgcacatgtgttcgaccctggtcggcacacc

SEQ ID NO: 78229 - DNA, 649 bp, Zea Mays
cgtagtagaatttttttggccacaattatgactataaaccaaacacatacctaactcttaactaactctgtcaaacttatctaatcttaaccgcgataaactatagcaacaaaggcagctaaccaaatagaccttgtacttaggttggagacatggctggcatgggggactgttgtgctggtgaaggagattgatactccataggtggtgcctgttctgacggtggttggtgctcagtttcttggggctgcggtggcattgcatgttcaactagtgcagcttgttctgcagttgggctctctctgctactgcctgtactggtggtggtgtatgcaacttaggattctattgcagggaattcatacgaaattccatcatcacttttagggcttgtttggaagtggagtttttttatagtttttgagaaatactatagtatctgctaatactacagtattctagaccaaaagatgtttaggagatcactagaatacagagttttcaataccatggtttagcttaaaccgtggtatttttggagtattcaatacacaggtctagacctaagttttctgctctgtgcgtgccgatagaacgcttggggcaagctactgtagatgcacttggagctggggcgacaagattagtg

SEQ ID NO: 78230 - DNA, 311 bp, Zea Mays
atttatttatggaatccatagttctgaatgatagtagttatcctcactaaattggctataacctcttaggtcaaacatatcaaaaagtaatcaaaaataggtcagttctagaaacaaataacgcatgagacaagtttgtactttgttgaccatacgatctacaaacattggttccttctcttttgctatcgtaaaattgttccttatgttgttttaacaattttgcggatgtaagtaattactatcgatgataaccattcccgacaaggttgtcgaatggaatatataggatgtctgaccttcggtctacg

SEQ ID NO: 78231 - DNA, 443 bp, Zea Mays
tgggaatgaaaagtgatggaggagttactacaaccagatttggtcagacacatctagcaaaagtttgggcatcaaagtaattaggcactaactaatagattgtgtttcatcttgctaaatgtttctgtgttcagttcttgcaatgtttcattatttaaaatttatgtttcctgtgttcagttcttacattgctgtaaaattgcatactgattaatgtggtcactacatatggcttgaactattttttatgatatgaaacattgttaaatatttgtagtcaagcattcaacagcccagaatgtatttcttatgaactgtgcatgctgcttctctcctgtgcattcagactttgggatacatacttattgcgaagcctaaatttatgctacaaaaggataggttgaatctcatagagacaacactctcttctgaggttgattatg

SEQ ID NO: 78232 - DNA, 307 bp, Zea Mays
ctagtgtcaatttccttttctttgcttggtgctgcggccatttcttcctctatagccacatctttaaccacatctgatatgagcctatcaatatctgacattgttgttttggcttcaccagtgtttttgacttcggcagcagcatcagcttctgcattcgcagcagtcactattttagtcgggaggctaaaggcaatgttcgctcgatggcttacatcacgttaactattcgtcgtttcttttgcccttcaaccttctcttttgcagctgaaggttcttctttcttctgtaaaaattgtgtcagttc

SEQ ID NO: 78233 - DNA, 540 bp, Zea Mays
ggccttgctagatttcaatctttccactaaagagagtagtatttcatccttctcaagagcttcgtttcttaatgtaataacctccgaacgaaggtttccaagtgctattcagcatctctcatcctctgcatctttctgcgccttcacaacattgcttaaaatcaagcccaggaaaacaaagagtgaacacgtaatgatgataagaaaaacaacaaaaatagtttatcgtaacacaaaattgcagagtaacaaataaaaactatacacaccttcagactgttgtaggcaagactatctgcaagctgatctttggtcatcacagatagggcaagttcgagcttcgggtaccccatgtgatccatcatttcacggcaaacattgatctccttactatcaggtagacagtagaggaaatcatcatcgttatctcctccatataccaaggatccttgggggtacttcagctctttagcataatgcttggtttcgacaatttgctctgctgatagttgttttcccgaagcatgtcgcacaataaaa

SEQ ID NO: 78234 - DNA, 305 bp, Zea Mays
ttacaatatcctttgctgtaaaatatagtgcaaaataagagtgctactatggcatctattttcggaagagttccgttaaacgtctccttgtgcagatctttggttggtgataacctgttgttgtggcatagtttggtaacccgaattgctaatgtggagttaaatgaggagaatggtatgtttaaatggaatttaactgcgtcgggtcagttcactgttaagtcgatgtatagagcagctagggggcgtttggcagagctcccacagctcagctcccagcaaaaatcactccagcgaaaaatctg

SEQ ID NO: 78235 - DNA, 360 bp, Zea Mays
tgcacagggctccctggtcatttgaaataccggtaaagaatcctctctactgtttctctatctcactgagatctgcgcaaaggcccctcccctttctgtttctttacaacccgagatcctcgaccgtgggtggcggagcagcgactccggcgagcccataccggccggaaaacgcaacggctagacttctcctttgtttgtcacttaattcaacccttcccaacactaatccctcagctaatttcactgatccggaccggagcacgcctgctcacgacgacggcagaaaccgaggataatccaaggtgttctaggcaatttaaggcggtctagttcaaccgaatgggtcggtgagcttca

SEQ ID NO: 78236 - DNA, 567 bp, Zea Mays
ctttagtctgatagtgtagttcatggactcggcagaaaccttcgccgaatggttccactccttgactacgaagggcccaaatataaacacttaatctaacaatggcattaggggtcagctgatgaaggtaaaccccaaatttcttcaaaacatcagcaatcatcccatacaaaggaaatcttaatcctgctttaaagaagcttttgaacactaccacctcattcttttccggcttcggagtagtttcctctccgccaaaacgaaccagctccttttttgcttcgctgaagtagccaagcttcaccatttttggaaggtcagcttcagagatggtggactttccaaagtccaaatgactaggtttagttggtaccccgcagctgaactcttcctcagaaccaacttcttcaacatcagcttgtgctgcttcggcagtaggtgtgtcctctgctgtaactagcccggagcgcttcatcgcttcagaaattggaacagtttcagcagcttcggcctcatctccatcacgctcaactctagcagtagagcgcactctggccatttgatttt

SEQ ID NO: 78237 - DNA, 523 bp, Zea Mays
gaaaatacaaaaaattgttcctgggaagttgtcgccaaacgaaccctagatggaggagagactttgaagatcatcatcaaatccaccgacgttggggggcaagcgtaggcaggcgaacatgatcattcccttgttctgcgcatcatggatggtctggctaggcagcacggacggttcatgtagcttgggcagacggtccggcagtgtctagagataacaacagttacgtaccttcaagccacgacgatctgaaataggtatgtggaggcaaaattcagcgaaagcacctagatggctgattaaggttggtcccacttttgatcaattattatctaagtacgtcaacaaaagggttggtcctcgtgaccggctagtaaagcgacatcgttcgcccaccatgagaagataggtgaaagaaaatacttcaccccagagggaaaggccgaataaatgaactcgaaacactattcactgatcccaaacacaccagcatggacacctccatatcgacccatgaacccac

SEQ ID NO: 78238 - DNA, 501 bp, Zea Mays
attccaggtagacgacgatctggatggtatcctcgacgaccttgttcatgttccacgctacccagccgttggggctgaccacgtgactgagagacttcttgatgaaggtgacgtgggagaagttcctataggggcggccaaggtaggtctccacgctgtcgaggtccacgcccagcgccgcttccacggtgcacatgtggaacgggaagtcggactcgtggctagcgttgttgcagccctacgccatcagcacattgtgattgcctttcggtgggcggtgcaccagcagagggcagctctagaacatggcctaggcattgccaaacacaaaataagtacgcggtgcccagatcaatgtctcaggtagaactggatcccgttctccacgtacaaggtgtcctcatgacgttccatgctgcaccagtagacgaccgacttgttcgaatttgaccttagcacgagatcctacctcctttccgaccctgccatgtttctgattgt

SEQ ID NO: 78239 - DNA, 386 bp, Zea Mays
cacgtacgtacgcagatatatataaaaaagaagagggcaggtgacatgtatatatacttggaggtgtgcgtttaattaatttaagctcgtccaaccaccactaaatcggtacttaggccgccatcatcaaggggacatttgcaatgcatggcaccgacagatacaggcacgcaggaaacattcccattctgcaattttaaatgtaaggacaccaaacgtgagttcttctgtttcaaacttcgctctgcaaacgaagatccgttggataccacggggctgttcactcgtttgcgtatgaaataccaaacagaggattatatgctagaaatcatgtgctaagcatcagaggcagtgcatctcaaatggtaacaataactgaaaaatca

SEQ ID NO: 78240 - DNA, 552 bp, Zea Mays
cttaagtcattaccgacttaagtctattgctctgttagtagggtatagtggtcaccctaagtcgagtaagcgcgagcatgttgcatcgtcttaagtcattaccgacttaagccgattgctccgttagtagggtatagtggccaccctaagtcaagtaagcgcgagcatgttgcaccatcttaagtcattgccgacttaagtctattgctctgttagtagggtatagtggtcaccctaagtcgagtaagcgcgagcatgttgcatcgtcttaagtcattgccaacttaagccgattgctccgttagtagggtatagtggtcaccctaagtcgagtaagtgtgttgattccaagtctaatcaagtcgaagtcgattgataaccaatagtttgaatgccttcgagaatgaaatcttttattgatgatgtattttccaattacagagtacaacgttgctccgatagctcttgttaagggtaaaacttcctgagatgctctatattccatgaatactccacttccgtgccatccatttgagtaagccgatatgatca

SEQ ID NO: 78241 - DNA, 653 bp, Zea Mays
ctcgtcctcaaccctctgcgcatgaagattggggcattgtgcttgttcaacctttgccggagcatgaggtcaatttccacatctttgatgatatcatccgtgagtatcttgtgggggtccagcgtgttcaagtcaggagcattcagcgctcccatttgggacaggcacttgtgcgattcaggttcgcgtttgacagggacaacttagtggcattgggtccacagcaagccttggatttttcttttactgtcattcgacacaatgagggctggaatcagcgtgccctaacctttaaccatgaatgttggcttcttcttcttggttttcctctggacttctggacgcatgaacacatccaaaatgcggtcggagcctttgggagggttctcatgtgggaccctgacccaaataatgcaactagattgttggtccgggcacgagtgacatctttacaggaagtgccccagttcatcgtgttctcggtggctgaaggcttctagggagtttcatggactgtccaatgtgacatcgtgcaacaatttatgcttttgtgctcaacctcaagatgaggatcccgtgccaccctacccacatgatgggcaccagcttccagtagagtttttttggaatgggtcagccggtggccaattttt

SEQ ID NO: 78242 - DNA, 355 bp, Zea Mays
aaaaatcctttttcctgtgcgttgtccggtggttcaccggacagctactgtgcgctgtccggtgtgcaccggacaggcactgtagactgtccggtgcgcccatatcgcgtttttaaaaaggcctccagcccgcagaaccgagccagaggctccccgtttctccctgtcagcgcctgctctcggtctcatgtgtcttccctcccctcaccggcgatctcctctcaacggcggcgactctccggcaaccctgtgcctgcactcatcccttccctctccggtgagcaggcatccctcctctccttccctctctcggtttgaaaggctctgtgacattcaagtcaccacccctttgtgc

SEQ ID NO: 78243 - DNA, 614 bp, Zea Mays
tcgtcgaccttgccctgttccgcgcctggtgggacttgcggggtcgtgcataactaatacccctactggtttggcctcgacgtcgactctagacactctaattgctcaccggaatcggagcttcgcctcggatccgctcgacatcgacgatcgaccatgtcaaggcctcaactcttggtaagaagcattcaatcgaattcgtcatgtcctgttctacgtatttccctagccacgttaggatagatgcatcggggcgtcgtggcgcggtgcacgacaatggtcgccgccgtcttgggcgttctggcgccacccaacccttaccaaggttgaagatgacctaggtactgttgatcgtgtggtgaacggctgcgattagaccaagcctaccgattcgtctgagatgaaccagggccgttgatcgggcgatggttggatctggatacattctggtatggacgatctccggccgtagatatcggatccagcggtcaggatcacaccttggttcataatgtgtgcttctaatctaggcagatgaagcaagatccaatgacccagattgcatgataccccttcggcctgggcattatgcagaagtgaccccctgcttttag

SEQ ID NO: 78244 - DNA, 637 bp, Zea Mays
atctcaagcccctgccgaccatttcgccccgcctcgcaagattttcgccaagccgttggtgcagcgcggggaaggcagtgatctcgggcagggcggatactgctgttactgttagcctacttgagtaatggagagtagccactactgaatgcagccaggaatagggaagaagagaagaatcgtgacgcaatatctgctaattgttttcttgcgtgcctctgtcctcgggcaacttcacttataacgtttcttgatacacggctaagcccagcaatgacaactcatatttctattgcacggcccacattggcccgctgtattttgtattccattttctctcccgccttgccttgctgaccgccttagacattcagcgcagcctcatcttcagtcttgtctgctactatgctcacattctcctggtcttcaaaagccgcttgtccccaagcgggatgctttagaaaacttagctctcaatgcatcggtgtctttccaagttgcccactgttcatccaacccggaccaaacaactttgacctgagcaatgaattcccccccccccccccccctcccttcaatcaaacgccgttgtataattttgagaggaaccggcattgttgtctgatcttggggtaat

SEQ ID NO: 78245 - DNA, 563 bp, Zea Mays
aagtaagctggtgcattagtcagtccaaaagacatgaccaaaaactcatatagtccatatcttatggtgaaagctgttttaggtatatcttcagtctgaatcttcaactaatgatagcctgatcttagatctatttttgagaacactgtagctcctctaatctgatcaaacagatcttcaatccgaggtaacgggtacttattcttaattgttacttcgttcaagcttctatactccacacacattctccttgaaccatctttcttgttcacaaatagaactggggctccccgtggagacgaactggggcgaataaaacctttttctagtaattcttctatttgtttcttcagttcaattaaatctttgacatccatttggtaagctctttttgaaattggtgcggttccgggtaatagttcaatagaaaactctatatcacgatcaggtggcatacctagtaattcttccgggaatatgtttgagtattcacaccctattctgatgtgctccaaagatttctcttccaactgattgaccattgcctctgttgttgctggcat

SEQ ID NO: 78246 - DNA, 649 bp, Zea Mays
cacgattgttattaccttgttggcggtgtggcataccttctgtgttttgatgaagacggcgacgtaggcgcaaatctctggtggccgcttcatcataattaccttcttcattaaacaccgcatcatcgggaagacgtggacgaggaggtggtggtggcggtgcttgttgttgcgtctccaacatagcaagtctatcgacgatctgggacaatcgtcgatccagcctcccataagtcttgccaaggttcatgtcaatgaaggcatcatgcactgacttgtggaccatctcctccatttgctccttcaggagcttgttgtttgcctcaagatcttggcggctaacacattcatcgaagtctgtagggatccttgcttcctcgtcatcgcctgccatcgaaacacaaaaacagaaaacaagcggtgacggttatccctaataatttcactacacgctcctctcaggtggaacacaggaacacgctctaatgtatcttaccaagctcttaaaagtgtctgacgaaatacaagcaaaggatggtacaatcggaggctggttcatgatacttaccaagaggtagtgaaaccgcgattgcaaggtcaaatctgtattgatcagaagatagtatgtggagcttgggaggccaaaatt

SEQ ID NO: 78247 - DNA, 459 bp, Zea Mays
cgaacgttgggcgttctaaagattctaagacagattagcacctctaccaaaagacgcatgtacccttgtttttttgtttgattacaaggttggagtaattacaattaaagctaattacaatctacagcagcagtatccaagcgacttgcacccctgcagaagcattttctggcgccaaaaaatgtccacatccctccttggcgccaagcgacttgcacctctgttagccataaaaaatgaaaagttttcagaaaagtttcacatggcgccagttgcttttgccaaaatcagaaaactttgacatggcgcccaacaacctgtacataaagctgctgcaacctgccacaagccgccaacaccacccaagcgtaaagagacaccatgcctttgctacctgatctaaatcattctgcatccgtacctgatctaaatcaagctgcacaaagcgacacccaagat

SEQ ID NO: 78248 - DNA, 653 bp, Zea Mays
cgcatgcatggagcattgagatgattgactacaatgaagatcaagcgagatcgttttgatgcaatgagagaggtgaagaattaacatagagacttgaaccgaggaaccaaacgccagcaaacatatcatggatggctgacacttagggacatcgatgaacaagtgtacatgtgaagacaaagtagactatgttgactaggtcaagacaaatgaccaagtcaagtggtggcacgaggacttaatgatctcgtggtcgaggcaaattgtaacacgtgtcgagatcatggatgaggtgtagtagatacgcttctccagcgaggtttcgtagtttgggcttcaaaaccaccaagaaataagtgatttgttgggtttggccctcgaaactcgaggagaagttcgaagcactaggtgacgttattgaaaagcttacgtcgaggcaaagctatcttgtgaagggcagaccatcgaatgcaccagttttagtttgaaccattttgtctctagggttaagtggtctaagaaaatatctaaggactaacttagatttagattgtatagtatggctctataaataatagggaaggctgcctaagctagtatattttcttccagtgcattagctagctctttcatcttccatgagagatccgtat

SEQ ID NO: 78249 - DNA, 569 bp, Zea Mays
ttgtgttcaaaatctttaggaaagtttctaactgacagaaatatgttgtaggctgaatagaaatgattagtgtcacacatggaaaatacaaatgtgttgacagaaatgggtctacagttcttcatgtattcaggataaaatagctatgaaagtatgaattgccaaagaagtgtgtctacagactcaatttaacagtttgacactgatctttaatgcataaatcagaaccttatgccaaaaatggttggaatggaacgaggaccttggactatagcaaatgtcatatcctttggaggcacagccgcacatgcactgcatttggcttaatatgttagttatagaaaaagttgagaagaaatattaacggccgtgggcttaaagtcttcacacaatacctgatgttgttctcggtttgttcttactttttgaatatagttcaatattaattttcaagatatgggaacaagcttgataaacttttatctggattggtgtcacggggaacgtggtatagcgccacattccttgtctcagcaacaacaaaagtcagaacgtcgtcctacttggaa

SEQ ID NO: 78250 - DNA, 610 bp, Zea Mays
cacggggatccgggccaatcgtcctctcaccctccgccccaggatccttctggcagtgctcctcccccggatcagtctggggaagaacactttgcctctcacctggcacaccacctctttgctcctcatcagcctcctcccaactggtgatctttggattggcatctctctctctttttggttcttgttgccaaaaaggaagagaaggtttattagactggcagtaccttctatttttgtaatgaacaatcggtttgtaataactatttggtctatcgtatgatgcatgcatggctctgaagccataaacatttttatgatgtgatgagatgagttatcattgttgtaatagcagtagtaatttttcatatcatatgctatgcaataatgagcttgaatgtgtaatttttactctttctatctaattatgtttcattcctcattgttttgtgtatggtgttgattgttctctctctctaaatatgttgcaaattgacatatcaagtcaatgttaatgtcgcaaaactcatgcacatatttagggggagctacacatacacaaaggattttatctcgcaagtacttgtaacttttaattttttatttctac

SEQ ID NO: 78251 - DNA, 2134 bp, Zea Mays
ctgtcaaaaattgaaaggaaaagatgattagcaccaacttacaggactggatcctatggaattgataaaatatatgtagtgtgctatactctctgatcttttctttaaggccaacaattgaaagctcctttgtccaatgggccagaagtgtctttggagcaacaatgagcaccctcttgactagacgagaatgaaacagtccagccaaaaatgcagcaacctgcagcggaaataaggttgcatgattacattaatggatttcttagctaaatgaacaggtggcaaaggaggtgaaatcatgaacagatccataatatgaagccaactgggaaacgactagcttatagagccaacaaaagaggtctatgcttctatctgaaagaaactgatttcagattcataagtaaatacagaaggaaaaaatacagaacaatgtgggtgtgcatgttcacacttatatagatcattacaataacaaaaaactatccatcggaaagtaaacaaaagcctctcctgcccctacactaattaagtaaacaagccccaataaacagttacaaccctgagttaaaagaagggcaccaactactatgggcacacagcaaagtagcgtaagtagtaacactaaaacctctgtaagccttaatacaatcgggaaaggctcaagaaaagggcaagctgagcatagcaaacctgcatcgtcttgccaagacccatgtcatcccctaggattcctcctgttcccctgcagtgcagaacccagagccatcggaggccctcgcgctggtgggcgaaaagcatcttgaatatctttcctgggagcttgtatggcttggatgttgcagcagttccagttggatccatcttgaagtcctctgtcttctcccatccaacatcctcagcattgttctccacagctccaaggttctccttctcctgacccagctcatcgtcgctgacaccatggttcctgaatgttggggtgttgggtggtctccttgtgaatcccttgcttcttagctgcttaacagcataatctgttcttgttccttggtcctcctcgcagtcgtcataatcagaatcggaataagaatcaacaaaggatgaggcctttgataccctatttagcctcccaacatccttggtggtccctttgttcttccccttgccacggacgtcatcacaggcataatgggtacaggctgaggagactaaatcagtttcgatcttgacctcggagcgtctggtgggagccctagcttcatcagagctagaaatttgaaggggtgaggaggcaccggcgtgagcatccacatcatctgggctatggtcatctaggtcgtcgtccacggtgatggcgcacggcaaaggggtgagctgttgtgtcctggacctcgcggcggtgctgggcttctggacggatagagagtcaaatcgtgtggtgaggtcgtctaggatgtcgagtatgctttcaccgtcgtcctggttgtcccactccgcctcctcttcatccactcgctgagtggcggtggtggtggtggcaagcttgcataggcggcggcggccggcgagcttgaccttctcgacttgttcttcggcggcggcttttgcaaaggaagaaattagaaccattaagtagattgaagggcgaggaaaaacaatgaagcaagaagagacgggcgtacagtacctgggggcggaggcggtggcggattggggctagggttagggttttgggtggggcgctggaggctgcgggtgaagcggaggaggtggtcgttgaggccgttcggcgtaggggcggcggcagggagatggcgatccttggggacggcggtgacgggttcatcgatgtcgtcgtcgtcgagatcgccgcagaggtcgaagggagggggagacgccatctagccgcggagacgcccaagaggcaagaggcaaggggacggaatcgaatcgaggatgcgcagtggggatgggtgctcttcctcgtcggttcacacctctctcacttgccgaggagaggaaggagaggcagcagcgagcgtgtgtgactctctagtctctacgactctacctccaccaacattgcggttgtagttgcagttcccaggaaagaagcgcggagggggacgag

SEQ ID NO: 78252 - DNA, 736 bp, Zea Mays
attttgtgaatttgtcaatggcaaccagcacgtgagtatagcctccctgagctttcttgaaaggtccgatcatgtccagcccccagcatgcaaatgaccatgttacaggaatggtctacagctgctgtgcaggtaaatgttgttgctttgataagaattggcaagcttcacatatctggactaactcggcagcatcactcttcgttgttggccaatagaaaccagatctgaaagccttcctgaccagagttctggatgatgcatgtactccgcactgcccggcatggatttcatctaacagttgcttcccaatagctgagtgaatgcatttcatgaggactcccgttgcacctcttctgtacagtgtgccccctatgagggtgtagtgggctgactgccttgcgatgtgttccgctgcagccttgtcatatggttctttttcattttttatgtacgtgatgataggctctctccagtcattggggtccgactctggttggctcaaggtgttgcactcttctgtctgatctgagaggatagtcggttgtgatatttcttagacaaagatctcgggtggagcctgggcccgattggatcccaactttgacaacgcacctactgctgtgttgcggtctctttccatgtgatggaactccaatccttcgaacttgtcctccaatttacaaacagctgcacagtacttgcccatggaatcagtcgagcaatcccagtcttt

SEQ ID NO: 78253 - DNA, 491 bp, Zea Mays
caggaaaagcgtgtgggccaggaacctaacattcggcccattgctgtttttcctctccacgcgcgcacggcccagctccactctgtggcgccaccatgtgggtccctatggtcagtcgcttggcgcccgtaccgctcgtccgtatgtcatgtgggccccagatgacagtcgtttcttccccaacgaatcatcccaacggacgcaatcccgccagcctcggtcgccgcaaattccgggttcctcagccatggattctgctggttgaggtcccgagcaccctcctggtgatccggtggtgatcacaggactcttgtgaacaaccgagcgattgcgcggaacaaaatagcggtggcggcggattcctctcccatgccgttgccgcgccactcctccactgaaatcgggcgggcgtaacaactttcctccccttcggaatccgctttcctcggcttcggggtataaatccgggacacctcgctcgcccatcagcc

SEQ ID NO: 78254 - DNA, 562 bp, Zea Mays
tgatcataaattgatgatgacgaagaacaaattccggcatttcgtttgtctcttctgctttttcccgtgattcccgcccgcgtgattgtgacgcgtcagacctgcattatccgaaaaaaagaaaactcttttcatggcctgacgactggcgtccccatattaaagcctacgctctttgtttcagcgatggactagacagtgttgcttccattggagagcaatgccaaagctgtgcattgaaattttcatacaaaatttgtccatctatgcgtgtggattagaagagtttgaggttttgaggcacttgagcgggcaactgcggaagaaactaactgatcgaagaagggaaggtcgcagatctatcaaggcgcaccggacgtcgtacgggaccacaaggtgccatatgcatgggtacaagcatggacgcaattggcggcacatgccagatgggtctggcggccggggcaagcacaaccttggatggagctcaggatcatcagtagcttaaccacccaatcgatcgagtaaggcgccgtggttggcaacctgacgaactccctca

SEQ ID NO: 78255 - DNA, 404 bp, Zea Mays
tcatcgcactcaaccgaagcaccgctgttggttttgcttcgtcacaagaggaagagcttcgggaaaattaaaaaagttaacaacttcatcaaaaattgtgaggaattcatcatcaaatggcaagggtacgttccactgctagggttacacgtgacggagaagaagccaaagctgctgaaaccgctccgatttccgaagtgatgaaacagtcggggctggtagtgccgggggatatttctgacgaaggtgcacctgccgccgaaactgagcagattgttgctgaggaaagtgattctgcaaatgattatagtgtcgtgccatctaaacccaaccacctggagtttgggaggtccactgttaccaaagatgatatgcctaagttgatgaagttaagttatttcagt

SEQ ID NO: 78256 - DNA, 425 bp, Zea Mays
cggaaaactgagtatcttgagattcccctcaaggatagcattaaggggtggcgtctagagtggttcatagttgataattatggaaattctctcccctctcggtcgggaagacagccagacgttcgcactccgagctggaccgagtctcccacagatcaggaagtggctgaggcaggtgtgttgctagctgaagttggactgctgaaagagagaggtctaactgctgaagctgtggtcactgactttgttttcaagaacattcagccactgaaggacagggcttatccggcatatctgtatcgagggctagccgattcaactcgggttaccaataggagaattccttctgtagacttggtaagccgacttgaaatgatcctcaggggtaaggtttcaaatgttggtgctccagtggcatactcggc

SEQ ID NO: 78257 - DNA, 662 bp, Zea Mays
gcgtggttagctgtaacccgctggggtgtgatctttccccatgtaataaattctgacttagctagaattgaccataggtggttgtgcgtattttccttttttcagaatggttttctgtttaggattagttccgcttgctttcttcggttgacagtcttctaagtcgtagcttttggttgatgtgttggtcatgtatgaaactcgtttcctatttcttaatgaaatggggggacccctttctgttaaaaagctatcttgcaccttcatagaacatgacatgcaacagagttgcccttaaaagtggtggtgggttggtctagagattatgaataaattgtttgagtttcacgtagatctgacatccttgcaactacttgacatcctcatgttatcgttgagaaaccccttttaagagctcaacaaccactaagagtgaaccatacccacgtaaaagtaaatagacaacttaggagagaggtgaggcatcgctacgagtattatcatagggatggtcaccttgttgagtttatctttcagaggaagatggacaaactgcataagtatgagtggaacaattagatcatgtaccttcctccccatggtatgcatgatttacttgttcatatgagtgatgctaggcctagaggtgcaatgcctcaagg

SEQ ID NO: 78258 - DNA, 538 bp, Zea Mays
catgtgttgagggaatcacatcatgattttgaggtagagagaagttatgttggggtgggtaggaggtttgctgataataatttgcatcttgttctgcataccctacctggagcatgttagtcgtccctgttagccatccctggaacgtaatagccggacggtctggtggtgtactcgattggtccaaggatgttagccgtccctagagtgggtttcggtggttcgtcgcggaggacgtgactgaccaccgctgggccagactattcgacctcaggctcggacggtccggccgtgcgcaggggcgtgggttttcccctcttagaattcatcggcattccataaattggttgggactatgagcgtcatttgcggccgatgaatcttgtgtggcatcaatgtcgcgtgatagaaagttgggagcaacagatttctcaaatatgtgtgtcattcttttaaaatcatctagcatacccccaactaattgttgaaattgctcctgctattcatctatgtaaacactaagagcgtgaataccgtc

SEQ ID NO: 78259 - DNA, 762 bp, Zea Mays
ttaaggtttccttacatagaccatgaggcaaccatgtaattttttatgaagagcatcttgcaacatttagatcaaacaatcagtgccatcttttgcatagatcaaacaactgtgttagtttgttcaagcaaactgttaactaatatgaatctacatgtgaggttctcaactgcatagttttgtggactggggacatgctcagttgggcgaacaatcgtggtaacgttgatgtcaatagaattcaccatagctcagttgacagaagagacaaagtacaatcccaattaagcacgcgagtcaactcgttagagaacattttgttgtcagtgattccattttgaggagcgactggtacactaaggctactggcacctccggtacgacgctgctggtaaaacttatttcaccctcctatagaaaagggaagagacaacattctttcgcataagcagacgtagagccaacattctttcgcataaagttctgaaccgatggctatgaactattctaaaaattgacttgctaatttgcatacggatatatatttcattaagatgtgaaaacaatttgcaagtatgtgtgatatgttgctttactaaacggcttgaccaatctatatttttcggtccaaaacgactaaaaattagttgtcatagttatatctgatattaaatgcaaagaaaattatacagatcatcgaggtagcaaattcacgtaaaaagtatcatggttggcctgagcatgacccggttttatttttcc

SEQ ID NO: 78260 - DNA, 1491 bp, Zea Mays
cagccgctgcagaaggcaccacaggtggaggcattgtcgtgaaggaagtcgcagccttcgcagcttcggcttttgatcccccagccacgctagtgcgaagagccttcgtctcgcgatgagggtccactatccgcaacagagccttccttttcttatttgaagactcctggagatctttgtccatcacaaatgttataacaatgccaatattccgcccgtaaggaaaaactttaaaatactaggccaaaaaatatgtaaaatcatcctcaccggaagccatagggatggggtcatccctgcaccactcacccctgtcacttccagcatccacacaaaggcttctcgttgaatgggcgaaggcatgacctcccctagctcaacacatgtcttagccaactcttcagcaaacttgtctgagcccttcccctagtctccacccttttcttcgtcgctcgcagtaccaaagctttccccttagaacacccctcgtctgtcgcaccatgtttcactccgcgtttctttatgcgttcatcgacgtctacatcgtcagcagagccctccacaggatcctgaccatagtggaggccgttcaactcgaacacgcaattcaaccaaacattcgagcctcgaatgtcctagatcctcggcatcaccgtcttcaacgaatacttgccaacattctttaccgcctcagcctccacttccctaacgaacgccacagcgtcctgccccctcaactccacggcaaaggccaggcttagcaccttctggttcttcaaaaacgacataagcagcaacttcaccacgcccacctcccaccgtgcgctagcagccacacaccacaagcgatgaactcttctaccaaatcacagtcgttgctcgtttttgacatgcggcgaagggcgtcctcgtttacatctccctttttactttaaactaggggaaggcaatgtagcagtgcgagcataggatggtcggagacagcctcagagccccctcggtttcctccatcgccacataaaaccaaaaatcccaccagttcccccacttgttcttagcacatggcacgagatccacaacttcaccagaagtcttcttggtcctcagtgtgaacaagcatgtgccaaactgcgcaatcttgccaccggtaaccatgttctgctagcaaaggcaataattctttgtaaaacctccactgacggctcaccaccatacgtgcccagataaacttagctagcgccaccatggcatttgcgtgagctggtggagctgaactttgaagcgctccaggactttggtaatgaatcgatgtgtaggtagttgaagaccggtagtgaagaacgctccgaagaccaccaactctccctccggttctaggacctctttggcccctggagcgcatcccatgtcgtctccaaaataccccaaacgttgcatttcatgcacgcgtctcgaagagatcctggacatcccaaactccactatatgacc

SEQ ID NO: 78261 - DNA, 527 bp, Zea Mays
caggaagcttttgggagggatgatggttttatctatcaatcacaaggccgataagggtggataacttggaagtttgtaaggatcactcgtttgcaaacaagccattcaagagagaatggtgtgaagatttgaattcatcccagtgggatagtcggcatcagagggcaatttctcaaataatatcgcttgactccacatctaaggagtgggataatctcgacgcttctaacaaccatcatcgtccttggatgcccatggaggtgcatcaatacgcgatccccatggatgtccttactgaccaggaagacatggcaggtgggcagtaccaactcaaccaaacaaaaaatgtcacgtgggatatccatggaggcatgatggatattggggacgcgtggataaattccaaggtggaagacaaagttgcagaggatgcacttctggaggatggggaggggaagaagccttctgctcgtatgggcctttccctagcttaggtgtttaaccactcttggaggcccagtgacccg

SEQ ID NO: 78262 - DNA, 434 bp, Zea Mays
tgagaacgggactagagacggggaaacaacgatggggagatgctctgggtgggttgggcaactccggcgaggaatctcggccacagggagggggtttcgagcgcgctaaggcttggactggctttggcagggtaaggggaacactatggaccaacgcaggggtacaacgcgaggctaaatcggccagtcaccatgtagggcacggcgaaccgatgtggtcggactccgccgaggccaaattggctaagaccagatggaaataaggtaaaccaagcacaggaacaagttcctcacctcaaaacagagctcgaggcagcttggcacgacttctggcgtgctggacggccggcagcgtggttgcggatctctggcgagcacgggctgtggtggtagagcgcgatagagggcgagagtgtgcaaaatgagacaggggg

SEQ ID NO: 78263 - DNA, 284 bp, Zea Mays
gtcgacctgcttgtgttaccttgcaatggtttgtagtagtggttacaaacgggcgagagagggatcgagctcccaagtctctagtgtgcgaatatgtgtgcggttataagtgctctgtactttgacttgtgctagtgatgcgtatgtgtgattgctcatcctcggaatcaggtccctttcccttagaccaaccgtgttacaagagcctaagggtcaagcgaataaaggtcagtcattgtcgtgtagttcgttgtcctcttgggttcccatcggtcaagggacgc

SEQ ID NO: 78264 - DNA, 645 bp, Zea Mays
atacttgttcttgatagttacttcatttaaaggtctatagtcaacacacatccttagggtttgatccttctttttcacaaaaattgcaggacattcccatggtgaggagctgggtcgaataaaacccttttctagcaaagtttgcaattgagtcttcaactcggccagttcatttgggggcatcctgtatgatctccgagaaactggagttgtgccaagcttaagttcaatagataattccacgtcacgttctggcggcaaacctgacaactcttctggaaacacatccggaaattctcgcaccaccggaacattgaccaactcttcgactaccacactataagcctttcccgaaatttcttctagagaagacaactggatctttaactgactttctcctaacactgtgtttatctgaatagtttgttttttcgtgtcaataattgcttcatgttgagctagccaattcatacctaggatcacatctatgtcctggcccttcaacactatcatattggtggggtaggtatgcccacacaattctactggcacatgaaatactatttcctttgtgcctaacttacccccaggagattttacaataactcccatgtttgtttcttgaaatggaatatcataatccac

SEQ ID NO: 78265 - DNA, 335 bp, Zea Mays
ttgccccaaggggagattaactcaaatacgcactacaactcctatttcctgcctccaacaatgttgcggaatatgaagtgctgatacacgggcttagtatcgccatatcactcaaaatcaaaaggttgatggtatatggagactcactggtagtgatcagccaagtcaataaaggttggtattgctccatagaatccatgagcaattaatgtgctgctgtcagaaaaattgaggataaatttgagggctggagtttcaccttgtagaaagagatcgcaacatggcagctgatgcattatccaagctagagtcaagccgagcataggacctacccg

SEQ ID NO: 78266 - DNA, 306 bp, Zea Mays
taatgggcatgtaggtacaacaagtgcaggtttcaaggcggttcatggaggttttgggtatggtagttcgaattagaaggaagtcttggactttgcgatagcttttgacttgttgatagccaacactttctttaacaagagaatgccatttaatgacctacattagtggccaacactctagtcagattgactttgtcctcacaagcaagagaggataaatgagtatgcttagattgcaaggtaatacatagggagtgtgttgtctcttggaagtttctagtggtggtctttcatttttcaaagtgt

SEQ ID NO: 78267 - DNA, 1044 bp, Zea Mays
ccttctctgattccggctctttgaccgggtctgcactagcttcgatctgccctttcaattagcttcggcacatcgaccgtcccaatgggctttggtcttcgtgtcaagaccttatctctcttcgccttcggtgcactagaagatgttgaagcagcaactttcttttttcccccttgctttcggacaggaaagcagtaatcagggtaaacaaacccgataaaatcgaaaaccctgttcagcctctttttccctcgagcaccgaaggcaactgtcatggcttcgtcttctatccttgagtaggctccaagtagctcatcaatcgttgcctctatagcgtctagccagtcatcatttggctcatcaacttggcttctgtatcagaaggtgtatttagataaaccaagccactttggctagagtcagcggcagcttccctcggcatttcccattcatttgcaagaggccatactttgtaaacagtgtgctcttgaactaaatctctcgtgccaatgtcggtgcatatggtgttgaaggccatttggctcacttgcacttcattcctaagtgcgattgatggccttctaatgccgaagtgtgaccatataggatgctgaatgacgcccctcacatcctccgtcttatccaggtcattcttcacgtaaaaccattgcttcatccaagagcccgaccacgtcttccgaaatgtaggcacatggtaatttgcgttggagcggggcacgaagctgtaactgccgaagttgttataatattgttcttttcctgtcaccttcgtctggtaagataactcatgaatgttgcagaagcacttagcatccagctcaagtccccgaatccacatggcccatataaaaacccccactttgataagagcttcgggggtaagttgatgaaggaatatctcaaatatcttcaaaacctcaaccaacatcttgtgtagcggaaagcgaagcccaactttcatgaagctcttgaaaaccactacctcattagcttcgggaaggggaacggtgctttctaccctag

SEQ ID NO: 78268 - DNA, 425 bp, Zea Mays
cgggactcattcctggacatcctcctatcagggccagaggacggattcacatccctgcccaacgaagcaagctgcaaccctggacatgagtgcctcacatcccacacgacgggggatcatttcccccgcacaagaagcctaggtggagccctcaccggtatcatggtacgtgccacgatgtctgccccgccctagctcaacctgcttccccaagaatcaccgccaggccctcaagccaattcccaagaatcactgctaggcccaagcctttcactgagcagtcagtgccccacagcaagagaacaaggaagcccacggtcgagaatggggctatcgctccatgttgaagggcaacgacatgccatgacgataaacgaccgccgtcgcctggtctacggcgggggcgcgacgttgcatttccctcg

SEQ ID NO: 78269 - DNA, 520 bp, Zea Mays
aaaggaggtaggttgataatccattgtaagcatttgggaagctcattttttatagaggttagatcgaagacagtggaacaggtagggaaatggattggtgtcctaggaaggggatcaaatgcaaagagttggaagataaatgcttcctattcacctttcatgaggcgacaaggaagagaaagactctaaaagatgggccatggatgatttctaaggaagtactagtggtagcagattttgatgggtccaaaaccttggatgaaattgatttctccttcatttcgatctagaccatgtggcgtggcttgtgatgggtctcatgaacagagcggcaaaacatgtgataggggatgaaattggagagttatggaggtggactttgaagtgatgatctagcagcgagaaggtttatctagtcaaggtgaagctagatatttgtaaacctttgagacgtggaatcactgccaataggggagaaggcgtgggtgatcagcggtgtccgtataatatgagttccttc

SEQ ID NO: 78270 - DNA, 478 bp, Zea Mays
tttaatttctctgattttatactattctggactaggcgcaccaatccagagaaaggcaggggcctcggggtaaaatatcccagacccagcgcacaacccttgtggatggcgggttgatttcacttttctccaagggctctattttaaataagcgcggcgaataggtcatagctaaccctgctcgtcagatctactctggacgcgccagatcagatcggtcgtagtatgaagcggtacgcgcagctaaccttacgatccgagatctacggtccacatcggacagagcgagaggaatacccagacttaatcctgaccgttcgtacgctaatcaacgactccctccccttcttattccttggtgagacatccaggtacagtcgatggcctgcccgatggcggactcgccatagccatgtccatgccttcccccccccctcaccgcaacaattgaccgggcgtttcaggctctaacccgcgc

SEQ ID NO: 78271 - DNA, 589 bp, Zea Mays
tttttatgcatgtgtggactacaggtttattttataaaaaacatagggtttctttagctaaattagaatatcgacggggtatccttcaacacaagccgttggattcactatctatggtcaagattagatcttcataatgttgaacaggtacttaacagaggccataggatctgagatccatgacccagattttatgatggccaatctaatgttgcccacccgatctgatatcgacgaccctgaacaaccacccaaaacggtgcagtagattctaatactagcactcgatgaagatccaatggtctagagcccatattcagcccccagccaaccatcacggtggcccacgatccctccgaggtggtgcacttcgcagaagaacgctagtttgtcgtccccacgattgaatcctgctcctgacccgatgaaaacggaggcccgaccaccgtgaacccggtaaccacccagataggtacgtctacgcccctacccaagacgcaccgggtccccatggcgatgccctcgtcgtatggccacgacaccacacacctagataagagtaaaccaatgttatgccaatccaatccca

SEQ ID NO: 78272 - DNA, 652 bp, Zea Mays
ctcagtagttttggctgttcttctgctgttttctttggtctcggttcttttaccggatcggcactaatttcggctggcataacaggaactgtttccatagctaaggggataactgtagcactttcaacaagcttcaccttctctgtcgtatgcgctacagccgtcttttctaaagaatgtagcttcggcttacgagtcaggaccttagctctcttcggtttctgtgcaccggaagaggtcgaagctgccatttttctcgttaacccttgtttttgggcagggaagcaatagtcaggataaacaaacctgatcacatcaaaaactctgttcagtctcttttttcctcgagcgccgaaggcaatgatcatggcttcgacctctgccttcgtgtaggcacccagcagctcatcactggttgcctcaacaaactctagccaatcgtcattcggctcgtcaaattggcttctataccggaaggtgtatcttagataaaccaaaccaccttggctggagctagcagcagtttctatcgacatctcccagtaattcacaagaggtcataccttgtaagcaatgtgttcctgtaccaaatccctggtaccgatgtaagtgcacacggtgttgaaagccattaaacacgcctgcacttcat

SEQ ID NO: 78273 - DNA, 629 bp, Zea Mays
gaagaaaggaagttgttatcagatggctatcgatagcagtgaagtagaaccaattgagagtatcaaggttgtgtccgagttcccagatgtgtttccaaaggacctaccaggtatgccaccagagcggaaggttgagtttgctatagaacttcttcctggaaccgcccccatctttaagagagcttacagagtatccggacctgagttggttgaacttaagaagcagatcgatgagttgtcagagaaaggttacattcggcgaagcacctcgccttgggtcgcccctgtcctattcgtggagaagaaagatggcaccagaaggatgtgtatcgattatcgagctctgaatgaggtcaccatcaagaacaagtaccctttgcccagaatagaagatctgttcgaccagttgagaggagccagtgtgttctccaagatagatctgaggtcaggttatcatcagttcaggatccgacctttagacattccgaagacggcattcattaccaagtatgggttgtatgagttcactgtgatgtctttcggtctaaccaatgcaccaaacttcttcatgaatctgatgaacagtgtattcatggattatcttgataagtttgtggtggtatttattg

SEQ ID NO: 78274 - DNA, 529 bp, Zea Mays
ggactcttgaggctgtttttttatgagttagcccttaatgtactgtctaagccagtggcgtttcttatcaaaccttaatataaaattccggaaccgcatttcagcttataaaatcttgtttctagaaacatgttttcatgttcagatatattactaggaggtagcataagcttataaaatcttgtttctagaaacatgttttcttgttcatcacagattctacgcacattaaactgcgcatcaggctagcaagaattgaagataaacactactagcaaaaatgagtatctcataaaaaataatgaaagatgtaagactaagagttaaatgcgtcagtggtccataaacttgtcaagagatatcatttaggttcacgaatttcaaaattctagatccttaatcttgttaaatgatgtacatctctaaacttgtaaagatgatgcatcataggttcatttcaaaccatatcgaccactgcagtgtgccacttaacaagttcaaaaatctaaaatatgcattttcaaaattc

SEQ ID NO: 78275 - DNA, 531 bp, Zea Mays
taatttgatatatttctgagttacttggactgcggccacaattacagaaaagtttaggggtctaaatcaaagaaatcagggcctttttgtaactacttaacacacagtgtggacgacgggttgttttccattaaagccagaggttcttttgcaatttggcgccgcccaaggggtacacacgattcccgaccatccgatcccacacagatggcctagattaaatcaatctcacatgaaccggtacgctattatggccatcagattggcgatccatggccctcattaaaataccctatcatcccatccagtccatccatagataatccaacggcacagattcgatcactaaagggtatgcacgctatctaatctggatcgcttgttctgaaatcaatggccatcaccccatctcctacctcccgactggaatcaggcgcagctcccccccccccccccgtgatggagaatgtcgtcgagccgagccccagtgttctcgagcgtgaatcacaaacgtcccgactctaaacgatg

SEQ ID NO: 78276 - DNA, 899 bp, Zea Mays
caggaacaagtacgtagatagaagaagctcggcatcgtggagtcgacgacgtgggctcggcttcgggcgacgaggttcaagaatcaagatggatctccaacgacgacaacgtatgtagcaaggtgcaagcagcagagtgttcggacaagctccgacgaggcgggacgatgatgttcggctttgtcttctctggtcaccggcataatgggaatgtgggggcggccttgagcacggcggtcagggtcgacaaggcaccaacgtgcgatagtcagcgacgaacagtccacgcgaacgaacggcaagcagagagcagcaacttcggtaatgttgcggctggcgagaggttcgtgcgcggcttatcatgagacggtagttcgactcaagcaacgcataagcggcagtggtatggggctctggcatgggcataggtggcgatgcccgacgtgagcagagaaatagaccacacgtagcagtaaggtggaagaaatgcgagagcaggggaggagagcaggcttgagcgacatcttataggtgaggggaggagcgattcacgactaattcaatgctccattgatacaaatgaagaacaacgttactcaatcgaggaaacagatgttgtgaacgttattaatggcggcatcaaggtcgacaaaacgctttctcaggtcggcccgttccgccagtagttctagcccagcccacgaaggaatgaccttacgaggtaactggcccaaggtctcgcgcgagatcttcttgccttctagtggacccagggatatctgtcccgcaattgtgatgtttcttcactctgccacgggaatgatacgagtggacgaattaacaacggcaggcgaaggaggtcaaacggtggtggttgtgggctggtgaacagccaggtg

SEQ ID NO: 78277 - DNA, 377 bp, Zea Mays
caaaagtggagaataaaatcaatggtaatataggtaaggttccaacggaagggttgaagtaaaaataaaacattcattactagggaatgttataagggaacaacaagatcatcaaggatgtgcaaaataaaatgaccgctcatggatcgttaagaaataagggtggttaaggacatgttaactgaaatgtcttgaactgccattagggtatgaagataagcatgcataagaatataagagtatgcaagagattccaaggatacgggcataccaagacaagggaatagaaaaggccaaaggataacgacttaacgatggaataggaaggggtcttagaagacaagaagatcatgaacatataaactgaaatgtttaag

SEQ ID NO: 78278 - DNA, 420 bp, Zea Mays
aagggaaatcgctgaacacgctctgaacatatagccgatggctagcccggttacccaacggctccaatgtttcgacgaagaaagtgcaaggatatcaggaaagaggtcgcaaagctcttggcggccggattcatatgagagatacaccacccgacattgtcgcaaaccccattctagtcaagaagaagaatgagagttggaggatgtgcgttgactacaggagtcttaacaaggcctgcccaaatgatccttttcccctcccacaaatcgaccaagtcgtagactccattgtggggtgcgagctactctccttgctggatgcttactctagacgttctgctacatctccatgccttttggcctcaagaaagttggaccaatgtaccaacgatgtatgcttcagtgcttagccgatcaaat

SEQ ID NO: 78279 - DNA, 508 bp, Zea Mays
accgaagtgtaccctggtctggcacaccggactgctactatgaatggcccttcccatagtggcgacaatttgtgtcgtccctcccccgttagaattcggtggaggacaagatctcccactgcgaaggatcgataccgtatgaccttgtcatgatagtgcctcagagtttgctgataccgggctaactgaatcaccatattcaatcgttcttcttctagtatatcaacatcctccagtctagtagcctcagcttctgctatgttttcaaagattaatctcggtgtcccaaacttgagatcagcggtagcactgcctccgaaccatagaccataaataaaggagtgtttccatacagagcttggctaggttgagttctcaggctccagacaacatatggcaactctctgatccactttcctgcgaacttttcattcttgtcgaagactttctttctgagtgcttccaatatcatcccgttggctctttctacctccccgttggctcttgg

SEQ ID NO: 78280 - DNA, 655 bp, Zea Mays
acgagaatgacgagggatacaagggttttatggaggttcgagccaccgatgtgtaataaactacgtccttcttgaatgggttagattgcaggaaattagctaagtcctattacagaaggctagccaaaccttagagtaagaatgtgtggggatatctaagaagacagacatgatagtagtatatgtgtcccataagggaaggcctcccactcccttttctagaccaagagagaaggggttacaagtgacaggtggggctgatcgtaatgtatgtaccatcctgcattaatggacggcctatcgacatcagtccaaagttctatatgaatgccattggcgttgtaggtgcacgccctacccataccggatatcataggcgtcgtgcagggcgtgcctattgaacatgagaggagcagcaggatctccacgatgctacaaaagatatggaaaggaacgacgtacatcatggatgatcgtggtcgtagacaccatgacagatgaagagggtgatctggaacgtgacgacccatagtaatagtggcgaaggacccattgtggcttagtgtagcttcatccataccttaacttttaaaagattcataccttacattatattcacattagaagatctagcgtgttggatatgtagttgcat

SEQ ID NO: 78281 - DNA, 356 bp, Zea Mays
ccaagtgattcttgcaatttctccaaaaatcgtgccacaaatggtgctcctctgtctgatactatagtccttggtattccatgcaaacgaactatctggtcaatgtagatttccgcatacttttccgtcctgtgggtggtgtgtaccggcaagaaatgagctgacttggtcagtctgtccacaacgaccaaaatggaatcatggtgccgggaggtattgggcaatcccacgataaagtccatgcagatatcctcccatttccaacatggtatgggaaggggttgcaaaggacctgctgccctcaaatgactggccttgattctctggcaggtgtcacaatcggatatgtacttggc

SEQ ID NO: 78282 - DNA, 438 bp, Zea Mays
ctgaagcccagaagtgcgaaattgaagatcttcagaaacagctggctgaagcgaagttaaagtgtgcaattgccgaagctgaccgagacgccagtaactattggaaaaattattgggagaagacagttgtagaactttggtcttcaaaagagaaatgttacgaaaaatccatagagtgtgtgcaaaaaataaaatctagcttcgccaatgttggcgcattctctagcgaggacaacttcgtaaggggcgatcctgaaggcccaattgattggatcagcaacgatgctgaagcctttgaagaaattttgagtggtcgcggggatgtctacgccttctcaggtgccaggggaatcgtggctattttgcagaaactaggctgtgaccacgtgaaagctttggcccaaaccgaagctaccttatctattgaagatacaaaag

SEQ ID NO: 78283 - DNA, 559 bp, Zea Mays
tggccgacccaacatacggctagtcgttgcagccctgagacgctcacatgctgaagaggtattgccacagcccccagtgcaagtcgatcctcatgaacgcctcacatagcgtgataaaagcacaccatatgaagaatggcatcgggatgaaggttttgcacctccaactgatagtaatgaagatgcccacgtacgaagggatgtagggggagttcgaacccgcgttcgtaaaaaggacgcgagcacgaccacctcgtcgtccccgagacggcccacttccccctcgctctccagtctccaccccgagacatccttcggggggatgaaccctttgttctctagaccacagatgcgactttctcagatcgagctagctgggaatgacaccatagatgcggggagcaagttggaatgacgcaagaaagaagaacaacaagggggttcccaaaggaagaacacaaggatatggtaagcaaaactgaccctgagtgcactcttcctttatttatgcgactaggtaggggacagtcgtgaatgaacggcgaaggaaccgcccctt

SEQ ID NO: 78284 - DNA, 484 bp, Zea Mays
ctgcgccaaaattagtgccgccgccgtcctgatttgagtgcggaatggagtggataacgtcggggaggggtaactcgtacgtggcaccatctcctgagctcggccggagttactcaccggcggccgccgtgactcagtgaattctgccgcggtggcgctcatgccgtagttctccctcactgtaccttctaccgacgtggttggcatgcgctagtgatgttgtccgtggccgtgtggtgatcgccggaccgccacgactataaatagccattgggttcacggcgaagggtgatcatcgcaaacacagtgactagatcgaagtcaaattcgcaccgccccctccaccttctcccaaatcgtttgcgcacggtgaaagcacagcttcttacggcccagtagcctcaatccccaaaaccaatttcaaccagagccaccgcgacgccgttttcccccaaattggtctgccgcatcgcaaagaacagcc

SEQ ID NO: 78285 - DNA, 352 bp, Zea Mays
ccgaatggtttcttcaattcgacgcagtcgttcgtccacgtccgctcgctctctccagccttgtcgagcatctgcctccttccgacctcgtcaccaagttctttgtcacccatgctgggcccatccaccgctctgcctcgccctagaaacggaaaaggctccacctccctccctccccctccgctttctccatcccgccggaatctcacatccgatccatccacccgtgcctctgcgtccgctcctcactctccgattctagatctgctctctcctctgacctctgccgctccgcgttcgtatcaccctgtccgtcgcgccagaccccagatgctgcccaccagctccgccg

SEQ ID NO: 78286 - DNA, 787 bp, Zea Mays
gctggccgctaagaaccgagtttaccagctgagtacgaccaacggtgttgagaagcatggccacccattttacaatcaataagaaacaggtgtgtacggtgagaggggatcaccttttacaatcaatccaggggcctgggcagccatgaagcaatacatcagattttgaactggagagcatgtcattgatccactggcaccacagagtggggaagcccctagctgacataattttgtcgagagcactccaactcactgtgtcgaacgcttttgcaaagtcgagtttgataaccaaagctggtgtcctgcgctgcttgtggcaagtctggatcaattctaaagcataggtgaagtattctgaaatggaccagcctcggatgaacccagattgatcaggatgaatcacatggctgatctgatgttgaagcctggtggttagcatcttactgaggatcttcacactgcagttctgaagggatatagggcggaagtctgagggatccgaagcggtctctttttctaggataagcacaatgaacgatctgttgatcctgccaagatccgcaactctcgagtggaaagcttcagctagtgacatgacagtgccggcgatctggttccaagcagcaaaataaaacccaggaccaaaccaatatgggcccgaggtgctatctttgttcatacttttaacaacagtctaggcttcgaccccagtagggtattccgagtagagttcgtcaaacaacaagtgattggaagagattgcagcggtgcccaattttaatct

SEQ ID NO: 78287 - DNA, 577 bp, Zea Mays
tacctaccaaaggtattctcatgcagatctctctcacaacatttaagccaacagcaatagcctaaaagaagtaaagtcagatatatgttcatgcagtcttgttagctggaacaacacatagtatgctgaaagggggcatgcaaacctctggacgagaacggtcatgcacaaactgatttactatctgcttgaacagtggttcaacagcatctggaggtacctaacatttacacatacattttgcattcagaaaaaaagtaatgtaagtggaaccaatagttgcaaagcaatgaacttttgaagacgcgcaaccatatcatggcaagcctgaactgctgcagcgagtagagtcgtcacatctcgttgatgaggctgcacatggatgtaccaaaaattatacatgagttagtattaccaaactagttggtgtttcaaaggacgacacaaacaaaaataccatcttaaataacatacttgaacgtatctttgaagatacgggtagaagttcaacaaaaccaagtgatgcagcccaatggtcctcgcgattacttttagcatcatcatccttacctgcagt

SEQ ID NO: 78288 - DNA, 314 bp, Zea Mays
ttcccctcgagcgcttggaccacctgtcctgcaaaaaggctagccttaggaagtggacagaggaagaggagaatcagaaggcttctagaagccgcctacccttcccgcgtcgggcgactcttgaactggccttggtgaggatactctgaggcagggcgcttactatggtccatgatcaacaaaaggatcctccaaggactcagacagggcagctttccaatggggtgctattctcgaaggatgaggaggcgccaaacgattccaataaaaggagaaagcagagagaccatctacttatagcgatcagtagacct

SEQ ID NO: 78289 - DNA, 667 bp, Zea Mays
caagtatggattttctatgaattatacaaattctagcacttattttatatcaaaaatctatttttcaattcctttattccattttaagtcagcaccagactgggcctgaaattcagagaaacccagggggctaactcgcaagaccgccaagacatagtgaatagtcacacatggaccgcgggttgttttctggaatttacaggggttctttaacaaaactgacccgcgaaggggtatcttctattgtgggccggacgatccagatcctgcggcctggattagatcctagttattaaactctagcgctcgatatagccatcggatccccgatcaacggactggatcaatcgcgcgaaagggtatatccctatgtctaatctaagccgtcaaatgcgcatccaacgacccgctaaggctttcctcttcaccggccggaacagggcggcggacatgaaccacgacggcgaccaggttccgacgaactacgaattcggcaaaccagtggttcatatcgcaattaatttcacctacgcgaagcggagttcaaagcgaaattagtggcgaggttctcacccagaatattgatgcaggtgaggcagtccgcgacgatcagaggcgcggtgcttcccttaccgtccgacgagaaattccccgcgccgtgaagacg

SEQ ID NO: 78290 - DNA, 540 bp, Zea Mays
cttttctgtgatacccagtttgcaaagaagagaagttggaggttattctttttttttctcatttgggtgatgcgcattggggatttggattttgtggaaaatattcaccaataagacagtagaatttctttggttagacgcttgcgacggggtcgggagctgtcgcgtgggcgagttgggccatgaatgatccggcccattagcctccccttaaccctagccgccctcccctaatcccctctctctagccttggacgccaccccctctcactcctccacccatttgcagccgccacccacctcccctccatcaaaccctagccgcccctcctcaagcccttctctccaaggtgccattcctttcccgctcggatctacgtcgcgttggtgcaagtctccctgtggtttttggtggagggaagaagaagcgaggaaaggggaaggattcaaggtgatttttgtgtttgtatcttgtttaattgtgctgcaatccaatcgattatatgtttatctatgcgaatcggtagaggtgctgtccag

SEQ ID NO: 78291 - DNA, 301 bp, Zea Mays
gaagatgaggccttggagcttctagatttagatggggaaggagaaaccaggctaaggttcaagtcatggactgaagaggatataaagaatccacaattctcagttggacatgtttttgcatctgttattgagttgagaaaggctattgtagagtatagtgtgaagaatagggttgaaattaagctacctaggaattatagtaggaggttaatgaaagggaaatgtgatcttgggccatttctagttgtttttgtgattaagtgaccaactttgggtaaaactacaaaataggaagtttaag

SEQ ID NO: 78292 - DNA, 505 bp, Zea Mays
cacgcccgccgctttcctgccgtggcctccgtcggggttcctcaacgggtaacccttctgccttcaacgcctccaccacccatcgctcgcatgcgcgtcgatcccaagtgcgaaccccctccactctagtcctctactccctccatctactttctcctgcgatcaatgatcatcatcccgtcgccacgtcttctgttggctcgctttacagacgccacttgcgtcgcgatatttatttatttttctttgtcacctcgattgttagggtttacggtctgcaggtcggtatgccccagcgctcaatcgccaatttatctgcaagtctcagcacttgtggataatttggatccatgtggtttggtttcgttctaccgccgtgctctgcgctacaccgttaccttcgccttttgcttcgcgcattgcagatttggtgccgcgttgtagatagtttatgtttggtcgaaccagtttcttccatgcagaaaataaaaaatattgtttggac

SEQ ID NO: 78293 - DNA, 368 bp, Zea Mays
aataaacaatactagtagaattgcatgcatcagcaacgtggaacgatacatgtatgcaacgcaaaccaaatgcaagcaaagaggggtggggcagggttttgggaccgagaaaggcgacccagcccaaggtaataaattgcatggtgacatttgcgtgcaacaagcgtagctcacgcgcgcgctgcctgtctgcctcacagttcacaggctttgcgtgcgaggggtgtgggtgcctgcctctcactgtcacacacagcactggcctggcctccatagcatgcgttgcattgtgtggggagaagagtagaatgatgagccttgaaccgagcgatgaatcgaaactgcgcggatttgctttcccatcgtca

SEQ ID NO: 78294 - DNA, 530 bp, Zea Mays
gcaatggttcatgcccttaagatatggtgtcattatctactggggaatatatgtcatgtgtatacggatcacaaaagtttgaaatatatctttacccagttagagctgaatatgagacaaagaaggtggctcgagctaatcaaagattatgacttggaaatccattatcacctaggaaaagccaatgtggtggcagatgctttaagtcacaagacttttgtcattgtcttatagtaaaagcacctgacaccaccatatgtcaagaaatggagaagttgaatctggggatagtgcagcaaggaattttgacaaatgtgaagcttgagtcagttcttctgcaaagaattgttgatgctcaaagaacagacaagggtatgaagtacattcatgagaaaatggaagctggcaaggcagattgcttcaggaaagatgaccaaggagtaatatggtttaaagatcgcatagttgtgccaaaagatactatagtccgccaacaaatcttggacgaagctcctcttagtcgatattcc

SEQ ID NO: 78295 - DNA, 777 bp, Zea Mays
gctgagtcgagaatctttattggcttttctcggtactggagatctttttgaatctgaattgtctctgcctcgatgtggttctctggtacttgcaggcatttgcggagctgggacacatgaaacacattgtgaatatctgacatggattctggtagctcaaggcggtatgctgcgggtcccactctgctaatgacggggtaggtgccgacgaaacgcggtgctagttttcctttcatttggaacctttgacaccacgcatcggggagaccttgaggtatacaaaatctccttcctcaaatctgagttctctccgtctgttgtctgcataacttttctgtcgactctgagcttctagtaacctcttgcgaatcagggaaactttctctttggcttctttaacaaagtcgggtccctctagtgtcctttcccctacattggaccacattaggggggtctggcacttccttccatacaatgcttcgaatggtgacattttgatactggcctgatggctgttgttgtatgagaattcggcgtacggcaaactggactcccaattcctgtcgaacgttaacacacatgctcttagtaaatcttcgaggaccttgttgactctttctgtttgaccatctgactgggggtgataagcggtgctgaaatctaacttggtgctcatagcttgctgaaggcctttccaaaattttgaggtgaactgcgtccctctatctgacactatcttctgaggaataccatggagcctgactatctctttaagat

SEQ ID NO: 78296 - DNA, 742 bp, Zea Mays
ggggcagcagttgccctaggtatgcatttatcggcatatcatataatggctgagactacgtaggcctatttgttgtcgatgcatctagcaagttcacctctattgcgacatcacagggatggaaactggaaatagtagattttttgaatgcacatgtgtgtgttttcagcgtttcttctattcctctcgtgtgttgttctaactaatttcgttgtgattccaaaaaattcttagtagattgatcattactggaattacttacattactatcgtgtagccaaggtatgagggagtcgactttgatcttcccttacttgataatcttcgggtaccaatccaccggtgaagtgtgacaagaatttctcctctgctttttcatgcacccgaacacattgtcgcagcgcatcatcatcacattgcttcatgggatcttcaaaccactactactcattgatcgatagactttccatagccagcctaatgatgttacctagggagacattggtacaatctttggaatggtcgatctaatatatcagaaatgtagtcattcctagaagagtcaccaaaatttgtgtttggcgcctttttgggccagacactaacgaacccttggggtcctcactgtgggagcacggactgtccgtgataggcggtcgaactgtccgcgactacgcacagagatgtgttcctcctctatatgagcacagaccatccgcgatggcgtagagggctccatgaa

SEQ ID NO: 78297 - DNA, 933 bp, Zea Mays
gtttagtttcaaatcattaagtcttgcaagaatctctggaccactaagacgcttgggtggtcccctcgtcacaatcgtgtcctttctaaaagcgttcctctcgaacctgaacgggtgatcctgaggcaaaaagcatctatggcaatcgaagtaacatatctttccaccaaacttcagccggaagcataaagtgtcttcaccgcatatcggacatgttagaatcccatgacaactccatccagcaacgataccataagccataaaatcatgaatcgaccacaaatacgcagctctcagggtgaacttctgattcttataacaatcgtacgcctcgactccttcccacaaaactttcaagtcttcaatcagtggtctcatcatcacattgatctttgttctaggatgatccggaccaggtattataagacacaagaaaataaattcatatttcatgcaaagcgctggcggaaggttgtatggaacaacaaagacgggccagcatgagtaggacggtgcagttagattgaaaggcgagaaaccatccgttgccaaaccgaggcggacatttcgcacttcggcagcaaagctggaatcaaacgcatctagtgccttccatgcatctgtatcagctgggtgcaccatgacatcgggattctcacgtacgccttctttgtgccatctcatgtgtctggctgtattcttcgagataaacaaacgtttcaaccgaggtataagaggcatgtaacgaagttgcttacgtgctacctcggtcgtcacggtcacaccatcttcgttttgaacctctacgaatctaggctcaccacatactgtacacttcttctcattcgctatctccttccagaaaagcatacaattattgtcacagacatcgattttttcgtagtgcataccgagacccgagagcaacttctt

SEQ ID NO: 78298 - DNA, 689 bp, Zea Mays
taaagtgggatccaatgccccggttagcagcacaattccagatgtgtttactggattacagatacctgaggagatcctggattccaaactggtttggcgtggtggcaagactgttgctcaagtcttggtgaaatggtctggctgggatccatctctggccacctgggagacgaacaggtgatgaggcagtcatttccctgtgcgccagcttggggacaagctgattttttaggggggaatatgtcaacaactgcactaatgggttgcacaaggaggggttggaagctgatgcagagcagatcgcagggaacaagattgatgaagctgaagctggagcacatgacaacaagctgaggaggggtgatcggacaaggcagctgaatcccaagtactatggcgccaactggctgtaatagggcccacttagttttgattctcagtataaagagatacacctgctctattgtaaagtgacttttggctattggcaaacttcaacagaaagaaatagaaaaccacaaacctgctgccgagagaaatacagagagtgcttaacaggcggctacacggacacacggttaaaggagcagaggagacgctggaaattgaagaaacatagtgtcaaatgggacccaccactatgtgatcaagagagagggaaaaggagcactcaggctgggctgagtgag

SEQ ID NO: 78299 - DNA, 627 bp, Zea Mays
cccaactgcctccatgcttaaggacacaagctctcaacatatcctcaagcacttggttagctctctcagtttggccatccatttgaggatgatacgctgaactgaagttcaacttcgtaccaatgttttcatgaaggctcttccaaaaccttgaggtgaattgggatccacgataagaaacaatcttctttagtaccccttgtaaacatacaatttgagccatgtatataactatgccagctgagaaccgttgtaagtagtattgaccggaatgaagtgagccactttggtcaacttgtccatgatcacccatatggagtcataaccctttgaggtgcgaggcaacccagtaatgaaatccataccaatttcttcccacttccattcgggtacctttaacgggtgtagtagtccagctggtctttggtgttcagctttgactctttgacaaacatcacacacaaccacatgtgcagctacatctcttttcagcccataccaccagtacttttgcttcagatcctgatacatcttagtctaccaggatgaatagagtaatcagagtcatgggcttccttcaatatagtctcatgaagggtgtcaatttcaggaacacatatcaagttc

SEQ ID NO: 78300 - DNA, 781 bp, Zea Mays
gctcggcagcttctttagctcgctgggcttcttcttgagcgtcgtgagattctttttcattctttctaatcgcttcatcaaccatctcacgaccgcccttcatccacacatcggagtaaaatctcccgcctagcgcagaagcttcagccgaagggtctttggtgtcatccaccgagaaaacaaatcccggctgagctgcagtcttagtatgtttgcaaccggctttctctaagatcgccgcaaccccccgtgcgccagcgaatgcgcagaagtctcttgggtcacttaaaatttcgttaaaggcttcgacttctccgctgatccactggacaactccatcagggtcgccacaaatgaatttttgcttagaagaaaatgcccaactctaccaaagccgtctttcaatttcttagcacattccaaagatatttcataacacttttcttttgaagcatgaagctcatcgcagttcttttgagctctagacctttcgatcttgcaaatttcatgcttcgcagcttcgtcttcaaatctttcattagctttagcagctttctttttcagttcctccactttggccttatgtgcttcggcttgcacaacaagactagcctcgctagatttcagtttctccactaaggaagcaatatcttgtccttctcaagtgcttcttttctcaaggatatgatttctgaacaaaggtccccgagggctattttgcagctctcatctttcgcatatttttgagcctttaaagccttgctcagaatcaagccctgaa

SEQ ID NO: 78301 - DNA, 583 bp, Zea Mays
ttaaccctgaggtttggacttatgtgcaaaagagccacactctttctcaaatgcctaagtctgatttcagagataatgactcaactttggggccttgcaactttcaaattataggatctttgcccttgttcaccacatcaaaattatagcctaatcataggagaacaactttgcttaaaggtgtgagcattgttgttaaggaaaaactggagataatcatgcctaaagattggctgtcaggctggtttattctgaaattcagattaacaggataatgggatgaactttgagctcgattttgaatgggatctagtgactttttgtgggagcacattgtatcaaagttattgatggattatagctctacaactttgctgcagaaagttgtcattggtttcacataaaaattggaggaaatgaagctccaaaatgctctgtcaggctgtctgatggagttggccatggtacagtgttcgtgcagatcataccgccagcgcaaaatgtccaccgccggtgacccctccgccgtgatttgcgtcgtcggtcttaagattcgtgctcggggtgggtggataacatcgtg

SEQ ID NO: 78302 - DNA, 459 bp, Zea Mays
gtggcctgggtttaatctcgctcaatcgattctggaccgtccacccatagatcaacgctcccgatcagcctgcccgaaccggtacaccctcagtcgctagatccccgatcaagggctaagatttgttgcgtacacgatccattccccaccattgatttcaaaatctaccgctccccatgcgtcttctaccttatgccgctaccctctcctggaatacgtaagactacgccaacagcaagcgtctcggcccgtagacccggaggagggggggagttctcaccgttgaaggatgcaggggtggccgacgatgaagcatgggtctgaggcgaggcgtagattcagtgctcctctccttccagcggtcgtgcgagacctccaccgctggccattaatgtccgcgcggcgagctccaataatctgcggtgggcgcacgccgggatgctccccagccgtcatcca

SEQ ID NO: 78303 - DNA, 1037 bp, Zea Mays
agaggctggaaaaagagcaatgattcgtggtgataagaaagaagaggatccactaatcacaaaaagtgagatgagaaatgagatgaggagtctgattcaggaactcatggggctaggtatgattggtcccaagactttgcctatctcatctgaaataaagttggaactcgttccaaatgatgtgaagctagaagggagcaagaattacttgagttggtctaggagagtgcgagtgctcttaggagataaaggagtggagcactatttggaagagggttgtgttgaacatgttgataggctcagccctgaatggagggtttggtataccaccaactcggttattgtggcatggttgttagcatccatgtatttgtctgtgagtaagatggttgaagccatgcgcactgctgcacaaatttggaagaccttgagcaatatgtattcaagaaaggggaatgtgatgatgatgatggaaatccaaagtaaggcagatgcagtgaaacagacagggagaccagtggaacaatatgctagtgaacttcagtacttgtggggtgaactagatcattacgctcctctacaaatggtttgtcctcaggatgcacaggttgtccacaagtggatagaggacaggagagtgactcactttctaaagaatctggatccagagtttgagagcaggagagctgccttttgtcaccaagagagtcttcctaccatggatgaggctgtgtcagcaatgattaatgaggaaagcaggctccaggtaatgacaactaatgatcctgtgaaatcagcctatactgtaaatgatgatagagactgctataattgtggtgataagggacacttgagctacaattgtcctcatcctcgtggcagtggtgaacgaggtggtggaactcgtggagccacttgtagtacctatggaagaggtcatggagactatggaagggggcgtggtggccgtgccaggggtagaggtcgtggtggccctcgtgttaatgttgtggtcactgaagacacccactcaatca

SEQ ID NO: 78304 - DNA, 371 bp, Zea Mays
ccggacggtccggcataagaagccggatggtccgcgacctggccaaatggtccgaaggtatatccggattgcccagtcgtatatggtgttacgtgggtagtctcatacccagactgtctgtcataaagaactggacgatccgtgatcgggccgaatggtccagggctgtacccggacggatcggctatatatggcgcgacttgggcagtctgcgcatggactcgtgtggagtcggatggtccagcgtaatacgtcggtcggttcatgccatatccggactgtccgacgtaagatggcggacggtctgcaacatatccggatggtccggcgtgatgtaccggacggtccgtgatggggccgaagtgttcagg

SEQ ID NO: 78305 - DNA, 707 bp, Zea Mays
ccctgtacttattacggtgtaatgtagataactcatttacttagaatccaaattcctatccttagctagattgtacttttgtcttgaggttatagtcaaatattcatcaatcggtattagccagaatgataaaaaatgaggcatacgagtttctaataacaagctttgttaaactaatttaataaaatatgcgttggccaaaataaaatgtacaacaactttcgccaaaattagtgaaaacaagtcatactttaattagataaaaaataggctaaaagatagaattatgatctacttatttcttaagtcttatttcctttatattaaagccggtccaaaactcagcctttcagcctatccatgtcggcccgaaaacattcagtcgtccgatcgcgcatctacggttccacacaagacctcgcagccttctcgcgtcgtgccgcgaagcttctaggagccccacccccgcgcggaggtccacttcctctctcgcctgggcgcgccgtcgcgcgcacgccccacccctcgtagcttcaacccccgccgccagctcggtaggtaaccgcccaaccctctcccccggcgccggctcgacaggtcacacccaacgctcagggcctcccaccagctgaccagcatcgcccatgggcggttccaaaccagtggccatcagcgcgccagctgctggggataccaggaggggggca

SEQ ID NO: 78306 - DNA, 712 bp, Zea Mays
cgaatttggaaaagggaagcttgcggccggagaggtgggtgagtcaccgaagcgaaactactgtggcgttcaccatggcaatgaatcaggcgatagacgaggtatctacagcggtctactgcgatgtgttatcgctcccaaatacatggcgtccaggcggcaagcgtcgaactccggcgatggtcatctcgactggtcgcagggaaagtgggtacgacggctagctcacggcatcatccgcggtcaagatctttcacccgccacggttatccacttcagataggcacgaatcacggtggccggcatgaatcacggtgcaagctcactggcggtgacagattcactgaatcagtgatctggttcagttactgtacaatctgaatcacattcagcttgttctgacagagcaagtttaggagctcttttcacaaatttttatgtaataacccaccaatctatctgtagcaaagttgatctcctacaaaccatctttgattttattatattaacctcgatcaaacatccactggatcttatttgaaattgctctcaaagtttgtcccagttcactgtcagtcgagcttcagcttcagggatgactgacagcatgactttaggtccatttatctcccattttcatacagcaccaaggctcagtcatttaatcaaacttgtacccctatagtacctctataaacttattgcaataacc

SEQ ID NO: 78307 - DNA, 875 bp, Zea Mays
gcaattacttgactgagcttaaaagggacaaattgtggttcaaccgctggtcgtatgaattgattatgatacctgcaaactgaaaactatttatcaatttccgttatacgttatgctcgctaaaaaagaccccggaagtcacggaaaatcaacctcgctcctcttgctagcaggacagtaatgatatggtggaattaatcatggcttgccacaatctagtatcttctgctgcttaatcgctttgaaatgttgtcggggctaggcgcttgtctaaattatatttcgtatcactcttttactgtataacaccgatcaattctctattcataataaaaattgatacaaaacaagaatattgtacccaactgtttgttgcaggctgtagcatctactagcatgtcattctaattcttaatgtcattgaccacttaaatgtggcatgatcaccagtctttcaactagtatgttttggataaaaactaagcagtatttttctggatatttaactggacaactggtcatgaaaatattttgatgatcatggtggcgtatgtatacatatagaacaaaaaaaatgcaagttgcaatatctttgaaaagttttcggcatcgaataggtactatcacattcataatgaatgccaccccttcaagttcctagtgagatactactatcattgatttgctcgcattacatctagatctagcattaccgtgttgctatagtttaaatgggaatttgcctctagcaccttctatgaaccattttgctaatatcccactttcagttttgcctagattaaaacataggtaaagcctggattgtgtcaattagtagccactggtgaagtgcatagcaggaattggtggtcttg

SEQ ID NO: 78308 - DNA, 547 bp, Zea Mays
gtggtagttagtagtgtagtgtaagtagcaaggtaatataatgtaatgtagtaaccagggtgggaaaaggttgactcataatgagtcggctttgagtttgtgtaaccccctccgatatgaatgaaggaattagttgcctcaagtgatcaatgttttgccatttttctatttgcgcatttgaaagtttgtccatatgtccgatactgctagcattttagaggtaactgccgagtgatgcttgatgcttttgcttttccgagtagtgatctggcactttagagatagtgcccgacccaagaaaccccatttatactcgcgtcgacgtgcctttttgatttatgaaccctagcttcactttttctcttcatctgctcctctgcttcccctgaatttccgagcctgctcgtcctgccagaaagatagcgatggcccccaagcggaagaggcagagcaccactgttgcaatcatcccgcccatcgaccccaacagaaagcttccatccgctggtaaccacatgtctatcatctctgaatctgaccttcttca

SEQ ID NO: 78309 - DNA, 462 bp, Zea Mays
tgcgatcgtcgaaaagcggcaagcacgacagtaacaggatcatcggacacagagcaaaacggatgcgatgcgacagtagaacagggcacgacgagtttatattattgctcagggaggggacacatggaatggggtggaaagcaacctataggctagcagctagctatacgtacagcagctgcatctccttctaatacatacatgccgtgtccgacggacatgcgcacagttgcaatcggatgcccattattaccacttgtgctattgacgtgtggtatgggcgggatggaatgcatgctgtcgcctgccgtgccggtggcgcgcgatgccgtggaatggagtggatgatggatgtgggggcagtgggcaccgcactacagaggtacagactaccgcacttgcgcgtctgcgcctcctgtctcgtctttttgggcccggcctccgaatgtaatcagatactac

SEQ ID NO: 78310 - DNA, 434 bp, Zea Mays
gggtaatatattcttgaaatgtagtagattcaccaaaacaaaggggtaggcctagcaatcaaacgataaagctctgttctggcaagagatggagagtactcccagtgcacaatagatccatcagcattaaacttaagcaaagattgagttctaccagttctatctttttatttcttaccagggcaaagttttaggtgatggatcaattgcttagttctagaagaagatttagctgacaaggtgtgcttgcagtgaagtcaaatggcacaaatccttacctcgttgcctccctggttctcagtaacctcctcaaaatgcaaccagaccttggaggtgggacccctcctcctagagcgcttaccagggacaacaacagatgtgctagcatcggacgttgggctggtggatcggttgtgcgtctccgtcgtgcccgg

SEQ ID NO: 78311 - DNA, 434 bp, Zea Mays
cggccaggatcataccgacttactcaaatggatggcatggaagtggggaactcatggaacatagagcatcttagaaagttttacccttagcaaggcctcaaaagctctcgaagcaacattgtactctataatcggggactccatcatcaataaacttttcgttttcaaaggcatacagactcttgactatcgattgacttcgatttgattggacttgaaatcaacatgctaacttggcttagggtgaccactataccctactgacgtagcaatcggcttaagtcggcgacgacttaagacggtgcaacatgctcacgcttactcggctaagggtgaccactataccctactaacgaagcaatcatcttaagtcggcgacgacttaagacggtgcgacatgctcacgctaactcggcttagggtgaccactatac

SEQ ID NO: 78312 - DNA, 528 bp, Zea Mays
ctgcgccagtgaaacttcccttcctccggccgccgtgcgtctcatccaaattcacggccaccgcccactaagcctataaattaagcccgccgcgagctccgtaagacagtgcagtatccagctaccacgaattagcctcgattgttcgccagagctcacgaattttggagtctccccaattcaggtttccgccaccgtgaaaccagtctcaccgcggctagcgtaatccaggtcagcccccgccttctgctccctcgtttgagcattctcataacttcgtgatgcttgccgaaccaccaaattggaccgagagctcaccaatcaccgggaacacgaacaaaggtccatggccatcactgtcctcgcgggcagagcttggcagatcgccaaccatgaaatttggttggggaaaatgaccggggagggttcaattcggtgttcgccgctcggcagcgccagtcgttgccctgttcggccggtctacgcgctcgccggaactctgtcgcgttcgccgtcgtcgagggtctc

SEQ ID NO: 78313 - DNA, 711 bp, Zea Mays
gaaagcatcgtcatgatgatccttggcagagtctaacaagcctagtggtgtgctcctcctcgacctttgccttggcagcctcgatcgcaatttccatggatgagggtgacgccctccgagtccatgccccccacaccaccaccacttgtcgtgccacctttgctcgcaacatcagcatcttcaaggcgcctaggtccacctttgcacttagctcgcctgcagagcgtgcgtgtgtagcatcatcgtctacagagccttctcgtagatgctcctcgtcttctctgagttctcctctgaattgttgttcaatcactggtttttggcaaattgtaagggaatgcgctagatacatctgccatgtaacctagaaaacttacaagtaagagattatggatcgttatccctatacacgcaaatcaacggaagaagagttagagtagcaatctaacgtaggcgcatgtcgttggagagaaagtagtcggtcacgataatctccttctctatggttggtcagcacaccagtcatagccgcatcttcatgtagtccacatatacggggaggaacaacgagagtcacgcgatcaggttcaacggaagtggcggctagggtttacacgtgtgatgggataatgtaaccctaatcccttttcatatatttatagagtgtgttaatgggttgtggcccattaaacctataatctaatatgagtt

SEQ ID NO: 78314 - DNA, 837 bp, Zea Mays
aatctctatatttgaacaaaccaggtgatacaattagaaaattctctcaaatgatgtattttccactagatgttcgtacgttgaggccactgtaataactttaggttctaactgaagcttaccatgtgccacatattaaagattatttgatttactaagatctgagggagatgtttgggatgattagattgttactagatgtttctaggcaaaatcgtagaagatatgatgcacgctaaatgtttttctaatcatgacagaggcacacatccttgctgcagtgaggagcgtatctatgggcccacgacatagcgggaactacgacactgctctgtggtgctccattgaagacaacaacaaaaaatagagtatttggaacattaatgaattaataagattaccttcttcctcgggttgtattaggccaaatatgcttataggctcttccatgttcgtgcaacaccttttgagccggctaaaagaatatggaagacttgggctcctcctcgttgtaaatacttcacttggctggcgtctctcaaccgatggtggacagctgatcggctagctcgtcaaggaatggatcacccgaaaagatgtcacattttgtgaccagcaggacgatatagtgcaacacaatccggtgacatgtgtctttgcgagggatgtgtgttttagaactctaagcaagtttgggctgcagcatcttaccccacggctgatacaacggtgttccaggaatggtggggagatgcagaaaggaatgtgtctaagccaaagaaaaaatgttttaactccattgtgagtttagtagcctggtaaatttggaagcataga

SEQ ID NO: 78315 - DNA, 280 bp, Zea Mays
ggggacggctgacgggagtgtccgtggtgacccatgttttatttcttgcggggtcatggcctccgatccatatagaaggcggaaaggggtgaacccagttgccctgcactcagtcgtgttcagtgcccagaccgcttcaggtaacaggtcggcccacttgccctttttgtcgtcgaggagcatcttcttcacggctgtgaaaattttgccatttgcgcgttccactactccgttggattgcgggtggtacactgaggcgaaggcaagcttggtgccaatg

SEQ ID NO: 78316 - DNA, 1051 bp, Zea Mays
gtggggactattggtccaacttgcattgattgtggctgaatatcaggacatgtattgctattattatcaaattctccttcaacgtagtcatccatcatcatgtttgaaaagtatccattccctggaactacatctaaaaaatggtactgtaaagtcaagacaggtctactatgtctcacataaatggtacatggtgactgcaaatgcaagggaacaagttcaggcaggaagccaaccttctggacaaaacatatgctcaaacaaagtatgaaccaaactgagacaactgaacacactaagttatcttccaaagtaatctgagcagaggatgttgggcacatgtttatggattgaaagaaagaaaaagttcttgtctatggcctatgggtgtccaggtcacaatggctgaaccttgggctaagaagaccatcagtaaagagtcattatgattcctcaaaaagtttttgctcagactcacagtaccagggtatggaacggatagagcaactttagaggtggacgaccgaattcaattcactagtagctcaaatatgcaaattaaagaaaacctcagcttggagtgcaaaatcagatttgggatgcaaggttttcgcttggacttcgcttgagcagagtttggtcaggatcagatcaaataccctgcttgtgtagaattttatgaccgcaaaagaagggacggacagagcaactccaggagccaagcatgtgaaaaacgtcagccccaaaaccagcttttagggatactgtagctgttttcataggctaaaattacttgcgcgcacagcagctccctacaaaattatatattcatatgctcaaacaaagtatgtacgcacaatttcttttctttctatactgctataagctacctattcatttactgaacaataaggctcactatattgaatcaacaatatgcagctcgttgaaattttagactgcatcacacttgtgtctgaccactatcaatgagacaagcttcagttcataccttccccttggccgaacgatgaaggcaactcgtccctgc

SEQ ID NO: 78317 - DNA, 504 bp, Zea Mays
cgcgaccaccgctgtcatgacgccgtttaccctgatcgtgacatgccatacgccatcttaccacgtcgtagtaagtcatggtggatggccatttaccgccctgagtccataccccactgagcgccacggtagacgagctccggtgactcaccctttcatcaccgtgagctccccttcgtccaaaattcggagcaaccgaagccggcctctataaattgagtgccctccttgttccgccttcttgttacgcgctcagtgcaccagtcctcgcttcaatccctccaccatagcctgaggatttggaatttcccccaaatcagtcgctagcgccaccgcgagacatttcgtcgtggccagagccctctgaggtaactacggggagcatgagagtgttttgagttcccttatgtgtcgcgatgctcatcgacccgcccggttagactctaccgtagcatgatccccggaatgctgtgtcgccaccgtggaatgccgtggcggacactc

SEQ ID NO: 78318 - DNA, 462 bp, Zea Mays
tgggtagtgtattaatagaacacataactgggtcaggcccattaaggggacaggtagctaacagtttcaactcctggtggtgccgagcatctatagccttgtccaaagaggaggaaagggtttaatttcctggtgcctatagtggcctgggagctatgaaaacataggaatctgtggtggctaaagggcagttatggcacctggctagggcttcagccttccaggatctggtcctaaaaactgaaaccaccaagggtcgtttttgggtctgtcagtatgtgtgggtttgttgttctatttaatgccagtgtgcctaaacccacgaggggatttctatatttcttctcaaagaaatgacgtgcggttctcctacgtggtttaagaaaaaacaagaagtgtctaatttaaaactagtaagatacattaacaaagtttaggaatccaatattttataatatttac

SEQ ID NO: 78319 - DNA, 315 bp, Zea Mays
tgtggagaaggtggatctcttactggtggcgtagacaatgggtcaccaagaggatgaggaggagaaggtgatggagccctggattgcaatgcttgtggccgagacgatgggtcagaaagaggatgagcagaagcatgtgaagtttgaggtgcagatggatgtacaataggaactacaatttgagaaggcagagacgattaggctggggacgacgatggcagtggtggatcaaccaattcaacatcccttcgaggccaaaggatgaaattcttgacagcttgtccaggtgtctcaataccttcgggcctagggatg

SEQ ID NO: 78320 - DNA, 302 bp, Zea Mays
tgtaatcttcttcgggtcgaaagtctcggatttgggttgatttgatcaaccgcatgagattttcaatggaatttccatacatacgatgcatggaatttccatacatacgggaccgccgtggctatctgctgtagtggcgaacatatagaaacgtgtttgtctaacctgtttttgcaggacatcttgtgatcggtatggctattgtgtgtatatgatgcatattaatgaattattcatgacctgcgtgtcgtgaccagggcaatacggctggagccacatgtattgtccaaatttaatgtaat

SEQ ID NO: 78321 - DNA, 993 bp, Zea Mays
gagaatgaggtggggtgttgggatccgttcgtacccttgaccggggagtgggaatcgataagggtttgccaaaatccactatcccaatgttgtgaggcgaagcggtgcccgaagggagggccatcggcatcttcaacagggatagattgacgccccggtgccgatcctagtgtcgacagaattccgcgctcactgaggcctctaggatgaccggcgaggctgcacggtcctagatgtggccagggagactccagcgaaacgtggatctgctcaatggagtactgcaggtgggcgatggatgaatccacccgaggacgccatccgtcgagcaactggactgcagactccagtgccgtgacatagaatcctgcgtcttcctcgatctggcaaagcctggactcggtgttgacatccgacgcagtaaggtgggcctccatgtcagcacggatggactccgacgggttggagaggcaccgatctgcttcagcgacgtgggatttgaggccgccgacccgagacttccacttagcctcgagcgattggaacctcttgtctagttcggcgaggagcgaacaagtttgattctccagtgctagggtgagatttgtctctgcaggaggagtgtgtgacatgtttgtggcaagggatccacgctctgataccaatttgttagctacctacggaaggaaggaagaaatctgggaaggatacagaagggaggaagagttctgggaaaggagggagttcatgagaaggagaagaaggtagacgaggatgacatttccatagagtttcagatagtgttcattacaagcataatccctgaagacagacatcatctcttacatatactccacacacacggggtcccactaggcagactaacaaatagataaactcaccacacagagacctgcatcaagcccactccgaaccactcgtacgaacattaggacgacgcttgcgaactcctcggtgagtggtttcctgtgt

SEQ ID NO: 78322 - DNA, 653 bp, Zea Mays
cggaccccataccctgaccgaaccgacagcaagcacatctaatcgcagccgtacgtgtcgtgatcgacgactagggttaactctggcgaaccgttatgtttggatctaatccagtatgtccatttggagatctacggctatactttccttctcctacctctaaccgagccgagcgatcctatgccccatcacccgctgcacctgatgccacacgatgcatggatcctggcgaaaggaatatggtattcttaccggtgatccaggtgtagacgacgccggtcgaagagaacaggaacgcacggccctcccacactacgtcgacaaggcatcaagagtaccctgccctctagggagttatctccaggttcgctgcacaccgggagtcctttgccctccctctctccttggttcgcacagtctactcgacgacgcagcgatgcacaggccccagacaccgattggacagagctacgcataaaggatggcgaacgcgtgcaacgaagactcaccggcatggactcgacgctgatcctcggccctggtgcaggaggccccacggcggcttcactatctctctccatcacggtgatgcagagcactctaccacggtggggcccattcggcggaatcccccacaccggtgaggaatccac

SEQ ID NO: 78323 - DNA, 395 bp, Zea Mays
ctgggagtagagcttgtctttattgtctctagtgcatctagtacgttgaccatccttttcctcttaggggtcgctctaagatctttttgtgccttcggcactgccacttctgccgaagggcttgtaacttctaatatctttgttcctttgactactatctcttcaatattatcggtcttcggctcaactaatttgaccgaggatgccttcggctttgcagccggctcttcaatcttctgcgtaagcacaggttctttggcttcagtagccgaagaggtctcaccgccaaattcaggcactgtggccggttcgatatagcgcggtcggtgagtaagaaccttcacctatttcctcttcggcatgggctcgcttggagcagctgaagcatcatcctt

SEQ ID NO: 78324 - DNA, 371 bp, Zea Mays
gaccccagcctggcgcagtcctggcatcctcggccccttcactcaggcccaggcgcacattgcgctggcccccgtccggtactccgacaaccctgctccaccaatggcagagcagggcggctgggatcaggctggcctcatagccgcactgaaccagatgtccctccaggggtcctctccttgggtcctcgacaccggcgccacaactcacatgtcgtcttcggctggtatactcctgtcccgtctcccccctccctcattaggcatcacagttggaaatggcaccaccatacctatcaccagtcgtggcacatccacactctcctcccccacctctacctatcgtcttaacaatgttctggttgcacctg

SEQ ID NO: 78325 - DNA, 374 bp, Zea Mays
atgggatatctgaagcttgaggaaggcctttcggttatgtcgaaggatgatcttgctgatagccttgcgtacaacagtataaaggtatagaagttaactttaaagctggaaatgaagtatttcagtgtcatgcttaattctttctttttctttgcagggcttgattcttagcaatgccttgagggcacaaaagagcgccgaagatgaaagttgtacaatagctctcagcaagtaattgagctgagaaacgaaggtctaaagaaagacaaaactttgatttcgttggtgagtaaaatgaatgaagacgaagctaaatacaatactcaggccgaaacccaaaaagccgaggttgaagaccttcggaaacaactggc

SEQ ID NO: 78326 - DNA, 526 bp, Zea Mays
aatctcccagcttgagaaaggaaattagaggtacaggacagtctcttttcaattctttggataaggggtaaaaaatggtgtagtcggggttttgagaatcctagaggaagtccaaggtaagtgcaaggcattgatcctatctgacagttaaacgttcttgagagaatctctattttctccgggttaacattgatcggatacatacttgatttgttgtaattcacactgagccccgttgaagttgcaaaggaatttagaactgctttaagaaaaaataattgctttgggcaggcttccattatcagtaatgtgtcatcagcatattgaacaatcgggaaatcttggccacaacgttcagtcaaaggtaactgaagcaattcaggtgcctggctttattgataatactctggagtagatctgctgccaagacaaacaacaaaggtgagagaggatctccctgcctgacccctcgcttgcaatgaaaggttttccctggtactccattgagtagaaccgatgacatgcc

SEQ ID NO: 78327 - DNA, 663 bp, Zea Mays
ggatgtgcatcgactacaccaacctcaataaggcctgtcccaaggactcatatccacttccacgaatagatcaaatcgtggattctacctctgggtgcgacctcttgtccttcctagatgcttactctggttttcatcagatccagatgtctagacaagataggaagtatactgcttttgtaaccgtggatgggctctactgttatgttgtaatgccttacggtctgaaaaactccttaccaacatttgtacgggtgatgagtaagactttcggggacctgattagggacagggtagaggtgtacgttgatgacatcgtggtcaagactaagagagggtcgaccctagtggaatacttaaccctggtcttcgacaagttgcgggcaacacgcacgaagctgaacccggacaagtgcgtctttggtgtctccgcagggaagttgttgggattcctggtttcgcaccggggcattgaagcaaacccagagaagatcaaggcaattgaggcaatgaggcctccggcccgcatcaaggacgtccagaagcttacggggtcactagccgcccttagccgcttcatctcaagactggctgagagggcactacccttcttcaagctattgcggaagtccaggccattctcttggaccgaagaggcagaat

SEQ ID NO: 78328 - DNA, 451 bp, Zea Mays
ggggtacagtgatgacgatccagtgtgtgccggcagcgctgcaggtagattagatataagcgtctgccccgcgtattagaagagaaaagacgaacacagcgaaacgttaatttcacagttgggccctgtactcgtaggttgtggcttttcggatggctatatgggcttccattgtgacctttgttagcaattttcgctagcagtagcagcagtggggtggtcctctttccacttgcattgttgctaaaaagacaagttcgacttcctaactgtccgtttgcatgcccacactatgaaatcgaataatgcatgcaatagtttgcgtaaatataatggtggaataaacaacagtattttagctattatttatttattggtattcagtttttaaagcttcttgttttgtctcatatccgatttaagtctacctttgcggtgacaaaacaacgaa

SEQ ID NO: 78329 - DNA, 1106 bp, Zea Mays
agcatttcctcagatcaagcagaagaatgcaatgttttaagccagccagagtcagactctaatgactggagggagcccatcatcagatatataaagaatgaagaggaaccggatgacaaagccacaacagaacgcatcgcaaggcagtcagcccactacaccctcattggggatgcactgtacagaaggggcgcaacaggagtcctcatgaagtgcattccttcagttactgggaagcaactgttagatgagatccacgccggacagtgcgggatacacgcagcatccaggactctggttgggaaggtcttcaggtctggtttctactggccgacagcaaagagtgatgcagccgagttagtctagaggtgtgaagcttgccaattcttatcaaagcagcaacatttaccagcacaacaactgcagaccatacccgtaacatggccatttgcatgcaggggactggacatgattggacccttcaagaaagctcaaggaggatacactcacgtgttggtcgccattgacaaattcaccaaatggatagaatacaaacccattgcctctctgacttcagccaaggcagtggagttcatacaagatataatattcaggtttgggataccgaatagcatcataaccgacctaggatccaatttcactagctctgaattctttgatttctgcgaacaacgaagcatccagatcaaatatgcatcagtagcacatccaagggctaacagttaggtagaaagggctaatggaatgataccggaagcactcaggaagaaagtctttgacaagaatgaaaatttcgcgggaaaatggatcagagagttgttgtatgtagtttggagcttaagaactcaacctagtcgagctctgcatggaaatactcctttcttcatggtctatggttcggaggcagtgctacctgccgacctcaggtttggggcaccaaggctggtcttcgaaaacatagctggggcagaggctaccagattagaggacattgacgtattagaggaagagcgattgaatacagtaattcagtcagctagataccagcaaaccctgaggcgctatcatgacaaggccatacgaca

SEQ ID NO: 78330 - DNA, 1535 bp, Zea Mays
gcccaccaactttccgggatggccttagcctggtgggacaccttcaacttcaccatcagagatgctacctgggcggaatttgaagcagctttccaggagcaccatgtgccccaaggacttgtacagcttaaggaggacgagttccgagaactgactcaaggcggaagatctgtcagcgaatatgtgcacaagttcacagagttagcccgctacgcgccagaggacgtcagtaccgagggcaagaagatggcccgtttcctgaagggactcaggcccgaactcaagacaattctggctagccaagacttcctcagtttctctcacctttccaacaaggccatgcaagatgaaagggcaaaggaggaagaaaaggggcatctcaaaagaaagttccaggttctccgggcacaacagcaggaccggcaccaaaagactcgatcatttgggtttccacccaaggggccaaacttcagtagaccagctggacccaccccatcgcggttcagccagcagagtcagagctctttccattctccctcagtggcatgcaaccaacccccggcgaatgcatgttggcactgcagtgaacccagtcacttcaagaacaactgtccgcaactgaagccaccaggacccgcctactccaactcggtgaatggccccaagaatacctcggcatccgcccccaaggcgccctcctccgtcagccagcagaacaagaccccgtacctaggaagggcacgagtgaatcacgtcgatgcccaggaggctcagcaagctccgggagtagtgctcggtgagttccttgttgaatttactcctgctaccgtacttttcgattctggagcatcccactctttcatagccactagttttgtggaaaagcatggcattccctctactcctctagagattcccttggtcactcgaaccccagggtccgaccttctatgccagctcaaatgctcccaagtcagaatccttttaagtggggtagtattcttggcagacttaaccgtcttgccatccaaaggaattgatgtgatcctagggatggattggctaactaaacacaaaggcataatcagttgcgcagacaagacagtcctcctcaccgaccaacagggaaagtcagtctcttgtcaggcacagccacccgccagtgacccaatgatgttcaatctagcaacagaaagtatatcagtggtagaagaattcatggatgtgtttccagaagaattaccaggaatgccaccagaaagagaagtggagttctacatagatctgatccctggaacggcacccatcgcaaagagaccataccgcatggctccaaccgagttagcagaactgaagcttcaaatcgcagatcttcagcaaaagggatacatttgtcccagctcatccccttggggagcaccagtcctgttcgtctctaagaaagatggaagcatgaggatgtgtattgattaccggccgttaaatgaagtcaccatcaagaacaagtatccacttcctcggattgacgacctctt

SEQ ID NO: 78331 - DNA, 438 bp, Zea Mays
tcatgactcttcaatcctaagactcacacaatagataagttcaccccctactcaggttagttgcatactcatcaaggaacatcaacatcttgatccattgcagtacttccttcctctaggccctgctgaggacaaaatcggcctttggccttctccatgtctttccaccactaggcaacttcatctcttggtttggtctatcacataacgctgccagatccactcttgcctttacattatcctttgacttatcaggaacgtccataattgttgcccaaagtgcctcagcgacattcttttcagtgtgcatcacatcaatgttgtgtggaaggagcaggtcatcataataggggagccgagtcaagcccgacttatgtgtccacatatgatgctcaccatatcccacaaaaccaccttctgagttggccacgaggccat

SEQ ID NO: 78332 - DNA, 333 bp, Zea Mays
ttcggccaacgcctcctcgcccagtccgccggtggagcctcagccccaagtaagcaccgggtaggcaccgccgcgcctgaggacgtctagggcccggttgcggtttcattgttttggttatcgcgacttgtgttgcttatcgttgattgctgtctttcttcgtctgcatgcagcacatggaaatggaggggctacaacattcgctaccagcacgctgggacagcaggccctgcattggttctggttcatgggtttggggcaaacaggtgtgtgccatacactgataaacccgtgtttcagtgtttctgtaccatttctgtctccaaatctgct

SEQ ID NO: 78333 - DNA, 938 bp, Zea Mays
ccctcactccctttgaccagcttacaacccttgtggacattaaggagtatttcataggtacatagcatgaatccatcctgcattttacacagttgtaccaaatgctctctcgtcactctatattgttatgtaaaatagatgtcattggcgcagtcaccatgatctcagatgtcgcaaccattcgtacaaagatgcgccagactcaaacagcaaagagatccatcactatacaaaatgagaggttagttacttacctatgcagcaagttgttttacccatgaggttatacttgtgactcgttttaatcgtgtttgtagctgtactccccttgaggttgtgctgtggggtgagcaggcaacctccttcccggctgatcagattagtattgccggccaggactcagtccagattattatctttgttggtactattgctagatcctatgctggtatgtttgtctaaccttgctatttacacttctattaagactctatgtttacccaaggttccaaacctttcaggtaccacttcgctgacaggtggatcgtcttgcaaatggtacgtgaatccgcaggttccagaggcaacaagccttgcagccaggtaccataaacacgtcacccgcttcccttgagcgccaaaaaatataagtctaccctttatatgtccagttcccttgtctcctttttagcttgcatcataaaaggagcccaattatgtctgctgctggttcgacgcagagtgtgccgaggatttctaccgctgagcataagaaagtatctgaaatcaaacacctgcattcattcaagcatgaggtggttcctttcatactaatcgactacatctttttatacactcttcttatgtgcctaagagaacaatgctaacccctgtactgcctcatttaactgttttttagaaagttgagtggttggtaa

SEQ ID NO: 78334 - DNA, 284 bp, Zea Mays
ctaagactacacaacaagtaaaatctccatcagccacacctgttaaatctgaaataaagttgaatgctcttgttttacttgctacacgtgctgattttgatgatttacatgaggctcatgtgccctgttatgcacttgtttgcttgtgtatgcttgtttcgcttgacgatgcaccgtctttggatatacccccttctgttaactgtttgcaggagtatgttgatgtctttcccagggacttaccaccaggtcttccacaactccgcatcgagcattagatcgat

SEQ ID NO: 78335 - DNA, 941 bp, Zea Mays
ttggaagttcgtgataaaccggcggctaaaatctccacaatcgtcgatgtagtgtcgaggtagatgtcgaagccattgcagcgtgtcctgccccaggacaatgggcaaggtatgctagcatgacgtcttctgttgccccagtagctcgagcggtgatggtgtagacgtccaaccagcccctaggtcttgcttgggttcgtatttgtcgacgttggaaactttgaagttaggaggccattggatggcacagagccgggggtgagcgtggatactccgcatgtttcctcctatcgatgatcatgctgccagtcccggggaggggagcgagtctcatgtcacctcgaccgtccccggaccggactgttggtggaggctgccgccaactcgatcctagttacacggtcacgtgcttgtgtaccatgatcctagtcgtattccttccggtgcgttatttcattttcatgtcgacgatcgcatgaagcactgacattgctccgcgcgtctcattggttgttgatggcatgacatggatcgttcgaggatgggcgaggggtagaagatgattggccgcttgagtgagcactcgccgatagcccttcacgtctagggttcgcggaggccaaaggctatctacgctaggaccccaccaacctcgcttggcatgttcagtgcctgggcgaagtcggggtataggttctgggcgaggagcggattctcccgccggagcctagcatcttgttcggcttgctctcgctcgcgtttgtgagcttggcaacaatcgcgacggtgggagttgcgtcgttctcgatgtgttctttcatcagaggtcccccatttccggagcttcatcctgagagacgggctgagtcgggtccagttccccggcctcgtggtgtcgtcgcacgttttgacgcctatttcgtcgtcgtcgtgcgtcgtgc

SEQ ID NO: 78336 - DNA, 440 bp, Zea Mays
tttggatttaattcataattatatcagattgttggactacggccactaatatcacaaagatcaggggttgcttataaatttccagggcacgaatgaaattaatctgtactagctgtggacgacgggtttattttgaaattctctaggggttcatttcaaaaaatacccgcgacggctagcttgggatccattctggtccgcccaaccaaggatctagggctcagattagatatcgaagaggtacgctctattggtcttcagatcgtagatcagcagtccacattaaatcgcaaactggtatgcaatcagggccgttcatcatcaggtcaatgatcgtgagctctaatcctagccttcccgagctagatcgatggtcaccaaggtctggtcactatcacacccaacgacgacgacgctaaagcgtgggcacggcgattccc

SEQ ID NO: 78337 - DNA, 563 bp, Zea Mays
gaaggtgggataggaggagcagaaaggggagcaggaggagcagtggaagctagagtagtggaggtggtaggaatggctgaggtggtggatggcgtaggagtgactagagcgggcgaagtgggtggtggagtggtagcagtgacgggagtggtaggtgtggaggagcgaggccgagaggcaaggcgacgaactcggtaagcaatctgatcggaaggaatctgtagctaagctcctcgctctgcctactcaatgactgtcgctgctgctagagctgctcaggttgctctatctagacgccgcttcttgtggccttcctgctgctctaagtaaaccgtcttccccttgacctgcctaaaggggcgaggagggtcctcgtcatctcctccccctagcgctgacacattcttcgtgcgcggcatcctgactgacgactacaaatgagagagagagagagaggctaagcaccagaagataacagtcgataggatgacaaaagaacgaatagctacctggaaatctcacacgagagggagagaatccaggcaggacaggagacggctcac

SEQ ID NO: 78338 - DNA, 450 bp, Zea Mays
gaaacaacgcactacatatctagtacatgttcttctagatggcactagaaaacaagggcatgctttggacataaactttctaaatccaggtttctcaccaaagcaaaatggcaactcatcttgtattaccatctcggcaaaagcaacccttagtgtgccttgatcaaacctccacgtgctaacaccttcatgttgagttgcttgtagaataccttgagatggatctttgttaaacttatttggattgcgtttgcaagcaaccagatgcatcttcaatgaagatgtgccatggcgtccagcctccaccttcatgttttgatggcaatatttgcacttagcatgcataacaatgtctttatcatcctttatcttaataaaatgtcgccatacatctgaccttggtgctacttccttcctacccccatccttagtcaactcaggttcctcttg

SEQ ID NO: 78339 - DNA, 433 bp, Zea Mays
ttttagaggtaaaggtgtcattaaaatattggatggtcaaattcaaactcaaaaaggtaattctattagttcaccatttgcattagagtgctctagtgttgaagccgttatccactaaataatacatattctttatatgataaagatattttcttttacatgaatattccaggactagatgttctcaaccagtactagaagacaatggtgacactactattcaaatacaaaccataaggaggaggaagatctcagacatcataacattaatttaaaggggaaaattaagccaatgattatgtaggaaatatattgttactttattattactgatgaattatgttgattcagttaccatcagattgtttcatcctttctattcgttaaagtcgtcattaaactaaaatagatattttaattcttgtggttgctg

SEQ ID NO: 78340 - DNA, 767 bp, Zea Mays
tttttacataaaaatcattttataaatgattttacaagttttattcactgactggactggacactaatttcagagaagttcaggggtctaacacataaaacgtcttaagactcagaatcaagccagatggacggcgggttgattcataaaaactttaagggcctctctgcaaaatcgttcggtcgaaggggtatccgcaaacctcggccgttggatcaccagccgagggcacggattagatctggagtgcgccgaaaatggtacgcaatcctggctgtcagatcaaacatcgacggcgcagacacaattaaggcgtggtccgatctacaccgcacatccaccgatctgtggacacgatccgatcccacgaaaaggtactcccaaactaatctctaccgttgaacgagagtcggacgaccctgaggtaaacttcccctgagatctaatcttacccctccgtttaacatccgacggcttagcttcactcgacgcatcagcgtggatggatacgatcttaaccgttgactcatggatctggggccctggcttgttcttcttcctgcgcaccacaggacagcacctagcccacccgaacggcggcgcccaaccccggcgatgacccgcccgccggtgtaacactcccagtacatggcttacccgagctacgcgaaatggagaactatggcatgattcttacctgtgttgtcgcggtggcggatgttcgccatggcacaccgtgacggcgctcacaatttggcagaaactgc

SEQ ID NO: 78341 - DNA, 529 bp, Zea Mays
atcatgtgtacctcaaggtgtcaccacttcgtggaatgaggagatttaaagttaagggcaaattgtcccctcgctatattggaccattcttgatctttaggcgagttggggagatggcatatcaactcgagttacctgctagtctatcagatgtgcataatgtgttccatgtatctcaactgaagaaatgtcttcgtgtccctgaggaatagttaccaatggaaaagctcagtgttcagggtgatttgacttacacggaatatcctatcaagattcttgatacattgacttgaattacaagaaataaggtgataaagatgtgcaaagtgcaatgaagtcaccatggagaagatgaagcaacatgggaaagagaagaagagcttcacatagattttccccatcttttccctcgttcttcctaaatctcgaggacgagattcttgttaaggggggtaggatttgtaataccaatttgtaagatataatataaaaggagagaaaatttatttttcctttatttataagtgtg

SEQ ID NO: 78342 - DNA, 693 bp, Zea Mays
gcctaagaagatcatgttagactagggataacaatttacttctcggttttggcagaagttgcacgagtgcttggacacacaattgaattttagttcggcctaccatcctcaaactgatgggtagaccaagagaaccaaccaagtactggaggatatgttaagagcttgtgctcttaaacatggtggtagttgggataagagcttaccgtaggcagagttctcttacaataatagctaccagaccagtttgaagatgtcaccgtttgaggctctatatggcagaaaatgcaggactccactttattgggatcaaactggtgaacgatagttctttgggcctgaaattatacaagaggcagaagaacaagtataaatgataagggagaatttgaggactgctcaatcaaggcaggaaagctatgcggatgcccagagagggctactagagtttaaggagggtgatcacgtatatctgaaggtgtcaccaatccggggtatgtgaagatttaaagttaaaggaaagttgtcccctcgcattattggacccttcttgatcttaaagcgagtgggagaagttgcctatcaactagaactacccaatcatcttgctgatgtacatgatgtcttccatgtatcgcaattgaagaagcgtctcagggtacccaaaaaatagctacctatggaggatcttag

SEQ ID NO: 78343 - DNA, 469 bp, Zea Mays
atcagctacaccagggaccgagcacgtcgacggaagctaagatcgcgcctaggcagcgacgtccgaatcccaagtaccctgggccgatgtgggccgtgtaatagtgagtgggctaatcgcttgtgggccgcgttggtcataaggaaaacttggcttgccgaggagactatcgaacaacagaaacctaaactgaatacaccttccccttccccatgttcttctcgtttccctctcgttcccagttttggagttctagattcctaccgagagctaacaattggtattagacgaggttcaacccttgaagaccttcatcccgttccaattcgccgaactcgttcgacagctgtcgcgggtatggaccagacgatgcagtgggtgtaggaggagatggcgcggatggaggcccgccttaacgaggcgacggcaggacgttgcgatgtcttggagcagcgcatcgccgcgacgg

SEQ ID NO: 78344 - DNA, 425 bp, Zea Mays
ggaaaattcagaaattcacaaatctgaattttaaccccctttccaaagttcagatgtgttctctgtattcccaaactcgaatccacaaagtccaaatatcaaagtggcgccaaaataccccacaaacactctggtgatgcttgaaaccaaaccaaaatcgtttggcacgatttggcatgggttttgtctcggtttgaacagtgcagacataactgacttcacaccaccatatcttctcacccaggccatatcttcactcgggactcacacacggaagagagccattggcacggtgaagaaatgatacacaggatccttggcaagatatgcaagtttaggtcgaccaacaggcgtttgaactagggcagaaacacacctccacgtgttcgatcgcgtgctcaagcgctcggccgcgcagtggctgc

SEQ ID NO: 78345 - DNA, 327 bp, Zea Mays
ctgaaggcaacattcatggcttcgtcctcagccttcgtataggtccctaacagttcataacttgttgcttcgatggtgtcaagccagtcatcgtctggctcaccaaattgattcttgtatcgataagtatacttttgatgaaccagactgcttttttcggcattcacatcagcttcagcatccttcgacatttcccatttggtagccaggggccataccttgaaggctatatgctcctacactaagtccctagtgctgatgtagttgcacacaacattaaacgccgccaggcagctttgagataattttgtatttatgatagcagtc

SEQ ID NO: 78346 - DNA, 349 bp, Zea Mays
acaagcaggcgagtcactgctgtcaggctgcaggttggtctaatccaaaaccttccccctttgggctgtaaaaatcgtccatgtgaccccctctttttaccagaacgaaattcttgttgttttgcacttatccaaagtcatctggaaacagctagtggatgcagatctttttcctaagatattttcagactgcctgatctagttcagtcgacagcagcagccaccttgtcccctccgtttctccaatttctttataatgacagagctaactctccacatcaaacttcttccctgaacattggtcttttaatttcttgtagacttccagagtcaatatcttacaggtttc

SEQ ID NO: 78347 - DNA, 1009 bp, Zea Mays
aaaggatctattcaaaccacggacattgatattattataagcaagatcccactcaggactagccagaaatcgatccaacttttcaaaagtggggtcaatccgattattagaccaagtgaacaacctattgttcaagtcaaactccacaagcccattttgctcaatgatactgttaaaaaggaagctccacttattaacacccacaggtttgtttttctcttccacttttcttataatattaaaatcaccacccacgagcaaaggagcacgactcctcgagcaaaaagacgaaagctcacacaagaatctgcatttattctccttctgagcagcaccatacacattgacaaagttccagatgaggtttttttctctatgaaaaatcaaggtgcgaatcataaattcatcaatctcattttctctcacatcaaatacatcagtattaaaacccactaataaaccaccagatctaccattaggcggggcagaaaaccaggcaaacggtttactaccagccagcgaagtcaaccaagaatcactgaaatgactcctttgggtttcttgcaaaccaataaagtcaattttctcatctctaatgagttctttcagaaactggaccttagaactaatccctaaaccctgacaattccaaatgaggcctatcatcagaaagggtctggggggagacaaaacttctctgcttccctctttttattaggtgtacacctaaatttaggggaagcttttttttgctgattctttcgatgtttaatttttctcccttttctcaggaccataacatcaaaaagatcataatcaatctctttctcacaatcagcatggacactactatccacttcattaaaatcatcaacaatgggctcctcagtttttttaattccacatgattgagtagccagaatttttctggacatttctaaatctcttatcaagtcaagattagccatagcagaggtttcagaagaacccaaacaaactcctagtttat

SEQ ID NO: 78348 - DNA, 685 bp, Zea Mays
gcagtgagggtcgagcaatcgatgggaggggtccttgcgtggtcttctagttttgtggtcgtaccgatcgagcgcgctatccctaggcacctggtgtcgtcgccggtgtccatacccttggctaggtcgctggtcaacaggggcgggtcgctcctcctgtcacgcctgatctcggtgagcaatgcttcctctccgcgtgtaccgtagggtcgtaccttctttgccaatccgcatggggcggaatgggatgcgtgcgcggggtctagacctcaccggtagagttgcacggtgggtggtgcttggtgtggagtgtgttcgtcgcgcggcgcgcggacgatgtcatggcaggctgatcggaggttgaagaagaacggtagaccgttgatctcatgtctattggtcacgattggatgaatggtcgagagagtgggaaccgtagatgttagatggctggcctagatcgaatcttggcgtaccccttcgagtcattaaaccagaatcgtaaatttcggatccgacggctagggctgagcgcagatgaataactagcgtgaagtttaatctgtttcccagatgttggatccaacgacctgtgttcaaccgtacctcttcgcgattgcgcattatcatatgagcccttacaatttacagttatcaacccaccgtccgtaaaaggggtcgcctg

SEQ ID NO: 78349 - DNA, 605 bp, Zea Mays
gaggcaagtccacgtcggaacagacgacattcggcatcaccatgaagccgaggaatgggatcttgctcaacccgtctccgggacaaggcatttgaagcaagagaaactcctgacaacagagcgctccgtgagcaccgcaattcccgatgctgcgatcgtcaccacgcctaggagcgcgagcgggaacaaactgaacatgatgccaggatccaacatgagaatccacttctccctcagaacctgttgtctgactttgctcaagccctgaacacgctgagtgaagttggcgaggccctagctcagatcgctaatgacctgccgcgcaccccggatgtggaaggctaccgacagagtcaacataatcaacagtcggtgagaggcgtggagcaacatcaacgcttcgcacgattgccggcatgaagaggagatgaggcgatgggaagagtacgaccgagatcatggtgcaccggcacgcagtcatgtcaataggacaaagtcaacagtagcctctacgaacagcctagcgctaggccggtcagctcggtgaggcgacatgacacgacatcactcgcctcccagggaccaccatcgcaaccatgatcgag

SEQ ID NO: 78350 - DNA, 1239 bp, Zea Mays
atgaacttggggcttaattttaagcaagatccagtgactttttgtgggagcacattgtagcaaagttatagctggattgtagctctacaactttgctgcaggtcactggatgagttgttatttgaaattgagagacaattgggctccaaacttggctgtcaggctgtctgaatataactctccatggtacagtgctaccagggagatcagatcgccagtgcagctgtcatcaccgccggtgacctgccgtcgtgattcatgccgtcgtcgccacgattggtgctcggatggagtggataacgctgcggggtaaaagaatcttcgctgccggtgagctggactccaccctggccagccgtggtactcccccccttgctcaccgccgtggataaaggggctcaccgccgtcgtgccatcgtcgttgttcgccgcgtgtctctgtccatctaccgcatcaccgtgaccccttaccaccgtcccatcgtcgccggtgagctcgccacgactgtggacacgcactcacgcgcgccagtgcctatttctttcccgaccaccgcgcgtaatcgctcgattcaccggccaccgcccccggagtctataaattgagtgcaccatcatcttcgttatgtattcgagcaactagagcacccacctgcaccccaaaccccccaccggagaactcgaatttgagattttccccaaatcaagtctccgccaccgtgaaacccacctcaccgcggccagccctttcccgggtcagttcatccctcgctctccctcgtttgagcactcttgacgctctgtgatgcttgccgaaccaccaatttgtatggagtagctttagatcaccgggaacacgtaccaattgtcctcattgtccgcggttcacgtggacagagcttgatagcttaccaattgtgaaattgatttaggggaatcgttcggggagggttcaatccggtgtatgtcgctcgagagcattggtcgtagcgtaaatccgccagtacaatctcaccggagttcgttcccccgcgctaccgccgtcgtggacttcaaaccgagaatagatggaagtgcgggggtctgtctgtaaacgtcagtgactctgttaaacagtagttaagcctgttttcggttagccagaaacccaagggtctttatgcaaagtcgcaagggcgcgggcgcgcgcgcgcgttttcccctggtactgggccggctgggctagaatcagcccaacac

SEQ ID NO: 78351 - DNA, 369 bp, Zea Mays
agtttgcataggaggatagaatgttggacaatagtcatataaatgccttgttcagcagtcaacacctgccacacctcagacaccataccttgttaggtagccccagcaggtaccccagcgaaacctacgagccagaacactactccaggcaacgcttgtttcaagtgtggtgaagtaggacattacacctatgtctgtcgtaagatgaatgcaagtaccaccccagcccgaggtagtaatcctaccaggtagaactaatcttctggtggtggaagtcaggctccgtccaatagttgcggcccgcgggaccatacatttggtcgggtcaatcagatcaatgtcgaagctactgctgatggttatgatatc

SEQ ID NO: 78352 - DNA, 442 bp, Zea Mays
ctgacatgaatatgagtgatgtagtagcatgcccgaggaggctcgtacactcacctggtctcatataggggtcagacataggttcccaactcgtgcagaacatcctgcagtaggttagggaagtgccctgtctcgaacattgaggtgtaatgttcagtgacaggccataaccccatgtagtggtcctactgttcttcgttggcttcatcgttgaggttttcctcatcttcatcttcttcttcttcctcgtcgtcttcatcatcgtcacaagagtcgtctaggtcgtcgcctccaggagcaggggcttggactgctggtgctggcggtgctgaagctgacaatccagctgcgaaggctagttattttgccaacggggtggacgtaggcagaaactcttccgagctgtcctccagaatgactccgttctccacccgaatgcgag

SEQ ID NO: 78353 - DNA, 581 bp, Zea Mays
cggtcatgggatgacttcgcttcatctcgatgcaagcctcaggatgatgccatgtgttgcatctagttaccagcggaactccaactaggttttaaggcccaaacccgaatggttttgaaacccaaaccaccaaaccgtcgtgattagcatatataatatgctccctccatgatcttgacacgtgtcatcaatggtccaccttccgatcaccaagtcctctagcgcctctacttgacttagtcaacatggtctactgctccatgtactcttgtgcttgttgatgttgccaggtgtcagtcacaacagtcagtcttctacttctccaaaaccttagctaagcctcaacgctcatccttcattgctcctagtccataagcatgaaccttcttgacgttcaccttcgttgttgatcatgcccaagctccacacctatgcaacataagccaagatacatgttgcaaacactataattcacaataagtggttagtcaacactaaacaaaagccaatcatctcattcacaatcactcatcacacttgaacaccatgggcacatctcaatcatgttttcacaatctccc

SEQ ID NO: 78354 - DNA, 1071 bp, Zea Mays
cggccgaagcggagaggtaccaacagggggtcctgacaaaatcgatggcaccactggagcgtgaagcggaggaggtggagcagactgaaccggaggtactgagataccagaatgctgaagcataagagccatgaatgccctagtctcagcccgatcctgaagtagctgctgctgaagggcatcctgcctgtcctgcatgttctgaaacatcgagagcatcctctcggataaccgggcctgctcggccgccaggtttgccagaatcgaagcaagagcagggtccatagcctgaggaggagcaggggcagcactagaactcccagcctcatgatcatgtgagcgtagaggcataggaggcggaggcggaaccccagaatcatcatcatcatcatcatcagctgctgtaccctgagtgtcaaactgtcgaagagctgcatcctcggcctgagagtcaaacacagaagcagaagctggcacaggaatctcaggcgcaggacggtaggatccaaaaacaaggcgtgaggcctcaagggtgctctgaaatcgagggggctgaatcagctgtgcaaagatgtggcacaagtagtgagcataaggcaaactgccgacgagcacgaatcccatccagaacggtgtcttcgatctcacaaatcaggaagtccacaacgtcaaactgagagtgggagactagggcaccaaggagccaaagctgaatatgagtggtagcctccctgtatcccatcctcggcagaagagtccgtctgatgagctcgtataagaacttggctgctgtagtaaagtctgccggtgaacgtcgcgacccatctgtgaagggcgggcggaacagagccgcgacgtgagctgtacccggagccacaccgtcgtgagggcgacgaggagggtcagaagtgtcgtagcagagactgtgaaggcgagtcgtcgactcggggaatccaaatagctggcggatctgactggcagtaattgtgacatcctctcgctcaaagtggaacctcatccagtgatgatccgggtcaatccaaacagatgcgtaaaagactcgtacccact

SEQ ID NO: 78355 - DNA, 576 bp, Zea Mays
aacttgttcatggactctgctcagaggagtgccatggcgtgggcagatgtcaaaggctgtggcatagaggacaaccagatctaacaagccccaacaccgagtatttatgatttggtaccttctcgttttcgcaccacctatggttagagccagacatgaccaatatgacatagtggttgcccgttaccgataagggtctatcaaagattcttcttttcattacaacaacaaaactttttcgtcaaaagcaagtttggatgggctagagttggaacccaatagaaatcaagtcaaggttcaggacataactatttcccatccactcctatttaacattaaacctttggttatattccatcgctcccagtctcactgcatattcctatgtcaacttaagtctcccctacctccctttcccattactaccacgctttagaatcccactacgcactggtgcctcagaaggtctttgttggatgtatccaaaccatctcagacggtgttaggcaagctttttctttagttggtgctacccctaacttatcatgtatataattgatctggattcgatccctt

SEQ ID NO: 78356 - DNA, 417 bp, Zea Mays
ccgagataacggaacgctatttgctactaattaggggataagtagggagatcgcaatcaacacttatgtgggagagccctctctggtcgtgtaaataaagccagggggcatccctaccatttttatctcatcaacaccccatcatcttagcagtcacaacctgtaaacccatctccatacagaaaaccaccacaggaagtagggtattacgctcctcaaagctgctcgaaccagctcaaacttgcgtgtttccctctcgtgcagctgcacgaaccatcgagtcacaatctacgatgtcgtcctacccaaaagcaccacaagggtaaccctgggtgtgaggtcggacacaaaacaccgacagatataacctaagaagacaaattcaagtagcagactttagaaggcattttgactagt

SEQ ID NO: 78357 - DNA, 527 bp, Zea Mays
cttgacaggctctgaaggcctagcttcggccacggtttggctctttgtagcttcgtcttcggatgtttttgtcccaatttgtgttttcggtgcctcggcagtcttctacggagtggtgcttgaagactttattgtctccagcacatctaatacattgaccatcctttttctcttgggggtcgccgtgagatctttttgtgccttcggcactgtcattcctgccgaagggcttgtaacttctaatatctttgttttctcggcctctatttctttaatattttgagccttcggcatcatagacgactcttcattcttctgtgtaagagcaggtcctttggcttcagtagccgtagaggtctcaccaccaaattcgggcactgaggccggttcgataaagcgcggtcggtaaggaccttcacctttttcctctttggcgtgggctcacttagagcaactgaagcatcacctttcccagatgttgcactttttctcttttgccctttcagcgggtagctgtaatcagggta

SEQ ID NO: 78358 - DNA, 1064 bp, Zea Mays
ccacaacccaactctacagttttttgcttgttagttcatacttgttgtctatccttgggacgatacaagatgtgtcaccacagaggacctcaaagtcctctatgccatggtgaagaaaaaattctacgcttctatgatgaatatgatttatcattagtgctacatggtccataattgccacaccatcacgatcacatccttggtaacaaggatacctcgtgccattggtgcactaaggaatgctaggattgagttgctttctcatgatcaaacatatttaatcattgagcaacactttccaaggtcacttatttagggcaatcccaaataatgaccttgccatgatatacactggttaaaactttgagcacccattgtccgcatcggaatataagttgtaccatgtttgatgattcaccctacaactctagacaaaagatacaaggcatattgttgctggtgtcatgacttgaggacatcgatagtgactcgagcagcaaaaccataatgaaatagaggaggcacgatttcctccacaatgtgaccctaggggacgtcactacaggtaccattcgagtcaacctcccactcaacatgacctatggtcgactgagtctaggcactcatcctagaagaccagtcaagacgacatcttgtacccaatgcatgctcccaggagcattatgagtactctggtggtgcctcttcgttataccaaggtatgtctagtgatcctgactatgcagttgcacgaccgtctacctctgtgtgctacgcttccaacaatcgtatcatgagacaccttgactccatgatggagaagatgcatctccataatcatcgtactgcagcaatgagggacaagatccatgagctcatccaatgcacaacttaaatacagcatcatgtggaccatgaccatgacattctttgggaaaccagagaactgatgaatatcctctctgggtgtatccataaatatcacacataacaaggtttttaccccctaccagtagcttggttcaagcttggagggaaaccttctattaagggtacatctgtcg

SEQ ID NO: 78359 - DNA, 737 bp, Zea Mays
gaattcttgaggattttgctcttggtcaatatagcaaacctgtagagctatgtaaggagaatacatttgattaagtgagtaagccctagtgttacataaaagtggtagaaaaatagacctgaagttggtttgtcagtcgagtgtagctctgaaattgaactgacagtgaaccagaaccaagtttaggagctattttgggtatgaatcagtgagaatttaagtatagttgctatagcaagataaaagttggattgtagatcaacaactttgttacaggaggcttaacaagttgtcatataaaaatctgagatctgggccctgcaaatcggtctgtcaaacgctctgatgaaggtctgatagtatagtaaactgaataagatctcaggttcagccccccttgccgccgatgatctcgcgcccggattcgcgccagcatcgcgattcatgcctagttaaacgcagataacgatcctcgggtgaaaaatctggcgctagggaagagcttgggacactgtttcgccctggccgtcgtacccactcgccttacggccggtccagataacctcgccggagttggccgcctgctgctcgggtgccacgtgtctaggtgctctaccacgtctcagtgaattgccatagtatgtccgttcatcgctggtggtcatgccacggtgaaagccacgaatcacttgcgccagtgacctcccttctctccggccgcaacgcgccattccaaa

SEQ ID NO: 78360 - DNA, 453 bp, Zea Mays
aaaaaggtgagatgctgcttgcaacgtacgcactcttcgacactgaagagtcgagtggagactaatccagagggacagcaggctacgcaacatggtttgaacacaactattctggaggaaaaaacgaatagtctgacgtactgccagaatcgttgacgtgtcggagtcatgtacctttagcgatgaaagcatcttcgagttcgcacacgactttgatggtaggaagaatatattgagtgattgaatcgattcaatcggccaaggagccggttagaccgatgttgagccatttctgtaagctcagtaaaattgtttggtactcctgtttgttgattagagctccaatcttattgtatactagtataaagttttgagtccggaaggagagatcattattgttgtagcccctgtgtctaagcagctccatgaaccatcacaaaatactatttatat

SEQ ID NO: 78361 - DNA, 657 bp, Zea Mays
cgttgacccgtgagaaggagggagagggaaactcatgccaaagccgctgcggtgcttgccggggctggtcgtcctcatcagacatcgcaggcggccatcatcctggtcaccatctcgatcttcggtacgtcaccttcatgtgagtcttgtacccgtgtaacatgcgtctttgctactgcagtggttggtcacctattcgccgtgggccgtgatcgccggtgtgctcatcgccgtggggggctatcggcgtcaggcggccatgaagagagagaaaggacgataggagggtgtaaggaggaagaaatgtaggggtcgttggatcgtgggcatgtggccacgattaaaatgtgataacgattcagccagattcaatctggatcgtcgatcgatgttcacgttggagattagatcatgccatagtatatgttgggcccgtaccgtttcgggcgagtgttttagggacattgatatctgatcggacagatccagatcaatctcggtgtcttaaaatcctaagcactgaattggaatccgacggatagcgttgcgtaccggttcgataaggtgaagatttaatctaggtcgcgtgtttcggatctaatggctcagatcagtgcgtaccccttggcccctagaagttcacaaaatcaacccgcc

SEQ ID NO: 78362 - DNA, 288 bp, Zea Mays
ggagaagttgcatatcaactgaagttacccgatcatctatcagatgtacatgatgtatttcatgtgtctcagctaaagaagtgcctcagggtacctgaggatcagctatcgatggaggaccttagtgttcaagatgacctgacttatgctgagtaccctatcgagattctggacactttgactcgagttacaagaaataaggtgataaaaatgtgcaaagtacaatggagtcaccatggagaggatgaagctacatgggaaagtgaagaagagcttcgcatagatttt

SEQ ID NO: 78363 - DNA, 386 bp, Zea Mays
gttgctgattgcccacatactcagggatatatggggaatagcatgaagcagtatgcaagacctacttcggttggttctgtcgtgcttcagcttcagcaatttacttctacttttggatcatgacttggcacgtccttgtcatgtatcccttatcctccccacagattaagcagaacaatctcctaggttgagtaccaaaccttcctccgaagttcctcccccttctacctctcggggctggtggcctataggaagtttgttgcattcccgaagactatgagctttgttgcctgctctgggtatgattgaccctgacatcatttgtgttgatattgtggatcgttctgacatgcctgggttggagtcttcctcaaaagcccctagtc

SEQ ID NO: 78364 - DNA, 464 bp, Zea Mays
tcgatgccgaggaccacttcgaccccatagaccattaagtatggtgtgtactcggttgagcggttcgggtcgttctcaagctccataggactttggttagtgcctacgactattgttggccaagtttcttgaggcgggtgaaaatgtgggacttgatgccttgcattatcatcccgttatcccgctcgacctgtccctttgcccgggggtgggccatggtggcccagtgtacacacatgcgatatttatcgcataactcttgaaacatattcccaatgaactatgtaccattgtccgttatgattaaattcggtacccaaaagcggtggatgatgttggtgatgaatttcatggtctgcttagaggtgattttcatgataggccatgcctcgatccacttagtaaatttatcaatcgcaaccaagacatgtgtgtagtcttcatgtgcccttttgagaggttcg

SEQ ID NO: 78365 - DNA, 363 bp, Zea Mays
gcgggccgatgtcgcgacgacgacggggcgggggtggaggcgccaggaagggtcggggtcgggcagcgttgcgtcaagaggaggcgacagtcgaaacgggcatcgaggcaaactggtttaggtggcatcgaaaagattagggtcgaagtgatagatgcgaggactgggttggagaggatctgacgaggaggctcatgacaaggttgttttaggcagctaacaactgggttggagaggatccgacgaggaggctcatgacatgattgttttagacagctaattgttaactggttttagctaggttgaggtagctaaggactaatgattatttaaagggtatagctaaaaattagttggtcaatc

SEQ ID NO: 78366 - DNA, 401 bp, Zea Mays
cctgtctcgccgctttcatccatcggttagttgtcagatctgggcataaaaaaaaaatcaaagccgatggaatataaaatgactaaaccgcatacagccaagcctgctcatttcttcgtttgtatctttcctccatccttcctctccatcggcataccgggaggggttctggtaatttctttcccagatgcttgcaagtcgttctactgtacctaacaagcacgccaatcaacggctgctatgctgacaaagttgccgattctagaacaccacgcaaacgcaaagaaacaagacgatctttcgccctaaacgacctactcacatgggaatccatcagtttgggagaagactccgcagccagtcgaacactcgaaccagcacgcaagtttgaaagctaccgt

SEQ ID NO: 78367 - DNA, 604 bp, Zea Mays
gttgatttgtaataatctgagggtctcttttgcctaaacacgtggccgaagggatatggctaggtctcagccactcgatcaagcacgtgtggcaccgattagatcagtcccccatccaaatcgatatgtgttgccatccgctagatcgaagatcgacgactatgttttaatgaaacggggagctaatcctatccgtccatcgcttgatggacgaccctcataacctgaccgaaccggcacgggtactgtctattcatagtcgttcatccaaggatcaacggctagtattcctcccacgaagaggtgtgagcaggatctaatcttggcccttaattcatccaatggacagtgtagatgcctccgcccatgcccccagtggttacccacagcgacaccccaaacccacggtggaagtcgtcggcacgcaaccaatcccatgtcctggtgtgccattcttcaaccggccatgctatgcgatgggggaacggacacaagtcatttggtggggtttttacctggggttgaagctacgatagagctgaccacgaaagacgacgacttggcggcggagttcaaaacccggcatgcaattggtgcatcaccg

SEQ ID NO: 78368 - DNA, 441 bp, Zea Mays
cgcgccagagccccgattaagcaagtgacgaggtgcaaaaacgctcctgaaatcatgatggactagttgagggcgtgattacctcgaatcgagatggacagggccctacccacgacacgaggcggttccacggtagcgccgcaaccccggcgagaaattcacgagcatgtggtgaccctatttgccaggcaaggacccgagcaccacccgagtagactaatgaggctccttagctagcatagggacacatgcgttggcgccaagaggtttctcccgaggcggtctctctttctctacttctctcttgcttccgttctactagcgccgacgagacgccccaatcggtgatggtggccaacacagcggtgggttgatttaggtgaggctccccccggctagccctttatacaccgtaaggcagatcgaatcacgaatttcccc

SEQ ID NO: 78369 - DNA, 334 bp, Zea Mays
cacattacgatttggatgttggtgcatgcttataaaaggttgtcttgcacctacttgtgtttaccttaccattcttgccttgtcctcctgatgccattctttccttcttctccttgtttctaccttgcttgtgtacataagcaccctaccagcaaaactgatgaatagagcactaatgttcatcatcactcttggtaattcccatgctacatggccatcgacgactgtgtgcatgcactagtgaccaaggaattattgcaagattcatcgacgtagagggtgaagacggaggtggatgaagtcaagcctcatgcatgaaaggttgtggtgatgc

SEQ ID NO: 78370 - DNA, 444 bp, Zea Mays
gggaggtgctcgagtcaggctcgggtggagtccgatagaaagaggaggaggttacgaatgatgaggttatcatcgtttgttcccccgagctggcaggccagtcggtagtcagcaagccagagcttcgacttcgtttcccccgaatacttagtgatagtagttagggttcggaaccgaggcgggaatggcgctctgcggatggccttgctaaagacctaaggacctagcgactcaggagaggggcttcgatcctccatgttgtcgtaatgccaccccttcgagggcggtagttgtacgtctcgtggtgtcgaactcgtcccccaagacggtcgtgaaccgcttggggttagcggttgtctcggagacgatcgcgcaccgtgggtgccctctctatgctaggtgtagggtgcaccgtggcctccctctcgaagcgatagggtccca

SEQ ID NO: 78371 - DNA, 815 bp, Zea Mays
cgccattttgcatcaatgatgcacagtgaggtgtgccctgactttgtgttgctcatatccgtcctcaaagcctatatggagctcgatgactttcctggtgccacagcagcccatgccttagtggtcaagagtggctttgacaatgaactagatgtgataattactctgacagccatgtatgctaagtttgggtgcatcgtgtctgctaggacactctttgacagggtgccaaccccacgggtgaatgtggtcctttggaacgccatgatatcaggttattctaagaatggacttgccaatgaagccgtgcaacttttcaagcagacgaggaaggttgcaaggagcatgacccctgactctgtcactttgcgatcggtgatcgtggcttgtgctcagcttggatccgtagaacttgcagaatggatggattgctatgtccaaggcagcaagtacagggatgatgtgcttgttaacacagcgctcatcgacatgtattccaaggcagggagcatcgcccgtgcacatacagtctttgaacgtatggacgtgcaggagcgggatgtggtcgtttggagtgctttgattggtggttacggggtgcatggtcatgtcaaggaggctgttgccctgttcgatgacatgaagcatgctggggtgaaaccgaatgatgtgacattcctgggcctcctgtcagcttgcaaccatgccggtgctgtggatgaagggtggagctacttccattcaatgaaacgtgactatggaattgagccccggcaccagcattatgcctgcatagtggacctgcttgctcgtgc

SEQ ID NO: 78372 - DNA, 1222 bp, Zea Mays
aagactttgcagaagagccctcagggtttaggctaattggaattgggttcggtcactgttgcactgagtcgctgactgtttgcagaaaagaccccggtttctatttcttcgcaggggaaggtccccgacgacggtgaacgcggtcgagctccggtgagctagcagaccggccaaacggagcaacgactggcgttctcgagcggcagacaccaaagcagacctaccccaagcatttcccctaagttaattgcacagttggtgagctatcaagctctgtccacgtgaaccgagggggtggcggatagatgagtgcgttcccggtgatccctggtggtccagttcaattaaaggggtcgaggggcatcaccagcatgcaaagatgctagaacaagaacagggagggtatgagcagacctgtggagggctggccacgacgagcttggttctacggtggcggaaacttgatttgggggaaacaagaaatttgggcacactggtgatcaattgctagcaattcttggtggctgggtagttgatgaccttgcggaactggtggagggctcaatttatagggagagtgagcggtgatgatcaattcggtcgagccgtgctggctgccggagatgaagaagaaccttggcgcagtgaattcgtgtccaccgtcgtggcaacctccccggcgacgatgggacagctctagggagtcacgacgacgcggtggaaaggcagagccacgcggcacaaggccgagaggcggcggtcaccagtgaagttatcggagtccgctgcggtgaacatggtacggtggccggagttgtttaatggccagagtctatccacggcgaggatatttacgcgaccccaagtgctatccggttaccagtgagtgtgaatcttaacgacggcgacgatcccggcgcgaagtcattggcagcgaggggagcggttgatttgatctgtccaggcactataccatggcaatgcttaatcagtgtgtctgacagccaagatttagggccagattcctcccaattttctatggaaacatccccaagtctctgcatcaaagttgtagtgctacataccaggtacaaatttgttatgggaatcatgctcaaacttgcactagatcatgtttaaatccgagccctaactccatgccattacattgttaatctgaatttcagatttcaagcagtctgacattccaacttcaggctca

SEQ ID NO: 78373 - DNA, 583 bp, Zea Mays
agaaatccggtgactactatgactttgtggtcgtcaaagtagtgacggagcttgcgagcggttagaagtaccacgtatagtagtttttgaacttagggatacttcattttagagagtccgagaacctcgctgatgaagtagaacggatgttgtattgggtatgtatgtccttcctccacccgctcgactactaacgcggtgcttacaacgtgagtcgtgcaggagatgtataacaacagatcttctgccggctgattcggcgtggctcggtgtggtggattgagtactggtggcgtagtcaggaacttttttagtgcttctagagcttcctgtgcctctgtgatccactgaaacttgtccaccttcttgagcaatttgtagaatggcatgcctttctcgcccatccttcatatgaacctgcttagggctgccatgcatccagtaagcctttgtacctttttctgtgatcgcgatgcttccattctcatgatggcctcgattttttctgggttggctttgattcctcggtggctgacaatgaatccgagtaacttccctgctggtactccgaaaacacatttct

SEQ ID NO: 78374 - DNA, 621 bp, Zea Mays
ggcggatgcatgcaatggttccatgtcggaaggggaatacatgtgcaataataagtgtttgcatatattgggtgagagacagcataatactatgcataaactatgggagggagacgcatgcgtgcattgcctgccgcagctaattaaacgtccacttccctttcatccccttccccggccgggttagttagcaatccagtgatgatatccatcatattagctagcatgcataaacactttattaattggtgtattgttattggagaaagacaaacccaccaactatatatcctagctagctagctacctaaaagacacgtacgaccaaggcactagctagctagcaccccattggccattgccctcttctccaaccgccacgcagcctatcattggacgagtgggtcggatgatattcgatagtggaaataccttttttttttgcctttgcttgttgatcgacactctagcaagctcagcgtcatcagggagaaaagaagaatcattctcatgggcggcgtgtagattgcgatcggacggagagaggagcaacaattgatagacggaaggaatcagctggcaggaacaaaccctgctagctagcgcgcatctcaatcctca

SEQ ID NO: 78375 - DNA, 531 bp, Zea Mays
tacctactacggtggatttgtctcaagggggtatagagccagagcagatccttgatcgaaggatggtgagaaagggcaatcgagctattgttcaagtgctggtgaaatagactggggtgcctaaggaagctgcggcatgggaggattattcagtggccaaggcaaggttttcggaggcaaacgcttgggggacaagtgttatctgaggctcggggagatgtcatgactgaagatgcagcctaaagtggatctgtgggaaatggagtggcgcgagaggatggtcaaatgaggtcagtcaggcaatttctatttcgctattatggagttggtaatcgagtctgtaatggagttgtgggctgtttaggccgtattagtgccatcttgggccgtaaataataggttaggggagtttggtgtgcctataagtattgtactcagcgtcttatgctagacatgcaaaatcagaaaaggaatctaatcagtttgaactacccaaccacttacctctgttcttgtctgcttgttcttgct

SEQ ID NO: 78376 - DNA, 307 bp, Zea Mays
aagcaggagaaggaactccactactttcaccactggcgacatactgccgactgttctttcgagttagagggacctcatcttcttcctccccatcgtcttcaccagcagcacaggcaacacccccattgggatcaacaacagatggagcacacccattgggatcagcagcagatggagcacacccagtggggtcggcgtcagtaaattcaggcacaagcacttcttcagcagcaggaaccgaagtaccaacgtcccgatccaaactagatactcgctggaggcgtctctttttctttttctgctcatc

SEQ ID NO: 78377 - DNA, 517 bp, Zea Mays
atcgatcatggtgggtgagaccgacagtgttggggcaggcatagtcgttatcgatggacagtatcgacctttatgttggggccacaactgttaccgatgggtttggtcaacgactatcggtagctgacgtggtcatctctgattggttcgagctgtttcatccgtttgggtttgaaaaagaatccaaaaaacaaaatccaccctaaaaatagaggggtgcttggatttattcacacgctttcacctccaattatcaaaccctctccttcattcacacactttcatctccattttgatttagttgcttttgaaccaccgttttgatatggatccgaggtggagttccaacgataaaacattcaaggacttgcttagtgagcaatatccacaatgtcatgagacccctgctggtgcgggacaagtcttctttaatggtctttcttccatccaccatcggcgagagtaagttcttgctcatcccttggcctaactcctcaaactctctttttcttgtatg

SEQ ID NO: 78378 - DNA, 308 bp, Zea Mays
ctaaagtcacaactaccttcaatcaatgaccacatagctatctactatgcaatcgatcagtggtcttcgcgccggcgtcctatacagtcactgcataagagaccactcaaaaacttgcaagaattatatcagctgttcgaaaagtacgcccggtccgaagagctccaccaaagaaaaattgaatcacagcaagagcccaaggacactccgtagtccagcaggacatgggtcaggcctgcataatcggactcaggccggcaaaaccgtaaccagtcccaagtgcacaacatcaccaatcagcagcagac

SEQ ID NO: 78379 - DNA, 469 bp, Zea Mays
gcaaacagagcggcgctcgcatccgaccgcggcggaggccatggccggagttgccgtccacggtataagcaccctaaactccaatgctaatcggttcgacgcgttacgggaaggaaagtaaacataaaggcgtggttcataccggaaatcgcagggcagagatatccccacacgacgaagcacggatcctcgctggaacacgccccggcgagcaattcacgccaagctggagcacttctttggctaatagcggcagaatcacaaccagtaggccaaatcggagcgccacagtacttcgcgcggcatcaatttcagtcacaaaacgagttgcacccatggaggcggtgcggtcttgtttgtcgtggtggttttaggagggtttgcgggtggaatccttaacgaaggcacccgcacctttatccttgccgaggaaaggaccgcaaggcgcaggattgaccgggcgcaacgg

SEQ ID NO: 78380 - DNA, 937 bp, Zea Mays
gtagaaagggccaacagaatgatactggaagcgctcaggaagaaagtgtttgacaagaatgaaaagcttgcaggaaaatggatcagagagctgtcatatgtggtttggagcttgagaactcaacctagtcgagctctacatggaaataccccattcttcatggtttatggttcagaagcagtgctacccaccgacctaatatttggggcgccgaggttgaccttcgaaagcatagccgaagcagaagctaccaggctattgatatcctggaggaaaagtgattgaacacagtaattcaatcggccaggtaccagcataccttgaggcgttatcatgataaagttgtgcggcaccggtcctttgagtgggggacttggtccttcgccgaattctaacggaggaaggacggcacaagttgtcacaccatgggaagggccgttcattgtatcagaggttactcagccaggatcataccgacttactcaaatggatggcacggaagtgggtaactcatggaacatagagcatcttagaaagttttatccttagcgaagcctcaaaagctctcgaagcaacattgtactatgtaatcgggggacttcatcatcaataaagttttcgttttcaaaggcattcagactcttgactatcagctgacttcgatttgattagacttgaaatcagcacgcttactcaacttagggtgaccactataccctactaatgaagcaatcgtcttaagtcggtaacgacttaagatggtgcgacatgctcactcttactcgactttgggtgaccactataccctactaacagagcaatcggcttaagtcggtaacgacttaagacggtgcgacatgctcatgcttactcggcttagggtgaccactatatcctactaacgaagcaatcagcttaagtcagcgacgacttaaga

SEQ ID NO: 78381 - DNA, 504 bp, Zea Mays
ctgatcaatgaaacctttgacttgcctattataaaaacggctgatctccagccgccggttctcatcgtgaggtacgcagtgcaggatccaggtcgtcggcgtcggagctggagaagatcgaaggtcgcggcgtcagatcagaagatgaaggagagagatgggacattgagctgagcagatcggcgtgagggtttgtctcatatcgtgacatctttagccaaaggggaccattctttccgcatcgtggccttggctgcctacaaacatggactgttacatgcttacacgtatggggatgtctacacttgcatgcatgtgatcgatcctccagcaacaaatctgaccaggtctagagagagtggcatgcaaccacccaagttacattaggtactccacgtgagaaggcgacgtgcaaccgtcaagattggacgtcagacatgtcaagatcatcttggctctctagggatggcaactcgaaattccttgtcgaagaatggctcttca

SEQ ID NO: 78382 - DNA, 479 bp, Zea Mays
aacacttgaacacgagctggtgacacccttaacgcttcacgcgttagggtcctagccagtagtgtgcccatcaccggctaccccttagtctgtttttcgctggagcgatcgcgagccctttgcgggtcgacctttcgaacacgagagttgacaaaaatcatgctatgagtttttcggtccctaccaaagtaattgaatgagtttggaatcttaccgaggaagaagccttctgtgttggtttggtttcttgggcaggggcgttttgaagggtggcttggttatgtttccttcggttttctcgaggccctgcattagtcgagtagacaaaaaggggaggtataatagcgcagccatacgtgttagtaggatgtaaatgatgttgatattttttagaggctagccatctggagccttccatctacctagtgcccgctgtccccaaaccatgggaggtcgtcctagggtcggggggaaggaat

SEQ ID NO: 78383 - DNA, 786 bp, Zea Mays
attgaaacaaacttaaaatgagaaagttatggatcttcaaagttctaggatccatttttgtaccaaaaagcaatttccaggattttattcatttattacgaatttaaatggactgcgtctgttatttataacaaggtcgggatctatttcggaagaatttggacttaagtgtaatggttttacaacagttagggatggtgggttcattacgcaatagcttaggatctcttatgaaattataccgcggcaaaggggtatcgacacacgctggtcgctggatcgacaatcagcggtgcatattagattgagtcttcattaaaggggtatgtactggtagccatcggatcaagatcaacggtcgatacaaaacaggtgcgcggatcaaatctcgaccgcacgtgattcgatcgacgacccagacccattcaccctcctctgggccagccagtgacgctggtcacccactcaccctgcggcggcgcattgccgtgacccacgaaatcccacatccaaacaacaaaacaccaaaccgacagctgccacgcaaagggaatggcagggaatacctcgtcgagggtttctcaccgcgagtcgtgcaccccgaagctccgtccatgaggtagtgcggcattgcagcggggacgaattccggcgagtaattcacaccaacaccgctacagtctgagcctgccatcgcgatgaatatgttcggtttgatctcgtgacggtcctaggccctacgccctcgcaggagtgatggttctaccagatttggcttgctgcgcc

SEQ ID NO: 78384 - DNA, 295 bp, Zea Mays
ctaaaactgggtgtgacacaaggcaaggtaagggctcagagttgatccttacataatcatattctaatcagaaactatctatgtttctgtcacttattcgaacttactcaaaaagtactcaatattattgtacatgtccttaatgagtccaatgtatttcagttgaactttatgtttgtctaaacccactacacatcatttattcttattttttcatatgtcttccccaggtcaatgaaaatcatgtgtagatccttcctttgttcactatattacgctatcacttgttttatta

SEQ ID NO: 78385 - DNA, 829 bp, Zea Mays
gtttatgactttgaatgggtgttttcgagttaactaataagttcctaaagaaattatgtgtaaggtgtttatagtgacactttatcccgaaaggtgttaagtctacgcataaataagagataagtgtacttgtgtagtgtggattgattttgagtacatatgtcgcaagaaatggattagtgcgcatataggagatgaatgtgtgatgaaatggtgacatgccttcgtagtcatcatgtcgtctgtttggtgacttagctgagagtcatgaagaaatgtcgcttacctatgtgttaatattgtcactctgcaactctgtataattgccatgtgaagtatgattggattagtctatgtttgcgatgtgtggtgtggtggtgctatgaaaaaggggttaggaatcgatcggccaaatgccaagttcggttagagttgttttgttacttgggagtgtgtggtgaagtgatggcatgactatgtagccgtcacgtcatctattgtgtgacaatgcttaagtgtatcttgatataagttagagtaagtcaagtctctaaaatgcggaaattcttgaattgtataaaagctgaaatgtattaatggctgctttgggatgcacgtactgttttcggtgtgatgtatgtttgatgaaccaaatcatgttttctgtagaaaagccacatcgaataattgtagataacctcattatcttgcttgtacaaaaatttgacacccataaacctaatcgtttaggagttgtgcttttcacaagccaacacctgaatctgtcgaatttctgaacagatttcagaaattacaatggttgctcaag

SEQ ID NO: 78386 - DNA, 351 bp, Zea Mays
gggcgaatcctcgattcaggttgccggttaaagacggtggttggcttcgagttttatttgtcaggttgcactagttatcgctgcttgcagcaagttatcttggcttcttcgaagctagttatctgaagattgatcctacatcgtgaagatcgggcatcatgacacatcagagggtcacacatgccatcaatgttctaggggcggcttcctggagatcgaccagtgccgagacgagctcgtagttagctctctcataggtgtacgcaaccttgaatgaagcggaagccgtgatgatcccgcgtggcctaggcatcttcatcttcaagtatgtgtagttcggtatggccatga

SEQ ID NO: 78387 - DNA, 453 bp, Zea Mays
gggtgagccatccttggaggcctactcgcgtcgctcgctgacgcgcttcatgatctttttcgatcttgcggcaccctgaggcactatggcggctagcgggatagatagggcatgagccactttcaccaccctactggtgtgggtgttttccacacgctttgtggccctcagccgtagctgtaatgaccagagcaccggacagtggcttctcgccaccgcggttcttcttctttattttcttactgctgccctaagtagtggtgcctgagccacctatttgggtagccccggcttgtgggaccgagtgccatgcccggtccttggtagccctagcgtatttgtcggccagagcgaagaccatggtgacactttctacatcatctgtcactagcttctcgagcatcttttcatcacgtattccctcacaaaaagcagtgatgacagacacatcgg

SEQ ID NO: 78388 - DNA, 363 bp, Zea Mays
ctcgacaaagggaacatcagtgagccattttgccggtctctgtcctaagtacgctggccggcggattctatattcaaaataaacaagattatactatatttttttcaaggagagctaactcgctctactaaaaatcctaaaacatcagggtccgagaaaaatagtaccatcataaaacttaagcggcaaaactgcgaaccacacaatccccaatcactcccacgctcgactgcaagatcacctcgagtaggtagcttgtcctgttgccaccccacgtaacacgatactctgatgatgatcatctagcccatccattcaccgaataaaatagaccctaccgaaaagaacctcatgccatcgtac

SEQ ID NO: 78389 - DNA, 911 bp, Zea Mays
taggaaatagatgggtagctaggtggctatatttatataggccataaaggctactatttctactattaggatgttgtagaagcatccaaaaaattagttaggtttgagaagacgactagaatgagcatgcatcatgattgtcgcattataattgtctcttgtgcaccaacatgcttctctcacctttattccaataataagaacttgtgaataatgtgatgtgctgttatgttaggaactataagaaatgctttaccttgtgtcggattggtaagtcttgactaggtcgtgatatgtgtttctcttgccttgctttctagaaggtacgatagttgttcagtccaatttgcttgttctgttcataaaaagacccccgtccaaacaaccttgagtttagcaagtgaaacctccaaaaaaaatcatgctatgtgagtgttttctaacccttgtgtgttttacccttgaatttacacctgcacaatttgtagaaccccgtagcatgaccgctagttcgacctaaagcttccttgtgcacttgtcgtgtcaaaaaaaattgttgttggtgtctagttgcacaaaccctatcaaggccatgtttctttccatagatcctgcccgaatcttcataacctttctggtgctcgtcctcagcaatctcatgcgactacctctctttcacctggatctagtaatcattttccttgtgaatcatgttgtggctttatcatccgaatctctggatcccccattgatcctaccctattatctggatatctgctctaactcgttctcaagtatcagatgttgatataccaaaatctctcaattctggtcattctcataccccttctccgaggatcatgacactattttatcaattttatctctaaacaatgtatccatttggttca

SEQ ID NO: 78390 - DNA, 470 bp, Zea Mays
cactggccgcccttagccgcttcatctcaagactggctgagagggcacttcccttctttaggcaattgtgtaagtccggtccattcccttggaccgaagaggcagaacgagcctttcaagagttaaaacagcaccttgtgtccctgccaatactggtagctccggagccgggggagccgttgtacttatacattgcagcggctttagaggcagtgagcatggtgctggtcatcgaaaggacgacacaacacccccaagggagtcaggaagttcccctaggagaaggtggtggtccgaccaccacgatgttgatggaaggccaggaggttgaggacccaggaccaaccacaggggtccgaaccatccagaagtcggtctactacgtcagcgaggtcctccatgaggcaaaggccaggtaccttgagacgcacaagcttatctatgctgtacttgttgcgtccaggaagttg

SEQ ID NO: 78391 - DNA, 519 bp, Zea Mays
aagacggggaaaagatgagggccgctacgccggtgtgggggaaaaaagtgcttttgcccgcgtacgcatgcacgaacttcagagcacgtcgcacgcatgctgtagcaaaagcccgccatcagcgcagttggatctctttgcaaggcgcacggcaacggcatgcataatgcatgctatcgttcttggacgacactaacgcatgcctatccatgcattgttccatcagtggctgcctctatacattattgagcttcaccagcagcagcagccagctatagctctgcgccgatcgtacgtggcttttcgctcttgtttttggtttgagggatctagcttgtcactttcttcgaccacttgatccctttttcccccgcgactagtctattgcacgttattcgttaggagagagtatatagcaaaaaaaaaaggaaaaaaaaaagactctctcagcgttaacgaaaattgacaaagaaggcgccaaacctgagaacacaaagttgttattaccaaacgtctcgc

SEQ ID NO: 78392 - DNA, 1047 bp, Zea Mays
cttcgttctatttttgattatgtatggttttgatatgtcttgggttgaactgtccaccgaagtccctggtcatctcggaatatctcaaggcctcctccttcctctaacgagaatcattgtctgctctaatatactcatccatcttctgaagaagcttttctaaggactaaggggatttctggtaaagtattgagccgccagtcctaggcgaaggcccttgatcatggccatggtaactatttcatttggtattgttggtgcttgagcctgaagtcggaggaatcttcggacataagcttgcaagtattcatcatgttcttgtgtacattgggaaagcacctgggtgtgattggcttcgtctggaatccttgaaggcttgtgatcaacatgtcctttaatttctgccaagaggttattgttcctggccgaagagaagaataccatgtttgcgcaacacttcatactgccatgacgaaggacttggtcatgatggttatgttgtctctgtatgatgatattgttgcttcataactcatcaggaattgcttcggatcagagtgactgtcatacataggcaattaaggtggtttgtatgaaggtggccatggtattacctgcaaatttgtagctaaagaagaagcatcatcacaaggaaaattgtcatgattaaaggcttcgtaccacatgtcttcatgattttggccttcatgccgtaagtctttttgattcttgtgatgctcttgacgctaagtatcgtgtgaaatatttcgcatctcttcagtcgcattgtcaatcttcttctaaagttcagaaaaccgaagcatcttctctttttgcttttcaacttgctaatggatagcttcgagattactgatctcatggtccaatgcgtcatcttgtggtgttggactggtggccttccttttctggcttcatgcctctcttaagagaattccatcttggttaggatccaggggagtaaggacgggaccgggtaccgttgtattttttggtggcatgacgaaacaacttgtgaacgtaaatgag

SEQ ID NO: 78393 - DNA, 1101 bp, Zea Mays
ttatgtgctacccgctgcggatgccagagagcaaggagacgtggtgacaggtacggtttcagttgattcgtttgtggcccatgttctttttgactctggcgcttgctattcgtttgtttcgaagaattttgtgtcgcgggctggtccttcggtgcagaggttgggtcacccaattttggttagttctgctaatggctccattagtagctgtgcagtttgtctggggtgttccgtcattcttcctgatgaggtctttttggccaatcttgttgtgatttccttgggggcattcgatgttatcttgggtatggataggttatcttagtatcgcgcagttatatcctgtttttggaagacagtgttattgcaggcaccgtcgggtagggaggtggtattcttgggaagttccccaaagtacacgttatccttgttgacgcaattgcttccggatcgccggtcaaggaagtcgggaatctttttctccatggtggtggagggtgaggctgccttgcgggtacatgacatccgtgtggtgtgtgactttgttgacgtgtttccggcagagcttccaggcattcttccagagcgcgatgcagcctttgagatcaagttgattccgggtacgcagcctattcataaggccccgtatcggatggccccaaaggagcaggttgaattgaagcggcaattggatgatctgctggctaagggtttcattaggcctagcaggtctccatgggcttccccagtattgtttgttgagaagaaggataaaagcaagaggctatgtgtggattatcgcgctttgaatcaagtgataatcaagaataaatattcgctaccccgtattgaggttctctttgaacagttgaggggtgcccaggtgttctccaaaattgatttgaactttggttatcatcaattgaggattcatgaggaggatattgagaagaccgctttttgcaccaggtatgggcattatgagttcatagtcatgtcttttggcttaacaaatgcccctgctgcttttatggaagcaatgaataggatgttgcatgagttcttggacgactttgtggtcgtgttcctggatgatattct

SEQ ID NO: 78394 - DNA, 432 bp, Zea Mays
gtaatatagcttttagtttctagttggtaccaaaatcaagagatttttttatacaaatgagtaggtgattaggaaggtatgggtatatatgtacaaccatcaaatgtgtaaaaatgtctttaaagcatgcataggcttgggtaggacatagtagggtaaggaaggactccataacgcatagcggatcttgattcctttggaagtatagcttgattcttattattcctcaacgagtttgatctccttcttctcgagtcttgatgtcttcatccgggtttgggactagaggttaagatagatctataggcaacagatgggtagagggtttaataggtagctatatgctagatgggattagttatgtaacctgttttgtaggtcaagttgttgggtgtggccgagttgatctaagtcaccaatttaggcgtatgt

SEQ ID NO: 78395 - DNA, 570 bp, Zea Mays
gccacgctacgttttttcatatcgctctaaatatttgttatgcgttgagccttcggactcacatcgagcgattaaatggtataatgggtacacagatatgacgatcaggttacattattaatcgactgagttaagacattggctaagcattgattgcgccctggcaacacgacacagtatttgtgtcgtacgaacttggttgtgtcatgtgattgctatgtcacactctcgcttaatcggaccgctcccgttgagtcgaatctccatcgtcgagtcgtgtatttttcatatgccctgtaggcactgtccgtctgccgtgatcatcgagccacaattgcgtctgttgcgcacgttgcatggacatattgtatactccgattaccaagtcacaattgcgcatgttgcgcttgttacggaggcttattgtgttgtcgtaccctgatggccgcatgcgcgttgacaccagatgctagagcttgtacttgcgtggattgtggtgggttgtttaagctcctaaagtcacattatgcgcaaccttcataaacaattttgtttggccctatattttat

SEQ ID NO: 78396 - DNA, 1147 bp, Zea Mays
cggcccagctagggcagaaaggcgcccgcgctggcagacttgcacagaggcccttggggttttaactaaccacgaacgagccctttcactatttaacacagtcactgacactttgctgaagagccccccaacttctaagtcttcacagggagaggtccacgacggcggtgggcgcagggatgctccggcgaggttctggaccggccgattggggctatgtctgggttctccgagcggcggacactaaatcagtactaccccgagcatctcccccaaatcaattgcaaggatggctactaggtttgctctggccgcagtgaccgtggactttgcgggcagatgaatgtgttcccgtcgattcatggcagttaagttaattggatggtttggagagcatcaagggcacatgagaatgttagaacaagactgaggatgacagtatcggacctgatttgcgctggccgcggcgaggctcgtttcacggtggcggagaacgaagttgggggaaattggaaattcaagctcgctggtagatgattgaggctgattagcggtggctagttagctgacgacctcacggagctagtcacgggctcaatttataggcggagtgagcggtggcgcttgaatcgacgatggcgcggtggcggccggagatgaggaagaagcctggcgcggtgaatacgtgtcctatagcgtggcagtaactccggtgagccacggagagcgagggtaaagcgcggtggtgcggtggaaagcgagagccacgcggtgcatggccgggagacggcggtcgccggtgtgtttatccgctcagccgcaaagaaggagagagagccacggtgatgtcaccggagtgacctccaactcaccgtcggcgaggggctcctaccgcacgatgttatccacacgcccagagcacgaatccaacagcggtggcatgaatcacggcggaaagccactggcggtgagatcttttctatggcggccgatctgatccggttagggcactgtaccatcgtgagctcccatcagagcacctaacagcccatatttagggtcgattttctccaatttttgtatggtgactaaaccaaccgtctgtaacaaagttgttgtccattataccatcttcatctttgttaca

SEQ ID NO: 78397 - DNA, 274 bp, Zea Mays
gccgagctcggcgtcgaacgtcagctgacggccccgtacaccccacaacagaacggggtcgttgaaaggaggaaccagaccgtggtggctatggcgagaagcatgatcaaggcgaagggcctctcaggcacgttctggggggaggctgttaataccgccgtttacatcctgaaccgaaccacaactcgaggaacaggcggcaagacaccgtacgagctctgggttgggaccacgccagcggtgcaccacctccggacctttggttgtgtggcgc

SEQ ID NO: 78398 - DNA, 508 bp, Zea Mays
cttgtgtggccatcggtaaggacaaaagacggtgagaagacaacatgatgaacaatgggagactaggacatctttggttggtgcctagtttgcatgtctaaccatagttaaagtacaaacttttgataaagtttgtcacaaaaatgagtcaacgacatgtagtacatggtgctttgaaagtggtgcatcattgttgttaatacgtgacaccatgataaagggtaccagagaaaaaaatacagaggtgtaggtctggaaccgctagcgctgacatgacaatatgcatacaacaatgtacggtgtagagaggtttagactcggtgtatatgtttatatgcaagtacgaacaaagcatatatacatagatcatgactgagctagcaaatgggaacaactcatgaatgctaataatcttccctggtgtctgtagtcgccgatcatcccgagatacgatgaggcgacaagaggggtgaatggaagccaatcaattttttgctgtcaaatactg

SEQ ID NO: 78399 - DNA, 760 bp, Zea Mays
tagcccaatgttgattgtttccatctcattagatagggtgaaacctagccataactttccttcttctacaagctcgatgtcacacaccacataagatttagtcgactgataaatcgaattaatccggtggctagcactagcctttatttctttattataatgtgaagtacattacattttttgttcgaatgctagaatcagcctcacatagactcatgttacatcgacgttttcctactggtcggttacatgaactagcctcatccaacaattatgtaagaacatctgctacacagtcatcatggttatccactaaagcctcttcaagttgattattttttaggttggttgcttggattggcttgtccatgtttttttgtcacggagataatgttgactgctaccgagggggatgacccattgtcatctttgtcttcagtcttctggtgccatactagtctctaggatggggtaatggttcatgattgggagatgtggagggtccctatagcggtggatactgctgacctttctgtgaaggcaaaggtactcttattctgcatgctctaggcttcatagtgttgtacacaacattttgtgaccataataggttgtccgggtactattaaggttgacaaatgtttccctataggtcttcatcattggccggctcttgatgacgtgcagcccactgagcaggccctcaaagtggtgggacctcctggattggctcatgttgtcgtgtcatcttgggtccaag

SEQ ID NO: 78400 - DNA, 712 bp, Zea Mays
ctagaccttgcttccgtcgccattaattcttcaaggttctcaaaattcattgctctcaatggttgccgctcattcgcacgagtttgaaccttcctccacgctgggagattgttttaggagacagagaggtgattcaaaagcaactccatgtcaaggggccctacccgatgccgaaccaagaggagattgtggcctaactcaaagtccagcttcataaggaattcgaattgtctgttgtttttttttcttgaaagctcgtttagtcgtttgctctggaccactgtatttacctgaactctgcagggcaggccagtgacgcatcatcgaatgaccataaatgggtagcctatggtcataaaattgcaccataaatattgcagctcctagagctgctgtcattcaatcaaaatgaccggttgtcaagccaaagatctcccctggatctcattcgcgctgcgtgggagacgtcgcagttccagggcacgggcctgcctggctcaccagtcaccagtaatgtttacaagacgcaaagcggaaggctacaggctagagaaggtgtcaagcagggcagcagctgagccgcccagtgcatgttgatgttgtgacggggcagtgaaaatctagagatgaagctggattggatacaaggataacagtgatcctgtatgtattttgttccatattctatattttatcccatattccatatttt

SEQ ID NO: 78401 - DNA, 472 bp, Zea Mays
tgcatggctagctgctttgtttgttgcaatcagcggctagctgttttgcttgctgaatggctgactgaatgtgcgtgctacagtgaggtaggtggatgttctggacttctggtaggtgcatattatttctggtgaatgttttgctagttgtttacatttgtgaatggtaaatgtattttgggctgctttgcttgttgcaatcagcggctagctatttttgttcgaggtgcattttaaattgtaggtgagaatgtgagttgtgagatcaatgacttggatgtttgctagcgttgccaggctacctgggatgctgccggtcagaaggttccgagcagccaggaagtaaacaagcgaggagaggtctgggaactgggatcgggccgtcgaggctgttcgtggaatttgggacaggcatgatcatgggaggatctgtctaagtgtctactgtctagtgaaaaccgctaaaacattt

SEQ ID NO: 78402 - DNA, 524 bp, Zea Mays
aggacacctcgcagtctagcagaacatgggtcaggacagcgcagtctgaatccggcaggcaaaaccgcaaccagcaacaagtcaacaccattgccaacccacccccacgagagacacagttcgtcgccaggagtatcccacacaacagtcgtggcaacaacactagaggaagaggcagaggccgagccccgcagccgcgaaggttttactgcctttttcatggtgaagactacacaaatcccaccagggattgccctgaaaccaaggccaccaaacacaggatggccagaaatcagccagccgacaatcagcgagttgtcacgcatacttaccacccctagcagtaccaccaacaacaattccacaatgagccgatccttcatcaacccaatcacatgtaccaccaacatcaagaggtacaagtcctccctcctccaccacatcatcaaaatcctccaccaccagcacccaagcaagaggacttcgccgagcagcctttctgtggggtcatccacatgattacc

SEQ ID NO: 78403 - DNA, 371 bp, Zea Mays
tcctccatgctcatccttaatcatcatattgtgcataatgatacatgcacatatgttcacactgagtacttgctaggagaaagaacaacctggggttgcaaaactatgaaatcgagctttgagcaccccaaatgtcctctccatattattttgtggcccctcctagcacgcaacaaactttgtagtccgtgggagcagaacagtcttcatgaacacctgctaccgagggtatattgccattaacatggtagtatccttagttgtactcgtgaccattcactatgaaattcatatttggtgcttcacccttaagtggttgatcatattcacaccattgttcgatcccaccactcctaaaaacatgccatgca

SEQ ID NO: 78404 - DNA, 327 bp, Zea Mays
aataaatggtgcgtgtacacagatattcatggtggaggaacatttacaattttagaggaagaatcttttttgacgctaaacatggtgtttttgtatctatgtacataaatgggtacggaggaacagaatgtagtgttctagatggaggactttattatttcacaatgtaaataaacatgatatatgtggtatgaaccttggatgcattttaagttaacttggtagcattcataacatgtatggtgaagttacggtgaagtattttgatcattaagaaatataatgatcataattgttctcgtcaaaagaaactttggaagaataata

SEQ ID NO: 78405 - DNA, 398 bp, Zea Mays
gtctgggtgtgggcgcggtgggtggccccaaagacacacgatgagatggggacgaggccgacaaggtcaggcagaaggactttggcatgacaagcccactggttgaggacgagtggtcggacttggctgagacagccagagggcacgatgctgagatgatgtaggagcaggggagttgagacccagcgaccaccgtggctggagcatgaggaaagaatgcacgacatggagaagaagacctagatgctggtaaaggagctgtggagcgctcgtggagggcacgatgatggtcggcgattgaggcagcaagggcgtggttcagtgtcgaggctcccagtagcatggcagacgggcgaggagggcacatccgagccaaggaccgagcagggtcaggggcg

SEQ ID NO: 78406 - DNA, 606 bp, Zea Mays
aaagaatgttgatgagctttgtgccaccaagaaaaaatgttatgaaatatccatggaatgcgctaaaaatttaaagaacagcttttctaaggttggagcctattcctctgagcagaaatttattcgtggaaatcctgatgaagtcattcaatggataaatagcgaatttgaagctttctaagaagttcttagcgacataggagacttttgtgccttcgctggtgcttgtggggctacgtccatcttggagaaggctggttgcgatcatgctaaggctgtagctcagccaaacttcgccttctcaactaatgatattagaaacccttcagccaaagctattaccctaggtgggaaattttactccgaagtatggctgaagggtggacgagaaatcgccaatgaagccatcaaaagaaatgagaaggaatctcatgatgcatcagaagaagtaaaaagagctgaagaagctgtcgagcgagctagatttataggtatgcattttaactcattttcgtaagtttttcagcttcgacactgacacatatttgtgtctcaatgcagctgagctctctccacctcccgaaccatacaaccctgaagttgacc

SEQ ID NO: 78407 - DNA, 812 bp, Zea Mays
tgctccggtattggctcaaccggacatcaccaagccctttgatgtatattgtgatgcctcaggcagtggactcagctgtgtattaatgcaagaaggccgagtaattgcatatgcttcaaggcagttgcgccgacatgaagagcattacccaactcatgatctagagctagctgctgtggttcatgccctgaaaatttggcgtcactatctgctgggaaatatctgtcacatttatacagatcataaaagcttgaagtatatcttcacccagtcagaattgaatatgagacaaaggcgatggcttgagcttattaaggactatgaactggaaattcattatcacccaggcaaagccaatgttgtggcagatgcactaagccgtaaggtttcctgtcactgtcttacggtgaagacctttgacaacactttatgtcaagagatggagaagctaaacctaggaatggtccaacaaggaactttgaatcagctgaagcttgagtcagttctcttgcaaaagataattgatgcccaaaaggataatgtgggtacgaaacacattcgtgagaagttaagggctggaaaagccaaatgtttcaaagaagatgatcaaggcattgtatggtttaataaccgcatagtggtgccgaagaatgaagagatccgccagcaaattcttgatgaagcacatcttagccgctactctattcatcccggaagcactaagatgtaccaagacttgaagcaacattactggtggacaaagatgaagatcgaaattgcacgctatgtggctagatgtgacacctgcagac

SEQ ID NO: 78408 - DNA, 865 bp, Zea Mays
gaaatcatgttgactgatcaacctctacacatggttgcctgatgaagggtacttcgatgactccataaaaaatgtcggagggcaaggtatctccccttgccacaaactttgccaacacatcgacctcctcattcttagcacgatcaatgtgttggaccgtgaacccaaaaaatcacctttccatactccgcatgccagataggtactgaagaagaattggctttctctatctgccatgtcactattctagagtctgttttgactatgtaggttcagactctgagggttttgagcttgcggagtcctaacatggttgttggtgcatatgtcatagtgcatatgtcagagtctgaggtgaagttgagttgtgcatttgcacttctgtatttggcacctgatggtgcagtgaagtctgttgcaaccctgacccctcaatggccccatgctgcatcataatgaatgatccagaatgtgtctatggtgggttgtgaaagggtgtctagcctagtccactctacaatgaagtctgctagcacctacgatttggtggcgcttcttgactcaaatgataagtagtattcggatagctccatggcccattttttgatcctggccgaggcctcgatgtttttgtatatgtaggctagactacgctctgtcaatactcttattttgtgggccccaaaataatgttgaagttttctggatgccatgaggacaacatgcacgatcttgtccatctctaacatattagccatcgactctgtgaggaccttagaaacgaagtatattagggaatgtagcagtttgtcttcagtctacttttcctgtacgagggttgcacttactacgctctgcaaggcta

SEQ ID NO: 78409 - DNA, 999 bp, Zea Mays
ggggccgtatgtcagccgtaatgggcgcgctccctctcaaaccttgctctctgccactgggtcctcctcgtcagttcgccctgtggatcttcccctgaacaccgcactccgcccacctcgcgcaacggatgccgagttcttcggcatggcggacctgtgcgactatgcttctgcgcgcatataaggaagccgggtccccacgccgttaacctagccacaactggttgcctcttctaccctctggcgcgacctcgcgcactggatctcctctccgctgccatacgccatcgtcacaggggggcttcgccgccgtcggctggagaaggaaggctacctccgccgctccactagctgtgagtactcctaaggacatacgctcgtacctcctactccggttgcaactagaatcgttcgataaaaggcacgcgtcacctggcgatttctcgccggagtggtagaaccgtcgtgcgccgtggacagggctcgcgcgcacgctttacttcagttgggttctgtccacgtgctcgggccattcatgacaacgtgtagagtatctagattggaggaattggtgctcgatgcatcggattgaagttcttccgatggctctctgccgtgggagctcgggcaccgatgttacccggtgagggctggggaagatgcaccgtggaccgttggatgctctatgcgcggctctgattgaaaaccaggtgtcggtttgggcgcgttcgtctgggatcgtcgatctcgagttagtcggccgggatttaatgatgtgtggagcgagcgattgccgtggattctagatctagtggcctcagttgtataccgtttcgtttcaagccgattggatcctggccctagaattctaatcggacggccagcgttagtccataccccttcgcgggtcacttttgttaaagagccctcggacttttagtgattaaacctgcggtccaatgcgcagggtggtctgtgtcttagagacttttaccctag

SEQ ID NO: 78410 - DNA, 453 bp, Zea Mays
ctttgatgtcgccacgaacatcgtacttgggaggtatccgtggaggggataatccatggctcaccatagtcgtcttgctaggttatggcctttctttttacttcctagtttgaacatccctatggttacctgattcatttttacgtgcgtgggttttgggtctccctgacccctttccatttcgacgatctcatatcttggataggagggagggggtgctttcgtgcatcttttacgcgcccgctatgcgtgtgcagggtgagcctctgagtctctgttcgatacaaagatccatctaggggacatgttctatctttatatttttactctcccccacaagtcctgttcgcggggaagaggagaggtgagtcataccacacttttctcaatgggctagcaatggtgctcggtgagatgtggtgagatgcaatcaggtaatctgagtgaagccct

SEQ ID NO: 78411 - DNA, 341 bp, Zea Mays
agttgaaaaaaattagagattaatagagttcaggatcagctagtgcataagaacaaagctgatttatctggttttatgggaaagggagtagtagaggacgaagagtttgatcattacattttaaatcatctgtgtggggatattatgcatgaagagatggatggcattgatgggctgattaagtcagtctgtacaaaaccatctagtcacggttcgttgtgttctaaaaagaggtcgggcttaattattaattaactgtttcccaatgaaagaaatcttttggaacaacaatgggttcaaggatttaaaataacttagatacgtttcggatctgaccaaag

SEQ ID NO: 78412 - DNA, 698 bp, Zea Mays
ctcatttacagtggatgacatagttttgttttcttctttcatctcatcactagcttttacaactatgtcatatttggcatttaaaaattcattttcatctttcaacttatcacatttggcttttgacttcctaatgatttgagtgtattccttaagcagatcagctagttcatcataggaaggtgaagcaaattcatcatcactatcactatcactatcatcaataatatcattatcattttgtaccttccgttcacctctagccatgaggcataggtgagaagttgatgaaggtgatggtggtggtgaagacaagtctccagcgatggcggcaactttttcatcattttcttcttcactttaagatgacccacttgatgactcaatgtcagtgagccagtcaccaacaatgtatgcctttccatttttctttttgtgtaacctcttgtgcttctcatccttcctcttgaagaatttcttttccttttctcgtcatcgttgtcatcatctttcttgcccttgaacttgttcttcttggcttgttgcattgatgagcaagatgaccaagctctccacagttgtagcagcccatttcagaaatgggctttcttttactggataagaatttcttctttcttgagtcaaacttgatgccttctctattgagattttttaacatccttggtggtcttcctcac

SEQ ID NO: 78413 - DNA, 328 bp, Zea Mays
atttttcaaattttctggttctaccttctcttggagctagtggtgggattttagttgcctggaaacatcatctgggagcacaggccttaacagaattgatgatcacagtatctcagtctagttctgcacacaagaggggcaagcctggtggctaacttatgtatatggaccgcagagtagtgaagaaaaagttcagtttctgcaggaactaagaaatgtcagagcagcttgtcttggtccatggataattgcaggggacttcactctcatctacaaagctgaagactaaaacaattctaatcttaatcgcgcaatgatgggtcgcttt

SEQ ID NO: 78414 - DNA, 954 bp, Zea Mays
ccggaaccaacttgatttcaaaagccgcatcgtgcactagtggaatgcctagtagctccactggaaacacgtcggcataatcacacaccacatggatgtcctgcactcgcaaggcagcctcactctccaccatcatagaaaaaaggattcctgaattccttgtccgacgattcggaagtaattgggacaataaagaaagagtgtactttggagtgcttcccaataataccacctccctacccgacggtgcctgcaaagacactgtcttccaaaaacaggatataactgtgcgatattgagttaaccaatccatacccaaaataacatcaaatgactccagggaaatcaccacgagattagccgaaaagatctcatcagcaaggaacaactcgggcagactgaacaactacttatggatcccttagcagaactaaccacaattgggtgacccatcctttgcaccaaaagaccagcacacgacacaaaattcttcgaaacgaacgaaaaactagcgctagagtcaaaaagagcatgtgcatcaaacgaatcaactgagaccgtacctgtcaccacgtctccatgatctctgccatccgcaaatgatagcacatatgctctaggaacacccgccaaataggaagctcccggagtgaaattaacagaagaagaacccccaaggagttgcaggatgaggcagacgaggagctccaaactgaggtggtaaaggagcggtcagtgcaggagtaggtgcgaccaagtactgaggaagacctggcataggcaagtactaaggagtcctgggcatataaaactgctactgagggggcggtacagaaaattgctgctcagtgtttgccatcgtgttgatagtgctctacgaaaggggaagaagtcactagatcccaattatgtttcccatttggattcctcctacaccacatccttgtgatcctg

SEQ ID NO: 78415 - DNA, 553 bp, Zea Mays
ccggaaagtagattgcgctcgcccgtggaaagatcaagtcgcggatgagttcaggctactgtggcctcgctgttcctcgaccacttgcaccggcgacgtggccttgcggccgtcaccggagtttgcgcccttcaccgggattgtgccacgcctcaggccattaaccacgtcgccgtgagttgtgatcgttacccactgaccgtcgtggcttcttatcccacaattgccacgaatcactgcgctagtaacctctcccctctccgaccgccaccgcgtgagttcaaattcaccggccaccgctcaagagccctataaattgagcacaccctcggctctgttaggtattccagcatccaatccacccgctcgtgcctccgattactcaccatagcccacgaattgctcagttcccccaaatctgttttccgccaccgtgaaagagtcctcgccgtggctagcttgttctaggtctgttcatgctctctgctctcccatttcagtgtccttaggttctcctaatgctcctcgacccattcaattgagctaaaccgcg

SEQ ID NO: 78416 - DNA, 469 bp, Zea Mays
ggtggccgtaactctcattgaggcctcagaggaggttgaggatgagcgtacgattggagacaagctcttcaagatcatgaagtgagtctgccatgccattcatttggtggcagtacttgatgatagagatgtcgccttgggcgaaagtgctgaaggcagtgtcgtggtgaagagcatgagcctctcggttgttggggaaccgctccttgatggcaatctaggcctggtgagtcgtaccaccctgttcgcggacaacatcttgggctcaatggtcaccgtgtcgaggatctagaagaggacgatgttatccatccgatgccaggagggtataccggtatagtagatgatgccatgttgttgaggatgtggtcatcgagggggtagcattgtagtgtgaggacaaggtcgcgccaacgtgcgtaggaggaatttgggttgaggacgatgagaaccagagacctgatgttct

SEQ ID NO: 78417 - DNA, 526 bp, Zea Mays
gccagatgctgcgcaggcgatccagcgacatctccgcatccgccgccgccgccgctgcctcctcctccgcagccgcctcatgacgatgattgccatatagacgtgcgatggaagctgatttaagctaggggacagttgatgtcttggctcgggagaaatggctagttgcgcatttgtcactgtgctgcctggttgcaggtctgtgtgccggccattcacacacacacactgacgccttacttctcaggccggcctagactagaagaaggcggattcgttccatctcgagctaggcgtacgttggaggagttttggtacaaggagagcttgtacaacctgaaccgcaatcgcaatgtatcattcataatcccttggtcataccatgaattttatttattttatctgcattctatattgatatatccacacacattggttgcatcttctaccaatgccaaagttgatcttgatcaccagaacgaacaatccctcctggcttaaacctcttcttacacgcaaactaaac

SEQ ID NO: 78418 - DNA, 295 bp, Zea Mays
atcttatgctaccgtgaaaaggaacgaaacggattttctatatcttcctcgcatttctattgctgatggaagggtttgggacagaatgtggtatctatgataacgtcattactcaatatattatcagcactgctctactctaacgttgttgcagatattatctgcactaactatctaacaagtcggtatgtccataggtattgccgaactgtcctatgtggcaggctttgttttcgtatgctgaattaagaaacacggtatgtcgctcttgaaccgctataaatttatggtttag

SEQ ID NO: 78419 - DNA, 729 bp, Zea Mays
gaatttggctgttcatttgaagtttgcattttcatatgattgcttgcattttgactggtccccaaaagcagggtacccaaagtagatccattactggtggcaggcacacgtatgtacccgctaagcatgaaaacgaggcagacactgttggcctacaccagccatgatgagacatgtcaccgcagaataccatcccgtctaacatcacaacatgtcgggcgaacatcgaggggccagcttagataggatgggacacaccctcatacggccatgaacatctccaacactgcgatatggggcctgctagggtctacgacagagttagagtccccaaatgagacacgacagtataacccaccataccgcgtgtgtgctcacgcaagcaccaaaagacgacgtcaccagaagaacttctgtaaatgacagaccccactcctatcggctgcaaacaacccacctctttgtaaaagtccttccccttgaactataaaaggggtggctgaactggaaccagggcagagggtgagctaaggaacattcaatagaagccttcgtgttcctcgctctttcagtctcacgtgtaccccttataacacatcctcgggcctccaaccccaaagagcaatacaagatcggtgctacaattttgaagcgagtccgttataaaccctaacgagtccgcactaacctcccccatcgaacacaaattctattgtgttcccgttttcg

SEQ ID NO: 78420 - DNA, 422 bp, Zea Mays
aaaagggctgctaaccagggacaaactaggagtagtacccatcctcgatatactactactcaaagtacacctgctcgtggcagttccgggcagcaaactgaacagacagaaactgctcctcctcaagcaagcaccccagtaggaactattgctcctaatacatccaccaacagatcatgctttaagtgtggacagtctggacactacgccaactattgtcccaacagagctgcttatactactccggctccaatcaagcaaggtcaagcctcgggaggcaagagtcagcccttatctatcaaccgggggcaggtcaaccatgcagaagtggaagctgaacctggtgaacctgaaaaccaagaagaagtgctggttgaagatgaagaagttggtgaagaaggcaatgaatagcaggattagag

SEQ ID NO: 78421 - DNA, 521 bp, Zea Mays
cgagacaacagcagatcctggacagccatatcaaccgcaggcacaaccccattcccaccagattcaggtaacaaaagactgggagcagcagccacagggggatcatagccatagacaactttaaaaggagagcaacctagagaggtgtgatatgtagtattgtaccaaaattcagccaatggtaaccacaacttccacttagtaggagaatcatgagtagcacatctgagatacatctcaagacattgattaacacgttcagtttgaccatcactctgtgggtggtaggcagtagacaataagagcttggtctgcatcagagtaaacaactgcttccagaaagtgctagtgaacactttatcgtgatccgagacaatcgatttaggcaatccatgtaacttgcagatgttgtcaaacacaacttgagccacttgaccagctgtaaatgggtgcttgagagggaaaaatgagcatatttggatagcctatccaccaccactagaataacagaatagccagcc

SEQ ID NO: 78422 - DNA, 524 bp, Zea Mays
cttgaggagaacttaaggatgctaggacaaatgattgaggagcttgaacaaacctggaacaagctggccgcggtgaggtgttcttgcggtgtattcgaaccgatttgggggaagttagaaattggagttcctcagtgaacgattgagggtgataatgggtggctgggtgtgtgatgaccttgcggagctcacggcgagctcaatttatactaagcgagagaggtggccgggaattggaacgatgacgtgcggcggtcggaggagggggagtttcactggcgcaatgaattcatggcatctactgtggcagtcattccggcgatcaacggagagtcacaatggttcacggcgatgcggtggaggtactcaggcacgtggcacaaggccagaaggcggtggtcaccggtgaggtcatccgattctaccgtggcgtgtgctgtacggtggccggatttgtttactggccggagttatccacggcgaggacccttactcaaccccaagcgctatccacatgttccaag

SEQ ID NO: 78423 - DNA, 689 bp, Zea Mays
cgccccggcgtttgcacgcatggcgagatggcgccatgaaaccggggagagacgctcgtggtcgcctccatttctcctcacttgccgctacctagcatcgcatcccctccacccaagctcgatcgatgaccaataaaagaagcttgagatcggctcctgcatggccggttgcgtgtcgctgggggaaatagaatagaaagaggctagatttgaggtcgctgcgttctcaccaccctctccacttctgaattgaagaacctacgatccgttccacaaccgggcagcggtttgttccgtgctgcaaattagatcgagaggccatcttcttcatctcagagtttcgccgtcggttggttcccggagccgcgccatttctcgacccaattttgtttcaggtttcattgacgacgttgcagtgctcaggtttccgcatttcgatttcgacttttgaatcgctctgaaactgcttgcgtgcgtgcgggcgtgcgtgtctgactctctgttcatgtgttcatcgcttgttcagattcctctctttctctgttttctctggacatcacggtttctgacgtctcggcatccttgttgcatgaatctgcaggcagtgtgatcccggactgtgcatgagctagctgaaaagggaaggggattccagagatgccgttgttcgaacgggatcgctaccagag

SEQ ID NO: 78424 - DNA, 1110 bp, Zea Mays
gccaggttgccattcctgattgatcatgaaattcatctctaaattctggaaatggttattgtttggatccccaacatgggcctgaagcggcaaatcagcaataccaggaacatggtccacttgaagcgtcggtccatcaacctcctgaggtccattgaatgcagcaatattaacagcaagcccatcccctagcaaaacaggtccctcctcaacaacatggccattctgaagaggtgcaacttgaccagcgccaaaggaactatccgacgacaagcctgagtgctgattactgagttgaagctcatccggttgaacgggttgcaaatcaggcgggaagggctgcggaatatgttgattgggttgtacgttttcgatccactggtcccaatccccatgggtgttgtcatcctgaggagctggcaaatcaccacccataggccccggtgggaaatttaggtcaagcccagccgggggcattggctggcccagaccgaagaaaaccaatggaagctgctgaccatcttccggggcaggaggaatagggtcctcatcctgagcctgcccccaagcatgttttgctgaataatctcacactgaacagtccaagaatcaccaacgaagccctcagcctccaaaaaaacaatgaattgagggacttcctcaagggaagtgacacggacacgaagcagggttctggaaacattaccccgatcctcctcccaaagaatcagcctaccaaacgactcaatggtgctagctcctcactgcctcttgaccttaattccctccttgatgttgattacgtcgacgtacctcctcttttcttgacctcttccacgctatgtgctgcctagtcgcctccgcctgcaccatgtgtgaccccgttgcctccacctgtgctacacacatcaccagaataaggtgttcccaatgctctaatgtgcggcttgggggtacgctgaggtgcaaaacaatccagagagaataacgaatcaacatggatatcattactagctattagagtgatgacaagtgctggccacatcgttacacaacttggcgacaactgctgaacttggtaaaaatcctcatgatctcgattgttattgc

SEQ ID NO: 78425 - DNA, 1350 bp, Zea Mays
gaggaggagcagtggaagcaggagtggtggaggtgataggtggtggatggctcaggagtgactggagcgggcgaagtgggaggtggggtgggagcagtggcgggtgtagagggagcgaaggagcgaggccgagaggcgagtcgacaaactctgtaagcaatctgatcggatgaaatctatagctgaccacctctctctacctgctcagctactgctgctagagctgctcgggctgctatatccaaacgtcgctcttgcagccttcgtgctgctctaggtagacggtctttcccttgacctacctgaagggacgaggagggtcctcgtcgtctcctccccctggcactgaaacattcttcgtgcgcaccatcctgacctgaagactgcatatgggagggaaaaactaagcaccaaaagagagtagaggaaatgattatgactgaggtgataaatacctagaaatctcacgagggagaatctaggaaggacaggagacaggcttacgagcaagcgaggtcactgaaatgacaaaagaggtgaacacgtattagtcacatagtcataagtatatgaaatgtgaataaatacatacacagagaattatgacaccgaaaacgagtgatttggcgatagagaggtcaaacgacgcgaaaacggtgtttgaacgaggaatagtgccataggcggtttgaaattggaattgaggcatgaaatgacttggaattgagccgatacttcacgaataggtttatgtgggtaaatatgagtgaagtgtgcgcttggtttgattttaggcgaagaaagtggaatgttggcactcgactcggaatcgatcgctaggaatggggatttgtggaaatttggagtctgggatatcggattgtcgtgagattttgcgaatatgttactggaggtatcatgaagatgcctgaaaaaattgggattgattggagcaaatttggctggtttgggcatttcaccgagcacttggcgtgcgaggttctaggtttaaagtgaaatgcatatttgacgtgagaaaccctcccaaagggagctaggaacctacaggggtattcaagatagcactgggaacacttccaagcatttgaatggaatcaaaaggtggaaggaaggggggagtggctagacagagtgaagagacggagaggggaaaggaaagataactcaccagaggatgaagagatgaagagggaggtgagcactgcgcagatgaggatcaccggagcacgttcggagcacggccggagcacgccggtggcgaggtgggaggcaccgagagccagagagagcagagagcgcgccagagagagtggaggaaatgtccctacc

SEQ ID NO: 78426 - DNA, 359 bp, Zea Mays
ttctgatgattccgtgtctaagtgttttgagtctgatgattctgggagttcggttgtgtggtcggaagactcttcggatgaggacttacattattttgcggccttggatgtggctgcgccggaggcttctccgcgtgtgatgggtgctgaagttcttcctggtccgagtgctgggcgtaggcggcgaagggcggtggcgaaacggagggtgagtgaggtggagggtggtcgtcttcgtgtggatggggctagcaaacgggaattgttgtcctcgccggctggggcgagtgtaggtgagggggagttgcgaaatctttttgagggtgaggagctgaggataatgttgttcaactacaggg

SEQ ID NO: 78427 - DNA, 273 bp, Zea Mays
tccccggacggcgggttgatttctataaactacagggactcttttgaatgtttgctcggccgaaagggtgcgggccacgatccaccgtccgatctacaacggacgcatcagattagattgcctactctgcgaaccggtacgctattcccgcccgcaagattaggaatcgacggcacagattttattcaccccaaagtcatttgatccgcccgatcggatctgaacggatcggatttcttgacctaagcgtaacaccccagggttccatcgtag

SEQ ID NO: 78428 - DNA, 898 bp, Zea Mays
gtttgaaatagtgagtgaaatagagagtgggccagatagagagtctgccggagatagtcttagagcaactcaaaaaggaaatgcaaaaaaatccccaaaaactgattgtgggggacatacggatacgtatgcaggttgaaacaaggtggtactgcagcagttccctcaaaataggaaactgaaaacaaaactgggccaaattttaaaaatcacatgcccattttgcctaaattgttggccaatttcatttcatccatgtcgttggcacttttatttgtgttttatgtcgcacaagactcggtcgcacaggaccaagatgtgtgtgttggcgattgggggagaagtctactctcacatatctaggattattccaggacacaaaaaattgcgggcaacgaatggggttctgttggagtaataaaaattgggttttgcctgtaaacaaggtattgggtagcctttgaatcatttcttggagatgctcttaagcagactctgcatcccactctgcaaccccttccaccgataggtcccgagcgtgccaccgtatgttgaaggaaggatcttctcgtcggcgtgaagtcggtggaggctccgcctcctcggcgaccgaagtccacagagctgcggccggtaacaaagcaccattttggtacgaaccccccgtattcatctcggtgctcatcgattgaaagatttgctatgagcgagtagcccgtggcttcaataatctaggttgatctcaactggttaaccccatcttcgttgtgattatctcagtgcgacgtcatgcgattcactagtgcccttgtcgatgttgtgcggagacatcctaaccgatgaggatgtacaagaggtgatttaggccctcttcccccacccatgtcctttccttggt

SEQ ID NO: 78429 - DNA, 453 bp, Zea Mays
gggaaatacaatgtgacatgtgcctatttttgctaaaatgttagtctatacatgctaaacaggccttttctagtgatatcatcatcgctactatgtgcccccaccctttcacagcccatcagatgttctccctgctgcgcatggatgataacatttcttgctcccaacaaccatgcctccctgcccctgcgccagacacctctggttctccattgttagataactcttgatagtcccaatagtcccttgttgtttgtgttttcagtcatagtcaggttattcagttagtgttcagctaggtgttagagtagtcagttagctcgtgccggagtttacctatgctgagcgagtctcacggagaactggttgtcatgtgggccgtggggatggacacgactgtgatcatggcgttggtgtatctcagtgatttttttctctatatgaatatacaac

SEQ ID NO: 78430 - DNA, 532 bp, Zea Mays
gtgggatgatcgcagcaacggtgctctgcctcttacgcttcggtgccatcgcaatcttttcggcggaacgagcaggatcgagacctcagggaagcagaggagtggttcgaggtgaaaaagtgaagttagggctcaggaataaaaaaagcacgtcggtgcgagtataaatggggtttcccaggtcgggcactatttctaaaagtgccagttcactactcgggaaagcaaagtttcaggcatcactcggtggttacctctaaaatgccggcagtgtcagacattactcggcggttacctctaaaacaccggtagtgtcaaacattactcagtagttacctctaaaatgctgtcagtatcagctatcactcggcagttacctctaaaacgtcgacagtatcagctttcattcggcggttacccctaaaaatgccggcagcattaggaatatgggtgaactatcaagcgtgtaaacagaaaaagcagcaaagacaacagtcacttgaagcatctaaagtttttcattaatattgga

SEQ ID NO: 78431 - DNA, 1712 bp, Zea Mays
cttcggaccactcgtacggacattaggacgacgcttgcgagctcctcggtgagtggtttcctttgtgtgcaccggcaacggaggtgtaacattccccggctcttgaagacctgcttgaccccaagcaggggcgaatggaaagcactgttggagagcttcacggtcctcccaagtggcgagatcgagcggtaggccagaccattccacaagcacttgctggacaaggtgatttcccttggtaatacctctggtttgaagaatctgttgaggaacactgaactccggaagagctgatggcaaggtagcagtagtggcatttttgaagcctgaagcaagccggagttgagaaacatggatgactgggtgtattttgctagaagcgggtaaggccaagcgataggctacattacccactctggctgctacctgatatggtccaaagtacttgtagctgagtttgtgatgagcccgcggcataaccgatgcttgtacatatggttgaagcttcaagtaaacccagtcaccaaccgcaaattcccgctcagacctgtgtttatcagcctgacgctgcatgcgaagctgagctcggaccaggtgttggtggacaagatcctgcataatagaacgatcctgtaaccattccgacagctgaccaggcacagtctggttcggagatacgcctagagaatgtggtttacggccatttaggacttcaaacggagatgaacccaaagccgaatgaaaagtagtgttataccagtattctgcagtgggtaaccaagaggaccatttcttggggcaagcacttacaaaacagcggagaaatgtctctagacactgattcacccgttctgtctgaccatccgtctgggggtggtaggaagaactcatgcgcagctcagacccggccaacttgaacagatgttgccaaaagtggctggtgaagacaggatcgcgatctgatataatagccaatggaaatccatggaggcgttacacattggaaagaaacaactgagcgacagaggcagcagtataaggatgagatagtggtatgaagtgggcaaatttggtgaacttatcaaccactaccattatacaatctgctgaacctgagcgagggagaccttccacaaagtcaagtgaaactgtgtgccaagcagtaagaggaatggggagaggttgaagtttgccaggatacgtcgatctatcaggtttagcttgcagacaaacttgacactgctgtgcaaattcttggatgaattgcttcagtttcggccaggcaaacaaactcttaacccgacgatacgtggctggaatgcctgaatgaccacctatagcagaggtgtgtaacgcggacagtaccctattttttaactgagaatcatcgcccaaccagattctgcccttgtagcgtaagataccctccttcaagataaagtgtggcgctgccgttggatcaagcgacaatttagcgatcaaggacagagcctctggatccttttcatagctagtctgaacgtccttcagccattgaggaactactgctgaaacagcctgacactccgcatcaactctgtgcgacaaagcatccgcaacacgattttcagagcccggacgatactgaatcttgtattgcaggcctagcaactttgtgaacaccttgtgctgccaaggtgtgtggaggcgttgctcattaagctgcgttaaac

SEQ ID NO: 78432 - DNA, 492 bp, Zea Mays
ctcggaggtgatctgtagtgaactcttcttaggacagttacggaagtaatgaccttcatgtccacattgatagcaagcttttctttaagttatttcttgactttttccatgtttccctttttgtttcttggacctgatgtgaccacgaggctaaaactgtgtgcaagtaatagtccatccatcaatgtaacactcatgtgtttcttcttggggttgggcatccttgtgatgtttcctttttggaatactttgcaattcatcaactgacagtgcattaggtatgagagaatctgctattagttgttcttgaggagacatctattctttttatgtcagaaaataaatatggttcctctgttttgtggtttcactttcgtttgtactaatctggcgacaaggaattccatagtactcacaacaacaacatgttccaaggtcacttgtctgttggtttagttgtgcatccttttgtgtcttgaatgtctattcatc

SEQ ID NO: 78433 - DNA, 605 bp, Zea Mays
cttgccgtgatccatggtctgctgagaggatcccaaaaggcttcagacaacattaccctctcgacagaatgctatttttgggaagcagagaagcggcggttgaagttagttacgggtaagtgcagaatgaccctttacttatagcgcctaattggatccaggaagccagtagcaggccacatgagcctcacattaggtgcaaacgagaaaaggacaagacaacgttcgacccgggagaagtccccgagaggaaatatcatcccccctaggggctctactatcgaggatatgatccccggtccctagggcctatctgtcagcgagcacactgacgaaaggcctctggcaaccgggacccgctagtcagtatgaggagatatgtaacgtctaccctagaataactcaaccttgggcgaaccccgcgacatcgagcctagggccgggtgtggcgagaaccggatagaggggccaggtgtgccgaagggataccactctagtggatcccacgcctggcatgtcataaatgaccaaccacattaagtgtgcctgtcgctgagccatagcagaggtgccggttgcctcccactcatgacctacgaacccgt

SEQ ID NO: 78434 - DNA, 313 bp, Zea Mays
cgaccaggggaggcctcgccggccgccgcgctgggaaagggagcaggggctgggtggactggagctgcgcatgggcatgggatgggatgcacagcagggggcaggctcagggagagaggaaatgggtggggctgcacgacaggaatcagcgccggccatggctgcaaggagtctgagcttcggtcgatggtctaagcttgctacgcaggtagcgacggggaagaagggtaaaggagagaggggaggagataatttcttaccggaggagaaggctcgccggaggaagactgcgctggtgggccgtgctggctgg

SEQ ID NO: 78435 - DNA, 939 bp, Zea Mays
aaagtgggtcgacagagagggtgtcgcggcggcgttctacggagcagagaagtgttccggtgatgggactctagcaaacttcaattggtcagctcctagagcaatagaaagctataaacaagctagaacatgaagcaattggggagttactaacccgatgagtgctggccacggaggagtccttcacggcagcgcgaagaacagggcagaatgggtttgtggactgtgtgagttcttctggtgaaattgagtcgattgctcaagtgcttgtgtgcgtgatgtggtgaagaagcaagatccgggctcgatttataggccgatggacggagttggatgaggtttacgacggtgtaaccgcgctggcgagctcacccgctcgacatcaccacgacgatggtccgatggccgccgactaaccgcgcagcgccacctcaacgttttgacgccacgctgcggaagattttttaccgcgaccgcatacccatccccagccacggtggcgatcttatctccggcgggatttttctgaaatctgatgaacagtgcgccacgtttcagttaaaaatcgcctgacagcccatctttggatcaaattatctccaaattcctcatggcaccaaggcttaatacctatagcaaagttattcttctacaatggctctgctactttgttacattgacccagggcaaattctttgaatttctcgatctacagagctccaaagttagccctgatcaactgttttcagacttagctatataatcacaaaagtggcttttttgcaaataggcccaaaacttagggtttcatttgcaaatccccaagtatgtgaaccatatgactagagacaccctatttccatgatttttgcacttaggtccaaaatgtgcacattttgcatataaccccttagggttttagtccaaggttttccaggg

SEQ ID NO: 78436 - DNA, 566 bp, Zea Mays
agattgtgagaaaacatgctctggtgcatttacgtcattgtagacaaccaagactctccaaaacatacaattcagcagcttgtacatccaaacaggaattgaaattggctgttttcctttgtttccagctatccaaacaatggtatttaggagtcgaccgactatattatctatgagccctgaaaattggctcctagctactacgtactacaacgtatttgttcagtttttagcagggattcaattgcatggatacgcaagtcagtccaaaatagctgctactgatgattgccgccagttcctgcgtatttagccaaaattaaagctatagccacggcaatacagtacagtacagcttcttctataaaacccactgctggtctgcatatatgtcaccatatcataagctagacagctacgtatacaccacccattcactatcaacagcattcctctcaacgttccctgtaagaaaccagcaggacaggaggatgaggactagacacctgctgctggttgccactcccctcctcctgctcctggcagtatcctcaggtacttccagc

SEQ ID NO: 78437 - DNA, 786 bp, Zea Mays
cgcctagaacccagttgttggcattttcagccatctacaccaagtggtgtgaaatgcatcatgacacgcaaatgatcccctacctggtgcgccaactatcgatgttctaaaaccactagagagtgatctgcatgctttacacatccggtgcagaaggtgtgcaaaggatgacacaaagattttataatggttcgggcataatgtccctacgactagtgggttacttgtgtaccctgcaataagtttgtaatgggtgtggatgaattccatgtgtgttgtaagtgtgttcactatttgtgctatctaattgctcatgtcctttagtcgccaccttgcccttccttttatagaccaaaaaagggggatggccttggtacacaaacacatcgtcttgaccggtcggatgaagctttcattttgctactttgtcctttcgtcccattgaatgcccatcgtccaatggtgacatcgttgttccttaccgtgttgttgtcctgacccgaggcatgtgtgtcttgtcttatcttggtacatacacctggttgtcctttgattcatagcttggttctttagttagcttttgtactgatggagcgtgtgggtgccctctctagagtggtcattcaagttgtccgatcatcagagcatgtgtttctagtttttaactcatgtcctgacattcaagcgttggtctggtacttttgtaccatcttcgagatgggcttcagtaatgctttctagagtatgtggccctcgaggggttgggcacagcctctgacctctagg

SEQ ID NO: 78438 - DNA, 472 bp, Zea Mays
tattagttactaataattattaggcccccgagagtgctcactgctcacccgaatgtagcatttaggcaaatccaacccagcacagccaagttcagtttcttccacatctccctggatacaaaacagatcccaacaatcgatttccaattctctcgtttaagaactgaactaaaagctaggcagcacacgatgacgatgtgcagtaggaatcaatcaatcgaggttggcagctagcacctagatcgatctccctgcttgcggctacagctgattcatggagacagcaaaaaggcattcatctgtctgagtgactagtgctgcatcagatggccatgcatgcattatccattagcactggaattagtggtagccaggcacgtcaacaagcccctctaaatcctctccctgttcatcatagaattagaagcaagtagctagggtctagcccgaaaggacaaagaaagagatcaaa

SEQ ID NO: 78439 - DNA, 413 bp, Zea Mays
ggaaactgtggtccgctagagaaggtggaaccaaaaccactgccacggggtccttggccatatggcacacgaccagcaccccgccgagcacgaccaccacatggtctctcctcctgaggcctagcagcaagaggcaaagcacctctaggcctcgcaggacatctctaaacaggctgagcacgaacaccaagagaggggcggttcatgttcttcctgctcgactcagaaacccgccgctcatctctcttcctcctaaagcaaaaagaagccagatgcccatccctctcataatactcacaatggtacctcacctctctcttgggtggattttgtttgtggaagggggctttctttttgggtggctgaggagctctaggaaggggatcactagagatgttgggaagggtatcaag

SEQ ID NO: 78440 - DNA, 755 bp, Zea Mays
tgggatcagttggcgatagtaacccacccactcggatggtcggggaactggactctggagccctatgtgatctacaaagggggattgattgcgggattggtgggtggcgttgacgaggaagtttccattccgtcttcaatggatcttcgtcttcctagtgtcaaaggcatgctgacagggaagtcggtgatgcccaagttctgctcgagtcaacgagcttcttttgcagctgtatgcccccgactccacagttgccaatccttagttgttgcaacttctgctgaacttttgagcctcaaaaccttgcagtccgcagtcgtatggccactgttgcttattagtcacttgatctgaaccaaatcacaaggatgtcacaattcttagaattctgatttcatttctgcgaaatttgagcctcagaatttggtttcaacggggtggagagattaattgtggatgtctcgcttattatgcttgcaatttcaatgcttttcacccagatggagcagaagggcgccggtccgggagcacggagctcccacgccatcacgctgctcgggggcacggcctactcgttcggcggcgagctcaccccgcgcgtcccggttgacagcaccatgtacgccttcgacctcaacacccagacgtggtcggcgctggacgcgacgggcgacgtgccgccgccgcgcgtgggcgtgaccatggcggccgcgggcggcacggtgttcacgttcggcgggcgcgacctggagcac

SEQ ID NO: 78441 - DNA, 351 bp, Zea Mays
gttgccgagtatgaagccttagtcaatgctttgcgcatcaccattgagctaggggtcaaactcctagacgtccgagggaattcccagcttgtcatttactaggtgatgaaaaaactcgagctgtcatgatgcgaggatggaggcttactgcgaggaagtttggtgcctcgaagataaaacttttcggcctggagctcaaccacgtcgcacgccggtacaacgaggtagctgataaactggtgaaaatcgcctcagggcggaccacagtccccccaaacgtcttcgccaaggacatctccaaaccctcggtaattttcaaggaggcgtccgagatcgtcccccacgaagaag

SEQ ID NO: 78442 - DNA, 847 bp, Zea Mays
ttttcaacatgtaagttattatcaaccccagtaacaaattatcctggcttcgcccctggtgtcgggtatagctcctcgcaagcataaatagatggccccgtgaccgcctcgtccattggctcacgactcacggccaccatagaaggtttggcgtagagagaatctgagagggagagactgtcgccactgacgaactcgagtgggatcgcggcccagccctcaatgcgtggtgggagatgttcgctgagacatgtgtagtctttaggatgcttcctcgcatgcggtgacctgtggcctgtgggagctcagggaatttctcaccgtcgtgtcacgacaccgaggaaccaccgcgaaccatggtaatccacatcatagtcttgaataccggtaaattctatacccataggttcgccatagcctcactcatcttttacaccaattctcgtcgcgattaaatcatcgaatcgtgggattgccgcgcaccgggggtgctccgccgtgagggaaaagcacctccaccgccagtgtgcactgggagggagaaacgtgcccgaccattgatcatctaatggacgatcaagattaaaacagcccttaccccttcgtcgcattaaacgttagccatcggattaagatatgtcagctagaaccacgcatgtgtgatcggctgtggcatatatgcatgagaccctcaggttttcccaaaccaacccaccatcctttctccgttaaaactaattagaaacaagtcccttgattttgcaaataagtccctaaagctcgattttaattataaaaatgacctaaaacctcatttattctctatattgcttgttttatttttgtt

SEQ ID NO: 78443 - DNA, 484 bp, Zea Mays
gaagaatctgcacaagctctttaacacacataagctaccttgggtgagcttggtctggaataaccattataaatctggaatagtcccttctagcaaaaaggtggggtccttctggtggaaagatgtgctaaaaactctaaatacattcaaaggaatctccaaagcaactattgaggatggtcgtactgttcaattatggtatgagtacgatgtgtgcgacactaaaaatcactctacaatgtatactgagttattctcctatgccattgagaaagacattacactcatgcaagcaaaggtgatcacacaacatcaggacatgacccacttacctatgtcaaatgaggcatttgggccatttcagctcttcactaacgcgcttcaagggcaacatgcaactggtcactgtgtcgtatggtaatacgactgggaaaacaaaaactactcatcatagaaagcctacaaacatatgtcaaggtcttcc

SEQ ID NO: 78444 - DNA, 492 bp, Zea Mays
cttttcaatacattcgagtgccccgggtacatcttcggcagagaggctggtttcctcatgcagctccaactgaattgaaaatacttctcaaccgagcggtgcatttgcttgcaaacttgaagcatctctccttcagagccctcagcgcctcactaagcttcgtatttttctcagtcgcaaccttaagtgttgctttcaaggctttgttttcttgttcgaattgattagaattttccttcaaaagtgtctaagagtctgataggtctttgcttaacttcttgttctgagtttgcgcttcagcaagggacccttcggctgaacatagcattttgtctttctccttcaaagaggctttgagttctttgaccttatcctctaaacctttgataataatttcgtttttcctgtattcgtcgtcttgttgtatctttaaagttttgcttagtaataaactctataaaaaaagttcaaacttagaatatttaagctaat

SEQ ID NO: 78445 - DNA, 921 bp, Zea Mays
ggcatggccaaccattctagcctctaccgcctcccccacctcgaggagagcctaacaagcctaggcagcctcagcagcaggaaggggaggggtggagcttttccatgcattgacagggaggtcaacgtcatcttcggagggcatggagcacaagagaacaggaggcagcaaaagctcaacgatcggcaagtcctggtggctaccaccagtgccccagctccttaccggtggtcggagcacacaataaccttctaacggagcaatcggcttaagttggaaacaccttaagtcggtgcgacatgctcacacttacatgacttagggtgatcatataccctactaacggagaaatcggcttaagtcggaaacaccttaagtcggtgcgacatgctcatgcttacatgacttagggtgatcactatgccctactaacggagcaatcggcttaagtcgaaaacgccttaagtcagtgcgacatgctcacgcttacatgacttagggtgatcactatgccctactaacggagcaatcggcttaagtcggaaacgccttaagtcagtatgacatgctcacgcttacatgacttaaggtgatcactatgccctactaacggagcaattggcttaagtcggaaacgccttaagtcggtacgacatgctcacacttacatgacttagggtgatcactatgccctactaacggagcaattggcttaagtcggaaacaccttaagttggtgcgacatgctcatgcttacatgacttagggtgatcactatgccctactaatggagcaatcggcttaagtcagaaacaccttaagttggtgcgacatgctcatgcttacatgacttagggtgatcactatgccctactaacggagcaatcggcttaagtcaaaaacgccttaagtcggtgcgac

SEQ ID NO: 78446 - DNA, 477 bp, Zea Mays
gatttaccaagtcttctgaaggtagggattggtactagcgtgggcttggttacctctggtttgagtgctgtcagaagtcgccaaggcaacttttcaatttttgtttgggatcctggtgattgtactgtcatatcgccagcttcaagtgtcgttccagtgttgcaagagttgtcgaatttcagatggagggctgcagaggaaacgttatgcattcaacaatgatgcagcagaagaagctgatcctacaccatgagcgacttgggggcaagccacattttaaggagtggggaatgttaggtatactatgggctatggtcatgtatactagatgggctataggttatgtggtattaaggagttataaatacatgctcagacatctgtaaaaggtatcaaagaagaaatatcagaactctatcgagaagcctccgtgctcctctgtctctatctctcttcttctccaagtctctatcccag

SEQ ID NO: 78447 - DNA, 289 bp, Zea Mays
ttcgcctgctatacggttcggaggccatgaccccgcaggaaatcaagcatgggtccccaagaacaagcgcttcggcctcacccgatgtagacgagctaacctccaaagatctcatcgatgcagaccgcgtcttcgccctgtaggccctcaacaaatatcaagcccaaatgaagacctagcgcgaccacgcagtcgtcccgagggaattcaacgaaggagacctcgtactcgtccgaacaacccggaccgagtcacgaggtaagctggagccgaagtgggaaggaccatt

SEQ ID NO: 78448 - DNA, 606 bp, Zea Mays
ttgttctttcccggttgccttcgtctaatataatagctcgtgcatattgcagaaacacctggcatctggctctaatccttagctcctcatggcccatataaaaccccctactttgacaatagcttcgagggtaagttggtgaagatagatttcaaaagttttcagaacttcgaccaacattttgtctagagggaaccgaagtccggctttcatgaagcttctgaaaatcaccacttcgtcagcttcgggaagaggaacattattctccccttcgactctcacaattgaaatatcacgaaagtacctccctctcattgcttcgatctacccttgtttaatagtcgattttccgaagactacatggccgatcttcggcatcttcatttccactttctacatcgaaactctcactatcgctagagttttcagatattccagctaacatctcattggcgattttctccatgttggttttttccatagcttcgtaaaattcggccagcgccgggtcaatgatcttcttctcatcagccatttggacaatggttgctagaatgtcgaagctcaaaatccaatcaaactcgacgaagcaaggaaggttaaaat

SEQ ID NO: 78449 - DNA, 651 bp, Zea Mays
ggaaagattctcatataagataaggcaaaagtggtcctatgtcacatgaatgtgtaatgaacatccagtgttgctgctataaggccaaaataagaaaatgaacaaaaacacctgtcacaacaatctggagcgccactgcatctagtaaaacaaggcagcaaggcatgaagcacacacatactacagactccagtaacagctgattcagcaaatgaaagagcaagcacagaatttatcaccgataactgcatccactgtacaagcactgcaggatcaaagagaacacttgtgttgcaggtagcgatataaaaaaaagcgaacatattgagcagtaaaatactgcattcaatcaaccatgcccggcgatccttatgctaggtccccactccccagtaccctttgtactaaatcctcagttcctcttcatcagccggaggctgaattttttgtaataatgaatggttgagtgcaaaactctcgaagctgaaaatttacaagcaccctagttcaagaaagtaacaatttaccagaaaaacaactgcatcacccattttccggaacacaaatccattaatctcaaaggaaagaagcctatgacgagcaagaagcactaactggaagcggcacggaggcagaggaggcgcagctcgt

SEQ ID NO: 78450 - DNA, 453 bp, Zea Mays
gagcgtgttcatccactcaacaagtgattccatttctccaaaactgacaagttgggtcgctttccacgtacaaacttcttctcacctgtgggtctttttgacctccacatttcagatgatgaaagtgaccacaaaaaaatactgcacctgataatgctatatgtccacatgggtcagatgtcattccaatcgggttaggtcattctgctttgcctacatgcaaccatggtgttcaccctactcctcccaatgttgtattacaacctttagttaagtcacatgcaaatttctctagaagccttattgagctgtgtcctgaaagtgatacaacagcagtagccaacattgatgtaccagagaaggttgtttctgtgctagtttctcatgctcaaaaggtctgctatatgcctttttcactgttctttttggttagctgagtttctgtttttttac

SEQ ID NO: 78451 - DNA, 695 bp, Zea Mays
caggaagttgcagccgctggttcttttcctgttagcgcggccggcgtcgttggcttggtgctctgggcatgcatcgaagaacctggtctctagcagcgcacgcagccacgctggtggggcacgctccgcatcggaccgagccatctccctcaggctcaccatttctgctgccctggatggaaagtacagcaagcatggtgagcagacaccgtacctaaagacatactaaaaatgcaaaccatgctactaagtaagaagcgaagaaatttagcagactgaagaaatttcaccaacctgcacctcggatggtcgatagatggagatggagagcgaggcagattgagatttcagagaccaccaccactcttctgcctttatccttattttcctacaaacacaggatggattgggatctgagatcttagagatatagtatagtagtaataacggacgtattaaatgatggtggatttgtgtgcaatgttgccacgaaaattttgtagtgtgtgaaatgtgtgtgcaaatttaaaatttgtctcaaggcgggggaaaaaaagaaaaactggaaacaactgccaaaagggcgtgaagcacatgtgcatggctgggtagcaatgacctggtgtggtgattatatgccttccaaaaataaccagatctccaaatagatgtcttggcccattaagttttttttt

SEQ ID NO: 78452 - DNA, 460 bp, Zea Mays
attttattattcaacatgcttcgggaaaaaagttatctgaagaagaaatcatggaagccaaacaatacacccgggaattgaaatacctgaagggggccttggtgtacaatggtacggacgaagatgatttcctatactgtctcctagacaacaaggaaatatccgtctgccgagagatggccaaaaatatgggatttccgaagcttgaagctggcctctccaccatgccaaaagatgatctcgctgacagccttgcgtacaacagtctgaaggtacgaaagtgatgaacttaaaaatagattatcttgtcttgtattctcgtgctggttctatctttttgtagggcttaattcttagcaacgctttgagggcgcagaagaatactgaagatgaaagctgtcagatagccctcggtaaccttcggtcagaagttatcaagctgagaaatgaagccatcgaa

SEQ ID NO: 78453 - DNA, 623 bp, Zea Mays
cgactgttcacactatttgtggacgtttcccttgcaccttaagtctgacaccttttccacccttacaaattttttcgcttatgttcgcacccaatttggtgtcaccatccggggtgtccaatgtgacaatggtcgcgaattcgacaacctcaacgctcgcaattttttcacctcccatggagttcttttacgcatgtcttgtccttacacttcccccaaaacggcaaggtcgaacgcataattcgctccatcaataatgtcgtccgcacgcttctcttccaagccagcatccctcccactttctgggctgctgctctcggtactgccacatatcttctaaatatctttcccacaaagacacttgcttccagcacaccccacttcgccttacttggcaaacacccctcgtacgaacatcttcgtgttttcggctgcaagtgctaccctaatctcacccccactgcaccccacaaactatctcctcgctccaccctatgcgtcttccttgggtattctccccaccacaaaggatacctctgccttgatcgtctctctcaccgcatcatcatctctcgccatgtggtcttcgaggagacctcttttcccttttctgaggatctctc

SEQ ID NO: 78454 - DNA, 879 bp, Zea Mays
ccaccacatccatcgttccggtggtagcagaagattccatgcgactcgacgatgttctcggctacttcaattcacccaaatgtctgcgtaaacgaatcacccacctctcccttccgctttctgctctctctttctcctctagtttgcgctgcccgcacgatagagccatggccggctgcgagacggggctatttttgtcctagatcaaggcatgcagtggccggttggttggagacctcggttatctcacgtggtgggtgagagtttgttgggatttgagagtcgcggcgcgacatgattacagtggggttcggtaagaaggtgaagatgacagcgtggtcccacccggcagacacggctcgcgcgcgcgtgcttactatggagaatggcaggtggggttggatgtcggcacgggtccgatgctggctagattcattttgggttggcgcggcagtggatttgggccacgcatgtgaagaggaaatgggacggcagcggaggaaatcggcccaagctgattcttttccctggtttattctttttcgaatttctgttttccttgatattttataatttcaaattcaaatatggttttggttgttgaaattcaaatatgaatgcaacccaaggaaaataccagcatgtatgagaagcacattttatttatttaggaaaatgttccgaatatgtcatgaacacacattattcaatatttgttttaatggctcattcaaaaatttagtatttattatgcattttcttcattgtaaaatagttttacccctttttaggatataatttcattcccggagaatagtcttatcaattatttagttttaagaaaatttataattatttaagtaggtttcaagttaaatc

SEQ ID NO: 78455 - DNA, 740 bp, Zea Mays
ctctaatcccacatctagaacgtcagagcagatgtccatcatatcaccatcagttggctcggacagcatatcttcaggaacaacatcctcaagagcctgatcaaaatttgctagggataactcttgcagaccaacaagagcagacagagctggagaaggaatatcgctactccccccactgactctgtagcgccgactgttcttccgaattagcgggacttcctcttcttcttcttcgtccttgtcaacaatacagacaacaaacggcatagggtcacacccattgggttccgctctggcagggtcacacccattgggttcagctctggcagggtcacacccattgggctcagttctagaaggatcacacccattgggatcagcatcagtagggtcacacccattaagttcagcatcagtagggtcacacccattgggatcagctccagtaaagagttccaccggtacctcttcagcagcaggagcagaagggccagcatcctggtccaagcacgacactcgccgaagccgtctctttttctttttcttcccctcagcaggtgcagttgaatgactgacttggcgaagacgtttcgggcgagtaccctcaggccttcgagtatccatgtttttttcaggctctaggatagttgcaacagccattgtttcagtagggaccaagtcagaagattccctagccaacatgtccagcatagcacttatctctacatcacccggac

SEQ ID NO: 78456 - DNA, 480 bp, Zea Mays
ccttgaagaaaatatcaaggacttgaggattgccaagaggaagaaacaaaagatgaaattcaatgcctcttccaaaagccttaaccatgcctccatacaaagtaacacccaaggtaataatcaagccacacttcacactaagaaaaataagaagtgtagtgaatcctttgaagagggacacttgattaggtcatgtccctacattaaaaatggcttgattattaacaaggatgatagactttgttttaaatgctcaaagaagggacacttaatcaaatcttgtccccatttgaaacaaagaggcatagggttagaaaagaaagtttttactaaccatgtagcaagcaacaaacaaggaaagaagaaatcttcaagacttcaaaaacgcctatgctacacatgccggaaaaagggacatcaatgcaaggattgtcccattggtaacaaccccactcctagcttgtcaattaattctcatgt

SEQ ID NO: 78457 - DNA, 519 bp, Zea Mays
caaagatctgcatatctactttgtatctctttcaaacgggagacgtctaactgggttacgtgatctacgaccatgatgcagaaatagaggttatgtatagggtgactgtggagtagggctagcggggctgtggcgggtcagtgcagtgttgatgcgtcgtggtgcaggttctcgtgcagcggcaaggaatacctctgcaaaaaaaaatgaacagaagcctatcaacaaaaaaatttggcagcacctcccctgcacggggaggtgttcaaaacctgcaaataaaagtagcagcacgatggctgacatccacacatatttcaacgacacaatggccgacaatcacatctatatatattcaatccataagagatagcacacaacaagactatataactacataactatatgtaaactacatttatgttataatcgaatcattgcgtgcgcgggccacgagagacaaacaaaaagcccaagagatatcgatacaaaatgtctggcccaaaatgttgtaaccag

SEQ ID NO: 78458 - DNA, 935 bp, Zea Mays
aaacaatttaactttgtgggcatcagttatacctatatcatttacttgtgccaagtactgtcctacatgttcataggtggtttttgaatcgtctcccaaaaatttaacaaaatctggaattctaaaaccccgagggtatgtcactgtatcaaaaaaatcaagataaggcttcttataggatctagtatgccctttaggctcagaaccaaattccctaagagtccttgctacctgctccctaacattttcaaatgcttcaccatcataagtcacaggtgtcacaaaaggggctgaacacaatgctccctgcgcccctgccacatgcctgtttgggacagatccttgcggcactctgtttcctatgggattaataaatggtccatatgccacattttggtaatatggctgctgcagattagaatttgctactgcactcccactcgtacccttatttgttgttttctatggtgttgggtgcaactgctattccgaagctagatgtgcccgacgaattcgctgcacgtttaccctgactctcttcttgtatctgttgaactatagatcgaatctgtctaggcatgttgttgcttatatcttgcttaaattcagatctaaacgcatcgaaagaattacgcactccctcagaaatcatacgcgtaatttctgtgacatcagccccatacttgctagctacagaagtatcaatcatgtgagctagctcttcgcaagtgacagatgaacttaccttcttgccggacgtgcttgccccaacggtctgtttgatcacaccattcttggtttttcggaagcaagccaacctctcattccgtttctcttccatctctcgtgcgatttcttcttcaatctcctccctgtctgcctctgtaagatcttccatcgtgactttgatcatgttcaagggatgaacttcagat

SEQ ID NO: 78459 - DNA, 422 bp, Zea Mays
tgtagacgctatagttgggacgaggctcgatggagtggacggaaagcacggcatctgcccaagaatgaatacggcccgctggagacacatacacagatacacttgggccctgtctgtcggcctcggctctgcggccagtctctttcccggcccattttacggcccaaaatttacgtagtaacccacagttccatcgaaaaagataattcacgccacttcctccctcctacacggagcaagatggttcacagaaaagcaaattctgctacaaataattaaccgagaaaaagaatcacaatctacgttttaccaaggtgaatccttccttcataatgcatataatgtttgttcacaaggacacgtggaccaccaccagtactattcaaattaaatagcgggggaaagggggtttgggaggccgc

SEQ ID NO: 78460 - DNA, 370 bp, Zea Mays
acaggataatcgaggaagctatagctaacggcactttggacccaatattaaaagatatcgatgagcgagctattcgttggatcttaggtcgggcaggtttgagtgaggacggcaaacttttgcatccagaataggtaggcgaagtttcgacaaaaattcaagaatatgcagataagagaaagaagggcgaatttaagccttgaagggagaatgacatactaactgcagcactaggcaatcctgaacacaatggacgggctcggggaatctcttctaagatttcctggagagaggcgtttccagagtatgcgtcgtcatataggaaacacgagaagtcaaaaaggacccttgaagagactattgatgaaag

SEQ ID NO: 78461 - DNA, 381 bp, Zea Mays
gaagcatgtgggtgtgtgagatgataatttgagtatgacctcaaaggttagcggagatgttcaagaaagactaaacttagaaagtttgagtggcacataaaccctagaacacttaaaaccctaatagagaccctagaaaccctaattagtgctctataagatgagatcaatttctatacacttttggaccaaagtgcatatatcaaagtggtagagtaacaaaagttaagcaacttttacatttggagatttccaagttttatggaacaaattggagtaaatttcaaaaaggtcccaaaggcacccaaatgcttaactctgaaaaacagtgatattgggctgattttaggtccttgtatcccttaatctaggaagaatttg

SEQ ID NO: 78462 - DNA, 397 bp, Zea Mays
agagtttgaaattcaaaattgggcatgaaatgactgggaaatgagccaatacttcatagataggtatatatgagtgaagtgagtgcttggtttgaagtttggcagaggaaaaatgtttttggcactcggctcgaaacggatcaccataaagataaataggttgtgaaacatgtgtctagaatatcgaatgtgtgtgaaaactgacataggaggtactggtagtagctagagtgtgctggaaaaagttggggtcgatttgagctattttggctggtttaggcatttcaccaaacaattggtgtgcgaggtttgagaatggtggtgaaacgtctatttagggtttgaaacctcctagagggagctcaaaatctgtaggggaagcatcatagagtaccag

SEQ ID NO: 78463 - DNA, 526 bp, Zea Mays
ggtcggaggcagtgctacctactgatctcaagtttggggcgccaaggttgattttcgaaagcatagcagaagctgaggccaccaggctggaggacatagatgtacttgaggaagaacggctaaacgcagtaatccaatcagcaagataccagcagactctaaggcgctatcacgacaaggctgtgcgacaacgattcttctcagtaggagatctcgtcctccgccgaattctaacgggggagggacgacacaagttatcacctttatgggaaggacccttcgtggtagcagaggtcactcggcccgggtcatatcgcctcactcagatggatggcacagaagttgggaactcctggaacatagaacacctcagaaagttttatccctagttgtacctcaaaactgctagggtgatgatgtactctgtaaagtggaaatatgtcatcaataaaaaagaggtttcaaggatactcagttcatttacgattgactggcacgcttacttaactcggggtgaccactatgc

SEQ ID NO: 78464 - DNA, 533 bp, Zea Mays
ggagcatccagatcaagtatgcatcagtggcacactcaagagctaatgggcaggtagaaagagccaacgggatgatactcgatgcactcagaaaaaggtgtttgacaagagcgagaaactcgtaggcaaatggatcggggaactaccatatgtggtctagagcttgcgaacgcagccgaaccgagctttacacgaaaacaccctattcttcatggtatatgggtcggaggcaatattacaagcggacctgatctttggagcacccagattaacgttcgaaaacataactgaggcagaaagcaaccaggctagaggacatcgacatattagaagaagaacggctgaatgtggtcattcagtcggctagataccagcagaccctgaggcgctaccacgacaaagcagtgcggcatcgatcctttgcagcgggcgatttggttctccgccgagtactgacgggagagggacggcacaaactatcaccaccatgggagggacaattcatcgttgcagaggttacccgaccaggatcc

SEQ ID NO: 78465 - DNA, 414 bp, Zea Mays
ccgtgcttgcagttgcagccttctctattgtctcgttcgcccacgagggagggagggatggactaggatgcttcaccattttggttcggtgctgatttggatccctgtcactgacgaattcagtgttttttaggcatgtttagatctgacagtctcacgtttcaaatgtggcaaaatgctgcagttttattgagctcccagtagttcggaattcgatatccattaacgagaaggaaattgccaagatcaagctaccgatatgttctagaaccatggacgaaccagtgattaatctactgagttgaaaactctgcgctaagcaaactgggctggttcatgcacacacctgtggccctgtggacgcttagtgtgtgccattgcctgctcaatggcatgcaacctccacacttgagc

SEQ ID NO: 78466 - DNA, 672 bp, Zea Mays
ctgacattagctctgtctgtaagagaaacgctttggatgttttgttggagttgggatagctcaagtgatgttgcactgcttagacaaggcttcagatgttgtaagatgccattgtttagcacctggtcgacagtgatctcggtgtttttttgcatggttcgtcagcgagggaaagcagtcggctattgggtcgttgtgcgtctagtcatctagccaaaagcaagtagtttttccattgccgatatttgtcactatctggacccgaaggtctaaccaactagtgaaataatgctgcatgtccttaacttaaacgtgtgatataagatgacacaagtctttattctggtttaggcaagagaagactctacttctagcagggggagatgagacttatattacttgcacctaagtgcttgcagtagggaatacaagctgagcaggagaggagagaatccgaagtccttggggctgattgaggctaatgccaatatcgtggtggaggggaaaccgtgaagtgttttgcctgcccttctaaagccgtagactatcctatttatattctcaagagtagctgcctggagtactggagttggctgcgcattatgaggaggtgtaaccgtggtcctgtaaacgatatggtctggagtatggccttgtactttttgttaactt

SEQ ID NO: 78467 - DNA, 277 bp, Zea Mays
agtgatgcagctgagttagtccagaggtgtgaagcttgccaattcttatcaaagcaacaacatttaccagcacaacaactgcagaccatacccgtaacatagccatttgcgtgctggggactagacatgattggacctttcaagaaagctcagggaggatacactcacatgctggtcgccattgacaaattcaccaaatggatagaatacaaacccattgcttctctaacctcagccaaggcagtggaattcatacaagatataatattcaggtttg

SEQ ID NO: 78468 - DNA, 487 bp, Zea Mays
cggtaacatacgctcgtgtgaagcaactgtttgcctagaagggtttaaaagctgatgttaagacgtttgtcacaaactgtctgacctgtcagcaagccaaggcagatcgtgctcgtttaccgggcttgttacaaccattgcctgttcccacatcgttatggcaaatgattactatggatttcattgaagctcttccttgttcccagtcatatacctgcatcatggtctttgtggatgccttcaccaagtatactcattttctgcccctgaaacaccaatgagcaatatctggcctggtgacagtaagataaactaagctgccaacaagatgtctatatcaagatggatcctccaaaggtgtcccatcagtcggacgaagagataagtgaagatccataggcgtggcaacagtgtgagtatcactaagaccagaacgatcaaggaggtcttgtatgtacttggactgagaaagataaataccattttg

SEQ ID NO: 78469 - DNA, 669 bp, Zea Mays
ttgagacgggaacaaccatggcatgcacaaaatcccttgaagaaaatgtcaaggacttgaggaatatcaagaggaaggaacaaaataagaaaatcaatacctctgccaaaagcctcaaccatgcctccatacaaggtaacatccaaggtaatgatcaaaccacacttcacaaaaagtaagaaatgtagtgaatgctttgaaaagggcacttgattaggtcatgtccccatatcaaagaaaatggcttgattattactaaggatgataaacattgttttagatactctgagaagggacatttggttaagtcatgtccctatgtaaaacaaaaaggcatagttttagaaaagaaaatatttacgaaccatgtagcaagcgagagacaaggaaagaagaaatcttcaagacatgaagatcacctttgctacatatgcctaaagaagggacatcaatgtaaggattgtcctattggtaactatctcgctcctaacttgtcaattaattcatatgtaactagacaacccaaactgcaacttgtgctagaaaggtaatgagtttacgaagtgtttgcacaaagaacatttgggttcctagatctttgttgactaaccttgatggacccatcaagagatggggaccaaaatatgcttgacaagctttgcaggggaa

SEQ ID NO: 78470 - DNA, 487 bp, Zea Mays
gggcagaccgagagaaccaaccaagtgctagaggatatgttaagagcttgtgctcttaaacatggtggtagttgggataaaagcttctcgtacaataatagctaccaggccagtttgaagatgtcaccgtttgaggctctatatggcagaaaatgcaggactccactgtattgggatcaaactggtgaaaggcagtactttgggcctgaacttatacaagaggcagaagaacaattgcgaatgataagagagaatttgagaactgcacaatcaaggcagaagagctatgctgatatccggagaagactactggagtttaaggagggtgatcacgtgtatctgaaggtgtcaccaatccagggtatgagaagatttaaagttaaagggaagttgtcccctcgtttcattggacctttcttgatcttaaagcgagtgggagaagttgcatatcaactagaactacccgatcatcttgcggatgtacatg

SEQ ID NO: 78471 - DNA, 802 bp, Zea Mays
gggcagcatcagctagtggggatgcgagtttagagatgcgccgtgggaggaagactgactaccttgaaatcccgctcaaggacagtatcaaaggatggcgcttggaatggtttattgttgagaaccacagaaaatctctccccccacggtcagggagacagccggatgttcgtactccaagttggaccgagtctcctacagaccaggaggtggctgaggcaggggctttgctggctgaggttggactactgaaggagaggggtttgactgcagaggctgtggttgctgattttgttttcaagaacatccagccgttgaaggatagggcatacccagcctacttgtacagaggtttagctgactcaacccgggtcaccaatagaagaattcccgctgtagacttggtaaaccggcttgaaatgatacttagaggcaaggtgtccaatgttggtgcccctatcgcatactcggcctggaacctgcctccttccaaggcttttacccattttgtgtcgaatcctcctgttgctgacggcggtttgggccttagagtacgaccctctgtagaagaagttagtgctttggttgcttcgattagagaaattcccgatgatgaacggcaagtccactttgaggtgcctttggatcctaatgatgcagaaataagtgctatgcttgatatgctggctgaagactcttctgatgctgctcctgctgggacattggcggtggtgcctctcccggaagctggtacaaccttggatgttcagaagcctgtcagtgttcgctcgaaacgcccttg

SEQ ID NO: 78472 - DNA, 2028 bp, Zea Mays
cttaaaggaatctcgccctcgagatttagtctggatttgggaaaaggtaagggtattccctcctcaaagagtcctcactttcccaggtagcttcctcttctccttctctgcttcactgaactttacagagcctcacttctgagttgcgggtcttccggactgctgagtcaagaatctttattggcttatctcggtactaaagatctttctgaatctggattgcctcttcttcgatgtgactttctggtaattgcaggcatttgcgaagctgggacacatgaaacacattgtggatattagacatggattctggtaattcaagacggtacgctgcgggtcccactctgccaatgatgggataggggccaacgaatcgcggtgctagctttcctttcacctggaaccttctgacaccacgcatcgaggagaccttgaggtagacaaagtctccttcctcaaatctgagttctctccgcctgttgtccgcataacttttccgccgactctgagcttcaagtaatcttttgtggatcagggtaactttctcttcaacctctttaacaaaggcaggcccttccagtgtcttttccccaacgttggaccacatgagaggggtctggcattttcgtccatacaatgcttcgaacggtgacatcttgatactggtctgatggctgttgttatacgagaactctgcataaggcaaactagactcccaacttttatcgaacgttaacacacaggctcttaataaatcttcgaggaccttgttgaccctttctgtctgaccatctgtctgggggtggtaggcggtgctgaaatctagcttggtgcccatagctttctgaaggctcatccaaaatttggaggtgaactgggttcctctgtctgacactatcgtccttgggatgccatggagtctgactatctctttaagataaatccgtgcaagggtggctcctccaaaggtagttttcactaggatgaagtgggctaccttggttagacggtctattattacccagatagagttgttccctttttgcatccggggtagttcggttacaaaatccatgcctatctcctcccacttccattcgggcactagaaggggttgcaataggcctgcaggcttctggtgctcggctttcgttcgttggcaagtgtcacaccaggccacataatgtgctatctctttcttcatccctctccaccagtatctggttgtgaggtctaggtacatcttggtggttcctaggtggatggagtaggctgagttgtgagcttcatcgagcaggacttctcgtgcctccccttttggtacacacagacggttcttgaaccaaaggactccttgttcatctgttgtgaggtccggaagttgttctttgcgatctttttccataagtcttgttgtctctgagtccaggcattgagctttgcatatgaggtcttctagcattggtttgacttctaggctgccgtcgtttcccaaacatgcattcagctgagctgattccttcttccaatcttctaaaaagttggttccctttatcccgaaaggttttcggctgagggtgtctgctaccacgttggcctttccggggtgataatgaatctcaaggtcataatctttgattagttccagccatcttctttgacgtaggttgagatctggctgagtgaagatatacttcagactcttgtgatcggtgaagatgtgacatttgttcccaattaggtagtgcctccatattttcagggcttgcacaatggctgccaattccaaataatgggtgggataattctgctcatgcggcttgagtaggcgcgatgcataagcaatgactttctcgttttgcatcagaacacaccctaagccttgtcttgaggcatcacagaagacgacaaaatcctggtgtatatccgatagtgttaaaacgagcgcggtcgtgagcttctcctttatgatctagaaactttcctcacacttcggggtccacacaaacttattgtctttcttgagga

SEQ ID NO: 78473 - DNA, 371 bp, Zea Mays
ccacattaggcataagaatctttttaccatcggctgcaacacccctctttctatgctgcggaggatcacaatcagaccgtgtatttgtagggtctccaatgtcagtcgagcgtggaatgtcaacactgaaacattcttgacttgactcaatgattaaacgcttcggattggttgggggtcgatcaaccttccgcattattgaagcaccagcctgcaaaggaagaatgtaaaacatatgtgctttattgagttacatcaacatatacaccaatgattatacgaactaattgtacactcaacacagtcatacacattataattcatcaattgtgttatatgaccctaacaacataaatgtcaacacagtcaaa

SEQ ID NO: 78474 - DNA, 360 bp, Zea Mays
cgcgaccatgcaatgcaccggtgatggtctccgccggtgggggcggccgccgctggtgcgggatctgctgcgcgcaactatcggtggtggaagacaacccatgaaccgtagatcgcattatcagtggccaggattagaagatagggccaacttgactagagcctatctccaccgttcgatcatttaccgacgtgtaggattagatcgcgttcaaaagtgacttggaccgttgatccattatccaatggtcctcgctggtcaccagcacataacacgccagatccaatcttcaccgctagatctaatctggacggcttaaaccgctcgataccctttcgtcgttcacattttctaaaagag

SEQ ID NO: 78475 - DNA, 547 bp, Zea Mays
tttgaaagctatgagagaatatgtgagggtgccaatatttgtccccaacatgtgttcttttgtgtgcttataagttggtatttggtttggcgcaaaaattcttagaaaaatttcaaaattcccttagtttgggctcaccggacagtccagtgtgcaccagacactgcactgttcactgtccgctgctccagcttggcctcggcttgctctacctctatgcagactatccggtgtgcaccaggcagtgtattgtacactgtccggtgtgcccataaccgcgaattcaaacatcttctctcgtccaggcccgcacgtcagtcacttagattcttttatttggccacaactatgctcttctcttcctccagtccagaccacgtgattctctctgtctagttcagccagcgccaccaccttgctcattatccttctacaccgccatgcctgtgcttcgctgtagggctcccctcgtcgtcggtgtccagctccccgtcgtttgtgctcagatcctcccctctcctctctggtgagcagatctcacctcttc

SEQ ID NO: 78476 - DNA, 629 bp, Zea Mays
cagcagggactgcatcagaagaatcttcagctaacatatccagcatggcacttatctctgcatcactcggattcaaaggcacctcaaaatgaacctgccactcgtcgtcaggaatttcttcaagagaggcaaccaaagcactaacttcttcgagagagggtcgcactccaaggcccaaactgctatcaccagcaggagaatttgacacaaaactggtaaaggccttggaaggaggcagattccaggccgagtatgcaacaggagtgccgacgtttgacaccttgcttctgagtatcatctcgagctggctcacaaagtccacggcaggaattcttctgttggttatccgagttgagtcagcaaagcctcgatacagataggccggatatgctctgtcttttagcgattgaatgttcttgaaaacaaagtcagcgaccacagcctctgcagtcagacccctttctttcaacaatccaacttcagccagcaaagcccctgcctcagccacttcctggtctgtgggggattcggtccagctcggagtgcgaacatctggctgtctccctgaccatggggggagagaattcccatgattctccacgataaaacattccaggcgccatcccttg

SEQ ID NO: 78477 - DNA, 997 bp, Zea Mays
tgcttttctaatgttccctatggacttggtgaaaatggttcccttcccttttgtccccgattttcttagtacttagtataggaaacgaattttggcatacttatttcgggggctctcttactctccgatcatgcaccaagcggctttggcatggctcatcagtcccgggaagcggtttcacaagattctggtctacctcggtgctatggcagccatccctaatttctggtgtcccgcacgcctccgaggtaataggaagtgttgcattgggggtagcagggtcggccgcggtgttgctcgggtttctcgctggtgattatgagttgtcttgggaggatgcattgtcccttcccacgcattccatccaccggaaggggaagagtgagctgtctcttgctccttttttacgacggaggttatgacgagcctccctttttgtggggcgagcccctgggtcccctgatcgttacggaggatcctctagggggcgtgtcccgtttcttctctgtttcttcccacgcataccattcacatggaggggaagggcgagctgtaccgtgctccccttagtggttgagatcatggggctcaatgggccaggaacgactgatccaaatgggcccttctttttgtggggcgagcctccgagtcccccgttcgttatgggggatctgtctaggggcgctccgtattttaataatcttcccacacatcatgtttaccggaaggggaaggttgggtcgtaccatacttccctcgatggttgagatcatggcgctcgatgagctacaaacgggtaatctgagtgacgccctagctccttcagcgagagccagacgcgaggtctgctggtgaccatcctcatgctcctaggttctgactcatatagttgttggccccgatcgaccgggtccgatgactccttgcctctctccatgataaaccactagtcagatgttcccttcgactcaaacacaatttagaaatgcccttgacg

SEQ ID NO: 78478 - DNA, 512 bp, Zea Mays
aaatattcttttttctcacgctactaatgattgcaatctgtctcattgtcagttacaataaacaattaatgagggccagttgaatttttggaaatgcaggtgtataaacagcccttccctgtcaacaccatcgatctcgatggtaagaaagtcttggttcggctggaggtggccgataaagaaaagggaaacggtatcatcatcggcgaccctcgggtcctcgatgaaaacaggaagatactctctagggaagttgttgttgagaagacgccggatggaggagaagacgataaagatcaccatcaagttctccaatgcgggggcaggcacaggcatatagcggggctaggactcctgttttgctcatagcggacggtccggcctagagacgaggacggtccgggtcaccagcggtcagtcagtcattgactagagacaacagcgactacgtaccttcaaaactcgacgacacgaaataggaacatggaagaaaaatacaactaaagtaccta

SEQ ID NO: 78479 - DNA, 695 bp, Zea Mays
ggagagatgggaagagcaaggccgcgaatgaggaaagggacatagatgacggattcatgggtgtcttctgttggaactgtgaccccgcgacaaattcacctagagcagatctctttcggcagtaaaaccccaacatcgacaaggtgaagaagatcgaactctgagataatggacatatggttacccacgaaaggcaactactgttggggtcaatggggggaatgatggccacggcggaactttgcctcttccgcttcagtgccatcgcaatcttgacgacggaacggataggagcaatatcctagggaagtagatgagtggttcgaggcgaaaatatgaaattagggcacagaaatcaaaatgcacatcagcgcgagtataaatggggctttcccgggtcaggtgctatttctaaaagtgccaagtcatcactcgggaaagtaaaacttcaggcatggctcgacagttacctctaaaactccagcaacatctaactcggctcggcgttacctctaaaacaccggcagtatcaagcaccactcgacgttacctctaaaacgctggtagtgtcaagtgtcacttggtggttacctctaaaacaccagtatcatgagctatcgcccaatggttacctctaaaacaccggcagatttaaatatgactcgacggctacctctaaaaacgccgatgtcatc

SEQ ID NO: 78480 - DNA, 694 bp, Zea Mays
atcgaatgtcggagaagccacttcatcggcggactggggaaatcatattccagatcccccctacatggcacaccagatactagtccttagaatagggctaacgacctagtatttggcgctagaggaagagtgacatagggacacacaggcacacaaggttttagagtggttcgagttgccagagcgtaataccctactccatagtgggttgtattactgagagcttgagaaagcctatgactagatagagattcctctgagggagttcgagtgcaaatgtccctagggagtcttccccgggagcttgggtctaggtgtcctcccccttgcaatgcctgtgccctccattttatggcctacgaggagcatgtataagggagttggggtctgacacgtgggactaggaatactaaaatatggagcacagagtgatggatagatctggtggaccaaggtcttctcccgcagtgggcataaatcttctcttggtcgtcgtgcaagatcctcttgccagactcgtcttcgccccgtcttgtcagtgtgtgggtcagtgggtgaaggctctggtgtaggctgcggcgtagactgactcatcgacttgcataggggagtaggtgggtggtgttgtcttgtcccctccgcctatctccgtcgtctgcctgtgtagcaggaatagtagaaatcattatgggag

SEQ ID NO: 78481 - DNA, 548 bp, Zea Mays
cctacccattttccccacccaacacgtagcagcgtcgccgtcgtcgcgaagctgttccgctatcgccaccgagctccttccgtcacccttgccatgatgagcttcgccttggtgccagctgcttagtactcgccccaatccccctccctttctttgtcctcgctcaccgccgttactcgtgcagtcctggagccgtcgttgtcgaacaagccgccactgtgtcgttgctgtctctgtggaaattccgagtctcgcattgagataaggaatctcccctgccccctccattttcatcccttactatctgtcccgcacgattgctcgtgggagttgctcgcaccgccgccaagccgccccactatgaaccctcactctctgatgcccctaccccagttcagcccccaccatcggatttcctgcacccttccccgaccatcccagcagctctaagacccctagagcgtctgtgcccctcatctccagcgagcttttctccatggacatgggcagcgccgcctttggtgcccagaggaaagggccagagccgg

SEQ ID NO: 78482 - DNA, 685 bp, Zea Mays
cttgaagtcatgtaaagatcatcaccgtggataagttctggccagtaaagtatttcggccaccgtacagagcttgccacggtggaacccgataagcatgccggtgaccgccgctttccggctttgtgccgtgtgtctaggcttttccaccgcatcgccgtgacctgctctctctctccattgatcaccggagtgactggcacggcgtaggacacgaattccttgcgccagtgaactctccctcctccgaccgctgcgtgtcttcgctaaattcaccggccaccgttcgctaatgctataaattgaagccaccgcaagctccgtagtatcatcacgcaccacaccacccagtataacccccagacgatcaccagtgagctccaattttaaacttcccccaaatctgctcaagaacaccgtaggagagacctcaccgcggctagcctattccaggttagttccagtgccttgatcatttgttctagcattcttaggtccttctcaagctcctcgacccctctgattgaactagaccaccatgaatcaccgggaacacgttgttctttgggttgtccgcgctgtcaccgtggacagagcaaggtagaccgccgttagtaaaattgagtaaggggaaaccattggtaggactggaatttggtctctgtcgctcgggagcaccagttctt

SEQ ID NO: 78483 - DNA, 379 bp, Zea Mays
gggaggcgcagtatagaagaatgcaccgttcctgaagaagcaagagacacgcagggagcgagggggagcacgtgcacgtcgcctccttcgcctaggctcctccaggcgggttcgcctcgactccttcgtccaactattccagtggaggaagcaaggtgtcagatttactcttttaatggatgtccggatgcttccagcagggagcggaccccggacgcaacatcgctacggaaggagtcggttgatgaagagcgctagcagggagcggacgtaacatcgctacggaaggagtcggttgatgaagagcgctgattcacgatccgatggcaggaattaattaaagtgacgtggctaaatggtgtgcatgctttcctcccgc

SEQ ID NO: 78484 - DNA, 433 bp, Zea Mays
catgctgcgaggcttagtcttggcgagcgcattgcccttggccaggggatggtggcaaatctatatgcggaaatggataagattgttacttgcactgtggccgatggtgtgtgtggccgtctagatgtctgcgtgccagtctggatgctgcaggtgtggatgtgggagcgctacaagaggctgtgcccgccggagctgaaggcaccgcagttccctgtctccaatgtcagggtattgtattggagccggaggaagaagaagagcacatctgaagaggctctaaagattttgctggacgaagtatgctttgagtggaggccctatcggcacaactccctcaactggatggaacccaagtggttcaacaaggacaccattttggtgacctgtcatggtaaagataagccagagtggttgttggattacattgctg

SEQ ID NO: 78485 - DNA, 314 bp, Zea Mays
accgttcgaggctctatatggcaagaagtgtaggactcctctatattaggaccaaactggaggaagacagttctttggacctgaacttattcaagagacagaagaacaagtccgtataatccgggagcatttaagggtagctcaaaccaggcaaaagtgccacactgataatagaggaagaccactggagtttgaggaaggtgatcatgtgtacctcaaggtgtcaccactttgtggaatgaggagatttaaattcaagggcaagttgtcccctcgcttcattagaccattcatgatctttaggcgagttgggg

SEQ ID NO: 78486 - DNA, 1172 bp, Zea Mays
ccacagctggtatcggagcgagtaccactacagagaaatcaataagtcatgaatgccaacttttgaaaaatatttattcttagaaaccagtgttggatcgtcaggactagaacactagacctatgacgaaaggcattaagaatagtggggaaaacatttgctatataagtaggccctataggccaaatcttagaatagtagggatgccctagaagcacccctctggtcggtgagaagacgttctttccagtatgcatgcattataaaacataaagaaaatagaaactaaggaaaaatgcatctaattatgaatttaacaagcattgttaataatgaataacgaaatgggttggattggataaatctaattttaacccacctcctcttaacaacccgggcacatgtttctccttaccactaccatgacgcttacatccaacccttttttcacagatgacttcacccacccccatcaatggaggagatactcatttcagtttttactacctttcccacgagggttttccttccatcttgtgggaggtgctctgcttcgccggttaccctacaccccctctgtatacggtgcagctatacgagtagcatcgggtgccacgttgcagggtttggctgaccctggagtctcaccctctatagcctgggtggcattcccttgactcctagactgtcgggttcagggcggatgacaccattgaggctgcagcgctaaaagccctaacaaccttctacggatatcatcccctggagatgatgatgcacccactgggactcttccctgccgagaagagggatgaccccatgtggtgcgacagagtgagccacatgaaggacgtgtaggccatgcatcccgactatgttgggaggatcactattcagtgtatgagcgcattgtatcgcctacaggccctgcagagcgacgccatagcacacctcactgatctagctcagactactaagatcacacttgacagtcgagaggacttcatggtcgacttgtgttcggaattggtggaaaaagacctacaggtggaacagttaagccagtgcattgcaactctagagcagcaggtggaaatccgggataacaccatcaatatcctggagatccagctccatgctgtgcaggaggaactcgaggaagctaacgacca

SEQ ID NO: 78487 - DNA, 947 bp, Zea Mays
ttcgggatcaggagatttagcttcttcggctatttctttcttagttgcagcgggctccatctcaacagacactgcaggctcagctttggcttcagcttcgaccgtagcagcttcaacaacttttttcgcgggagcaggagttaatgtttttgtggtttctatggcagcgtatagcatgctggccattctcctcaacttaggagttgtggtaggagcctttgtcacctttggcaaattctgcctgtaccggtgggctcagaattttcggcattatcactgttttttccaattctggctcctcggttgcatcatctttggcttcggctgacccgactgtaggcaccttcagcactacaatcgatccttcagtgctccgggtggcgggagcatcttgttttgcttcggcagtagaagaggtcccctcaccaaattcaggcactacgaccgtttcaatgtatcgtggtcggtgggtcaaaacctttattttcttgcccttcggcacaacagtggtggccgaagtggcagttttcctcttttttccttgccttcgcaaggggtagcagtaatcagggtatatgaagccaattgcatcaaaaaccctgttcaatgttttcttgccccaacccccgaaggctgaggacaaggcatcatcttcggccctggtatatgtcccaagcaactcgtcgctagtagcctcaatgcacttcaaccagtcatcatttggttcatcgaacttctctctgaatctgaaggtatatttcaatcgaatctctcagcaacggtctccttcggcatctctcattatccacaagtggccacactctgtaggctatatgctcttggattatgtctcttgtgccaatgaaagcacagacattgctgaaggccttttgacatgcttcaacatcattttcaatcgtcaccctcggcctctaaaggccgaagcg

SEQ ID NO: 78488 - DNA, 638 bp, Zea Mays
cagcctccaaaaaccacccggcgatatggatagcgggttttgttgagtttgggccgcaaaactcggtgacgctttcagagggaatcagtggtggcatgtggcaccatagcgaagggtacgtcaagtcaaagcaacttcgtgttgagtgcatggtcattggatcaaaaaccaagtaggtctattttgcccttggtggagtggatagactctgtaaattggggtagtttagaatggatataaccctctatgaatagaggcatagggctggttagtttagtatctcttggctgccatttgtttaggcttctcattttagaactcctagttttcctcttttgtactaccaactagtgcaaggagatgcacatcgatttttgtactatcaactatgagttgtgttctacaagtttaatccaaggaagggttgtcggtacggcccacatcgtttgatcatctctccatctcagttgtgcctttgctgaattttgaagactttgtgttcttgagttcatcccttctgtcctcttttggtttattgagaaatcttgtgttcttgtgtgagggactggcttggggtttgattcgtagtgagtagcactcctcgaaccactccatacacccagttgttgcatattttg

SEQ ID NO: 78489 - DNA, 414 bp, Zea Mays
caaatagtcaatttatactctaattgttctaatatgtgggcaacaaaactgcaatatagacatgaagtaagtgatagacgaagtggtagaggatgctacacgcgaaggtgaggtagtgggttcgattccaaccgatcacgtagtcatgagttttacacggaaatcgataggatactacggaccctagtctttagagcgccccagggcctagtggcctttagttcacttggtggatcttcatgagacttagagacgtagctattcctttaaagtaccttgatgtcaccctagtctttagagcgcccagggcctagtggcctttagttctcttggtggatcttcatgagacttagcgacgttgctattcctttaaagtaccttgatgtcaagtttactcgagacttagtgaaagtg

SEQ ID NO: 78490 - DNA, 900 bp, Zea Mays
attaatcaggattctagatttatttgtaccctaaaaatcatttctcataattattttacttaattcaagcactaggactggggacactatttcagaagagtttaggcgattctgcataaattccaggaccttattgtaaggttattaaacatgtaatagacggtgggttcattcaacaaaaattgggggtttctttagcaaaagtttaaggcggctttaccagggctcgatctgagccatccgatctcgatcgtaaggcccagattagatcgggccgattctaaaacggtgcgcacaacggaccgttggatcccagatcctcggtccagattcaattaggtcggattcataaccccatccacagattcgtgcatcaacggtggaggatccacggactgaacaggtatccctgtgtttaatccgtcccaatcatcaatcgatcaacgacgaggaagccccgagctaaacacttacactaggttcgatcttcgccgttcatcacaaatccaacgatagtcacccttttgtccacccctagcagcacgacacggagagataaccagggcaccgccccgagcttgccgacgcgatgagcctaggcaccagtggtgcactagatcacagacggataggtgcaaatcacaatttgaagtagggcgaattgatagaggtcgcaattactggtaaatccccaacgtcgaaccctcgccacgacaataggcaggaccacgccggaggagggagtgcggcaagaaattgccaccaaatctcggccaccagagcccaacaatactcgtaggcacgttcctcaagagaatgcgaagctctctgagtccaagttccaacccaaacgacgacgctccacaacttcacccgtggcgacgctttttcttgatttcc

SEQ ID NO: 78491 - DNA, 612 bp, Zea Mays
gtcattcgagcaatcccattctttgtttatctaacttatgaccaccaatgaatctccgtataccatcaacctcttaatgcccagtgatatggcaatgttcaatccgtggatcaaagcttcatattctgctacattattggatgctgagaataacaactgaagaacatatttgagttgttcacctccaggtgcaatgaagaggatccctgcgcctgccccctgcagctttagcgagccatcgaaatacatctgccatacttctgcagtctccaagttatctggtacttgttgctcgatccactctgatacgaagtcaactagtgcttgagtctttattgcagtacgaggtcgaaactcgatgtcgtgagctcccagctcgcaggcccacttggctattcttccaatagcttctttgttgtggagaatatcccctattggaaacccggtgactaccatgactttgtggtcgttgaagtagtgacagagcttgcgtgcagttagaagtactgcatacaacattttttgaacttgaggatacttcttcttagacggccccagaacttcgctaatgaagtagaccagatgttgtactggatacgcgtgtcctttctc

SEQ ID NO: 78492 - DNA, 725 bp, Zea Mays
gctggagcactggcaattgctcaccatggtcggtcttccaccactgcgcatggacggaagtcgtcgtgatgccgattagcggtaagagctcccttgatcaattcaatccattttcctctccatgtaggtcttacccatgctacagttgggttactgggtcgcctcctcgctggctttgcccgccgcggtggtgaacgccgccatgggctgggtacggcgctgctggtggggaagaagtctggtggccattggatccctagccaatggctaagattagacgtggacctatcccttcgccacattaaaccagagtcgccgattcctagttggacgaccatgattagaagcctagatatcggttagtctgggtgagtgtataccattagatgataatctgttggcctcggacgcataccgcttcacgatctgttctgggctcttggatttgatcgaacggcaaggatcacgcgctgaacattcccatcggctagccctaatttggaccgtagacatttgatcgtgtggatcacgaatgtcgataccccttcggccagcccttattgcaaaagagtccctcgagaagtcctaaactaacccgccatccctctctggttgataacaactatggttaggccctggaaatttgcaaatttgaacctagacttctcttgaattgtggtcgtagcctagaggttaaataaaataggtaaattaatagataaaat

SEQ ID NO: 78493 - DNA, 430 bp, Zea Mays
aaccaggtatgtaatgatgttgttgggtatcccaaacctgaatataatctcttagatgaactctaccaccttggctgaggtcaaagtggctattggcttgtactctatccattttgtaaacttgtcaataactaccaacacatgtgtatatcctccttgagatttcttgaatggcccaatcatatctagccccagcatgcgaaggaccaggtgactggaatagtctgcaagtgatgtgctagtagatgctatttttggccaaggactgatagtcttcacatttgtgcatctttcttggtagttgtccagtacaaaccgactctgaatgccttcctgacaagtgttgttgatgctgcgtgtaccccacattgcccggcgtggatttcctccagtaggcatttttagcgcctatgtcaatgcatttcatgaa

SEQ ID NO: 78494 - DNA, 529 bp, Zea Mays
caacacaacgtgttcccggcgatctaaagcagcttaactcaatcgaattggccgaggagcatcaggagaacctaaggatgctgaaacaagagagcagggagcacgaacagacctagaattcactgaccacggtgagggctctaccacggtggtagaaaacagaattgggggaaatgggaaattggagagttgtggtggctaatcagaggcagggtgctaaggcttggtgatgacctaacgcagcagactgtgccgtcaatttatagcggcgctaagcggtggccagtgaatttggtttggcgtggtggcggtcggagaagaaaggagtcactggcgcacgagattagtggctgcaaccgtggcaacctcaccggcgatctctgtataggtcagtacgagtctcggcagcgtggataaagtgttaaggcacgtggcacaagaccgtgaggtgtctaactccggcgagggtcgattcaaggcgatcagggtagagcggacacggcggccggacaaacagtgccttaagctc

SEQ ID NO: 78495 - DNA, 308 bp, Zea Mays
gcgaggagctcagttgtagattccttccgatcagattgcctatcgagttcgtcgcctcgcctcttgtcctcgctcctccactcctaccactcccaccagtgccgccactccaccacccacttcgcctactcacgtcactcctgcgcctactcccgtcactcctgcgccatccaccacctcagtcatacccaccacctccactactccagcttccactgctcctcctctgttcccctttccgctcctcctatcccacctgctcgcttctaggagcgcgatgagactgaggtgcgaccacttgctacgga

SEQ ID NO: 78496 - DNA, 461 bp, Zea Mays
attttattcgaatagtctttagacatttctcaattggatagcaccaacgtccctgcatggccccccccattcgtgcctcataggggagatgaagaatctaatactgcattagattgaagaagctgggtggaaatatctcctcaagcttacacagtaacacgggtgccaatctttcaaagtctgcaaccatggtccgagataactcttttgcacaaagctggcggaagaaatagctcaactctgaaagcgttagccagacatgctcagggacatagcctcgaaccatcgcaggaagaatctgttcaatccatatgtggaagtcatgactcttcatccctaagactcacagagtagataagttcaccccctactcaggttagctgcatacccatcaaggaacatcaacaacttgatccactgaagtacttccttcctctgggccctgcttaggacaaaatcgg

SEQ ID NO: 78497 - DNA, 375 bp, Zea Mays
gaggtttgtgtgtcgttattgttacactcaatggtgtaaccacagtcttattagatcagactaaaggttaaaccttcttgtattgtctttttagagaaaaatgtaatgacaaaaaataagaatacattggattaaaacactcctcattgtgccaccttcagtaaataggcctcgacttagacacattgttgttgactgtgagagtttcggactcctaccgaaggtcgcgttgttcctgaacctggcgatgcccttctggttgttgattgtgagtcagggcaggcgccagtgcggttgtggtggcaactgagcccaggaagcttgagaatgacttgccgaagcaacagaagtcgtagaatgttgattgcccacgta

SEQ ID NO: 78498 - DNA, 793 bp, Zea Mays
ggtaatccccgcacatcgaatatatcacaaggagggattgctcggaaacctccacacaggaagattaacaagtctggaggtgccggaggcagactcaatcgagtactagagcaaaactccctgactcgagcatcgcggatagtccgacacctgcacgcggacagtctggtgctcaagcagacgggctgactaactcagtcggacaatctactcataaccagaggcattgtcctccactcaaatcgaaaaagaagacacaggggcaaagcacatataacgcacatggccgacaggtcaaaaccagcgctacttttgatcaattgctctccaaatatgctagcaagaagatcgttctacgcgatcggccaacaaagaaaccctggtcacccgctaaaacaaaaccactgataaaatggctcgaaaggtgacgtagcaagcatcacctattcatctagtgatgccaagatacttttcacccacatactcatcattgatatgttatcctgttcaaatgtggaacggtacaaagatgaacctatggtacatgcatagtccctttgcatattcaagctagggcacctctattctataccttttgatttattgatcagaagctcctggccgagaaagatgcaatccaaaacaacctttatgcattggagctcaattgagcgatcatcctattatattgaaaagccggtgacatgcatcgggcttaattcttactgtgagaacaaggtgacttgtgagatcttttgtttcccgaagggtgctggaaatacatatgcttttc

SEQ ID NO: 78499 - DNA, 367 bp, Zea Mays
gtttctggaattattttgtattaaaaatcgatttctataattatttttctaattctatctgatttctggattgggcgctaaattctgaaaaacccagggactgatctacaaatacaccctagactcaatgatcatcgcccacggacggcgggttgatttttaagaaagccaggggttctttagaaagaaagccagggcgaaggggtatggacatcacacaaccgcttgatcagatccggacagtccagattagattcatatcttaagcatcccgcgtcgaatcccgatcgcaggattcgagaccaacgactcagatttttaatagccgagaactactcgcgcccacccgattgaaatccaacggtcg

SEQ ID NO: 78500 - DNA, 961 bp, Zea Mays
tgcatgcatgcatggctgacaaattgagcatgcatggtccaaggaatcaacatgtgtctacatgcatgcatgcacttggcatatagtactactacttacatgcatgagcatcatcagatgactgattgggaaccgaacgcatcgcatcaggctagctacgggtttctttgttttcttcctttcttcagggaggcaaattaggcaagcaataaatcacatcgctcgctctgtcgtctctgcagctccaagtctcgcctctcagtctcagcaaggcggacgatggatgggaacggttactgacatgtcgcgtcggttgtaattagttcaagcttgaagcagctgatgaagaagggaagggataagctaggcctaggccggccgcgcgccaaaacaaaacaaataactgtacttgagctccctgtccctcccatacagatacaggtttgctgcaagctaagtacaggccggatcgatggaagccatatgcagttgcgtgtgtgttcctgattgcttggtcatttctaggtcacactgcatggcttatatatctctatctaatcacgttgaaaattcgcccaacaacgtacgtatagtactgccgtctccattacgaaaccgaaggacctactgccattatatatgatcatgttgatgttgaaagaagaagatgaggtttgagatcatcaggcaggtcaaacgcaaacagctgatcgagctctggacggacggacgacgaccacggattaattcaggcgctcaccatccatcgatataaatatacctaaatatatatcatgatggcaggaagcactactagcttacttgcaacagccggcgaaaccgaactgccctgatcaatcgtgctagctatagctagctggagcctggaggagaagagacaggaataaggcatgtagatctgcaaatctcgccgaaagcgaccgcctaatgttgcagctgc

SEQ ID NO: 78501 - DNA, 352 bp, Zea Mays
ggaagttcacgtgatgggtcgaccagctagcccacccgtgccagcccatctcccacgcagcaccctccgtgtactccatccgtctcacatcgatttggccgggtgcgtgcgcagacgcttcacggtgggccctacctgtcatagccatctccttgcttggactcatctcaactggattccgtcgttctcgcgtggacaacgcaacagattccgagcttcgtggcgggatcaagtcttcggagtccgactccaagctgtatataaccataccctcatccaaccgcacccataggcattgggagttccggtctctgcgcgcgcacttcaccagattggtagccgtcggtgccgc

SEQ ID NO: 78502 - DNA, 1646 bp, Zea Mays
cttgtctgactttcagggcaacagattttttatttgattcagatatggtacttcctccattacttttttcactatcaatgctggagttgaggttggtaattttcccgttgttgcttgacaccccaagcatgtaacgggaagcgacaactgtcttctgctctttgataactacctttctctgcaaattttccttttcactttcagacagatcagctgacttggaagttgtccgttgatgatccagtgcttccataactccagagggagttgacatttgcatcaaatcctttgggtttccaatgcaagggttccttcctggaactgggcggaccccaacaagaaccggaacaggtatacttgactggaccttctcaacatatataaactgtccaagttgtagtttgtttgataagatgagttcattgtcctccttagacaaggaaacataagttgagtgtgaagaatctgaaactttgataaagaacccatggtccggccaaagttctgaaccagttattgcagggactatgctaataacttggagaagaatggaccggtattctccacatactttgacatcagagttaatatgttttagaacctttaatagtattcctggagtaagagatgccattatcttggagccagcttattctttttctgtgaaagaaagaaaaagtaatagaagttaattttagatgcattatccaccacattactgataatgctgcgtcgcgcatgaggattcatgcgtgttcctgatggtggcctaatataaagaaataattgttagataattgatggttaagctccatgaaagtaatggcttacttaaaaatacggccgatggtttcaaaggaggaaaggacaaagatggattggttaaagcttcagaaacacataaaggagcaatataggcatgtaattactagtataactgtggacctgtaacacctaaaaatccaaacctggccagatgtcaagatgattggaacaccaaccaaacagatgaaaagagcaagacacccaataataatgctgttcagcatcaaacaatgtcctttcacacagcaagcaaaaattagttgataacataacccagtgaagaaagaaccaaaaaaaaacaatcatgtttacaggaggaatgtattttactggataagtggaggttctaggaaaaggaaaaaggactgcatccatatttcttagctttccagcaaagattagtggtgtacccgcctgaaccttcttgcaaagctctaggctctagctccgtggccatgaacacggacacacagacaacaccaactttcccaattccttcacgtctgcatacgaagacgaagggattgtgaaccttccaaaatcccgctgcggtagcctgtcctttaggggtttcttggcttagaattcaggaaatgagaaacctaacgagccaagaaacaggcattgttggaaaggggcgagaagcgagtagtaatccttaaacttgtaggacagaagaacaattggagaacgtgagggaaacaactcttctaatttgatactcatgtacaatactaaaatcagaactctttggtatcagtttatcgtagtaacatccgattagtgttatcccataagattaataacaggagaaataaagc

SEQ ID NO: 78503 - DNA, 518 bp, Zea Mays
gtaagacagaacaaggaacgtggcggcttgccgttgtcattgagcacttgggttggtcggtcacaaagcattgctagatctcttcgagctttcagattgtcctttgttttttcaaaatgcatgcaggtgtgtatgagggcttcagcaacattactttcttggtgcatgatatcaatgttgtgcacaagaatcaatgacggcatataagggagctcccacagaccacattactttcttaggcggtcctttggtgaccacggtgttctttataaagtttttcttattgctcctaaaggggtgtttcctgggcaaccagcgtcgatgacaatcgaagtaagtgatctttccaccacgagcaagacagaagcaatctgtatcagacccgcaatatgaacatgtcaatctaccatgtgtactccaaccagtaaaaatagcatacgccatgaagtcatgcaccgaccacaaatacacaactcgaagtttgaatatctgttttttaaaacatgtatgcttcaact

SEQ ID NO: 78504 - DNA, 449 bp, Zea Mays
aatattacagaccacgtgaatctgcaatcagaacatatgctttgactatggctgatgtatcatattcgcaagcgtccccgagaatagatcaaatgccaataagtcaaatgtggatattatattaatcccgggtatatccacatctacattaggtagaagcattcagaccaatatggttactcctcaacgatttctggcaaactctatatacacaggagtacacaccgaacgacaggttcagtttggcttttgtgcgtttaatagaacattgaggcattacactatatgggcattcctccccctaatgccgagatgtacaacaagcatacagataaaatccccaaccacaatcatccaattgtgggcaatgtatgctattgtggtgatttatttgggaaatcttacgcacattacagataggggttttatgcagtgagctttagacttag

SEQ ID NO: 78505 - DNA, 788 bp, Zea Mays
cccggctagagccacagccactgatctgcaacaatgtacacactgcgctatttcttagttcttaccccttttgttccataggttaatttgcatgcatttactttcctcaccactctatgaaccactctatgagcctgtttggttcagctgaaaagctggctataaggaaaatctggctgtaaggagaagctggatgataaaaatctgattgtttagttcgactgctgtgaaaaaaaacgggtggtcagaattttagtgtagattctgagagaaaaaatggaaaaaacacaaacatgcttaacaatcataaggtacttacaatacctcatgatttgtcttgtacaagttatttatttacacccagataggtacctacgacactaacacattagcaatagaatccctaaaagcactcatatctaactcatatgcggggtgctactactctcacctacaactacatcatcaacatgcctactgctaggtacgtactggtcaaagtcatgatcgtgtatcgcgctgtcccgaatgaagttatgcaacgccatgcatgctataattatcttcaattgcttcctcaatgaaaatgaaggcagtctaagcaggattctccacttcatcttcagcaccccaaacaatcgctctataacaatcctcagcgacgagtgcgcatagttgaatactatacctctttcgcaacaactggttgcctcccatgctgccattcggaaatgtggtacttttgacctttataaggtgctaggtatcccttcctgttagggtacccg

SEQ ID NO: 78506 - DNA, 704 bp, Zea Mays
catggaccccagtccactctgctacgttccgtagtgggcaatggccggtgtacccgcctttctacaaagcacacaagatccagctggccatgcaaccgcctcctcgcggctatttgtgtgtgatcgcctcggccacactcgcttcacccaaatttttccaccggtgagcattgtcgtacgaaaatccctaagtatcgtgaggagtgggagggagcctccatgccattcttcgattatgtgctagtttcgtgcctgggctggggttgagatccccatcgcgggtcacactttcggtggtagcagccaggaagaccgggggctgccgtggtgcccgtaatttctcatcgtcgctcggacttggccacatatccacgtggtgcgtgggcagctatcccccgttgcctaatctccggtgaggcatcccccacctgtttcgctttagtcttgtgatcatgtaggggcgctcagggtgagtatcggtgcggcgttgcgcctaggcaggtcaccggtgtgtgtccgccgctaaggctccatgcaccgccgtgggtcacggctggaggatgacgatggtcgcgccaccgtcaatcgtataatagatggttcagattaggtctagctattggatgcggtacggtgagtctgagccgtcgattacgggccgtgtggctatgatcacgcgttgaagtataatgaggatgatctaa

SEQ ID NO: 78507 - DNA, 438 bp, Zea Mays
gaagcttctgtagaactaatctcaaatgatcttcatgtgcttcttcattctgagagtatactagtatgtcatcaacgaataccactacaaaccagtcaaggtattccatgaatactttattcatcaaattcataaagtacgctggtgcattagtcagtccaaatgacatgactaaatactcatatagtccatatcttgtagtgaaagctgttttaggtatatcttcagtccgaatcttcaactgatgatagcctgatcttagatctatctttgagaatactatagctcctctcatctgatcaaacagatcttcaatccgaggtaacaggtacttattcttgatcgttacttcgttcaaacttctatagtccacacacattcttcttgaaccatctttcttgttcacaaatagaactggggctccccatggtgatgaac

SEQ ID NO: 78508 - DNA, 727 bp, Zea Mays
ctcacaactaagctctagcacttgatccaaccagaccacttagtgctcttcacacctcgctctactagtgttggtctttaagtctcccatcaggtgagcatggtatccttcacaatgccttcttcgaagccatgcacttcacataggcttccacgaagccacaacctccaagccatctagcggatggcaacctcgaacagtaataatcaccactaacttacaactcgaccaactagtgtcacttgatgcaaccactcactgcaacacactagaaatcgctcttatacgcaatcatatgtgatctctagcaatcgtatgtgagtagagctccctattgacaataaccgactagcctactatttgtagagggaagtcctcaactagtcattgggaaaaatctgtcagatgcgagaacacaagacatttctgatgcaccaccgactcccacaccagactgtccagacatgcccagtgcctttgtaatgactacctctacattagttataaactagttgcccctgtaagatgtctgatgcaaccaccagacataccaccatgcacaattgatgtgtattagtgttaaagttcctagaaaacatgctctttgggtaacttgtcgggtgtggtgttcggtgccacactagatatggctgatgtactcttctgcattctcaaaatcgtgtctagtgtcacacctagtgatttaccgaacatatttgatgaggta

SEQ ID NO: 78509 - DNA, 642 bp, Zea Mays
ttactttacagaaaggatgcgagtttgcagcccgagccaaatgcgctacgcgtcaatccatcctataaaataaaataccctcgctcccactttccctctctcccctgtccactagaacccagcacagcgacttgttaacattccctgtcagcctagtgatcacaattcagaacaggtataaggcggccgtaggcaagaattcccccgcctcctccacaggtatttgagaatgtgcgaacctagccctgtgacactagattctagttccaattaattgtccaataatgaacttgactctgcagcactcccggccatgcacacgatataagtgcacccccaccagcatggcctcccctcccttgagacgcaccaccaccccggcccagagcactgcactgcttctccctctctgttttacggaggacgaggaggaacaggaagcagcagggtgcaacaatggtgaagttctccaagcggttcgagggccagctggtgcccgaatggaaggacgccttcgtggactactggcagctcaagaaggacgtcaagaagctgcaggccgcggcaggagaggctgccgtggcggcgccggcgagggctccggctcactgggcgatgaggctgcccttcttccaccccctt

SEQ ID NO: 78510 - DNA, 356 bp, Zea Mays
tagggacactcaatagactattgaagaaagagatggttagagggttaaacaatgctttgtttgaaaaggataatctttgtagcgcatatcatgccatcaaacaagttgcaagtacacatcgtacaaaagcattcatgtcaatatcaaggccactaaagcttctacaacatagatttatttggtccaacatcatatgcaagtgtgggaggcaacctctattgtctcgtacttgtggataattatttaagataaagttgggtgttcttccttcaagagaagttcgaagttgtatcaatatgttttaagacatactgatacaacttcatgttatgccaaagttatcaacacttcatgtt

SEQ ID NO: 78511 - DNA, 523 bp, Zea Mays
gtagctggtaaatttatattttttatataaatgtcattataaataattatctcttatttttggttgaaaacataaagctataattcttattatttcttgtttaaaaaatataacaatcataattcaaatattaacgaaacatgtaaaatgttgcaacactaattttaaatgtgtatcataaatttatgaagctgacaaatcaatatttactttattagagttttaaatacgtatttaaaatatggaacctatcgcacgtgtctatacgcaattaaacatacatatgaagagggtagctggtaaaatgttcgtctttttctaccttggttcggcgacggggatggatttatagcggcaataaggagggcaacagggaagtcgacgatgtggtcaagttgcagcgaacagcagcacgaagggcgtggtcgttgcgcggtgatgaaatccgttgaacgacgaatggcgatgacgtcgggtgagcagttacaacagtgtcaagcgacaacaaaccaggtggctgact

SEQ ID NO: 78512 - DNA, 710 bp, Zea Mays
atttctttgaaatccgggggtctaacttgtaaatttcagggcctagttgtagtttctgttgaactaaggtggactgcaggtttattttgataaaacacatgggctcataggtaagactgactggccgaaaggggtaatggacgacctgagccatccgatccagacctaagggcctagattagaaatctagccacgatgaaccggtacgacacaatgaccacatgatctaagatctatggccccaacacacccacgccatgacgaacccccagccctcggatataaccttgacgtctctgatttaatcaagccaaaggggtaagctgcttctaattgtggccgcccaacggccgatcgacggcacaagtgcactcttcttctcaaccctcaatcccaagatcgacggtcgagcccccgtcttcttcctacccgtcgaccggtgatggagacgctttccatgccccgacgaggacgccgacaagttggcgaccccgtgccccaacaacccaatcgcgatacggttcaatattacacaaacaggagaaaagcgtgcatcaatctagggacaactcaccccgtatcgggtagctagactccacggcgacgaagcagggcggatccacggcgaagaaggcgccccgacgatgggttctcggcctcccagatgtttcccccgcttgacgacatgacgagaacgtgcagcatggacg

SEQ ID NO: 78513 - DNA, 1427 bp, Zea Mays
ttgaagcattgtcaagtgtgattgtgataactttatcttcaattttccattcaaccaggcactcaaaaatagctatcactgcaccagtgtcgggaggatccaactccacaaagttcagtacacgacattgcaattcccaatttacatctatgtagtgtgcaaccaaactcaagtattggatattttggttagatgtccacagatcggtagtcaaacttatggattcaacctctaagagttttctttataaggtccttttcagattcatacactttcatgcactcattttttataatctttctaccaatactttcatagctgttattcatccatttcatcaagatattaaaccatatttgctctaccattcaaagtgaatactcatgaacaataatcatcttaacaatcaaatttctagtgtgatcatgatcatattcaatgggattaacaacaagagaaccatcatcaagagcgaagctgatagtaccttgagcaacctttgattttgcattggccaacttgttctggtaagcggtgcacttatcaagatgtcgattcagctgtgatgttggacccccaggtcgatacacatacagtttgtaacaaaacttgcacttggccttcgtcaccatttccccaaacttctttgattgaacttcgaccaccttaaaatacttccagtaatctgctcgcttcgccctcttgaccttacactttgaaggagataatggaacatcaccctttgcccttttgactcctctctttgcattatgaacttgtgccacttgaacctcatcttcaccctggctcccaccatcctctgaagtcttagagagaaatcatcctccatgtcgaggctattgtcctcctccttgtcttgctcctctctagaattagttgttggttcctgcatttcaatccaacattacaatatagcatacaacaaagaatgtgaagacaacaaaagcttagcatttgaagttttggatactcaccacagatatagaaacattagaccgattgccgaacgtcgatgatgttgtcgttgcaggcatcttctgcatcgaaatgggtggcttctttatcagttgcttggttcgagttcgagatcgagaccccaaacttgctggcaatggagtgttctcctcctccatagtgcttgaactgttgaaatgttacacattaatacacatatatgaaaaggtataaaacaaagtacccacactttatccatctaatgaaatggttggaggctctcttgaagccacttctcatatatgaaaaggtataaatcctaataaaactaccacaccataacagtcctagtatcctaatttcgaattaggagaatgtttttatgctacatcttgaacagttgaactattccatgaaataacaatacctagtgtcctaattttgaaaatgta

SEQ ID NO: 78514 - DNA, 593 bp, Zea Mays
cccattcgtgcctcatacaggagatgaagaatcaaatgctgcatcggattgaagaagccgggtggaaagatcttctccaacttacacagtaacacgggtgccatcctttccaagtctgcaatcatggtccaagctaactattttgcacaaagctggcgaaagaaatagctcaactctacaagcgctagccagacatgctcagggacatagcctcgaaccatcgccggaagaattcgttcaatccatatgtggaagtcatgactcttcatccctaagactcgcagagtagataagttcaccccctactaaggttagctgcatacccatcagggaacattaacatcttgatccaatgtagtacttccttcctctaggccctgctcaggacgaaatcggccttaggccttctccatgtctttccaccactaggcggcttcatctcttggtttggtctatcacataactctgccagatccactcttgcctttacgttatcctttgacttatcaggaatctccataattgttgctcaaagtgcctcggcgacattcttttcagtgtccatcacgtcaatgttgtgtggaaggagcagg

SEQ ID NO: 78515 - DNA, 775 bp, Zea Mays
aaaatttgtgacgggaaacgggccgggaggacagcaacagcagcatgttgtcactacctcacgtggggggaacggcgtggaatggaaaagccacacagccacatgcggaccgtgacgcgtccgtgacttgtacacgacaggccaagcttgcgatggtatataagttgggcgtgcatatgatatagtagaataaagcttacatgttgaatgatagctgcaaatcccatcggtgtttaggtggggtcacgactggtgctgcaacggagaattcgattgtctcatagtcgcctatatcgtatgatcctgcacactcatcctcaatgactatattatgcagaatgatacattcacgcatgatcaaacttagtaattgttgattgaaagaatggtatggggttgcaagaatatgaaatcaagccttgagtacccggaatgtcctctccatgtccttccatgccccctcttgtcattcagcgaacatcctctgctttgaagtccgtgggagcgatatggtcttcacaaaaactagccgccgagggtatattccatcagcgagatagtatcactggttgtacccgtggccattcaccgtgaagtgctcgtttagtccttccccgctaagcacgccaatgaacaactgtgattggatgagcatgttcgccacgccaaaaaagcatgacagacccacaagtcatatgaggcaacaacctcgagcatgatagtcgaggatctaatgttccctcttattaaggatctaatgttccctcttatgaac

SEQ ID NO: 78516 - DNA, 788 bp, Zea Mays
aagttttgtccttgatgcagtggaatcctctcctactctagaggcaaatagtgggtctgtagctttcttttgctatttattgcttctctcattttaccacttgtgttttttcctattgctttaccagctctgactcaacagtgttccgatgctgaggaaaggtatgcccagagtcaggctgatctgaaccaggtttctgcattttttgacagcgcttggaccctgaactcttccttgaacactcaacttgattcagagaagagggctcatgaggtagattttcttaactcttcttgatgcttctgtttcacgcctttgccctgatattcagtgctcttcttgcctgtaggaggataggcggacgcttcttgactcccgtgacaatttggatagattgtaccatgatgccagcaattccctcactatcttggagaggagtcatcgctttactatgtcggagctagaccatcatagggatgagttgagggcctcccaaactgaagtgtcatgacttagtaagctactgtcttcaaaggattttgtcatcaaggagttgcgcgccttgaagaaacttgtctcgcaggagttggaaaccgcttgtcacaacattaaggccttaaaggatgaccgtgttgtcatgaaagcaatgtgtgacaaagcgatggacaaagctgtttgtgctggacgaatcctaatgaaaagacctggtgttgtggtgcctggggacatcgttgttgacgttcttactgcatctgctgttgtgagcaaaccttcttcctctagtaatc

SEQ ID NO: 78517 - DNA, 756 bp, Zea Mays
accacattgttttttgttttataacagcatccagaagttcatatgaaaaaaaaatgctttctgcagaacgaaataaccttaagctaccagagataggtttggaatttgaaaagatgtccagatgtcctccagttttctacctggcgtttttgtgtgtgcgcgcgcgagagagagagcaaatctgataatctattcgatccagatttggatctcggaggaagagtatctgactggaccccgtcttgctgctgtcacagctctcctgggactagaatttgaacaacttgcgcctgctagcctgcaaggagttgtactgcacattgttttccggaatcattcagattcttgcaccaactaacagcatcgaaaccaactgcacgttccatcatatcttcttttacgggaagaaagcacgttccttaatctgaagcagaaaccaatggagctctgaatccgctggaggaaaacagactgtactgtaacctaccggcgcagttcgggacttgttagcctgctacgcttagtgacgctgaccgcacaggaacctggaggactccatagttcgtcagcgtacgaagaaatcacatatattcttaaggactccagcaagaaaagaaccccagttggggcggctgtagttagcatgtgacatgatgataatgcagcagcatgcttctatgttctctgagtgttagtagcatgacagttctgtatctgcatgatgagccaaacgcacttgttttttttttctcccgc

SEQ ID NO: 78518 - DNA, 298 bp, Zea Mays
acaggcgcaatggtggctcaatgattgcgacacatggatagtgcctacagggcctgcgaaaaatatgtgactcggctatagcggtccgactcaacggggagtggtccgattaagcaagagcgtgacatagcaatcacatgacgctgccaagtttgtacgacacaaatactgcgtcgtgttgccagggcgcagccaatggttagccaatgctaaaactcagccgattaataacgcaacatcgcgcgtgtccgattacccactatacaatttaatcgttctgcgtgagcctgaaagctca

SEQ ID NO: 78519 - DNA, 325 bp, Zea Mays
cccacaggtggaaaattacagggttgacaagacactcgatcaattctacatacatttgtgggcagattagactaaagacgtcaagggggtaagagctacttcctgcttattgttaatgaccatatctgatgcatgtgggtggaatttctgacaacaaaggatgaggctttcaagttcttcaagcgtgtgaaggcacttgcagaaactgaacatggttgcaatcttcatgctttccatagtgaccatggtggagacttcaattctttcgagttcaaggaatattgtgatgagaacgacataaagcacttcaccaccacgccataca

SEQ ID NO: 78520 - DNA, 508 bp, Zea Mays
ttagtccggggactcctccacacacaagcgttagtagtagagacatagagccccgtttgtgggcacatgacaccgggttgatatttgaccctagcgagtagctttctcttttcctttcctttttgcatatccttatgaacttgcttttagatatatggtgacctaggcataacatagagtgatggggcctagaggtggcccctagcccaactctaagggaggtcggtacattctctcgtggtgatgagaggacatgacttatggacatggagatgcgctaagatcacggtgtgtcttaagctccatttttcctaggacaaccccaacctcagggagaggcaagggcagtgaaggatgtaggaccattcgcttcgaggatgacccctagaatcacatagtcatgccatggacacatagggcgatggagaatatgtgcatttttatttatctagcttacatgtagaaaaaatgttctagagtggaagtgtttttatacaacaagatttat

SEQ ID NO: 78521 - DNA, 330 bp, Zea Mays
ataacataagtgactcaacctctatcacgctttggcaaacatttccgaaacaccctatctatccttcacattcctaatcatattgcacgacataaaatatttcaatacgcattcaccccataaataacatcatcacacaggactccgacctaaccgtagaggaagcaatgactacttcggcatgtcaccacctctctacaggccaaatcaatatttaactccatcgatcgagtctcatatcacgcaacacttataatttactatctcaaatacaaccatatcacgacatgtacttgggacacttcggttcaacttacgcaatcactacta

SEQ ID NO: 78522 - DNA, 820 bp, Zea Mays
catcagtggatgagagagtgaggatatgtatatgaaaacagaggttgcagactcagcagagaacggaacgcgccggaacgtcctccctcccttcatggataggagaaaaatcatcgaagaaaatttgccccataccggcagagatctcagattgttgtgaagataatctaagaaaaacgacaaaaaattgatattcgttatatatccattttcaactattttcattcatagtcacagggctggtgcgtgaacagctgagaagaactgaactttagctgggcttgtgatcccatctatatcttgaaacaacacgatgtacaaggtggaggagtattttgacataatgcgtttgatgattatttggctggattagtctggttataactagacgacaagacaaacgggtaggggcaatggccattaatcctctaccactgcgaccggtcgttgttgctttgaagctctgcttgcttgaaattgtgtagtgggaacagccgaacaggcgagtggcgtggatgttgatttcctttgattgttgtgtgaatcttcagataattctgaaaaagcactttgcgcagaaaacatctatccctacgccagtcttcgtcttgtaagtgttggccgcgactgaaattgaataatattttgtgcttcatcgtaaagaaaatgacatgctgtcattctagctattgaggactaaaagtgcttggcagattgttcagctctgagaccggacgatccactgtttggacagtccaccataacgacgcggatcgtccgcgtgtcgcagaatcagttagggttccggattacttgtgag

SEQ ID NO: 78523 - DNA, 476 bp, Zea Mays
ccgcactcgcctcctcctctccattgctcagcgtatctgctcgtcgcgccctgcaactatccatgctccacacgcctgtgctgtgccgtcatctgctactcgagcactgccgctcaccgatgtctaagctcgcctcggtgtcctttgttgttcgtcgtccctgtgctggtcacctgtcgtcgttctctccacgctcaaagcacagaagctactgctcgcttcattcctagttcccctatccttacagaaccgtcaacatcgtgccaccagtccaccactcgccagcgtcccgtcgttctttgcactccggcgatcctctccgtgacttagctttcgtgccctcgtcactagtgttcctgctctgcttcgcttcatcacccgtgtcgtgccttaaaccccacctcaccggaatattctctgcatcaccgtcgctcgctgaagctctacgtcaccctgctgcttgccgaatcccctcg

SEQ ID NO: 78524 - DNA, 519 bp, Zea Mays
cgggagtgcgatgctcccaaggggatacaccggttgagggcccactccggagaatgggcgagagggtcccagtcgggatcctaggatctatagctgattgaacgcagcgtgactgatgacattgagcccagctccaccatcaatcaggacatgatgtagtctcatgttggcgatgacaggggcggtgatgagtggtagtatgccggcgcctgccatgttttcggggcagtcggatgccccgaaggatatagtggtgctccaccaccgctgatgtggggctgccttcgggacccctggggtcgccgaaaggacctcgcggcgcagggacttcacgttcctacaggaggtgagctcccagcttccgccatacatcacgtacagcttcttgcggcggtcgttgtcatcaccggagtcggagtctccagtgaggatgtccttgaggacttgctcgggggactgatacccgaggtcccgttctcccgtggccaggtcaccttcgtcgaccttctccttgccagg

SEQ ID NO: 78525 - DNA, 527 bp, Zea Mays
ggaccttgtgtaattcccatcctgccacattacaagtgatgacgagtgcatctttgtgggtgcgctgtgcaggtcgatgtctcttgcattgaaggtgagtgtgagaccacttcgtctgaattattggtcctctaacatcgacatggttgactcttcggtaatggtcccttttgacatttatttttgaagtccaaactggaccctccagtaatcatatggataacacctctgaagggggattaacaaaatcattctcttgttttggggtggggaggtggttgccgagcttgttgatttgcttgaggaggtggaggggtgggagtggtagcctttcttgatattggagttgtgggtgttgtggagctctttggttgtaattttgatgctgctagggatggtattggtggtcgtttttgtagtgagggtgatggcattggtgggggtgataagtgtgagctatggctcattggttgttagtggggatggccctggccatgtgctctttggtttctttagttttggggcaa

SEQ ID NO: 78526 - DNA, 370 bp, Zea Mays
cgcccgggagggcgtacaagacgccgtggagctggtggccgagcgcttccagcgggatcctgctgatgatgagtagccaaatctgcagaaacaaggcaagggtcccactggggagcggcttgtaataacttttggtagtgtaacatacttttgagaaccattaatcaagcagtattagtacttatctgtatgttatttgttgtcgccgtgtgtagcgttaccaacttctccctggtacttggcccccctgggatgtaggctcgacgtgtcgaggttggataccagtacaccaaagaaaaagttggtggtctggcccctagggggtagtctctacagtttgagactacctacctctggacggggacctgga

SEQ ID NO: 78527 - DNA, 517 bp, Zea Mays
gaaatatttgcaaactggccctaaacatgtgcatgcagaggcgacgttgacaaagatgccctctgctgcgcaaccttcgctgctcattcctgcaaaacagggtttgcaaattgcaacagcaattggtactagcttgatcgcattcatgaacatgattctccttcatatgtagtagggttttttttaaccaggacagatttcttcagctctgatggcgacctgttgtctggcactccttcgatcaagtcgtctctgactctgagctgaaactccaaagctgaaccgtgccaaggaagatcgacccagcaatggggtctggtccgtccacacaccggtgaccggtgtgtctccccagagcaaaccccgggccagttgggatccaggagaccggctcttggcgcccgtcaacttcgctaaaccctcatcacatcagcaccccgtccctgacagagattgataaagctagcacgcagccgcaggcacaagctgcctgggggcaggacggcgacgaaccaga

SEQ ID NO: 78528 - DNA, 530 bp, Zea Mays
ctcatctccatcctcgtgccggtcgaacgcagcggcgatatccgcccgtagcagagaactccattgagcccaccggtctgatgcgtcagtgcctcaaaagtgaaaccgagggcatctacacgaaccctagggaaaggcgaatgcaatggaaattgtcttactagaaacggtgctgtgaagatccctgtccacaacaacaagcagacggcgacgaattccttgccccgatgagcaattttggccacgcaagaccgcccatgcacgaatgagtcccgagggctcttctatgatccctcgctgacaacccgcaagtgccaaccgaggccgcaacgatggcgaggcagggatggctcacgggggtcgattccccccaccctggctccctgttctctctcggcgtcgtgatgtgtattgggtctactcaaggaaaaaaggaggggaggaataccaggcgcacaggtttatagtccagctaggtcggttgcacccggctagctagaatcgcgcggcggcggcgctcattgcggctg

SEQ ID NO: 78529 - DNA, 520 bp, Zea Mays
tcacgcgctagcacacctcacaggctgccacatacttagaaacatcaaccttcatcctcttccaccagaagttttgcttcaaatccctatacattttggtttcgccaggatgaacggtttaaggcgttttatgagcttctctcaagatatatgtcttcacctctgatttctgtggcacacaaaggcggcctctgaaacaaaccaaatcattctcatcaatggtgaactctcgaggtttaccatcgctgaccctcttccgagcctcctacaacaaatgatcctgctgttgtgccacactcactctatccagaagggaggattgaatgagcatccgagtctcctctctaggggtgccaacatagcacaaagcaactcccaaacggtctagatctgcaatcaaaggcatggccaccttcgggacaccggtcctgctaagtgcatcagccaccacatttgccttccctgggtgatattgaattgatagatcataatcctttatcaactcaagccaccgacgctg

SEQ ID NO: 78530 - DNA, 741 bp, Zea Mays
ctcaacaatcataacaaacatcgaaatctgccatttcgaacaaccaaaattagctcaatgccactattaattgaaatagacaaatcctaagttgataatacatgatgtgatgatataccatggcctccatataacaaatttgcattgtagggtgaaaaatataaaaaggagatcctaagcctattgaaagaggatggtgagttgtgattatcaaaatgattttagcacacaaatatggacctcttatcttttatgttgtgggaaaatgtgttgtggcataatttctacattactacataaagacaagtaatataacaatattcaacccatctaaagatgaattatctaaaagcagtcacaacaactgaagttgtacgcattcaaattcaaggtttccttacatagaccatgaggcaaccatgtaatttttattggagagcatctcgcaacatttagatcaaacaatcagtgacatcttttgcatagatcaaacgaatgtgttagtttgttcaagcaaactgttaactaatatgaatctacatgtgaggttctcaactacatagttttctggaccgggaacatgctcagttgggcgaaccatcgtgctaacgttgatgtcgatagaattcaccatagctcagttgacagaagagacaaagtacagtcccaaccgagcacgcgagtcaactcgttagagaacattttgctgtcagtgagtccattttgaggagcgactggtac

SEQ ID NO: 78531 - DNA, 387 bp, Zea Mays
ccgatgggtgacccatacccacatgggtatgggtatgggggtaaatccatacccgccagtgtatatgggtgacccggtggagttatttttgtgtcatgggtatgggtatggggtagtaatacccggtgggtatttacccattgccatctctacctgcccccggtgcatgcgattccgggctagcagtcagccgcccggttggcccgcacgggcccacacaacattcatggggcggaatggcccatgcatgtacgagcagtgcagggtgcggcacgcttccgcttcacagatcggatgcatgcgtgtcgtgtcgtgtgtacagagttggctggccacgttggcgggcgcagtcgtactcgtacgtatacgatgtacgcccagccaaca

SEQ ID NO: 78532 - DNA, 302 bp, Zea Mays
ggacaccatccatcaagacatggaaactgacatcagttcaaccactccctcaccgagaagtcaacagaggacactatataacccattgcaggacatgacggggcataatggtaggctatagtatcctgactgaaggggaagacatcatccacaacatcgtttgaccagtaggaatcccagtggacaatgaactaaacgaaacatgacaatactcgacccccatctgcttcactcgacctcagactcttgtaatagggccctactcccaccttagcctggaaaaggatgggagaggcccacac

SEQ ID NO: 78533 - DNA, 945 bp, Zea Mays
gcgcgcaccaggaagagcagtagccggtgaagtggaaaacctgggagccgagcgtgaggaagttggagacgaggactcgaccagcgtcgatggcgagatgcagcagagagcacgcctggaaagggcgccgcgagggagatggagcagagacacgccatggctggagtagatagggcaccgggacgcacgctgcagaggagcagggaggacgctgggcgcggtacagaatcagagaaaagaatctagcgaggggataaggccattgcccatgccgatggtggaaatatctgtccacacgcgtgtggtgaagaaaaagatcagagagggcgacggcaggggatagggatgggaagagatttttttatttctctctttttcatatttttagaaattcatagatattttgaattgcgatttttagtgatgattaaattttcagattaagtatgtgggagatgtaaatcggacgaaacaaaagatactagtcaaattagtacagactacgcttgatttaatttagagcagataatttactgaagaaatctcaattatagatcctcggatatgatttcccagctgacgggcgaagacagaattattttgcacccaaaacttcagttgccgagttttgcttaatttatatgggacaagaatcacaagactgagttacaataaattcatttgctaaccaaatactcggatcagggtcaaaaacaaatagaccgaatcaagcagcatcagctttgatatttaggtcatgtttgagtcgatcgaaatcagacaaacttcattcgttattgacccgagtactttactgttctacccggcacaacctacggggaaccaaactccattatccctttcgcacataatttcatagttacccacacagtccgaatttataaagttcaaatgttgtccaaattcacgttcgcccactcaaac

SEQ ID NO: 78534 - DNA, 536 bp, Zea Mays
ccgtaatgccgaaggtaaccatagccgagccagtcaaggctaaggttgataaggctgaagagtcaaagattgaagaaataataaaagtgccaaaaattctgagccctccgacagagacaaaactgtcgaaggtgcaaaaggcttgtgctgcaactcccaagaggaggagaatggccaacgtgctggatgctatgctggaaactacgaaggtcttaagccctgctgctacaaagaaagttgctgaagctacaaaaacgcaggacgaagccaaaactaggcaagcagaaaccgaagctgcgcaagctcaaactgaagccgaagctgggccttcagtgcccaccgagatggagcctactgagcctaaggaaaaaacgacagagcagattgcatctgaaaagatcgaagctcctgctccagaagcttcgaacaaaagcactgactacatcattcgtcatgcttcgggaaaagaactatcccaagaagaaatgctagaagcacgacactacacccaaaaattgaaatatctgaagggggcg

SEQ ID NO: 78535 - DNA, 469 bp, Zea Mays
gagaagaaaacatgtggttcgttggatccttatcaagtggaggggattaaagcgaagataacgtttcgaccgggcgtgatgaaaactattgatcgaccaatgggcggctcgggatagatcagggcgtagggggaatggaggccatcgattttggatcggatagcctacgttacgtactggttcgtgttgggtaaagtctaattcagtccctcggtgcaggatccaacggctctggtcatccgatacccccttcggttgagcctgttttgcaaaagagcccctcggcttatgcaaaatcaacctgtcatccaccttagttcagtttgtattacatattggtcttttttctttcaattaggcccctaatctcctattaaattgtacatgttgtccaatactcactggaattatcaaaataaatatataaaatgaatttttattataaaaataaactagaagattagaaatt

SEQ ID NO: 78536 - DNA, 654 bp, Zea Mays
ccgagttgagacgtgtatcggctcacatactcgacgatgttgaatttgtaaaattggacaccttgaactttggtggggtggcatccgaacaaacttgtttggatagggattcgtgtagctgatcgccttccatttggtgaggatccgaaactgattgttaagattgttaaacatagaataaattacctgtacatggaatgcctgcatgcactccttccttagatagctagaccacattcctgtaatctcgtgcatgctttctttcctacgatagctagactgcctgccagatatgcacgcataaaattctccatgtacattacctatataaaggaatagcacaaccctgagaagcagtgcattaggcctaaccaaacatggtatcagagccaaggttttaatgtccacaataccttcttctcccacaaattcctccaccaccacgtcctcctccaacatggtatcttctgctgctcacattccaattcatcaagtcgtcaccattcgtctcaccaaaacaaactttcttctctggcgtgctcagcttctccctcatcttcgtggtgcccaactgatgggttttctagatggctctaatccggcaccaacacagcagattgcctcatctaccgatgcaaatgccagggtcatccc

SEQ ID NO: 78537 - DNA, 424 bp, Zea Mays
aggatatagaagccatccttatatgagtaattataattacgtcagatcgccttaagtcgctgctgacttaggtcgattgcttctgttaatagggcgtagtggtcaccctgaattgtgttggcgtgagcatgttgcactggcttaagtcgctgctgactttagccgattgctccgttagcagggcatagtggtcgccccgagttaagtaagcgtgagcatgttgcaccgccttaagtcgttgccgacttaagccgattgctccgttagcagggcatagtggtcaccccgagttaagtaagcgtgagcatgttgcaccgccttaagtcgttgccgacttaagccgattgctccgtcagcagggcatagtggtcaccccgagttaagtaagcgtgagcatgttgcaccgccttaagtcgttaccgac

SEQ ID NO: 78538 - DNA, 734 bp, Zea Mays
gcaaggatggggggaagggagcgagacccacctccctacacctcaggaaataccactagatctagcccaagttctagccaatcagactcgactcattgaggtcctcaccaaaagcctcgagaatcagcgcccgaatggaggaagaccacatgacaggatgggagaatttctaaggctcaagcctcccacgtttgctagatccagcaacccactcgatgctgatgattgactgcacacagtaaagaggaagctagaagccattggatgccctgaagatcagcgcgtttacctggctgtccaccaattatcttggatgactctatcctggtgggacaccttcagtgctgttgtgagaaatgacacctgggcagaatttgaggctgctttccgtgagcatcacgtgccctcaggaatcgttcaacttaaggaagaggaatttcgagacttgactcaaggaggacgatctgttagtgaatacatccacaaattcacggagcttgcttgctatgcaccagatgatgttagtacagaagtcaagaagatggtccatttcctaaaagggttaaggccggagctcaaaactatccttgctagctaagacttcctcagcttctcgcacctctcaaacacggccatctaggtagaaagagcccgagaagaagaaagaggtcacctcaagagaaaatttcaaattctctgatcttaacagcaagacaggcactagaagatttgat

SEQ ID NO: 78539 - DNA, 406 bp, Zea Mays
ttttgatgctgatcagttctatcagttcaacggaacagactgatagaattattttactgtgcactacatatgacatcattttgaatgtttctgggtttgggaggcacattaccactgttctgaactaactatttgagaagtttactactccctccgtttgtttttcttctacatattgcacatggtgatctacgtatttccgatgtggtgccactttggcttgggtaactatgcatgcccattcatatggcagtgtgccaagtaaatgcatcagccctcccctcgtctgtttgcatgccttggccaatagtagagagaacaagttgctgactagatgcatatatactgatgtcgtgcatgcatactctgaggaaaaagtactcggagcagttgcgaaccgatagag

SEQ ID NO: 78540 - DNA, 300 bp, Zea Mays
aatggttttatgtgaagaatgatctggtagcaagggaggatgttaaggaggttattatgcatcccatatggtcccacttcggccttcgaaagccgaaggttgaaatcgatgaagctgccgaagcatgccagaaggcctttggtactgtatgcttcttcattggtacaagagacttaatttaagaacatataacattcagagtatggccacttgtggaaaactgggagatgccgaaggagactgtcaccaagtctaacgaaggtgacctggttcgactaaaatatacattcagatacggag

SEQ ID NO: 78541 - DNA, 470 bp, Zea Mays
aatgtaggtagtcatacctttagggttgaggtggaccatggtagtaggagtcagcgtaggatctagaagttgagcgcccatgttctgtttcgattctcctcctcccccttacatagtgggtacttggggcgtagtatcagtagcgtcataggaacgttggtttctaagggtgtcatatcttagggtttggtaattctgttcactaggcgctagaaagagattagatctcttgtgaattgtggcaactagggtttaagaaagcacatgaattggcttccgtctcagtctctgcctcacctttttatagtgcctatgagtcaagggtcacaaccataggataggatcgtacccccgattttggtgcaataagttgtagattgccccatactgagtttattggcaaagttcaaagacatatcatgtattctcgtgtttgttcttggcttttctcgttctttgacgatgtggag

SEQ ID NO: 78542 - DNA, 851 bp, Zea Mays
ggcaactttgcacagaggccctcggattaatatctaaaccgaagtaggttcatttactattgtactaagtcgctgacacattgcaaaaatgccctcaaatttctatttcttccccacgagtacccctggccacggcgtgcttgccgccgagcaccatgcgacttgttccagccatgattggcggtggctgtctaaaatggctacggaatggacattcccgacctaaggcgatccgagaacaaccttcaatttcgactggcacaccaagaaagtgttctatccacgctcttggcggaaccagggacgtcgagctcacgttccgagtcgatcatatcctaatttaccaattggctgctacgatgagcaccaagggtactcatagttactaaaacaatgcttgaatcgggcagtgccttaccagagcgggctggccacggtggagctgttcttcgcggtggtggcgacaaatttgggggaagtttgaaattccagagctcgggtgaacgattaagggtgggagcgggtgctaaggcttcacgataacatagcgcagctaccccggccttcaatttgtagccggctaaggaggtggcgcgcaatttggtcggacagtgtgggtggccggagaggggaggtgagctcagtgcgtggaaaaagtgactttcaccgtggcagttgctccggtgatcgtcggacatgcatctagtgagtcatcgcgatgaagtccagcgcttaggcacgtgcgcaacggcggtagctcgacggcggtgagatttatccggtcgaccgacgagctggggaggaagtacggcggtcttagccgcagctcaatccgggcgccagatttttac

SEQ ID NO: 78543 - DNA, 401 bp, Zea Mays
gtttgatagcctaaaggagtctctccggctgagtcatccagaggtaggacgagaggaggatcttgaacctccactgaagaaggcatcattgcaggccgagtccaagcttactaagcaattctagttagatcccaatgactcttccaagaccacacacatctgggccagcatttcatcatcgtcatccgagtcactaactcggatcattactttcttcctcttcttagaggaggaaggaggattggttttcattgtgaaagatggaccaacagaagccctttcggctaattgctctagaaaatggtttggtctggattcttcatagtttttggcgacccatgcgggttcctcctacggagtacaatgcacaccaacatttatattgaagtatgagctagata

SEQ ID NO: 78544 - DNA, 434 bp, Zea Mays
gtggcctagaggatccagtacatgggagagactacgatccgtccccagccctcgaggttttctgcgcgacgaaggtaacggacgacgcagtcaatcacgacgaaaaccagcgtggaaaacttactcttccaagccaatttaaaccgattaaactcctcgtatgggtcagctcaacttgttagccatatacacgccatcgcaagcaagtagtcggccgatcgagtaacaaggaacaggaacagttgtacgccttgcggaaacgaagacagcagacagacggatttccaggtccggtctcgcaaaatctttgtagaaacctctgcacaagtactagaacgcaaaggtaacgacaagccgcgcgcctgcatgcgacgtgtcagtcaaaagaagaacagcgcttctgcttacatacggcggcctaatcaatcaaaaac

SEQ ID NO: 78545 - DNA, 548 bp, Zea Mays
tgggctcggagcacggcaggtcagcagcgtagcaggagcctgtcccactggcatggcactggcatccatcccctcccgcccagtgccagacgatgcatgttgtgtcgtcacgcagacgttggcgcgagaacagggggcacagggcacggagagacgagagatcagttctggcgtactgctactgtggcaggcccatgctaatcagcacactgtacgtgcagcagtgaacacaaaagttgagcatctcacatgttcgatatgttccttcttcctttcggaaaaccgcgtcatgcaaaagccatatattatctttcgctggaaaataaacacaaagtagtcccctaaactgatgccatactggtatagtagtagtattctaatcgttcagctgtcggtcctctttatccatccatccatctcaattctcaagctggtggtggtgttctccttttgatacgctctcgtgcatcgtttcaaatcgatcgatcgctcgctcgctcgctttacctctttatgtttaccatcttgtactagcgcccacttttaat

SEQ ID NO: 78546 - DNA, 475 bp, Zea Mays
tggctgtctcagggggaggggaaggcgcgggcgtgcagggcgcgagctcggtggcgagaatggtggcgctcggaggcatgaatggcggggcttccctcaagcacggagatctcaaacatggagatctcgcactcgctttccctcgacacagagatacctcaagcacggagatctcgcacggataggtcgaaaaaatggtgggctcgtaccttctacaggagaacctggtcgaaggagcattggagcagcgattggggttggacgagaggccgatggcgctggagacggatcttggcgtaggcgatcttctgatctccttgacctcgatgacggcgccatcgccgggcttcttgagggggatggggggttgtctcggcgagcgcggatctgggggtggcattgggcaagggcatggccttgactggtgtggtcatgcggatgtcctccttccactcgtaatggggtgagaacgatg

SEQ ID NO: 78547 - DNA, 1976 bp, Zea Mays
agggtcagtagccaccccctcaccagatataatatggcccaaataaatcagctcctttttaccaaatacacatttcttctctttgagatagaacttgtggtcccttaaagcaacaaagaccaacctcagatgctccaaatgagagtgccaagtggaactataaatcaatatatcatcaataaagaccataacaaatttccaaaggaaaggagctagcaccaaattcatcgcacactgaaatgtagccggagcgttagtaagtctgaaaggcatgactcgaaactagtagtggccctggtgagtcttaaacgcagtcttaaactcttcggaggcacccatgcgcacctgatgataccccgaagtcatgtccagactggtaaagaattgagtgccagcaagctcatccaaaatctcctcgaccaccggcatcggaaaccgattcttgatggtcatatcatttagcttacggtaatccacacagaaccgccacgtaccgtccttattttgcactaaaaggaccggagaagcaaatggactcacactgggggtgatcagtcctgacttcaataacgcagcaacttgcttctcaatcttcgttttatgatgaggagaatatttgtagggtcgagcattgactaggatagatccagggagcaaaggaatatgatggtcaaatggtcgagatggaggcaattcagttggtgtaacaaaaatgtcacggaattcccccaacagcacctgcaattctggatggatcccagtgctgttctcctcacgcacctcctccaacaatgcaaacacccagatatcattccctcgcagccatttctccacctgtagatcttcctccaccacctgctgatgtattgtattgcccaccaactgaacttccacacctttgtccacaaagctaataaccttatcatcccaatcacaatgcataggactgtgtcgacgcaaccaatcatagcccaaaatagcattataggcgccgagccccaacaccctcatatcactctgatatgtatgcccattagcccaccattccaatgattgtaccatcgtgtcactatacataatctccccatttgccaccctcactttagctgaagaacaaggatgcactggcagccccattctatcgaccaactgcttgctaatgaaatttgtggagctccccaaatcaatcaacaccaacatcacctgattttgcaataaggctctcacagccatacactcctcatttgtggtaccactcagagcattaagtgacaacataaaattctcctcttcccctttctcctcctgctcaatctgtgtcaacgtttgctctgatagtgtcatactcaaatcctcggcagtgagggcatgcaattgcatctggacttttttaaaaagcgagcttgatggccaggttcaaacttgtcgccacaacaatagcacagaccattctgcctcctatactccttcaccaatcgctctttagacaactcgggtaaggaagcagaccctctagtgtcagacctggacacagtaccccctagtcgacccggactgaccaacttgaatgatttctgtcgttgtttgtctaagataccttgttggatcctggctaacaatgctgctcgttccaccgaagctggcaaatgagacttaaccggtccctgcagctcttgcttcaaccccttaatgaaatgggccacatacaaagtctcatctaaatcatgattatggacagaagtggcataccatgcctcatcaaacacctttttgtactcctccacagatccagtctgcctaatctccagtaaggactgcatagcttgtgaatactcctccgacccaaacttcagcatcacagcttcacaaaattcctcccatgaacatggaccatactaaattttaaaaatttgaaaccacctcttagcattcccctccatgttcaacgatgctgacatcacccaaaccgactcagg

SEQ ID NO: 78548 - DNA, 962 bp, Zea Mays
ctcgcgtcgtctcgacggagcctagacgggtgaccaattttgcatcggctgatcctccatagctacacacatgaaccaaacatgagatgcttgaggactccacggtgcactgcaccgatagaccaaacagtcagtaaaacactctgtgggaggaaaagatgaaccaagtattagatatatatcttgtactatgatatagttattatatgactaaacttttagtttgctaaagatgacatggccacttcttaaagctcacaacggattgcattactacccatgctctaatgcaggttaaaccgactgacgctagatttggtcggttagtcggtcgccaatcgactaggtcaagcgatgacatctacgatggaattgggctagtcgataccgatcggtacattggagcgggtctgatatcaaccatcctaccggttggcgtttgctaatgtggcacactatgattcgtcgacgctattttattcgtttcaatttaagaaataaagtataaaaaattctaaattcactctataaatataggaggggcttgggttcattcacactcaactaactttaatttataagtcatctccttcattggtagcttttcactatcagttttgatttagtagcttttcaatctccatcttaacatggatcctagatagagtcctaactttgatatgtttacggacttgttcaacaagcaatctctgcaacgtactaagaactctgtcgtgcagggtaaatcttatccgatggtcttttctcacgttcatcatcggtaaaaggacgttcctactcatacccgttcccttacttcccaacatttgtttttttatatgtatgctcctcctccatatatgtagcaaccaactgttcatggtccttccgactactgggtctctaacgacggacacttctctctttcatatgtttctctttatgatgctctcatatgttcc

SEQ ID NO: 78549 - DNA, 476 bp, Zea Mays
attgaaccttattccctccaagcccgcgtaatgcaaatcggtaatccatggattccagcgcgacgatgctgttctttcactacaacaaaagttagattaaagttcaggcatcaccgaaatggcatatatatatgtcaatgagtccatttgggaccggccgggcgctgtactttgtaagcctaattttcttttgtctttttaataatgggcaccggaactcctgccactcgtttcagtaataccaaaaccaacatatatgtagtaggtcccatttgcagtgggggcaaaaaaatcagaggttcttgccgtacgcgaaatattatatgaaactctttcaggaacttgtgctccataactcaacaatgctctcttttcttccatagtgaactttttaacgagccgacatatgccaaacacacaaacgtaatatatattcagttaggtgtgacggaaatctgcacgttaacttgtttacg

SEQ ID NO: 78550 - DNA, 333 bp, Zea Mays
tgttttacaacaaccttgtgcgaagcgagaaacacaacagttattgcaaattgtgtgtgacttttacgccccaaacagtggacctcttacccattataaagtcaactgtagtttacgctaaattatacacaattttacgcttcttttgtatcagttttacgctaaaacggacaaagcaagatatacggtaactaccacaaatcttacgcatcttttacgcaacgttgagaacaaagcattaactgtcccacatttatcgcgattttacagcactactttcctaatctcaaacccacccagatctatgcacacactggtcacatatatacaata

SEQ ID NO: 78551 - DNA, 1052 bp, Zea Mays
ggcctgatatcactgatttcagagttaagccatatgggtgctctttgggactttttgcaatttactccaatttgttccacaaaacttggaaatctccaaatgtaaaagttgcttaatttttgttactctaccactttgatatatgcactttggtccaaaagtgtatagaaattaatctcatctcatagagcactaattagggtttccagagtccttattagggtttgagtgttcttagggtttaagtggcacttaactttccaaatttagtctctctttaacatctccactaacttttgaggtcatactcaaattattatttcacacacctacatacttctaatccttgggtaagtaccctaccctagggtgaaagatcaagtcaagtcatcacaccacaagcttgtttcgagattttagcctagtggatgcactctaggtgtaacatacataatgaaatgtcaatgcatatgatgccatgcctaagttttagttcttgtaacaccggggtgttacataagccttcgcctggaaaaagcagagccaattaaggcctagatacagagcaacgaggaagccaagaaagtgcctttggacacatcggtacccaaccaaacggtcttaatcagcgaagacctaagcaaagcggaagaaggcaaattgctatcatgcctgaatcgcaataaggatatcttcgcatggtcaaccctaaacctcgttggcgtcagccgcacagtcatcgagcacagtctgaacaccaacacttcgatactccccaaaaaacagagactacaaaatgtcagatgagaagaccgaagcagcaaaagccgaggttcaatggctgttggaggtcaaattcatcgagccaatcgactacccaacctggctcgtcaatgtagtcatgatcaagagtagtaggcaattttgatctagttcagtgtgatgtttgggcatcccccgttctcagcatttctggttataaatattacttgctcattctggatgatttctctgattttatgtggaattttcccttgcgcttgaagtctgac

SEQ ID NO: 78552 - DNA, 645 bp, Zea Mays
ttgagcgcctccttgtcgaatcctcccttgtacttgtacttgatggaggagtactcccgcttgcccttgtgccggccagagtggtggtcacacgtgccagcctcctgctttgctcttcttggggcaattggtgatgaagtggtcgaggtcaccccagttgaagcatccatccttgaacctgccacgccaccccacgtgaactgactggccacaagtgccagatcctcatccccgaggctctctacctgctactctatgatagacattaaagggttagaggaggaaccaccttcagagaccagagccatggtgggtgcaccagggttttcaatcttggcccgagtctggtggtcattctttgtggacttgagcttgttgaatagctcatccacggtgagtctcataatcgggtgactcgttgattgccgagaccttcacctcccaaaccctccgatctatgcatgtagcaattttagtgctctttcgtgatcatcattgggaagttgtgccttgttggcacacatcctatttacaatcgactgaaaccaagaaaacatagtgtctatggtctctctagccaactgcacaaagttctcatactcccatcagtacgtctcaaatagtctggtctttacatgatcattg

SEQ ID NO: 78553 - DNA, 572 bp, Zea Mays
ttcgtgcaccacggtcgggggataactacggtgaggtaaaaatcttggcataggatcgactcgagctcggttgcggctaagcccgccgtacccacttgctcatcggtcgatcggataagagctcaccgctattgtttgatcactgccgtgcaccgcgtgtctaggctctgtaccacgtcgcaattagttatgttaagggatccggtgatcgccggaggaagcgccacggtgaaagccacccatcccgagcatcagtatccctgtttccctacggctgccagcacaacctcgggaaattagacaccaccgacgatgggaactataaattggcacctccgcccgctccgctaggtaactgcgtagccggtgaagcaattcgcaccttgaatcctcccctagaattcaccaatttcggatttaccaagctgctcaagaacaccgtgtgtcttgacttcgccgtggtccgctcaattcaggtccgattttgccatttatgttcttgtttcggcacccatgcttacccttgatgctcatcgacccgtccaattgaactagaacccccttaatcaccg

SEQ ID NO: 78554 - DNA, 1314 bp, Zea Mays
gcggatccgcgggtcccacgctcgcgattcgtccacttgctgcgctccagctaatctcggcagaacggtcacggtctagcagttagccccacttgccagggagatctgtacctgtacgggggcggtgaatcttctcgtcaattacagcaatgtacgagccatacgggctcggtgtggtgtggtcgtgtccgtgggatcacagcagcctttcgatgcaatcataaaaaaaatgaagcctcggattctctttggcctgcgaatctccagaacctgccgaagaattgaagagctcgatcgctcaacaggtacatgaatgcgttctcctgctttcagcttggagttggagccctgcccccaccccatttttttaaaaaatttttttggcgtgcctgccgtatcaatggagattcatcaacttgctcgagaatttttcgggacgacatctggcggcacgaccgcacaacgcttgagcgagaagagatgcacagcacagcatagcacagcacagattcgccggcgttcggtgcgacaaggaccgcaaagtcttcaggcttggagagttggagtcagtggagaggggcattttcccgggtagttgagctactcgcatcgaagccactgaatgcttttgcacggtggcctgaattctcgaaacgctgctgagaagaccttgaccccacgagtcccttgatcatccactgcttggggtgtcacttctcttgcacacttctccgaggattctcttttctggtgcgaacgcttttgcatgcttggatgatgggtttttgattcgttgacctgtacgtgaacgacagtacgagcggcagtgttcgtttcggctgctcatcggacgagatcacgagatacatacattgcaatgccatttaccacctaaactacgtagcaaaattagcatcagtcgctctactttagctgaaagaaacctgtcgaatcaaaaaggcggtcaatttgtgcttggttaagccggggaaggactgcagctagttttcaaaaaaaaaaatgattacgctatgcactatcattattaactaagtaacatacaaattatggaagtaaatgtaggtcctcacgtaccaactccaacgacatatatccacccgtcctactcgccaaaatgatcaacatgacaacgaggggccaaattgttccatgaaagcatctagactctcagaagttttgatgattaatgacaagtaactaatatatgttttgcatagacaaatttgagtaaggttacaatggcgaagaatggcttatgtaatgtatagttcaagtgccctacttatggatttt

SEQ ID NO: 78555 - DNA, 457 bp, Zea Mays
agagacaccgaaccgaacaactcctttagtaggtgataccctaagaaggacttgatcccccactgcaaattccaagtcccgcctcctcataacagcataactcttctgacggctctgagcggccaaaatattctgacgaatttcccgaaccttctcagatgtctgctgaacccaatcaggaccaaccagagatctctctcccaaagtatcccagcacaaaggggagatacactgcctgccatataaggcctcaatggtgacatcttgatgctagcctggtagctattgttataagcgaactcggccaaggcgagatgatcctcccagctacccttccaagacagaacacaagcacgcaacatatcttccaaggtttggatagttcgctccgactgaccatcagtctaagggtgaaaagcaacactagagagagcttggtacccaatgcactgtgaag

SEQ ID NO: 78556 - DNA, 403 bp, Zea Mays
gaaaaaaagagttaaatagacagttaaaaataaaaagtatcttggagatgctattatattttttctccggcccgggcagatagactagtcatcctaacaaaacaaaggaacatcaaagctaggaggtgcaagaagcacctggccagtggccatgtcccatgtcacactttttcaaaagacaaaacaagctttcgaaaatctgggccagtgggtgttgatcatgctcaacacatcatgtgaagcatctaattccatggtgcaatgggaaaattctagttgcgaccaataatataacgaaaaccgaatctaaatccacatgcaaagaatgaccaacccaaccgacaatatatagtaagtaccgatcagaggaccaaagccttctaagaatccgaaacagatacta

SEQ ID NO: 78557 - DNA, 707 bp, Zea Mays
cttagttttccattaattccattgctaactttaattacgaatatttataattttcaaatgaaccattgtttttttaaaaaaaggacgatcgagaaagaggccgcacttgtttagctccagcttaggagagggaatctaatcaacccaaagacacaattttcttctgcatttgctgataattgttcgtccaacaggtcatacgagtgcagtgaaagcatgggggccacaaggttgatacgtgtctgatggagttcataaattcccgggcgcgaggcgttatggcagcgtaccggcaacgtaccagcacggcattacattgctcggagtacttgtgctcgatcgatccgacgatgtagctcacgatccctgtttattaccggcaaaaagagaagttaccggcttcgtttatctctgtatgtagatctccatcggttagtagggtttaatcacagtgcactgcctagcttatagttagaggcaatagtactattgctggtgatttgacgccaattcatgggcggtttgatcgaattaattctgccccaaccgatatcgtgtcggtgctgctattgtagtagttcagcacttcagcaggagtggtatgcatgttcgtggttcgccacagcgctgcgcatgatcgaaaaggacttgagcagctagcttcttcctgaagcccccttttgaggtgcagcttcccaagtaagccc

SEQ ID NO: 78558 - DNA, 314 bp, Zea Mays
ggataccgctgctgaggcgaagacagaggccgcctgaaagcgaattgtcgagctggagctcaaggtgaagggtatgcgtgcctaccgtgagagggtggaggcaccacacgagttggtgtggactgggcgcacacattttttgtcgacgcttatcttgacctggacgcgcatacggcccccttcgacaaatcagaagggaaggtggggacccgcttccttgggtggctacaggaggagctagagttcctcctgtccatcatgatgggcctgatgtcctattgaaagtcgcctagaggggggtgaataggcaaaac

SEQ ID NO: 78559 - DNA, 444 bp, Zea Mays
cagtggaatattttttaaaatggattaaagcaaattccttggcaacgataactttagtgactattcagaagttttctgaccaaacattatatggctcttcggagttccaaggtccatcactattgacaatgacacccaatttgactccgaagcattcagaacaatctgcagttaggttggaactaatgttcatgttgctttggtcagacacctagaatcaacacactcgtagaaagagcaaatggcataatcttgctaggaaccaaaaagtcgttggttagattaccgaacggtaaatggacagaagaactcatcaaagttgtgtgggatcataacacatcaatatcaagatctactggttttacactattcaagctcctattcggggacgaagatgttacccccgaagaaatcaagttgggatctgtaagagtcgcagcttcg

SEQ ID NO: 78560 - DNA, 442 bp, Zea Mays
cgccttcatcaacctcaccacgccaaaggcatctgccattgtgggagcttccccacatgccttgggggccttataaaggtgacactaaggcctgtgttgacctgtagcgaccgtcgtccccaaccaagctccgtcctcaaccaccatagaggcagcataaactactgcttaccctacaggccgagtgaccaacgtcgctcagacagatggaggggcccctgcacatcttcaacccttaaggtagcatgagaatgaactctacctttgtaatatcatatcttttgcctatgaaccagtctgttaatgctcgaccctcataagcacgaccgctgtcgccatctatggaccagcgcggcgagggcgagccttataaactcgaccttcagtgttcatcacacggatcatacaaattgtaacacccctggtgttaccaggactaaaa

SEQ ID NO: 78561 - DNA, 352 bp, Zea Mays
gttgtttcatatacacatcttcttctagatacccatggagaaaggcattttggacatctaattgacgtaggctccaccctctagagacagcaacagacaaaatagttctgatagtagctggtttcacaactgggctgaaagtatcctcataatcaatcccataacgttgtctaaatccctttgctactagcctggctttgtatctatccaaactcccatcagatttctgtttgactttatatacccacttacagtcaatgacattgatacctctctttggtggaactaagtgccaagttttattatcaatcaaagcattatattctgcatccatagctaatttccaatctct

SEQ ID NO: 78562 - DNA, 510 bp, Zea Mays
gcagcatggagttgtcgattgttggatcagatagcagggtcttgggcgccaccgtggcgcacgagcttagagtgtgtgcatccaagaataggtgagcggcgacgtgcacggtaagccgcagggcagcatgggccatgagcacgaaatctgcctccacagtttcgtgcctgactaggtggggattggctgaatagaagaaacacacatcagatcaatatatgcttaacgagtgcttgattaaatgctggaactgaacatcgtgtcctaggtgacaatggtctctaagtaaggcgagaatggccacccatgggaatcactggatctgtttgcgctcgccatctggtccagcactaggtcagttttgtctatacttgatcttgtttgctttgcatataaattatcataccatttttgtagaattgacgattatcccagtttgattcaggaagctaggtattaagtgatgtgatggggtagttgcaaagtaccaaatttgtgttatgataactc

SEQ ID NO: 78563 - DNA, 596 bp, Zea Mays
gaagcgtaagctcaaacatcacagaagcatgttaaagaaaaagcatctttggctgatcagccgaagccaattctgctctgtgaagatgtggctaactaaacgagtttctttggtttgcaaccaattctttttccacccaagtaagtgctatgccaacatccccgttcgcatatgagctatcccccgaagtggcaccagtagaggagaaaatctttttgaagcagtcacaacaccgggatgtgatctcgaagcaatgatcccgaagatatctcaaggattccaatagcttcacattttcttcgtccttggcattaatttcttctttcacttttttaagatttacatgaagttcaccgatagtctcatattgctccatgatttttatcatgtcttgttcatgagtgtttcctgcttccttcttctccttcttagcttcggccaaagctcgcttcaaaaatgcaatctcattgtctttttcctccaaggagtcttgaactttttcaacttcaccttgaaggtctgaaatggttgcttcgtagccaacatcttccttttcttgctgcattttcaaagctttgcttagcacgacgccctgc

SEQ ID NO: 78564 - DNA, 767 bp, Zea Mays
gcgagccacattgtcggtgtttggaccgctggtccttaaccaaccagtaaatgtgccgtgtggtcgactctagatagtgtgcgagaagacacaagtgattatcctagttcgggcaacacaaggccctacttccaacagataggatgaggcttatattactcgtatcgtggtgccaagcacagcaggagaaggaaagtccccaagtccctagagatgattgaggcaaatgccaatatctaagacagagtggaggagtgagcgttcgtctacgtgtgttgatccatcgtccatggagggaccactgccctatttataaaccaagcggagcgtccgcagtgaagctgagtcttgtattcgaaggagagatgccctggcgtctgacatgacggcgaactgtgtagtagatttgtgcctgctgacttcccgtagagagccgaggccgagaccgagggatcgtctgtacgcccgagctccagagggagaggccgcccataccgtagtggttgtaacagcgtcggggtatgggccaaaggctacttacggggtgcgtcatcgtcctggcgcgtgatgatgtcgagattccctgctacactcatcgagatcaaagcccctggttgatgcggaagtcttcccgaggcgttggccgagctgtccctcgacgtgcgctacagtcgggcggagtggctgtctgcgagattcgcgacgtagttggtggctgaggccgagaccgagggatcgtccgtacgcccgagctcccgaaggagagg

SEQ ID NO: 78565 - DNA, 565 bp, Zea Mays
ggaactccatctaagaaatataacttggctttcacacttatcacttgaatataacattcgtgtttccatttaaaacatggcaggttatgttcccattaaaaccagcaccgattgtattcgaactgcactactcatttccggatgccacaaggcattgcaggaagataatcgactccccgaacgcacgacagaatgaacagaacagtaataatcgcgattacattggaagggaaaagcaaaacggactttcaaacaaaatcaaggtccaaacagacaacataatgataaacaatagttggatagagcaatctgggttgcgacgaaccgaatcgggaaggagacgaatctgctgtgcggaggactcctagcatccgacggggaggtcctcaccctgcgcgacggcgcgacggtgcacgtgaataatgcggacgtcacagggagggtgctggcaatggacgaccacggagtcgccgaaggcaaaggggaggacggggtgccgctcacctcgtcggcgacgagccgagaggaggcactagcgaggaccgcccgcgtcgcggggcgccgc

SEQ ID NO: 78566 - DNA, 759 bp, Zea Mays
ttttgctgttaagttcttcgctttgtcacaaagaattggctgaccagtccaagaattttgaaagacagacataaaatcttcaaattgcagccagaaattttcaaacctaaaaagcttaggcttggggacctttgacttgaaagaaatcagacaaggaacatggtcggagatgtccctaggcagcgtagttgcgtgagtgtcggggtagaaaactgaccattcttgcgagatgaaaaaccaatcgagtctctgaagaaggggctctctttgcctattcgaccaagtaaaggacagaccatggagaggaatttccatcagatcaagctggctaattgactcattaaatttcaacatcaggctaaggccccccagcgatattcctgttttcgggcctacgagtaagattaaattccccaacaatcagccaaagtttttccgagggcatatttatattggagaaccaatttaggaattcaattttcccatgcggagaacagggcgcgtaaatattcgtgacaatccaggattcattcgacgaattagcagaaaattcaaccgaaagagcataatcattctggtaaataacactgcccaccaacttcgagctattccaaacaataatgaaaccacccgaatttcccaccaaggggacaaaagcgagtgagtcaaaggagttgggacaaaactttctgagatcagccctgtcgaaaaattccttcttggtttcctgcaagcagataatatcacatctggattccc

SEQ ID NO: 78567 - DNA, 442 bp, Zea Mays
atccaatcatcaggtacataaagaatgaggaggagccggatgacaaaaatgtagcagagcgcattgcaaggtagtcagctcattatactctcattggggaaacgctatacagaaggggcgcatcaggagtcctcatgaaatgcattcttttggctacggggaagcaactgctagatgaggtccatgttgggcaatgcgggatacacgcagcatccaggactctggttgggaaggtcttcaggtctggtttctactggccaacagcaaagagtgatgcgaccgagttagtccagaggtgcgaagcttgtcagtacttatcaaaacagcagcatctaccagcacagcaactgcaaaccatacctgtaacatggtcgttcgcgtgctggggactggatatgattggacctttcaagaaagatcaaggaggatacactcacgtact

SEQ ID NO: 78568 - DNA, 658 bp, Zea Mays
atagaagtggaatctactttggaacaagagattcgtaaaggtcaggaatccgatgagaaaattaaggaaattaaaactctgattaaatttggtaaagcctcagatttcacaaaagatgaacaaggcacagtatggtttaaaaagagaatctgtgtaccagaaatcgagcacctacgccaacttattttaagagacgctcatgattcggcttattctattcacccttgaagtacaaagatgtaccaggacctaaaagaaaagtattggtggtacagtttgaaaagagatgtggatactcatgttgcactatgtgatgtgtgtcaacgagttaaagccgaacaccaaagaccagcaggattgctacaacctctcaaggtaccggaatggaaatgggaagaaatcggtatggatttcatagttggattaccccgtactcgggatggctatgattcaatatgggttatagtggacaggttgactaaagtggcacactttatacctgtgaagacaacttactcaggagcccagttagcaaagttatacatatcaaggattgtttgtctgcatggagtaccaaagaagatcgtatcggatcaaggaacccagtttacctcacacttttcgaaaagactacatgagtccatggatacaaagctaa

SEQ ID NO: 78569 - DNA, 636 bp, Zea Mays
tagtctatcattccgtatactgtcatcattctatgttctgtctttcgtattcattgttatgtcttttctattccccctccccgcataactcattctcatgttctgtcatcgttacctgttctgtcattctcatttattgttctgtctttcccattccgcccattctgtaaagcccattcacattctcatcccccatacagcccacgtctagctgaaattaaaaaacacatatggctccaaatagattctcatttcttgttctgcctttcctattccccctccacgcataacaattcacatgttctgtcattcccactcttgttctagcattctcatttcttgttctgtctttctcgttccgccctccccgtaaagcccattcacattctcgttcccccatacagcccacgtctagctgaaattaaaaggcacacatggctccaaagggattctcattccttgttctgtctttcctatccccctccccgcataattattctcatgttctaccaccattctttgttatgtctttcccattcccctctccgtaaagacattcttattcccccatacaggtcacgtctagctaaaattataaaacatatatagcctcaaagggattcaaacccgcaaccc

SEQ ID NO: 78570 - DNA, 648 bp, Zea Mays
tggccaaagatatagcgtaatacgaagagtaacaaagtgggaagcatgtaaatttaccggcacacaagatgccgtgggggaaaaaaaacagggaaagcgagctcgggagaccgaggaaggcaacttgtccgtggatacctgaaagaaactaaagaccggcacaagggcttgctattgctagggaagatgccctggatttttcgagcgagacatggggagcagcacttgaggactgcgcggtgctcgctcatcacatcagggcccattctggtcacgtcggtcgcgcggcgcgcgctaggaaccgtccgtaagattctcgtgccgatggaaatggctgcatccattgacctggacaagacaaagacaaagcgactcacccagtcaccacctctacctgcagctgggccacccccaaatgattgctcctgtcgtgtccctgacaactgactctgcctcctcctacgctttcgtgggcttcgcactagtaagtagtagtagtagtacaattctttgctcctgccacgtgtccgtgtgcatggctcgactagctagggtgcagtctaagttgacctgctttgcccatagcctttttttaatgaaacgattccctacactatctccggtagtactgtactgtacattcgaagc

SEQ ID NO: 78571 - DNA, 611 bp, Zea Mays
aaaatgagcggtgaattgtgtctcttggtctgacacaatggtgctgggaattccatgtaaatgaacaatctctgtgatgcagatgtcagcatacttttgtggtcgataggtagttttgacgggtagaaaatgagctaatttggtgagtcgatccacaattatccaaattgagtcattgcctttttgagtaacaggaagtctagtaatgaaacccatacttatctcttcccatttccacttaggcacagacaacgattgcaataaaccagctggtttcatgtgaatagccttgactctgcaataattatcacatcttgcaacatacgctacaatctcatttttcatcttggtccaccaaaattttgatttcacatcatagtacattttgctactaccgggatgaaccaatagtttgtactggtgagcttcatctagaatcttggttctaagctcatgatcttttggcacaacaaggtgatcgtcaaaccatagtacacctctttcatcaagtttgaagcggctattgggttcgctcttcattctttcctttatatgaaatatacctttatcggatttttgcttctggataattgtaataccctaggtgttac

SEQ ID NO: 78572 - DNA, 588 bp, Zea Mays
tgttttggtaattaatgacaattgactgtggacgaacaatttttagagaaataagaatgcaggactggaccacaggacagtaaagtctttgggactcataaccattgattgtggatcaagtgaaggccaaggtaaaacataggtttttgattttgccggtcagcaggtgtttacagaagaaattgatcgaattaataggataaacagtcgtactattaagaggggtcaatgaacttgcatggtgtaaaacttagtgcctcgtagagcataaacgacaacatgtgcatgaggtctaacagtgctacggatttcaaaattaggattcttttgaactagcgcaaaatttgttttctctgtggtcggtggaccgtccgggccagaaggtcggaccgtccgcgactctgacagagaggtttgctggtcatttgtctctgtctccctttggtggaccgtcctggccaggaggccggaccgtcctcataagatgaattgagtttgggcaaggacggtgtgtttttgagaccttgtactatggactgtccggggtttttagccggacagtaagtggtccatgtgcggatcatacga

SEQ ID NO: 78573 - DNA, 907 bp, Zea Mays
tcgtggtgttcccaagtcgaaacagtatctctgatatgacctcgattgttgcttactgatcaatggcacccatgcgactctcctctcccccatcaccggagactctttgaccggcaccccaaagtacaaaaccaaaatattctacaagctacccaacgcagtgagcaggcgaactagatgggggagatccttaccagtatccgtgcggtggcgagggctggtcacggtgcagtggcccggcggcgaactcccacactctctcacacaggtaatggcgaggcttaaactcctgggcatggtagggatctagggggtcacggatcccgtgttttaaagggccagggatgcgaggtcagggtggttgcgacagttgagaaaaaaacccgagcgaaggtcggcctcaatggaggattttttttttgttgaggcgagaggataacgaagagcggtttgttgccagctcgttgcatgcgcatggttgaaaggtggaggaaacgtccgtcgaacgagcccgacatacagtgacacgtgcaactattggatgaagtcatcattgacatcatgttgacatcagcgaataaaaaatcaatttccatcacagcaaggctttacacttgctgtgcgatgggaaaagagagttctggccgctggcacccacgtcggctaggaaaatggatgatgggccacgggtgagaaaaacgaaaggtgggccgcgtggatcgagaaggaattggcctaggcgaaggcaagaagctgggctggtgcatgcggcgtgttttggagagacaggagttgtgaagtgggccgcacgatagggtttagtgggccgagggtgtggaatctggtagtaggctatgggtagatgagtgggtgggacggtctgagggtggcctagctggtagttttc

SEQ ID NO: 78574 - DNA, 454 bp, Zea Mays
tctcgatcgtctggttccccgaattaatttgaatttgggtacataacttctataactcttttcacttgtcgtattcaaatcacctgacacttgtttcttttcgtttgcgcaccagataatccatgagctagcattaattggaaccatagaattccttacactatgcaaacccaaaacatgtaattaattattgtcaatgatgaaaaggctttgatggctttcttgaaggaggagagagagctggatctgaattgtggattagtaccatcttaacaacgagtcagtcttccttcaacaactcagaatcttaattaataaaattgcaacggagagattcgttacaaagctgcagagcgcacacattgttctgatggagagcgcatttctcctgcataccgttcgagctcagctatgtgatataagtatccaattaagcgcggagggagcggagaag

SEQ ID NO: 78575 - DNA, 523 bp, Zea Mays
tgtggagtaatgcccacaattacatctaaacatatataacatatttaggaagataattactcaacatagattatatctcataaaaaacagatccatctcatttttaatgagtccctataatcttgaatgattctatctcatccttataggttcaaattgtcctaataagcatatttatcccactctagagtaacaaccatgatctaatcaaaaactagttggattatatctagtataatctagttgtaccaatctaatcaagattccatctaatctaatacgagatatctaacatgttaattagatgctaacaaaataaattagatcccacccctatgaatatgttttaaacctaaagtagtgccttacaccaactcatccgtgaacaacaacctaacctacatcacaggatgcctaatccatttatcccaaaagaaaagtaaaactatgtttgacctacccacctcatgtaaccccagccctcttaaccatatgtcactaactccaatgatgaacactaaac

SEQ ID NO: 78576 - DNA, 694 bp, Zea Mays
gctagagtgcgctcaacagctagggttacacacgacagagaggaaaccgaagcttttgaaactgctccgatctccgaagttatgaggcggtcgggactagttgtaacggagggcgctcctgacgaaggcgcccctgctactgaagcggagcagacagacattgaataaggtgatattggtgaagaagagattgattataacactactatgtcatcgaagcccagccatttggattttggaaagtcaactctgtctgaagctgatatggctatgatgacgaagctaggctacttcagagaagccgacaaggggttgattcgctttggtggggaagaaactatcccgaaaccagaaaatgatgaagtggtggtctttaagagcttcttcaaagcagggctgagatttcctctgcacgggatgattggatatgtcttggaaaattttgagatttaccttcatcagttgacccctaacgccattgttaggctcagcgtttacatctgggccctccaaagtcaaggggtggagccactcaccaaagccttctgccgagtacatgaacttcactatcagacgaaggctagggaagacggactacatgagaacttcggctgctacaactttgcttatcgcaaagacatgaagacaccggtggtcagctatcgcactaaatggccgaccggttggaaatctg

SEQ ID NO: 78577 - DNA, 1829 bp, Zea Mays
gttttactcccatacaatttaaaagctccaagccgaacaaaagggcctcatattcggcttgattgttagtgcaataagttttcaatcggctagagaagtcgaaggagacattacttggtgaaacaagcacgatgccaattccttgtccttcattgcaaaccgatccatcaaaatataaagtccagggagtaacagtgaggtataatatgtctagtttatgagcatcattgatccgatgttctacaataaaatctgctacaacctggcctttcatagatttcaatgattcataggccaagtcatactctataagtgcataagcccatttacaaaccctaccactcataatcgggttttgcaacatgtatttaatcacattggtttgactggcaacggtgcaatgactagatagtaaataacatctacacttggtgcatgcataaaataggcataagcataacttttcgataaaagtgtaccttgtttcagcatccaccagcctccgacttaggtaggtcaccacatgctcctttcctccagtcacttgtgtcagaacaaccctaataaccttatcttcagctacaatgtacaatctgaacggtactcctacttgtggtgcttttaatacgggagctgaagacaaatactttctgatgagatcaaacacttcctgttgttctgtcccccatttttaagccgaaggatatgggtgaaggcatcaatcttcccgactaggttggaaataaaccttcgcaaataatttatcttgccaatgattttatgcacttcgaccttacaggttggaggtcccacattccgaatggatttaattcggtcagggtctatctctataccatgttcatgaatgatgaatcctaaaaacttaccagccgacactccaaaagcacatttacgtgggttcatttttagaccataccgacgcattttatcaaaggctttgcacaaatcagctatatgagaactaaactcagccgatttgactacaatatcatcaatgtagacttccacagtgtttcccaatagctcgtgaaagatcaacttgatagccctctaataagtagcaccagtattttttcagaccaaatgtcatgacaacccactcaaataaaccaatgaagcctggacatataaagaccattttagacgtatcttcttcggccatgaaaatctgattatatccggcattgccatcaaaaaagctaataattctattccctgacgcattattgattaatgtgtcggctatgggcatgggatattcatctttagaagttgctctatttaaattgcgaaaatcaatgcatactctgagcttacctgactcctccaccggcacaatattggagacccactttgcgtatctgcaaggtctaataaaattagcttctagtagccggtgaatttcgtccttgatttgtgggagaaggtctcgacgaaatgttctagctttctgcttgaaaggtctgaaaccgaacttaatgggcagacgatgctctacgatctcacgacttaatctcgacatctcagtgtaattccatgcaaagcaatccgaatattctttcaatagaccgatcatttcatttctaggatcggtctccagggtcttgttcacaaaagtcggccttagagttttaccatctcctatgtcgatctccgccaaaggatcgaccgatgtaaacccctgtcctaatttgtcgagatctctgaattcctttatcatgtcccccacagaggaattagatgatctttgtgtgatggcggactctccggtcccgggggccggatcatccgcgatactgactttacgc

SEQ ID NO: 78578 - DNA, 378 bp, Zea Mays
tgccgccggctcttcaatcctctgcgtaagcgcaggttctttggcttcggtagccgaagaggtctcaccaccaaattcaggcactgtggctagttcaatatagcgcggtcggtgagtaagaaccttcacctttttcctctttggcgtgggctcgcttggagcagctgaagcaacatccttcccagaagttgcattctttctcttctgcccccgtggtgggtagcggtagtcagggtacataaatccaatagcatcaaaaactctatttagcctcttctttttctggctcccgaaggccgcagatagtgcgttatcttcagatttggagtagactccaagtagttcatcactggtgttttcaacacacttcagccagtc

SEQ ID NO: 78579 - DNA, 599 bp, Zea Mays
cttaggacccttggccatgaagcatgacggatcaccaagattgaggacttgttggcagtaatgcttgcaagtactttcttcttttttacttttcttgtcatcataatcattttcattgtcacttgttgacgcatccgaatcccattctacacgatgtgcatggctcttcttgaatgccatcttgtcatccttgtctctcttattttctttcttttcttcatcattgtgtgggcattcgataataagatggtcttggctactacacttgtaacatcttctttcttcccttcttttgatgaagactttttttcttgtgtcatgccctttgttcctcatgaatatgccaaattggtgcgctaagaggtcattttctcatcttcatttgagattgagcttccatctccactagattcttcttttttcttgttctagctcttagatgaggttgtggctttgaatgacaaagttgtattcttctttatcttccccatccctttttcatatggtatgtgtctcgtgtgacaacatcacctagtacttgggtaggggttactccttttagttcgcctctcacattgattatgactagagtgtaaaag

SEQ ID NO: 78580 - DNA, 493 bp, Zea Mays
gtactttattgctctttagatgcagaattagacttagagcaatattacgagcatgatcaagaatttagagaaagaataaatcacaagaaagttgaggtggtagtgaaggacaaatatttctgtgatatttctattgtgagacctggtccgaaggacactgtccagcacccagagaaagatgaggtggtggttttctagaggtttatgagggctggactttagtttcctcttcacaagatgtgggtgaatgtttggaagaagtttgatatttatcttcatcaactaaccccaaatgccctgatgaggatgggaatttttatatgggcagtgaggagccagggtgtggagccaaatgctggctacttttgcaacattcatgaactccattactagatgaaggatactaggaaggagaaacttcataacaactttggttgctacaccttcgcatacaggaaggatgccctgttctctgccttggcgtaccgaagca

SEQ ID NO: 78581 - DNA, 364 bp, Zea Mays
atccacccgttactgatggcagtttgggccttagagtgtgaccctctgctgaagaagttagtgctttggttgcttcacttggggagattcctgatgacgaacgacaggtccattttgaggtgcccctgaaccctagtgatgcagatataaacgctatgctcgatttgctagctgaggattcttctgatgctgctcctattggggcgttggcagtggtgcccctcctagaggttgatactactttggatgcacagaaacctgtcagtactcgcccgaggcgcccttgccgagccaatcagcctgatccttctgctgatgagcagaagaagaaaagaagacgcctccggcgagtatccagctttga

SEQ ID NO: 78582 - DNA, 616 bp, Zea Mays
gggtgcttaggagtagtgttatgccctctaaccctactaagtgtagtcaagtaattagttaagtgaggtgatggcagtagattatgctttgggaagtggtaacttgcttaagggcggataccttaccaattaggactaccttgtagaggagaaggtgatgggttgtatgatttcttaaagtagtagtcaggaccgaccaagaaaagacaagctacatgttcttggacgatgtagactatcttgtagaactagtttgtagctaacctcttaaaagtataccgtaaagaatgttgcaaacaacatgcatccataagcatcacctaccctcatacttgcatgcatcatacaggattgcagaaggaaatgccagtaggagttgctgaggagctgcaagaggttctcgctgaggaggttgagtctgaagccgaagcctaggagtgctcattgatactgggttattattgtttgtaccatcaaaacttgttgcatgtgcaactagggctacaccactacactgcactgacctacccacatcataagaatgtgtatggaaatttatcccatttatagaataactatcataagaatgtgcaaccatgttaggctccttagctaa

SEQ ID NO: 78583 - DNA, 512 bp, Zea Mays
gaaataatcagcactgtttgccaaaggcagctcctgacgcatggctagtacttaaggatactttatgtgcagtgcagaccatgaagataggtaagtgagtttcacatctagtcttctgcctttactaaccattatttgtaaaagcatttgcttaattgcatcagttaagcacggtgcctttatacggtagtttgttgatagattgcgatctgattgcatgatgcatttcatttgctatgataactgcgctgagaaatgtgcattggatcgttgatatgtcacgtgatctgctagaatccgcctcatcgttgtgattttcttctgataattatttgtgcagttgcctcactcggcatgataaatacctcatcaatgttgttcgctttcatgcccttgttatattccgtgttaatcttcataaaaggatccaccataccaatttcagccggttttaatttgaacgcaatctttatattgacttgatggtggcacaaaaacactattcttggcta

SEQ ID NO: 78584 - DNA, 501 bp, Zea Mays
ttcattgccccttctgtctgatccatgtctaacccctcccctgcgcagactgtagttgccgccgccatgattcctcgttgtccagccaaccagagctccccgcatgtcgtgctaagctgtcccgagcaccgcccctgggtaaggaacctcccctgcccttcttctgcactaattttgtcttagcgtggggaattttggctcgctggagctgcctctcatcggaccatcgtgtcttcaaggcattcggccagtacagcccttccccgtgcccaatcctaggcatagagtactcgtaccccctcactgaagctcatgttggcctcggtgcatcggattgtcccccattgcgacgggtattgctcaccggagtgttctctggtcgcccaaggtccccctccatcgtctgcccgcttcggtttcgtcttcgcgacccaggcttcgccatagtgttcgcaaggccctccccaacctccctggctacccagaccaccccagcacccc

SEQ ID NO: 78585 - DNA, 286 bp, Zea Mays
caggtgaccatcaaatgtgcttaataagtatcaactccaagaatatggtaagaatggggagttaggtcttagctagtggaatttgatgtttgtgtaacctctattctcccttgcactacaaaagggagacgttgagtaaagtttcagaggatttgatcaatcataagttagatccacccaagctaaccatagcatactcttgcataagagttctctcagagcacaagtttgaaggtggattaggaccatatgctataaatcccaccataaccatgaggtaagggga

SEQ ID NO: 78586 - DNA, 565 bp, Zea Mays
attttttgtacctggttaagcaaatttcgagctttggctccagccagttctcggtcgccctttgcccagatctagataataaatctgttacctatgctttgggcttcgactggaatgtcaacaaggtcggctggagacaggctgaagtttggcctattaacggcccttgcatggttgcacctggcttttatgaaagcagcagtcataccacgagaagctactagcgcacagaagtcatcgtggccagttatgacttcatcgaggatgtcaacttctttctcaatgcattcaagtgccccagggatatcttcggcagaaagactggcttcttcgaatgcggctccgactgaattgaatatactttttaactgagcagtgcattgggccacaaaattgaaacatttattcttaagagctttgagtgcttcactcagtttcaggttcttctcagcttcaaccttgattgtcatatttaaagcttcggtttcacggctgaaccggctggagttctcttccaaaagtatttgagtctccttcaactctttgcttagtttctcattctgag

SEQ ID NO: 78587 - DNA, 442 bp, Zea Mays
cgcggatcgtaactcgatggttcgtaccgggggcacgagaaagagagagtcaagcgagtttctgcaggttcgggccgctttgaagagcgtaataccctacttcctgggatggctttgtatgtgagagatgtttacaagtggtgtctaccaagtggttaggtgctaataagatgaaaatgatagggatcccccttggccttatatacacgatcgtagggtgcctcccgcgtacacattgatcacacctttcctgcttatctcctagctaatagcgaacaaacttcgctatcccgaggaaaacccggcgcctctgctccgagctatctccggcgtttgaggatgtcgggtgcgagaaaagcgaacagactcaacgtgatcacgcccaagctgcgagtaatctgggtgtgggcccatcgtactcctgggtcggcccgtttccgcc

SEQ ID NO: 78588 - DNA, 417 bp, Zea Mays
gcagtatctcaacaagtttaatcatttatcccaatatgcaattgaccaagtaaacactaacctgaaaaagaagaactgcttcatgcgaggactcaatgaccggctctaaaggaaaatggctacctgtctggatcttacgtacagcagagctgtcagcacggcgctggcagtagaagccaagaatacagggcaaggaaaatccaagggatttgggggtgacagatccaatcagggacctgagaaatgaaccaggttggtaatccgaccattcaatcagaatcattcttcgcctcgtccaccctcctatccattcaaacagcctattttcattcgccctgccactgcccccacttctacaaatcagccgagtgcccctggtgctcgtttccccgccctccctagttcctcaactggcta

SEQ ID NO: 78589 - DNA, 274 bp, Zea Mays
atagtcctttctaaaactaattatgttggctaacaaaaataaatgagagaattaatactatgttggtctagcaaagactacacatatctaactataacaaatacctgataaaaatcctaattgaagcaactaaggtgccaagatagtgaaagagctctcccacacaaatctagttagcaaggtcatacaaacttatgcaactataattctaagcacaccgagagctcctaaacatactagtaagcaagtcgcacaagcactactagcaaaattc

SEQ ID NO: 78590 - DNA, 593 bp, Zea Mays
cttgagctttggcgaagctagtgacactggtagcatggtcaggggtgcttcgaggaggacagaaaacggtctcggatggtcctgaacaatggcggtgacactggtaacgaaaggagagggcttgggtggttgggagcttgaatggggatgagcaaatggtgtgggagtctccttttatagctatgcaccagtggttcaagaggggtggctcatgcatgagtaggacgatcaggcttctattgaatgatgatgagctcgcaccattgaatcgcaagacatttggggagagaatagggggagaaactatcaacttgaatgcccatcattaccgttgttgagtgacggggacagcagtcgcgcttgagcaaaggatggcgggatcgacgactgtgtgcacacgttggggaatagggagaggggtgagacgttagggatgacatgtacagctctcctattagcaaattagggtctgggaagcatggggaaaggctgacacgtggggctagggattcagtgtcttggagaacaggcgagtgtggggtgtgcgccgacaagcgaggttcacctatcaggtgaccaagggcatatgcgtg

SEQ ID NO: 78591 - DNA, 436 bp, Zea Mays
tgatgctttgtcctcagccttcgggggttggggcaagaaaagattgaacatgatttttgatgcaattggcttcgtatatcgtgattactactaccccttgcgaaggcaaggaaaaaagagaaaaactgccgcttcggccaccactgctgtgccgaagggcaagaaaataaaggttttgacccactggccacgatatattgaaacgaccgtagtgcctgaatttggtgaggggacctcctccactgccgaagcgaaacaagctgctcccatcgctcggagcgctgaagggttgattgtagtgccgaaggtgcctatagtcgggtcagccgaagccaaagatgacgcgaccagagggctagagttggaagaaacagtgatgatgctaaaaattctaagtcctccggcagaggcagaactgccaaaggtgacaagggct

SEQ ID NO: 78592 - DNA, 812 bp, Zea Mays
gtcgaccatgaggaatttcctatggcttagacaaacattattagagtttaatctaatggactaagtcatgggtacacacctttaactccttttctccattgctttcctgtttccgctcaaactagcaccaaaagcaatgttgcaacatataaggtttctatcctatccaaatgcttagaaatatttataagggtattacaaacatgatcaaacctatgaacttgtcgaagctcacctttaacaagttttacccttttgtctcgtttgagctgaatgttggactccaaaatatcaaatcacttgacctaatttcttctgtcatttcttgagttccatcaccttccaatggtcatcaagaacttttccacactctgactttgatactcttgaccttgtggccatggtcttcacttgagctaggattttgagccttatgacctgaaccatccaaatcatgttagttactccttatggtttcaagtcacgtccttatgttgtggtcttcaatgcaacatgtattttctcaacttgactaaccttgacctttgcaagaacctcttcttcaccttagctttaggtacctcgatcctcttaaccttctcccttgctcccatcaacttgaagtccttcttgcttttgtccttggttcaacaagttgtctccaagtcatgtacattgaatcccaactttgcaatgtccatccttcaacttcacttgtgatatccataatccatatttagacaacttatatggaatatcacatgaccacctgtgttgaaccttataatcttttcactaagttcctattcaac

SEQ ID NO: 78593 - DNA, 272 bp, Zea Mays
agtaatgagggtatgaaacacattcatgagaaaataaaggctgataaagcaaactgtttcagaaaggatgaccaaggcattgtatggttcaacaaccgcgtagttgtgcctaagaatgaggaagtccgccagcaaattttggatgaaactcatcttagtcgctattccattcatcccggaagcactaagatgtatcaagatttaaagcaacattattggtggacgaagatgaagattgaaattgcacgctatgtggcgagatgcgacactta

SEQ ID NO: 78594 - DNA, 570 bp, Zea Mays
cagagattagtataagatgggatacgagaaggaagcactcaagagatcatgattaatgggcttcttagagtcacgagatatctaatgacagcaataaaatccacagaaccaaaggaatacactatttatagatgaagttagtaaaacatcgtcatgatccttggagaagggggggtatgagaatgaccagaaatgagagatttaggcaaatcaacatccgatacttgagaacaagttatagcagataaccagaaagcggggcagaatcattggatgatctagagatttgacggataaggtcacaacatggttcacaaaggtaaggattaccagatccaggtgaaaagagaggtagtctcatgagatcgattcggatgagcagcagaaaggctatgaagattcaggaaaggatctatggaaagaaacatggccttgatagggtttgttcaactagacatcaaacaacaattttttttgacacaacaagtgcacaaggagacttgggttggtctagcggttaagctataggggtctacaagctgtgcaggtgtaacttcaagggtaaaacac

SEQ ID NO: 78595 - DNA, 514 bp, Zea Mays
gaaggatcaatcgtgttgactaagtcaaaatgatggttgaccaagtgaagtggaggcacaatacttggtgattagacaatcaaggacttgtgatgatacgtttcgagtagagggagcgtatcagacaagctactactcacgaggggtttggtggtttaagcctcaaaatcattgaacacatggtttctggatttgggcctcaaaacctagatggagtttcagcacaaactggagtttcaacacaaactggaggagacacctggaaacattgagtagttctcttagagacaaagctatttcatgaaaggcctataactgttggatctgcaaatcttgtgttagagcataataccctcggagttaagtggttcggctctaattatctaggggcaagttgggaatatgaaatgatcctataagtaaggggaggctgacccaacgagcatcatctctttagcacttcatttggtttcatcctttttaggttttccctatctctagtctactattgata

SEQ ID NO: 78596 - DNA, 644 bp, Zea Mays
gaatttatggcactcagctcagaaacaatcgttatatatgtgaaatagtgatgtaatcggtgtttgggattacggattggcgtgaaatttggcaaaagtgtttcttgagctgtcatgaaggtgctagaaaaatctggggttttgagcaagtttagctagtttgggcatttcaccgagcacttggcatgcggggttttgcattaagggtgaaatggctatttgagtggatgaatccttctctagggagctcaagacctacagaggaacttaatggagcactagacacacacatgcacatgatttatgagatttcctaggattttgagaagatttgcaaaagggggggtgaagctcctcctcactagcagagagaatagagggagagggaaagaagatagctcaccaggaggaagaggaaggatccgagcacaggctggggcagacctcataggagatctgctggagcacatcggcggtgagggagagggaaatcgccagagcaccagagaccgagaggagaggagtaactgaatgcctggctcaggctcggttggggaaagaattttttaaaaaccagttatgggcacaccggacagtctacagtgcatggccggtgcacaccggacagagagactccgaactag

SEQ ID NO: 78597 - DNA, 277 bp, Zea Mays
aaaacgagtaactgctgcattgctgtccaaaaatctgcaagtgtccatttgatggttgagttcacccttttggctaaaaatgctagttagcacttaacggatatagacttgtaatggctaagcttgagatagcatgtatgccctgttttgtatgtttcttccctagttgattgtgatatgggagttccatagacattgatgtattgaacttgtgtgatcggtgatgcttttgtgtgataaataagaagaactaatgaaaagccgtagtaaattaaat

SEQ ID NO: 78598 - DNA, 452 bp, Zea Mays
cgagcgggcagaagaagggcatgcatatccagtacagcatccggtctacttcattagtgaagttctggggccctctaaaaagaagtatcctcaagttcaaaaattattatacgcagtacttctaactgctcgtaagctccgtcactactttgacgaccacaaagtcatagtagtcacgggtttccaataggggatattcttcgcaacaaagaagccatcgggagaatagccaagtgggcctgcgagctgggagctcacgacatcgagtttcggcctcgcacatcaataaagactcaagcactagttgacttcatgtcagaatggaccgagcaacaagtacctaacaacccagaggctacagaagtatggagaatgtattttgatgactcgctgaaactgcagggagcaggagcaggaatcctcctcattgcccttggaggtgaacaactcaa

SEQ ID NO: 78599 - DNA, 736 bp, Zea Mays
attttgtccagccctactaatagtcatgatggtgaacagcgacttgaccatatcgtgctcaatcagcaggccgtgtaaacgatcgtgccaagtaccgttttctactgtagattatgatgtttgtagagtgaagtttgaaatagagagtgaggtaggaagtgggataagaagtctgctggagatagtttagttgctcttttgtcctttttcctcttatcaggattgggaaggaaaatactgccacctgacctgatcaacttctaggaatacacctggaatcttaccataaaagagagagacaataattgaacaactgaggcgataaatataaagcaagctactccttccgtcttggaaagaatgattagcttacgtgtgttggttcatttccatatgagactcaaaaacgtcattgctcagtctaaaacagtgatgttcaagaacagactagctgaggaaccggttactgatattgccattacatttgctaatgacagcggtgggggtagatcgactcaataagtttccacctcaaaaggctggtgaaaaaaagcctgcactacaaaatttattggagcctgcagctctttttttttcatacggagaggaggaggacggtgcagaaggcccaagggctggcggttcagtgttcgctgttgaggaggtcgggtcgctgacggcaggctgcatctgcagccgcggcgaggcaacaactgctttttttacttgcaattag

SEQ ID NO: 78600 - DNA, 304 bp, Zea Mays
cgaccgagagatagcagacgaagctatcaggcaaagcgaagaagaatctcatcttgcctcagaagaagtgagaaaagctgacgaagctagagaacgtgaaaggcgtttaggtatgtttgtcatattttagcttcataagtactttagcttcgtatctgacaaaaacttatattttggtgtagctgaactttctcctcctccggagccatatgatcctaacaccgatccagccttaaagggtacctttgacgaaattaaaatagtgaatgcagcaatagatgaagctgtagagaaacttctaaat

SEQ ID NO: 78601 - DNA, 383 bp, Zea Mays
tccccgatggggtcgttacttccactgatgcttccttcatgcctggaggctagctgatgtcgaggcacaccttgaggtccagttgatttgcgctgggtagtttttgtgcgtgccatatctccttaagagggggaaattttatttagtatagtttaaacatgatgcatgcataacctaataattatgggatcaatctttcgttgatcccttacttcctcatatactgcactctgttacccgacttttaaaaggtaagttactaccagaaagtggtaagataagaatgaaagaatattttaaggtaagtatttaaaaattattttgaagtactacgtaatgtctgaagagacgggcttcgctccgataccagctgtcacgaaacc

SEQ ID NO: 78602 - DNA, 1456 bp, Zea Mays
gcgattggtgacggtctagttcaatcggatgggtcgacgagcatcacgggtatgtgagatcactcaaacgagagagcagaggggacgagctaacctgtatcgcgctggccacggcgaggtgttcttgcgacgttcttcgaccgatttgggggtaatcccaaattggggagctgtggggaacgatcggagctgatagtgggtttactggatgcacaattacctagcggaacatgttgaggcttcaatttataggatgctcaagcggtggtgatcaatttgggcaagttgtgctggcggctggaggggaaaaggagttctgtgctaggaacaggtggccttcaccgtggcaatcactccggcggtcaccggacatgcaccccatggttcaccacgatgcagctaaagcttaagcacgtggcgcgcaacggtgacagatcaacagcggtgaaggttatccgatcgaccgatgagctcgggggtacggcaagcttagccgccacgagacccaactcaatccgggcgccaagatttttacctgcccgtccttatcttctaactacggtgcacaaatcacggcgatcagcgctcatcgtggcggcgagtcaccggcgacggtgaacggctggcagtcgatcttatgcagatactgtaccatggcatcccttattcagttagcctgaccgagcgatttgaaacccaatttcctcccgattttcaatggcaaccagttgattggccagtaacaaatttgttgtctgatgatccaacgacaatcttgttatagcaaccatggccaaattcttattagatcagggttgatttctagttcaaagttggctcagtatcactgttagtctgaatttcagactgcaaacagcctgacagcccgagtttgagctgaattatctctaaattcttcataacaacaatgtttaactccttaaacaaagttgttcacctttgatagatttacatatttgatgtggtgacctagggcaaaaaccttagaatttgaaagttacaaagctccaaagttgagcccatatcacagaattttagacttagggtgagatctcaaatagggtctttttgcaaataagtccaaaattcagggtttagcttgcaaatcttcatgattgtgaaccatatgacttaaaacaccttactttactagtttttgcactttagtccaaaagtggactaattttgcacttaaccccctagggtttaggtttagggttttccaaggtccttattagggtttttggtatttcaggggtgtgaatgtaattcaagtctattcttagtaacattttttaactattttacttaagctttagggttttctctatttgggttttgttttaccccttctaaatcttatttagggttaagtaccctactctagtgttttatttgcaaaatgccatagcaatacaacttgtttgagattttg

SEQ ID NO: 78603 - DNA, 956 bp, Zea Mays
atactataagccacattaccatttaggtccttcatagctatatgtaacgcacaagacatttgatgttgaatatcatccattggttatgattggtattcagggagttccgagaaagcacgacaacttcggtgagatgtgttgatcatgtcactatagaaggcattaacactttgttagttagctgcttaattgtaattaccatttaactctaaacctattcaagaatagaaacttcgattctagttagttcatactcaagattttgcaccttgacctcctcctttactttgtcgctttgttggctccataggtttgaatatgttgagcaaatccaaacttccatgaaaaactcttgtatcgtcttgtattgtcatctttagagacacttcccttatggctatagtaccaatgcatttagtttttaactagtcatggttcttagcgatggcacctcgctactcgaggtcatgttccatctttctccaacgtttccacacctcttttcaaaccactaggtcctagtttatctaagtatacttattagcaatgttgtctttattgatcaattccctagcctaactctcttaggatgccttgtagtctaggaactcatcatagtggcctctgtactttggaaacttcttaaagtcatatgccttttccttccttcttaaaggcctggtccagtttcttcttgtggttctagaataaatacactactttcttcaaggtacattgctttattctctccatacaatcatcatcggtcatgaacttcttctttactttagccataacatttccttgtacccttcaaggactgcatgctaataaatgttgctattggaattccatctttgaatgctaatggccatgtgctccctgacaagatacccatagtatagttagcaaactaggttataggtgatagctgttcgcatggctccccatctact

SEQ ID NO: 78604 - DNA, 581 bp, Zea Mays
cgagtgatgtaaatagatcaaacacacgcgtaagaaatttcagatttgatgcagacaaggagtatgattggaatgcaagtgttgcaatcagatccaaccaaaattttgcaccaaatgacatgagcaaactggttgaacaacttgataaaattttcagcacttgtgcacataaacaaactgattgttctacttttctttcacaatcttgttcaacacttttctttggtacttttctttcttctcttttttttgatactcttttttatagaactaaacacagagatctgatatgatattgcacactttataatacttaacaaagaactcaaccagcagctataacttaaataggatcaaagttaacgcgaaggaaatgatgagagttttcagatttttctttttgtggatattttccgatatatataagaggctcaaagggaacacaaagtatagagtgaccagcaactaaacaaagactctaaggactaaaacttaacaaaactcactagaacaatagattgaaacaaagggctatgacaaaatattttatggctttttggtggataggacgaacacaaaat

SEQ ID NO: 78605 - DNA, 278 bp, Zea Mays
gggatggtgcctaggataagctctatgacaaattcaacttttctctcaagtggcgtgcctagtaatttcttgggaaacacatctgggaattctaatactactcttataacttcaagcagattgacatcctcgctattgatagatatctggtgacaacttcctttccttggttcagacaaggtcaactccaccaacacttcttctcctgacaagtacaccaacctcacagtcctcttatcacagctaaggcctgcttggtacatggtcaacctattcat

SEQ ID NO: 78606 - DNA, 434 bp, Zea Mays
taatccgagccgcatatatcatatcctacggctgatactgggtgatacccccttcggccagggacaattgcaaaagaacccctaccttttattataaataacccgccgtcccggttagtagtaaaagcattacggtttggtcctgacgtttgcgcagagccccctgggctttgttaaaataatgtccatagtcttgagtcatgggaaaataggaaattagtaattaagaatgttttctagtatgggaaataaagctagaatcctatttaattcatatttgtttcatattaaccccttttaaatccattccagttcctataattttgtaataatattgttcatcacatagtgtctctggtttgacatgaaaactatattaaaattaatctcttaattaatcttgtatcaaatgcatgaaaacttcggaaatccat

SEQ ID NO: 78607 - DNA, 364 bp, Zea Mays
gggagacgaaagctgccaaatagcccttgggaaccttcgatcagaagttatcacgctaaggaacgaggcgcttgaaaaagataaaatactgcttttcttagtagatgggctgaagagcaacgaagcaaagcttaatgcacaatccgaagctcataaagccgaagtcgatgacctttagaaaaagcttgccgaagctaatgaaaattttgaactcgcaaaggcaaagcaagagataagtgaatgaacaagtgcgaggctagaaaagaatgtggaggagcttcatgagtccaaagagagatgctatgagaaatccttggattgcgctaagaaactgaaggacaactttgccaaggtgggtgcatac

SEQ ID NO: 78608 - DNA, 455 bp, Zea Mays
gccgctgcaggggaagatgggagggacaggagagaaggagagggcaaagggaacgtgaggcggcggtggagtactagtccatcaactgcaccgacactatagggaggacgggagggcgcaagggaggaggtgaaacgcgtcgcgacgaagaaagctggctgctaacgcgatgtcatgagtgaatggatggaatcgactgttggagcgtgtggagaaagggcttgcaaagatacagagccgatgaagccgcttccgttttacatgacaagatgggtagtacgatgctaggatgaacaacatcggcgaacacataaaaagggaatggatatccatttacggaacgtagggtggacgaaccaaacattctccttttctatgcgtgtgcatggacattagcaaatctataccactgtataatccaccaatttaaattttacaaaacgcatctaccaaat

SEQ ID NO: 78609 - DNA, 684 bp, Zea Mays
gagacttctgcgcatgcgctggcgcacggggggccacatcaatcttagagaaagctggctgcgaacaagctaaggctgtagttcagccgggatttgttttcttggcggatgacatcaaagacccttcggctgaagcttcagcgctaggcgggagattttactccgtggtgtggatgaagggcaaccgtgagatagctgatgaagcgattagaaaaatgaaaaagaatctcacgacgcccaagaagaagccaagcgagcggaagaatctgtcgagcgtgcaaagcttataggtatttttagtgagttttaacttcggagttcgtttccagcttcggaattaacaaatatttattgtgatgtagctaaactttcacctccaccggagccacacaaccccgaagctgacccgtccatgaaggaagggcaagatataataagaattgctaatgaagctgttgacaaagatgtcgacagactactaaatgaagccgctgagaaagtgctaaaagaagactaaaactttgtatattagagagcttagtgcttgtgtatagcttttgtcgtttgtaagaatcaaacatcaagttttgtatgtatgttaatgtaatgtatttctttgtgatgcatgaaaccttcgtacataccgtttttgagccgttggcaaaaaaacaccttcccttcttt

SEQ ID NO: 78610 - DNA, 757 bp, Zea Mays
tgcgagccctccagcaaactggtactggccggaatgtgcaacgatcggtgccctaacttagttaacacataatcccaccctagcgaccctaatccctccatcaattgcacgaatccggcccggagttcttctgcccacaacgacggcgaacaccaaggacaaaccgaggcgttcccagcgattaagcgcggtctagctcaattggtcgagctgacaagcattcctagcgtgcatgggtgctgaaacgagggtggggagggcaagagcggacctggagacggcagtccatggcgcggtgactcacggcggcacggagaatcgatttgggggaaatcacgattgctcaggctatggtgagtaatcgaaggcgaggagcgatgcactgggtgcgtaacaagctaacggagcacgctgagcgctcaacttatagagagcaaccgcgagtacgatgaatttggacagagaagagcttgcagtgagaaagggcaggagtcatcagaggccgctcaacgaggcattcactgggctaagtccccgacgacagaggggctatctacagcgatctactgcgacgtggtaacaaggccagtagcgtggcatgcccggggataacagcgatcatcacggcgacggccgcgcggccacatcgccgggcaagtgggtacgacgaagctagttctatccattcccccgctgatcttttcactcccgcggtgatatccgctacacactgagcacgaatcacggcgcgggcacg

SEQ ID NO: 78611 - DNA, 406 bp, Zea Mays
caagttcgattagcttttgagcttcaacatttgctcaactattgactaaatcgctgaggagaagaagatcactgaccctgcactggccaggttttatgaagctatggagaagacaaatatagagaaaatcaccaatgagatgctggctgggctatctgaaaattccagcgatagtgaaagttttgacatagaaagtggaaatgaagaagtcgaagaccgaccatggaggccaagtcatgttgtttttggaaagtcatctgttaatcaagggcagatcgaagcaatgaaaggcagatactttcgtgatatttctattgtaagagccgagggagagagcatcgttcctcttcccgaagctaatgacgtggtggtttttagaagcttcatgaaagccgaacttcgtttc

SEQ ID NO: 78612 - DNA, 734 bp, Zea Mays
ctgcgggttgattcagttgtttctcggggtctcttacgcaaaaagcccaggccgaaggggtatcaaggtattctggctgcacgatcctggatgagtggcacggattaaatcaagcgtcgtctgaaccggtacgcagcgcggtccgtccgaccaacggtctacgacatagattcaattaccccgaactcagccatatctgcccgatcagagccaacagctcagacttaaataactgcgatggaatcctagacacacgattcagatcggatggatctgtgtaactggccgaaccggtactctgggttctaatcccgaccggcgcttctagatccagcggtccgtcctcatcttcttccgccgcccaaagccagccggcgtcagagtcctgccgcggcggcgccctcatcggaaaaacttagacccggtgttcgagcgaccaattccccccattaacgagtcttatacgtggcggaaagtatagcaaaaccacatggggtttactcaccagcgatcggcgcttcgaggtaccccaatcgtggagatcggcggtccggtggaggaggaagaagtccgttgaggaattctggcaccccgactagccacaccaacacaaacgtcccaccgactcacttcggctcccccgacgaccctcctcgatccacccttgaagttgcgccagcagtgtgggtcagaatcgacgtcgacggcaactctggcagcgtgttggcttcgat

SEQ ID NO: 78613 - DNA, 275 bp, Zea Mays
gtctacctgaaggtttcatcaatgaagggtgtatctcgtttcgggataaaagggaaacttgcacccaggtacattggtccattccctatacttgagcaatgtggaccagtggcgtatcgacttaagctccccaaaactttgtctgctgtacataatgtgttccacgtgtcccaattgaagaaatgtcttcgggttcccgatcgaaccattgaagtgacagatgttgtcctcgaaccagacctgacctatttcgaacatcccattcgggtcttgga

SEQ ID NO: 78614 - DNA, 423 bp, Zea Mays
tcactccatcagatcgtggtggagatgacccgacgtggacgtccatggaggtgtgggaacgagagctcacttggacaccctcaagggctgggttgcatctcgcgctacccaccagagccggatcccctacccacaacaccctctggggctgggttgcagcttgcgctacccacccgagccggatcattaccggcgacaccctcgggggctgggtaaccgccagcaccacccttggggctgggttttctgcaacagccacctctaaggctgaaggatcctcagtcacctccatgggagttgggcaatccttaccaacctcttgacaccgaagactgccttccaaggtcgacgatgcatgagatactacccgggatacctctaatcccacgtctggaatgtcagagcaaacatccatcatatcac

SEQ ID NO: 78615 - DNA, 589 bp, Zea Mays
gagtgatcgccagcgcacgggcggtgaagatcttttaccccgcaaggttatccattagctatgagcgcgaatccggacggcggcagcacgaatcacggcggagggtgccgtcggcggtgaggacagccgcgctggcggtctgatccctattgagcactgtaccatgagatcgccattcagtccatctgagagcccaagttggagctcgattttctgcgatttttatgtggcaccagaactagccttctgcatcaaagttgtagtgccaccaaccagctacaagtttgttatggaaatcattcacaaatttgcactggatctcaattgaattgactctcaaacttagagcaaagtcactgttaacttgaaattcagactatttcagtctgacagtccaactttaggctcatttatctctaaatttttcttaacaactgagctcacactctttagcaaagttgttcttctatagttggtcttcaactttgatgtggtgacttagggcaaaaaccctatgctttgaaagttgcaaagctccaaagttgagccaattatctggttttcagacttagtgtagaactcaaatgag

SEQ ID NO: 78616 - DNA, 485 bp, Zea Mays
gcttcagcatcataagaacacatgaacggtggaatagagaacttaatcttagcaaatgggtcatggtctagttcaggattatgatgacgatgtctaccattacctcccataccttgtcgattacgtgcgaggcgttgtcgcagcggtgcataaacatcgtcgtcgtcgtcgtcgtcgtcgtcgtcgtccacaggagagtgagctggggctggagttggtggggggacgagcctccagtacgcccatgcgtgtaacaagttcagcaactcgtcgatcaagttgctcataggatgtcgagacagagtcctggtgttttttaaaagctttagtcatcgcgcgcatcatctccttcaattccatctgagagacactcatcgtcgttaagtttaggccccttgtccttgtccatttaattctttggtcatgtcattgttagcacaaaacagagacaaaaaggcaacaaacaatgtgaatcctacaactat

SEQ ID NO: 78617 - DNA, 317 bp, Zea Mays
gttttggatcataggatacaccatgaagacttttgtctgatttccatattcctcatcgtcgtgtgctcaattttgtgtatccaccaaagtgtcgcatgtgaattaatttgcactcatgttgtttgtatgttgtttgctcaatgttgctggtacacaaacgaatgttcatcttcctatgcgaacaactaagtaccaattaccgtttaattccccatcagaaccccttgtttcttgcatatccatttctttgaattggagtaagtaactctgtctatgaattcgactcagttaacctacaatttcgagtagtctttcct

SEQ ID NO: 78618 - DNA, 976 bp, Zea Mays
cacacctcggcaactatcccctgggagtcgtccaagtcatcggacgacactagaggggaagcgtagaccggcgacccctcagactcggagtcaccaaagtcctccgagggactcggctcatgcttgcgcttgtcgctggagtggtgcgacgaacctcgacctttttgttcttgcccattgtcgattggaggagaagaggagagtggaggaagaagaagcagacgatcagaaaatgtgtcaagacaccaacgaagcaagcagtctatatatagaggttggaagcaactgctcgtctcctaccacgaccaccgaacagtcgcaagtattcaataagcaattcaaatcgtctagaaaaaagacaggcagcagacaccgcttcgcataacacgacaccatttggactaaggtcaactgcatggacgatatgattacaccccgcggttacgtcaagttattactcaaggacagtttgctaaacgctgagcgtaccaagacgtcccttggacacacccattggggggacgaccaagaattttgaatagattttcccaagcagtcacatctgtatagtatatgcaatgaatgtatcaagacagaagagagatatcgatgaagaacgaaagaaagacaaatatagccactgaactgcaagtctagttagcagaagcattgaagcacaaggcgaaatgaaggccagccaagagccatctaccagatgtccaatctgtcgccgatcaaataaatctcaaacctaacaggacatgggaagatcacgctgctggtttctaaagcatgagatgaagacagtatgctggtctccaaagcataagctgatggtataacgctgatctctaaagcacgagatgacgataaaaatgctgatttctaaggcatgagacgaagataaaatgatttccaaaagcacgagatgaggatctttgagtggattaattttagtaatccgctcaaagctcgg

SEQ ID NO: 78619 - DNA, 1067 bp, Zea Mays
ttttgtcatacttaatgccctcttgaccaacagccttttcaaatcgttcctgcctttttggtgtagatgaccaaaacccaacaatgtcccgaatcctaccaattcccacttccatgacttttactcctaatgcatcctttatacccatcccatctttgtcaataagattaatgatgtgagcagcacaacgcatatgcaacaatttgccatgcaacatgaggaaggaaagaggcatcttatcttgcatttccttcataacattgtcattggtgctacaattgtcaagagttatagtggaaaccttcttgtcaatcccccaatccatgagtacatcatgaagtacatcacttatgacttcagctgtatgtgggtgtggcacatacataaacctacaaaatggagtaacaagaaagtgtccactataaatactagtatatatgcatggcagcagaaatatagagcagcagaaatattaccttaaaagatagctttttagactccaattttcatcaatatagtgtacagtcactgccatgtaacccttcttttgatgatttgctgtccacatatatgtggtgaccgcaatacgagattgttgttgttggaacattgtcaccatagagagcttttgaacgtcatacatatccagaatatcctttctaatggtatttcttgacactaatttaaacaacggttgcagggaagcacaaaactttctaaagcctacatggtcaaccatatacagcgggtactcatgcacacagatcattaatgcaagttctttcctagcaacatcttgatcaaatacatacttctctaaacaaacactgccatctggattttgtgaaaatttcaaggaggattgttttaggccttttctagcttgtcgtgactcacatgtatttatgtggctttgtaaatggctggtaccacttttactttcggctgtcaatagtttgctacaccaattgcacttagcttttcatttaccagatatagtaactctaacaaaatcctcccatactttagagttcaacttcctcttacacccaacctgtgcagcatca

SEQ ID NO: 78620 - DNA, 597 bp, Zea Mays
gccgccatcgctaggtatttctcttcaccaccaccatcaccctcatctacttctcacctatgcctcatggctaaaggtgaacggaaggtacaacttgagaatgatattattaatgatagtgatagtgatagtgatgatgagtatgcttctccttcctatgatgaattagctgacttacttaaagaatacactcaaatcattagaaagtcaaaagttaaatgtgacaatttaaaggatgaaaatgagtttttaactgccaagtatgacatacttgtaaacgctagtgaagaaatgaaagaagaaaataaaactatgtcatccactaaaaatgagctcaaaacctccctaaaagatgccaaagataaatgtgaaaaattaagtgaagcaaatagggagttgaaagatagacttgtcaaagtaaaggaagattataaaaaaattaaaattgactatgataatcttcttattgcaaatgagcttttatcttgtaatacacatgaggctattaaccctgttgttaagattgatgtagcaacctcatgtgatgatttgagccaagttgatcaatctagtcttgatgatgaattgctgaaaaag

SEQ ID NO: 78621 - DNA, 701 bp, Zea Mays
ctgaccaagagatatctagtgtagtgttggtgcatgcacacacttgaaattagtgttaggtgtcactcaagatctcactcacaagttggaatcaaaatcggtctagaaaacacaaggaagaaagaagggttggtgttgtgggggcaccggactgttcggtggtaccacgcagaacagtgcagtaacgactagtttggggtggttggactatttatacccttccaccaacaatattcattgtcttactgtcccaactaacaagcattcattgctaagtacacaaagcctagtgaggtgattaacaaaatcataatctcatgttaggacctcattagtgcacatgagagcaacctagagcacacaccgcatgcattaggcttctcttggtcaagtgaaagtctatgatttattactcttggtgatcagcatcaactagacgaatcgatgacgattggagctcggtgatcaccccagaggcttcgttggtgacccgactctgtgattgtacgtggttgtgagggatccatcgcgccgtgagcacttggtccttgcgaggataatcttgcgcgggtgctccaacgaggactagtggagagtgctgactctccaatgcctcgagaaaaatttggaggagtcttcttgcccccattttacattctgcatttactttgggtaatttaatttgtgtatttgtgtttcta

SEQ ID NO: 78622 - DNA, 282 bp, Zea Mays
aggccatgaagattttatgacggtagtgtttttgttgtcacataagggtacgaagattcgtcatatattgtcaggcgccaggagttggtagacggttttacttttatgacgcttagatgtgcctttatgtgatgatttgacggcgtcactttatgttttttgcaaaaaaggatcgtatccctttctattggctgcattcactttcccatctcccgcccaagatgaccaaaattcccctcctaccttatcctctcggctgcccaccaccgcagacaagtccag

SEQ ID NO: 78623 - DNA, 438 bp, Zea Mays
ggagcctacgatagcgaagaaagcagctgggccaaaaaaacgaagaattattactatgacagaagctatagaagagacaccatgaccagcttcggcttcgaaggcaccagctgttgagaacactgcagctaccgaagctgcacctactgaagctgcaactgccgaagctaaaccgaccgaagatgcaaatctagaaagcacgctttctaacattgataagatacttctggacatggccacagaagaagctgatgcagccgccgaagaaaccacagctacagtgcctgagaaggagaaagaaatagtcgaaactgctttagaagaagaagattttaactttcaaaacttaattgggcaagaattgacgaaggctgagaaagaagaattgagagaatacgccatatcctgcggatatcaaccaggggcactactctttgg

SEQ ID NO: 78624 - DNA, 540 bp, Zea Mays
cgttgttggccaatagaagcctactctgaaggccttccacgcaagagtccttaatgttgcatgtactccacattgccccacatgaatttcttctagcaaatgcttcccgatacctaaatcgatgcatttcatgaagactactatggcccctctcttgtacagtacttctcctatgattgcgtagtgggctgactgccatgcaatacgctcgacagtgaccttattgtatggttcctcttcgttcttgatgtatctgataatttgcaccctctagtcatttgggtcaggttctgtctgctccactgccttgcattccttcgccggtcctgatgcgatactcggttgttgtatttcctggacaaagatgtctggtggagcttgggcctgggttgatcctagctttgatagagtatctgttgttgcattgtgatccttttctatgtgatgaaactccaagccttcgaatttatcttcagtcttcctgaccgcggcgcagtagttgcccattgaatcagtgaagcaatcccaatccttgttgac

SEQ ID NO: 78625 - DNA, 321 bp, Zea Mays
caagccaaagcagactcacaagcccatcaaatgctttgagtgtggaaatgaaggtcattttgcccacaactgcaaagccaaaccaccaactcccttgcctaagcactcaagaccatttgctttcaatgctcattatgttctaagaaaggttgcaaatggaaaggttaaatttacattcctaggtccaccaaactagagtagacctagacaaatctgggttgcaaagtccttgattgagagagtcactggtcctatgcaatatagggcccctcaaaactcaagcttgaattgtctgtggatgtaggtgaactacaagaccgg

SEQ ID NO: 78626 - DNA, 304 bp, Zea Mays
ctgcaatatgtccaaaatcagtcgcaagagccaaggccatgtctccctttggcctcaaatgcctcaagtaacccagtgatgagtgcatggtcaccagctgcctccttcatcccagggccccctccttatgatcaagtccctgctatccaacccatgttcctaaggcaagacctacagcaaaggacagaagggagggatctaaaacccgtactgtcaacagtttggtccccgagatgaagcacatatattgaggaccccaaggggctgggtaagtgagcccaaagttaccaagaagccatcgttg

SEQ ID NO: 78627 - DNA, 600 bp, Zea Mays
agagatcacatatatgtgtccagttgtggtccactccaaatccttcgtaatggtcccccttttcatttaagacaacgttgttcagctgagcatatatttctactgcgttaagacgtttaggtggtcctttggtgaccatagtgttctttataaagtttttattatcgctcctaaaggggtgtttcctaggcaaccagcgtcgatgacaatcgaagtaagtgatctttccaccatgagcaagacggaagcaatctgtatctgaaccgcaatatggacatgtcaatctaccatgtgtactccaaccggtaaaaatagcatacgccatgaagtcatgcaccaaccataaatacgcaactcgaagtttgaatatctgttttttaaaaacatcgtatgcttcaacacgtttccaaagctccttcaactcttcaatcaagggttttaacatgacattgaggttctttccaggatagtctgggctaggaatgataagcaaagaaatataaaattcatatttcatacaaagagaaggtggaaggttgtatggaataacaaagacggaccaacatgagtatgatgatgccatttgaccaaaaggtgtga

SEQ ID NO: 78628 - DNA, 1088 bp, Zea Mays
atcttcccccacatatggctgaagatgttgagatcgtgagatctgtaggaactcccgatcaccgcgcgtggaattgtagctaccagataggaaaaaactccgagcttctcggtacgaaaatcaaaccggactccatgggccttgtgtggattctggtcccagcctcgtcctttttatctccgtgtataaaaccggacaccaccgccatggccatcaatggtgagaagtcgcctccgcggttgggatcaagctgggcggaaccacacccctagtgtgggagattgggagcatcgcggaccacgggtggtaggcgcacgcttacatcgggcggggataaatcgaagccctatgaattgctcgctggagttgagttattgctctcggaccgccatatgtcgtggtcgggtcttcagtcgcctccaccaccggtacgaccgggtccctactattcgcctctttctccacttcgcgtagagtctatccatggtaggaccgtgcccctgtgtgcttgagaaaggtcaagatggtcgtttggctggggcaccagtggtgctctgctgctaggtgtccgcgctgccgtgtttagggttggtggggaagaaatccaaggaccgttggatccctgatgtgggattgtggtgtgaagaggtgatcaaccgttagattggctatggacgctcctgatctgacggaggatacccctttcggctatttgaatcatgaccgtagattgcttgatcgacgaccattagcacgtaccggttcggttaggtttgaatctaatctgagctgtcaaatggagatccaatgacgcagatcttctcataccccttcgccgaagctgtgtttgcaaaagagcccccgcggaatctcataactaacccaccatccaccgaaggtataagcccattactgttaggtccaggtttttatggaatagaccccgaagacttaagaaataatatatgcagtacatatcgtttagaaaataataaatgaaaatatagaaatcgattttcaagtataaagtaatacccaaatcttagaaaatccatatgttgttcattttaactccgattggattcatt

SEQ ID NO: 78629 - DNA, 869 bp, Zea Mays
gggaaatgagaaattggagagctctggtgaacaattggaggcacgacttggtggcttggtgcgtgattaccctacagacccgacggtgtgctcaatttatagtgtgcttgagcggtggtctccaattttggattggcgcgctagcggtcggagaagaaaggagttactggcgcacgagattagtggctgtaaccgtggcaacctcaccggcaatctctagataggtcagtacgagtcatggcggcatggttaaagtgctgaggcacgtggcacaatacagtgaggtgtctaactccggtgaggattgatccaaggcgatcggggtagagtggacacggcgaccagagtaaacagtggccgaagttcatctactgggtgatatttcgcacccccacaacgttatccaacgacgccaagtacgaatcacgtcgaccagcgcaaatctagacgtgcggctcaccggcggcgagggggactgaacccaaggatatttagtgcactgtaccatcagattgttctttagttagcatgacagaccaaatttggcattgattttctcctaaatttacatggcaagttgttgatcggccagtagcaaatttgttgtctaatgatccagctataaaccgactgtggtaaccatgctcaaacgtccacgggatcatcttcaaaatggcacccaaagttcatcccatgccactgaataccataattcaggttttagacagactgacagcccaactttgggcacatttatatcaaaatacttcatggtaccaggacttgatctctatagcaaaattgttccccttttatagctctacaaacttgatgtggtgacctagggcaaaaactttataatttggaag

SEQ ID NO: 78630 - DNA, 318 bp, Zea Mays
gcgggaggctggctggggcgtgtcgtgcggagggtgcaggaggcgatacgagcgttggcgagcgtgtgcaggcctggggcagagacatggtctacttgtgtacgatagaggtgagttggtgtgcattttggtgcgggtggagaagcgggctggagtatgttgtggagtgggcgggtgggacgtgacaactgacatggcatggaggttgcagatggcgtgaagacttgcgactgacgtggaggtcatggtttgcgggcggaggcagttcgttgcgagagtcaatcggcgcgaatgcgagaagcgagaggctggctgggg

SEQ ID NO: 78631 - DNA, 579 bp, Zea Mays
cgttcctgggctgatttccacgtgctggcccaatacctcccgcgccgcgtggcccagtgcttcacctgtttaagcctgcaccatctcctccttttttttctttttgctaagtcgcttacatgtgggtcccggccacctgcccttcttcctcctccaccacggctggtgctgttggaatcaaacgaaatctccgctaccagaaatctacgaactcctcgaccgaacgccatagcggctcgacgcaatcttcgcatcaaacccgggcgttagttgccgaaatcttggagctgggactgttacctaaccgcccaaacctccaatgcccctggaatttgggaccgttcggcggctagccctcttcccatagctgcgttaggctgaggccagataatacctgggtgtatataagccaagcgtatgggcccaggacgccatcaaatctgtgggcagggaactcatcgagtgtgagagaaacagggcgccgtggggagcggaccgagggagagaagtggaatccgtcgatgttgtccgcctgtgccttcgtaggattctcggggccaggaattgggagcttcgctg

SEQ ID NO: 78632 - DNA, 568 bp, Zea Mays
atccgactgcgtattgccagtgagtctccctttctgcttgtccgcatcgttcttcccttggcaatgcacctagttaattttggattcgggcgcttggatgctggcatgatttccacctaccatggcgccgccgcgggaggagcttaactccggcgactggcaagtgagagggagcgcgtcgggagacgtgtgccgtcgggtctagtgcgacggtcaagattaattcgtaggctaccgatacacatggaatgatctggagcgttcaaatcggatcaaacgcatgcagttccatctaggctcataaaactcgggtcgtagatccaccatcgtgcggtcaaaagagagagtgggtggtcgaacacaaggaaccgcgaatcttggatccaacggcctagggcggatgcgggagaataatctagctgtgtctaatcttgcgcgtaagttctcgatccgatggtctagatcaccagataccctttcggcacagacattttgcttaagagacctcagactttctgaaaaataacccgcaatccataggactatgccctgtgtcgttggataattt

SEQ ID NO: 78633 - DNA, 415 bp, Zea Mays
cacaaataccaggaagtctagggttcactatgtaaaagtctgggcgtggttgtaattattttacccttgccgtggacggagggttaattcctaaattcaccagggtctctttagtaaaagtgctcggtcgaagggacacgcaaggatcacggtcgttggatcaaaagcacacggtccagattaggttgttatcaatccgaatcggtacgcaatgttgttcatcggatctagatcctatggtcgaccgaccccatgccctattccaaatcccgatcgtccgatcagaccgcccgcccagatcaaattacccgaaacggtagcccaacgatctattttccaccgtctaacaagggatggacagacctctccggttccaaccaccgacgagagtaggctacaccaccatcgttcccca

SEQ ID NO: 78634 - DNA, 585 bp, Zea Mays
ccgagcccttcgttcttttactctgtctaccgtgcggttctttaattattctgtgttcttcgtgcatctcctcttcttcttcctttgtttgggcggactcatgtacaaggagaggtcaaatcttgatgagggcacagactccgacagacgatgtgttcagtgagtgaagctgctgaatgagagagaaagtcgacagagatattgttctgtgcagaccctagccaagaaactgccatccctagagagagagaggagagggggagctactagtactagattagcatagctagagcggctagagagagagagatcatctacttctgctgctcctactagctagatagtgagggagattggatgtgtgggtgcgtgtgtgtgcaagaaaaggtgccatcatcattgcacaataatgcaacgtgtgtctggtcctgcaagccgcgcccaacctccaaagctagctagcagtgaagtgagcgcaacatgggcacgcacggacgacgagatcatcagagtcagagaagagccggcccaccccattgcgatttcctttggacagttctggccggccgggtgctccgttttgtg

SEQ ID NO: 78635 - DNA, 444 bp, Zea Mays
gaatttgtgatctctggtgggtaattagaagtgaggaagggtgcgctaggcgcgtaactagaaggcagatcagggagagcctttaatttatagtagctacgtgagtgcttcgcgaatttgggacaagaagatctcatggccggaagggaggtgagtcactagagggcaactgtcgtggcgctcggtgaggtaaagcccctcgcggtaaatgggttgtccacaatgacctattctgacgtggtatccttgcggcgagcggcggacgccgatgaggacattctggtcggtcgcgaagcaagtggttatggtggccagctcacaaacttatccatagtcacgatcttttcacttgcccggtaatatccgcgttgatccgggcacgaatcttcatggcgagctcgaatcacggcacccgatcaccgatggtgaggtacactgcaccag

SEQ ID NO: 78636 - DNA, 393 bp, Zea Mays
gttcagtaggtttagcgttagcgaatcagaatttgggtgaccctagcgcgcggaatcgttcgccgacgtttattgccgcggtagggtagcacggcgccatcgtctgtgtccgcgtgggggagacgacacctcgacaccgtcagatccccaacggacggctcggattagaaggttgagtaccgtttcgtcatagccagtgtgcaccgtcgatctgttgatgactggcttagattacgtttaggttatttagatctagggcgttgaattcagatcggacggtgcctagcgcatacctgttcacgagagacgctgatttaatcctggccgctcgcatttgattggacgaccagaaatcacccgtaccccttcggccatgcacactttcataagagc

SEQ ID NO: 78637 - DNA, 752 bp, Zea Mays
aaatcacacacaacagcgaaaaaggatttagaacctcaattagatgaagtggacgtgaactaatcaaataattttatgaagctacagaataagtaaaggtttcgttagttgcatgcaatggttttgtcatgtaaggaaagactactcgtaattgtaggttcactaagtccaattcatagacagaagttcttagtccaattcaaagaaatggatatgaaaggaacaaggggttcagttggggaatttaacggtactactacttagttgttcgaataggaagattaacatgcatttctctagcaccaacatagaccaaacaacatacaaaccacaggataaatgacagaacagttcaaatgttgtttcctttgtaccatactacaagtagcataaatgttgtacatgagtagcatggatcagttagcaatacgtgattaagtataagttcagatctaagtgtacaataatatcaaactttgttcttgtacataaacaatagcccaatcggagatcggacttaaaccgtaaccctaataagttaagtaggcgatgaacacttgaatcgtagcactcaaataagttaagtacatgtaaaccctagtgctaatcgaaggtacatttttttgccacacggattgaaaccgaggtgtagaacatggagatgggacgaagcttaccttggaccttgaagcttgaatgacgcagatcggttgagcgtagatctgtcggcatatcgatgacctccctttgac

SEQ ID NO: 78638 - DNA, 339 bp, Zea Mays
tgtaaacccattcgattgaatgctaccatagtatattgatgagaacactacctcgctgtccttatgcgccgccatggccttccttagagtggtcggctaattatatcttctttccggtcatgtcgttggttgttacaatagtcttatgagccactgaggcttgccatgcttggtaattgaacgctatcgcactgggttgacgggaacggcttcgccaatcctcggtgtttcttcgcagtcatgggcagaaggaatccgagcctgattagttcaatgaatgtatggattagagtcaccttggctcagggatgatgactaggtgcttgagttcgatggtcg

SEQ ID NO: 78639 - DNA, 624 bp, Zea Mays
aaagcatcgtttcgtgactgatttaactaaggaatttaatcttagtttcatcgctttgtctgagaccgggaaaaaggatttttcggatgtgttccttaaaaacctgtgtgccggtaaagactttctttggcattgcaaggagccgaggggcaggtcgggtggtatggtgttggggatagaccttaatgtttacgacattgggtcgattgatgagggtgatttttacgttaagtctttattgcgtaataaaagtgatggtttcaaatgggcactggtgagcgtctatggccctgcacaagataattttaaggaagcctttcttgccgagttggttaacatgaccagccatgtttctgagccgatcctcattgggggggattttaacttgcttaggaagtcggcagataagaataacaacaattttaacacaagatggccttttctcttcaatgcggtaatagatggcttgagtttgagagagtttgaattgtcgggtagacaattcacttgggcaaactcaagagatattcccacatatgagaagctggatcgtattttagtttcaaccgaatgggaactaaaattcccgagagccactgtgactgcacattccagggatatttc

SEQ ID NO: 78640 - DNA, 310 bp, Zea Mays
gaacttggcagcgcagggaatcgagtgcctggggcacccggctgacttgaggcagtaggggctttgttggaacgaataattataggctgcttgaaagggaaagatggtgcacttgaacggttctggttagagggccgaagaataaaccgttgtctctttaccgggccctgattaggccgattaccactgaatcccttacttttcccagaagttgcatatttggcctccacagataaggctgtgctgacagcctttccataagtaagatcaatacatgcagccatttttcgctgcatgcggtcattcagac

SEQ ID NO: 78641 - DNA, 672 bp, Zea Mays
tgaggtcaatcgagcagcgcacggttgataaccagagaagtggtgctgcgattgcggggttctagtcttgttgattggaagccggatcgtctatatgacatcttcaccaaattgatagttaccttcacctgacggaagatcgggcacccctgttcctatcaagtggtattcaaagactcaggtattaccgtcaggtttaccctagtttagtttatgtttttcatcctataaccccagaaaattgccatacaaaaaatttttcgttgtcctagaacccttgtttagcctttgcaatttcgttttcagtttggctttgttcagtttgtgtccgtggccgagtcgtgttgctggtttaggttgtatcttcatcgtagttcaactgcaccttcgccgctatcccatccaccattacccagatcacaagtcgatccacaccattaatcgacttgccctaaccgccgctttctagtcgtgcctcccaaaaatataacttgaggtaccttccttaaaaccggcataacttttcgctcggttgtccaaaaaatctgaaatttttacaggagcttggtactgccattctgctagttcattgagcttcccattgttctttgctccaacttgttgtgctacgcctcggatacatctcttagccagcaattgtgacttgtgctt

SEQ ID NO: 78642 - DNA, 752 bp, Zea Mays
gagccatagttctagcttggtttccccccgagtacttggtgatggtagtcggggctcggaactgggctaggaatggtgccctgcggatggcttggctgaagagctaaggacctggtggctcgggcgaggggcttcaatcttccccactatcgtagtgaccaccccgccgagggtggtagccgtgcatggcatgacgtcagtcgttgtggtgtagctgctcgccgaggcggtcatggacaccacagttctaacgattgtcgagaaggcggtctcataccatgggggttttgtccttcgtgggttcgtggtggactgaggcctccctctcttggcgagagggccctgttcgttgtttcgaggcggactcccgaagccaagaggcagagttctcggcctgctggaccgcagctcactccaggagacccttgatttcaccgtggattcgatgtccttcagtggttgatggttctggcatcgtcaggagcaagattgttgttgcagcgaggttctggttggccctatgaaaaggccagagggggttcgggcccagcatcttccatgatacgatggtgaacgtagcatgactttgcgtgtgctccccatcgggggctctgcctgctgcttcctgctcgagaacatgtcgaagctgttatagccattgctactcctctccgagtttgtcgtgtagctcgtggagcttctcgaggtgtgtgatctaactccccatgggggtctaaactgcaccctactcc

SEQ ID NO: 78643 - DNA, 1009 bp, Zea Mays
cacgctcagattcgtgtcggcgttgtgattcacacctagtaaagcgcggataacgacccctggtgaaaagatctcgccgtggatgaagtcgaagcattggggccgctctgttgccccatccacttgcgccacgacgtggccgcgcggccgtcacggtgatgatcgccattaacctgagcctgccacgctattgccttgttaacacgttgccgttggtcgcaataggtagcctgcctgtcctctgagtcgacgcgctagtgaatgccacggtaacccacggtagtgaacctcccctctctgcggccgccagcgcatcttctcaaaattgggcgccaccgctgatgaactctataaattgatgccctagtgagctctgctaggttattacgcatccaaagcaccagctcttgcctcttatcgttcaccagagcctcccaaattcttacttgccccaaatcggtcggaacgccaccgtgagacatctcgccgtggccagtcatctacgggttagttcatgcccttctctgtgatgttctagcctcccttaggtctcctgttgctcgaagacccttttgattgaactagaccgcattaaatcgcctagaacaccatgatttgtcttcgatatttgttgccgccgtggacagacgaactccgagctggactagtggaattagttgagggattagtgtcgctaagggtggaattaggtgttggccaagttagggcgttggtcattgagtgtctcggccggtacaggttcaccggaaggcgtgctcaccggcgatcaccatcggggacctgacgtttcaaagaaatagaactccgagggcctaactttgaatgtcagagacacaagtaaatagtgaaaagggttcttaaccagtgattcaaacagccggggtcctctgtgcaaagacgacattgtgggcgcgcgcgcgggcgcgtttccttgttagtgggccaactcgggttggtttgagcccgttactattcattccttttcttt

SEQ ID NO: 78644 - DNA, 438 bp, Zea Mays
cttagtccgacttttgagagtttattggccaacgatcagcaaaaaattgaagactatatgaagaagctggaaaaggaggcggagaggtggtacctcttgcactttaggatggatcgccacgagaaggtcgtccaggagagggaagtagagttcatttcccggcctcgctgcagcacccactatgagtaaaactgtgccatcccacgatatccaatctattaagaattattgtagtgacacattcgaactcatgagagagtctgtggataagttcgctgcacatgcaaaaattcatatgtttatttttccatcgcatcagttgggaactgaaacaactatggcaaacacatcatcaacaaatgggctttctcagtcctagcaatattatggtatgccgatgaattcatatccgaggcaaccattgacaccatctcctct

SEQ ID NO: 78645 - DNA, 1431 bp, Zea Mays
tctgtggtcgttaaaaatagaatccaacgttgccttcacgacgaccacactgattggcgccaatacctacctctccccgcgcgtaaacagaaaaagaattaacacgatctaaaacaaccccgcctgaatcaaagcaggggcagccacaacgtcttcctcctcccctctcgttccttgttaatagatcaatctgcgcagcacggacagccacatcgtcttcctcgtcccctctgtaattcctagccagccaccacgtcttcctcctaccctctataattcctaggtcaaagggagcaggggcagccatcccccatcccttcccttccaggtcgcaaccatcttcctcctcccctctatattttttaggtcaaacagagcaagggcaggcatcccccatcacgtcccttccaggtgagctcgttttcctcccccttcctaattcttttgttcagatatctccgacggtctttcctttgcatccagaatcatgtagtaaatcatgtagtagggcgctggttgaactgctcctcctaccaatgataataatcccagaggcaccgactagatgcattcgtgccaattcaaaaaggcagcatgtccagaattgtaatgcagtggcccagaattgttagaagtggtagctgcaatgatcttccctcctccctagaacaacacccccctcatccgatgtgcccctaatttatattttggaaccacacaaggcagttcgtccaagcaaaagggtgttcctgctgtaatcttcagagaatatatgttaattagttagattacacaagtttatatgttaattgtgaggcatagtggctgatatgtgagaagtgtatacagaaattacttgtatcaaatgggaattcagaccattgtggttgtggttgagatcaaaatctactacagtattttagtttaattagtgatgctgctagaacaatttacttttcagtgttgtgtttcggttaatattattcatggatatcagtttcagtttatatcatatattttcctgttgattggcaccttactatttaaaaattgtcactccattgtttgaattataccttgagatctctgattctctgatgcatgtgttttggagctgaattcttttatggtgtttgtcaccttggaacacagaatcatattgatctttgcttttctttgcattgctcaacatcatactcatttactgtaccatttttatcagcttgcagtcatactaatcagaattgttattgttctttttcagattcaaattgtatagcagctttgtctgtgtttgtcatcttggaacacaaaatccctactactctccccccataaggtgtgtgcactccataacaacaatctgttgtgaaattacactgatatttgcccgtgcgttaggaccaattgccccatctgttaggaccaaat

SEQ ID NO: 78646 - DNA, 576 bp, Zea Mays
tttctgaagatcaaaaagatgaagcaccttctccccgcgcttctccaaccgctggtggattgcttcgaggttgttgatctcttgttcaagctccgtgtcttgtggttctgggataatagttgggcgccaatgttggtacttggtttcaatccctttaaggtatcaaaaatcaaggcaacacaagttaaatatttggaccttcatcgtttggtttaacacttcttcgaagtgttagcgagaaggaccgaagttttcaaaaggaagtctgaatgaaacgatatgaaaaggcaatgtaaagtgttgtatggaactcatctcatgtgccttagcttttttattccatcttcctttatatcaaatgagtctacaagcatacctttggctccttaaaatagggtggcacaaaggttctttgaaggctaagctacacgaagctacgacccttaaaaaggtaccttatacatggcaatgttcatctatttataggaaagacaaactggcttcgtacaaaattacaatcatgtccctcgaggttttacacacattatttacaaatgacatcagggcaatattgta

SEQ ID NO: 78647 - DNA, 728 bp, Zea Mays
caacagggcttccataaatgtgggatggggtgcccataaatggaggagaaggcaggcattcagtctggccccacctaccatatggaaccctctctccctcggtctataaaagggagggggaggactccctatagagacagataacttgagttaatcccactcatacaaccccaatcaatcttaggcaggcaacctgagggacaacagtcgccaactcaggcaactagacgcattcatactcttaggctctagatagccaactataataggacttagccattctcttgaatccaattcacaaaaggagaatgtaaggtgttatgtatgcaacagtggcccaaacctttgagaaacccctagttccctagcagtgttgggagggttgttgttgccatcttccaacaatcgggccatgcctttatcgtgaaaggtattagagtactccaagaaccccttgtcaatcctctatggaggtatcatccttttttcctcgactatcaaacactgacatcgtcgatcgtggtagatcttatggcaactatgggttatgcacaaggagaagagatctttttggggacctctattgccgatgaggttgagagtctcaagcttgccttagaaaccctagcaattttggtgtccttcacctaagattctatagattcaatttgcacttcggcttagactctgcctagacactgaccaagattcatgtgaagctccaactt

SEQ ID NO: 78648 - DNA, 633 bp, Zea Mays
aggtggggcaaacgaccaggtcccgtgccaagataatcggtgaaagcgaagggccgatgcaacgttgctgacccacatcagcatgaaaagacacgccaccaccaaaacatatcccgaccacgagtacggtgtcaagaagtccctgtcgaacacaacaatacgtcgccatgtacagtctcatgcgagccccccacttacgtatgggaccactcaacccctgtcgtagggacctcaacgttggagtctctaaagtgacccacatacaggaaacgacaggaaggtataccatgccgggttcatgcctacgtatgctggaaggtgacacaagggtcatgacagaagatgaagctatcgttaacacgaccctgaaccccaccgagagtctattctgtaggacccaccaggtgccgctacgttgacatcaaaatagctacagggactcgtatgccagacgaacaagatggaatgccataccaagggtacgacagcgcacgaccctacggacaatgttaggagggctatgccacctagagcaaaaggtcgagctccctcctagtagaatacgagttcccaatgtaaagtccacccttgagctataaaagggcaggaccaccttctttctacacacaagca

SEQ ID NO: 78649 - DNA, 333 bp, Zea Mays
ggcgggggtgggtgaattcatctgcggaagggtatcaaaggtaaagattatggtggaaggaagaaaataaaagagcctggatggttttaaaaggaagcgggttagctcagtttttaattccttttagtttttataatgcatgcatgctgaaatcaacgtctcctctccaaataaaataaaagggggggctcctagggcacccttcaaaagctaaggattggcccacagggcctacatggccacctatttctccctctattcctaaggccttttgtcctaggtctagcggtctagtcctaacgattcttatcagtttctaagcaagttttagat

SEQ ID NO: 78650 - DNA, 741 bp, Zea Mays
gtttgaagaccatgaccatgaggaaggatctgatgagaatccctttgcaaatgatggaatgtttggtcgacgacatcatcaccgacatgctgattttgaagatagagaccgttatcatgggcgtcgtcatagaaatgacctagacaatattgcccgagataagttggatattcctaaatttactgggaaagaaagtgcagatgaatatcttaattaggttgagcagtgtgatcaaatttccagagttcataatctttcagatcaacaccgagtgaacttggcttcagtcgagttctctggttatgctcttacttagtggaatcaagtgaaagaacatcaacatagattggggttgagacatattaatacatgggcagagatgaagcgagtaatgacgaggcgatttgtgccttccagctatcagtgtgatttttgaaaccgattgcaactgttgatgcaaggaaagagatcagttgatgaatattttaaggagatggagttgatgttggtgtggactagaattagagaagatcctgagtcaaccatggcaagatttctaggtggactcaatgaagagatttctggatttgttgagatgttcccaactgtaccttgcaagatctagttgatcaagcaatgcgtatagagaggaaaattcagcaagagtcacgtggaaaatcctatgcaagtcattataatgttgtcccatggtgcaaacagcaatccggtgcttcttttggt

SEQ ID NO: 78651 - DNA, 1748 bp, Zea Mays
ttaaacatgagagagagaatgcattgcctttgcagtgatggtgatgttgaggcacgagtctgtgaatggtagaacactagtgtttatgatggcgaggccctgattctcaatctcggagatgatcatcactagcactcctcttctctccttgcagcatattttcaataggacggtgtcgccatgaatgcttgcatcaaccgtcgggttgaacccacccgcaccaaaggcactcccgctggaggatgaggcgtcaatatcagttgatatatgacatttgctctcaaagtcagtgggctcatacgttctcctttcccttcgcccctccagggccttcaccttctcctcgagatgcttcacgtactcaatggtgctccctagtaaagagatcttatctgtctaaaaagtcatcaagtcgttaaaacttgttagtgaatatcatatatcaaacataaagtttgctcatactgtaagtaagttctattataatttgagccaccaagtccccaacctaggtccatgtttcaaagtttcatgtgcatcatcatccattgatacatgataggcttggctagtgattgagtatttgctagtctcaaagtatggattattttctttaatcataaatcaccttttccatccgcaatacccaacttccaattaagaacctatttagattcattatgattataataaacatttaaaataatttgattatgattaaaatagatagattatagaatgaatattataatcaaagatcatattccaacaatcttataaaagcacatgatacctacaatctgcatattatggatcatgaaaagtccaagttgcccctaccttatataaagtggcaccaaactaaatgacatgatatctacttgcagtttaatattcaacaataatgcatcatgcaaatcagggatctagatactatgattattacaacgtatagttcatatagtaataataatcatatacataatgtagaatataataatataattatgatccaaaattaatggccctaagcaattcgataattttgttatacatccaaatgctttctaacaactatatattagtaggtggactatacagactatagttgctaagttgtcggttcatttttctatgtcaccctagctattactgtcgggaaatatacaaaatatgtatccaaactacaaaaataggtatactagctcatgcattcacaaataaatgctacggaagacttgtaaatcttgtggtgcaagtagtgttatgtttatggaacaatcaagaccaagaatgggtatatttctaatttttattaagcatggtggcaatatataagagtcgagcaacaacaatgaaattggcatgagaacaacaaaaactaacaacaaaaggtgggcatggcctatagagaaacatgggaatggaacctggaagcaaatcccggaccttagcctatggttgcgaaccactagcttccattccagtatgagcagaaagaagcaggagggacaaaatagctaggatgtgaacatgacgaggaagaaggatctgtgtacaccaatgttgttgcgagctatgtactagagcatcagtgaggcggccgagcaaggtgatgagcatggacggtgaagcttcatagtcttctttgagtgagcggacacaacgaagcggcgaggagcgctgcttcatgccatcactactcactatgtcatcgagatcactcaaatctctgggcgctagctaat

SEQ ID NO: 78652 - DNA, 321 bp, Zea Mays
taggacgtctacatgagcatgcaaaacatatgaaagtatgaaacgaaatcgaaatgcggtggtggggaatatatgctcccattggtgggaggaagcaagagcgcagaaataacggtccacgtgtgccgggagtaatccgaatgaatcgctacactttgggggaaaacaatttggggaaaaaaattctacacaacctagatgcaaacgtggcctttaacagccccgcacatccaccactccatgcagcgccacgattttactacgatggagcagcgtatcattcatagcgctagttttctccacgcatcgaatgccacttgg

SEQ ID NO: 78653 - DNA, 537 bp, Zea Mays
cgaaaattgattgcaaactgcttcatcgtgtattttttcacgagttcttctgaaccccgaggcaaaacgaacctcgttattagcttattccacatttgattcttgacatcatctgatacatctctctactgtcggattgtgatgtcaagattatctctaactaagaacccaagtgcattccgaaacttaggcagtgcctcttctggagctaggggctgaccattcgggctcacgtctgcgattttatatgtcttgtcaggaaacttgtttagccccctgtcacctctgttccgatcgctctgcttccttttccttgacctctcggtggttgtctcagtcgattccggtgcgccttgggtcggttccggtgcgccttgggtcggttccggtgcgtcttgggtcggttccggtgcgtcttggtatcgtgccgcagctttttcgagcatcgcacgaaattgagacaagacctcctattcatgtaataaaatgcacaagaaatcatgcatgtgtaatagccattgtgaaatcatctaatta

SEQ ID NO: 78654 - DNA, 287 bp, Zea Mays
ccgatttcagaagtaatgaagcgatcaggtctggttgtggcagaggaggttgctgacgaaggtgcttctaatgccgaagctgaacaagttgtggttgagggtgaaaatgctgatgagagtgaagaagactatagcattctggtcccaacaaatcctagtcatcatgaatttgaaaaatctgctataatagaaggtgacatgcctatgatgatgaaattggtctattttggagaggctgagagcaaacttattcgatttgctagggaagaggtaatcccggagccgaa

SEQ ID NO: 78655 - DNA, 624 bp, Zea Mays
agaagactatgagtcctccttcaccctctgctgctgaagtgtcagagattctaaaggtaatgactgaatccataccatttgcactactaagtcctctaaggttagatctaactagccttttagaatcaaaggaaaccgctccggctgtggaggagaagatcggggggggcagaagaaacggcggattgtaaatgtcatgcaagtgattgagcagatgccgccctcagcttcggcggcaaaagcagcgatgcctgtcgataccgaagatgccgccagagccaaagcagaagaactcacaaccacaatgtcaaaaatcgaccaactcatatcagatgtggttgccaaggaaatcacagccgcagcacctgataagggaaaaagaattgaagatgcctcttcagaagatagagattttgacctttggcacctgggtggccaagaactttccgaagagaacaaattagagttaaaagagtttgctatatcatgtggttaccagcccagatccatacccttcggcggggtcgacgaagagattttgggatgcattcgtgactgcgtaggggcaaaaattataagcaccttatccaagagtgttggatttccgaagctagaaacggagat

SEQ ID NO: 78656 - DNA, 343 bp, Zea Mays
aagccatgccgaagatcacttgttcacaaatacacaatcatctgtttaacatacagcttcggcgtgaataagtgtgtttcaggaacgttttcagttgcagtcgaagctaaccttccgctaaagcagtaaacaagtacgcttcgtctatgttcaagtagcaaagacaaatgccaaagacgatgacttcgggcatgagccagaaaggaagttactgaacaacgaaggttaagaccctcaatgccgaaggcggagaaaatacgatattatccttatatcatttataaacagtgtatgtaaaaccttgatgggcattattgtaaatctgtagaaagacggttcgtct

SEQ ID NO: 78657 - DNA, 349 bp, Zea Mays
gtgcaatacatatagggttttcccaggccagatgccgtttctaaaaggtgcccagtcaacacccagcggttatttctaaaaccactggcgtgccacgtcttcatccagcggtcatttctaaacccgctgacatgccacgtcatcactcagctgccatttctaaaaaggtcagcgtgccatgtcatcactcggtcgctgattcctaaacggccaacgcggcccaaattgactcaaccatggtttctaaaaatgctgacttcactcgaccgttacttctaaaacgccgacgttgccatcagtcactcggtcgttgcctccaaaacaccgatgctatcgtaagtcactcgac

SEQ ID NO: 78658 - DNA, 776 bp, Zea Mays
gtggtcttcggtatagcttttcctcacacccttcaggaaatcatgtgacataactagtcaaaggaccttcggcaacattggcccccaacagtagccccttgcgggatgagtttgttatttcataacgagcttagatcgcaataatttataattgagaggccttgtgtcgaaggtccgaaagcaccttcccgaagctcattatgaaatcgactcacacgtagtgggacccaattgtcattgggtgcgataattaaagtgagatggtcacacatataaaaggggaggtacctagtgtcatagggtatgacttttgctgcttgtgctcactgctgctagtgcccgctctgcattcgaagctagcttcaaactctgtttatttgctcccgagccagccttagccagtttcagagatcacttgctttttcacttagagtgctactcgagatgtcgtagacacattcaaatgatgtgtcagaggcacaggctgaggaaactactcgggcaatgggagctactgctccctaggctgaagctggctcgctgaatcaatctgaagaaagtgtggacatagattttgaacaggacaacacggtcatccaccctccgaagcctagccatgtggacattaggaaatccaagatcaaagaagggcacatcgaggtacttaaccgctttggctatattgactggcagcggctaggggtgatgagttagtaccgagtctgagggaggacgaagttgtcatgttttagtgtttcttgaaggctggtcttagg

SEQ ID NO: 78659 - DNA, 665 bp, Zea Mays
tggtggagcagctcaacattactacaacgagcaattacacacgagtaaaagagtaattgggtcaagggcatgtcgggtgtaggttcctcacctcgggactcgggtgagccttgaaaacagttgttgaggtcgatcgtgctcgtggtgttagagttcaacggtggacgggttcggtttgcatagaggaaagagggtccatggaaccagtgagttaggaaggcagagagggtgaattaacgcccgcacgaagtgcggagtggaacaaggaagctcaccgaaggttccttaacaccggagaagcactagcaacgatagaatggggtagaaaacttgagcggcgacccaagctgcaaggtcgacggtgactaatattttaggcgagtgaaagagggagccaaggcatgtgctaggtgtggtagacggcaaagctcacctagtagatcttgatggtggagaggggttgctggcttgagaatgtgacgaagacgatgatgcacgagcgcgaagaggaacaaacttgctaagatcccatggccaaatcttgccccactgttgaactcaaccgcctcctgagcccataaagctcgatcctccagaaccgtccaccctggctgtcggtacggcaccgccacgggggaaagatgtggggatggtggacgccgctg

SEQ ID NO: 78660 - DNA, 310 bp, Zea Mays
ctagacttcaaagcaattaatatagtaaaaactcattccttcgctacaacaaatccaacagtcaccgccacaatttttgtggaaaagccttttcaacatgagtatcattgtcacaattttcacaattaagaattgttcgtgttcctgatagatgagcatgagggccggaacatttgcaggggatgacaatcgggagagtgttgagtttctaaggttctagagcattttccatacttccaatcccctcagagagagacagaaaaagagatatgccagtttgtcacttctatatagcttatggggacccggc

SEQ ID NO: 78661 - DNA, 603 bp, Zea Mays
ccgttgtaggctaggctatcggcaagatcatccttcgacaaaattgaaaggccatcttccagcttcaggaatcccatgcttttacctatctcccagcaaacagatatttctttgttgcccgagagacagtataagaaatcatcttcattgcttccgttaaaaactaaggctcctttcgaatattttaatttttgagcataatgccttgcttcagcgatttcatcttcggacaatttcttccccgaagcatgtcgaacgatgtagtcgatattttcaattggagcttcgggagaagcagtctcgaccttttcaggtgcaatctgccctgccatctcttccttaggcgcggtaggcttcgtcgcggcgggcgctgaaggcccagcttcggtttcagcctaagtttttgtagcttcgacttctgcttgcttagtttcagtttcggcttgcgctttggcagcttcagcaactttccttgtaggagcagggctcaaggccttcgtagtctccagcacagcatccagcacgttggccatcctcctccttgggagtcgtggcagaagccttttgaaccttaggcagttttgcctttgttggagggctcaa

SEQ ID NO: 78662 - DNA, 459 bp, Zea Mays
ccctcttcatcctggtccaccagtataaggatctgagatcatggtacatcttgttgctacctgggtgcatggagaattttgaaagatgagcttcatccagtaccttctttctgagctcagggtccttgggaacaaccaatcgatctccaaaccataaagttcacttgctgtcctcacgaaagcacttgtatttttctgccttttgcttgatcatttccttgatcacctgaacacccttatcttcaatctatgccctgactatttgctcttgtaatgtgtgttccaccgaaatgtagcctaagtcacctgaagaaacaacttccaggctcagcttgcacaactcatcgcacagggtggtgactcttgtatccatgcgcatacaattgcactgagcttttctgctcaaggcatctgccacaacattggccttgccaggatggtaatgcacttccaaatcat

SEQ ID NO: 78663 - DNA, 493 bp, Zea Mays
actaaacaccatgagttcacatgatttttcttccactggagctgatttcatgcatctctgcttgcttcatgtaaacttcaccgtgccaaaaaaaatggtttgctggatggcacttagagaacgtttatacaaaagaggataagaaaatgaaggtattagagtatgcatcatgttttcatggctatatatttagtttcagttgagaccacattgctcgaacagctagttaggtagcttgaatgttacacattgtgaatgtaagtatgtaactgctgcactattgatctaaaaaatatactgcattacccgtggtgttacaaaaataaattttgaaaagtaaatgaagccttccaatgaagatttgattgctggctttgtctgtgctttagttttattaattaattaatctgatgaccacacataaatagtttgtgtagcttttacagtttagtatgctttatttatgtaccagaacttataccgcgtttctgaa

SEQ ID NO: 78664 - DNA, 702 bp, Zea Mays
agacatgtttggtgcgtccacatcaactagttgttgggttctagctgttgatgaccattgaagataagtatcctatgtaacaccaacacgtctagtgtcttatagaattctcaaactcacacttcaacctctttgagtaccatgtctagtgcagtatccagtgcatcatcaaacatgtctgttgtctagtattcgatgcatacatacttatacggtgcacctagctatagttcccttcttaccatagtattgatgctatccagtgcaccatcggacatgttcggtgctacttatttctttgtgtgtctttgtctgcacttttgtcatcgtgtgtcttagactctaatatgtacttgtaggtcttttatgtcttccaatatcttgtttgagatgttgataatccagatcacccatttgcctaagtccaattctacttgtgcatcctttgaactatacacaaaaacactagcaaatggtgttagtacagatggtaatgttgatcatcaaacaccaaaactttacttcaaatgggcctctatgcatttttattgctaggatgcaatataaatacaatattataggatgctaaaaaataccaattgaatgatatcaaagggatttattaatgcatagatgaatcttatccttcccttgccaatgtcctcattgtgtaatattgtggacttaaaccccctaactcca

SEQ ID NO: 78665 - DNA, 751 bp, Zea Mays
catctccacaattactagaatggacccagcaaacaatgccacttcatcgcagcccatgtcaaatgcctcaagtggccagcagtttcctcctccacaccctatgtggcctacgggttacatgcagcagagtggtatggattgtaactttatgggaaacctcagttttccaaaccctgctcaaggtccgacaacaatgtgggcgcccatgcagacaggaaatactacttcgcaatctaacatgattccggcctcacaatcagcaatgtactggaatcattacttgaactttgtgaggaatcctcttgggtctgctgaaggcaatccttttcctgactccattccaccttccaatactagtacaccattgcagggttccaatactataccttcattacctgtgaacttggactcagatgctgaacacagtgttcacgacatcaacagtccacaaaagaatgcacctcctctgcagaaacataagaagtctaaggaacaaaactttactggacctgaagatcttctcctttgcacaacctggttgcaaataagcagtgaccctgttgtgcacactggccaacgtaggaaggggctttgggctcgaattgaaaaaaggtacaacgaacagaggggcaagtttccttgtagagttaacagagcccttagcagcagatgggacaagattagagcagatgttagtaagttctctggctactactcaagagttctaagggagaaacaaagtggcctaact

SEQ ID NO: 78666 - DNA, 1033 bp, Zea Mays
agggcaactggattgggtaaaccaaagagatggcattagacatcgtttagctacaaagggaataaagatggataagatcttaataaagacctaattagatgtagaacttaatgaaggacattgtccactggatcaaattgtctaaggtggttagggatggctaggtgaggttaatagaaatgttttcaacttggaagagcgccaaccatgtctcacccatgattgaggatgatagaatgagacattggttgcttgaatcaacactccctcggctaacctagttttacttataggtctaaattgcttctatattttttggactctaagctaaacatcaattgaatttgatagaataattggcttcgaatcttctcaatgattagcaagtggtttggcaaaggtaggcttaggttattacaaagaccgacaagattgttgtgttggcatgtgtgcatatgttgtggcatgtaggtggggatggtgtttggtacttggaaggaagacatagcataagtggatgactcaatgtggtagtcagtttttttgaggaataattatgagatgacatcaagagaagaacaacaaaatgggcatttggattcgataatggagagtgtcaagaggttgcactcaacaagatataaatggaaaatgctcttaatcgcccccctctgagtaagagccagtgtgaactagtgggtatttaaaaggtttttattccaaatggcaattacgggtaaatgatcggttaccatatgggtagatacacattaaataagacagaaaaggattaagacgagaaatcatgtttgtgtcgtttgtgtggaaatagaaaatatgttcaattcgctctgagtgaaaagcatatattacgattatagtatataggcaaggaaaagcattagccaatggatttttaggagagaaactgctatcaagaatgtgtctccaatcaaactcacaataacggtccattttacgcaaatatgcactagctggtatataattgcaaacaaacgatgccattttttga

SEQ ID NO: 78667 - DNA, 550 bp, Zea Mays
cttaatttatagtgttcaagagcggtggcctccaattttggattggcgcgctagcggtcggagaggaagaggggcactagtgcacacgattagtggccataaccgtggcaacctcaccggcgatcactagacaggttagtatgagtcacggtggcgtggttagagtgccgaggcacgtggcacaagaccgcgaggtgtctaactccggcgagggtagattcaaagcgaccggggcagagcggacacggcggccggacggaacagtgccttaagctcatccgtggtggagatcttttcaccacgagacgttatccgggcaccggtgagcacgaatcacctcgccggcgtgaatccaggcgcaggggtcgccggcggcaaggtgcactgcacctgggatctcgttcagtccactgtaccatcagagttcttatcagggtgcctgacagagctatttgcagagcccagatctcaaatttccatgtgacaacttgctaatccacctttaactgaaattcagacttaactcaatagggtttaagtggtgtttttt

SEQ ID NO: 78668 - DNA, 515 bp, Zea Mays
agcgaagccagatcagttacccgctgtcagacaactttgtgattcctgtccaccttaaagttggtcaggaatttcgcttgtgcttccttgatcacctactctttgtgttcctcaaactcttgctgatcttcgactgatagagtctccatagtcggcttgatgatgttatttggagagacgtcggaattatcctttgaactgaccattgggacgatctgatactctatgtggttcctccagcggagtcgtgaaaaagtgtgttgccgccgatctgacgtcaatcactacgaggtgtaccggcggcggtgcccttatggcagccagtggcggccctgagggtggggcggaggggctgcctccccgggcccccaattatatagggccccgaacctagttatacattcagtaattagactatgagacacaatagcttaatagtgaaatgtcgaataattagcagtcacgaagcgttcacaacccggtcgtatttaaacatgttaaaagaacttttaaga

SEQ ID NO: 78669 - DNA, 456 bp, Zea Mays
ccggcatgtgtcggtgagtcggtcgctcgagatagccaccctcagcttcagaatctgtcgtataggagtatgtatgtatataaaacgagataaaatctgcatcgaattttctcattccacacccagaacgagaagagaggaggggattttaaaactcgaattccggaagaaaaaaaaggacttttagatcctctcgatctccatgcatgtaatcttccaccattttgtttgtctgttcgttcgttattgtagctactgcgtgcatggtgaatgccaatattcttcctctgctgcctctctctcatcatgcagagcagatgcagactccatcgatctccattccatccaaccccaccagcagctacagcaccactgctttctctctatctctctcaatctccttcgaattcacatgcctacagtggttcggcacacacactgctgtccggcgtctcc

SEQ ID NO: 78670 - DNA, 310 bp, Zea Mays
ttaaaaatgaaagaataatgattcgaacgactatgatgcaagctatcagtatcatattgccaaggtcgaccaagtaacaaagagcatgcttgcatgggaataacatcacaatcaacaaaatcagaataagcacccatggagaaaggaacacgcacggaacgtgtgatttttattttaccaccatcattaagccattgaatgtgatatgggtttggatgcttatgagtgggtaacgacaacttttcgaccagcatggtactcgccaaattgttgcaactgccgttgtcgataatgatgcgaattgaccaat

SEQ ID NO: 78671 - DNA, 1234 bp, Zea Mays
agtattagtagaataatgtagtagtgttagtagtatactgtagtgtaagtagtgaagtaatgtaacgtaatgtagtagaaggtaggggtaaaaaggccggttcataatgtgtcggtctttgagtttgtgtaaccccccctttaatattaatgaaattcttcagatgcttccagtgaaccttgtgcttttgctgctttttctgtttactcgcttgacaattcatccctgtgcctaacactatcggcgttgttagaggtaaccgctgagcgatagctgatgccattggcgttttagaggtaaccgccaagcaatgtctgacgctgctggcgttttagagataaacgccgagccatgtctgaagctgtcagcgttttagaggtaaccgccgagccatgtctgaagctgtcggcgttttagaggtaaccgccgagtcgtgactgaagtttcgctttccagagtagtgacttggcaccttttataaatagtgcccgacccggttaaccccatttatactcatgccatcgtgcgtttttaatttctgagccctaatcttcactttttcacctcgaaccactcctctgcttccctgagatctcgttcttgttcgttctgccggcaagattgcgatggcgccaaaacggaagaggcaaagctccgtcgcggcaatcattccgcccatcgaccccaacagccagctgccttttgtgagtaatcacatgtccgttatctcagaatctgatctccttcatcttgtcgacgttggggttttgcttccgaaagagctctgctcttagcaaatttgccgcggggtcaccgttccgacagaggatacccatgcatctgttgtttacgttcctttccttattcgtggtcatgctcttcccgtctctccctttttccgcggcctccttgatttctatgaattgaacttgactcatctgaaccctaattccatcttgcaagtttccatttttgtacatctgtgtgaggcctttctcgggattctcccccatttcggtctctggaaatacctgtatcattgtcggctcgggatggtggggggacagcaccaactcgttggcggtgcaagcctagagctttgtcacgggagaaaagcagagtacctcgacattccccttaaggacaacattaaggggtggcgtctcgagtggttcattgtggagaaccactgcaagtcactccccctaggttagggaggcagccagatgtccgc

SEQ ID NO: 78672 - DNA, 1851 bp, Zea Mays
ttgaaaacaccggtcaataacaataagaataataagactagtaccggttagtgccttcggccgatactaataacataatatttgtaccgattgaacacaccaatcgatactaatgacttccatggtggtgtgatactgaagtttaattcagtactggttgtaaataaaccggtattgatgacctaggatgaaagctagcactaatcttcaataatcgtgatcgcaaaaaaaaaagaactactatattatttctctcattttagtttttgtcttttaatttgtttttcgctgtcgtctatttcattgcgacagtgagcacaaggttgtagagacggtcaggccattcgacgacctagggcagtctattgtcaccttctttgtggcaggtccctcctaggagcatgcatggtttatcgggcttcaaaagctctcgtcggcgtatcttatatatatatatataacgcaaaatggtcgtctctacaaattgactgaccagagatgatcacactgatcacgccaccactaatgaaagaaaaaatgcataacgctgcaggccatctagcgtgattgttttgcactgttattggcaagtgcccccttttgtgatgtatatagttcccgcataagacaaactctagcaaccaaaatctgattgggacaaatatatgtgcatataacacagtgcagccaccgaaaccctatctgcatgcaggttagctaccattgagctcagctggtttcagagagccaaaccacgtgcatgaacctgcaccctgctagctgctgctctttccgagcctcctgctggtgaagcaaaagtcagggcaacacagtatcgacggtcagttggcttaaggaagaggtccacaaaatctctatcatgcagactggggggaaatcggcccatcacgcctcgtagctcgatcggacgccgatcgagttttgatgagcttttgtgggtctgaattctgaatctgatgcgctgccatgcatgcatgcatgtgtagacggagcttttggcatgcatgaacaaggacgccttgttcgtcctgcgccattccaataatttgttcggccgggcagcttttgagcaaggtagggtagggtagggggccggggacccccgatcgatgatccagtactctcactcttttactcgctttcacgggtacaagcatgtgcatgtgaacaatcaagcgcacagaagcggtcgttttgccagaagatctagctgagaatacggcgcgacagcaagggtagctagtagaggagagatatctgttcgttgtctgaacaatatatgtcatagccagaacaactactggctgccgctgaacatcaccaaaaaaactgaaacggagcagggcattggttcatcgaggagtgcagtgcgtatgggaaagggaaggcaaaagcttcgaattatatttcaacaggttagctggctccatgaattgaaacaccgcaggttattaggtcgccatatatatgtaattatgtatggcatttaacagtaagtcttatcgaacgcagacgtaccccagccatgttgctgcatgcaccatgcagtacgcgcacgtaccgtcgtcgtcaaccagggcctgcacgcgcacgttacgccgtcccctctctccccctgccggcgggcgggatacgacacagctagtagtgctatagcctgcatgcatgagcgcgaggctgtgactgtgagccaccgcatctgcatagtgccgatcaccaacttggcacagctaggcgctagcgcgcatatctcgcgacgatcctcgatctcaagccgatcgagcctgcaggggcgtgggcactatatatattatatatagcacgacacga

SEQ ID NO: 78673 - DNA, 1178 bp, Zea Mays
ggacatcatcgatcatctcagcaaatgtgtccgctaattcatatttcttcacaaccatcttggtaagagtatttttgatggtggaacacgctttgccaacttcggaatcgtactcaaccaacttttctatgaatttcggccggtcacgtggttggagctgcttgatcttacttgaaagcatatccttgatccatggaagctggatatgaatggtatgatgaccacaagggtcgagacgaggcacatcaaaaatgtttgtcctggccctttgcagtgaaataatatataataatgcataagtcataattaatacgtagaacacatggatataattatacataaaacatttgtcatgcccagcagttagttctgcacatggatgtcatgtctgttttgtcataaactaacctcggattgtacatggacagtagggacaatagaataacaagtttctgagctgcttcggaactgaaaaaaagttgtaatataagtaaatgcatgaaacatacccataaatatattgagaggtgtgaaaaaatgaagtatatgatgtctattgcgagtttatgcggactggtacaaaaactaatagtgatgctacagatatacaacatgcccataataagtgaaatgcatatttatgcagggtaatagcttcatattttttttgtacaaatgacataccacacaatggccgaatggttccccgctttggcgtggcttcctcttatcaacttctgtcagtgcttggataatgtttttatcgaagaattttatgcgaggtgtgccacgtttgttgtggggggctgcagcgtcatgcaagtggtccaaataatacaactacaaaaatcaaaaatgaatttatactatcatgggtggtaaccgcgtaactaaaaaaagtaacacaacattttaatgatttatcataatatagattccatgcgatttgccaaaaaatgaacagtccaatattatttacttactattatggcaattgaacatccatatatcatcgtggacacgttagtagtgcttcttgtatgccacttatgagcagcttcgcaaaggtcgttgaaaattaagtggcaccagtctgtctcatggaaacgatccatttcttccatcagtaacacctcatggttagatatgccccagctggaagtggagaacagcaacct

SEQ ID NO: 78674 - DNA, 786 bp, Zea Mays
tatggaagaaatttgatatttaccgtcaacagttaaccccaaatgctttgacgagggtaggaatgtttattcgggcagcaagaagacaagacgtagagccaaatgtcgattgtttctacaatgttcatgagctccactatcaaacaaaagcaactggaaaggaacaacttcataatattttggttgctacaccttcacatatcggtcggatgcccggtaccctgtcttagcataccgaaacaaatgtccaacttcttggacgagacaatggttttacatgaaaaatgacttaaagaagagggaagatatcaaggaaatcattcagaggcccattgtgtctcgctttggtataaacaggccagtagttgtaatgactgaagaagctcaagcttgtctggtggcctttaacgccgtgtgtagctacattggtactagggtctagtccaagaacacatagcgtttagggtatgccccttgtgaatgagtgggaaatgccaaagattcaagaggacaacccatctaagcaaggggcggagaagggtggtttggtgaatttaaaatatacataccattgcagaagtcagttcggtgaaccagatgacgaatggctagaggcccttgaattgatatgtaatgaaattttgggaaattatacgaagaaggaatatgatgctttgaccgttgcttttggtgcttgagggaagagaaggttgaaccaagtttttgatgctattcgctttgtttatcctgattactccttcccagctcaaggtaaggggaagaaga

SEQ ID NO: 78675 - DNA, 806 bp, Zea Mays
tacatctacgccacacttacaattggttcaactagattaatacagactaaataaacttgacacggactaacattcacccccttaatcttgttgaacacaaaccactcccagcttggatctcagctccacaaacttgatcttacccaaaggctttgtcagtatgtcggctagctgattatctgttccaacatgatccacatccacaacacctttttgaatacaatctcgaatataatggtagcgagtgtcaatgtgtttgctcatgtcgtgataaactgggtttttgctcaactctatggctgatttgttgtcaatcaacagactgaatttctttacttcctccttcattatatcagcaagaaaagtactcagccacactccctgacaaacacccagagctgctgcaatatattcaacttcacatgatgacaaggcaaccactttctgttttttgagagaaccaggtcactaggtttgaccccaagaagaacaaaatacctgaggtactcttcctgtgtactagatcaccagagcaatcactgtctgtgtatcctagtagagatagttcacaatttccccctttcttgagttttatcccatagttcagtgttcctactatatacctcacaattcttttaattgttgtccagtgctctttgttaggaccttatatgaacctgctcactagtccaacagcaaaggataagtcaggtcttgtgttcactaggtatctcagactaccaatcacactcctgtatctagtaacatccttttcagtccctttcttagcagcagtgagttttatt

SEQ ID NO: 78676 - DNA, 522 bp, Zea Mays
tttgccccaagtcattacaataaacttgtagagctatgttagtagttcaagtttgattaaatgatctagcccaaggactgtccagaaattggagaaaatagacatgaagttggactgtcagttaaccttaagattgaatcttgactatcagtgaacttggatgaactttgagatcgatttgtgggggattcagtggatgattgatcaaggtctttgtaacaaagttatagctggtacattggacacaactttgataccgacaggttaatgggttgtcacatgaaaattagagaaagaggccctgcaagttgctcggtcagatgaactgaagaacatagccatggtacagtagctggaaagatctccagtgccgtgaacctgacgccggtgatcttctgccgcaattcgtgctcgcctgggagattcatgctgtgtgagaagtagataacgtcaggaaggggtgaaaagatcctgggagaggtggagccagtcactggccggttcggccatcgtgtcccaccg

SEQ ID NO: 78677 - DNA, 636 bp, Zea Mays
tcagctcactaaaactgaattttagtgagttttgctcaactttggagctttcttatcactaatccatggagttatgggttgtagtctctatagaaaagttaaagaacatagaatggtgagcaagtttgtggcatcgtcatcccttcgcagctcggggcgctgctatcctgcagctcgccatagcatattcgattgtgtctcgctttggccatccttcctagtgactcattgtggtcatcgttcctattgttcgtcgtcgtcgtttctcggcaaccgtagcatcgacgtcccttgtccccgccacttgaagccactgccatctctagtataggacgcacctccctagtcaagcttgacgtcgccttccccaaggcatcgttgccctctatcgccgtcttgcgccatcttcgtcctcgtcatcaagtgccacgccatcgagtttcgcctcaccgttctccatccttgtctttcaaagtttcggtgagacatcgccactctcaattttcagtttgtcgggtacttgtttggaggagataaacaaaaacatcagtgacatggatggttgttgcgttaagatagttcgattctgtccggatcacatgcgcatcaagtcctggtgaatcatctgaatcggaa

SEQ ID NO: 78678 - DNA, 517 bp, Zea Mays
ggacaattacaacaaacggattccccatctctttcaacaacatcacactagcaagcgcagggtaacaggccacattacaatacaagtcacagattacatacacacagcgaagggccaccagacccaccacacaaataaatacaatcgcgctctcccctccctatttattgcgagccgggggagggtagcgttttcacttactaccgcacgacaagtgagggcatcacacacactacatcggctcagccttcaagataatgcccgcctctcgataaataaacaaaatcattttcaattcctcaccctcaaacaaattccgcagatccccctcactaatactcatcccaaacgacgaggacagcaaatcgcgttggccaccttgatctacccgaagacgagttcgctccagccccatccggcagcgcctaccacttcgcaacatctcgccaacgctatgcttcgccaccacttttcgtcaacggtgttcgaccctcgccccaaccgggggatcaaatgc

SEQ ID NO: 78679 - DNA, 506 bp, Zea Mays
cggaggccgaaggtggcaatcgaccagaatgacgaagcatgtcaaaaagcttttagcaatgtgtgcaatcaaccttatctttcattggcacaagggatttgattcaagagcatatagccttcagggtatgaccatttgtggagaattgggaattgccgaaggaggccactgccgattctagtgaaggtggtcttgtccgaatgaagtataccttcagattttgggagaagtttgttgagccagacgatgactggctgaagtgtattgaagctaccagtgatgatctactcaaagcatattccaaggccgaagataacgccttgtccgcagccttcggtggccgagggaagaaaagattaaacagagtatttgatgccattggcttcgtataccctgactatcgcttcccgctgcgagggcaaggaaaaaagaggaaggctaccgcttcagccaccacagttgtgccgaagagcaaaaaggtgaaggttctgacccaccggcctcgg

SEQ ID NO: 78680 - DNA, 564 bp, Zea Mays
gatattttcacatttgagaccgtattgaccctatggaccaaagaagttgtccacccatgaactaaactcaacttccacaagacctttttgttaataagctgtatgccactatatgtacgtcctctcaacaaacaagttagctagtagaactccaaagtagcctttgtcttgactcaatcctcatctaatgatcaattagtagggcatcagtgtgtgtgtgtccttccacttcaaaataaaaccattagacatgcaagctgccgaatttccttgaattcatttatcttttccgccgtgtacgttgtacttctcatgcgaactttcccctcctcctttgaaattgcgagatggaatattttttcagaattccacacgtgagatgtcgacatatattggatcgggtagccaacacgcaaccacaggccatgcgaaaggaaataaagaaatagatatgccacacacccggtctgccaatcacatgtagtaggtgacgactaagaggaacttctcgaagacgaagagaaacaagtcattgttcaagcgcgcgatcgatcgagacacacg

SEQ ID NO: 78681 - DNA, 615 bp, Zea Mays
agagagactaccgtgacagttatggtgggacaaatctccacggggaagataaacagtccccggattgattgcgacaggactgttggaacgtcgtctgtgttggtgggctcaccccggaacctgactgggccgcctgagatggcctggaatgcctcggtctcgccccttcggccaactgggccgcttgagacatggctcccaaggcctgtctcgccccagccttgcccgacgctagagacgaggcttccagcgccggtctcgccccactgtctacctgggctcctgaacacgacgatgactggggctgtctcgccccacattcgagttgggaagcttgagatcgtgccttctgtgcatgtctcgccccgacctcgtgttgggccgccagagatgaccccatatgatgtcttgccaattgaagatactgggacactgaagatggccttgcctgcgcctgtctcacctcagcatccgcctgggtcgcttgagacagctgcatccttgcagacagagccaactagaatgctgaaggtctattactgcaaagggtcaaaagcatgtcaatttcacgacggccaacaagatggaacaggaagggagttgctggcaatggag

SEQ ID NO: 78682 - DNA, 402 bp, Zea Mays
ccagggtttaatttgcaaagtctcggtttatttctatttattttattcagttaatagatggcgggttagtttgtcaaatgtgcagctgccctttagccatactactccgctgtctacacacgcgcgatcctaagcccttagatcatcatcgaaccacccaaaacacatcccgaaccggtatacgcccctgaccacatgattccggatcaactatcagatttttatgaagcccggtccgttacatccctcggatccaatctcaatggtctgtgttcagtccaagcgaaggggtgtcttattctaatctcaggcgtttatctcaattcggacggcccatgctcatcttcaacctcacgcacacctacggttccttctctcccattctttcccttcgttctctcg

SEQ ID NO: 78683 - DNA, 353 bp, Zea Mays
taagtcgggacttagctttgttgcacgtggtgcaatgagagacgtagcgctcaatatcacgccgcatccgaggctaatagaaatgagtagacaacacatcctcggtcttcttaacaccaaaatgtcccatcaagccaccttcattagcttcctgcaagagtagaagacgaacggagctagctggaacacacaacttgttagcacggtagagaaggccttcacgcagcacaattttttgccacgttcttccctctctgcaattttcaaaagcatctttgaagtccaaatcagcagcatataattcctttatagtctccaaaccaaagatttatgattaagttgggacaacatag

SEQ ID NO: 78684 - DNA, 1207 bp, Zea Mays
gttgattgcgactcgatggtacatgtggatgcacgtcggatcacacgagggtttatataggtttgggtcgctagaatgtgtaacaccctacttcctgtcgaggctgagtatttgagtatcactggtgtacaaaggttacggacaagatgtgggcggtggagggtgagttctcccgtcgatctagtggcggcgtggttgctgtgagagggctaatgagctataaggtggtgatgggatgtgacgagctgagagaggtgagatgagacgagagagatgagatgagacatcccttcgcagggtaccccctcatccttatatagatgaccagtgggttatccctttacaagtcgtgatgactatctgactctatctgagtctgtccttttaatgtggcatgcattcctacttatccgaagttcagtttcccttcacctgaggtattttcgagtatctagcactttgagtacgctcaacctcattgcccgaggcatcagcgcaagacttagacatccggtcttcgcctccccaggtcgagctcatccagcttggttgtggctcgagggcatgccttgctaggcatgtcattggaaggcccatcaagcggcccatgaagcatttctgtgctctcgcctgagatcagccttaggcgagtcgtgactgcatctcccgtccgaggttggcctcggacgagtcgtgtctgcttctcccgcccagagctggctttgggcaagtcatgactgcatctcccaaccagagctggcttcgggtgagtcgtgactacatctcccgcccagagctggctttggacgagttgagattgcatctcccgcctagagctggcttcgggtgagtcgcgactgcatctcgcgcccgaggttggcctcagacgagacggaacaacgtttctcgtccaaggttggcctcgggtgagacagaacaacgtctcaagtccgaggttgtcctcgggcgagacggaacaacatctctcgtctgaggttggtctcaggcaagacggaacggtgtctcccgtccgatgcggaacagtgtctctcatccgaggttggcctcgagcgaggcggaaaatcgtctccagtccgaggttggcctcgagcaagatggaacagtgtctctcgtccagagctagcctcgggaaaaacggaacaacgtctcccgtccgaggttggccttgggcgagatggaataccgt

SEQ ID NO: 78685 - DNA, 308 bp, Zea Mays
aaaaattctgagcccaccggtagaggcagaattgccgaaggtgacaaaggctcctgccacaactcccaagagaaggagaacggccagcatgctagacgctgtcatagaaaccacaaaagcattaactcctgctcccgcgaagaaagttgccgaagctgctacggccgaggctgaagccgaagttgtgccttcagtgtctgttgagacgaagcccgctgcaactgaggaaggggctgaacaagaatctctaggttttggcataactatggagaaagaaatagtcgaagaagctaaatctcctggtcccg

SEQ ID NO: 78686 - DNA, 776 bp, Zea Mays
gttagatcacatacccactatgttctttgtttgtctgtttctttaccatacttattctatcattattatatttttttactttagtctccaatgaggccagaaacagttgatgaagacccaaatgaacatggtcgacttccaaatataaacatccaactgcctcttatgcaagacctgatggcaaataagatctagatgcttcatgtacatcaacggcagaagttccaagctaagttgattgattatgacttagaggttggcaaaatatttgccactatcaagcaatgtttgaataatattggtacaaagcagtccaagctagctgctacatttggagagttgattgacaaggttcttcgggctgatgaatctgttacacctaatactgttagtatttaagcttgacttatatatattttctgtcttgatagcgtgcatttcatgtttacatattatgattaacgtatacttcaccttttttttgtgcagcaaggtcagacagtgccaggtggcatagttgaccatgactctggcccagtatttgacaagactcctattgggagtgtttgtgcaccaggcatctttctatctgaattagaatgtgctcgcgctcttcgggcctacttgtgttctaaggtcattgaattggacaggtacatacttttcaaattgtttgacttggcataatgtttaattcttatttattctgattgatcaacatcgtggcaatggtatagatactgttaagttttattcaatgtttgaaggcaataaat

SEQ ID NO: 78687 - DNA, 669 bp, Zea Mays
ctgacaataaaacaacagttgtatgaagaaggaaatgccttcacattacccttaattcggggtcttagcaacacatgacaggaattcagcaaggcaacaacagcgaacattccccagactgtagcaaacacaacataataacagtaggtgcatgaagaaggaagtgcgttcacattacccataaattggagtcttagcagtacacaacagtaactaggaaggccacacaacccatcagcaacacaccatccacaatctgtagcaaacgtagacagacaacaactacaagaagaagggagtgccattgtagcacccataattcggagtctaagccatacagaacaggaattaagaagcccaccattggtgacatggattgagttgcggagcgtagcccacagttctacaataggcaacttaaacatagttgcaatagaggagacataataaagtggcgctgcgtaggtcaagcagccaccagcaggcttgagcaggcattgcgcctggcctcttcctgcaactcaaccgcactctcttggatttctgcaatgccgtccccaacggcttccatcagtgcctcatccacgagctctgcatcaacagtatccaggttgaagagggactctaaagaagcagtcacctcctttggcagtggccccttgaagagag

SEQ ID NO: 78688 - DNA, 407 bp, Zea Mays
ggattaacccttcagccgaagacatcccctgggcctttgatcatattgaaaatgaagttgaagcccttgatgaagttatcaccaggcacggggatttctgtgccctggtggcatcacgcgacacaactgcagcttttatgaaggtcgggtgcactcacgctaaaactgttaataagccaaatttcaatctttcgacaacagatctagttgacatcccaaccgaagcccaaagcatagggaacggatttatcactgaaatttgggcaaaaggcgggcgtgaactggccggggatgaagcatgaaaactacttaactcggtatgaaacttttacctgtcttctttaccttggttttcctttattatgtttcctgatttctgtataccttcttctctctgcaggatggtg

SEQ ID NO: 78689 - DNA, 566 bp, Zea Mays
acagacgatttttgaaccaaaggactccttggtcgtctgtcctgaggttcgggagtcgttccttgcgggctttctccacaagtcttgctgtctctgagtctagacgttgagctttgcataagaggtcttccagcattggtttgacttcgagactgtcgctgtttcccagacatgtattcagttgagctgattccttcttccaatcttctaaaaagttggtcccctttactccgaatggttttcgactgagggcgtctgctaccacgttggctttcctagggtgataatggatttctaggtcataatccttgatcagctccaaccatcttcgctgacggaggttgagatctggttgagtgaagatatacctcagactcttgtgatcggtgaaaatgtgacatttgttcctgattaggtaatgcctccatatcttcaaagcatgtactatggctgccaattccaaatcatgggtggggtaattctgttcgtgcggcttgagtaggcgtgatgcataagcaatgactttctcgttttgcatcagcacacaccctaagccttgcctcgag

SEQ ID NO: 78690 - DNA, 375 bp, Zea Mays
agaatcgcataagaatgaagacaagtgacacatcgattttatcccatcaccttgcttgtaaccccctgatttttccctggtcttaacccgaggtacttgagttcggtagcagtcgccgatgactaaagaaagggtgacatggcttatcgacggtggtagggttcttagagagtggtagacaaggtcgaggacatcgtgagggtcacgtcgatggtcgggtcacgactagaggtggtcgggttgagctgtccactcgcaccagcggcgaagatcgacgacggcatgaaattcggtcggccaacgatagtagagcttcggttgagggattgcgaaacttcactagagggtggtggtgttgtgggctagacaaattgg

SEQ ID NO: 78691 - DNA, 516 bp, Zea Mays
gtcgagtcgagatgtatcacaagcacacagggatgctaaaacaagagcaaggagggcttgatcggacctgtgaagggcagaccgcggcgagctcacacacgcggtattgttgaccgatttggggaaaatctcaaattggggcgctctggtggacgatctgaggcacgggttggtgtattggatgcttgactacctagtggagctaatggcacactcaatttataggacccgagggcggtggcccgtgaatttgacatggcgcgctggcggccggagagaggggagaacactggtggcttaatcgtggcgttcaccggtgcaacgactcaaagattgtaattctgagtgtgccacggttactaccacgcagtaacgagccacgacgtggcagaaccgaggtcaccggagtttccacggcgacaccgctggtccagccacgtcaaacagctacaggcacggtgataagcttcctccgcgaccaaatctgctcccctgcaatatctttatacctccccg

SEQ ID NO: 78692 - DNA, 1032 bp, Zea Mays
tcgcgcactatattaaaaaggtttgggaattactctctaagaggagaattattaagtcatttatctttccagaatcttgttgcttgttcgttccccaccttaaaatatccccacttgaggaatttgtccttgacgttcattagaccggcccagaaatgagaatcacccgattttctgacagcttgtgttagggatttgtatctcaagtatttgtttcttaatagccgttgccacacaccatcttcattgagtaatttaaaaagccatttgctgagtaaacaaatgttctttatgtcaagattggcgactcccagcccacctagctctttaggttgacaaatgatttcccatttggctagtctatatttctttttatgatgtcctccttgccaaaagaatctggaccgaatagcatctagcttctgtagcacaccagccgggatttcgaagaaagatatcatgaaaatgggtaggctacttaaaacaaaattaatcaaaacaagccgccccattgaagacaggaatttggctttccaattactaagtctcgactcaaaccggtcaacgacacaacgccactcactatttctcaatcttcggtgggtcataggaatcccaaggtacttgaaaggcattgtgcctacgctgcaaccaaagagttgtgagtactggggctcacaatctttagccatcccataacagaaaagttcacttttgtgaaagtttatcttaaggccagacatttgttcaaaaacggttagaagcaattttacattcctggcctgttcgatgttatgatccagaaacaccactgtatcatctgcatattgaaggatagataaacctccttcaatcaagtgcggtacaattccgttgaattgatgttcctctttcgctctagcgaaaagcagtgccaacatatcagccacaatgttaaatagaatcggtgataaaggatccccttgacatagtcccttgtgtgttgagaaaaagggtcctatgtcgtcattaactctaaccccccacgtgtct

SEQ ID NO: 78693 - DNA, 278 bp, Zea Mays
ttacggcacccgacacttttggttcaacaagctccaccaaaagaaaggaggtatatgttgagcattgtttatggctggacggtctggtcctagaggtcagacggtccgcggcctggacggttcgatgtggcgacgcatacggtctgcgcgagaaccgaattaattaggattcataattcttgcgcgatttgttagcaaactccatgggtttggtttgggaaccgacttgtaacgggtttagacctcccctcagtggcggatccagaaatgagttaaag

SEQ ID NO: 78694 - DNA, 396 bp, Zea Mays
gagttctcttataacaatagttaccaagccagcatcaaaatgtcaccttttgaagctttatatgggaggagatgccagacccctctgatgtggtcaaacgtgggagaaaagaccctagaagggcctgccttcatccaagaggcagaagagaaagttgctctgattcgcaaaagactcctcgaagcccagagtcgcagaagagctatgctgacaacagaaggagagaactcagtttccaagaaggtgattttgtctatctcaaggtttctccaatgaaaggggttcggaggttccaagcgaaaggaaagttagctccacgctacgttggcccctatcctatcattgatagaatagggccaacaacttaccgctttcagttaccagaatccatgtcag

SEQ ID NO: 78695 - DNA, 860 bp, Zea Mays
aaccccaaatcatgagaagccaggtggtggctcgacgaaggaatatcaaccggggcaatctgaagagcatcatcagggatcaactcaacatcaccagcaggaatcagaactctagcatcaggtgcgccggtctctaaggcgacttcctcgtttaaggcatgcgatgttgccatgccatcggaatgtggaggagaagacccaacgtggacatccatggaggtatgagaaggggagcccgctcggacaccctcgggggctgggtcgcagcccacactgcccatcagagctggatcaccaccggcaacaccctcgggggctgggttgcagcttgcgctacccacccgagccagatcattaccggcaacaccctcgggggctgggtaaccgcttgcgccatccttgaggaccgggttctctgcaatagccacctctaaggctgaaggattctcagtcacctctataggaattgaacaaccttgaccagcctcttggctctgaagactgcactccaaggtcgacgaggcacgagacgttgctcgggataactctaatcccacatccggaatgtcagagcaaacgcccatcataccaccatccgttggctcggacagcagatcttcaggaacaacatcctcgagagcctgatcaaaatttgctatggataattcttgcaggccaacgagagcagacaaagctggagaagggatatcattactctccccactgactctgtaacgccgactattcttccgaattaatgggatttcctcatcttcttcttcgtcctcgtcaacaatacgaacaatacccccattggggtcagctccgacagggtcacacccattgggatcagcatcgtc

SEQ ID NO: 78696 - DNA, 568 bp, Zea Mays
cctaaccatttgatcctcgggatcctcaactaccccatatcgtagcatacctttctgaagctcttggtagtattcctgtaccgacatgtctccctgatctaagtgttacaattttttttgaagatcacgtctataagaaggggaaacaaagcgagctcgcatctcctcttttaacacattccatgtttgtggtgtagcgcgtgtgttaacaagttcattccaccaaatgatagcaaaatctttaaattcactagtggcttgtctaaccctatactgctcaggaacaagatggaaattaaatttttattctaccatcatctcccagtctaagtaagcttcagcatcataagaacccatgaacggtggaatagagaacttaatcttagcaaatggatcatggtctggttcaggattatgatgacgacgtctaccattacctcccataccttatcgattacgtgcgaggcgttgtcgcagcggtgcataaacatcgtcgtcatcgtcgtcgtcgtccacaggagagtgagctggagctggagttggttgtgggggacaagcctccagtaca

SEQ ID NO: 78697 - DNA, 317 bp, Zea Mays
ggaaattatccagcgccccatctggtctctcttcggccttcgaaggccgaaggtggctattgaaagtgatgttgaagcatgtcagaaggcttttagcaatgtttgtgctttcattggcacaagagatataatccaagagcacatagcctatagggtgtggccacttgtggatagctgggagatgccgaaggagaccactgctgaatccagcgaaggtggattagtttgatttaaatataccttcagatacagagagaagttcgacgaaccaaatgatgactggttgaaatgcattgaggctactagcgacgagttgc

SEQ ID NO: 78698 - DNA, 304 bp, Zea Mays
ccttaaccatccgatagttgcataacccctcaattttaacctagcaagagattctaaccaacctacctcatgaaatctatcctacccacaattagcttaaccacatgtctctaactcggatgatcacaacaagaccaaaggaaagaagaaggtcaaccttgacaaggaagaatgtgaatagaatcagaacttcagatgaatcaagatccaccatccaagatgaagtctttccatgccttaatccttcttaccccaaccttatatactgttagctgataactaaatataatgtacccatgtttcc

SEQ ID NO: 78699 - DNA, 766 bp, Zea Mays
tgtgatgtggtgatccgagtacgtgctgcttgtgatacgtgtagtatccagggtggtgcccctctgcctgtgttcatggtttagatcagctagtttgcccctgctccagtttctatgggtgctcgttggattgtttccgttccgtcgctgtgtcttgttgttcccttttcgacatgatttgtctctcccgacggatgtcctgcgccacttcgataccccacctcgtagcttccaagtgaatcaccatggatctgatttgctctagcagtggctcttctttctttcttggtcctgttgttcgagggatgcagctaatctgtatccgtcgttctctcaacgccacaaatatcgttgttctctccttactccaacggaaacatctggctcggttgtggttgtcgatgccgggcttggcgtggtgcagcaaggcatggtcgagggtggagatggatgcgagctgacaggagggctgtggctgtggaacccatacgaagggaagaactgaagctgtggctgctggagggagaagctaatcatgtgaggtgcgggtggatttggggtgggcaatcgagcatcgaggttgagatcgtcacgaggacgagggtccattatcattccttggaggtggagcttgtgtccacaagatttctctgactttcgatcttcagcgccacaagtcacttattacaggttacaaatctcacctctgcgctacctttctgagttttttttctctctccctctctcaagaacacaaggattccgc

SEQ ID NO: 78700 - DNA, 905 bp, Zea Mays
ttacatatcttagcaacattgtagcattcttctttagcttgacgaagctcctcaatatttttctgcacccttaaccgttccatgtcagatatctcacgctttgtttgttccacattgaaatttccaattacttcgtcaagtttcttttctagatcttgcacttcagttctgtgcaattccacttgagtggacagcgcatactccaaatcagcaatgcgcttcgcatctttcaattgtctctcttcagccttcttaatcttctactctgcttcagaaaggctagaaagcctggcttcactagattttaatctctccaccaaagagagcaggatcttatccttttcaagaccttcgtttctcaatgttatgacctctgaacgaaggtttccaattgctatttggttgtttcatcttctgcattttttgagcttttaaagctttacttagaattaaaccctggcaaacaaagagtgaacaaataataatgataagaattaccacaaaaatagttcaccataacaaaaattacaaaatgagaagccaaagtatacaaaccttcaagttgttgtaggcgaggctatccgcaagttgatccttcgccattgcagacagaccaagctcaagctttggataccccatgttgtccatcatttcatggaaaacattgatctccttactgtctggtagacatgaagtcatcttcgttgtctcctccgtataccaaggacccttgggggtattttagctccttagcatagtgttgcacttcggcaatttgatctgctgatagctgctttcctaaagcatgtcgaacaatatagttcaaatcaccctggggaggtgcttcgggaacaggtgacgtgggcttttctggaagactctctcctaccagctttactggcgca

SEQ ID NO: 78701 - DNA, 679 bp, Zea Mays
ccggggggtccagacctactattgatgccttggagtatatcaccttctttggacacgtggcggctctggacccgcccatgtggtggagtcgggcgctgttgtggacccagaatagctgcctaagattggggcgagctgtggcttggtcccacacacaacacttctaccacgcgactaagggatagccatgtgggttcttcgtctttgtacagtagcaggggtaccctagttttagggtaccgacacaggggattgaccctctctccttgaccgctaaggacaaagtcgatgttcccaaagcgaatggttgttccggggcccgaatgacatgaaggccatcgaggaccatcatggaggtctcgagattgctgggcagaaggggttgggttttcgaggccctcaccatctccccttcaccattgaggacgaagtcgagatctccgaaatggatggttgttttggaggcctagatggcatcatgactgaccatcgagagcatggggaagaaggcgtcaagaacgtgcaagtcccctacctggtgcgccaactgccgatgtttctaatcaactccaacaagtaaattagtttttgcatgtttcgtggtccggatggtgtgctcagtgggcgcaagatttatactagtccggacagaacgttcctacatccagtctacagtggc

SEQ ID NO: 78702 - DNA, 827 bp, Zea Mays
cggcaagcctcagcagccgttatgtgcgacaagcacagtccaggcagaagtcgcctaagggcgcagctgggtcaatataagtgtgtagtcgaactagagacgcatatttttatccgagcaaaagccgcctaagggtggaaccggatcagcccaacaagtgtgtaacaacacccaaagggtgcaaaatcgtctatgagacacatatttccgagcaaaagccgcctaagggtgcagccggattagcacaacaaatgtgtaacaacacccaaagggtgcgaagtcgtctacgagacgcatatttctacctatgcaaaagtcgcctaagggtacagctagattcacactaggcgcaacacaaaaaaggtgaagtcgtcatagaagactaccaacagacagatcaatataaacatattaacgacgcccaagcgcgcgaagacgctactaggtgcaacttagcgcaaacacaacaaatgtaagacatgttatgttacaattacaagatgtgcactatgcacaagatattcatccacatacatgtccccacagccgtcctttggcgaagggggcgagggcagaattttcgcttatcgtcgccaaagaacagcgacggcaacactcatttttacattggttcttgtttcggaataagaccagcttctcaaaaattaaaaattatcaacctcaactcttcaccatcaaaaaggtcccgcagatccccctcaccgatacacgacccggacatcggcaccagtaagtcatgacgggtcccctgattcagctgtggtccgatccaaagacgtgacctctccatgcccattcgacgatgt

SEQ ID NO: 78703 - DNA, 350 bp, Zea Mays
atggatcacaaattgccctagctaaaaaggttggccctttttacttggattctcttgactctgggagtcgttttcctatatctggatttgtagatgacctgattactcttccctccaatcacactagatgctcttgagaagatatgctcaaaacttagacttaaaatatttgtgtcaaaatttgaataaatgtgtttagattgtcttaaatactaaatactatcaaacacattttttatacctttctgacccatgcctttgtcttcagcttaacctgaatcatcatattattggaggagagcttctagaattgtcagaaaatgaagtgcctcctgaacatattgttttcc

SEQ ID NO: 78704 - DNA, 601 bp, Zea Mays
ccgccttggtgaacagcggcagttgagtgctcaagaattccttataagtagctgcagccggtgggcgttgctgctgccctccaccaaactgctgagggtagggctggcgttgcaccagctgccgtaggatttcattctattgagcccttaattccttcatcgttggagctaggggaggtggtgggggaacttgctcgttttgtccgcgacgaggtctagctaccatctgaaaacaaaaattctgtcattgttagttcaacccaagattccaagtggtgacttcatatcatgatgagaataatgacacaaaattatattgaaccaaacaaagataatcattcattcattgcattgttcatacaggtttttccgggttacaacatactaggagatccaccctacagcctagttcaaaagtttgtgccaaaagctaagattatgtggtctttccattctcctaacatgtttagttctaacccatctaacctgagtagcggaggcagcactgggcccaggtgtagggggcactccggagtaggccatgtccagactagaagctggctcaatctcctcgggatcctcctcctcttcactgccggcc

SEQ ID NO: 78705 - DNA, 390 bp, Zea Mays
caccaataggctccttttgtggtgaaaaacataattttactataaaattttatgtcataaaatccctttatcctggcagtgtcttctcatcatgcaacacatcatggggtccttatcgctagatcctccaagactaagcgctagcaactaatactccctactctagaacaagcaccttaaaacacgccacaaaccgagggagcatatgaaaagcatgataggagttcaatcttgggaggtagggcaagggcctaactaggtacacatagcactaagacctagaactacatgatctttagtcacttgattttatgttggtgtctgctcactattgtcgtcacttgacatatcgcgacttgataatgggccatctaaatctaagggttggat

SEQ ID NO: 78706 - DNA, 432 bp, Zea Mays
ctggcatgtcaagttcatatgccactgcgttaaccttgagcacctggaatggcccgaataatctaaaggccaatttatggttcttgcgttcggcaactgagatttacaatatggctgtaatttcaggtacactcggtctcccactgaaaacactctctgaacgacctttgtcggcttgttgcttcatctgatcttgtgcacgttgcagatgcattctgacctgctgaagaacctcttgttgactgttgagcagattcctgagatctgggattgtgcactggttaggggaatcaagtccaaagtgtgtaggtaagtgaccatacaagacctcgaacggtgactttccaagagcggaatggtagcaggtattataccaatacttagctagagacaaccatgatgaccactgtttgggacgtgtgtggacaaaac

SEQ ID NO: 78707 - DNA, 316 bp, Zea Mays
ttcatctttttgcttgtagccttcagcacacgttcggtcgaggcggccacagcagtagctttccttttcttcccttgcccccgtagcgggtaacggtagtccggatagacgaagccaatagcatcaaaaactctgttcagtctcttttttcctcaacctccgaaggctgtggacaatgcattatcttctgccttggaatatgatccaagcagttcatcacttgtcacctcgatgcattttaaccagtcatcgtttggttcgtcgaacttatccccatatctgaaggtgtacttcagccggaccagttcaccttcgc

SEQ ID NO: 78708 - DNA, 718 bp, Zea Mays
aatctctaaattcactagtggcttgtctaaccctatgctgctcaggaacaagatgggaattaaaattttgttctaccgtcatctcccagtctaagtaagcttcagcaacataagaacccatgaacggtggaatagagaacttaatcttagcaaatggatcatggtctggttcaagattatgatgacgatgtctaccattacctcccataccttgtcgattacgtgcgaggcgttgttgcagcggtgcataaacatcatcgtcgtcgtcgtccacaggagagtgagctggggctgaagttggaggtgagggacgagcctccagtacgcccatgcatgtaacaagttcagcaactcgtcgatcaagctgctcataggatgtcaccgcagagtcctggtattttttaaaagcttcagtcatcgcgcgcatcatctcattcaattccatctgagagacacactcatcgtcgttaagcttaggccccttgtccttgtccatttgattctttggtcctatcattgttagcacaaaaaagagacaaaaaggcaacaaacaatgttaaccctacaactatctctcagggtggtggtggtggtggaatacaaattatgaagcgtcttaccccgctcttacaacgttcttaccagcactgcaagtggcaaacggtgaccgatgtgattatccaatgagcgtgggtgtgattgcaaaggagtacctgtt

SEQ ID NO: 78709 - DNA, 840 bp, Zea Mays
ccctcaggacgctgccagcacacccgacgttggcttcgacaccctcaagtccgccgagggcgaggaggacgccccgactagcgctgccgacatcttgaagtgtgcgtggatcggtgcaacatcccccaacgaatagacaggagcaaaggcaacagcaaggaggtcgcataggcccttagtaggcagggtttgtaagaaaatgactccacctagtgcgagttgcgaatcatgtatttactaaggaaaaatcaatgagaatcgggggatgcacgttaacaactccacctagtgtgaccccatcgaccagtccggtgcgaacacctcccttcccaactccactctcgataacagaacttgacgaccaaatcgccagggcaaccagatccccatgttcccctcgggggggaggagtgtgtaccattccaccttttcaagtaacacacatcccctcgccacaggccatcccaagaagaacccataccctagaaggcctcaatggccatgactctggtagaccgagatgaccgataacaagggttagagcctaaggaaagaagaatggcgcagagtttaaaaggaaaacaatattacacataacaacattcgatcattcaagagttctttataaggcgtcaaaatagcaccatctaaacagggcgagcggatcaccggcagacggctccagactccaaggaccgatcaggaggaacttcacgtcaacccagctcgcgatcgaccgggcatgaggacggacctgctccccaatattgtccagctccttatcacttcgaccggcggcaaagccttctatgatcacggcgtcatctatctcatcaaaat

SEQ ID NO: 78710 - DNA, 451 bp, Zea Mays
tttacgcttgcctctcatttttagtgcctccccacccctgcgatgaagacctgtcgtcacagagtgacctccatttgtgtttaacagaatagtgtaagccatgatgtattggcactagcagagtgtaacatctaacgttactttttctgcaactgtttgacttttgagctagcagtctcgcaacaaaaggtagcttctttctagtaccccaagcaacagaacatgtaaagcacaaggcagtagagcacatgtgtggagcatgttgttttcacttctaaagtcaaaatgcagttttattcatcgccgccgcgcgctctaaagacctggcaataggcacagcacactccatcatggagcaccagaaccactggtgagattccccccaatcgacaaggcaaaatgcgcagcttgttggtttgactgcatgccaagttgctcctcaacctttttc

SEQ ID NO: 78711 - DNA, 1408 bp, Zea Mays
tatacaagggaaccaactctgaagttgaatttgtggtcttcatgggaataaagtgcgcagacttggtcaagcgatccactaacacccatatagcatccctgctcaaggagaacgaggtaagcccaccacaaaatccatggtgatatgctcccacttccactctggaatttccaatggcttcagcaaacctacaggcctcttatgctcggccttcacgcgctgacatacttcacaggcagccacatacttagaaacgtcaaccttcatccgcttccaccaaaagttttgcttcaaatctctgtacattttggtttcgccagggtgaacggtgtaaggcattttatgagcttctctcaagatatccatcttcacctctgatttctgaggcacacaaaggcggcccctgaaacgaaccaaatcattctcatcaatggtgaacaaccggggtctaccatcgccaaccctctttcgagcttcctgcaacaaacgatcctgctgctgagccgcacgcaccctctccatgagggaggattgaataagcatccgagtctcctcactagcggtgccgacatagcacaaagcgatccccaaacggtccagatctgcgatcaaaggcatggccacctttggaaccccggacctgctaagggcatcagccaccacatttgccttccccgggtgataatgaatggacaaatcataatcttttatcaattcgagccaccgacgctgcctcaaattcagctccttctgagtgaaaatatacttgagacttttatgatcggtgtaaatgtcacaagactcgccataaagataatgcctccacgattttagagcaaagaccactgcggccaactcgagatcatgcgttggataattcccctcatgcttcctcaactgccttgagccataagcaatcactctgccttcctgcatcaacacacagccaagaccaattcgagaagcatccgcaaaaactgtgaaacgtttaccactctcaggcaaagctagaataggagcgttcaccaacttgttcttcaatgtctgataactgacctcgcaatcgctggaccagacgaaaagaacaccctttcccaagagtctggtcaaaggcttagcaatgctggaaaaatttggtacgaaacgccgataatatccggcaagccccaagaaacttcggatttcagagacactagagggtctcttccactccaccacagcagcgacattcttgggatcaactgcaatgccctgttgattaatcacatgacccaagaaagccacttccgacagccaaaaggcacacttcttcaatttgccaaaaaactgattcttcctaagagcacccagaacgagacggagatgccgctcatgctcttcctctgtttttgaataaatcagaatatca

SEQ ID NO: 78712 - DNA, 1422 bp, Zea Mays
ctcgcctactaaggagtggacacagatcgcccagcaaagggaagtggatattccgtaccaaggaaggaaagcacaatgggcaatcaactcgacaccttcgccctcaaagtaggatgagaagaagcacactgctacactagctccattcttccccgacatccttttcattcaggggagattggagtcatggcccatctctgatgatgaacccaccgtgctgggggaagaacctcaccaacgcgatgctcaacgatggagaaataggcgttgtaacgtgcagcgacatcacgaagctggagaacgggacccggcacaacccgtctctagggatgaagcctcagagatgggggagaccctcgacgaaagagacatcgacgaaagattctaggctctagcgggagaatccgctccttgcccgaaacttgtaccacgattttgctcgagccttgaatatgccaagctaagttggaggagtcctggcgcagatagccgatggcctcccgcgaaccccaggtgcgaagggctatcggtaggtgcttactcaggcggccaatcatcttctacctctcgcccacccaccaaacgacctgcgtcatgccatcaacaaccgacgagacgcacagagcaacatcagcgcttcacgcgatcattgacatgagaatgaaataaggcgctaggaggaatacgaccaagatcaaggtgtaccggcacatagccacgcaacccagattgagtcagcagcaacctcaaccaatagtccggcccggggacagtctaggcgacctaatactcgctcccctccccgggatcgacgacatgatcatcgacaagaggatacatgcggggtctccacgctcacccctcgcctccgagccatccaatggcctcccaatttcaaagtctccaatattgacaaatatgagcccaagcaggacccagggggttggttggtcatctatacaaccgctgcccgagctattggggcaacggaggacgtcttgacagcgtacttgcccattgttctagggcaggacgcactgcaatggctccgtcatctgcctcaacactgcatcgatgattggggagatttcagtcatcggtttatcgcgaacttctagtccctctccgataaaccggcacaactgtgggatctcaaatccatcaggcgacaaaatgatgaaactcttcgttcattcctcaaaaggtttcaaacaatgaggaaccatatccccaaggtcgctaagacgactgtgattgaagacttctatcggggatccaacggtctggcttttgtccgagccatacttcaaaaagcacctgccacctctgaacaactattcagggaggcagacgtctacatcacagtgggtgagcaggttcaagacctcattggaggcgcaaagcccataccacccacaccgc

SEQ ID NO: 78713 - DNA, 922 bp, Zea Mays
aaactgcccaggagcctcagcttcgtggataaagccaacgcgccgttctttccttttccccgcttccccaaatcggaccgtagacactagtacctgagagaaagtgagggccaagtgctgggtggggcgccgatgttgacctcgcccacggctggcgtccgggagtccgtggtgtgccgcggtgcttcgggtgcttgccggtggatcacccgttgacggattagggggaaatcaatctagtggcggccggaattcgtcatcacacccattgattcaccgagggaagtctagcgccaattcgacctccacgttcggtgagccctcgattctttaccctcgtcgtattcccttacctagctaatgtcgcgtcgtcgttaatcgtgggcgaattgggcacgaatttggcctttgtgcggggaatgtcgttcgggcaccgcccgtatcatggtcgggggtgttcaactgtgtggaggtcggcaaaatcattacccatgtgttcgtccttgggctagctccgtgttgcgccaactcccttcaaggttgatgcagtcgtaccccgcagagatttctccggcaatggcgtccgccgtggatttgcctacgccgccgcgctcgcccgtcggagtagggaggagagatcttggccgttgatctctcaggcaacggtgacgattagaaccgcaacataccggttcgggacttcggtttgggccgtggatcagtgatactgcgaccgtgggcgtgtgagagatattgcgtcgtccgattaagatccagtggtagtctggggacgaccctcttaaaataaccatgatctaatctcggcctctggatcaggacctaatgctgaaatgagagaataccccttcggccgagaacttttactaaagaaaccctggatctattagaaatcaacccgcga

SEQ ID NO: 78714 - DNA, 477 bp, Zea Mays
gagccctgtccacgaggaagtacagattcgtggtggtgatcaactccggtgagcgattcctgttgtagggtgacgtgtttttaggcgccaacgaatgctacacaaagagggggtagaaccgaactatggtgtagatcctcaccggcgatttaaggctcagacgataccgcccacataccataccaccgtggatccacaacgatagatttactccgatgagcaattccagcagcccagacgaccacccctccagctgatgcagcgaactgctcccaagaatcgggcggggttccctgactcccctacaaagcctcaccgatggtgggtggtcggatcgatgatgcggtgatccttcgctctatttcacgtgttggagttctttgcggagggtattgccgaagcccgaagggtttagggtttgtgagatatgtggtatctatgatgtatgagattgttacaatgttatatgtgatgtat

SEQ ID NO: 78715 - DNA, 535 bp, Zea Mays
gtcaccaccctgtgtgatgagttgtgcaagctgaacctggaagttgtttcttcaggtgctttaaattatatctcggtggagcccacattacaagagcaaatagtcagggcacagatggaagacaagggtgttcaggtaattaaggaaatgatcaagcagagagcagaaaaatacaaatgcttccggtaggacagcaaaagaatcctatggtttggagatcgattggttgttcccaaggaccctgagctcagaaagaagatattggatgaggctcacctttcaaaattctccatgcacccgggcagcaataagatgtatcatgatctcagatccttatactggtggaccagaatgaagagggaaattgccaagtacatatccgaatgtgacacctgccagagaatcaaggccagtcatttgaaggtagcaggccctttgcaaccccttcccataccatcttggaaatgggaggacatttgcatggatttcatcgtgggattgcccaatacctcccggcaccatgattctatttggg

SEQ ID NO: 78716 - DNA, 631 bp, Zea Mays
tgataggaaggatatacattctcacagtggggttgttggtgctagagcggcgcaagagaagatgaagcagaccgacgagaaccacgacgtcgacgtagaggaggcagacgaacaacgagcattcatgatgacgcttccaaaaacctaatacggcccctaccccgtgtagggacacaaagggacgtaggcttcggagatcctgctctctcaatcccgatggcacattgacaacatgatggggaagacgagggcagcgcaacgtaatggaacaaggagatgaaaaactatatactggggataggcacaatgcaccagtaagggcggaggcgagaaatcgtcggaccattgagaggcatgttgtgcgcccgcgcccattgcgccaccctgcccgacgaggctagcttgtgtctgtttttccttttcccctcctcaataactttatccaagtggagacaactaaattatttaagttggtatcactccacctgacgtagcaatgtggtactaaaactactactatatcatgcatgcataagtgtgcctttgagatttttagaaattattatttagaccaagtccaaattctctatcagtttagtccttatttatgtaattaattttgtaattaaac

SEQ ID NO: 78717 - DNA, 510 bp, Zea Mays
gttggtttgtgggggatgatatataattatagagggctgccaagagtaagtaccgtcgatctggaagtggcgggatgttacagcgtatccaaaggataccataccataatggtttcggatgcagagcgatccgagtatgcgtgagcatgagacaaaccaaaagagtcatttgaatgggcattgtgcctctatttataggaacaaggtgacacataacttcgtataaatttacataggtgacacataacttcgtatgaatttacatttttattcctcagccttatacacatgatctacatagcctactgagggtattgttgtattttccctccacatgacatgccgcacaagtcttcttaatcctttttgcatttggtcctaatggcaccgagggaaacacctgatccttctgaattagtccgttcaagccctaatgacgaaaccggtactttccttttttatgacaaagcttacattattaactctgagataaacttggaaacaataaat

SEQ ID NO: 78718 - DNA, 649 bp, Zea Mays
ccttcgggtatttcgcttcccgggcatagtgtttggcttctaaaatttcttctttggataatcttcttcccaaagcatgtcgaataatatagtcaagatcttcggacgatgcttcgggagcaggagatttagcttcttcggccacttccttctccatagctatgctaatatttggagattcttgctcagctctttcctcagttacggcaggcttcgtctcagcaggcattgaaggcccagcttcggtttcagtatgagtcgtagcagcttcggcaaccttttttacaagagcaggagtcaatgctcttgttgtctccatgacagcgtctagtacgctagccattcttctcctcttgggagttgtggcgggagcttttgcaaccttcgacaattctgcttctaccggtgggctcagaatttctggtagcactattgttttttcaaactctggctttttggccacccatcttcggcttcgactggctcaactataggcaccttcgacactatagtcgattccttagcgctccgagtgacgggagcagcttgttccgcttcggcagcggaagatgtctcgtcaccaaattttggcactatggtcgtttcaatatatcttggccggtgggtcaaaaccttgattttcttgccc

SEQ ID NO: 78719 - DNA, 781 bp, Zea Mays
atggaacgcctttgcgccggtgtgctagcatcacacacacatcgagagtctcacgactaggtctgaagaaagcgacgactaggatttacacatgtagtggaatgatttaaccctatcccctttctatctatttagaacgtgttaatgtgttgcatcccattaaacctttaatctcagttggaccctaatccgaactgtgtatgattgtctcttagacgtatctctgacacctatgtctttttttttctctttttgccattgtatacgtatcaatgaatgaacacataccaccttctgtactactggagacttccacctctatgtgaaactcaatgtttttcatatcttctcgaatacatgtgcgcaggacgcgcgcactatactagtgcaggaagaacgattattcatacactattgtgaaagaggaactcactattgtaaaagagaaaccgtacgggcatcgcatcataaggacgataccatgaatgattgtgtctggctattttgctgggggcactgtcaatggtgacatggtgtcatggtcggagatcatctggttggagtcaaaagaagcccaagtgggatgcgaacataagctgagttggccagatcaggacgcggagcatgagctaccaatctttaactaaattttcttttggcccatccaagtctgaaacatgtgcgtgacaacaaccctgccgttagatattgctaccccaaagtgctatgtgacttgtgtcccgctctatcctgcattcctcattattgaatctgccacctg

SEQ ID NO: 78720 - DNA, 1151 bp, Zea Mays
gattttgctggtatattacatggctccgcctcgttaaaaacctcaccccctgggaggaaaagagtgcgggccggaataacattgtttgctgaattacaagggcgcgtgggccctgagggttaaagaaaaaatttccggaggttgtcaatgttccaggagtgctctaagtcttcgccggaaggcgttactagcctgtacgcgctgggggatgcctttgacttgacgatgaatggaccctcccatttcggctctagcttgccccgtgattctgtccgggtggtccggacgagtacgaggtctcctttgttgaactctcttgggacaaccgcgttgtcgcaccaggccttggtttgagcttgatatttgttgagggcctgtagggcgaggacgcggtctccgtcgatgagatctttggacgttggctcgtcgacatcgggaactgctgatgtgcttgttcggggcgacccatgctttatctcttgcggcgtcatggcctcggatccatacaatagatgaaatggtgtgaatccggttgcccgacattctgttgtgtttagggcccagaccacttcaggtagttggtcggcccatttgccctttttgtcgtcgagaagtcttttcttgatggcagtaaaaatcttgccgttggcgcgctcaatgatgccgttggattgcgggtggtataccgaggcaaagacaggcttggtgccgatggagaaacagaaatccctgaagtcttggctgtcaaactgtttgccgtttgtcgactgtgagttcagacgggactccgaagcggtagacattgttttgccagaagaacttttgggcggtcttcgacgttattgtggatactgctctggcctcgatccacttggttaagtactcgatggcaacaaaggtgaatttgaggttcccttgagccgtaggcagtggtacgacaatatccagcccccagcgttgaagtggccatgtatgggcgattagcttggtgaattgcaaagggttgcttgagtgaggggaaaatttttggcatgcttcgcaagacctcgcgacttgattcgcagtacagattattgcgggccagtaaaatccttgacggatcaccttggcagcgagggccctaggtcctgagtgggagccgcaagttccgc

SEQ ID NO: 78721 - DNA, 443 bp, Zea Mays
gaggaatttaatgaaagtgaggatgatcttctggactctcaagatctggaagagtttgctaaggatgaagatatagttctatcccctgtcaagagaaggaacacatgaatcttagtgccctgcattctgaagacgcttctaaagtgattggggacaagaaaagtggtaacatggaaggagagcggggtgatggaatcagaaggagcagtagactagaatccaatgacgaaatgaagattgcggataaggctacaacgagagcagtggctaaggatgcatttatgaataaaggtatatcttctaaccctttttctgttctcaatactgataattctattcttatggatgttgctttaaagttgggtgtagaattatgttcttattttaatgaagctatggaaaatttagatctgataaaatctctagaattatctaggaaaaat

SEQ ID NO: 78722 - DNA, 415 bp, Zea Mays
tatacagtagcttacctctatagtaacatgtacttgattctgaataacaaataatttccactactgggactgaaacttagtatccatctactgcttgattagaacatggcttagaaaatgtcatttttcacctgagtagtcaatttgacttaccgttgatgacaatttatgcaagacatggttcgctgagtaaagtaacacatgggattgtgaagaacataccgaggttcttcttggatagggggcattttaactatgattttagcattgtcaaacacggtccaggatcctacaggtttcataccttcttactagacagagtagggtcatgctgattttacaacctgtccattatcgcctccctaccacctccgcaggcgagagcagctatctccagtgccccacgcccccagtg

SEQ ID NO: 78723 - DNA, 358 bp, Zea Mays
cggcggagaagaagacccccaataggcatttgttgtgatcatcatccaaatggctgaggacaagaagattgtagaccccataactgctgatttttacgaagcaatggaaaagaccaacgttgaaaaaaatcactaatgggatgcaagttgcgctatctggggattccagtgacagtgatagctttgatgtggagagtggaaattaagatgtcgaagatcggtcgtggaggccgagccatgttgtttttggaaagtcaactgttaaacaagggcagattgaagcgatgaagggcaaatatttccatgatatatctatagtgagggctggaggagaaagcactattcctcttcccgaagc

SEQ ID NO: 78724 - DNA, 655 bp, Zea Mays
caaagaagttatggatttattaagttttaggatttattttctatattcaaacaattttctgatttattttattaaacctcaggtctcatttggactgcagcaccaattccaaagagtacagggtctataatataagatttaggtaccggtttgggttcgcaccctactctagtgtagtgctgatcgtcctcttgttcctgtccctccggcgggttcatggctgacgtactcatggtgatgcgtggccggccccatggtgtaagcctaggactcgactaatacggcatggtcccccttcaccattgtgggctcgatgtcctttcgcgcgtgtggattggtttattcgatatggcatcctgtcttgttgtttcttccatacctgccactgtagaggccagttccgatgctgaggttgtccctgacaggagagttgtgttcgtgtctcatcacctgccggggtcgaggtacacttgcggctctggctcaacgcttagacttgctcggtgggacacttggtcgcccgcttcgcctcgcagacttgctcgacggggagacttggtcgtatgctccgcctcgcagacttgcttggtggagtacttggttgtctgcttcgcctcgcttatttgctcgacggaggacttggtcggaggggccg

SEQ ID NO: 78725 - DNA, 283 bp, Zea Mays
tggttgtcgaactgtaatacccaaattataaagcttacaaaagagttgatctccttaggtgatttgtcatctaatttttgagacaattgactaaacacaattaaaagagagtaattctttactaaaacacaaaaagtaaagccatgcatcatattggagttttgtttgtgcatttaataaaataataacatgggtaaaaatattataatgagtggaaggtttagattaaaacataaatttgaatttggggattaaaaacctattttgaatatttaagaatgag

SEQ ID NO: 78726 - DNA, 544 bp, Zea Mays
gccgcactcgtgaacggtaaaggatagcgtggaaattttgccgcaacaattgattggatgcgctactctgtttactgtagcgtagttgtggacgctatatctagcgtaaaggttgctcgtaactctatccattgtaccgtacgagtgggggtaaaagcaaaggagtgggtgctggggccatagtgagtattttttatatatgttggtaaaaaatgtggtagtttgtataaggttgagatataaattaaacatgagtttaaagaattatgataaaaaataaagaattttgctgactagaattgaatattcttttaaaggtagaaatttagaatagtatgaataaggatagcctaagttaccttcaacagatgtgtgctctctcatgtgtacatgccaacctggcgagctctggcgacgaggaccactgaaaagtcggaagcaagtggggcaaacgtattctcagttcagaaagccactttctttgtcgccctcttttccagtgagcatcgtcccttcgtttccactagctgcaatcgaatcgatt

SEQ ID NO: 78727 - DNA, 777 bp, Zea Mays
cctgtaagcctttcccatttagatcgtctggtagactttgaggtgggtagaaataatctctccggcacaattccaccactgctcttcaacaagtcatcgctcctgtatctcggagttgcatcgaacaagctgcatggaagcttgccagctgatgcaggcaccaacctgcctggtgtcaaaaagctcctcctaggtaacaacaggctgtccggaacacttcctagttcacttggtaacgctaccatggtcgaaatattaggtcttggattgaacagattccaagggagggtggcacctgagataggaaagctgtgcccgtttaatgtcgagatgagtgcaaatgaactgcaagcagaagatgaacagggttgggagttcttcacgctgttcacgaactgcacccgtcttcaactgatcgatctacccctgaacaggttaggaggagtgcttcctacttccatcactaacttttcaacacagatccaatggctcagcatcgcggccaatggcatatctggggtggtcccctcaggcttaggaaaccttatcaaccttagcaacctagacatgggtgaaaacgacctgcatggtgtaattcctgaagatatcgcaaaacttacaaatctgcaagtattgttgctagcaaataatcagttctcaggaaatataccatcctcctttggcaacctcacacagctgcagttgttttccttgtcgaacaacagccttgatggccccatccctagaagccttggtaacttgaaaaacttacctagc

SEQ ID NO: 78728 - DNA, 545 bp, Zea Mays
ttggaatttcttacctcggcccacttcgttcctcagcgcgcgcgcggcctactcccctcttcacccgcgcgttgccatcacttccacgtgggccctaggggtcagtctcaccaggtcgtgtgtacaatgccttgtgtctctgatatttgggccgcttgctagtcacagtagtggattcctgctcggtcgcaaaatcatgctcactggtggtgggcccagtgcgcagtgaccatcccctttttttttctcttcttctctcccgtccgcaacagatcgcggcgtgctcgccaccggaaatcccgtacgcgccatggccagatccccgccgaactcggagttggttacaaccgttccaccgatcttggtgatctacgccctataaagcttacccctctcagccatcttgcatcacgaagaactagagaaccacgcgtgccgctgccggagggagagaagggagctttggaacgccgcttgggggagttgtcgtcgtgccgcgcccagtgcctcagattcttcctcgccggtcgctgcggagcttcgct

SEQ ID NO: 78729 - DNA, 943 bp, Zea Mays
cctcctgctcgagacggtagcccgagccatagagtgcggccctccccagaagacattgaggccttgattgctcccctttgaaatcttgctgaggttgagaagcaaactcacttcgagatgccatccagcactgatgatgctgagatggacgctgtacttagcctgctggccgaggaatcatctgactctacccgcattgagccgacgacaattgtgactggggaagagtttggtgaggatgaggaaatctagcacccgaaggtgcccaccggaagcgttcacatcgagtgaaccactcagctgcacctgtcgaggagaagaagaagaagaaaaggcgactccggcgattatcatgcctggagcaagacgctggcccttctacatctttccttgatgatggcccggcgagcgccatcccctaggacaatgctgaaggttgtgacaatactcaggctgctgacggtgtgcttgatgaggaataagaggaggaagaagaagaaattccgctgatccgcaagaatagccgtcactataggggtagtgacgagggcagcgacattccctcgcaagccttgtcagcactcattggccttcaagggttgttaatatcagattttgaccaagcgctggaagaggtcattcctgaagacattctatcagagcctcctgaagctgtcaatcccaccatcagttcagaggtcccaaacgatggtcttctgccgcatgactctgtcgggcaagaggtaacccgggtggtttctcgtgcttcgtcgaccttagagggcggtcttatttgcgcaaacactgatctgggtcacctggctcctatggatgtggctgaggaatctttagctttagaggtggctgctgcagagggcccaacccccgagggtggtgctggtagcgacccaaccaccgagggtgttggggtaggctctctctc

SEQ ID NO: 78730 - DNA, 565 bp, Zea Mays
tgtcagtgttttgacccaagggtcctgtcggtgttttgacccgagggtcctaatcaactagtgaatttgtgttgcgtgtcccggtccagatgggtgatgcaagaagacacaatgtttattctggttcgagcaaccagtgaatttgtgttgcatgtcccggtccagatgggtgatgcaagaagacacaaggtttattctggttcgagcaattagtgaatttgtgctgcgtgcaccatttgagtacgcgtggctccacctagggtaaaacgctgcttttacccttgtcttatagctccttcccagagaagccacaactggtcgacccctctcccagcctataaaagggagtggctgaccttagggcaagtggatcaaaaggagagagctcttgggcaaccggacaccttcagacggacacgaacccataagaacgaacacgaggaggagcaccgacgaggaataggagatcggacccccgtcgagtcaagacttagctaagactccacatagcagcttctaagctccacttccatctcgataaagagacttgggagcctcttccccc

SEQ ID NO: 78731 - DNA, 436 bp, Zea Mays
gctgatttcgtcctgagcagggcccagaggaaggaagtactacagtggatcaagatgttaatgttccctgatgggtatgcagctaaccttagtaggggggtgaacttatctactctgcgagtcttagggatgaagagtcatgacttccacatatggattgaacgaattcttccggcaatggttcgaggctatgtccctgagcatgtctggttagcgcttgcagagttgagttatttcttccgccagctttgtgcaaaagagttagctcggaccatgattacagacttggaaaggatggcacccgtgttactatgtaagctggagaagatctttccacccggcttcttcaatccgatgcagcatttgattattcatctcccgtatgaggcacgaatggggggcccgtgcagggacgtcggtgctatccaattgagag

SEQ ID NO: 78732 - DNA, 325 bp, Zea Mays
cgcatcagattagatcgggtctcattaaaccggggtcgtggatctcggatccggcggctagtatcgtgtaccgcttcagtgaagttagatctaatctgcgccctagaattctaatcgaatggccaacgtttgtccataccccttcgtgggtcagttttattaaagagcccctgagatttcagagaatcaacccgccatccacgggagctgtgctctgtgtctgcagatttttaccccgagccccctgggtttctctagatttcaggcccagtccagaatataataaaatcagggaaaatgatttataaatagatttttaatagga

SEQ ID NO: 78733 - DNA, 464 bp, Zea Mays
cctcctctggtaccgtggctgtgcggcgtgaccagaatttcttgccgaggatgaatcgtcgccgtggatccgcctgatgccgtgggcaggggtgctgcgtcctgcgattaccggtaagggcttgccttgttaattcgtcaccgtctcccttacgtttatcatccttcgtgatggagtttcgtgcacggaatcaggggattgggtgctcaccagagcatcgtcgccttgcgggcgtcgcaccactgcggcgggcgatcgggtgaacggatggatgggaagagatgaagtttgtgccgctggattctcatccaacgaataccattagaaactggggacagtttgggttgaaccatcgatcagccatccaacgggcgaggcgcgtgtgtggttatttaaaataaggagcatcagatctggatcgaacggtcctaagtgcataccggttcgtgttgagtctaatccag

SEQ ID NO: 78734 - DNA, 701 bp, Zea Mays
gctccgcctcaatgattccctcccttttgtcccagaatcattcctgcatgcaaaagggcagctagctagctagcttattggtgatgaacaaaaggccccggcgtcgtcggttcgcttcaagatcctctactatctaatggcttcttgctgcctgcccccgattttgcttcagagtccacggtcccagctagccgcaggactgtgtatatatactgctaattctattttatgtaaccttagtcttctgtgcgctgtcatgtaaacacgtactacgacatattgtgcaaatgttgaatggatcctgggctcatggcattggtttaatagtagtaaaattgggcggcgaatacccttggctcgggcactgacatgtcagtgcgtgtgtggcccgtatgggagaagtagcacatgccatgtagcaggacggaccacggacggtatactgtagcctcagtaccggattctattgcagcagtccgaaccagacagagcagagagaacgacgacggtatacagtatgcagtatacgtactacaataatcaatgcacctgcatcttccgttcagacagtcgaccagttgggggtgggcgagaccgtatttttgcctgtgatagattcatagacatagtagaagaggaacggacttaccggctcaggctccgttggtttcacgcgcgggtttcccgcccgtttgacgcgc

SEQ ID NO: 78735 - DNA, 438 bp, Zea Mays
tacgagtgtacgtgtgtgggcggcagttgcgtatacacgcgtacgggtgtgggcggcggctgtgggtgaaaatatggtttggtccgtatagttaaattgaaggtgggcctatgtgaccaattttgcgcgccaataaacaattaaaatgggtgtcgcgcgtggcaattactcatgggactttatgccgactgacggtgtgatggtatttatgagaattgtcgatcgaccaagcgacgatattcacatataaatataatgatcgatacttagttggaatatatgctgactcataatccgtggtaatttataccgactaacagttcgatagaaattctttatttatattgatagtcgtctgacgctaagttagtattgtagtattagtgttaatggctgacgtccccagcttgttggctgtcaatacgcacgacctcctcg

SEQ ID NO: 78736 - DNA, 713 bp, Zea Mays
cggaagacgagtgagctaggagacgggctcccggtccctaggggcgacgaggaggtttagagttggctggactcgatgcaacttttatcacctagtgagcatccttatccagaggcgagcgccctaatcctcctcgccggcggcggtgcaacaacagaagaagcgggcggaggttgttgcgaaatggacgtggtttgttgctagagcgacagctgcaagaacgctgatgtgcaaacaaatatgataggatgggatatgatctgggactgcaggttgattttgaagaaatacaagaggttctttgtaaaaaaatgacgcgggacgaccgttgaaattgatgctttaatatagtagagataagtattatggcacgacacattcatgtaaacattttgttccgacgaaacctttgatatggtcatacataaaatactatgcaacatccacttgggaatacgatgactgtgtggcaaatcgaccttgactaatacaaaacacgttaggtaatgcacgttcaaggtgacaaaattgatacccggctcttccgacaaatgtaatttttctcgacagtaatttatatgacgagggccctcccgagatctaagaactaaaagtaattacataggagacataaaatttagactaatttggactcttgatgcgagataacacaatacctccagtatacgaggttgagaggctacaattaagac

SEQ ID NO: 78737 - DNA, 392 bp, Zea Mays
tccgagtgttcaagggagtgtaggcacttgcttggaggttctgttgaaccttttgggcattttatcgggtctttgagagttggtagattttttttcgatgggagacagagcgacatctgcaggttttgtcaaccagacgagatgtgtggcccacgagcaggagttaatgtgacgggacgtgatgcccatgggcaatctgttgtcgtacgtgtgcacgtgggattcgaggaacaaaatcaacttttggattcgacattaactgcgaggagctcgatttcaatctcgtcggattcgtcggttccccttcctcttttcctctacatatttgggaggggttggctgtggccttcaccccgcgttcgcattcttagcctcaacctcctatgtttttt

SEQ ID NO: 78738 - DNA, 483 bp, Zea Mays
gtcaaaagaataaaatctcctgcaccagttgaaaaggcacataccggctatacagtcagcgcagcaacgctcagccttcaggtaacgcagcgccggctggacctgttcgactggcgtcatcgaccttccggcgacgggttcaacaccaaacatttctacgtacttccttgatgcttccgttcggaaaaaaaatccctttgactttgttcggctcaaatgattgttcagttgaacgagtttttctcgaccacttcccgcgaatagaaaccgtctacggagtagtaccaaacaaccatacgttatacgtacgtatcttctttttctactgcgttgcgttgtgttgtgcgaatgaacagtccatctcattccatatttgatttgctctaccacttgagccacacaacgtaacacaagtgtttgacttcttgttaggctgtctccctcttcgctttctccttttagctcgggaaaatctcgttctcg

SEQ ID NO: 78739 - DNA, 1064 bp, Zea Mays
agatgtgttcaaggtatagggatgatgcatttaggagtcatgtagggctcagagggatgacatcactaaatgttatcccttactattcaatcccgaatgtcgtaagttatataactccgaaggttgcaattattttgaagacaatcattgtactcttcccattgtgagttttcctaaagtttcttagagatgtttttaacaaggcaataagtgcaatacatggagcaacactatatactctttattcatttccccactgattttcagagttttaacgaggcatgagttagtcatggtattcacccaaggacagtattaagaaaccttatgaagggttatataggaaaataccaaatgtacccctcaggggctctacttttctatataaaaaacatgtgcctcttcattatgaataacaagagaagagatcctccacgttgtttttatctttttgtatttatgctatcgtgggaatgaaaatgagaaacaagtattctacatcttcttcacgcatttattgctaataggagtgtttgggatctagatttaagatctgaatgatgctattacataacatatccaacctctcgtccacgcatgggccaagcccatcgttcacctcctccctccccacgccgaaggccacatattgcacactccctccctctaagcttggaccacaattaggccaaggtcatcacactaagatccctcctccactcccctataggcttgggtaacgattaggctaaggtcatcaccctaagaccacaagacatccccacatatcactccctcattaggtcgttgcctcctagtctcacctctgcctagaccaagtggcccaaagtcccacttggcctctcacctcttaacctccctctttcgcttacacatggaacccaccaatcaaccacaactccctcccttttttcaataggagatgtgtgatgacactgtgggcatgtgcccctatccatggtcgagcctccacacgacacccaatggacccatccttatacgacgtaccctaccccactccttgccataccttggcacatgac

SEQ ID NO: 78740 - DNA, 491 bp, Zea Mays
ccgagccagccgaaaccaaagaagaggcggccaaaaaccagagctagaaaaagtaatagtgctgccagaaatcttgagcccaccggcagaagcagaattgccgaaggttgcaaaggttcccgcaacaactcccaagagaaggatgacaagtgtgttggacgttgtcatggagacgacaagggcattgactcctgcgcctgcaagaaagattaccgaagttgtggcggctcgcggtaaaaccgaagctgaggccccagcgcccatggaggcagagcctgctgcaactgagagagctgagcaggaatctccagatactggcataactctaaagaagtatgcgacaggaaaagctaaatcccctattcccgaagcaccgtccaaagattctgactttattatttgtcatgtttcgagaaaaaagttatctgaagaagaaattatggaagccaaacactacgctcggaaactgaaatatccgaagggagccttcg

SEQ ID NO: 78741 - DNA, 594 bp, Zea Mays
tttaaatcattgctgacttgagtcgattgctccactagtagggtatagtggttcccctaagccgagtcagtgtgagcatgtagcatcgtcttaggtcgtcgtcgacctaagccgactgctccgttagtagggtatagtggtcaccctaagtcgagtaagcgcgagcatgttgcaccgttttaagtcgtcgccgactcaagccgattgctccgttagtagggtatagtggtcaccctaagtcgagtaagcgcgagcatgttgcaccgttttaagtcgtcgccgacttaagcccattgctccgttagtagggtatagtggtcaccctaagtcgagtaagcgcaagcatgttgcaccgttttaagtcgtcaccgacttaagctgattgctccgttagtagggtatagtggtcaccctaagtcgagtaagcgcgagcatgttgcaccgttttaagtcgttgccgacttaagccaattgctccgttagtagggtatgtggtcaccctaagccgagtaagtgcgagcatgttgcgccattttaagtcgtcgccgacttaagccgattgctccgtcagtagggtatagtggtcaccctgag

SEQ ID NO: 78742 - DNA, 784 bp, Zea Mays
gtctaggaattgttaaatgtaatttttacacttaaaaatatacagaagtatactacgattattaatttcaaatggaacttatgttgtcgattgctcaaaacaatcaataaataacatctcttaagaacttcgaatacaaatatgttcatacaagttcatggcataaagttgacataatttgactattacatatcaaaatttatggcttctccttgcttaaatacacttaccaatgttggatagagggatcatattttttccataggtatctatatttttctccctctctagctataacactcatgtgtgtgcaatattgatatatttcaaagcacagcttaacttatagtgtttttagttgtttcctatgtctccacaattgtggaaaccttgatccttgatggtgggtgaaggcttctccatgtcacgtttattgtcaatgtgcttgaacaaatgaagatgcatggtggcacatatgatgaatatttgttaagtgaaggtgcttctcaatgtcaaaccaggctcgataggatgtcacaatgacctttttccgtccatttccagttggcagtcatcgcatgtatggcaaccattggtcaactgttaattagtagcttattggctccctggtggagcagtttgtctttcttcctctcctgattggtactccttactctccctcctttccctcttcgtcatcgtgtatatatgtggtgcaccattttaggcacgagcttcagctgccgtcgactgtctcaattttctatcatttggccactcctat

SEQ ID NO: 78743 - DNA, 464 bp, Zea Mays
gtaaagatcttggcgctagataaactcggacccgatcgacggggagttcgccgcacccacttggattgcggtcggctgaattggtcctcgccggcgctggccgcttaccgaccatgcgccacgtgcccgggcgtcttaccacatcgcagtaggtcgtgttaagcatatccggtgatcgccggtgagtccgccacggtgaaagccactaatcgattgcgctagtgcccctcctcctctccgaccaccgcgcgtctccatcaaattcaccggccaccgttcaagcacactataaattgcacacaccctcggctccgctaagtagtcaagcacctaatccagcaactcgtgcctcaaatcatccactagagcgcgccaatttcaaagttcccccaaatcggtttccgccaccgtgaaagcgtcctcgccgtggctagcttgttccaggtctgttcgtgctccctggt

SEQ ID NO: 78744 - DNA, 797 bp, Zea Mays
tgctccgttagcagggcatagtggtcaccccgagttaagtacgagcatgttgcaccgtcttaagtcgttgccgacttaagtcgattgctccgttagcagggcatagtggtcaccccgagttaagtaagcgcgagcatgttgcaccgtcttaagtcgttgccgacttaagccgattgctccgttagcagggcatagtggtcaccccgagttaagtaagcgcgagcatgttgcaccgtcttaagtcgttgctgacttaagccaattgcaccattagcagggcatagtggtcaccccgagttaagtaagaatgtaggtcgatcatgaacaaactgagtattcttgaagcctttttttattgatgacatatttcccattttacagagtacattgtcgtcccgatagcttttgaaatacaactagggataacatttcctgaggtgctctatattccaacagttcccaatttccgtgccgtccatctgagtgagacgatatgatcccggccaagtgacttctgccactatgaatggtccttcccataggggtgacaacttgtgccgtccctcccccgttagaattcggcggaggacgagatctcccactgcaaaggatcatcgtcgcacgaccttgtcgtgatagcgtctcagagtttgctggtatcgcgctgattgaattactgtgttcaaccgttcttcctcgagcacatcaatatcctccagcctagtagcttcagcttctgctatgctctcaaagatcaaccttggcgccccaaacttgagatcagcgggtaatactgc

SEQ ID NO: 78745 - DNA, 543 bp, Zea Mays
cggatatgtgttcctgagattgacatcctccgtgagactacattgaaggaagcccatgactctgattattctattcgtcctaggagcactaagatgtatcaagatctaaagcaaaagtactggtggtatgggctaaaaaaagatgtggctacacacgtggctatgtgtgatgtgtgtcaaagagttaaggctgaacaccaaagaccagctggactgttgcaccctctaaaggtactcgaatggaagtgagaagaaattggtatggatttcattaccgcgttgcctcgcacctcgaagggctatgatgctatatgggtgatcgtgtatagattaaccaaagtggctcacttcattctggtcaaggttacttataaaggtcctcagttggcagagttatatatggcttgaattgtgtgtttacacggtgtaccgaagaaggtcgtttttgatagaggatcacagtttacctcaagattttggaaaagctttcatgagaacatggatacgaagttgagtttcagttcggcctatcatcctcaaact

SEQ ID NO: 78746 - DNA, 858 bp, Zea Mays
taataaatttattataaaaatattttcttctcaaatgtaataacacttattagtcattatggacactgatattgttttaaattatatttgcttaattttattttttaaaaaaaaaaactttcttgctctaaaaatgatatgtatgtttattttaggacggagggaattgttccatatggccgatggaggctatatagggatgcttatgtttgagtgttgataatgattattactagactccagcaacccatgttatattgtttatccattccaaaaaaactgtgtgttattagaacgcttgaatctgttttatttgggttgaattgttccaataataccttttttctattggattcttgaaatccgataggaccagcatcatctgaacctttctcccgttcggtgaaaacaaaacatgtgcgcggggccgcgggtgcatcggatgtgttatcagtcttggctggagccacgtgggcatgtgttttcgggtggagaaaataccgcacacctgtggggtctgtgggccaaaaatcgtgggaaagaacttagaaacaactagtaaaagatgtgcgaatgccataacccgtctatcccaaatactcacatttttgtcgtgcctgcaaacccgtaccgtttgacgcctctgtcgcgctgtgctgccgcggcaatacgtgcctcgtgcttgagaatgattgagatcccgtgcgcccatcagcccatgtgggaaggcgaactaactgcttgtcttgttggttctgctcagctcttgtagcactaggcagctgtgctcccccagtcccctcctccctcctcatgaaacgggcgggcgatgattcctgggcatgtgctcgctcgctc

SEQ ID NO: 78747 - DNA, 627 bp, Zea Mays
aaataattgatttccaaatttatggtcggatttatgttatacttatactctaaagttttatataaaagtgagggcaaatttgcaaacagatgataataagagggacaatgatgcaagagtaagaacgtctttttatgggctgagttaacaccgttatgtgcttataacggaatagcagcaaacgaaggatttgtttcaaaaaagggggcaacggtgcaaattctggaaaaatatgggtaaaacggagtaagagttatgagcaggggcaaccatgcaatatttttgggtacctctcctgccagcaccaaaagttaagaaacagacaaatgttttttcaaaaaaatagtaaatacagaaggccaagatactaattaattactaacttgttgggttggaagtgccaaaaatgcttgtgaggtgtacattgcatgcattagcagaaaacagcctagaatgtgacaatgccaatctggaatatgctaactgccttaaaagttaccagagaatagacattcacagatgttgtcatcctgtgactgccttcttgaacggtcttatcctcagtttcttttcatcatactccacttctgtctctttttttgggaaattgtgagttactgtaatgct

SEQ ID NO: 78748 - DNA, 893 bp, Zea Mays
gtctaattaaccacacaagctaaatggtaaagacgccgggtgtgaactactagataaactagctcacattgaatatagcatacatagaaataataatatttggaagctaagagtttggatgtctgtagcgggctaatgcagtgtcatatacctgcttaatgccagattagttgctatatgcatggcaacttcaattcataaaaaaactcatgatagcagcagttatcttggttgtctgaacaaacaatccagcagaacaattatttattgtatgacttacaaattttttttaggtgcagaaattcaatcccaggataaataagcaggaaaataagtgaagtgatgatctttgctggtaggaacattatattgaattgggaaagtaacatatcaacctacgcatcaaattacttgtcaaagttataacttatataagtaacaaagtgagagcttagacctcgttaaatttttcttcagcgaaaagtagagtagcatcacccaactttttaataacttcagcactgcccttattctttgttcctttctttcttccccttctcttgccctgataaaaatgaaagaaaatgaggaaaaattactaatttattaatgctataaatatgattccaaaaagaagacctcaactgcattgaacatagtataacacatctagtgctataatctacaaaacaaccgctttccagaagtatgataagtcaaaaactgtttgggcaaagagcttaaaacagctaatatatcttcaaatataactagaaatgaaagggaatatactaaattcaactgaatagaacgttgcatgaaaaacaacaggcaggtaactcagtcagttccgaaacacttttagaatatcaaaatattattcaggttctagg

SEQ ID NO: 78749 - DNA, 524 bp, Zea Mays
atttcatctttattgagtagcaattcttgaagctctaggtttctttccttttcaaggataagcaagtcttcttgagcatcaagagttgcttttcttttatctagcttctccattaatttggtgataacattgtacccattcaagccaaattctttaatcattttatttttcatgacaatttgttcatcatcatcatttggaaaatcattactaaataaggttaccttatctccttttgccatgaggcaagttggagtgtaggagtcgtcttgtaggttggtgaagagttgtgagcttgaagtagattggatggtcacgtttgccaccacttcctcttcctcggagctagaactctcttcatcggagttccattcttcaccaatatgggcttgaccatatttcttcttcttgaaatatcccttggtcttgcctccctttttgaacttgtccttcttgtattccttcttggcttcttgttccttcttgttaggacaatccactatgaaatgaccggtttggccaca

SEQ ID NO: 78750 - DNA, 672 bp, Zea Mays
tttggatttattggtgtggattttattttataaaaatataatgtgttgataaatatattttttagaaatgtgttctatttatggtaatatatttttggaatttttgacctatatatattcgaatatttaaaataaaaaaacataaaagcaaaacacacaccgtgcggcataaaaaagggaaattgaaaacaatatatatatatttgacaccaacgctcagcttccaagcccgcacactaaatcccatgcctcgttctttctcccttacatgtgggcctcatcactttcttctctctccttaattattttctcccacatagacacggctcaatctgctcgtctgctagatcggacgtacgcgctgccgctggttctcctgcccatggcattcacgttgccgcacagcccagccgaaacatccgcgccctctctctccttccactcggcaccacctttactgctagccgtttcccgcactcatgtcgtgccattaatagtcatggtcgagctcctccgtcggcatcctctccactcctctcgttgcgtatatctgcagtgccgcaggttcgcctcactcttctccctgctcgcccttgctgctctctcctcgctcttcgctctccactttgttgccgcgctcgccacccgcaaactgccgctgccgaagctctc

SEQ ID NO: 78751 - DNA, 499 bp, Zea Mays
gcaaagtacaatggagtcaccatggagaagatgaagctacttgggagagagaagaagagcttcgcatagattttccccatcttttcactcgttcctcctaaatctcgaggacgagattcttattaaggggggtaggatttgtgacacctaatttgtaagagatcatattaaaaggagaaaagtgttttcctttatttatatgtgtgtatcgcatccatttgtcatcacatgtgaacaccacctttaacaaaaaaacaagtaataaaaatatatatatcactaaaccatggcatcatgttggattttgttttttgtgcattttgtgtcaacataaaataatttgaagaaggaatatattaaattcccaaaatataatttggaaaataaaaggagatcctagaatttgagaaaagagaagaagaataccatacaaaatagagagataaatattaaagaaataataaataaactcatctcatgccatgtttaagatgtatat

SEQ ID NO: 78752 - DNA, 385 bp, Zea Mays
agtgcgagctcctaaagcgctttatctccaagccgcttgccaagaaggtgaggccagaggagccggcaaaaccgatagagcaagaggtccccaccgaagatttactcgagccaacggggtgccacatgatcttcggcaaggctgaggcttacgacaacaagcgtcacatcaaggccacccaccggtaagtccacacaacagagccaaccatcccacgatatctttggtggctagagtttcatatcattttcgatcgctgcgaccaccctacagcatcccgcatcctagggcctacccccttgccgtcgatccgattgtagcctctaagcgcctcaccaaggtgctcatggatgggggaagtggcctcaacatcatgtatattgag

SEQ ID NO: 78753 - DNA, 450 bp, Zea Mays
ggaaagtatcgaaccgacagctggagatgtggctcttaaagactctcttaatgaggaacagagggccgcctatgataagattatgtctgccgttgacaccgatcagggcggattgttctttgtggatggacctggtggcaccgggaagacttatctatacagagtgttgctcgtgacgctacgcaaccagagcaagattgcagtggcaacagctacatctggcgttgcggcttccataatgcctggaggaagaaccgcccattcacgcttcaagataccactcactattgatgatggcgctgtatgtagcttcacgaagcagagtggaacagcagagttgctacggaaagcatctctcattatctgggacgaggcttctatgactaagagacaagccgtggaggcactggacaatagcatgcgcgatataatgggtcgcctcgcactgcc

SEQ ID NO: 78754 - DNA, 563 bp, Zea Mays
tttatgggttggcttttgatgaaaatgatatcttattgaacctttttaaagaaacaaatataaaagatgctacttctagatggagcaaaataagactccagggccagatggactcctagcagagttttactaaaaaaatttaaggacattatcaaatatgacttgctacaaatgttcaagaacatgtataaatgtataggggtgaccggtcattgtttggcttgaactttattataatcacttgtatccttgaactttattataatcacttgtatccctaaggtacatgacgcaaaactaataaaacaacatagacccatttgtctcttgaatgttagttacaagatcttcaccaaagtagctactaacatgttgaatctagtagctaacaaaatagtaaagcctacccaaaccactttcatgcaagaacaaaatatcctaggagaagtaatcctacaagaaacaatccatgagttacacagacaaaaagatagatggggtaattttcaagataggttttgataagacatacgataaagttaagtggctttcatgtatcaaac

SEQ ID NO: 78755 - DNA, 492 bp, Zea Mays
gccgaagaggcaaagaattgttactgtgacagaagtcattgaaacaacaccaccaagggtttcagctccgaaggtgccggctattgaaagcacgacagctactgaagctgtaccttcggaggccgccgcagaagaggccagagccgaagatgccaaatccgaagatattaatttagagagcatagctgctgatatagacaaaatgctactaaacatggccacggaagaagctgtcgtagccaccgaagagactacggccgcaaaacccgagaaggaagagatgaccgaaaatacttcggaggatgaagcttttgactttcaaaacttagttggccaagagctgacaaaagctgagaaagaggaattaaaagaatatgctatatcctgcgggtatcggccgggagcgcttctcttcggtggcattgatgacgaagggttaggctgcatacgagatcagactggcgcgaaggttatcggtactctatcaaagag

SEQ ID NO: 78756 - DNA, 722 bp, Zea Mays
taagttcatcaagggcttcaacttcattttcaatatgttcgaaggccccggagatatcttcggtcgaagggttaatttcttcagaagtagctccaaccgagttaaatattccctttagccgattaatgcaccgagtggcaaagtcataacacttgttccgaaggttctcaatagcttcgtgtagcttcgtatttctttcagcttcagctttgacctttgctttgagctcttttgtctcgtggtcgaagcgatgtggcctttcgtttaaaattgatcgagcttcgtatagctcctcgctcaacttattattctgagatcgtgcttctgcgagggagcctttggctgattgcagcatgatgtctttttcctttaaagaagtttcaagttccttgattttatcctctaagccttcaattataatttcgttccttctatcctcagtatcctgctgcattttcaaggccttgcttaataacatgctctgcaaaacaagttaaaattagaacactcaatccaccacaaaggtaataaaaaaatctagagaaaagtctcaccttgaagttggaataaaacaggctaccgacaatatgttgtcgtcggtagcagctaatgtcggtctccaacttcacgaatccaacactttggaatagagtgccgacaatcttcaccccggcgtggtcgtgaatgcatcctaagatttccacatcgaccacgctgaagag

SEQ ID NO: 78757 - DNA, 350 bp, Zea Mays
gctgccaaaggagaagcatcatcgaaaacaaagttaccatggtgaaaatcgtcgtaccattcatcttcattgattgggctttcttgacgaagctccctgtgttggggccttcggtcttggccatcctgagtgagatgatgaatttcctcagctgtttcatcaatcttcctctgaaggtcggccagtcgaagcattttttccttcttcctcagtacttgctggtgaatcgcttctaagtccctgatctcctggtccagttcctcctcatgaagtgttgggctagtagcctttctcttttggctcctagcttctcgcagggagagtgtgtcctgatttgtgtccagtggctg

SEQ ID NO: 78758 - DNA, 320 bp, Zea Mays
ttaagctaatgtaaccaagtcaagaaccctaaaaccatggaactacatacctcattgcaatacaatcgcattgcagtgaactgaaaacatctaattagataaggcaacaatattatacatacaccaaagataagtactggacagatcagatttcaatgtatttgtgtgcaccatcaaaacctaaacctgaagctatttttaaatacatgggagatgaatttgcatcaagagtgtgttcatcaatggaacgctacggatctggtagaacggaaaagttctttcaccgtaaacctaaccctaatggaatggccgaaatacgg

SEQ ID NO: 78759 - DNA, 294 bp, Zea Mays
tcgcaaaaccaggtccgcgatggtggtcggtgacgagcacgtctccggtgagcctatactggccggaatatgccaagaccggacccctaacttagccggcactgaattctaccctcggcgacactaacccctcattcaattgcactaatccggtctagagcacgactgttcacggtgacggcaaaacccgagaagaagctacggtgttctgggcaattcggtacggtctagttcaatcaatcgagcctacaagcaacaggagatcctagagatgctagaacattcaacagaggg

SEQ ID NO: 78760 - DNA, 1241 bp, Zea Mays
aataccaaagtaatagaaaaccacaactcatgtgtttctcacatttgaggatttgcaagtcaaattatgggatttggacttatttgcaaaagggtaccccatgaattcaataagactaagtctgaaattcagtgcatagggtcaactttggaaccctatatctctcaatttataaagaatttgccataggtcaacacatcaggattatagagctactataggcgcataactttgtttaagtgattaaaccttggtgtcatacaaaaattggagataaatagtcctaaagtctggctgtcagttaactccaagtctgaatttttactaatagtgacttgggatgaactttgagggctattttgagcatgatcgagtaagtatttaagggtgattgctatagcaagattgtagccgggtcatagggcaaaaactttgttacaggcggattaacaagatgtcatgtaaaaatctgagatcggggccctacaaattggtgtgtcaggcgctctgaataggatgccaatggtacaatacctgacaaaaatcacagattcagctcccctcgctgctggtgaccctcgcgccgtgatccgtgctgtcgccacgatttgtgttctctggcgaggagattatcacggcagggtaaaaatcttggcaccggataggctcagacccggtcgacggtgtgctcatcgtacccacttgggctgcggtcgggcaaagtggtccttgccggagttggccgcctatcgaccgtgcgccatgtgccttggtgctctaccacgtcgcagtaactcgtcttaagcgtattcgtttgtcgccggtgaccttgccacggtgaaagccaccaatcctttgcgccagtgctctcccctctctctgtccgccagcgcgccatgccaaattcaagagccaccgccctcgggccctataaattgagtgtggcatcagctccgctaggtagtcaagcacccaacgcagcagcccgtgccttagatcgtccaacagagcgatccaatttcaaagttcccctaattcagtcaaaactccgccgtgagtgagctcaccgtggctagctctttacaggtccgttcttgtcttcgtcgctctcgtttcaacatccctgtgtgctgtagatgcttagcagcccggccaattgaactagatcacgctagatcaccaggaacatctcggattgtcctcggtttgcgccatcaccatggacagagtgattgtgagcc

SEQ ID NO: 78761 - DNA, 312 bp, Zea Mays
gtctggtccctgacagaaagttttactttctttctctatgttgtggcgttatcaactattcaccagtggctatttgtcatatatattgcagtggtctgggtggtcttaggaagaagcttgccggtcgtttcaagtcgaagcgccctcgtgcagatgatgcagattataatccagctacagactctaaggctcaatcctcagctggggacagcatctctatggacacagaggatgttccacatgctcatccagattatcccatcgacatcacaggatggacttatccaaagagaagattctctgtggctgagt

SEQ ID NO: 78762 - DNA, 490 bp, Zea Mays
ccccgtggacgtcgagcagccgcaacagagctccaccatgcgggcaccgagcagacgagcaaacacaggtccacccccaaatcgaggcacttaggtcggcctcgcgggactacgttgctgtccaggtccagatgagactcctgttctggctctggctcctatttcagctagcggccagccgcgagctccaccaacgtccaggcccaactccgcccgtgttccaggcttccaacctctgcacaacatcgtaggccttcaacgtgcggcgcccaccgtatctgcgtgcagactagggacccagacacgaagaatgatgaggtggatctggtcgtggaatctgtcatgccttccgaggtgaggtgtttcctattgtttttgcgttttgctgctagtgtcgtactgccgtgtgaagtgcaagggatagcctctcttctcctcgtggtatatctgatagggacgtaagcttgaggattcaacctaaagatgagct

SEQ ID NO: 78763 - DNA, 329 bp, Zea Mays
ggctaaccggcgctctggccggccaagaccaaccagtggtcggcaccgccgtcctccttcaacctccggctcctaggcacaaacgccacatcctccccagtacgctctctctctcccgatgctccaccggcgaacacacagaccggaccagaacacgacaccgccgttccccagccgatcgacgcacacgctatctgagccctggagtcgccgaaggaatactacatgtataggtgaataaatatacgcggctgggcaaaagaactcacccaaggtccaggcgccgcagtcagatcggtggcgaagctccagtctagcgaagattccgc

SEQ ID NO: 78764 - DNA, 487 bp, Zea Mays
cacaatcacccaaagagagtcatacccagtagatgtgctgggtagaccaacgatgaagtccataccaatttcttcccacttccactcgggtatctttagcgggtgaagtaaaccagcaggtctctgatgtttagctttcaccctctggcagacatcacataatgctacatatgaacaacatgtctttttagaccgtactaccaatacttctgcttcatatcctggtacatcttggtactactaggatggatgcagtaggctgagtcatgaacttccttcaatatggtttcgcggaggctgtcaatctcaggaacacatatcctattcttgaaccagattgtacctagatcctcctccatgaagtacaaacctctgccctctaccataatatctatgatctcttgaatcttggcatcaccaacctgagctttacatatttcttgttctaaggtaggttctactcctatggttactccctctatgtgag

SEQ ID NO: 78765 - DNA, 296 bp, Zea Mays
gtgctccatcgaggaagatcggggtcaccgtgacacaacagcaagtggatccagactgaatatgataccaaatgttagcacacgaggagggagaaggataggtagaggatgacaagttcggtgtgaagaagaagataagggatggagacgacggcaaccagccaaattgttgtggtttttggattaatccatcgatacccacttacaaagctagggaaggcttataagctccacatacttggcccaacggccccaattacacaaccccattcgggcccatatactctaatgttgcc

SEQ ID NO: 78766 - DNA, 755 bp, Zea Mays
gtattgtcggtgtctgtgacccgactatgcaccgcagggttacccacgtgatgcttttggataggacaacgtcgttggctacgacttgatggtatgtgcaggggcacgtcgattttgcacgaaggtttatacaggttcgagccgctttagaatacgtaacactctacttcctgttgaggccgtgtattggattttctcttgagaatgaagattaaaaatgagccttgtgggtgcttaggtgttgttgatgaggacaggtgtcaagtgaaacgggatgatatgagataattttgtaggatcccccctcggtcttatataccctaaaccctaaatcctagaaatcttaggcctagaggcaaaggaacgtcaagagcaaaaaaaaattaaaaaaagagagaaaattatctatggcacactgagaaaaaaatagtgctttcaattttggaacacaagaaataacactggttaccgggaacacatcgagaaaagttagggtttctttttatcagtggcgattaaatcgtatcttttttgttattttatttatcgacgcacggctctctttatttaataaaacatgagggaagtacgtggtaatgctcgtgtccgtgttcctgttttggtcaaaggaagcaacgcaaaaaagaaaatggctggattccaaaacgtacttgtcggccgctactaataatgtagtaatgcttaacgaaagcaatgggtgcgtggacacgtgcttttggttgggttgagcccag

SEQ ID NO: 78767 - DNA, 488 bp, Zea Mays
tgaagggcaagcattaggacttgatcgagggagtagagaagccagaggactaggtgtgatggttgacacatggggacactgacaggcgtgaggtcatattgaagcagaccatgtcatccttgtggtccagaattggctggacacatccataatatggggtatgcatatgaagtatgctacctatggtggtttggtggttgaacctcaaaaccacccagcaactattttgagggtttggcctcaaaacctgaggcacaatttcggtgggaatcgaaggtggcacatggatccattgtggaggttgtgccgaggaaaagcaaattcgtgacgggggcacattgtcagatctatggtttagaagatggactattgttccttgactaagtggtttaactctagaataactaggggcatgttgggaatgtgaaatggcctctataaataagaggagggcttcccccaactagtttgtaactgtttagttttta

SEQ ID NO: 78768 - DNA, 1068 bp, Zea Mays
aacaaaggagaacaattttgcttaagagtgcaagccatgttcttgtgaaaaatctggagataatcatgctcaaaatctggctgtcaggctgttaaggtctgaattttcagactgacagtggactaacatcaacttcaagctcaattctgagcatgatcctgtgactgtttgtggatgcacgatgtatcaaagttggagctggtctattaagctataattttgttgtagagtgttggtcacgttgctatagaaatctgagaggaatttggccctgaactttgactgtcaggtgcactgaatcggattttgccatggtacagtgacctgataaggatcagaacgccagcgcaaaatgctcaccgccggcgacctctttgtcgggattcgtgccacgggcgtatggatttcgttcaccgggtaaatatctcgtcgtggatgtgcatgagctactgtggcctcgttgtcccctgccccttttcaccggcgacgtggcctcatggtcgtcaccggagttgccgtgctttactgcggctgtgccacactccaagtcttccaccacgtcgtccctagccgtaacagctcaccagtaaccgccgtagctcctcaaccggtgatcaccggaggaagcgccacggtgaaagccacccatcccttgctccagtatcactgttccccccggccgccagcacgaccttgcgaaattggacaccaccatcgatgggacttataaattgagccccccctcggcttcgccatgtatcccagcagctaccgcacacacctgcatcccaaatcccccactagcgagcacaaatttcggattctccccaatccggttctagaacaccgtgaactcaatctcgtcgtggccagcctgttctggtaaaaatctgcccaattcaaaccttgtttaagtgctctcgtatgcttgtgatgcccatcgacccacttaattgcacggagtagactctggtcgcctggaacacgacggtatagccgttatgcacacggtcaccgtggccagagcaaaccattgggccatagatgaaattaggttgggggaaatgc

SEQ ID NO: 78769 - DNA, 314 bp, Zea Mays
gtggttcttgcacatctcctctagtcatcctcacctttcctacccttgtctttctctcgatattgttcattgtccgctaatcagtcattctcattgattgtcgtccatgagtcgttctcattggttgccatccatcgaggtgagtctcttgctattgcacatattcatctccacttctctagctccaaactccgactatgtaggtatgattcctaactctatccctaaatctctttgattcataatatgaactctaaccctagcttgttttatgcctaagattggtcgatgcttggtgtgtcgtactagtgcca

SEQ ID NO: 78770 - DNA, 446 bp, Zea Mays
actacaacaacaggtcaaaggggaagtgtgactgctccgaatgcggtaagactggtcatttataccaaactaccccaataatgatgataaccaggacaaggactagaatgggaagggagtagaaaagaagacattctacaagaagaagaagggcgaggctcacattgacaaggagtgggactcagactacaactcctctaactccgacgacgaaggcctcgccaccattgcctttgaaaaaacatccttgttccttaacgagtgccacacttgtctgatggcaaaagagaagtaggtattttctagagacactcccaagtatacttcttctagtgatgtgtcaagtgatgatgaggaggattataacaacctatttaagggccttgatagatttaaaattgacaaaattaatgaattaattaactccatcaatgagaataatgaac

SEQ ID NO: 78771 - DNA, 486 bp, Zea Mays
aaaaagaggaggcttcggcgagtgtcatgtttgaatcaggatgctggcccttctgttcctgctgctgaagaagtactagtggaactttttacttgggctgaccccaatgggtgtgaccttgatgatgctgatcccaatgggtgtgaccctgctgaagctgaacccaatgggtgtgatcctgctgatcccaatgggtgtgatccgaccagagctgaccccaatgggtgtgttgttcgtattgttgacgaggatgaggaagaagaggaggaaatccccttaattcggaaaaacagtcggtgctacctagtcagtggggagagtagtgatattccttctccagctttgtctactctcgttggtctgcaagagttgtccatagcaaattttttatcaggctctcgaggatatggttcctgaagatctgctgtccgagccaacagatagtggtatgatgaacgtttgcactgacattccggatgtggggtt

SEQ ID NO: 78772 - DNA, 552 bp, Zea Mays
cttagataaataatctttagtttatatttatgcgtgcaatataattttctgatacagttgtactgaaaattttaggtgataagagttcaagtcaggagcgtctatatattgaaagccgtggccgccaatgcgcaactccggcgacgtgagcacgcctcaaaccagcaaaggagagaaccagaacaggagcgctcaaactcacagataagtttgttagaattcagtttctatttcttttcttgtctccagatccactccagattacagtttttatagtcaagctaataaggccgacccattattacaaggctaattagccacattgacacccaaatcccggcttaagagcccatttacaattccacaaatcagcacaaagattcaatttgccaaaccagtagcagtactaacacttgcccctctggaagagcttgattgtccccagtcaagagctataggataccgattcttcaacacttcatagtcctcccaagtggtaacctcagctgacaaattggaccaagtcacccttacttgcaccacaggatggta

SEQ ID NO: 78773 - DNA, 532 bp, Zea Mays
cagaaaacgaagccatgacagttgccttcggtgctcgtgggaaaaagaggctgaacagggtctttgatgttattgggtttgtttacccagattactgttttcctgtccgaaggcaagggggaaaaggaaaattgctacttcaacatcttctagcgcgccacagccgaagagagccaaggtcttgacacgtaggccgaagcctattaggacggtcgatgtgctaaagcttattgaaagtgcagaggctgcccccttacccatagaagcagcacctgcgatgccgatcgaagctagtacaggcccagttaaagagtaggaatcagaaaaggcagcagaacaaccaaagatactgagcccaccagctgtaacagggctgcctaagccatcgagcactacaacagtgactccaaggaaaagaagaatgactagcgttttagatgttgtattggaatctgtgaaagcgccagtttctgcttctgccagagcatctggtgagaaatctaaagatgcaagagaaaagattactgcaagc

SEQ ID NO: 78774 - DNA, 459 bp, Zea Mays
ccatctgactgtgcctttcgttctccttcaacagtggcccttccataggggtgtctgtgtctttcgtggtatgttcgttgtatgttcgtgctgcaatcatttgaattatgtgtttgcagttgggcatttgatccccaaggaggcagtaaacaacactacactgcatgtatttaagcgagccaacaaggggggtatcctttcactgtccataattcaaatgatttcagaaaaaaccgcaactcgtgcgcttggttgatgtcaccgttgcactaatcttgaaaccaacttcagtagttctaccaataccgtctacatgagcaagcagacacctaatattggaccaatacttttggtcgtgattctagcaacacaactgtctctagagagtctagatgcacttcaactgtcccaaaaatgaagcaagaacaaatccacttctaacaaaaaacagggagacaa

SEQ ID NO: 78775 - DNA, 798 bp, Zea Mays
gtgatggtagcctgggtcatagagtgtgaccctcttctgaggacattgaggcattgattgctccactttggagtcttcccgaggctgagaggctaacccactttgagatgccagctagcactgatgatgccgagatggatgttgtgcttagcctgctggctggggagtcgtccgactctacccacaccgagctgatggctatcacgatgggcaagaatttgatgaagaagtggagattcggaaacccaaaggtgcccacccaaagcgttgatgtcgagtgaaccgcccgactgcacctatcgaggagaaaaagaagaggcgacttcagcgactgtcgtgcttggatcaggatgctggtctttctgtgccgatccttgacgatgtcccagtggacgccattcccaagtttgatgccaaaagcagtgataatgcataggctactggtggcattttttatgaggatgaagaggaggaagaagaagaaatcccattgatccgcaagaacagccgtttctacagaggcagcgaggggggtagcgatattccctctccagctctgtcggcacttgtcagtcttcaggggcttttaatatcagattttgatcaagcactggaagaagtcattcctaaagacatactatcggagcctcctaaagatgatgtcccagccatctgttcagaggtcccagatggtgggcttccattgcttggttctatcgggcaagaggtaaccctagtggtgtctcgcgcatcgtcatccttggagggcagtctcccatgcaaagacactgatccggg

SEQ ID NO: 78776 - DNA, 386 bp, Zea Mays
gtggagaagaaattgttttgtcaagtattaaaaggggtcaagtttcctgatggatatgccgctgatatacgacataatgttcttgtcaatgaaaaaaagatagttaatcttaatactcatggcaaccacattcttctacaagatttactgccacttgctgtctggagagttctccctcaagaagttagtgttgtgctgattcgtttaagcacgttctttagaaaattgtactctcctgttattcgaataagtgacatgcaaaggttagaatctgagatagttgaaatcttgagccttttagagattattttccctccatcatttttaccatcaatgtacattttatggtacatcttcctacccaagcaagagtggcaggcccaatc

SEQ ID NO: 78777 - DNA, 283 bp, Zea Mays
cgcccccagcgcggcgaccgatctcgaagcgtgacaagatccccctttgctgctgctgcccagccggtcgccggaggacggtgctcgccggcgcaccagccggataattgttgagatttgtgttgcgcgagttttcctggtgcttcgattgagattgatcggtcgaccgatcggtttggttggctccttttccgttttatttttctgcccgttttccaagctgttgcttgcttccgatctcacttttaccttctgtcttcgtggcttcagcccctactaccac

SEQ ID NO: 78778 - DNA, 842 bp, Zea Mays
gacccggttgagttttacatatacaacaagtaaaaaggagacgaatggatctgaatggatcacgatgtccaagagcggggtgaattgggctgctctaaaaattcttgcttaaaataagttcaaattgcaaacccaacatgacccgagtgcccaatgtgtaatcaaaagttttgcatcctaatgttcaactttatactatcatagtaatgttaaaaatgtaaattattaaagtaaattgcttaaaagtaagtgtgtatagtaaagcaaaggttggaagacttttctgtgttttcccgatgtcttggagagttagcaatccccactaatcctaattagagcactcgcgctaggtgttgccccccttggtttgcacaagaactaagtgctctatatgagtcagttcttcattgccccgacatggtgaactgctcacaaccatgtacaagtcttaagtcgggtcatccacaatcactctaggtgatcactgtactcttgatcgccattgaattgtctaggttatgtcggtcaccaagagtagtaagggcaaattctcacttgactctaccaagctcaataggatcaatgggcacacaattactaccttatcgctaataatgctactaaacaagcaaattacaactcttaagtccctcactaggaaatgactctttcttacactcaatatgggttgtttcagttattcaaattaaacaagagctctaatatgggctggttggtgggatatttgtagccataactaactaaccgttacagtaactctagcaaaattcatgaccattggaccatctgatgctcgcccattggatcataccacattatcc

SEQ ID NO: 78779 - DNA, 796 bp, Zea Mays
gttaaactaaggactgaatcaagccttaaccacacaaataaagttcaatataatgaggcccatgagcttgggtctgggcatgagctcatcttatgaagagtttgaactgagcacatcgagatcttttgacagaactgtatatgaactaaacaggcactacacttctatgagtatgacatagagtaaatcaacaattcatatttttcaagcctatttccagaactgaaagcctgaaactaccacatcattggtcttagccttgacagataacaatactaggtgtgccttcagatttttcaaacgtgacagtaatcagaaaagattgtgaacattattttgtatctcactatgattacaggaactaacagttttcaattcttcacccatgaacttgacaatggcccagcatgtctccaatttctactgacaaaccatgttcctctaaagcgcagggtgactgagcgagcagctttttctgtccatggctcagcctcagcttcttcgctgcacctccctccatacgcactcaacctccgcccactaccccttctgtgtccctcagctctcctttgatgagatcccctccatggtggcggcaggagctgagcagcctctagactggtgcaggccctgtcagtgtcagcccaatttctgcctccatgggggctaagaaggggagacagcggccagggaagcacgatcaggtgtgcggtagagggcacgaggtagacattgatttgacctggcagcagcacgcagtgagattggatcagagggatcagtggtagaagggcaa

SEQ ID NO: 78780 - DNA, 768 bp, Zea Mays
ccatattaaaagaacgaagggggttcatcttttaatcctggccgtagattcgattatctacggtacagatcacaaccggcaaagggggcatggctgttttaatcagaaccgtcagcctagatctaacggctgcgggcggtcatcaacatcacgaccaccagagcggcggcgcatagccctagcacggcggaatcacaccggcggcaggaaatcggttgcccaagtgcccaagtcagcaaaacgatgtaagaaataggtagagaaaccctatgcgaacacgatggaggtatcacacacctcaaattgtgttgtgccaagccctatcgacgacggatggcggcgcaacgacaatggacaactccggcgagtaacctgtggctacctggggctctattccccacgaagcacgatactaggtgaccagaggaacatggcaacgctaggggagagggtctcaccgggagtgaaggtggagacgaggccggacacggtgtgtggcggaacgctggcatcgaagtcccaccattgagaaattatgtagcctcgggtccacaatcccaccaggcgaggccatgattgacatcccggtggccatagtcatccgcccggcccgcccacgagggatctccatcggtgagccagagtcacccccacggcggacatctcacacacagcttcctcccatggtggtcgggtataggtgacgatgtccgccagtagagccccacggcagcggcagtgggacggctgtgcaccagagaggcgcgg

SEQ ID NO: 78781 - DNA, 332 bp, Zea Mays
ggatgagctgtttttgtagagatacccctccaccttatatagatgaccagatggttatccatttacaagtcgtgatcactatctaatctacatatctcctcctttatcatggcatgtagtcttgtttatccagagttcaattgcttcctcatccgagctaacaccgagtgtataactcttcaggtgcgtgcaacttctttatccgagatatcagtgattcggtctgcgcctaactcggacgtccagttcccaccttcttggatcgaattcgcccaacctagacatggcctgatgactcgtcccacaaagcaaaccactggaagacccatcag

SEQ ID NO: 78782 - DNA, 415 bp, Zea Mays
gaccaagaccaagtcgacgactagtcgactgagaatttccagttgttgacaagttgcccgacttgccagaaaattcgagccgaccccaagtcgagctcccaggaccgactgtatggctagttgacgacttgaaaacatggcttacaatttaaactgatacaattattacatttagcagttaaataggttgatacaatggctgagtggccttgaattgcatgcatgtatgctctgtaataaatacttttctttgatgttctcatatcttgtcatttgaatgaaattcaatgacttcttgcataataatatgtggtgaaagcgtctctagctgagttggttagctttcgtgatatttcttggtcggagctccaattaagtttcttcttgacataatatcgttgggggtggtgtttcc

SEQ ID NO: 78783 - DNA, 698 bp, Zea Mays
gatgaatctaatgaatttagtgcgatgtgctatagttgtctttaactctatgtagcttatgtgaggcacaaaagaagtttggaaaaagccatgttcacaaagatttcaagttcgagagtgtctggagggtttaaaagtgttgtactgtgagtttcagggtccttggaccaatggtgatggtcgcctctacgtggacaactagcgagtgcttgattgtcggaccctatgaataaggtcgctagaccatcgtggatgagttcaacggtctagaaaatcacattagagagctctagggtgcgttatattggttcgttgaagggggtagaccatacagtgcaaatcgttactgtagtacatatggttcttcctacaatagcatcaaaccttataagagggttttcgttggaccaatgggtcttgatccaacactatctacgatgtggctagaaaggttttcaagagcatcaaaatagtttgaagatgagccttggaccacacgctcggtgtagtacacttcaactatgtcttccatataaagtatatagttacccttgtgactcattggaccaaatagaaaggtcgaacagtggggtatccggcgatcaaacgctcatggattttgtaagagctagttggtcgattgagggttacaaatacatctcaaacttgtccattccagcactcctgcctattttaag

SEQ ID NO: 78784 - DNA, 624 bp, Zea Mays
aaggtacttaagcacaattttgttaattgagggtattaggtttgaggcctagatcccagtgaacatgtagtgtctagttagaggggctcaaaacttagttagcagaagtctcgtttttccattgatcctcccacttgtgtgacctatttgggtattttgcataacttttatggtatatcatccttactaacttttgtaagtaatttagtgttctacaacttttattaatggtccatgctccgataatgtagttcatatagttttcttgcttgtttcatgttggtgtttcttttgctcaaggtaaggtgtttagagttttgactactttcttccccttttttatttgcatgaggtgactaaggtaggtcattcaaaatgatttgtacttacttagggccttgattcttaagtgtggtatcttttgctcagttttacctacatgtgataacagagtttgtgaaagtgctgagcagagaccctagtaacacatggggtgttacagcccccttccttaaaagaattccgtcccaagttttttgagtgaggatcctcaggggtgagaaggctggtaactactgcttaaacagagtgatacacctactgagtggtcttcggaaactagct

SEQ ID NO: 78785 - DNA, 618 bp, Zea Mays
acaagggtgagaagggcaagaatggacctggagacggcggtccacggcgcggcgtttacggtggcgcgggaacccgattttggagatatttcaaattgaggagctatggtgaacgattggtggtgagggctgattcactgggtgcataacaagctaaaggagcacgttgagcactcaatttatagagggcgaccgcgagtacgatgaatttggacggataagagcttgcggtgagaagagaatgagtcaccggagctatctgtattggcgctcaacggcacaatcactcgaggatggtaattctaggcttgccacggttacggttacatggtaaaaggaccacggcgtggcgcaaccctggaggacgacgtccacttcggcgatggccgctcggccatgtcgccggcaagtgggttcggggactgggcagaaacattgtcccaagttcatcccccgcgcgaaatcttttgccgctagccattatccacgtaccacagcgcatgaatcgcaacgccggcaagaatcgcggtgcgggatcaccggcggcgagttcactgaacctggattcttcttcaggttactgtaccatcagaactccattcagagtgcctgacagag

SEQ ID NO: 78786 - DNA, 378 bp, Zea Mays
cagtgaatgaaataagcgacaatgcaagctagaatcagctcctgcattccattttcatcaagaggatctgatccggtgctggtgaacctgttgtcgttgtctgcatgcatgcgatgttctctcacgcagtaaaatggagcagagagagatccatgttgtgatgactgctttctggagttaccagaggccgtcttagtcctcaaggagctatcagcggtatcgaattctgtatcaaggctacctaccagacacgtagcgcgctaggattcgatgacaagaatagcattcagtcgtgggagatgctagtgcatgcagtgactgctgcgtgccttgcctacctaccttgagaaagagaaactgtcgtgacgctcagtgtct

SEQ ID NO: 78787 - DNA, 474 bp, Zea Mays
aacgcatcatcgagcggagttcgtggagcgtggtgtattccatgctcttgaagacgaactacgccggatggtcctgatcatacagtgaatctgcaagcacggagcctttgggaggctatggaactccatcaactctgttcgcgtgggcgcggagggcgccaaggatgcaaacgctgacatgcttcgtaaggagttcgccgaccacgcattcaagccggaaaaaaggataaaggaatcggaacgacgattctacgattggggtgtgttccccttgctcaacacaccgatgagctcctccgcggctctccacgacgacccggcctcggccacggcctcccgcgctttggctgccagagcagacattttccttgcggcctcggcgcccgtctctccggtcatgaggtcgctagtcaccctggcaatctgctcgcttcgggccatcccgctgaccgcgtcgcttttcggtggcaccct

SEQ ID NO: 78788 - DNA, 853 bp, Zea Mays
gagaccttgaggtagacgaagtctccttcttcaaatctgagctctctccgcctattgtccgcataactcttctgccgactctgagcttcaagtaatctcctgcggatcagggaaactttctcttctgcctctttgacaaaggcaggtccttctagtgtttttcccctacgttagaccacatgagaggtgtctggcattttcgtccatacaatgcttcgaatggtgacatcttgatgctggcctgatagttgttgttgtatgagaactctgtgtagggtagactagattcccaacttctatcgaatgctagcacacatgctcttaatagatcttcgaggactttgttaactctttcggtctgcccgtctatctgagggtgataagcggtgctgaaatctagctcggtgcccatagctttctgaaggcttgtccagaatttggaggtgaactgggttcccctatctgacactatctttcttgggatgccatggagtctgactatctctttgagataaattcgggcaagggtggctcctccaaaggtagtttttactggaatgaaatgggctaccttggtgaggcgatctattattacccagatagagtcattccctttttgcgtctgtggtagtccggttacaaaatccatgcctatttcttcccacttccattcaggcacggggaggggttgtaataggcctgcaggtttttggtgctcggccttcatcctttggcaggtgtcacactgggccacatactgagctatctctttcttcatccctctccaccagtatctagttcctgggtggatggagtaggctgagttgtgagcttcctcgagcaggacctctcg

SEQ ID NO: 78789 - DNA, 622 bp, Zea Mays
atttgtcacacaaagacatccagcagccgcagccgattggatcgatggagagatgcaataggatcggatactgatgaaattgaagttaccatatgcggaggagtctctttctttaaatcttggagatgtgggtggagcattccccctatttcgctcttagaatcgatgcacacaaccacagtggtttctcatcccacccaaaatacatttttgccctttgcatgctcgcctacggtagtgttgttgactctattgatgagtatttaaaatggagaaatgctcgaccttggaatgccttgaacatctgtgtagggttgtcatttcatattttgatgaggagtagtcatcattccactattgatgatgttaggcatctattagttaaggggagaggattttctggtgtaatatagtgtatagattgcatatattagaactagaggaactatcatgttggatagaaaaggcagattattaggagacattggatcggcaactatcatgctcgagatggttgcctcgcatgaatcatggatttggcatggttgtttggctagtggggtcaacaacaacgtcaacatgctaaatgaatcgttgttgtttactgacatgcttaggggag

SEQ ID NO: 78790 - DNA, 306 bp, Zea Mays
ccggaagttgggaatgttcggtttgccagatattcttgtaccaaatctctcgtgctgatatgctcagccatgaccctaaattccacttcagctagctggcaaggagaccccagctgcatgttgcacaggggccgagtcatgccgaagtttaatcgcagtggactcatcaccatgctcataagcttttcccttttcttctcgtctgccttaacgtaaaaccattcactcgtccagccagtgggccacttagtccagtagcctatcactggggccttcatatcctttcggtatgcaaagttgtagctt

SEQ ID NO: 78791 - DNA, 975 bp, Zea Mays
gttcgttcgaggcaaaacagaggtcattatgcctattgcctctaacctcgtgtatcctggctaattgtactgtatcgccgatagggccgatggtgaccagggactggtcgcactacctgagggtcggcgagcggctggtcctagcaaggcaaaaggtcccgctccctatggccttttgttctccttaggtttgagccccctcccggatggtgtcgttatgcgtaagaattctctgagtaacttgtagtcctcatagccatgtcagactgaatgctgatggttcggacattcggcttcaaggagcttttcgaagtgatcaggggttttctcagctggaggccttcctcacgtccagcttatcgtagccgccgatacattggctcattttcatcaccctattctcctcttcatgttgaggtgattgtcgacatcttcatctggacccctatcacgcccagtcttccgtttgcgactaccagtggtggctctctctacgtcctctcttgatgcatggcccgtcgcaatgtcgaaaagcttctttggcgtttgtggggtcttccgtcccagcttatgcaccgaggttttgtcggtggctccctaggtgaaggcgttgataacgttggtgtccgtgaggttgggcaactggttgcattatcgcgaaaagtgtcagatatagtccctcggtgcctcgtccgactactgccaacaatcgttagggtcccatgggtttctcgggcgtacgtacgtgccctggaaatttctaagaaaaatctcttctaggtctacccagccctagatgcacccagggtcgagggtattgagccaggtcaacgccgaacctactaacaatagggggaggttctggattataaaaccatcgcaattcgctccccgcgcatgacacacaagccgatagtcctctagctagggaccggggttcgattccctagtgtacttcgcgatagtgagggcctg

SEQ ID NO: 78792 - DNA, 1856 bp, Zea Mays
aatattgttttcattgttgtaatctctggatcacgaggtgtttcttaccgatgccattctcactgacagacacggctcttcaattgttaacgtagaagtataggatggctgtatcactatgctatttctgccccgggctcacaacacggtcccggatgcccgtgaagcggtacaagaagatccttgctgaaatcttccccaaaacacaggtcgggacatgctgtgtccgttttttccctttgtcgaatatgagcatgttgacgcttgaactgtgttgcggatttatttatttaatgagcatgtttgtttcggttgcaggatgaagagcctaacgagagaaggattgggaagttgtgcgagtacgcttcgaaaaaccctcttcgagtgccaaaggttcactccccttgcttcctcattggaatttcgttgtttccatgccaggtgtggaggttctgaccttttgagcgaattgatcttgctgctaaacttagacgacccttcagaatacagtttgctagctttgtagcttctgtagtactgattataaatgcaatcgaggatcgagtggtataacttatcttgaaactggagatgcctcatggatcattgttctaggcctctaaacttaatgttttcagtatagttcccttgtctccttggtgccctcatttcagagtagtagtccttgttaaacatattgtcaggcatgattgcctcttaagcaaattcaggctctgtaagcttgctgtcttatgcatgttgatatctgagcagatcacagtttacttggagcagcacatttaccgggacttaagaagtgagcagtacggctttgcaaaagtggtgatgttgatatatcgcagactgtcggtttcctgtaaagaacagatgtgagtcttcttttcaagtttctcttgctcatatagccctgtattctgtgaagttaatatttttatttggtttgcaatggatacttcttacactttgttattacctttgctggttacaaatgaaattgttattttcttaattcaggcctctgtttgcaagtagcctattaagcattgtgcacactcttttagaccaaaagaggcaggacgatttgcgcattgttgggtgtgaaaccttgtttgattttactgtcaatcaggtattcctaatggactagatgccaatgcccgttagcaggattaagtttatataggtatgtcccattattggtgatcttgagtctgtctattccaggtggatggtacatatcagttcaatttggaagggctggtcccaagactgtgtgaaatagcccaagaagtaggagaagatgaaagggcaagtgccctacgagcggcagccctgcaatctctttcagctatggtaagttctgtgattgcgccttatcaaactgatgtcatatgttagcatggctttctaaaagttttggataaattaataagaaaaaactcagtgtaagagagctgctatgctcatatttccaagaggaagttaaagcattcttccagcataactctaattcacagtttacttaatatcttatgatgcaagcaatgaaatctcaaaggcaataagccaataagtactcgtgcgttgactaatttcatatgcataacttatatgcataagttatgaaactaaacctaactcagttgtgtgagtgtggatgtatgcctatatcactcaatttcaaaccctatttgatgcaactttcactcctatttctgctttattaattaaacatgacaacatgtagttcggcggaggtggattatgtattgttgtaacttctcatactccctccagtcacacatgcatgtagttttggacatcagcatgttgat

SEQ ID NO: 78793 - DNA, 454 bp, Zea Mays
ccatcgccagctggtggtcttcctgggaggtcgcccaatcatactcatggttttgtggtgatgagatcgagctttgggcaggggggttcggttctgcgctgctctggtggcctcaccggtgcttgggcttggcgtcgttgtggccgagtacttggggaagaagatggtcccctgggacattggatcggacgatagcagtctagattaggaacacgaatgcctctttgcgttatataatcctggccactggattttgatcaacggctcgggatgcgaactacttcgggcccttgatctctgatcaaacggtccgcacgtatcaagtaatctgcctgcagcaaccttgcaaaagagcccctgcgctttttcgtatttaacctgccgtccaacacaaggcgttctagtctaggcgagttttataatttagcccccgtgcttctctgtattgtgcgcg

SEQ ID NO: 78794 - DNA, 598 bp, Zea Mays
cgaaagcctacgcagctcagcccaaaaccgccgtgcccaccgacacgcggggcctgccctgtcagccgctcataccctctctgtgccatatgaccggtgggacccacgtctgggcgttctcctagctcaggttgtttctacgatttctcgggcgcagactcgtggggctggccagattcctctcatcaaccattacaagcctgggaccgagccttccccttgactcatggctctcaattgtggctggggtcctcttccacgggtcttcttccacaattcatggtaacagactccaatagaagatgccaatcacgcgcatgcctgcgatctggtggattgggttgtgagattcctgatcccgcctctgcccatataacgtagacgcaaaaccccccaaccctcatcttaggcgccgccaaaccaccgtcaattgagcaagcatcgacgagaatagggaagaagtacatgaatcaccgcgggtccatgcggtggcatggttgggagctctgcgctgggtggattgcggtgagtaccttctcgggtgattggtcgttgtctctgcttcgcattgtgccactcggacctgggattggggcac

SEQ ID NO: 78795 - DNA, 588 bp, Zea Mays
taaccttgaaatatattacataaaacagttatatgtggtattattcattacaataccaaaatcggcatagtttacaacactatgcttataatagaggttacggcactagaacacatgccaacactaacccttcgtatctgtagctatctcgaaaacatcactaccacctggggactcaccaccacccgacacaagcataggggttgcttctatgtctaagtccgcgttggactcacctccatcagctaacacaacaccaccctccgcctctacggctcctggtgcatcattttggtgtagctggtggacttcctcatgtagctcatgggcataatcctctagatcattataagctatcaccaagtcttggaagcggcccatcaagtggttttcacgggaaaaggatgccacccttgaccgaagtgttgctgccaagcgctccttctgcttagccacctccttttaaagttgtttcttctctgccaccagctcaagaatatgagctgcgtctagacatcgttcgttaaaagaaacatccaggcgctgctgtagcttctccacctgcgacggaggcgtacggttgatgct

SEQ ID NO: 78796 - DNA, 450 bp, Zea Mays
tctctgcatcttctgctcgagcaatcatctgacggtggtgccgagccaagaaatcatactgtgcatccagggtgagcaggtatgcagtgaggtacacgactgtggggtcaacctcaagcaactgctgcccttccaatgcacgcatcctggccatccaaactggacggtttctctgaaagggcagaaagaatctgagcggtgtgtcggctacttcttcttcatagatctgacacagggccctcaatgccttgcgagcgacgacttggtaggtgtctttgaatctgtgcctagcaacagtgacactccattccgtatggcgcgaactggatccaatgtatacagtcatgacacacttctctgtgtcatgctcgatgaattcatgaccatcatactctggctggctcctgatttcgaggcggactgtgcatgctctcagcaacttgggtaaac

SEQ ID NO: 78797 - DNA, 603 bp, Zea Mays
gtctgaatccctagctgatggacccaagagagaatcaaggcagcaacccaactttcctttatttataaaaagaaccacatcacagttcgcacagacatctcacactcattcatctccgtcaaggcacagacatcgcacatacatttcaatgctaaattacaacttcaaaattgcatgcattaactatatataaatttcaacaatacctatgctatcctcaaatatactgggacaaattttaactagaattgcataatttgttcctttgctaatagaaacagaagaacacgcactgcatactgaacatccccaaaaaacagtagaactaggaaaatatactcgagcataggaaagatgaagtaaaacgaagagcaccctcaccggatcgacagtgccaccagatgccgggacataatcttcgcgcagtggaactccagacctgcctgcttcacaacaggttgctgtcgccggacagcgaaaatggatcccgtcgggacctcctcgcccttcgccgtagataccgttgcatccagctccaccacccccggccatggatcccgtcggaccttcccctcctccaccatggatcctgcagcagccaac

SEQ ID NO: 78798 - DNA, 374 bp, Zea Mays
cttacctctggcctggccagcaaactagcggaaggtgcttcatccgagcaatctatgaggacattggtaatgattgttttaggtaagtcaagcatcagctcctcaggaatggcctcttcaagtataccatcgacaatggacatagacaaaacttggatatccaccatcctcgctgggacaacaagactcaaagtatcactctgagccttggagagtcgttcacactgaaccaaaggaagcacatcctcctcctcttcatcaacatcttcctccacctccttcgctatgtacctggtccttttcaccacacctccaccatccacgacatcctccaaaccagtatccaccacatcatccctgaagttcggctcagc

SEQ ID NO: 78799 - DNA, 486 bp, Zea Mays
aacccaccacaatccacgcgagtacaagctctagcgtatctagcatcaacgcgtgtgcggccatcagggctacgacagtatagcaagccttcgtaataagcgcaacaggcacaattatgactcgataattggggtacacgataaatccacgcaatgtgcgcaacatgcgcaattgtggctcgcgacagacacacagtgcctacagggcatgcaaaaaatacgcgactcagcgatggcggtctgactcaatggaagcgatctgattaatgaagagcgcgacatagcaatcacatgacgcagccaagttcgaacggcacaaatattgtgtcgtgttgccagggcgcagtcaatattcagctaatgtcataactcagccgattaccaacgtagcctgatcggcgtgtctgagtacccattatacaatttaatcgctcgacgtgagtccaaaagctcaacacatcataaatatttagagcgatccgagtc

SEQ ID NO: 78800 - DNA, 1055 bp, Zea Mays
ttttcttcagatcggtattcacttggtcaatggcatactgggagagatggttgaatttattgagatactgcattacagtatctctcccttactttaaccggatgaactcttcttgtttaatatggagcaatccttctggaacataatgctcctggaatgctagcttgaattcctcccaagtaacctgatgcccggctggttggattgctgcaaaatttgcccaccaagtactggcagaccctctcagctgttgtgcgacaaacaacggtttttgtgtctccgtgcatcgaatcaacccaaacttttgttccataactctcacccattcgtcagcttctaaaggttcttctgctttgatgaagagcgggggtcgagtctcagagaattctaaatatgtagtatcacgcggtccttgaggaggagctcttcctccgtgctgttggaactgattgcccgccatctcgcgcaagaagtgtgtattatcagcggtggcattgaccagagcagcgatagcctcggccaaagtcggtggtactggtggcgggttaggagtatcctccctaccgcgggaagtccccgcaccatcatgtgcacgagtccttgatggcatctgaggcaaagaaacatttggaaacaatataacatgccagcatacaccatcatattacattaccaaaatgtaataattatatagactccaacgtacaactcgactttattacttattttacataggcataatacttagactgtactattctagtcttcttcatcctttgttgctccatttcctgttgcaggagaccgttcgtcagcaaggttcatggaaggagggggcctaaaaaggtccaactcctcatcaggtccttcagtcactgctcccgacagtccggctcccattgcagcaacgtcggaaggcatgtccgggtgcagtcaagcatacaatacatgtacttctttatgtaaagtatttcagtacacttgcatgcttttgagggacgcactaagctctgtcacatgagctagagcttttgtttcgcggtcccaagcgatcg

SEQ ID NO: 78801 - DNA, 578 bp, Zea Mays
gtttgactggtcctcaaaatgccatgaatccttcgagcacctgaaagtattattaaccactctccggtattggctcaatcagatatagaaaagccttttgatgtgtattgtgactcatcaagcagtggactcggatgtgtcctaatgcaagagggccgagtcatagcttatgcttcaagacaattgcgccgacatgaggagcattatccaactcatgacttggagttagctgcagttgttcatgcccttaaaatatggcgtcattatctgctgggaaatacttgccatttatatatagatcataaaagtctgaaatatatttttacccagtcagaactgaacatgaggcaaataagatggcttgagctgattaaagattatgatttagaaatccactatcacccaggaaaagccaatgtggtggcagatgcactaagttgtaaggttttttgtcattgtcttacagtgaggacctctgacaccacactatgtcaagaaatggaaaagttgaacctgggtatgatacaacatggaactttgacccaattaaagcttgagtcagttcttctacaaagaat

SEQ ID NO: 78802 - DNA, 360 bp, Zea Mays
tagggaccagaatttctcaccagaattggggccttccaccgcgaggatgttccacgccatggcagagagtccgtatcgatctccatggtagaaagaggtatgcataggttagttgtcgtcttcacatcctttagcacgtgtcggatttggggaaatgcattagagcctcgggttatggacatcggccatggcgccgccgtgttgggcagggtccaccaccgttgccagccatgaggaaggtgaggctctctccaccattgatctggtgatcaacgatagcgatcagaatgggggctgatgcttgggcactcttgttggatggctttggatccataaccaacgcactgggttagatcgtga

SEQ ID NO: 78803 - DNA, 637 bp, Zea Mays
gaaaatgaaaactttattgatgactgattctccaattacagagtacaatgttgctctgatagcttttgaggccttgctaagggtaaaaatttctaagatgctctatgttccatgaatttcccacttccgtaccatccatttgagtaagccggtatgatcccgaccgagtgacctctgacacaatgaatggtccttcccatagtggtgacaacttgtgccatccttcccccgttagaattcagcgaaggaccaagtctccctctacgaagtatcggtgtcgtatggctttattattgtagcgcctcacggtctgctgatatatggctgactgaattattgtgttcaatctctcttcctccagcacatcaatatcctctagcctggtagcttctgctttagctatgctttcgaataccagccttggtgccccgaacctgaggtcggtgggtagcactgcctccaaaccatagagcataaagaacggggtatttccatgcagagctcgactaggttgagttctcaagctccaaaccacatacagcaactctctgatccactttcctgcaaacttttcatttttgtcgaacactttcttcctgagtgcttccagtatcattccattggccctagagatggc

SEQ ID NO: 78804 - DNA, 485 bp, Zea Mays
cgacggttatcggcgagctggtgcggctagaagcaacgtggttaaaggcctggggcatggcacaaccgcggtgaaagacaccaactccggtgacggccgtaaagccacgtcgccggtgcaagcgattgaggaacagcgaggccacattaacttgaacccatcctcgacgagatcttttcaccggcgaactcaatccacagaccagacgcacgaatcgcggtgagcggcacaaatcacggcgaagggtcaccggtggctagttcactgaatctgttgatcttttggttattgtaccatcgcaaagctctattagtcagtctgacagaccatcttgtagggcttgaatctcgatttttcatgtggtgacttcctaatccatctttaagaaagttgttgctctactatctagcttcaatcttactatagcagtcgctcccaaattcttactggatcatgctcgaatccctgctcaaaggtggctcaat

SEQ ID NO: 78805 - DNA, 359 bp, Zea Mays
aaaatatttggcacaagacatgacagtttaaggcagattcgaaatgaagccgtagtgtagggtttcaaaaatatggcaatctgcagaccattaggccgtaatagtttgcagtaccatttgttccactaaatatcaaggatattcagcgggattaagagtaccatataaatttaaccctaaaaggcacaccaaatccgtggacttgtttgcaccggggataaatcgtttgttctcggatgtaatgaagaacggttaacaggattagtcgattcgtgtactaattagttcatcaaacaggggcgcatgaagtacagaaaccataggagacgaagggcgtacctcaagatccgaagatttcg

SEQ ID NO: 78806 - DNA, 728 bp, Zea Mays
atcactcacaaccatgtacaacgtcgatccgagttaccaccaagtcctctgaggtgatcatcgtgtttcaattgccaccatacaggtgatgccaatcaccaagagtagcaagctatagacattcacttgaccatgctttggctctctcttgcgccaatgaggccttaacgacgggattataattttgctaatctcctcactaagcaaatgggtcttgcaagctctagcaataaataccaagtggttggggtaagacacttaaatgaggatgttggaaggggtataaatacccacaaaccaaaatatagtcgttaccgttctgcgtagtcggcggacgcaccggatcagtccgatgcgtcactcgacagggtgacatcacccaacggctagttctaacaactagccattacatagtggaggtctgccctaccagcagggccacacctagacctaatcatgggccacctgattcgatcgccccaaaagaactcggtccgacccgacccgccccgattcgatcgccccaaaagaactcggtccgacccgacccgacccatgcagcgggcgggtatgggccgtaaattttgacccaataattcatgggtcgggtattggccatgatttttgaaacaaaactcgacccaacccaaggccaaaaacctgatcccacccaaaaaaaactcggcctgacatgtcaaatagggaggcacgggcccccgacactacga

SEQ ID NO: 78807 - DNA, 680 bp, Zea Mays
tgagcgtagcgagtgtgcccctaggccttgtcccctaagtagcgagtgtgccctcccttttaaagccaagggaggggcacatacatgggtactaaggagccccgacttgtgggctttagctgtataataaatggagcatggagctattaatcctctggtccaaggtcttcgcttggtcatcgtgtggattccctgccttgtcttgccatcgtcttgtctcgtcagcgtgcgagcaaaggcaacggtgtaggctgcagcataggctagctcatcgtcttgcatagtggagcaggcggatggtgttgtcctatctcttttgcacatctcttcacctggtgttgtagtgggaacaacaagggtcatgatggaagttacccacgagcgttgcagtcggtcaacggtatttacctctataacacgcgggttactaatgagtcccaggccttgcagactgcacacgccgccttcttttaattcgaggcgtacgtcgcatgtcactggtgtgaacaggtgggcgtgctgcccatatttaatgcaggcggccccctatgtcagaggctcacaccaagcgacgcaggtagcttctgcaatacaccttgggccacgtggtagcaccacacctccgccaatgcgaagagcaatggttgggaacgcatgttgacgtggtggctctagacccc

SEQ ID NO: 78808 - DNA, 596 bp, Zea Mays
tgaactttgcacatattgataaccttactccgagtaattctacgtgatgtttccaaaattctaactagatactcataatatgttaagtcttcattaacattcagttcttccatgggtaactgctcctctggtacccttaagcatttcttgagttgtgacacatggaatacgtcatgtacatctgataaacggtcaggtagttctaactgatatgctacttctcctttcctttccaagatcttgaatggaccaatataacggggagataatttgcctttaaccttataccttctcattcctctcaccggggaaaccttaagatacacaaagtctccaacttcaaaggttaattctcttctcctattatcatcatatcttttctgccttgattgtgatgtttttaaattctctctaacaatcagcacttgcttttctacttcttgaagaatttttagaccaaacacatgactttctctagtttgattctaatatagtggtgccccgcatttccttccgtagagtgcttcaaatggtgccatctttaaattcgcttggtaactattgttataggaaaactctgcatacggcaaactcta

SEQ ID NO: 78809 - DNA, 560 bp, Zea Mays
gactcatgagtttgcacttgatgtttcttcttttttgctcttccttggatcatcctccttccatctcccatctcctaccacgagtggtggtgcgtggtgccatgtgagccttctctcatctagatatactctcatgctactactcgtgttgccctcatgctcagagaagaagaggcaagtgaaattccagctccatcacaggttatgacgggttgcacatctaggctcctttgaatggaagccaataacaccctttttgtagctggtgaatggtgaccatgacgaatatacaatacttatatatgcgatttgtttttgattgacatgcttctttattactacaatttatgaaatctttgatttgtgtcaatgtgttatttctagtttttattgaacatctaattgttattgctacaaatcaaaacgttacttgttagttatttttatgattgttggtacttatggacattagtagctgtgctattggatgtggattacgcattgggcataattactcgtgtgaatgtaggcataggtatgcacatgtatgggtattttaa

SEQ ID NO: 78810 - DNA, 753 bp, Zea Mays
ttttaaactaaaaatgacgtttccctaaagtcaagggcattgtattcgcacgagagcgtattagagtacaactagtgcatgaagacgttattgggctagctaatgaccttttgtgataccaggtttcctacaatcccctctattcaaggcatacctagatggtgtttatgtccactcaagtaaaacaccatacatcattatgccgcattgtttctcaaaatataataaagaccacaggaaatttatccaaattacgtaagagatctgtccaaacatagttgaaggttgtaagacaacttttttcaccatacagttgctaaaaagttgaaatataaataattcaaaacattagatcaactttgaaactaaaaatagtgtttctatgatattgagggcattgtattcacacgagagggtattagagtacaactagtggatgaagacgtcagtgggctagctaatgaccttttgtgataacaggtttcctataatccactatattcatggcatacttagatggtgtttatgtccactcaagtaaaacaccacacatcaatttgccacatcgtttctcaaaataaaataaagaccatggaaaatttagccaaattgagtgagagaactgtccaaacataggttaaggttgtaaggcaccttttttccaccatacagttgataaaaagttggaatataaagaattcaatacaacagatcacctttaaaccacaaatgacgcttccctgatttcaaggg

SEQ ID NO: 78811 - DNA, 519 bp, Zea Mays
ttagagcagagcacgcaacagaaatgcaatttcccaagttcttgtcggtagcttcaaaactacatatggatcagattactatgcattggctttcccaagttaattccaaatatgttcctatcacttcccttgcaattttaattcttgcaatgttaatttggaagccatcttacgacgactactactactactcatgtgcacattctttgctactgctattgcccattgtgctgcatctgctactgcatggactagggggctggagttcatccgtggagtttatttaggctatagatggcatacaggcttgcaatctggagtttatgaatgctttgctctgttttaggctaggccacaattcatattctgtcgtgatggtgtagaagatatatgcaactctagattgatgcttctaatagtagatctgttatactaagtatgttctctggttttataaaatttgtagaaaacacttctctctagccatctatatctttttagccggtaacactttcattt

SEQ ID NO: 78812 - DNA, 417 bp, Zea Mays
ttctcctctattgctctagcaaagagcactaccaacatatcagcaacaatgttgaagagtatcggtgagagaggcccccccttgtcaaaggcccttgtgtgtcgagaaaaagggtcctataccatcattaactctaacccccacgtgacctcccgagacgatattttggatccaagcgcaccactttggtgagaaacccttcatgcgcatagcttgcaggagaaaattccactttagcttattataagctttctcgaagtccaacttaagaataattccatctcatttttaacctatgtagctcatgtacagactcatgtaatacaattaccccttcaagaatattacgatcgggcataaacacagtctaagagggtttaataattcgatggacaaccacacctattctgtttgtga

SEQ ID NO: 78813 - DNA, 659 bp, Zea Mays
ttcagctttggaagcagccacttttcggccacctttatctcaaatattcataaagaaccatttaacaacattgaatacttccttctaaggcttctttatgtcttcaacatccatactgaagtcgtctttgctgattgccttgacatggtcgcaacctaccttctccagcacagaagccatgccgcaagatactatcatggcacagtagtcacctcgggcattaatgaaaccttcaagctcccctttttctttctccacccaagtaagagctccaccaacatctcccctagaataagagtcctctctcgaagtagcgccaatagaggaaaacaccctttttagatggtcacaatgacgagagtcaataccgaagcaattatcctaaagatggctcaaacactctagcaacttcatgttttcctcgcccttggcaccaatttcttccttcgccttttcaagagtgacacgaagctcttcgacagttttaccttgttctttaatctttgccatatcttgttcatgtgtttttctgcttccttcttagcttcagctagagcttagcttcaaagaagcaatttcaccattcttttcctcaagggagccctaaagtttctctacttcaccttcaagctccacaatagctgattcgttttcaatat

SEQ ID NO: 78814 - DNA, 1023 bp, Zea Mays
ctcgatagtcgaagtagccacccttggtgggatctcatcaatggaggcagtggttctggcttcatcgctgtcgtccccaacccccttgcctccaggtgctgcatgagcgaccagtcaatctggggcagcgccgcctctagaagtaggtgagtccctggaaaatccaccaccgaccatcgttgtctctgcatttgcagggactgcgctacctatgctaccaggagagggctgtgcggatcttccctcttccaccttgaagtgccggggacagaggagtgaaagctcatcgagtcatcccggtccagtcctgagcttgtagaccattgatcatatgctcagtagcttcagggaagtggtttcccttgttcgggtgtcaatgacgcaagattttatcccttatgtctagatgagtgctccttttcggttttccctcctctttccttcccaccaacatttagttgattgcctgcttttcttcttgtagcatctctttatgcggtcgatggctagggcggaggagttactggcccaccagcgggaggagaagctatgtacaggggccacctgttctaaggcgaaggagcacgagcttgctgagcttcgttctgaggctgatcggctccaagacgaggtgacacgcttgcacttggagtgccacaatgcttggggcgacgtggatcgcctctgggaggaggggtcctaactctattggaccctccgtgagacgagtcttcgggcagaggaggccaagtcgtcccttagagaggctaacactcgcatggagaaggtgaacttggagctctagaaagagcacaacgtagccggaggtcggtccttttctcggcctcttgtcttcgttatctggtcctcgttgttgtcttagccctttccttttcccagagctccagaagatattctcccaagcctaggagcccaagaaagcggcggaagtggtgaaggcagcagtggaggccaagatgcaacagctctcgcacgctcgtagtggcaccattgctacgacgg

SEQ ID NO: 78815 - DNA, 400 bp, Zea Mays
atcgagactgtacttggctcgtcgttgcaaatattcgatcccatagtaatgtgatatgcaaatgctgtacaacagtacatggcatttgtgacaccttgttcagttctttcctgttattcctccctggcggtctgtttggctagtaaaatatcgttgaatcgaatctgagtaaagctatttcttgatggaggtgtctgaatagagatgagcgtggaatatttagtcagaacaacaccatggttaggttcatatttggtatggctacacgtgtcaaataagtacgccgagttcaattccattttatgtcttcttctacaatgccgagccaccttgaaaagccctagactaattgcgccacattgatatgagctagtacattatggagcttgatgttattttt

SEQ ID NO: 78816 - DNA, 2493 bp, Zea Mays
tggatccaaggctgagagtagccatcatcttcctttggtgggggaggaggtaattgtatctgtgggtgtatttgctggggggtggtggtagttgtagcctttctgggtgtgctggtagggattagtagtttggcgggtattgttttgtagtggttgtatgcttcttgatgggggtgatggaattgtggttgaaaggtgtggactatggccttcgctggctgctctaggtgatccctttgtgccttttttgtgtccatcatttcttttacgtccttgtatgtgcgatattctctggttgaatgaccaatactttcattaaagatataatagggcctgcattcatgtgctgggccaaattcgtgtcccttgccccttggggctctgccgcctcttgctagttggtaaatgtggtcgtaattgcgaggggtgtctttgggttgttgctattgttggatgttgtggtcttggtttggcggtggaggctactgagctcataaccatgttttggggtgtgctggcagtgaaggctccttcggcttgcgttgtgcctcgattttgcagtaatggaggactttagatcttgcatacttctcgaatagctggtagactttttgcatggttgatggaggatctcaggtacaatgactgtaccgatgacccacacggaggctgttgattgcgtagtggatggcgattccatcttcaacttatggtagatggcatttgatcgataagaccttgttgtagtaatcgtgaaggatttctttttcaaggtgcctgcatagagataactccacgaggacatccgtctatggcctgtatctctagaaattgaggagaaacttctcgcaaagggctgcccatgaagcaattgagtgcaagggtatcccggtgtagcatgttagggtggggccttggagggcgattatgagtgactttgccattgtgttgtcgttgcttcccagcgaagccaccacaacttgataactcataatgtattgcgaagggtcggtgtttccattgtatttttgctagcccctgctttgtagttgcatgaccaaggtgttgcttgtaacctggccgatagtgtggttctttcattggtgaaattaaaggcttggaacatgttgtcctatacagtctatctattatagacgatgttgcgaggtcctgctctgctgtgcggaggatggtcgtccttctgctggtcttgcagctaagagatttcttgttcaatgcaaggaggtgctccttctcctgctggattaagttctttatcctggtctggacctcgttgtagtgcctattggctgctagagtgtctctttgcttctgcaggttgctgttgcgcatgcgaagtctcttgagtaggagctgctgcttggtggtgataccaatgtctaggctagcctacatgtcttctcaatgtcttcaagtggcattcctaggtggtgttggcttcctatctctaggttgaagcctggtggggctagtggcatgtttttgcttaagtcgggccaaattctagcttagtaaggttgactttttgggttgggtggtgtcattcaagctgtctgagctggcggtatgaaccttgccattttgctcagtggtgatggttaactgtttatgcttcatgaggaggtccccgccttgtggctcgatggtggattttgggtaattgggtggtgcgttgtctacggtgatgactacctttgcctttttggcagcgaaggaagcccctgcttcattgtcgtcgactagtgaaggagctcggtgttcttttggggaggcattgtgagttttgtcttcgtcgcacaaacagtgggcgccacatgttgggtactaacacgtggtcaggtgagcccaaacactcggagatgaaaggaacgagctcaggtgtatgataagatgtttggtagagaactatagcgtctcgttatgtgtgtcccgcctagctacaggacaagggtatttataggaccagccggggataggtggtctaaagtacgtccctatccccattcaccaactatatccgaggaatattcagtgtaacaaggtaattacaacactgtattccctaaatgaggcgcacactaaataatacacacatacattacactaacaagtgggcctcgtagaagcatcctctggtgcaccaacggtgggatagtcgccttgtagccttcgctgctacctccggagtcttcatgactcggtgcccttcgctctctcccgaccatggttctaaatctcccgctatagcggccgctatctctcactattgctgttttgaggggaaatagctatttgctttcgtgcacagttgagtcgttatctctcgttatagccccatttagcccgctattgctgtttgaggaggccaatcactaaatgccatagctcgctatttaaaacactgctcctaacaaacgtatggcacatgccccacgatgacggcgttgtggcgaaggccttggtcggtgttga

SEQ ID NO: 78817 - DNA, 280 bp, Zea Mays
ttttaggcatcgtgaaacatcattccgtgtgccacacaagtgatatatgcatgcatatggtgcattcttgatcgagctagtggtacaccagtactcacaagtcacaaaattgaaggcacctaaatatatatgagctaaaaataagtgcagcgatgtaccaaattgcttagctagcttttctgattttatttcaatccgatgttgcactacatatatatcaagtaacattggcgaaagcaaaaacgacatgcatatgtttataatcaaggatctaaatctc

SEQ ID NO: 78818 - DNA, 448 bp, Zea Mays
gagtttgagagagcttcataatgacaaaaccctaacatattgtgtctaccatgactcagtatgtcaaatagacctattatttttttaaaaatccatatcgtaatttggatgtattcatatattgatgctaatgtttttaggggactaatatgttagttgtcttgatcctatgttgttcctcctttgtttcctcaatggtcgtggataaagcgatatgtttttcctttaaactagatacttgcctaggtaagaatcttgtaagttacaaacaacctaaattatcattgaattgtggggcaacaactttgatgtctaacactatattggaaactttcaaatgggctctatcgtggtttcgaaaaatgggggacaatagatttgtgtttagtgggggatgcaagcgcgaactcccttcgaatggtggatcacggggatccgagctaggaac

SEQ ID NO: 78819 - DNA, 317 bp, Zea Mays
ctcgtaggtggagagtgccaccaccttctgcttctgggattaccatgaaattgcgcacaatctgaggaagaagatgatgctcgtcgtgctgcgccgcccgtcgacatctcctgccatctcgctgtcgctgtaccctgtcagctccagtcgtccgcctcctctcttcggatacacaagcccatgctcgatcgtccctgcaatatagcggagaaggcgcttgatcgcggcgaggtggtcctcctgcggatcctccatgaaccggctcagatagccgatggcatagccgatgttcgaccgcgtgtgcgctagatagagca

SEQ ID NO: 78820 - DNA, 721 bp, Zea Mays
ctaaattagggcgctacggtggctaatcggaggcgggagtgggtgctctgggttcgtgataagctaacgaagctgtctgtgcaatcaatttatagcagctggccacggttgtctcgaatttgaaggagatttggatcacggtggtgaccggatgttgcactggtgagcttgtcgtggcattcaacgacactatgactcaagggcggtaactcttagcttgccacggcttcgagtacgtggtgaaaagactacggcatggcgcaatcgcggtgaatgacgatctccacggcgacgaccgtctggccatgtcgctgcgcaagtgggtacggcaactatgcagtaacagtgccccaactttatcccctgcacgagatctttcactttatgtaggtatccgcgcgccaccgggcacgaatcgcaacgccagcgaggatcatggcgcaggatcaccggcggcggtgcaccgaacctagcgatcttcgtcaggttactgtaccatgtgaattcctttcattgctcctgacagagcagattgagaagctccattctccatttttcatgtagagagctaccgatccatctgcaccaaagttgttgctctataaaccagcttggattttgttataaagaccttgatcgaattctcactgaattatacaaaattcagcctctaaagttcatccgagctcactgtcagtcaaaccctaacacctgatccgac

SEQ ID NO: 78821 - DNA, 710 bp, Zea Mays
catcgggggtggcggtggcaactgctgctgctgagctgcattcgcctggggtgcctgttgttctggctgagcacgtcttgcacctctacgcctgttctcagacatctatagaaagcacacacacatcagatctgactctgcagtccttcagcataagaaaatatgtatataaaatcttcgtagcaccaaacaattgatcatcttcactgacagcttctcagataaagaggaaagtggaaataaagggattacccaactgaataactaactttattaataactacaccaagtttcaggggaaacccacaccttgatgacaatcattacaaagatccaacttcattacatgttcatcatgacaagcattccaacatgagataagcaaacaaactctaacaaagactgactaagactaagatactaaattaagcattattatagattccaactctgtcgatctatggatccaaatctatctgggttctgcagttaggggtaccatactcgaagcgaccatggggcggtgaacggtaagggtgctgaatcccgacaggggaaggagaaccaccatccaaatagtggcgtgctgcgcactcagcacgcaattctgcaacctctgcccgaaccttgcccaactcatcaagggcatgatctagcactgggttgagtacggcggccaggttgaccatgctgttcagcttgggattgct

SEQ ID NO: 78822 - DNA, 402 bp, Zea Mays
tagatttggaccacttagcttttcactaagtaggcaattggtcttcgttcttgcatgagcacgccttcgatcccaattccactggcatcacattcaatttcaaatgtcttaccgaagtctgggagtgcaagaactggggttgttgttaacttcgtcttcaattcctcaaatgccttctattgtgcttctccccatttgaaaggtacttatttttggtcaattcgttgatgggagcagcaacagtactaaagtcttttacaaaccaccggtagaacccagcgagcccaaggaagcttctcacttggctcacattctgtggaggcatccagtcacgtacaactttgaccttttgttcatctacctccacaccttgtcctgatataacaaatccaagaaatacta

SEQ ID NO: 78823 - DNA, 618 bp, Zea Mays
ctcagccaccccttgcctacgccagctgctcggatagcttcaccagagacccgtgaagcttcccaagccctcagaccgagcacaaccccaccggagacaccatatcaccctcgccagactttctccgcccaccgcagagtgtggaccgggtaagccgctgcaccattctcaaagtcctcgtgcgcacagcttctgcgtcacctggtaaagctccctgaaccgaccaattgaaccttaccgccgtgtttaggccggactcttcgcctccgacgagctttttcgcccccgcgcgcggctagagtgactccgaccacctctgaccaccatccgcccatcgacatgttcgccaggacctccccggcctccatggacatttcaccggagctagatcaccatcggtaagccccactgccctttctttcgccgtagttactattccggtgaggttaggagcgcgggtaggatagctcacaagcttagggggttttccgcaatgttagtgcctcaggtgaatagtagcctagagacccgtctgtatggagcgcaaggaaaatacgccagggacctaagcgcaaagtggatttccttttccattttaaaattcaattcctttttaat

SEQ ID NO: 78824 - DNA, 471 bp, Zea Mays
gttcgctcctgcctatcaccgccaccggctcgacgcaccttagctctcttgttctaaataatgttcttatttcgcctcagcttatcaagaatcttatttctatttgccaattcactattgataacaattgttctgtggagtttgacccgtatggttgttctgtgaaggatcttctctcgcggaacgtgatcatcaggtgcaatagctccggtccgctctacccgctgcagctgcccgtcgttcactcccttgatgcctgctccacgtcatcctcccgtggcaccatcgcctcggccacccgggtcgcgaggccctctccaaactcacttcagctattcctggttgtaataaaagtttggagtccttgtgccatgcgtgtcagctaggacgacatgttcgtcttccttttaatccttcagtgtctcgagcgtcaaacaactttgatcttatttattgtgacttacgggcatc

SEQ ID NO: 78825 - DNA, 802 bp, Zea Mays
tggggaccgacctcctgcttctgggcctcatagcccttgtggtctcatctgttgggtcatgcttctaggccttgtagcctccatggagtcatctgccgaggcgtgcgtcgtcgtacctctggtgtggcgtcgtctcatggccgccttcctgtagctactttgatttggacgtgacggtgcctggcaggttctatcgattcaggtaaaggagtggtttaaggatctcttcagtataacttcatcttccatcatcctcctagcgtcatctttcattacgtgtagacgcatgcctggtacggtgtattgccccgtccctttggtgtatgggtcaatgcagagattcctatgacgaggtctctacgaccgggatcgttcggtcccactaattagcaaggatacatatccgtcatcgtgcctgacatagaccccttcagcaccgcttccatagtccgagcctggctcggtgatgtcctgtcatgttgacgtggctggatagtaccagactgactccccttgagagtcagttgttgtcttgctgcgttgctcggaggtccggttggtcgacagactcgcctcgctgggttgctcggcggacagattggttggcagcccgccttgctgggttgctcgatgggcaggttggtcgatagtcctgcctcgttgggttgctcaacggatatttgttcagtgagcctatcagcttggtggactgttcccggatggccttttgggctttctcgccgaactgcctggcaagcgggccgtttttggaggtcttagagccctctctggtactccattc

SEQ ID NO: 78826 - DNA, 907 bp, Zea Mays
cgggtcaccacacaaaatcaggagtaaatcgagctccaagatgctctgtcaggtcgactgactgaagaaacaccatggtacagtgctcagatatggataagactgccagcaccggatgttcaccgccggcgacctccttgccgggatttgtgccgcggccgtgtggattttgctcaccctgaaaagatctcaccgtggataaacttggagcacagtggccactcggtccctcctccacttaccggcgacgtggccgcacggccatcaccggcgtgccgccgttctttgcagttatgccacgccatcggccatcttaccacatcgcagttgattaccacacaccgtccttctattacctaaggccttgccacgatgttcgccacctatcgcacacaccagtgaactttctcccctccggccgccagcacaacctgctcgaattgaccgtcgccgctgtcgctccctataaattgagccccccaccagttccgcaaagtcatcagctagccttccctcgctaattgttagcaatcatccaccagtgagctcgaattcgagttttcccccaaatcagtttaccgccgccgtaaaagcaccctcgccgtggccagccacttccaggtctgatcatgctctctgcggttctgtttcagtacctgtgtgcattcattatgctcatcaacccaccagatcgaactagaccatcctcaatccgcgggaacgtgtgctcccatgatcggtgtccgccgtgatcgtggacaagcgactcccagtagagttcatgttagtttaatagttgttcctaggtcgccttagaccaatgaagcctctccgttagttattccgagcagtcatcgccggccatggccggtacagaccacgtccgggacgatctgcgcgcgcgccg

SEQ ID NO: 78827 - DNA, 1309 bp, Zea Mays
tcgacccaagttggcccattactggaggaaagcgcccgcgtgcagactttgcacagagacctctattgttttaaataacccgaactgagttcaccgcactatttctttgagtcgctgacagttacagttagacccctgaacttctaattcttcacagcgccatgtccatgacgtcgcacggcggagacccgagcaccgacgagtctataatggccggatcatgcaaagaccggtgctcccgtgcggcagacaccaaattggattccacctaaccatttaccctcactcaatttcactaatgagactctaaatcatcctacccacggagacagcgcgaacaatggatgaacatgggcgttctcggtgatccagggcgatctagttcaatcagaggggtcgaacaacattaggaggacttaaggagactagaacaaacgactagagagcttgaaccaacctgaaacaagctggctagggcgaggatgctttcacggcgacggaaaccaaattggggagaatgggaaattggagtgttctaggggatgattcgaggcacgggctgctttactggtttcacaattacatagcatagtaggcgggggcagcaatttatagactccatcagcggtggcacatgaatttgagttagcgcggtggcggccggagagtgaaaagagtactgtcgcgagagctcggtggcatctaccgtggcgacctcaccggcgacgaaccagttctaccgggcggtttctagtgactcaccgcgatggggtaaagcgtcgaggcacgtagcccggtcggataacggcaaacgccggtgatgccagcgcgactaactacggcgagacacgacggcagtgagaacagtggtcggagtttatctccagcgtgatactttataccgaggagtgcttatctgagttcggtcgagcgtgaatcgtgacgccggcgcgaatccgggcacacaggtcaccggcggcgaggttctctgaacctaatccatctcgttcactgtaccatggcgtagcttatttagttggcctgacaaagcatatttggtaccaatttactccagattttgtataaggactgaatcaactctcgtatcaaagtgatagcctaataaaccagccacaatcttgctagggtaaccatgctcaaacacttaatggatcatattcgaaaagactcccaaagttcatcccatgtcactgaatatcaaaattcaggtttttggctgactgacaacccatctttgggcccagttttctctcaactttgcataacaacaatgcttaaccccttaagc

SEQ ID NO: 78828 - DNA, 314 bp, Zea Mays
atgcatgggtgcgggccaataggccgggtttatgggggcagaccctaccgggttggcatacccgtgtgcactacctagttacaaaagggaaaaacttcgacccctcagacttgctctatagataaaacttacagagatatttcgacactgggggaggcattccttcggtcatagctagacagttgcccttgggtcggggtacccccattaccatgaagggtccttcgcagctgggggagtgttacggagccctgatttggtctggtacctttgtaggattaagtcccgaccctgggttcccatctgcatttgac

SEQ ID NO: 78829 - DNA, 279 bp, Zea Mays
caccagttgagatttccgaggaccaggaggaagggctccagtcagaggtgcccgaggacgtggaaccgaaggaggagctgccagagtgcgttgatcaccacccgagctcattcgaacgaagcaagccccagagcattttccctccctatggtttgcaaatgattacattgcgtcctttatgtttgatgcattaagttataggagttggttggaaccgttgctgcatttatattccttgtctacaccgatatatcgatatccttttcaccctgttaggtc

SEQ ID NO: 78830 - DNA, 452 bp, Zea Mays
agcccggatagataaaaatgacgtcgaactaacgacagacgaaacagattaagacagagagactgttaattagtttcgtctaatttttacgatcctcaccagcggtcgatcatttgattaaacaccaatgatcacatgttgagaggaacgattcacttaatgtgctggcgcattgttcttttcggatagcgtgggttccagattttacataaaatcagaagccttctgatttttgtattcacttacgagcgtgatccgaacagttcaaaatttgctagcaaacaaagatttgataatccaagagtttctcaacccctttttaattgcgtagattacggaattaaatacgacaccaagctcgaacctttgcgagatgataaaaatgcagtgtccactttatttactgatatcccgcgcttaaatccataatcgctgttgacgtacagtaacat

SEQ ID NO: 78831 - DNA, 414 bp, Zea Mays
cttagctctcctctccctctgtctcttccatctattcctctagccgtgaggcagtgccacccctttttgtgccaatttccaaatcttgttaattccagtgaaaccaaatggccatatgtgttcctatgtgtgccttaaacatccttgcaggttcctagctccttcgggagggttttcatacctcaaatggccttttccctaaaaccctaattcctcgccctccacgtgttcggtgaaatgcccaaaccagccaaaaatgctcaaattgaatccaaatttttcaggcaccttcacaacatccccagtaacacatttgccaaatttcacgccaatccgagactccaggcttcattttcactcaatttctcgttttgagcgatcgttttcgagccgagtgcccaaatctcgttttct

SEQ ID NO: 78832 - DNA, 827 bp, Zea Mays
tctcaccaccaacaccaggcgggaacgcctatttcttgctgctcgtcgacgacatgagccgctatatgtggctcaccctcctgcgttccaaggcggacgcaccggcagcgatcatgacattccaagccaaggtcgaacgggaaaccgggaagaagctgaaggtgcttcgaactgataatggaggtgaattcacttctgtgcagtttggtgaacattgtgcaggggaaggcatccagcgacacttctcggcgccaggcacgccacagcagaatggcgttgtggaacggcgaaaccagatggtcgtggggacagcgcggagcatcctgcgtgcccgcaacatgcctggtcacttctggggagaagcagtacacactgctgtcttcctgctgaacagggcgcccaccagtgctcttgatggcataacgccgtttgaagcctggcatgcaaagaagccacccgtgcacttcctgaaggtgttcgggtgtgtggcctacgtcaagaaagtacgcccacatctcagcaagcttgatgatcgtggaatcaaggtcgtcttcatcggctaccaggacggctccaaagcgtatcgcttctacgaccccatcgccaatcgagtacatgtctcccgtgacgccatcttcgccgaggacgagcgctgggactggggagcatcctcggacgtggactgcgagcatcccttcaccatctcggaccactacatgctggaacgccagcaccaggagactgcagatcgggagcagctgatgtctgatcaccaaggttcgccatcgcactccctgtcccctggaggtgggagctcccaggacgcg

SEQ ID NO: 78833 - DNA, 437 bp, Zea Mays
gttggggaggagcaggcaaggaagaaggggatgaaccagtaggtggccggctgcgtccggaaaggctgagaggtgaaactcttgtaacctgttattctggatttgtcgtgggtaaatctcttcgtgagggggttcaccgccaggagcggtgctcagatcgtcgccggtttagtatcgttacatgctgtctcagttgtacatttcgcatcatcttttcactaaccttgtaggaacgtcaagaaggtaaataatttagacccctttaccattccagaatttcaaatccaacctacgcggtaggaccacaaccatcttgtgtatgatatattgtattcctcttgaatttcttgtcaaaacccatttaagtccagcaatttctagagcaaagaactttgcatctacatcagccataaatacttgggtgccgtttggttcac

SEQ ID NO: 78834 - DNA, 328 bp, Zea Mays
gcaagagcagtatccacgataacagcgaagaccgcccagaaattcttctggcaaaacattgtctgccgattcggagtcccgtccgagctcacagttgacaatggcaaacaatttgacagccaagactttagggacttctgcttctccattggcaccaagctcgcctttgcctcagtgtaccacccacaatccaacggcgtcgtagagcgcgccaacgacaagattttcacggcaatcaagaaaatgctcctcgacgacaagaagggtaaatgggccaacctgctacctgaagcagtctgggcactgaacacgaccgagtgtcgggcaa

SEQ ID NO: 78835 - DNA, 561 bp, Zea Mays
tgtatttgtaaatgtagatggtgtaactttaatttcgaatgtttaatacactacctttgaatctcttagcaaggcatccaacaaatagtatgacaacaggtttgttatcattctcatcgcagatgttatcaacagagaagctagatgcttggtgtccccaaagcgtcacttttgtagaggtattgctggtgcaataaaattaagaagtgttagtgtaacaaaaaaaggaaaagaaaagcatgttgatgaaaatgttagtgtgagagaattatttttgtatgatttttcttactttatgtccttgagaaatatgtctctgatgatgtttgagttgttgtaaccaacatgatgtaaagatccaatctctgtcaagattcctagaacatctgtatagttgtcaaagaagcactatatgaatttaacaaagtaaacaactttggatagggaatgatgacataaaaatttatgaatcgtatcttactaatcaagtacgttttattgtcaacattgtcacctatatcttcgaaagatgtgagtttgtaggcatatcttggaaagttg

SEQ ID NO: 78836 - DNA, 297 bp, Zea Mays
aaagggaacgaatgatgttgttaatggaacgaatcatatgctcggctttaccgttttgggaggacgtgtaggggcatgacatccggagcaaaacaccttgagtgagaaagaaggtgcgagtggaagagttgtcgaactcacgaccgttgtcacattgaatgcttcagatggtgcagccgaaccgtgtcttcacataagagaaaaaattagccaaggtagtgaatgtttcggattcaaggcgaagaggaaacgtccaaagaaaatgtgagcaatcatcaagaataataagataatatt

SEQ ID NO: 78837 - DNA, 427 bp, Zea Mays
ggtgagtcgagtagacaccatgcggatggggggtcaaagtgggaggttgggagctagatctcggggaattgatatataatatgatatctatatccaaaaatcctaaatcatctaaagcaattcaaagattgagaataatctaaccgctattgtgccagtccattagtcatgccatgtccatgccggcattgcgggcgaaagtcatggcctaggcacggtgtgcctatatcggtacagacttcatgttgtgtcacgctataaaaatgccttttatggttctcctcatgctagtccagcaattctaatctatttgaccatctatacatatgaaaatgtctttttaggttgtcctctcgctggtccatcatatctgacctatttgaccatatatacatggacgtaaggtagaccaatatatacaccgagc

SEQ ID NO: 78838 - DNA, 364 bp, Zea Mays
gtcggctgctccaccgtccgggctggttggttgggacgcagccgccctggctgccttccagactcccactctgacttcgccgatgggtcccgagtggatcgcggacaccggtgctacctaccacactactctcgaccctggtatactcacctctgttcgccctccttcctctctcccttcgtccatcgtggtggcaaatggctcgtgtcttcctgtcacatctgtgggcgccgccggctctcccggctcctttcgcattcccgatgttcttgtcgctccttctttggtccacaatcttctttctattcgtcgttttactactgataattcttgttctgtcgagtttgactcttctggtcttact

SEQ ID NO: 78839 - DNA, 479 bp, Zea Mays
taaggccatactcctaattcacttaagcctaaattggtgacttatatcaacttggccatacacaacaacttgacatatataacaagttaaataacttacccaaccaatagagtcttgatggattgcataatctgtcaaccaccacctgaaatcaaaccagattttgacctacatcatgtagtctatcccacccatacctatcttaaccatattcctccactctgatggtatacactaaccttgaatcattgagaccaagatcggaaaataaaagatcaacatcgtcaaggaagaagagaagtcaaactcgaccttcggatgcattaccacccaacacggagttctttatcaccataaactttcttaacacatgctcttcttgccctaacctacccatcttttataataaaatgactatacatctagatacccatgctttcctagccactttctaattaacatgaaacttcttattcttg

SEQ ID NO: 78840 - DNA, 293 bp, Zea Mays
cagaactggcgcgaggtcaacacaacgatgccccgctgccccgtggacagagagcacaacaacgatgacaacgcagccgttagagtacgaagaagaaccgccacacttagaggatgttggctgcctccgctattttaccaaaagctatagcgctcgttgctggacgcttgcaagcattgtcggacgccatatatagcgtacatgatatttagagtctattgctatacatagtcaataatgagccgttgcacaacagaaagaccgtgagaaacgacccaaaaccaacacgacag

SEQ ID NO: 78841 - DNA, 568 bp, Zea Mays
gaaactttaccggtgctcaggtgttccttctttgccgagtgctatggacctgacactcggcaaagaacctatttgtcgagtgttacactcggcaaagtgaccagtatacaccttttttatttgtttttgctattccatccaaacaaacaaaaaatatcacatatacatcacaaatatcacataatcatcacatatacatcacatatctcacaaacaccataaatcaaacaagttctcacatcattaccaacatgttcgaacacaaacataactatccagcactcaagaacataagtctcaagtatctcacaaagcattaccagcatctaacaagtttagatcaggttatctctcaaagtatgaacaacactaacaaagataatatctcatcaaggtgggcggctggactggtgcggcgatggactgggcgatccatgagggttattggatgccgccctagatagtccctacacagagaagagattgcatgtgttataccagatgaatatatatcatgaagaactagaattttgatactcacatgagtatagaactgagcagggtcaac

SEQ ID NO: 78842 - DNA, 642 bp, Zea Mays
ccttaatcgaacggaccaaaccatgtagccgagttggtgtggaagatcaaatcctaggcgcacggatggtatcgggcggacacaatcaattccctcgaaacggtatcccggtttaatctgtaccatccaaggagatctgacggcacaagcttctcctacgtcaccccaacccagaacaccgcgaacggcggcgccgccgtcgccacccggtgagctctcaccgacaacacacgattctcccctccctcgccctaatctgtaaaccaaatgatgcaatatgtggacaatggtatggcgaacatggtgaatgtatgcgtaccgtgagtccagagagcgactatgttgcccacggcgaatagcggcacgtcgcgctattggtaaatcgacgagcaattcccgccggtcgcagtgttctcctccccgaaggttacacaagcacacacggagcgacaccgtgatgcccaccgacctgacgaaggttcaattggcggcggggatgcgattttccctcgtggcggatctcccctctcttgttcgacgcttgaacccccagcaatgatggcagtgtcgaaggaagggagcaggggatgcaagaggtactggcgccaaggtcttatagcgcgtatagatctgtagtaccga

SEQ ID NO: 78843 - DNA, 756 bp, Zea Mays
ccgccaccgcgccaactccaaattcactggccattgcccccaaatcctataaattgagcacaccgtcggggccgtaaggtagtcaagcacccaacccaccaagtcgagcctccaattgctcaccagagctcgccaatttcagatttcccccaaattggtccgaagcacagcgccttgtgacctcgtcgtggccaacgtgtctcaggtccgttcatgtcctctggttcctcgtttcagtatccttggatgctcctgatactctctgacccatccaattgagctagaatccattggatcatcgggaacacctcggtcggtccattcctcgcgctgtcaccgtgaaccgggtgatgtagaactcgaatccagcaattaagtgaggggaattagtcacgtagggttgaattcggtgtccagcaaaggggagggctagccgttgcgtagtttagccagtacaggttcgccggagttcggtctggcgccgctcgtcgtcgtggacctcgggatgtgaaggaatagaagcacgggggtgtatttgcaagtgtcagtgagacaaacaaatagtgtgcgggttccttactagattttcaaaccgccgaggtcttctgtgtaaaactgacagcgcgggcgcgctttcgcttgtatatgggccgactcgggccagtttcaacccaatactgtagagtatttcttcttttctttttctaccaggactaaataattcctagaaaattgcagaaaaatgctaaaaatgca

SEQ ID NO: 78844 - DNA, 670 bp, Zea Mays
ggcattctttcgccagggtcaggagctcggttgtgagagtgagttttgggccgttgattcgcatcctatggacgggaggccctctctctctaacactggccgccccccacctttcccttccccctcccactcttccaccccctgtggccgccgcccctccctctctctctctcttttccattcttgcagccgcctctctctcaccttctccctctttgaagccaaccacccctccatcctccacccatttgcagccgccacccccacctccccatcaaaccctagccgccccctcctcaagtccttccctccaaggtgcacccctctcctcttggatcttcaacaagttggtgcaagcctctagttggggaattggtgggaggaagaagaaagtggtgaaggaagaactcaaggtgatcttgtggttatttttgtatttgtgctgcaattcatttgattatctgttcacctagacgaattaggagaagtgatgtcctgacttttggtagcgggcggacatcagtagtattggtagtttctgaaatttttgcgggggtagttagctgtaatctctgtgaaaatcttgtagagctttgtcatatctttttatagagtacttatgcgttcgattcggaggtatattctaggagatatcgcattttgaactcag

SEQ ID NO: 78845 - DNA, 564 bp, Zea Mays
gtgctgggaaatggaacaactcaaccttggtatgctcaataatatggaagcaacagttatggaagttgaatctactttggaacaagagattcgtaaaggacaggaatctgatgagaaaattaaggaaattaaaactttgattggtttgggtaaagccccagatttcacggaagatgaacaaggcacactatggtttaaaaagagaatctgtgtaccgaaaatctaacacctacgccaacttattttgagagatgctcatgattcggcttactctattcaccctggaggcacaaagatgtaccaggatctaaaggaaaagtattggtggtacggtttgaaaagagatgtggctactcatgttgcactgtgcgacgtgtgtcagcgagttaaagccgaacaccaaagaccagcaggattgctacaacctctcaaagtaccggaatggaaaagggaagaaatcggtatggatttcatagttggactaccccgtactcgggatggctatgattcaatatgggtcataatagacaggttgactaaagtggcacactttatacctgtgaa

SEQ ID NO: 78846 - DNA, 644 bp, Zea Mays
taggaattcaggggctatggtggctaatcggcaataaggagcggtgcactggcttcataacaacatagtggagcaggccgaacactcaatttatagtgatcactcaagtgtttcgtgaatttgggatgagatgagcttgcggccggaggggtggtgagtcaccggagcacaactatcgtggcgctcaacaaggtaaatactcaagcagcagatgggctgtctactgcgacctactgtgacgtggtaacgtccccaagcacgtggcatccttgcggcaagcggtgaactccggcgatggcatctcggctggtcgcgaggcaagtggttgcagtggctagctcaccatgtcatccgcggtcacgatcttttcactggtccggtaatatccacaccgcgccgtgcacgaatctttacggcgagctcgaatcactgcgctcgatcgccggtggtgaggtgcgctgcacctagaacctttggagttcactgtacaatggcgatcttctttagtgcgcctgacaaagtgatttaaggagcttaatttttcaatttcatgtgggaagctaccaatccgactgtacaaaagttgttggtatatataccagctttgattttgttacaaagttcttggtcgaatactcactaga

SEQ ID NO: 78847 - DNA, 432 bp, Zea Mays
gtcctatgaggggtctgggtgactcaccctatactagcggaggcttctatggcatcgtcgggcggattgggccccctgcttcgactgaattgctcgccggagtagcatacccaccgcagatcgacctgcgcgcgtgggctgcgtcgtccgtacctctgccgtcggtgagaaccaccctttcatattcaccatattttgcgcttcacgtagcacctacctacggttgaattagggcgtcgggcgacttgggcatggaccgcgccggtggacctccgccatggggcgtgcggtcaccgccgtggtcaggtcgccggggttggtgaaggcctggttaccattgatccctaagcgaatggcttggattacattatcgcataatgattcggagtggcaaatcttgaccctagatcagtaaatggacggttgggaatt

SEQ ID NO: 78848 - DNA, 611 bp, Zea Mays
atgagattaaaaaagtgattttcgagatgaaacataatagtgctcctggtcccgatggttttcctactgaattctttcaaaaattttgggatacgattcaaatggatattgtgcatttattcaatgatttttatgttggaaatcttaagatagaaaggttgaattatgggatggtcactttattaccaaaggtggataatgcggctgacatgaagaattttagatctatctgtcttttgaatgtgtgttacaaaattatttccaaagttctgaataacaggcttgcgagttgtatcacaaaagtgataagtgattctcaatatggtttcattaaaaacagatacattatggatggggtcatctccctcaatgaaattcttcatgaggttaagaggaaaaatcaaagtggagtggttttaaaaattgattttgaaaaagcctatgacaaagtaaattggcatttcctctatactatgatggagaaaaaaggttttgggagcacttggtgtgattgggtaatgaggattgtgcgtagtggcaaagtagccatcaaaactaatgataatctgggtccttatttcactactcacaaaggggttaggcaaggggat

SEQ ID NO: 78849 - DNA, 509 bp, Zea Mays
acagctgtgttcactttgcttgccagaaaaacttggaaaaggcattcctgaagttgtacactcagcaagaatcggatctgacaattgattagaatgcctcttgcaattagtttctattgtcagtggcttaaccaagccctcaaagtatgacacagattttttaagaggaacggcagtatcagtgtcaaatgatgacatatcagtgattatccaattactccagtggattggcatgctggcctacaaaaaagtatttcacttcacttgaccttgagtactgataaaacttctgcgaaaatatacaaaacatgcatttgcttggcatacctctgattggtacacaacatgaataggataaaatggtggatccctttcagaatcacaaagcccatgcatgttttcaatattgatgacatcttgatcttggctagcacatttgttcaatttccgagaatgaaagaaagggtgaattttctttccagatgataaccttcgaatttcctagcaat

SEQ ID NO: 78850 - DNA, 573 bp, Zea Mays
atcctctacatctttctgggctttcagagccttgcttagaatcaagccctgaaaaacgaagagtgaacatgttacaatgataagaaataccacaaatatagtttatcgtaacaaaaattgcaaaatgacaaatcaaggtatacacaccttcaggctgttgtaggctaggctatctgcaatctgatccttagtcatcgcagacaagacgagttcaagcttcggataccccatgttatccatcatttcacgacaaacattgatctccttactgtcaggcagacactagaggaattcatcatcgttatctcctccatataccaaggatccctaggggtacttcagctccttcgcataatgttcggtttcggtgacttgctctgctgatagttgtttttccgaagcatgtcgaacaataaaattcaaatcactcttgcaaggagcttcaggagcaggcatcgagggtttctctggacggctttcttccacaacattttctggtgcagtttccgaaggtcccgcctcggcatgagaataagtactagcaatgatcatctctgtgacatcttcaccttt

SEQ ID NO: 78851 - DNA, 310 bp, Zea Mays
caatcattcaccgttttggagtacccaactcgttcataacgaacaatggtacgcggttcttcagaaacatgttcctaaagttctgtgacgaataccacatccatgtagattagggtgtcgtggctcacttcgtgcaaacgggcaggtcgaacgagctaacagaatgatcatacaaggcctcaaatctcggatcttcacacgcctagtgcatggaagtggttctataacctcgatgtctaagtaatcttgactagatcaatactagtatgcttaggaaattgagtgtgtataattgaaatagagaatctgc

SEQ ID NO: 78852 - DNA, 361 bp, Zea Mays
caaatgttcaggcctcgatagccacaaagaacaaacacatatacttggggtaactatgctacacagacttagacgtcggcagaaccctcggtggttctcccgacctacgacaaatgtctaagtgcttgaagcggttacattttgctccggcaaaaacccagtatatcaccttacaaacgggactccggttccgctcccgtgggtatgaacaacctccacaccagggggcccgcgggatgacgaactccaagcggcttgccggcgacctctgcagcagtagagacaacgacctccaccttgggcggctaaacaacagcagcgatgacctcaggacaaacactgctgtgaagaggccctcgcc

SEQ ID NO: 78853 - DNA, 428 bp, Zea Mays
caaaaacagacataaaacatagaagtagcatgatgattatctagatttggttttgactgaccgtgttggtttccttgtggtatgctccttctccaatgctttaggaccaagttacccacgtgcccctgccagccctatttccctacgtcgtttctcacctatggtctctgtagattcggcagctgcaggttcgctggtgaacgaacatctgcaatgcacatctgcgacacgcgcgcacgacaggttccaacaccgtgacctacaaacacaaaatgtttttagagaggttccaatttcagtttgtgcatgacttttgatggtacccattcactgtgcggcgatactctataactttattatagataccactattataccacgatagatcaaggtagtggtcccttctcttttgtgttagtaaaaaaatt

SEQ ID NO: 78854 - DNA, 887 bp, Zea Mays
agtattttgagataaatgtgcccaaagttgggctgtcagtcagtctaaaacctgaattatggtattcagtggcataggatgaactttgggggccattttgaagatgatcccgtgaatgtttgagcatggttaccacagtcggtttatagctggatcatagggttacaggtttgctacaaacggattagtaagttcttatgcaaaaattcaagattttggcgtcacaaatctatctgtcagactgactaaaggagatcatgatggtacagtaaccaaaaacaatccacagattcagtgagctggccgccggtgacccttcgccgggattagtgctgctcgccacgattcgtgcgtctgggctgtggattgagttcgccgggaaaagatctcatcgcggatgggtttaagctactgtggccatgctgtccctcggttccccgcgccggcgacgtgtcctttcggtcgtcaccggaatccgcgatattcaccgcggttgcgccacgcctccagcctataaccgcaccgccgtgactcacgttagccatccgatcatcgccggtgagttcgccacggtattctccacgaatcaactgcgtcagtagccttcttcctttccggccgccgcacgtctctcctcaaattcacgagccaccaccccaagtcctataaattgagcgcactacgagctccgtagggtaatcacccatccatagcacccacgcttgtcttcaattgtccaccagagaccgcgaatcgctcatttcccccaaatcactcaagaacaccgatcggtttgacctcaccgtggccagcgcatctcaggtccgttcatgccctctgagtccttgtttcagtgttcttggatgcttctgatactctctgaccca

SEQ ID NO: 78855 - DNA, 1472 bp, Zea Mays
acttaaatgcaaaatggacctcatttgagttctatactaagtctgaaatttcagtgatattggctcaactttggagctctacatcttccaaattattgagaatttgccctaggtcaccacatcaactatgtagatctatcttaggtgaacaacttttcttaagtgggcaagtcatgttctagtgagaaatttagagattatcatgctcaaactttggctgtcaggctgattaagttctgaatttcagacaagtagtgcaattgcaagcactttgggcatgaattaatgcatgatcgagcaagtatttgcctaggattgctataacaatattgtagctggatcttagggctataactttgttaaagggtgtcgatcatgttactgcacaaaattggaggttattggctctgtaattccccctgtcagaagcactgctggagcattccatggtacagtaacccgagtggatcagaatgccagcgtagcctgctcgccgccagtgaccctccctacgctatgattcgcgccgccgccgtctcaattcgtgctctggatgtcgtgataaacgctcggagcacaccgccgtggataagcccggcgattaaagtatcccggccaccgtacaaagttcaccgcggtggaaccagataacctcgccggtgcactgcccccttccggccttatgccgcgtgtcctaaccgcgccaccgcatcgccatgactccctctagcctcttcgttgatcgccggaatgaccgccacggtagaagccacctagcgcttgcgccagtaccttcttctacctccggccgccgcgcgtcgtcgcccaatccacggccaccgcttgcgcgctctataaattgaccgtgcccccagctccgccatgtacccaagcacctactgcacccacctgcatcccaaatccctcactagcaagctcgaattttggattccccccaattcggtctccgccaccgtaaagcacaactccaccgtggccagtccgttctggtaaggcaccatccaattcgcgcgttgttctcatgtccctgtatgctggtgatgctctccaaaccgtccaattgaactaggagcccaccaatcactgggaacacgaactaatgtccatggctttcgctgtcctcgtgggcagaacgaaataggtcaccaatcatgcaattgacttaggggaaatgctcggggcaggtctaatttggtgtctgtcgctcgagagcgccggtcatggccccgttcggccggtacagttgctcaccggagcgcggccgcgttcaccgtcgtcggggacttcaaaccgagaatagatagaagtgcgagggtgtctttgcaattgtcagcgactgtgttaaatagtgccttgggctttgtcgggatattcaagaaaacagaggccctttctgcaaagctgccagggcgcgggcgcgcgcgggcgctttcccctctggactgggccgt

SEQ ID NO: 78856 - DNA, 1098 bp, Zea Mays
gggattcctaggatgaagtgtcagcgcttagcagttcgttgtcctccaaacattctatcatcaatgaccttcgtgcttcgaagaaaattttgtcccaagagttggataccgccaaacggaacattaaggtcttagagggtgaccatgaagttctgaaggcggggtatgataaagcgatggataaggcggttcacgtgggttgtcttctaatgaagaaacccagtgttgtggcccctgatgacattgttgcagatgttctagctgcatcggggattgcggctaaagctcttgccccggtgaacccaaggttgattccactcctggaggtgcttctacctaagtgcatgatgtattgtaaataattgttgcttgtgtgggaggtgcccctcccctctatgaatgtattgataattagtttaaatctaatctttaaggttgcttccccctttctttgaatcgtgcattgagattagttgcgtaggtgggacttaatgggtgtccctaccttttttctgcgagcgtgatatgtcgtcttaagttaatccccaagttttatactgagcattcttcttgatggggtttggagtgcacccttttatctgtatgtctgagattgtgacaccggcttaaggcacgtcctgacttaagtcgattgctttgttagtagggtatggtgtgcaccctttatttgtaagcgtgagcatgtaccaccgacttaagccgatccccgacttaagttgattgcttcgttagtagggtatggtgtgcacccttttatctgtatctgtgagcatgtgacaacgacttaaatgatccccgacttaagtcgattgctccgttagtagggtatagtgtgcacccttgatttgtatgcgtgggcatgtaacaccgacttaagccgatccctgacttgagttgattgcttcgttagtagggtatggtgtgcacccttttatctgtatgcgtgagcatgtgacaccgacttaagtcgattgctccattggtagggtatggtgtgcacccttcatttgtatatgtgagcatgtaacactgacttaagccaatccctgacttaagtcgattgctccgttagtatgg

SEQ ID NO: 78857 - DNA, 978 bp, Zea Mays
tcaccccaaggcctccactgactttttgtttagtaatcgtggaccatgcaactagcggcgacttttttgagcttgtgtcatccccctccaaagacaatgcttcctataaatgtctatctgtttaatgatagaacttaggattttgagcgtgcacataaaaaaagttggcaaggctgaaaaaatcgagtttaccaactccaaacgcccagcccgagataaaaaattagaggtacatgacaatctcttttcaattctttggattaaaggtaggaactgctgaagtctaggctttgaaagacccaaaggtaatccaaggtaagtgaaaggcattgcacctgtctgacaattgagagttcttgataggatctccattttcccagggttaacgtttatcggatacatacttgatttgtaatagttgacccttagaccagttgaggttgcaaggaattgagaattgccttaagaaagaataactgctttgggcaggcttccattatcaagagagtatcatcagcatattgtacaataggaaaatcttgttcacaactatctcgcagaggaagctgaagcaaattcaaatgtctggccttgttgataatactctgaagaaggtcagccgccaagataaacaacagtggtgagagaggatctccttgtttgactccttgcttacaatgaaaggttttccctgggactccattgagtaacaccgaggaagttccagaatgtaggatatttcgaacccagttaatccactttgtactaaatcctttatgagtcagaacctgcagaatcagttcatgctctaaagtatcaaacgccttttcgaaatcaagcttcagcacaatgatttatttttttgaggaatggcataaatgaatgtattcgtaggcccaagccaagcaatcttgaattgttcttccttttatgaaaccatattggttcctgtgaactaaccgtgtcatcattgtttgc

SEQ ID NO: 78858 - DNA, 945 bp, Zea Mays
tggaggtctggtcttgccacatctgacacatttgcgcatgtagagccatgacaatgaggtagaagaatactgatggagaagagagagggcacgacatgcctatggtcgacgaggcaagcgtcttttttctaacttcacagaagatgtatactaaattgacattttaagttgatcaaagttttcttctactagcaatacgagattaatctctcttaatacctttaataagtgattgaattgaataggccagcctatttaaatccaacaatagcgcatttaaataacacactagctcaagcgtgtttgtttacgtggaaacatgtcgtgcaagactcgcacgcttcgtaaagcagcgcctcagaggctgcatctagagaaacaaacttagctttcacttcttatctgaccttgttggctagttacaccgaagagcacgaaacaaaaactggttgtcctatcgtaaccttggccctgtgtgtcatggacatgtacagacaatgcaatcgctctaggctagccaggtaaaagacacaccatcagtgaccggcgcaaatagtttttgtccaccgcaagagcaccaaacaaaactggctgtcgtatctaaccttgtctctgcgtgtcatggacatgtacagacagtgcaatcactgtaggctagttagtaagaaacacgcgtccggtgcagatgatttttgtccaccccaagagcaccaaataaaactgcttgtcctatgtagcattgtctctttgtgtcatggacacatacagacgacgcaatcactttagcctagctagctaggtaacaaacacgtcatccatagtgatcggtgcaaacaattttctccaagactggaactcgtggccctaaatttggttcccaacgtggacgcacgcatcttcccagaccccggtggacattctcctatcctatatcttaatgatagg

SEQ ID NO: 78859 - DNA, 834 bp, Zea Mays
gtaagtgagaagtgagtggagatgagcttttttcggcttagattttggttcgggtggagaggagctttgtgcggctaattctgagttaggaaaactaaatattaatttacaacaattgccaccggttgaaaacaaactttgcatgccattcatgtggcgttctcccatagccagaattgctagggctcggtgtccgaccactatccggtgcggcggtgcctccgatcaggtcatagggcaccagccaccgcgtacatccactcctccattcctcaacggaagtttctagaagaggtgacaacgaacctgctcttatgttgtcgtaaaggtcatcggcacccaactgcctacgacatcgttgttgctgctcctgcatgcacaagagtcgggccgatggcctctacctccgatctgtgccctctcctcttgccacaaagctaacgtatgtgaacatcctctcctccttgcttccccaattaaatctagaaagatgtttcttacttagaaattacaaattaatgctgctacaattttggacaggaagaattttacattagcttgttgcagtttttgccttgagagccttgaccaagcgaacatgaattgattattgtggtccgtagctagatataggtggtgcaattgctaatcttagtagggattttatggaagtttcttatgacacatgattgatggagagcaatgaaactagtccacactattttcaacacataatagtcttggaaacatgatacgaattccctactaagactagctaccttaacaactgcaccttaaaaagaaaacacactgctgattacttgtggctctagc

SEQ ID NO: 78860 - DNA, 620 bp, Zea Mays
gttgcctctgttggagggctcaaaatctctggcattttggttatttctccaatttttggcctttcagccttatcagtcttcatctcaactagcttgactgaaagtaacttcggcattacaaccggctctacagtgctctgcacagatggaacagtttctcttgttttggtagctgaagaagccccttcgccaaattcaggtatcacggccggttcaatgtaacatggtcggtgagtcagaaccttcatcttcttgcccttaggctcaactgtgatgactgaagcagcaacctttccagaagcagcaatctttctttttaccccttgcttgcgcagagggtagcaatagttaggatatacgaagccaatggcatcaaataccatgttcaaccttttcttattctgaccccaaaagctgtggacaaggcattgtcttcggtcttggaatacgccccaagtagctcgtctctagtagcttcaatgcacttcagccagtcatcatttggttcatcaaacttatccccaaacctgaagatatactttagccagaccaagccaccttcgctagagtcagtgatggtctccttcggcatttcccagctttccacaagcggctatacc

SEQ ID NO: 78861 - DNA, 817 bp, Zea Mays
gcccgtcattctggcaatgagccaattacggattttactgccagcgggggttctgcacttctccaggacatccgctttcggaatcctgcattgcgcattcatgatgccaggattgatgggaatcggttctggactctccagcatgtggatttttacaactcggtaattcttcccaagaaacatcagcccattctgcatcagcggtacatcaactgggaatgatgtgaagctattggagatccggagatgacacaggtgttgagggcttgtgagagaaagtaaatgaagaatataatgacattccaatatgattggaatgatgaggtcattgctcaattttattccactctttggatcaagctggccgatgaggaaagtccctacaactttccttatcttaacttctttatcgaaggcagctgtacaaggtgagctaccggcggttcgctcacattcttggattctctgataatgacatttctggggacaagatcaaaattcatgattttcggcaacccaccaaagatgaagccagagatcttcatctctctgagtctggaaaattttgggagtccacaaatattacagatatatcaactctctcagcagaatgaccctcattcccaaagggggtaaccagatgaatattcttggagagagcaaggtctttctctcattcatgaagcccaacagttcagagagcatcaacatttttgatatgatctggcaggagattatccatgctgcctgctttccacttaagggatgtctacatgcacctttcataatgaagatgattgaagttgtgacgcagttc

SEQ ID NO: 78862 - DNA, 1106 bp, Zea Mays
gggaaacaaaggagatgacaagaactgagttcagtgttctattacttcataccgttcctagatacaattctagtatataacgcgccctttcctgggctcaacaaatcgccagctcgacaacatggcccaacatccatctacgcgaccactaacctttgagttcaccttcttggtgcgcgactccttgccccaacaatcactgaagcaggtagctcctcaagactgctcttcgcgtgttcctttatcatctgatgaccgcttcttgctgacattcctgacatctcctccttcgttgcttggtcttcttgagtccttgtgtggcgggggctaacagcccagttgcccgactggccaccgtcgctccgttggccagggtacgtgagtgaggagtgagaaggggagaggagcgcatgcatggtagggcactagatccggaacaacgaagggaagagacatagtggcatgacaggagggaggcagcatatgtcgagggagacgggcaggaggtagcatggaggaagctcacgggagggagcagcatggagggagaggacactggacaccggacgccacaccattcgcagttagatttgaggatgattttgtctccgcggtcgctcggcacgagttggacgcgcgatggcaagagccaccgtgaaacacaggtgtggcctggatccctagcgtcttttaagactttatacttgttcttatagttatcataagttaaaaatatttaaatttaactatatttataaaaagagcgatatgattaattgatacaccataaatatatatattttttaatatactcatttggtgtcataaatttctatgttctttccaatgtatggaggtggtatcatccaattgcatagccagaactgcgacgcaatatagaagaaatataaaagattttggtggtaataaatgtcagtacatgaaaacataaaagaaaaagtgtttccctataaaaaaggtgttgatgccaaaaacacaaggagaacgtatggttgttgcttccgccattaaattcagcattaattctacccaaaacggtagcgctagaatttggacatccggcctatcttgccaaggtcaacact

SEQ ID NO: 78863 - DNA, 728 bp, Zea Mays
atttggtgaagtattcgacagcgacgaaggcgaacttaaggttcccctgagccgtgggcaggggcccgacgatgtccaggccccagcgctggagaggccaagtgtgggcgatcagctttgtaaattgcgaagggctgcctgatcgaggagaaaacttctggcaggcttcgcaggaccttgtgacccgatttgcggcgcagatcattgcgggccagtagaaagcttggcggatcaccttagcagctagggcccttggccctacgtgagagccgcaggtaccactgtggacttcgcgtaggatctggacgccttcggtttcggtgacgcatttaagcattggctgactgacccccttcttgtatagttggccctctatcagtgcgaagtcccggcttcgatgtttgaggcgcttggcctcgttgatgtcggttgggtgatagtacccctgtaggaaaagagttattggtgctcgccagtcttcggtcatgataaggttgactatgcggtggccctcgctgtcattggttatttggagcccttcggggctccggacggctggtgtgccaatgacatggtagaacacgtcggagggcagggactcgcctctggctgcagccttggccaatgcgtcggcctcttcattcttggcccggtccacatgctgcaaggtgaatcccttgaattgtctctcgagacttcggatggccgtgaggtattgcatgagtgcg

SEQ ID NO: 78864 - DNA, 406 bp, Zea Mays
cgagctacaatgggcttcccgaagtgatcctagcgggtggaacgagggcgaagtcgctggtccccggcgacgtctctccttcactcacctttctctcgtcggcttctagtaatttggtggagggattggctcggtccagaggtgaggggggtcatgtacctggagaccagaatcccctataaagcccacaacaaccactactgcgcgaatcgcgcaacccgcgaagaaatcggaccacggcggccccggcttcgacttctccggtgagaagacgactgcaggtgctttgggcccatgtgccacagagactcaggtagtgcgcgacatgagtaactgtccactaggccccacatgtcggcgttaccagcgcgggttatgggtacatggcacagtctgccctgcgggc

SEQ ID NO: 78865 - DNA, 642 bp, Zea Mays
gatcattattatctggattgactctttacaggtcatatgctcctaaattttgtaccacatgcttggcattcagaaacagaattctggaagcagtgagcaacattatattagagtgaatgtacaattgattctaatgaaaatagtagtgatgtcttgaagagatcacaagtaagcacaggatctctagtcactcaacttgctggataagaatcaaagtccagaaactattatacttaagtttcacatagtcatcctccttattttatgttatacacaggtcacatcaaacaatacagcccaccctttcaatcatagtcaaaaggatatatccttcaaatagtttatccttgcttcacccgacataacttgcattatgtaccaaagactacataagctgctttacaaaagaaggaagcaatacatgtcctatgagaatttggttactggcctaaataatgttggatgtgatatggtgcaagctgagtacgctgacagaaggattgttcaatataataggataataatccactcacctcaatgtcgttaatcagcatctcagaaagagtattaaatgttaggagttactcagtagcattcttaattgtattacactgatttgcaaatctaccaaaaacgttgaaa

SEQ ID NO: 78866 - DNA, 535 bp, Zea Mays
agttgctgaaaagttggaatataaagaattcaaaacaatagatcacctttgaaactaaaaatagtgtttctatgatattgagggcattgtattcgcacgagagggtattagagtagaactagtggatgaagacgttagtgggttagttaatgaccttttgtgataataggtttcctataatcccctctattaaaggcatatctagacgttgtttatgtccactcaaataaaacgccacacataattatgccacatcgtttctcaaaatgaaagaaagaccatggaagatttagccaaattgcgtgagagaactgtccaaacataggttaaggttgtaatgcaccttttttccaccatacagttgcaaaaagttgtaatataaagaattcaaaacaatagatcacattttaaaccacaaatgatgtttctatgatattgaggatattgtattcgcacgagagggtattagagtacaactagtggatgaagatgtttttgggatagctaatgaccttttgtgataccaagtttccta

SEQ ID NO: 78867 - DNA, 479 bp, Zea Mays
aaacgcttagattgattcatgcgcgcccgatctggatcaaacgacacagaatcaccagaccaaatgggtatcgaagttctaatcaggatcgtccgtccaatgatcaatgactagtgcccttctccatccccaggcgacgatgatcttaacaacttggtgcttgatagtcttatctggctagaatttcatggataaaatgacgaagcgaacacgactaacgaggactcaccggagtatagacacaaaggccacccgtctgtgtcaagggtagatcctccatgaagatgaagcttcgatgaccaattctcattgctttgggtaaccctatgctacaataaggccacgattgtgttggcaacaacccagcgttgctcccttgcaaccatgtggaccccgatcggagctacggctataaggcgatgatgacagcaagtctttgactcgcgcggcggtggcgaagcggcactctatggccctcc

SEQ ID NO: 78868 - DNA, 430 bp, Zea Mays
agctagggataaaatttcctgaggtgttctatattccaagagttcccgacttctgtgctgtccatctgagtgagacgatatgatcctgaccgagtgacttctgctactacgaagggtacttcccataagggtgataacttgtgctgtccctcccccgttagaattcggcggaggacgagatctcctactgagaaggatcgttgccgcacggccttgtcgtgatagcgccttagagtctgttggtatcgtgctgattggattactgcattcaaccgttctttctcgagtacatcaatgtcctccatcctagtagcttcggcttcagctatgctttcgaagatcaaccttggcgccccgaacttgagatcaacgggtaacactgcctccgacccatagaccatgaataaaggagtgtttccatgcagagctc

SEQ ID NO: 78869 - DNA, 575 bp, Zea Mays
gagaaacccgcgtcgataggaaggaaaccccactgaccgcgtcgtccttccttgcgtctgaggcgactcgccagcgatttctgccgctccaatccagctgagccccttcaatctccgagcattggagcccgattcaagagccaatgctttcccagaagttccaggtaatccaacttgaaatacatcgagttttccgtcgattcttgaagcatttttcgtcgatttaagtggatttgattgtaacccttattcttcacctaaatgtgtgatttgtatccgattttacatctctctaatctgcttattgcgtcgctcattgcatccatcttttgttcaggagccccgatcttagagcatttgcatttcttctagatccagtgtatcactcgtcattcatagacctagacgaaggcagtggatcatgtatttattcatgagtttgcagagagtacctttacacaacattagtaacacgtatatgcttattgtatttgatatatatgcatatcgtcaataatgtttatgcacatttgtgcaaatgctttgaatattggtcaagataatatgcataattg

SEQ ID NO: 78870 - DNA, 352 bp, Zea Mays
ggaggatgggaggaactcggcaccaatcaccggcggcgatagcagagcagtgcggtggagaaaggggagggaggtgaagcagcgttatataacagcggtcacgacgggaaagagggaggtaaccacagcgttcgcaccatctcctgccatctcccacgctcacgcgcgcgctcgcccccgcgctgcacgccgccagcctacatccggagaaacgcccgattcgaccgcatcgggggagctaggttcgagggtagggtttgcatcttgggggcctggccgggaaggaggagaaggcaaccgaacaagcccacttgcatctcgggggcctggcccagggtacagtcgggcaacc

SEQ ID NO: 78871 - DNA, 454 bp, Zea Mays
agcatgttgcaccgcctcaagtcgttgccgacttaagtcgattgctccgtttgtagggcatagtggtcaccccgagttaagtaagcgtgagcatgttgcaccggcttaagtcgttgccgacttaagtcgattgctccgtttgtagggcatagtggtcaccccaagttaagtaagcgtgcaagccaatcataaacgacccgagtatctttgaaatctctctttattgatgacgtatttccattatacagaatacatggtcgctccagctgttttgaaatacagctaggggtaaaactttctgaggtgctctatgttccaggagttcccaacttctgtgccatccatctgggtgaggcgatatgatccgggccgagtgacctctgctactatgaatggcccttcccataagggtgataacttgtgctgtccctcccccgttagaattcggcggagg

SEQ ID NO: 78872 - DNA, 620 bp, Zea Mays
ttatttcaacattaacttaagtaatcattgcaatttctgaaatttgttcagaaattcgacagattcaggtgctgggcttgtgaaaagcacaactcctaaacgatcaggtgtaaggctgtcaaatttttatacaagcaagataatcatgttatctataactcttctatatgacttttctacagaaaacatgatttggtttatcaaacaaacagcacaacataaacaatgcgtgcagccccaaaacagcaatcaataaatcgccgcgttcgagagacttgaattactctaatgctttactattgattcgagttaagacaatcaaattagaaccaacaagtcgacttgcaaattttattcaagtcatttagtgcactaaaagtactacaaccaattaacaatgcattcttcacgataatcacccaacaattcgtgttttaaattagacatcacatgagcactactacttttcatccgcgaccataaccatacgcatttagaatacaacaagccaatcatcatgactacgatcttaaccaaatcatcgaataaatctgctaactcattattatagcactccgagacacaacatgtatatatatataacaatcacttacgccatc

SEQ ID NO: 78873 - DNA, 272 bp, Zea Mays
ctatttttaagccttcggcgaatgcatgtaaagtagcaatttactttgtgcccttgtccgaaagcttgggaagtgaaatacgattagacaagaagcagacatgttttgatgttttctcatagacccatccctttaaaaacttccatgtcttgaccttaatttttattggttgatgttttaataactggtacaatggcagccttacaaaatctttgcacgttgtcaccaatattctgccttacaatggcaacggttcttaagttgaatacatt

SEQ ID NO: 78874 - DNA, 395 bp, Zea Mays
gcccaagacccaatggtatttaatctagcagcaggaagcatatctgtagtagaagcattcatggatgtattccagaagaattgccaggaatgccgccagagagagaagtggagttctacattgatctaattcccgacactgcacccattgcaaagagaccataccgcatggctcccatcgaattagcagaactaaaactccagatcgtagagctccaacagaaagggtacatttatcccagctcatctccttggggagcaccagtccttttcgtcaccaaaaaggatggaagtatgaggatgtgtattgactaccgatccttgaatgtggttacaataaaaaacaagtacccactacctcggatcgatgacctcttcgactagcttcaaggggcc

SEQ ID NO: 78875 - DNA, 454 bp, Zea Mays
gtgcgtcgacatgtttggtgtgcgttggatatcgtgcatcagataagacatgcaaatattgtaggctagcttggaactagtatactcacccatcatgtttgatgatgcaccgaacggatagggtactcaaagagatctataactatgcacatctaaagatgaaggtaaacctcgatctcattgtgttgccttgttttttatactcgaagtaatcaaaacaagtgcccaacactggctaaggagacatgttggcacaccaagcatcaaccatgaaatcggtcctatagaagatgctacatggcgcttgcgatggcattcaggagcgcaggccacctccttgcgtttgtcagcgactacctgcacggtgactcgtaattggtgaaggacaacatctcccacatagggttagagggagacccaacaaccggggcggcaaaggtgaaaggtcatgccg

SEQ ID NO: 78876 - DNA, 790 bp, Zea Mays
gttctgatgatatagtgccacagaaagatctcaggattcagtccccctcaccgccgatgaccttgcgcccagatttgcgccggtcgccgtgattcgtgcttggcacgtagtggatattcacggggaggcaaaaagatctcgcgggggtgaggatttggtcgcgacagaagcttatcaccaagcctgtagccgtgcgacgtggctggatcgccggtgtcgccgtggaagttctggtgacctcagttatgccatgtcgtggctcgttactgcacggtagtaaccgtggcacacttagaattaccatctttgagccattccaccgttgaacgccacgattaagccaccagtgctctcccctctctccggccaccagcgcgccatctcaaattcacgggccactgccctcgggtcctataaattgagcgtgccatcagtttcgctaggtagtcaagcatccaatacaccaactcgtgcctcagatcgtccaccagagctccctaatttgagatttcccccaaatcggtcaagaacaccgcgtgggtgagcacgccgtggccagctctccacaggtccgatcatgccctcctcgctcttgctttagcatccctgtgtgcttgtgatgcttctggacccggccaatcgagctagaacccataggatcatcgggaatgcttcgagttgtcagttaatcgcgctgccaccgtgggtagagagattaggggctagaaccttgaaattggttgaggggaaatggttattaggggtcaaattaggtgtcaaccactccaga

SEQ ID NO: 78877 - DNA, 573 bp, Zea Mays
ggaaaaggcaggatgccatggtgctggtgcttaggtgcccgacctgtagggacaaggacgacgcgcgtgtggcatcgcggcacgacaaagcttctcggctaatgcagtgaatcgaaagcgagcgaccgaagcaggtgcagaaatgacacgaatagaaatcgaaaacacgagagaagaagaaggcctcaccaggggcggagaagatggccaaagcgggcacgagaggcggtgcagtagttccgtggcgcaagggatgctgcggtttcatggaagaagagagagggagggggttagcgacaccgagatgtgtgtatatattgaaaggagaaggcgtgggaggtggttgctgattttgccatggctcgtatcctgaccgagcgagtgagacgattgtgtacacaacatggttgatgttgcgtgacgaggcaagacaagaggatagatgggggtagacgaggttagcggacgtgagcaacatgtcgttcggtgatttcacgaaaaaggacacgagatctggaacaggctcgacgagaggaacaaatatatatatattatcgagattccagatttttt

SEQ ID NO: 78878 - DNA, 2112 bp, Zea Mays
tggagctagagcagtcatggacacagccacatcagcagtggtaacagcagccgctggtggcactggtggctgagcgctgacaggtccgacgaccggtgtcgagaaatccagggtgatcggcctgagcagagagatagaaggaccaaaagagtggagcgggggtcctgactaaagagcgggaacaacatcagcctgaagagccagaggaggaacacactgcactggtgggacctgaacaccggtatgctggagaatatgtgtcatgaatgcccggtgctcggacctgtcttctaggagctgctgctgcagggtgtcctggcggttatgaatggtctgaaacatcaaaagcatccgctcgaacaactgctgctggataacatcctgcctggcctgctcttctgccttacttgcctgctctgcggccatatgagcctgctgctgagtaagcgaccgaagaatagtagccagggcagggtcaatagctagaggggcagcaggagcagcactagaactaccagcctcgtgatgaagggaacgaggtggcacaggaggcggtgatagaatccccaagtcgtcatcatcatcggaagaagtatctgtagcgacaccctaagtcttgaactgtctgatagcctcatcctcagccttgatatctgatactagagctagcgctagaacagtgtccttaggagctgggcgatagaaaccaaactgaagtcgagaagcctcgagggtggcctagaactgaggaggcctgatcagctgcgcaaagatgtgacagaggtagtgagcatacgacaactaacggcgagcacggagaccatccaacactgtatcctcaatctcacatattagaaaatcaaccacatcaaactctgagtgagagatcaaggcaccaagtagctagagatgaatatgtgtggtggcctccctgtatcccatcctaggtagcaaagtccgcctcatcaactcatagaggaactttgttgcttgagtgaagtcagcagaagaatgtcgcgacccatctgtaaacgaaggtctgaacagggtagcgacatgagctgtggttggaacaactctgtcattagggcgacagggaggatctgatgtgccaaagcacaagatgtggagcctcatcgttgattcaggaaatccaaagagctctttgatctgagtggcatgtagagtgacatcctctcgctcgaacctgaacctcagccactagtgatctagatctatccaaattgtggcatagaaaactctgacccactgctcaatgtatctaccaccagaggtcaaaagagaaagtaaacatggcagataggataggtgaccctctgactcggcaccggcggctgacagaaatgctgggagatccaaaagccggtgcgccctcaaagcaatccgagctgacaactgcaccctgaagaatgactcctgagtcctggtgctgaagagcggtgcagctgttgggtccctctgtactggcaaccaagaatccatgggtacgtgtctgaaccgacgtacccgggtagcagtggctcgctgaagatcaagcagacatggatcagcagcaagcggtctcacctcggtcttgtcacgctccctgaagcgaggtggaggaataggcagagcggaagcgggagcgagagcagtggaagctagagtggtggaggtggtggacacaccaggtgtggtggacgtgagcgacaagagctggcgaagtgggaggtggagtggagactatggcggaaggagtgggggggcagaggagcgaggtcgaggcgcgaggcaatgaactctataggcaatctgatcagaagaaatctagagctagcctccctactcagcctgatctgcagctactgccgctgcaagtgctgcacgtgtggctctgtccatacgccttttcttcctgccctcttgctgctcaagatagacagtcttgcccttgacctatctgaaggggagaggagggtccttgtcatctcctcccccaggtggtgtggcgttcttcatcctcaccatcctgaactaactgctgcaagatagagtgaaaagataaacgagagtagagagcagtagataaggcctgaaaaagagtgatagcta

SEQ ID NO: 78879 - DNA, 581 bp, Zea Mays
cgacagttggtgacagcgcagaggcgaggacaagagagacaacaacctgggggcggtgagtgagagatgttacgacgacggcccatcagaggagtggaaccctagcccatcgaaaccacgggtacactgggcccagcaaacctgcggatatgcctccaaatgcggatatggagatctcgtgtagtgtttgctcgtgggccgcttgtcccgtgaaaatcggtcggttttgagtgtcctcaaacgaggcctaaaagtaaagagagtaccaattgacagatgaattagcaaatttaactagacaaattatcagtttttgcggtttggttgaggtatacgcatttagggtccatcaatattaattgcacatcactttgactagttaagagcaactccaaaagaacgtgtaaactaactccaaaacagatattagtcaagaatagtggtttttcttactccaacagctctctcattcttctcccaaaaaattagcgtcccggatccatagcctcctctcccttatattttggtgtgttccatcccaccccaatccattcctcaacgtatcagatcatccacggtct

SEQ ID NO: 78880 - DNA, 475 bp, Zea Mays
cagtaattctcgagtccgtcaaagatttgtgcttgagtgcagatcgtctagctaatggctcggtgggtgattgcagtttctgaaggtgcggctgcatgcatgtgcgtgaggaatgaatgattgggcagctgagagcaaccttgctttgaacaggaaggcaggcagccattgttttcagataagcatcaaggcgacatcaggcgtgcatgcgtgttaggtttcggtggtaggggacgaaacgaaaggcatgcctgccgcactgggctcaataactcgcctcgtccaatggccatgtgtgggctgaaggtcactgttctggctttctgcagacctggtggtctaggttctgctgccggtgcccaatcatttgtggcgatgagctactacagcaaggaactgcatgttctggaggttttcatttgtcgcaaaaaaagttgcgaggaattaatttattcagtttgttgctggattgttt

SEQ ID NO: 78881 - DNA, 495 bp, Zea Mays
catggttaaagagacggaagaaaaagtccaacggatcatacacaacttgaaagaggcacaagctcggcaaaagaattatgcgaataagcgacgccaacctttggtctttcaagttaatgatcatgtatacctgaaagtatcaccaatgaagggtgtgaaccgtttcggggtaaaagggaaactagcaccccggcatgttggcccgtttcttattcttgaatgatacggaccagtggcataccgacttgaactgcccaaaacattatctgtagtacgcaacgtgttccatgtatctcaattgaagaagtgccttcggattcctgatcgaaccatcgatgtggtggatgttgccttggaaccagacttaacttattcagaacatcctattcgagttttggatcagaagtataggatcactcggaaaagtactcttaaattctataaggtacaatggaaccagcatactgaagatgaagctacctgggagactcaaga

SEQ ID NO: 78882 - DNA, 507 bp, Zea Mays
gagatatggtatgattgatgtttttagtacgtagcgaatatttttatgaagctaacgcaactgggacagaataaaacagatttaaaatgagtaagttatgtcataaacaattttctaggtttcctaattatttattttaactctgtaaaggtttccaggggtatatttaaaaagtccagggaccctattgtaagttttgcctactagcaaggacggcgggttctatttcataaaagcaggggactgtttagcaaagtttgcctcggcgaagggggggtacgggttaactagagccgccagatcaaaatcccacgcaccagattaaatgaatcctttaagcgaagagttacgcaatccttgccgttggatcttcaaccaggcgcctggatccacatcggatggccgagaagagttcaggtcgaaccagaatccgggatcaaatctcagcccttcatctgggattgacggcccatattccaccccatcgcccaagcctggtaacggcgg

SEQ ID NO: 78883 - DNA, 408 bp, Zea Mays
ttcaaatgcaacattagtttcttgagcagcaatgagagcataatgagccatactatcagtgtcacgatatcgatgtggcaaaacaatattccttctaggtctatcttgagcaatagagtgattgttgctaacaagaggtacataaactgaaactaactgtgtaataggagtaacagaatcaatattaatagatacgtctacctcaagattctcatcagtagttttagacatagatgtggatgaggaaccactatcagaaacacctccagaggaagaaaatgtactttcatcaaaagtaatgtcggtgttttggaccgggggccctcaaccgacgagtgaattagtgctgcgtgcccctgtccggatgggttgatgcaagaagaaacacaagatttatcctggttcggg

SEQ ID NO: 78884 - DNA, 3329 bp, Zea Mays
tatatacatggttaaattaaaaaagctccctcacaacagggcaaaggcgcaataaaaccaaaataaaagaatctacacttcccaggttaaggcccttatccgttgctcgatgtcctctttcgctctaggggcaacttgtgctgccgtttcaaaagtgccaataaagatccttctgttccgtcctttccagatgttccaaatagtgtaaatcactaccccattgaatcgcctcctctcacttttcggaatcttggcatgggattcctcccaccaccggatcagcttgctaggctccttcgacgaaatgattagattttcgtcgaaatgcacccaagccagggtgaggctccaaactgatttggcaaaagcgcaaagcaatgccaaatggatacatgtctccattgacccattgcatacagcgcagtgatcttggtgaggccagccccttctttgtaaattttccgcgttgagtactttctcccttgccattgtccatgcgaaaaccttgcacttgttttcagcatgtgctttccagattaggccggaccggaaaggcccgaaagagcctctaaactgaatacggcatgatgagcaagtggagtatgttccgtatgtcgtccatctccagagaatggagtccctcatgctaggtctaaggtgagtgtcctgggttctgttccaaagggaaacgaactcatgtatctaggctgcagtggtgattcggcctcgcagtgcattgatccagtgattatctcggagctccatgtagcctgatccgtttttcatcctggacatcacaaagagactaggtgctaagtggcgtggcgtggcgtctcaccatcaagccatgtgtcatgccagaaacggcatttatggccatctccaatgacaaccttttgttgaggcgatgaaaagtgctcgatcagtgtcgtctgtcgtggtatccatgccaacccatggtttggtgtcatccacccattcctgccacaaccaactaaggcgtaaagctctgccaaatttatcaaggtccagaatccctaacctgtccaagtccttcggtcttgtgaccgttgtccaattcactaaacagtgagctccgttagtgttttctttccctttccacaagaaggatcttctgattctatccattcgcttacgagccgagaccgcaagtgggaacaccgtcagatgataggttggtatggaagagaggaccgaagagacaatagtgagacggccagctctatttagccactttcctttccaaccaggaagtctctgagcaattcattcaatgagcggttgaacgtgcagattctttaaggggcgtgtatgaagctgcaggccaaggtagcggcaggggaaggattctcgcaccccgttgaagggctcaaggacatggtctagatcaacgtcctcacaacatattgggtgtacggaccttttttctaggtttatgtggaggccagagaattgcccaaaaagcctagagaatcaccacaactggttgcatgtcctgtccgaccaggtttagaaaaatggccccatcattcgcgtatagcgaggttctccatctagttgtccgtctcatggggcaatggggatagtgtgccttggtcggttgccaggtcaagtatgtgttgaagagggtccatagctaggatgaatagcaatggcgagaggggacctccctggcgccccccttgacatggtaaagttttgtttggacctggccgaccgtttatgagcattgtggaggtggtcgtgcggaagaggatgggcacccattcatgccaccgctaaccaaagcccagagcatgtaggacttcgatgaggtagctccagttgattgtgtcaaaagccttatggatgttgagcttcatgaagaatgcaggcgtcttatgcttgtgcatttccctaatggtgggttgcacataaaggaaattattgtggatgtttcttttcttgatgaaggcactctgacagttggaaaccatagcatttaggtgggagcaagtctgttggccagtagcttggtgaggattttagcaatactatgaataaggttgataggcctaaaatctgtgatcttaagagcctcggttttctttgggagtagaacaatattagctgagcttaacaacttgaatccttgggaattaagttggtatagatagttgagtgcggctgtcaaatcattcccgatgatgccccaacatgtcttaaaaaaggcacacgtgtagccatctggacccggtgccttgtcagacggcatggagaagacggtacaccgaatttcgtcatgagtgaatggcaattctagttgttggaggtccctcatttcatatcccagcgcctgccaatcaatggtcaccatagaagtagagggagtagaaatccattggtcataaatccccttctaaccaaacaagccctaaggagaatattgcccccaaatgttgggcacctctatccctagaaaacgagcaggtgatcgtgtcctcacccatcacatagtgtgcgggtgatagacacacaacaagggggaatggacagatgggcactctaatgagcggctaagcaggagcctcccctaacgagctcataagtcccaagctcttccaccacctttcccaatgagatcgtaggtcccaagctcacgacaactgaaactcgtggaactggcccaatcttgtgtgtggggtccttgtccttgagctctacatgtggcgtcagcagcaagctcccgcatgtcgggtgtggggcacgacggcaagctctcacgcatgacatgggacatggcagcgatgctactcgggttcatgggggtcatgtagtggtgatgccactcgaaacccatggggttgggaggaagattttttatataaaaattaagagattgacaatcgagaccattggtgttgggtgaaagattttttatataaaaaataaaaatattgacatatgggtcccactaaatagtgactaacgatgtcaaatacatcattcatcccatccccccttatccctactaccaaaaggaaaacagggattgtcctatcccctcaaccaaacagaaaacaaggactgcccatccctagaaattggggagtgtatctcatcccaccatgtcctagaaacaaacacatgccaatagttcttacatgccttctagttcaagtacaccgtagggcatgacaactttgagaccacggatcggtttttcaagtataagagacaactaagagacgacatgatacaactaaacccctagatcatatgcagttaagagacaatatttatgaagaattgtgtagagacggcctctt

SEQ ID NO: 78885 - DNA, 616 bp, Zea Mays
taattcctcccatggcgatcccaatctatcgcttaattgcacgagttcggcccggagttcttctgcccacaacgacggctagacccgagggaaacccgaggtgttcccgacgactaggcgcggtatagcttaattggtggggtcgacgagcaccataaacacacgagagtgctgaaacatgaatcagaagggtgagagcggacctggagatggctgaccatgacggggtgactcacggcggcacgaagagtggatttgggggaaattccaaattaggatgctacggtggacgatcgggggcgagggctggtgctcttgcttcgtaacaacctaagagagggggtgagtcacaggcgagcgctatcgtggcattcacagtgcaaagacttatgactgtcactagttatcccacacggcttgcgacgacgtggtgaaacgaccgagagcgtggtgtaaccaagagaaacggcggcacgatggcggtggtcgtgcggccacgtcgtggcgcaagtgggtacagcgaactgagcagtaacagggaccgagctcatcccaacgccaagatcttttatcctgagtcattatccgcgtgccattgggcacgaatcacagctgc

SEQ ID NO: 78886 - DNA, 959 bp, Zea Mays
agcttgcttatgattctgcaatttcataattgtggttgcactataactgttgtttttcccctgatctacgtaattgttggcttctaagtaaaggaaaaagacattatggaactctttggtggcttgcattagcatgtatctaggcttctgcagtgtacttcgcctgtttggttgtggaaatctttatgcaggcttaaacaatgttcaaagtactagctagtacattgattaggcgatgtagatttacacaagctgttgaacaaaaaaagtggagaaattctcatctctttctaccagtactagaaacataagttctctactaaaacatggacgtgactgcatataacacaatgtaaggaaccaaacacaactgtatcagtgcacaatgattacataaatcaatttacaatatctctgacaacaacgaatgaataattaaactaaatctagcgatggttagagtttatgggttggacctttctgacttctgtgcctccttgtgttcaccatcaaggtcgtctgcgatgacccaaatccagcgatggttagggtttaggggttggcgagagcaatgtggatgggggcgtgttaggtggaaggggcgagagaaatgcggatggcaatgagatagagcgggatgcggcgagtgaagtcagcgatgacgcagctcatcgacgcgatgagaggtaagggggcgtcagtgaggtacctggtcgagggggcaggtcgtcgacggcggatgtgtcccagcggcggtgaggtacctggtcgagggggcaggtcgtcgacagcggtcgtgtcccggcggcggcgattagggttggagaaaatagtgggggagaaagaagaggagtgggggagaaagaagaggagtgggggagatagaggatgagcggcgtttgttttagtgacgacggcgaaacatgttttttggcgcccaacgtgtttggcaatgcgga

SEQ ID NO: 78887 - DNA, 533 bp, Zea Mays
gtggacactgatgagaagcgccaagagcgtttcctggaaggattgattggacctttgaactatcaactttagagtcacacattccccaacttctagacactcctgaacaaggcaattggcctggaaagcaaaaggaaggagctatctgaccacaaaagaaaatttcaaggtcagtccagcaggaacacccggccaaacaatgctcaaggttcgcagttccgctctggaaatcagggtggaaataattatcaagtacaacgctctggacagcaaagccagagaagtaatcaaaaccagaaccagtaaagaagcaactcccagaccaaccagaggtctggtggaaattcacagaaccgtcaaggtggcaccaacaacacacatgccagaaacaacgcacctgtccaacccaatggatgtttcaagtgcggtgagcaaggccactatgccaacaactgcccaaggcgcaaccagcagacaccccagaaaaacaatactcagagaaatgaccagaacacccccgctcgtggatctgc

SEQ ID NO: 78888 - DNA, 806 bp, Zea Mays
caagattgcagctatcagtatctataggaaacaaattcttagaaaaaagataattagtttctaaatctagtatgttttcctaccaaccgtattgggttcattaacacctgatgaaaccataccttatctaggtttgtgatcactgatcgctagcagaatatgaaaacggaatttcaggcacacgattgttaatttctgggaaatgaatgttccctaaatctgcatgtatagaccatgtatcaacattgtccaagtttatttaatttatgacgtgtccctcaacttcaacatcatgcaggcatctagtgcttacatgaaaacaataccatgagagatgtgacaatggttaaacctctagaaagaacaccaaaacaagtagcaagcacaatccacacatcatacactgtggctaataatgtgtccattccaattctaggtttctaacttcactggttggcaaaacacattaggcaattcaagaatcacaaaacaaaatgtacctacatgtgataaaataggaactcataaattcataaggtacgacgagcaaaccagataaaggatagtggactatttcatcaaaggtattaactggaagcagcaaaagatgaggaagacagtctgttgcacttacattttctttattagtgatgttcatgttctcctcccgcctttcatactctgatatagcattcagatgtgccgcatgatccctcttcaatatctcctatctccacgtcatcacttgactgagtccttaaaattttgttacccattctttcttttaaatcaaaaggagtcccata

SEQ ID NO: 78889 - DNA, 909 bp, Zea Mays
ttgcttaagtaactaagctttgattacatacaaagtttggagaaaaataagctcaaagttgtgctgtcagtcagccttaagtctgaattttcagtaacagtgaagttggatgaacttagagatcgattttgagtaagatcctgtgactatttgatggtgaacattgtaacaaagtgaaagctggtttgttaggctacaactttgatatagtgagatgatcgagtcactgcatgaaatttggagcaaatctccctgccattcactctcttaggctgactgaagaagttcttgatggtacagtaaccaaaaagatctgctggttcagtgaacttgccgccggcgacccccgcgcgtagattcacgccgccgaggtgattcgtgctcactggtgcccggataacgccccgaggtggaaagatcttcactgctattgagcttaaggcattgttccgcccggtcgccgtgtccgcttggctcatggccgaattctgataagttcaccggagttagccgcttgctgctcggatgacacgtgcctagacgcagtacttcgtcgtagtgactcgctctagcacatccggtcatcgccggtgagcccgccacggtaaatgccaccaatcgcttgcgccaatgctcttccccctctccggccgccgcgcgtctccttcaaattcactagccaccgctcaggagacctataaattgagtacgccatgagctccgtagggtaattacccatccaaagcaccagcacttgcctccaattgttcaccagagaccacgaattgctcatctcccccatatcaggtttctggcaccgtgaaaagctcctcgccatggctagctcgattcaggtccaatcttgtcctctgctctgttgtttcagcattattgcatgccactgatgct

SEQ ID NO: 78890 - DNA, 573 bp, Zea Mays
cctgggagcagctagccgcgatgaggtgattcacggcggcgcagtcgaccaatttgggggaagaaggaaattctccggctatggtggctgattgagggcagggatggatgctttggcttggtgataacttagcaaagcagaccgtgccgtcaatttataagggcgctaagcggtggccggtgaatttggtctcgcacggtggcggccagagaaagaggagatcactggtgcaagtgattagtggcatctaccgtggcggctctccggcgatcaccagatatagatgatccgagctattgcgatgtggttaagggcctgaggcatggcgcaatcgcggtgaacaacacagattccgctgacgaccgtaaggccaagtcgccggtgaagtggttgagggacagtgcggccatagtgtcccgtacctatccgcggcgtgatcttttcaccgtcgagctcaatccacagacctgaagcacgaatcgtggcgatcagtagcaatcacggcgaagggtcaccggcggcgagattcacggaatctgtagatttttttgccactgtaccatcagaggcttc

SEQ ID NO: 78891 - DNA, 442 bp, Zea Mays
caaggacccttgggggtattttagctccttagcaaaatgttgcacttcggcaatttgatctgctgatagttgctttcccgaagcatgtcgaacagtatagtccaaatcgccctagggaggtgcttcaggaacaggtgacatgggcttttttggaagatttatttcacctgctctactggattagctcccgaaggacccgcttcaacttgaacaggagaagcacttgcagcagctacttcccttgtatcttcaattttatcatcagaaacttcagtagtagcaggagcgggcaacttagtggattgtaaaacaacatccaaaacactagccattctcctcttcctaggagtcgttgttgcagtagttgatagcttcggcaaccctgtcgctatcgggggactcagcagttttgattgttctttcgctattttctttgttcccg

SEQ ID NO: 78892 - DNA, 509 bp, Zea Mays
tgttaatcggctagaggtcttatacgagtgttatcgcagtccaataattattggaggcaagtagtgtgcacaagtcggtccttgttaaaattaaggaacaatccgctaagatatacacataagtgccttaggtccctcagtagccaatgtaagtcttacagagttttatgccaggtgttaatgcctctatgttagacctcctaaaatatggtgttttaagtgacttgtgtgttgtctagtttaagttgagaaaaggttaagaaacattaagtaacttgctcccacctatgttttgagttgcaatgtctaaatggttcgctaagtcttctactgtgattagccaactcatattaaataggagtcgatttcgttgagcgtttgttatatatatatgttgtgtctcggattgcgatagtaatagacaagccgacgtgtatgctgtcgaacggactgtgtcgttgctctagttagccaaattgttcgatgaattggttaaggtcgtagccacg

SEQ ID NO: 78893 - DNA, 604 bp, Zea Mays
aattgcgtgagtgaactgtccaaacataggttaaggttgtaagacaacttttttccaccatacagttgctaaaaagttggaatataaagaattcaaaacaatagatcaccttttaaacctcaaatgacgtttctatgatattgtgggcattgtattcacactagagggtattagagtacaactagtggatgaagacgttattgggccagctaatgaccttttgtgatacctggtttccaataatcccgtctattcatggcatccttagatggtgtttatgaccactcaagtaaaacaccacacaaaaatagtgtttctatgatattgagggcattgtattcgcacgagagggtattagagtacaactagtggacgaagacattagtgggctagctaatgaccttttgtgataatatgttaactataatcccgtctattcatggcatccttaaattgtgtttatgtccactcaagtaaaacaccacacatcaatataccacatcgtttctcaaataaaataaagactatggaaaatttagccaaattgcgtgagtgaactgtccaacataggttaaggttgcaagacaacttttttccaccatac

SEQ ID NO: 78894 - DNA, 419 bp, Zea Mays
ataagagataagacttcttcagtttccactactatcatcacctgacatttattgagaaggcgtagtcaatttctaacttattcgtgtacatatttactgttctgtaacaattactgtccataaggtatacttactttcatcactgtctttcaggtcataagaagtgatattctgaatttcatgatttatggtatgtcaaatgtcctttggcacttattacctgtgtgtttgaccacctctatcagttatgagttcatgaacttaaaaaatcaaattaatgagaacacaaatgaagctaaaattattaaaaagatgtcagaccaatggcatgtactttaggatgttttacacttataactaccatgtttacacgttaaagccgagagtccacgttgaaggttctcccttttgcagaaagg

SEQ ID NO: 78895 - DNA, 412 bp, Zea Mays
agccgcagcggcactcctccaccttgatagtcgaaagcacgcgctttcctcggcgacggctccaacaaggacatgatcgaagggtggtgcctcgacaccggcgccactcatcacatgaccggccgacgggagttcttcaccgagcttgactctagcgtccgaggctccgtcaagtttggggacgcctccggcgtagagatcaagggcgtcggctcagtcgtcttcaccgtcgcgtctggtgagcacagactgctcaccggagtctactacatccccgcgttgaggaactctatcatcagcttgggacagctggatgagaatggttcgcgcatggaggtcgagcacgaagtcatgaggatctgggacccctctcgtcgccttcttgccaaggtacgcaggagtccaaatcagc

SEQ ID NO: 78896 - DNA, 577 bp, Zea Mays
tttctccttgataatgctttctccctattgaattcttatacttttgctttcgtgccattgtattgccacccttgcgcaatatctaccttgatgtatgaaacctttggctctctactccttgataatgctttctccctaactcactttatatccttggttgtatcatttattctgaatttaatagttcatgattatcttatttcactcttggccaccaacaaatatgtcttgtctaactccttgataattcttacccaactccttgatgttataatatccttcttattctaaaccttgtctcaccttttgttttggttgaatgagtagaattggattgtgttgtgctcgtatgcttgagttcattgtcctttgtgttcatgtttgatttgcttctttgaaatgattgttggtgtattgtgtgacttttgtccacaatgacatcagttagctaggtaaaaccttagatagatgggtttttctctgctctctataatctgtctttgctcaaccctttcatcccttccattcttccatacccatacagatgtcagaccttggaatgtcaactacaagtgat

SEQ ID NO: 78897 - DNA, 453 bp, Zea Mays
cgcaaagcagatttgggggaaatttggaattggcgagctctggtgaacaattggaggcatggcttggtggcttggtgcttgacgaccctacggacccgtcgttgtgctcaatttatagtgtgcttgagcggtggcctccaattttagattggcgcgctggcggtcggagaggaagaagggtaatggcgcatacgattggtggccgcaacagtggcaacctcaccggcgatctgtggataggtcagtatgagtcacggcggcgtggttaaagtgctgaggcacgtggcacaagaccatgaggtgtctaactccggcgagggttgattcaaggcgatcggggtagagcggacacggcggccggataaacagtgccttaagctcatccggggggagaagatcttttcaccgcggaacgttatccggacgccggtgagcacgaatcacctcaccgac

SEQ ID NO: 78898 - DNA, 761 bp, Zea Mays
cgcctgtgatatactcctacaccgatataggtaaggagattataggcataatatttgatggtcaggacgtcgaaactgtcaagaggtaccactcctacgtccattacatcctctcctttgtttgtatatgattgtgtgattaaaggtgttgttgattatgtatactgatgaaaggtgttgttgggttgcattctttttttatagggggtactactatgccactttgaagtgttacgatcctgggatgtctccaatggtaacctcaactctgacctatgtgcaggcaataccctttatcgggatacactacatcttagggtagtcgtggatcccgtccctaccacccgctgaagaataagctattgcaagaaacatttagagtcatatatgctactaggagcacccctaaagtcaaaacaagaaagttgttttgtcagacatgaattttgcagtcctaattaaattatccacatttgttggccatgatttttaatttgtattacaccgtccacattatttatcaagggttttgtctacatatataaattgtatattgtctttgactttttcatgtgtatagtttttttaccgtggacgtaaatatagtttatgcctccctctctttggtgcacgcgtgccggaggagagccagagcagaggttgtagcatgcagtgttgataggtaggctggccgtaggtggcataggcggtggccgccgcaatgtcgatggccagagctgtaacaccccgggatccacaaa

SEQ ID NO: 78899 - DNA, 406 bp, Zea Mays
acgggatgaccattgaaactggtgctttgagtatagtagagatttctaaaacagcctaacccgcactctttcgggcctaggctgctaacaaattaatcctaaatttctgaaacggcctaacctgcactctttcgggcctaggctgctaacaaattaatcctaaatttctgaaatagcctaatctgcactcttttgggccttgagccatgcgcaagcaccgtgtgagacaaaaaatagtgggaaagaactagataagaaaagaatgtgcgacatggaaatttgagggaaaaaaggctatgtgtaacacctcaggtgttaccaagacactggcttcatacttgcactgatgacttgttatcacatgtggttaattggaggagaaggagcacctaaaaccttggaagca

SEQ ID NO: 78900 - DNA, 321 bp, Zea Mays
atcggggggtagctcccctcgaagaagatattccaggtatgggccccgccagtctgaggctgtcatggcctcattttgctctccatcgatctacatggcttcgggcttgacggctaggggcgtgctggtgtcaggagctaatttgggtgcttcattgattatgacagatgctttgtggacattgctaaagaaaacatttgggggaactgtggtttgccccgaagctatctttgctagttcgttagcgacttatttgtctttcaggcgtaggacctcctcacaaaaggcctccatctttgggttgtgacagctcaagttttc

SEQ ID NO: 78901 - DNA, 439 bp, Zea Mays
gcaagcagtgataagaatatgttattacacattaaaaggtttccaccatcatattttgttacagaagatctccaggagatatcttatgtctcatgaattgggattcactgagatagagcgaaagagttattaggtttatcataaaaggcatacttacaaaaaaatcttaaaatcactatacaagtgtgtatcgcaccctgctccagtagttaggatgataagttggagaatgatcagtgccctacgaactaatgtgagattgatcgaatgaaatcaattttggatgcttcaggtgtcaaaagcatagtgtatgaaatcatcagttaggttgtgaccaccgtgcatatggtcatgcagaacactgttttgcactgtaggcgacactgtttatagagcgaagttttaaatagaagctgagatagaagatgtgatatatgag

SEQ ID NO: 78902 - DNA, 1248 bp, Zea Mays
ggcatagaggttgccctaagatgggtgatcgcaaacgtgctgagtgtgccgcgccaatttaagtcagtaccaacttaaaccgactgctccgtgagtagggcatagtggccaccccgagttaagtaagcgtgagcatgtcgcaccgccttaagtcattgccgacttaagccgattgctccgttagtagggcatagcggtcaccccgagttaagtaagcgtgagcatgtcacaccgccttaagtcattgccgacttaagtcgattgctccgttagtagggtatagtgctcaccccgagtttagtaagcatgagcatgtcgcaccgccttaagtcattgccgacttaagccgattgctccgttagtagggcatagtggtcaccccgagtttagtaagcgtgagcatgtcgcaccgccttaagtcattgctgacttaagccgattgctccgttagtagggtatagtggtcaccccgagtttagtaagcgtgagcatgtcgcaccgccttaagtcattgccgacttaagccgattgctccgttagtagggcatagtggtcaccccgagttatgtaagcatgagcatgtcacaccgccttaagtcattgccgacttaagccgattgctgcgttagtagggtatagtggtcaccccgagttaagtaagtatgtcgattgatagagaacaatttgagcgcctttgaagtctttttattgatgatatatttctcaatttaaagaatacatcgtcgtcccaatagcttctgggatgtagctaggggtaacacttcatgaggtgttctatgttccatgagttcccaatttccgtgccgtccatctgagtgagacgatatgatcccggccgagtgacttcagctactatgaatggtccttcccatagaggtgacaatttgtgtcgtccctcccccgttagaattcggtggaggacgagatctcccactgcgaaggatcgatgccgtatggccttatcatgatagcgcctcagagtttgctgataccgtgctgattgaatcaccgtgttcagtcgctcttcttcgagtacatcaacatcctccagcctagtagcctcagcttctgctatgttttcaaagaccaaccttggtgccccgaacttgagatcagcgggtagcactgcttccgaaccgtagaccatgaagaaaggagtatttccatgcagagctcgactaggttgagttctcaggctccaaacaacatacgacagctctctgatcc

SEQ ID NO: 78903 - DNA, 1067 bp, Zea Mays
ggcaagcatcattaccataagtttcgaaaaagaccgcatcgacggtcttcgacattcgacgtataaatagtcactgcaagaggtagcctagactaccctcgcgtgcgacaaatccgagcaaaagacgcctaagggtgcagccggatatgcacaacaagtgcacgacacaaagtctttactataagacaaacccgagcaaaagacgcctaagggtgcagccggatatgcacaacaagtgcgcgacacaaagtctttactataaagacaaaacccgagcaaaagccgcctaagggtgcagccggatatgcacaacaagtgcacgatacgaagtctatactataagacatccgagcaaaagccgcctaagggtgcatccggacatacataaatgtgcgacatcaccctaatggcgcaaacgtcaattacgatcaccttaaaggtgcgaagtctttgccatctgacacggtcgaacaaaaaccacctgaggacgcaaccaggtacgcatcataagcgtccaccatcgccgtggaaagcgaggtccccatcccatttcacaacaagcaatttcaccatagtttacatacacacagcgaagggccgccgaccacatcgcacaaataatacagatcacatcttgttgccctccctctctattgtgagccaggggaggccagcgttttcactcactaccacaacacgagagcgagggcagcaaacatgctacattggctcagccttcgaaataaggcctgcctcacaaaaattaaacatcatcatcttgaactcttcgccctcaaaaagattccgcagatccccctccccaatacacgtcccggacgtcgatgacaacaaatctcgttggccaccccgatctagccgaagacgggatcgttccatccccatctgtcgacgcctcccacttcgcgacatctcgccaacattgtgcttcgacaccacccttcgccagcggcgctcttcggttatcgccccagtcaagggagcagacacttcgcgcacttcaggctgcggcaaggactttgtcgtggccatatccaacgcaacaaaat

SEQ ID NO: 78904 - DNA, 345 bp, Zea Mays
gagactccattattacatttatagcgatttcgcttgtctcggaatggaccactagaaatctataagctgcactgttatgtgcataacctaagaagacacagtctacggtcttagggcctaactttctcttcttcggcaacgggacattcaccttcgcaaggcagccccaagtccgaagatgcgaaagatctggcttccttcctttaaatccttcatagggtgtggcctcacggttgcgaggcggcaccctgttcaagacatagcatactgtgagtactgcctcgccccaccagatgtcaggcatccccgaactttgcaacaaagcatttgctaagtcacacactg

SEQ ID NO: 78905 - DNA, 391 bp, Zea Mays
cttgagtcttgcagacatgacaagtctcgcattgaggaagaaaacacataccttcgaccagtcttgagacgggtgttgtgcagtgagccctagttgggcatgatggtcagttagttcaagaggggaactagcggatcgggattaggccttgctgctcatgatggaagtgtcacttgctttgataaggttggtgagtgcagtggcttgaaaccatcagtcacccacaaccttgtcaagcttactccacctaaatctaccacccatattgagagagatggagtgcatgtggagcatgtgagatttccacctcagaaacaagtgtggtgtccaaaacctaaccatctcaggaaccacttgacaccctgccagataccactagtgccccccctcc

SEQ ID NO: 78906 - DNA, 345 bp, Zea Mays
gtcaagaggaaagaaatcaatttagacttaccgggtgtacctatgaacacacatagcaacagcggatcatccctgtgaaccatttatgattcatcactgcaacttttttcccaaaataaattgatgttatgcggtgtcacctgcacaattgcacatgaaagattgcatgattatacccatccatgtgcatgcatcaagaaacaggcaagtattgaatcatgcaataatcatgtgtgcttctttttgtgcccactggccactaccgactttgacaaattgaaccgtaaattatgcatccacccgttccaccgtaaggctatagatattacagctatacaattttca

SEQ ID NO: 78907 - DNA, 1035 bp, Zea Mays
gtaaattctgttctaaataatactagtatactatagagaggagatagagtgaaaccgagtcgggttgctgacactcacccttccactagactagtttctttgaaccactgaagatgagtatttcttgagattgcgcgagattttgcgtatgcttacttttctagggtagtcagtcgtcctgtagctcttgttgcagatagctgtaggtgaatatgtaatgattttacgtccgtgaaggctaatcggaagatggaatttcttgaatccttcactgcttcactgtgtcgtatgcagtttgcagtacagcgtgttcgctatcgggttaattttctggcatctccttcactctccaatataaatcaccaatgatttatgtcgggatatctgaagaacttttgttcatcactggccacagaaaaaacgagtggacttcttccactactactgatgtactacacctcgcctgtcatgttcaccggaagaaacgacagtaatacaccaacccatttgctggacttaactgaggtcagaaggtgaccatcgtgacactgctcctccatgtacatttggaaagagacttcaagtggttcttgaaacgaagtgacagtcagcggagaatttgtatcgagccaaaggatgcttcaaaccaagcataccagacacgccactcagattttgtctctagcattaccgtgtgctaatgcgggtcaagcagccagtcagcacttttacatggtcaaacgagcaaactgtttcctcttgatgccatgccagtgttgtattctgcacacatcagccgtcccgtttgaacggtgatctggttggtacagtataaaagaacaccacctctctcgccccctcctgggccttggcacctttgcagctgcacgcgcgcatgatgctgagccagaagagtctttttagaggcagagtatttgttgcagttcctgaggaaccgagggatgggaaatccatactgtcttgggttattgaccgtgtatctgacagcgcagagatcatcatcgtccacatagt

SEQ ID NO: 78908 - DNA, 868 bp, Zea Mays
ccctcaagccgatggtgagggccctgcactcccccaagctgatggattgagagtgtatgtatattgctctccctgtcttttgtttccatcggatctgcatttttatgcaattttttgatgcacttagacgtaaaacaagtttatgtgtactcaaatggatgggtgaatttgttgccaaattatcttaaaatttgccgcatccatgttctagtggcgtgagatcatatatctctgcttgtagcgcatggacaagtagcagtgggatctagagaagataaacagggaatatgctacttggaggacagacgtttattttgactggcaacatttttttaatgcaccattatttatggtttcggtctagctaatatttgtcatccgaaaataacatatctacaaataaaccactaatatattattaaatcattgtacaaataagtgattgatacatttatgaaccactaaatggaattgtcgaccatgtattctattaaaataccaacacctctatccaaatctggctcctatgcttcaattcacaaatttgtatcaatctaatataatttggtagtcatttatgtagtatttcaatacaaattatgtagatcgaaattcaatgaatatttgatgaattcattatatgaggatgcggcaacggggcgctctatatatgctttttttcttatttcctttgtatttttctctgtttttacagacctataggtgtttgagtccaataatattgttgtggagatgaatatgtcctgcagctcttggatctagttaaccagcgacatagtcatcatactggtcccgccttgcaagtgcatggttatttgacatctagataggtgcaggcctctctttt

SEQ ID NO: 78909 - DNA, 325 bp, Zea Mays
gcagggggccacacctacaaacatctcgcagaggtggacgaagatggctgcctggaggacagagtggggcgtgaggtgttgaagctgaagctcgaactcctccagcagcagcagaaagaagggcgaaatcggcagcgccaacccacaagagatgtaggaggtgaacagcacgaactccccggcggcgagatcgccaagaggggcagcgccagcacggattctcccggcgagccctgacgcgctccacccaagcaggtcacgcaccaggttaagtgcttcctcagactgaaagcggtcaggatgaccaagcgaagccatggcaagt

SEQ ID NO: 78910 - DNA, 743 bp, Zea Mays
gggcatagtggtcaccccgagttaagtaagcgcgagcatgttgcaccgtcttgagtcgttgccgacttaagttgattgctccgttagcagggcatagtggtcaccccgagttaagtaagcgcgagcatgttgcaccgtcttaagtcgttgccaacttaagccgattgctccgttagcagggcatagtggtcaccccgagttaagtaagaatgcaggtcgaccatgaacaatttgagtattcttgaggccttttattgatgatatatttcccagtttacagagtacattgtcgtctcgatagcttttgaaatacagctaggggtaaaacttcctgaggtgttctatgttccatgagttcccaatttccgtgccgtccatctgagtgagacgatatgatcccggcagagtgacttctactactatgaatggtccttcccatagaggtgacaacttgtgccgtccctcccccgttagaattcggcggaggacgagatctcccactgcgaaggatcgacgtcgcatggtcttatcgtgatagcgcctcagagtttgttggtaccgtgctgattgaattaccgtgttcagccgttcttctttgagtacatcaacatcctccagcctagtagccttggcttctgctatgttttcgaagatcaaccttggcgccccaaatttgagatcagcaggtagtactgcctctgaaccatagaccatgaagaaaggagtatttccatgcagagctc

SEQ ID NO: 78911 - DNA, 434 bp, Zea Mays
tcatggtttatgcgccacgtcgcggaagatttttaccgcggccgcaagtccgatcctcagctacggtggcgttcttatccctggtgaggttcgctgaattacgttgaacagtacgtctgccaggccgaattcaaatggctattgcttcaaattttatgtggttgcttggaaacgaatctgcatcaaagttgtacctggaccaatgttatttcattttggtataatgaccatgtcgaaaatcctcacggattgatcagaccagggcgctcaagttggcgcaataacactgaaccctgacccaaataagatgcagtgaacatatacctatcaggccgactgacggcgctttttcaacctcatttatctctcatttttatgcaacactagtgcttgattacttaagcaaactcgttctccatacatagttctaccat

SEQ ID NO: 78912 - DNA, 437 bp, Zea Mays
gataacttgtgtcgtccctcccccgttagaattcggtggaggacgagatctcctaatgagaaggatcgctgtcgtacggccttgtcgtgatggcgccttagagtctgctggtatcgtgctgattgaattactgcattcagttgttcttcttcgagtacatcaatgtcttccagcctagtagcttcggcttctgctatgctttcgaagatcagacttggcgtcccgaacttgagatcagcgggtaatactacctctgacccatagaccatgaagaaaggagtgtttccatgcagagctcggctaagctgagttcttaggctccaaacaacatagggcaattcccttatccacttccccgcgaccttttgattcttatcgaagacctttttcctgagtgcctccaatatcatcccgttagctcgttcaacctgcccgtt

SEQ ID NO: 78913 - DNA, 568 bp, Zea Mays
gggagacatcgcgtcgcagtcgtgcctgatcctggtgatcacgggtatcatcaagatcaagatcaagctcagccaaaagataagcaatcaaaataaaaagagataagctaataatcgcccccatactctcatccatgcatgcatgacgacataggacggagcacgtagtacatatataccgctggctgtactaataataacactattaaagcagagccgcagtcgcaagcgtcgtcaagggttccaagtatagattaagggaaaagcgcgtagacaggtcggtctattttcggcccttggatggagaccaggaggttgcttgagcacgtattaatgtaggaggagtaccgtacccagcagctggtggatgacttggacacgcacgcacgggacggcacgatctgggaagcttcgaaccaagcggaggaggatcggagaccgtgtcttggccaccacccatatcgggccggcctggggcctgggtgggcgactgggcgttctcgtcatcgaaaaaaaagggcaaagtcggtggacaaaactgtgtgctgaaatgtgcgaagtgcgacta

SEQ ID NO: 78914 - DNA, 405 bp, Zea Mays
gtgagctaaatatcttggattctcgaaacgtgtcataaaactaaaattttgatcacatgattgatggatataaaatggttgtatgcacaaaatgtcatgagaaatactatttttattattaaaattactcatgtcatatttgttaagtgttgttaaagccttaccgggcaatatctcaaaataggttgagtaaatcagctgagtaggccactcaaccggttttcctctggtggaaaccggttgaaccggtataaaaactggttgaattggttttggccgcctccgcgtccgtgctgtcagtcagcgccgcagtctgcgccgtcagtctcgcagactgcgctgtcagtctggcagaaaatctgcgcagtcagcagctttttctgcgcgcttttactgctcagtctg

SEQ ID NO: 78915 - DNA, 950 bp, Zea Mays
ttgtcgggaccgagctgcagctgggcgacattcttacgaaggcactcggtcaaagtcgactccaagaactccgtggtgggatcgacatgaaaaatcttgtgtaaactgggcttaggaggagaatgttatagtaagcccatattagtttcctttttccattcttaggaagtagaatcaccgttctgcagcgggccacaatcacagcgcctgcacgcgttcacgacatggcctagggcactgggatggcagtgcttgatcacgatcgtgacgtgacgatctgatttcctagtagccatatatagatgcatgtatttcctttatatacatagagcaatcaacagagaaaagcagccattcggcagcaccaaaatagcttcgtgtctactgcatgtgcatctgagttatttgcgtgtgcgtgtgagttatctccctcggatcggagttctatcagacaggaccgccatcccttctctcttttctttctctctctcttgttctctcctatctaacgcgcagaaggatttgatttaccactgcagctggccgagttggctggttcaagttctaccagtaaataaagtatagcagctacaaacagtaaagaggcaaaccagctcatgactacttagctttagttgttgtggttgaccctgctccacagtacacattccaaatccacttatctaatacagcaacacagagtgtgattgacatgtggggaagcaacacagttcaaactaggagtaatagacagcaaggagggcaaatcaggccggggacttgagcttattcagataggctgtttttgcccttcgaagccacatttctatttgttttcgttcaatgggaaatctgtgtttctctttcaatgggggttttcattttctcccaggttttcagttgacaaagagagcaaaccttcttctggtatctggagttcagtggctgtg

SEQ ID NO: 78916 - DNA, 338 bp, Zea Mays
gcaaagctaaaaaaatttcaacttcgtcaaaagacaagaaattcaatcatcagatggccagggtatgctcaacagctagggttactcacgacggagaggaagccgaagctgctgaaactgctccaatctctgaagtgatgaaacggtcagggctggtagtatcggaggatgcacctgccgctgaagctgagcaggttgatgctgaggaagttgaatctaaagatgattacagtgtcgtgccatctaaacccagccacctggagtttgggaggtccactattaccgaaggtgatatgcctaagctgatgaagttaggctatttcagtgaagccaaaaaa

SEQ ID NO: 78917 - DNA, 344 bp, Zea Mays
gtcaatagctccctctgtcacaactagacctgatcattccataacttctgaaattggtgttgtcttagtaacctcggtctcttctccctcacgatacacccttgcagttcatcacactctagccattacaatttgacgaagctaactcgtctgacgaagttaactttaaatgatgaagtgctcgcttgagagcgcagtgcagaaagcttcggctatgattaaatttttaacaacacaacagtgcaatggtaatgaatgttgtggtaactcatcaccaacccgtctgtttatatagtgctgcaggtgggaagacgaatcgctaggtcgcccgcactcgctgaacg

SEQ ID NO: 78918 - DNA, 823 bp, Zea Mays
gaaatttataactttaaacccagacttgatcccttgattagtggttagaacaagatgagaaatagtcggagtatatgattaatctaaaatggattatattttgggacaaaggggtacaaaataaaaagacataagacatgtgaaaaaacagagactacatctcgatcgtatttcagattttccatccagattttgcaaaaagacctctatggtgaccggttgtcgtctccagataaggaatgtgttattaaagtgcaagatcaatttaaggggatgtcatctacaattgtactgcatggcgagccaagtttacaaacacagtttccctaagctcttttcttttgctgaaattaaagtgcagtatttacatgagcccacggaacacggttagacaagctagttgtgatgctccatcgaagacaacgctagagaagattcgtcgtcgccgggggtgacatgagtttccaaggcccaggttgtcggctgctcatcatccatgaggacacggtgctactagagagtaagattgttgcttgtttcagcttcctcaggcctcctgtttctgtgactctccctgactgatgttgagaacatgtggtttgatatataattacaatgattgtcaaagcgattgttacgacgtcggctaggctactgttgagagagcctaaggtgtgtttgcttgagaagtgtagaagaatggagcggctccatttctattttttggatgttggtttcattagaagagcggaacggctcttgtagtctccatatgaaaatttgccataaatagttggagtgctctcgctccaccaaaatgacc

SEQ ID NO: 78919 - DNA, 400 bp, Zea Mays
cccgaggtaaatccatgtcaagatcatgtcaaatggtggagagaggtttccaaactttgtcatggtgggttctaggaaatttggcgccactttgctatttggacttgtttgatttaagttttgaaaaacatagaacgcggtcgatctttggaaaggggctgaaattcagatttctgaatttctgattttttcccaaagtgcattagttcaggggctgatttagggattttgaaaagttcaaatggcaaaactttcttactatattttgttggttatttagtgtactaaaactttgttatttgggttttaccaaaatttgtatttttctcccaagtcttttcccaaatgccctttatgtgcttaaatggtccacttaaggttaattagggtttgagagttc

SEQ ID NO: 78920 - DNA, 645 bp, Zea Mays
agggctcaaggcctttgtagtctccagcacagcatccagcacgctgaccattctcctcctattgggagttgtggcagaagctttttgcaccttcggcagttctgcctctgtcggtgcgctcaggttttctggcgttttatcacctttttcaccgatggctcttcagtcttaccatctctagcttcgactgagccgactgtaggcaccttcggcactacagttggctcttcagcgctctgcacaatcggagaagttcttcttgcttcatcagctgaagaggaccctgcgccaaattcaggtactttggtcggttcaatataacgtggccggtgggtcaggaccttcatctttttgccctccggctcagttggggtgaccgaagtggcaatcttcctctttttctcttgccctcgcagcaggtaatggtaatcagggtatatgaagccaataacatcaaataccttgtttaatcttttcttgccccgacctccaaaggctgcggacagagcattatcttcggctttggagtatgctccaagtagctcatcactggtagcttcgacacacttcagctagtcatcgtttggctcatcaaatttctccctaaatctgaaggtatacttcaatcgaaccagaccaccctca

SEQ ID NO: 78921 - DNA, 312 bp, Zea Mays
aaataattacatatagttatatatatatgtagttggtctacatatggttatatgaaattgttaggtttgatattaggtttgatattaagtgatagcactcggcactcggcaatgattcgattaaaatataaatgtagtttgcatgtggctatggagtggattgaatatataaatgtgattgccgaccatcgtgccgttgaaatatgcgtggttgtcagccatcgtgctgatatttttatttgcaggttttataaaccttcctgtgcaggggaggtgctgccgaaattttctattgttaggcttctgttagag

SEQ ID NO: 78922 - DNA, 330 bp, Zea Mays
tccatttttatagacaaccaaattgtatgcacggcatgacaatgtttagatatggcaatattagaccctgtcacgctccataggttctgacggactcactcgcaagcccatggcacaacaaattaatgctatagccatgttcgtgtcaaaacgttaacacggtgaccatatcgttaacgtacaagtcaagcatctcattacacaaattcaagacatgtcgaacaaaaactactaaaagtcaccaataatctaattaacaaatgcatcgtctgtacatagacatccacgatccatacacaaattggggtgtttgcttcctctcgctgtgct

SEQ ID NO: 78923 - DNA, 468 bp, Zea Mays
ccgaagcgaagattgaggaggtccttgaaccgcccccaggatggtgtgccctcgtcgtcctgcagctggatgaaccacagctgcgcgacgtcctccagattataagaggccatccacacgcgttcctccgccatggtgcgctgttggcgaaaatagtattcgcatttgttgatgaagagcatcgggtcggtggtgccatcgaactagggaaagtcgagcttctggaacctgggggggccgatccacacgagggggatcctcgcgctggccgtcggtggacgacgaggatgacttgtccttcatggttctttcacggcagccaactcggtctggaaagactgcatcagctccatgaggtccttgatggtgggctcagctatggtgatggagtggtcggtggaggcggtgggcgtggcaggggatggtggagggcaagagcgggtgggtgaggatcgacgtgacactgat

SEQ ID NO: 78924 - DNA, 408 bp, Zea Mays
gtgatgttaaactctgtgattcaaatttgtgtcttatatgtcatatatttctcatgctgctccttgaatgaaggtgtcaaagaagtctagttttgtagtaggtggatgatgcagctgtgacttgtgaggctggaatggcatgccgtaggcgtgtgtgatgccggtgaggatgccgatgtcgtggtatctagctgattgtgattgcgatgtgtgtttgccgtaggcgtgtgtgatgccggtgaggatgctgatggcagatttgtttagaagtggctgagaacaacctacctatcttctgtagtactagatactattagtcccttaaaggcttctttttagtttgcttgtttaatataggcggatgttgatgcatgcattgatgccagttgatggaatagtatgtggtca

SEQ ID NO: 78925 - DNA, 892 bp, Zea Mays
aaaccattgcacgtttcatggctgggttacaccgcaacattcagcgtattgttgagtttcagccataccaaagtcttattgatttggtacatcaagccaccaaagctgaacaccagctgcaacaagatgctaagagcaccaagcccttgtcatatggtgcacgaaccatgactggaggaagcaaatcaatctcaaggttttctgctgcatcctcagcgacaaaaggttcaattggaggcttgcgatccaatattggaaattctagtggaaagaacagtgctgctccaaacatgagttataaaccagcagcatccacttcaacatcagtaggttcaatagccaagagtagtggtattcagtgcttcaagtgtggaggtcgttgtcatgtcataaaggagtgtccaaataatcgtgtgatccttgtgactgatgatggagaatatacattagctagtgaagaggaagctgaagcaggaaatgtagaagacactcataaaattgaggaacacactggatgtgaatttgagcatggtactactcttgtggttacacaaatcttgagtgttcaaatgaaagaagctgaaattggacagcgacataatctttttcaaacgcgagcaaaagtgcaagacaaagtagtaaaggtgatcattgatagagggagctgccataatcttgcaagtcgtgagatggttgaaaagcttggtttgaagttgcaacgacaccctcatccatatcatgtccaatggttgaatgaatcgggagatatcaagattggttataaggtgaaagttccgttcaagattggagagtatgttgacatagtggagtgcaatgttgcacccatgtctgtgtatcacatgctgctaggaataccttggcaatatgacca

SEQ ID NO: 78926 - DNA, 720 bp, Zea Mays
catcgaaagtattttaacgagtgttcgataaattgcactcggcaaagcgtcgaacacttgataaagagagagacagatctgtagtggatgtttatgcgttctttgtctatattattatctggcatcaaacacattactgttttctccttcgttccgccctattctcacagcttcgccctcttcgttttacgacatgctggccgctcacatcaattcacgtgtcctagaatccttctcttgttcatagccatccatgtggttgcttttctgccactaccggattgcccgcttcatttggcgatagagtagatggaagcacaggagaggagaggagatgaggaagagtgatgcaacgatggcgaagacgaggaacatgacgacaatagcagtgatgctggccacgaagacgaagacgaacaccaccatgacaacaacctgctgcaaaaagtctcaaactgaagtgtggcttataattcagcgcgctcttcgaatgatgaggacagatgcgtgaagaacacagtaattaaggatgatgaggatccccatcgaggaacacgaggtttagaatccaacgtagattgtggtggtggaggatatgaggtaataagctctgtgccttctctcctcgatattaacagcagcaacgacgacgtggcgttcgtttaggaacacgtatagatgcatggtgacgctggccggcctgatcgacatcattttgac

SEQ ID NO: 78927 - DNA, 733 bp, Zea Mays
tgctggatatgtgtgcccttcctctgcccgctcaactactaacgcggtgctcaccacgtgagtcatgcaggaaatgtacaacaacaaatcttctgccggctgatctggcatggcttggtgtggcgactttagcattggtggcgtggtcaagaacttcttcagtgcatcgagagcttcctgtgcttctgtggtccactggaacttgtccaccttcttgagaaatttgtagaatggtaagtcttttctcctagccttgatatgaacctgcttaaagctgccatgcacccagtaagcctttgcactttcttctgtgatcgtggtgcttccattctcctgatagcctcgattttttccgggttggcttcaattcctcggtggttgataatgaatccgagcaacttccctgctggtactccaaagacacatttttctggattgagcttccaccggtaccacctcaggctgttgaagaccagctgcagatcctcaatgaagttttctgtcttaatcaccacatcatcaacataagcttctacccgcttgccccagtgaccggctaagcatgtttgaatagctctttggtaagtcgctccagtgttcttaaggccaaacgacatggaggtatagcagaaagctccaaacgacgtaataaatgcagttttttcctcgtcttcttttgccaggctgatttgatggtatctagagtagcaatccaggaaggacaacatagaac

SEQ ID NO: 78928 - DNA, 358 bp, Zea Mays
gtggtgttcagatttgagcactcagggaggtgtttccatcttatactcgagcatcacaagatctaggcgggtctggcgtgtagaatgggaagtactcgagcatcacaagatatgggtggggctgacgcgtagaatgggaagaatgagatggcgggggtcatgcacttgcgatgggatgtgggccgatggtggtcttgtgcgctggatggcgacgagggaattgggttgattccttccatggcggcgaggcgtggattgcgtttggggcgtgggggatatgggcggggcatccgcggtgcatgggaagaacgattgggcggggtggtcctgcgcgtcgtcgcgatgggattcctgcgag

SEQ ID NO: 78929 - DNA, 469 bp, Zea Mays
ataagcaatagccatcatcatacaagatgtagggtattatcttgcatcgagagcgcgtacctgtctaaaccttcgtgtctcatatgcaccttcagttctcgatctcatgatctatcctataatttctctatcgaataatccttgatagttggtgggctatgtaggggaacacactgatcatttcacaccaagagatacatcaactactgatgcccccaagattagttggggattcgtgcaaaatcttcaagatttcccacaaccaatgactatatcgatagtccttcgtcaatcattacaagatccatcccaaatctcatcgaatctgagatgatatgatcccatgatgatgaatcgaactcggactcctccacgacaccgacttagacccagcctcaagtttaaaactatccttgactctgactcaggcccagatatgtactcatgccatgaagacgatgaacaaacg

SEQ ID NO: 78930 - DNA, 601 bp, Zea Mays
cagaggagtcatggcatgttgggggtcctcattagtcgaaggtccaaaaagcgttaactcatgagtctgttttagctataacagggtgaagtgacgaagggtaccctcgcatgaggcagcatacgactgtcgtgaacatagaaacaaagctacgagcttcgattcgacgacttgcacatacgataaaggtgtcgacaggagcgaggcgaaaccttcgagacttgctcaacaagactacaaagggaaaagacaacaataccccaagtcagccctgtagctcatgcaaataggactgaggacatgtttgtaattttgcaaaagctgtaccccttggctataaataggagcacagtgccatgtacgtagacgtctctatctttgactgaagaaaattgaatcgatccacctacgaagttgtgcttccgtcttatttttgtattactaattgtaaagccaaaggaataaaaaatgagtaaccaatatggcactaagcttgcgggggtcggatcttttgatttaaatctagattggtgtgttgccaccgacaccgacatagtgagtgccttcacctatggcaccacaaataaggcactcattcacg

SEQ ID NO: 78931 - DNA, 636 bp, Zea Mays
cgcccgcataatccttccctcctagcataaagccgctgacccatgggccccgcttgcccgcggtcttcatcgtgtgcgccccttttgtctctcgccggtaggtgggctcggttgcgcagagtcaaccccttcctcgcgatggtcggctcaagccattcgtaacagactctgtcatggtctctggtactccagctggcgtaatcaccataggactcgacccctcgctcgcggtgggtataaacccagctggggtcatgccttgattcgcccatccaccaacgcactcgtgcgcctccaatcgagcccgccgccgtcgaacatagagttgagagaagagagagttgagccaccacacgaataccttgccggggttgctgctctggctgcgcatacagctaggtcgggtcgccgcggcacccgacgtgtgctggtgggcgttcggtgcggggacatcggtcggaaccgtgggattttctcgccggacttcaacaccatcgcggactcgtgcggtaccgtggacagcgctgcgtctgccaccagccttagtgagaatccccctccgtgcttcgcttggacctttacggtgtgtagggttgttcggatatgagttttgcgcgttgatgcttgtgaccggag

SEQ ID NO: 78932 - DNA, 562 bp, Zea Mays
aaaataaatcccgaatttttccaagacttctgcaatcattccatgcagaggaaatctcaaccctgctttgaagaagctcttaaaaactacaacttcatcatttttcggcttcgggatagtctcttccccgccaaagcgaaccaaccccttatcggcttccttgaagtagcctagtttcgtcatcatagtcatatcagcttcagacacagttgattttccaaaatccagatggctgggcttcgatggcataataatatcataatcaatgtctccttcattagcatcaccctcttcaatatctgcctgctcggtttcagcagtgggtgattcttcgtcagcagcgccttcagtcacaaccaatcccgaccgcctcataacttcggagatcggagcagttccagcagcttcggcttcgtctccgtcacgagtaactctagctgtcgagcgtaccctggccatttgatgttgaattttttgcattttgacgaagttaaaattttttatctttgacgaagctctttcttgtcacgaagctagagcaagatgatctatcggttcagaa

SEQ ID NO: 78933 - DNA, 849 bp, Zea Mays
gcgtggagtatatgttattgtctccatacactaatgactaattataatatagttattagagaggcatagatcttgtgctcactctaaacggccattaaaacaatccaatggccctattttcaatgcgtgaaggggaaatggctagttggttggtcggtgtatttatacccctccatctcattcaagaggtctctcttgccattgagaacagtctcatacacacattggagggcaagagggagttcatgtctagtagagtgattgttatttgctaattgcaagattaaagacttcattagtgtatagggagtagtaagtgtgcatccatatttttaggccaagtgggaatttatgcttattactcttagtgattggcgtcaccgagctatagcttggtggtgattaggaacttggtgatctctcagtgatgtttgtgggagtttatgcttattactcttggtaatcgacatcatctaggcggctcagtgacggttgggagcttggtggtctcttagtggtgcttatgggagatctaactcatgttgtgaacattgtaggtcattcaccatgccggagtagtgaagaatgagcccatagatagcacttaggccttacacaaattaacgggtgctccaacaatgaccattggaactgccgactctaagcatataccttggaaaatatcattgtattcctttccctctctttacattacatatttaggttgtatttggttcacctttctgaactcgttgccaaaaatctgggatctcaacaaaacaggtacaacatcaaaatagattcctctagtttaattcagaatcaccttttactccatatttttcagat

SEQ ID NO: 78934 - DNA, 1368 bp, Zea Mays
gagctggcttcagcctacgcataggacgttgaattacaccatcatatgcattagaactgttgaacgcctctgaggctaacacccttcaactattttgcagaactcagtttcaagctttttgattactccggggttgatcggggggctccacacatggagcaacatctggacgacgtagcagaatgctttcgtgaatccttgagcttcttatcacctcagtgtctactaaagcaactcctttcttcttgttttgaggtacagaacattccacataaggagcaacatagacagaagggcaactttttaggattgtgagaggtactaaatctatgttggagtccatgagggctagtgggcatccgaacaaaggaactttttggcccactcaaaggtaccaggagccatcagcctctgaataaagaactctgcccatacttttggaattaacaccttgctgtcattgtcagctcctaaaaaagaattggtccatgcatataacattttgctggtcatgtgctcattataaatacgaccatgcatatcccaagaggaaggtccttgtccttgcatgcatgctgcattcaactgtccctccatattgaactctccattaacatgaccattaaattcttgttcttggccatcttcattttgcacttggttgtttactgcttgctcttgaaaattgtcatcctacacctgggcaccaaccacttgatcttgcaagagacccaactggtctaccacaggcaaagacaagacatctagcagttgaatatcctgctctaacaacatgttgacatcctcctcataagcaatgatcagcttgggagggtgcagtgacatgaagacctatagcccttgacccactgaactatttgatgattggatatcatcaaggacagaaaattgaaagctaatttgcatctcttgcttgtcttgctgaatctgctgaccattattggctaactgtaactgggcatgcccatcattcggtgcttcctgtggccactgtaacaccccgtccaattcttggaccggcgatactgttagcgtcctacgtagctaaccaggaattctaaggacgaaggatccaagactcgagcgatgtcacaacagtctcgagagccgccacgcgtgtggacagcgccgcgtcaaccctgtcgatccgctcccacgtcaaggacctcacgtcggatagccgagtctccaagtgcgacgagagggacttggtaatctcggactgaactgcagtcgcgtcgatgccgctcaccgctggcttcagcgatgctatggaagaagcattgcccgcgaccgtcctctccaatgcctcccaatggcggtcttgtgcatccaatcggtcgcaga

SEQ ID NO: 78935 - DNA, 1130 bp, Zea Mays
gtaagattgaagctgaatagtagagcaacaactttcttcaagatggattaggaagtcgctgcatgagaagttaagatccaggccttgcaagtaggctgtgaggctgactgaagaaccatcccatggtacagtaactgaaacagattacatgttcagccaccctcgcctccggtgacctttgcgccgtgatttgcgccatcaccgcaattcgtgctctctggtaagtggataaccacgacggagtaaagatcttgtcaccagatcagctcaggctcggtcgcggatgagtttcaccgtacccacttgctcgtcgtgtggccgggatagacctcgccgccgttggccgctcaccgctgtgcgccacgtgctaaagcgctagaccacgtcgcagtggaacacttcatgcatgccggtgatcgccgaagagctgccatggtgaaagccactaaccccgagcgctagtaaccttcttcctctccggccgccagcgcatcatcgtgaaattggacgccactgctcaagcctgctataaattgccaaccccgcttgctccgctaggcagttgtgcaaccagtgaagcaaaccgtgcctcgaatcatcccctagaactccccaatttgggatttcccctaaatcactcaagaacaccgagcggtttgacctcgctgtggccagcgcatctcaggtccgtttatgtcctctgagtcctcgtttcagtatcctgggatgctcctgatactctctgacccatccaattgagctagagtccctaggatcgtcgggaacgtgttcggttacccgtggtgtccgttgtcaccgtgaatagagcgtgttagggtcccgttaatgaaattagttgaggggaaacactcattaggacttgaattcggtctctgccaaagtagaacgccggtcatcgagttaatcggccggtacaacttcaccggagctcggccccgcgctgtccgccgtcgtggacttcggactgtgaagagatagaagtgcaaggacctttttgcaaatgtcagtgactcaattaaatagtgtgcaggattcttctatagatattcaaaccccggagggctccattgtaaaactgccccgcgggcgcgggcgcgcgtggatttctc

SEQ ID NO: 78936 - DNA, 344 bp, Zea Mays
gcggaggggagaagaaaaaggtggctttcttcttgatcatcgcaggacactattggaatagacacgtacgtagcctagctttgcaactgaaaccactactcttgctcctcctcgtttttcacttgtggtagcagtgatagttcctctctagatccggttggcgtcgaagcccagacacgtgtccgggcatgccgggtggtggctctgccactggttgaatgagattagatttttttcatcatcgtttgcgcgcgctgttggagaaaagaagggaaaaaacctctctatactttttggttgtttcaaaaacaactctttggggagactttttaaagggagctttt

SEQ ID NO: 78937 - DNA, 558 bp, Zea Mays
gagaccttcacaacgggattccgactgatttgggggaaatggacaattgggcggctctggtggatgacagaaggcaagatcgggtgctttggatgcgcaatgacttagcgaagctcactggggcagcaatttataggatctatcgatggtgacgtccaatttggaagaaatgtgctggcggccggagagagggaggagtcaccggagtcacataacgtggcatttactggggtagaagcctgggacgatgactaactaactcacacgacaccttacgacgtggtaatagggtctgtagcgtggcagattccggtgaatggtggtcacgatggcgatggccgtgcggccactttactaggcaagtgggtacggtgaggccaaccacagtgcccccaaactcatccgcggggaggatcgtttcactgccgagcgcaatccacttatccaaggcacgaatcatggtagccggcgcgaatccaggcgtggggtcaccggtggcgaggggtgatgcatctgccgatctttttcagtactgtaccatgggaactcaattcaggc

SEQ ID NO: 78938 - DNA, 524 bp, Zea Mays
aagcaatgacgatcaaaaaaaggatgggatggaacaaagataacagctagaacgatgagtggaaaaaaatcagcaactagacaaatattaaaggattaaaactcgataaagcaaactacaaaattagtaacacgtataaatttgggctgtaggttttctttttggctattagtggactgtaggtatataaaatctatcctaccaaaaatgagaacaatcctagtgaggaaacggaggctttgataccaaatgatatgcacacgcctaggcagcacgtgtagcaagttgttgtggcctgatcttctcgtaggatctgcaaacttgataaattgtcgctgcgtgacctggtgaagaggcagcgcaccgcgaggctgtccacgcgacgaactaccgagacaaacacccttccacgtatcgacgaaatgggccatgcaatcacgccctatagacgtgaaggcacgaactgggtgaaccacagttcggcattctacaattccctctggaatcgaaagaacaaatgttgc

SEQ ID NO: 78939 - DNA, 462 bp, Zea Mays
atttgttccttgagcccctaattgaagaactgctcaagctatggaagggtgtcaagacctatgatgcatgtactggtaggaagttcgaccttcgtgctactgtactatggtgtatacatgattatcagcgctggccatgttatctgggcgaacaacaaaagggtattatgcatgtatttattgcgacaagaatctgttgtctctggcaataaggaacaagttatgctacattggacatcatcgttaccttacaaggacacattcatggcggaatagcttggatttcaatggtaagcatgaaaacaaagttgagcctggtaggtttactgtggatgaggtcctacaagagctagagaaggtgaaagatgtcaggccagggaagcaggctgacattaatggaaataaaaggaagcgtagtgacggtccaaatatttatagccggaaatctgggttgtggcaatt

SEQ ID NO: 78940 - DNA, 486 bp, Zea Mays
agtcagggtaaataaacccgacaacatcaaaaaccctattcaatctctttttccctcaagcgctgaaggccattgtcatagcttcatcttcatccctcgagtaggctccaagcagctcatcacttgttgcttctatggcatctaaccaatcagcattcgactcatcaaaccgatccctgaaccgaatgtgtacttcagatagatcgggccactttggctggagccagcagcagcctccttcggcatttcccatccactcgcaaggggccatactctgtaagcaatatactcttgaatcaaatcccttatgccgatgtaggtgcatacagtattcaaagccgtctggcacgcttgcacatcatttccaagtgcgactaaaggtcttcagatgccgaagcgtaaccatataggacgttgaatgatgtcccttatatcctctctctagtctaggtcattttttacataaaaccactcctgcatccaaga

SEQ ID NO: 78941 - DNA, 1081 bp, Zea Mays
atcgacactttcttgggtacagtgccagccatgccagccacattgccatgaacaagctgccaaggcgggtcagatctttgaccctagtagatcaaccacatttcatcgtgtgggctgcaaatcaacagaatgccttgtagtcaaggattccctacgggctgtacatgaccgtcatgaagacaactgatgtgggagtcaaaatattggggaatcggccgactaggtccttcagaactaccttcgacattcaaggcatgatctttggctttcgatattcagcatgctgattacgtgcgctttcacgtgagtactcaactctcatctattttgtttgaatggttcttctagttccttttcctggtaacagagaatatcactagtcttggtttgttttatcacccgcaggtgaacagacttgactcaacgtgctagttttatagatcacatgttgaccatttctttttgtggtggttgtaggaggaggaggctgcctgccgatgggaggtcaagtatgctggcatgcatgcttagttgacgaagaccgctatattatctcagatagtgagtgagctagtacgaccagactggtgcttgttattgtgttggtgtgtttaacttatccgctttaatttattttcagataatcagtaggctttgttagtttgttgggggtctatctatcagtagggccttggtgttgtacgtttagcactattatatttccctttgttgggagaggctgcctgattattgtgagcttaaacactgctttgtgcgtgtgtgtcattcagtggctaacatacatgcaggcgagagctctagccattgcagtcatcgatgtcaaatgaatgtttgtgacagcagttcaatgatcacgaacgaagcacggatttttatagtcagcattaaggggaacttgattatatttgttattccaatcaacaatctatcctagcagccagccacaagcgtatcagctagcaatgccagtgtatgatcgagaacagagttaaaagctcagacctgcgttgatcgatctcgttcatcgcactcacataattgtttcataacaaaataaatc

SEQ ID NO: 78942 - DNA, 1274 bp, Zea Mays
gaagccccaacccctttccccttccagagaaaaacactaaggtcggtcgaaggaccttcttcttcagtatgataccgtgttgactgagcattcacattgttagtgtgtgataaatactgacttgagaagattgtgatctctttagctgcaaaggcctctgcgatacacccctcaacccttgctttgttccgcacagtagctctaagttttttcaattctctttcttgactatacatccatcggaactgcactggtcctcctaccaatgcttcataaggtaagtgcactagcaaatgttgtatcacattcataaatccaggcggaaatactttttccatcttgcatacaagcaccgtgatttgtttctcaaattgaatcctcaatttatttgagatatgcttagcacatatatgtctatatatgtatctaagttcagcaatcatcttccacagaggaggcttcaaatagccacagaacattaccagcataagtctttccatcaaaatatggtaatcgtgagccttcaaaccatttaatttattagtgtcgaggttaacagtacattttatgtaagctgcatagcggtctggaaacttcaacattttcaaccatcgaaatacttcttttcgctcttccggctttagacaatatggagctcgtggtgtcctctcctttccattaggatttaatttgacctcaaggctagggcgatcgcaaagattagctaaatctttcctggcgttgatgttgtcttttgttttacccttaatgttcagacacatgattatgatgctttcagcaacattgcgctcttggtgcatcaaatctatgttgtgtggtaaaatcaataccttcgcatacttaagttcccaaagaaaagaaatatgagtccagttgtgatcttgaccatagccttcaaactcatgaccttctgcagccctttgaagggcacgatgttgtatcatgatatcttcacccattaaacgttttggtggaccgtctttaacttttatgcctcttctaaatgacttcgtatcattttgaaacagatgattggatggaagaaaccgtcgatgacaatcaaagaatgagacctttttaccatgctccaatcgatatgcttgtgtgtcccccatgcatatgggacaacacaatcgaccgtgaacacaccagacagaccaaatacgatatgcatgcaaatcatgaattgaccacaaatatgcagcacgtaaggtaaattcacgttttagatgaccatcataagcctttacccc

SEQ ID NO: 78943 - DNA, 708 bp, Zea Mays
ggagattggggctcctggcggtggcccaggcaccgcgatgatgttcgaagggaggcaagtcccatatcccatagtttgccacaatgccgacctttccacgcacgtcagcgtcgaaatgtggggagagggatcgagggggggggggggcgtctagccggagctcctggaggacaacattgaaaagggagggtcgggggcctccttggccgaggacggcgccctagcggcgtttgacggagacgacatgaagctcctggaaggcttcgctagcgcgttagaaggcttagaggtgttgtggcccttgaggcaggatccgacggctgaaacaaaaagattgacgtggcactctgtacgcgcgactttccgttcgactttaataataaggaaactagagacaggtagacaccgcagtcattaagtgtagagatattcttcaagcatacatagttcaattccaaggatagtgaatctactcaatgttatcccctgtataggccttctcttatccccaacttaacccagatgcacctggaatccatagtggacatggatcttttcttcagatattttggtccaacactgcatctctactactcgattgaacctctctgttcgacccctcttttctcattcttgtcaaggacaagccgacctcctttagtcagacttgttcaccaagtatagccctataactctactacaatagcc

SEQ ID NO: 78944 - DNA, 519 bp, Zea Mays
agagaaagaatttgatcacttgatgtatgaacttgtttgctacacttgtgtactccaaataggcacctaggggggccttttatagccccaaatgttccccgagtcgttgcccctttccttgcaaagaagatctctttcctggaaaaaactgccacttatgcgggggcaccggactattcggtcccataattaggggctacatagatcacaaccctaaattgcctggacacttgagttagaagaagtcataagaaaacatgctcccaaccttaccagcatgagggacgtaagtcacaactcgcctgaggccaaccacccgatgcagtcatgactcgcccgaggccaaccgcccgacatagtcacaactcgctcaaggctaaccacccgacgcagtcacgactcgcccgaggccaaccgcccgacgtagtcacaactcgctcaaggccaaccacccgacgcagtcacgactcgctcgaggccaaccgcccgatgcaatcacgaattgcctgagtgcgtctc

SEQ ID NO: 78945 - DNA, 364 bp, Zea Mays
tgcgtgcgacacaaagcaccaatccaatttttcaagtagagggtgacgttgcatatttgaccaagtgtaagcttgtcctttgagaggaatttcctgaagccccaactgactgattgccaagttaaaattgatcattctgaggtggtcccctccaagtttattgcggttttcaggagatctgatcatattaaaatcgccaaggaagatccatagtttgtcatcattaatctcaagactggagaaccaagagagaaattcctctcttctgtgaggggtacatggggcgtaaatgttggtgagccaccaagtttgattagtcaactttgtacgaaaacaaatcgtgtgaccgaaagagttttgatca

SEQ ID NO: 78946 - DNA, 377 bp, Zea Mays
taaattagtgcattaagccaactcaaaccgtgagtagaagagctaacccaaccaatagagtcatgatagattgtatgatttgtttatccccacctaacatcaaacaaacttttgacctacatcatgtagtctatctcacccataactatttaaaccatatgcccaactctgctgatacacattaacctcgaaattaatgaaactaagattagagaagaaaagatcgacatcgacaaggaatgatataacagtcaaagcgaatctcgagatgaatcaagacttaaacatattggataaagtcctttccttgccataacctttcttacctcaacatgtccagcttatatcctacataataagtaactggatacctatgc

SEQ ID NO: 78947 - DNA, 493 bp, Zea Mays
ggttagtctggatgagtataagttcatcacttgcaagttgttgctaatagaagtaagtgcagaatatgatcttagcaacaatatgatcttagcaacaatgtcaaggataatgcaagtagaatttacggagaagagggaaacaagttgcaatgtcaaatcacgagagacacaatgatttgttactagagttcggtttcacaaaggaacctacgtctccgttgaggagtcaactaaagatcgggtctctctcaaccctttcctcactcaagtgatcattaagattaaacttgactcccctttctcttttctcaatgtggatatcgagtctttgcagggcgctccacaacgtgaaggctcttgcttgatttacactttctaaatgggagcttagctccaaaaatctacgatcacaaacatactccacacttcacctcacatatgtgcattaccacaattgtcataaagaatggctaactctagcactctacataat

SEQ ID NO: 78948 - DNA, 334 bp, Zea Mays
tccttactacattttgttggttatttagtgcactaaaactttgttaattggttcctatcaaaattttgtatttttcccaagtcttttctccaagtcactttatttgcttaaatggcccatttgaaaggtgttagggttttagatgttttctcacttgagatgtagggtgtgtttagagtgtggcctttgagatgaaatagacttaacttaggttttagttccttaagtttgatgtctcttgcttaattaaaatcacatatgataatggtcacaagttggggcactagggaaaaccctaggtaacactggggtgttacattgggtacgatttgcc

SEQ ID NO: 78949 - DNA, 562 bp, Zea Mays
tgtatcggaagttcagtcacataaagagggggactatgataggatggaagagatgcttgaccatgtatgccatgagcttctacccgtcgattccaagaacccctgtcaaccctccaattatgatgatcctcctacacctgaggttcagaagttctttgagctccttaaagctaccgaagagccattgcacaagcacacaaaagtgaccgtccttttcttcatgactcgacttatggctattaagtccaagtttgcattctcaaacaactgctataagaagcttctgaacttgatcagtgatgtacttccggagaatcacaagatgccaaaggacatgtaccagtccaagaagttgctctctggtctcagtatggactacaaaaaaatcgatgtctgtgacaataactgtatgcttttttggaaggagaccgcaagtgagaagaagtgtacagtatgtggtgagcgtacattcatcgaggttgaaaacgacgatggtttgaccgtgacgaccgaggtagcacgtaaacagcttcgttacatgattcttatacctcggttgaaa

SEQ ID NO: 78950 - DNA, 376 bp, Zea Mays
caagtgatgaactcttcaaccaagtcacatccactacctaggtgggctatgtagcgaagggcctcctcgtcttgacccctctctaccaccttaaactgtggaaacaccacataacagtgcgagcacaagatagcagcggtaagctaagcaacccttcgacatcgcctagtgccacataaaaccagaactcccaccagttaccccacttatttttcgcacacggaacaatctcgataacttcggtggaggtcttcctagtcctcggtgtaaaggtgcaagacccaaactgagcaatctttccacctatcttcctttttgccagtgcagatagtaatttttcgcaaagacttcaacagatggttcctcaccatatgag

SEQ ID NO: 78951 - DNA, 430 bp, Zea Mays
cagtcgtccgctcggtggcacggcggcgctgagggcggcaacgcgtggggtatggtcttggtgaccgcgagccgtggcggtgagattcgggtgtaccagaacttcggcctgcctttgaccaatctcttccactagctagaaaggatagccagagtttgctggtgctgtctcgtttctggtctaatatttccaaaggaatagattttgcagatgagctgatgtacaggctgatataccagaagaacattttcaggaaaaaaatagacgggaaggatagaagtgcagtgtaaacccctatacctgagagtagaaaatttgcgtggcattatatttgataacgtaggaagaacacatagattacatgtcccaagcatagcagaaacatcggcaaatatacataaactaattaaacatctatttcataaggaac

SEQ ID NO: 78952 - DNA, 559 bp, Zea Mays
aatacacttgtatggcttgttgggccacgacatagacatcgtctcctggtaacgtggaatcctatcgagtttcgactagcccaagattagaatgtgtccatctcatcactttagggtcaaaccaatgacatttgaatatcactagagaaagaggttcgaaatcatgaaaattgagttcatatatttctttgatttgtccataatactcgacctcgtcaagcccgagcgtaaagactctagaacacgtggtttttcgattgggccgactttggttgtagcttgttgtgcgaaaacggtctccattaacatcatacccagaaaatttccaggccctatatgtaacaccctggtgttactagaactaaaactttgacatgacattatatgcattggcatttcattgtataatacacctaggcaaaaatttgaatacaaacaagtgatgtgatgctctgacttggtaaaagggattcctggccctagattatagtatctgtctctaaggattagagaccaatagccttgggaaatgagcactaaggtatgatctcaacaagtt

SEQ ID NO: 78953 - DNA, 716 bp, Zea Mays
ccatcggttcaatctgaggaacctgtggtgatgagtttgcctactgctcttatcgatccggttaccttagaggtaagtgacccggatgctgggaatatgttgcctgctgttggagctgtggtcctcccaagtgatgctctcaacattgtccctgtcaacgctccatcatcagacagtgtgtcgatgcctccagctctggaattcccttatttctttctaacctccaggtgagctgatctttgccttgcattatttatgttgacaaatgagttctcttgctaacttttgagcttgcagaatgtcctcaattatgtatcggcccagttgaaatcttgtggcgctcttgtcccctatcaagttttgtctttgatgcagtggaatcctcttctgcttcaaaggcaaatagatgatctaacggtctccaactttggttagtgggtctgcaacttccttttgttgtttattgcttctcttgttttaaatcttgtatttttttcctgttgcttcaccagctctgactcaacggtgcttcgatgatgaggaatggtatacccagagtcaagctgatctgagccaaatttctgcattcttggacagtgctcggactctgaactcttccttgaatgcccaactcgattcagagaagatggctcacgaggtagattttcctaattgcttctgttttaccccttttcttcgatgctcagtgctcttct

SEQ ID NO: 78954 - DNA, 337 bp, Zea Mays
gttttacttgaaggctgacaagaaagggagaagctcatgggcatggtgatgtgactgttgaaattaagtttcggcgtgacaaggcctttgtgcaatatgcaactcgactccccatgccagctggctgaagttcaattcagagttgtggctgagcacatcagtactcgagacttagtctaagaatatttggccaataaaaattttccaacatcaagtggatggggaaatcccgaagatcaaatatgaagaaaagaagcttgaacttgtaaggctgccatatcgttttcagtttggctttgttcagttcgtgtccgtggtcgagtcgtgttgctggttt

SEQ ID NO: 78955 - DNA, 738 bp, Zea Mays
gattgacataggagatggtaaaactccaaggccgacttttgtaaacaagaccctggagaccgatcctagaaatgagataaacggtctattgaaggaatatttggattgctttgcttggaattacactgagatgtcgagattaagccaagagatcgtagagcattggctacccattaagttcggtttcagacctttcaagcagagagctagaacatttcgtccaaatcttctcccacgaatcaaggacgaaatctaccggctgctagaagctagttttattagaccatgcagatacgtagagtgggtctccaatattgtgccggtggagaaggagtcaggtaagcttagagtatgcattgattttcgcaatttaaatagagcaactcctaaagatgagtatcccatgcccatagccgacacattaatcaataatgcatcagggaatagaattattagctttcttgatggtaatgccggatataatcagattttcatggccgaagaagatgcgtctaaaacgacctttatatgtccaggcttcattagtttatttgaatgggttgttatgacatttggtctgaaaaatgctggtgctaattatcagagggctatgaatttgatcttccatgagttgttgggaaacattgtggaagtctataatgatgatattgtagtcaaatcggctgagtttagttctcatgtagctgatttgcgcaaagcctttgataaaatgcgtcg

SEQ ID NO: 78956 - DNA, 497 bp, Zea Mays
tatcaggccagtctgaagatgtcactgtttgaggctctatatggcaggaagtgcaggactcctctatattaggaccagaccataggaggacagttctttggacctaaacttattcaagaggcagaagaacaagtctgtataatgagggagaacttgagggtagctcagaccaagcaaaagagctacgctgataatagaagaccactggagttggaggaaggtgatcatgtgtacctcaaggtgtcaccacatcgtggaatgaggagatttaaagtcaagggcaaaatgtcccctcgctttattggaccattcagagtttttaggtgagttggagagatggcctatcaacttgagctacctgataatctatctgatgagcataatgtattccacgtgtcacaactgaagaagtgtctcagggtacgtgaagggcaactaccaatggaggaccttagtgtccaagatgatctcacttatgcagaatattctatcaagat

SEQ ID NO: 78957 - DNA, 1205 bp, Zea Mays
aaaaaacaggaatagaaaagaaaaggaaaatgccagaactagctccctgggctgaattccctttccactgcggcccaactaccaaccgccctgctccacgcatcgctgacgtatgggccccgcaaaccaggtttctccataactacgcgcggcccacgtaaccccccatatttctctccctctctgctgctgccaggtgggcccataacccagccttatctctccgtgccgtgacactggatgtgggtcccggctgtcagtgctagcttcttccccgtgacaatcttcaaccagacacgcgatttccgcgggcgcttcaaccagaatctgttgcgtccgctcgccgcgagcttcggaattccgttggggattgctctgctcgcccctataaagcccagccgatgccctcatcccttagaaccgagcacaagcaatcgcatcatagcagaaatagagaaagagagagaaagttgggaaggcgggcgactgcgttgagctgtagtcgcgccgcgcccagaacctcggattcgtcctcaccggtcgctgcggtgctttgactggacatagggaagctagcccgaccaccaatttgatgaacggccggtcggagctcgaggaatttctcaccggaatgggaagagcgccgctgtccgcattccaccgcgaccaaggagctcttgctacgaattctggtaagtcgctaccctatatggttcgccttgtcgtcctcatcatgtagcaccgttgtatgtggggtttggccgttggtatggctggagggggcctcgccggtgatgctccatcaggcaggcgtggtggcgccgccgcttgcagactaacgtggggaagaaagggctggcgaccgtcagatcttcaatgaatggataggattagaacgttgtaacgtttcgagtgaatcgatctggcgcgttgatctctgcgcgtatggtctagattagatccctggataatggttcgatagcgggatctggaatgttggcacggtatcggatggaggaggattgatcagggcggggtcgcttctcatccatggatgttagatccaacggccaaggtctctgcgtaccccttcgcagtgacaattcagcataagagcccctcgatttattccaaattaacccgcagtccacactgtgggaagcctgagtcttagggtaattgtgattttggcccctgtgtttttc

SEQ ID NO: 78958 - DNA, 368 bp, Zea Mays
cgcggcatcctgaactaaagtctgcaaacgagatagagagactaagcacagagcaaaaaatgactgatagaattagcaaagagtgagatgtctacctggaaagcgcacactggaggtgacgatccaggcagaacggaagacggcacacacaaagtcactgaaatgacagaagaggtgagcacgtattagtcacatagtcataagcatatgaaatgtgaaaaaatacatacacaaagagatatggcacgagacggaaagatcgataagtcaaaagccgtgaaaacgacgttttgacggacaaatagagacataggatgattggaattcaaattgaggcataaaacgacatgggattgagccgatacttc

SEQ ID NO: 78959 - DNA, 549 bp, Zea Mays
ttggtgagcaccaaaagcggcaagtgggacgatagtccgacgtggtggcgcggacggtccgtgcgggaacagatcagatagggttcctgatttcttgcaggatttgttagcaaactccgcatgatttgtttgtaaaccgacttgtaacagatccagacctcccattatataaacgaaggggtacgaccgattggggtaacaacaatcgatccaatcaaaccaatttaccatatttatcttatttgtcttgttctttccatgcattaggagtaatctagccttagtttagccttcatcaacatcgatcttcacctctctttggctctacgtcgactagaggcgtcttagatggcctgtcgataccaaggcaacccttggatctctcctccccgacgggacccctctcgtaaagtgagattcaggtttctacaaaaaaagatcctacaccatcgtggaccatctagaagcacgcagaggagtcgttgctacagcgaggtcgcagattgtccggtcctaagccgtggaccgtatgtgctcccgcagagagca

SEQ ID NO: 78960 - DNA, 387 bp, Zea Mays
acgaattgcacggagccacacctcctgtattgttgatttggttgatcacaagaagtcgccagcaaaaaagcctaagatacatactatacagatcaaggatccaactaggcacgactacaaaaatgtcccaaaaatatgtgctaggcacgcctatactcactttggacaaactaaaaaaggtcctagctggtattaaaaggttgcatgactagtacatgagagcatcttctgttggcattgacaccatcaatgtatgtatactagcacatgcttttgttagtggccatgaaacaatcgaccattgttaccttcgaggacatgttaatgatgaatctttagagactcgacatacaacttgtaacagtgttagcattgtaagtgtcactt

SEQ ID NO: 78961 - DNA, 770 bp, Zea Mays
agtgtcgcatacagtgatttggtcgatgctgcaccagacatgtcttgtgccctttgttcgacttattccagttaacaccttctataagtgtcatacctagtggggcgtccgatgcaccaccggatgggtgtgatgcctagattctcctgaagtcaagtttgcaactctctctacatgtcatataaagtgtgacatctggtgcaccaccggataccttggtgtattctcagttgttttgaatcgtttctttggccgaacttggtgggatccctcttcgaagttgtctagcctttgataaggagggtgacgatagagacaatatcctccatttaatgacagacatgatcgagatgaagtccccctcgagcattcgttgctgccttcggaacctacatccacatgattcaaagattagcatatgattagtcataaccaagtagaacatgatcgaaatctagttggaccttctccccaacaatttattcatatcttgctacggtggtagttgcttgtagtcgtaactagctagagcttgtagttgtaactaatttagttacttgtttttgtagctctaattgttcttactaaaagtatactttggtgcttgtgattagaactagaaaacaaagctgctagaattgcctgggaggtttgcttggctaaaactagagctagtgaaagtagaggctattaggatttgttattttacaaatcccccttgcactagtgttgtgaattttgcaggaaactttatataggatattcaccca

SEQ ID NO: 78962 - DNA, 844 bp, Zea Mays
cagtcatatattcaatgaaagcagacaatatgttttctagggctaccaagtcagcaaactaaatcaagttaagcagcaaaactgatatgagagaactctttcatgttaagatttagccgttaaaaccatcaaaaacaggatcacatgacaataatcgctaaggcaaattttgcacacattacttgccattaagcaagactcaactgatggttacatcaaaaggttaagataagccagcacatacagaagacaacatcaacaactattctcagagcctcaagatcactaggttcatccggcaaaagtacatcttgaaatcagataacaacatcaacaactattcatagagactcaggatcatcgggttcatccagtaaaagtacatccttaaatccaagttctggaactggtactggtttgtgcctggtcgccctctccagctcagccaactcctcattgctaagtatcattatgctatatgaccttataaacaacagctcccttctagatcctatcacattgtctagtgtgtcaagtactctcagttcatttgatccagacattctgactttgatttcttggaaatatgctggagcggcattactcaaagctgtcagcggcctttcttgtcatagtgccagcaagtgtcgttaacagtgatctcagtcatgaagtaggagccagtggctacaatcaatctcagatgaattctcgtcatcccgaattctctgtcccacaacaaggtatatggatctgaatcgaaatggctttgcaaatatcacgattacttttagaagatatgttatcgctcgatcattatcattcttattaagtaacctttccc

SEQ ID NO: 78963 - DNA, 352 bp, Zea Mays
attgggtgctccgaccattggtatggggcgggaggaccggtagttgccaccagtatctggcgattgttgagcttttgttgtctcttgttctcctgtgatctgtgtccgccgaagatgacattgacctctctgtcgacacgcgggaaggctccacctcctccctcctcctgctgctggggttgtcgcggttctcctggtcctccttgcggcgggggaggaggtagaggttggaaaggtcgaccgtgcccaacggagtgcttgaagtctctgcagttccgaagggtgtggcgcatgtccttgtggtacgggcactgggcatcgaggatgtcgtccagcgtgcgttcgcctccac

SEQ ID NO: 78964 - DNA, 831 bp, Zea Mays
aaaaaagtcaagttaacatgatggtcgctcattcgatgccatatgaactagcaaaggaattcgacaggctgagtctcggatttctaaacaacacccaaggagtgatagttgagctggagcccactttagagcgagatatcaaggatgggcaaaaggatgatgagaagatcaatgaaattcggcaactaatcttagatgggaaaggcaaggattttcggggagacgcagaaggcatagtatggtttgaagatggttgtgtgttcatgacatcaaatcgatttgggagctaatccttaaggaagcacatgagacaacttattccatacaccctagcagcgagaagatgtaccaagacctgaagaaaagattgtggtggtacggtatgaaaagggagatcgcggaatatgttgccatatgtgactgttgtcagagaattaaagtggagcctcaaagtcccgcaggtttgttgcaaccattacagattctcaatggaagtgggatgagattaggatggactttatagttggtttgcctcgcactcgagccggttatgactccatctaggtagtagtggaccgctatgatatagagagataccatttgatgatatacaaaataaaccatttcttgcctaagctaaatatccgcaaattgtggtattatgcacttaagcctccccaaactccataaaccatgtccttccttttgtagaccaaaacctgacattatttcctactggaaagtgtccctacaaacttaccttataaaaatggttaccacatgttaaatatcacttgaaattaattttcaaaaatgcggttttggtatttg

SEQ ID NO: 78965 - DNA, 371 bp, Zea Mays
aagttacaagaatcagtgctcatgtccatgatatctaactaaagacattaaaatgatgttatcaaaatgaccatacagtgataaaaggaccataaaacattagctaagtacaataaataaataccttgctgataacacggattgtacgagaccctgccagtaaaacaacaagcagttaaaaggttgacacttagctagtagtctactacaaagaaagtagtaattaaattcattatgtaagttgattaagaatcatcaggataagcaagccttgctagttggagcgcatcagagttagctaaatcagaatttgcaggagaaacaaccaagataatacaacttggatgcttaatgtattgcatgatctttgc

SEQ ID NO: 78966 - DNA, 427 bp, Zea Mays
gtttggttctgtcgatgttcaaagacctgtttggtcgccttagcgtgtagatctcggcaaaaatcccgtgtaaggtctcttcgctgcaccatatcctatcttttccatgtgagttccaagcaaagatatggtcggggttgagagatattatggtgtgaagttggctctgtctgagttgtccagcccgagacaaaaaccgtgtcaagtcgtgtcaaacgacttagggttgggttcaaatcttttcagggtgttctaggggtctttaggcgccattttcttctttgggccctatggttttgaggtttggaaaaaggtgaacatgtttgatctttgaaagggggctggttttgcaagtgagaaaaatctgatttttcttttatgcccttctctttggtgacctttttggggtcacactcttactattttt

SEQ ID NO: 78967 - DNA, 533 bp, Zea Mays
accgaagccaaagatgattcggccgaagagccacaagtagaaaagacagtgaaaatgccagaaattctgagcccaccagcagaggcagaattgtcgaaggtgcaaaaagctcctgccgcaactcccaagagaaggaggatggccagcatgctagacgctgtcatggaggccacaaaagccttgacccctgctcctatcaagaaaattgccgaggctgtcaaagtccaggccgaagccgaagttggaccttcagtgcccattgagacgaagcctgccgcgcccgaggacaaagccgagcaacaaactccggataccggcaaggcagcagggcagattgtaacagacaaagctgaagctcctgctcctgaagctccgtctaaagatattaattacattattcgacatgcttcggggaaaaaattatccgaagaagaagtcttggaagccaaatattacgctcataaactaaaatatccggagggggccttggtgtttaatggcacagacgaagacgatttcatgtactgtctccc

SEQ ID NO: 78968 - DNA, 847 bp, Zea Mays
gacatgaaaaaatgggtgtacccctgccatggaatccggcatttgcaagcaataagccaagctgcccacccgagctaagatagtgaatggtccaatatatctcgggctaagctttccgaagacaccgaaccgaacaactcctttagtggatgataccctgagaaggacttggtcacccactgcaaattccaaatcccgcctcctcacatcagcataactcttctgacagctctgagcggccaaaatattctgacgaatttcccgaaccttttcagaagtctgctgaacccaatcaggactaactagggatctctctcccaaggtctcccagcacagaggggagatacaccgcctgccatacaaagcctcaaatggtgccatcttggtgctagcctggtagctgttgttataagcaaactctgccaatgcaagatgatcttcccagctacccttccaagacagaacacaagcatgcaacatatcttccaaggtttggatcgttcgctccgacagaccatcagtctgaggatgaaaagcgacactaagagaaagcttggtgcccaatgcactgtgaagactctcctagaatttggatacaaatttggagtctcgatcagaaacaatggacttaggtaccccgtgaagcctgattacttccttcatatacaaggggaccaattctgaagctgaattggtggtcttcatgggaataagtgcatagacttagttaagcgatccattaccacccaaatagcatccctgccccgaggataacgaggtaagcccaccacaaaatccatggtgatatgctcccacttccgctccggaatctccaatggcttcagca

SEQ ID NO: 78969 - DNA, 623 bp, Zea Mays
atttgttggagcaaatgagtgagtcagactttggagatttcaaattgttagagtagtcctcgctgatgttagtcttctgttattaagtcaagtcaagaggtcaaggtctctaccttaggctgcaagtttgaatcaagtcaaatctttttcttaggttgtaaaaagcactagggttgttatctgtcctccctttcatcagctatataacaggtgaaggcaccagtcagctgcagcttacagcagcccaagaccagactccctcctcacaactaacatggtgcatcagcaaaacagcagctacaccataccagtccaaccagcaactgcactatgctagtccaacacaaacatcttgaaaactatcatgtttaaacagaatatgtcaacaatgttcttttttctatggaaaggcaacagataagccattctagagaaataattaaagcccaaaagtttatctgagtaaatcagaaggaagctcaaaatgttgtttcttaaatgagagatacttacatggtggaatatgtagcacaagcattcaggcataaaccgaacattagaagcctcaccccagataagaagatacaagccaatgtgaagaagcttcagctgttgcttcttat

SEQ ID NO: 78970 - DNA, 580 bp, Zea Mays
atccactgtcactaaatccaaaattgattactgtaagcctgtaattcagaaatcaggtaagggcgcatttggtaggccttaacaatctaattctaatccaaccaattccatccgcacgctgaccgccgtggtaccaatgtaccatcagtggttcgctcaagcgaagaagtgtcgaagccgcgatcgccaaaagaaccaacgagtggaagcagagatgaggaattgctggggacaggaccgctcttccacatgaaacccgtcgattttcgctttccagaattgcaggcccttggcggcatggcacccttctcgttcactccttccacttggggccatagcttgcctactgattttttatcttagtttacatatgtgctccctgaatagctctataggtacgatatacatgtaaaatttcgagttcagataaaacaaactaaagtgtgatatatattccttacatgacatacaacatatcgttgtttcagtcaaacttttcttaaagaaagatacaaacacaaataactaaactattcagtttaaaaacatgcaagtttaatgtatagatttataaacaaaa

SEQ ID NO: 78971 - DNA, 405 bp, Zea Mays
cttttgcgcatttgtgtcatgcttgccagttaggttgtcatgttcagtttccttttccctcctcttctagagcagtagacaattttgacataattcactgtgatgtttggacatctcattttctcaacatttctagttataaatattacttcctcattctggatgaccactctaatttttgtggacttttcccttgcgcttgaagtttgatacgttccttacgccccctcacttttttcacttgggtttccacttagtttggtcggacaattcatgctatccagtgtgacaatgggtggcactttgataattctgtgtcccgtgacttcttcctttctcacgacgttcaactgaggatgtcgttcccctgcacttcttctcaaaatggcagtgttgagcgcatga

SEQ ID NO: 78972 - DNA, 515 bp, Zea Mays
ctggaaggggcaccactgccaacgtactagtaggagcagcgtcggaggaatcctcagctagcagatcaagcatggcatttatatccgcatcactagggttcaggggcacctcaaaatgaacctgccgttcatcatcaggaatctccccaagcgaagcaaccaaagtactgacttcttcagcagagggtcgcactctaaggcccaaattgccatcagtcacaggcggatttgacacaaaaagggtgaaagctttgggaggaggcaggttcttggccgagtatgccactggagcaccaacatttgacaccttacccctaaggatcatttcaagttggcttaccaagtctacagaaggaattctcctattggtaacccgagttgagtcagctagccctcgatacagatatgctggataggccctgtctttcagtggctgaatgttcttgaaaacaaagtcagcgaccacaacttcagcagttagacctctctctttcagcagtccaacttcagttagc

SEQ ID NO: 78973 - DNA, 343 bp, Zea Mays
ccaatcttcaccatactaacaattaatcgtaagtgacccatacaacaccctccggctactttatttggaacactacacctatctagtgcacccctagtaccgcgcacttcgacacacatgcatccaccaatatatgaatcctactctcaaacctaaattctttaagtatacttgtcacatccaacaaacaccactcgttcgtttctccgatttcgcacatatgttcatgccactacgtgtgaatgagaaactttgtcaagcacctaacatacatcacaagatatcatctaataagagcatgaaagacataaaaagcatcgcaccctttttacttactttcttc

SEQ ID NO: 78974 - DNA, 408 bp, Zea Mays
ccgcggcggaagtgactgagccacggtgaccgccggtgggatatctccggccacgcacggctgggttcgcgggatggtgccacgtccgaagttatctctccgcgatcgactcccttcaccagatcactcgagcacatccggttcaacagtgcctcagatctttatcagcgttctttagatatttacactgttttgatcttcagcattttactgaaccgaccacctatcatccccactttctcatgattcttgttaagaacagggtatcctcccttaataaaatttgttccccaaaacaacagtctttaagtttgttatagggttcatggatcaattctgtatagattctcagatttggtgctctcaaagtgactgcatttcactagggccatacctttctgaattcag

SEQ ID NO: 78975 - DNA, 393 bp, Zea Mays
ttaactcttttatcttactccgcacacaatctccacgatactcagaattcctccacagacatattttcttacaaccaaattctcataaagcttctaaaaaagctaaaccaaactggcccctagtccgtccaccagccgccagcctacctcgtctacccatgggcctcgtcctcatcatccgcgttcacctacggcgcgccgcaccatcattcagatctagtcatccttgttcaccggcagtccgacaccgaccaaccacgcccattgccaccggccaacctcatcttcgtccatggtctgtgtgcagtgtgttgctgcatcgtttctgtgtggtgggtgttggcaagtatggttagcagcttgtatgacgacgcaacgacttgatccatcgtg

SEQ ID NO: 78976 - DNA, 543 bp, Zea Mays
cccaggtgcaactaatcctaagacttagatgacccaccaggtggactgcgggttcaaaatcttaaacctgaggggcatatctacaaaacggacacggcgaacgggtatcggggaatgctgaccgtcagatccaatttctacgcgcctgattagatccgtagatccgtgaactagaaatggacaggtactgcccgatcgaggatcgtcggcccagatctagtgttggtcgaatcaatacggatcgcccgatttaacaccaacgcccaggatcaatgcttcctgaaccggtattccatttctaatctcggtagcacctctcctatccaacggttcgcaaccgcacacccacacccgggccggagcagggcggcgggactgagctccacggcggagcttcaccggagcgcaagcgattcgaggcactggtgcgcaattcccttaaccgaataggcctacacgacacgggcgggcatacgaaccagagaatggctaactcacctgcgacatagacgtcgagaaggccgaccacgacaggctgcagtt

SEQ ID NO: 78977 - DNA, 1383 bp, Zea Mays
attactttcagaagatagaaaaacatgtaaacagaaagaaaccaaggctgaacgcagtctccatgacatgtatttgcttttagctggccccttagattttaaggccagactagactagtaaaaaaacacaggaggaacaggataaataactgacatgactatagaagacctaaacaaactggcttacctttaaggaagagggatcatattctaatttccaggttactgccaggaaactgatccatcagattctaatttccaggttccttccaggaaactgatcttttcctcaagggattccagacgggagaacgtactcagattttgatagtctttaagtaacttattggctatacaaaattttaaagtaccacctaagatgccatggtctttaagatatttcattgcatcctcgtgggtcatgccattttgtaatgactgagccacatgaactttcgagctcttctgacgaacatggctggaagaggtctcgtcaatcctgcgctttccagtacttgcactacttaagttcccacatctaatattggcacgatacgcggctactgatggtgacttatgcttatcacaacttacaaatatatgtgtgagctgatccaaatattgcaacatacgttcgtatttacccgattcaagttctttttttatctacaatggaaagcgtcagttagtgttaagttctataaacagagaaagactgaaatgttcaggtgaggtacctcttcaagtgagagctttatcgggcctacgccatttgacaactgccgcgtaagcttgttgtaccgtccccacaaatctttgaagtatttaaacctattttgcagatacttaagtggaatagtcatattcgtttgtttattaatggattttgtaacattctgccaaaaaaggtgagtgaattctgttacatagatgccgttctcaacctctttgaaacacgcatccacgaaaagtgtgtccaatacatcaggccatgccatgtccaacggatccctccaacctaaaatggaaaaaaagatgcaagcagtttaaccatctgttctgaaagtattgtatggatttctgcaagcaaatcgtgtatcggtgttccagggtgatatgtcatcccttgcgccccaacaattttaaacaatggtcagagaagtgaaacacaaaatattacaactatttcttggactgggcaattattgattatgtgctgagacaaagctgacactcgatacttctgtagcaagcaatcctattaagtgctttataatttaccactggattccaatattccacaagaaccaagaaccctaggacccaagaaccctacttcgtggtcagcagatgcgaaggaagaggaggtacctgtcaatcgac

SEQ ID NO: 78978 - DNA, 809 bp, Zea Mays
aaaacataatggaacaaggaacaccatggcctcactccaacaaaagcctcacaaagatggacaaagtggagaggacaaggacaacattgggcataaggtgcccaattggaagaccatagtggtcaagaatacaatggaaaaagtgagagagagggaagtgaactctgactgtaagatgatgatgatagaatatggtgtactcatcaacctcctcctatgggagacataatggaaaggttgcaagatgaatgttacccgagagcggtggtgggacctacctaagtatctctcataccttgtctaaccatttatcatttagaacacacgctcgtgggagatggtcaaggatggaatgatccaccttcacgcacggataagattgtagtgggcatctcatgcatgggaaagaggagaaagatgactaggaaaagaagagactaggtcactacatgttcacatgaaaagagtaaggcatcgtgtagagccatattttaagactccccctctctctacccactaggcatagtaaccaagcattgcataacctgcataaaaaggtgagccatgcaacataatgggagtatgggagtaaccacccaaccacttaggtgattacattgagaatcacatcatacgagataaaatacatgtatcatatgaccttgggtcccgagatttttcttaggaatcgcaagagtgttcctaattatctcctcattcagaaaacatagataaataagtttcctctgacataatgatgagcctcttggtccaagagttgttatctactgccaaagggaacaaaccaa

SEQ ID NO: 78979 - DNA, 279 bp, Zea Mays
gaaaggcactattacataagtttaaaatcgtgtgagacggacgaatataaggtcttgtagtgtagcttcttgtcctccaggattcttgccaaccaaaggactcctgcagatgactactcctccttccatcgtaacactgtagcgatgctcgggtcatcgttgtgtgacgtcttgccttcgcagggattgccttattgtccttggttgaccacttcgaggacaaagtggttgaaccagtactacagaccatcatgtgataggaggagcctatacattaac

SEQ ID NO: 78980 - DNA, 1464 bp, Zea Mays
ttgcaataatgttgagcatcttgtttgtagagagcagcgagcagtgtgccttgtcagcacctatagcttgaaaaattatggtaatcctgctaggacataatgattaatgaagctcccgggccttgaaaggaaactgtttatccaaggtttgtcttgtcagatgaagtgagcattgttctctccttggcctaccacaactggatgcagatacagcgagatattgaagggggtgtggtagcaacaattttagcgtcgatgggggtgtcaaatatattagagatgcatatataaatgtgtccctatcatgtccacaaatggtgacaaggccggctcgtgctcctaaactcggttgccgaaggaggatgtgttgtacaacatcgtcgcctccaattgaccacccacacatctcttttctcgatcgtcattctttcccgacaccaaatgtcgagcatgatggaggcattggagcacacgtgcgcgatggtggcgttggagcccaggcgtgtggcggcagcggtggccctgctcctattcagattaagccacacgagattgattgctgctgaagggaggcctccccagttgaatccacatccatatgcagagtacacagccgcatccggaggtagctaggtaccggcatccggcacccactatcgcaggtgccaccacagcctcctgttttcatgaacgtaaatgccatttagggactgaatcagccgccaccaggtcatggggcaagattggaggactgccacatgtgcttgaaggcattgttgcctcacgcccactctgatctgctggtgaatgagtatggcaatgaagtgcacggaggagctgctccttccctatatttatggatctatgcttgttgtttttctagctttgaaccacgacttatgatttcaaaactcctgggatctgctctagtagcatattggccttgttctgtgtttcagggaagcaagagaaggtcacttttttgttctgttggtctactgtaactacaatctgttcagttcagctttctgaaagtatttggtctgtgttatgtaaatgaagttttctagtccatcctatgtacaagttttaaatttgctggttgttattgtcatgaaaaaaatgatctgctgccattggtgcattggtcagtgtccttcctctgccaattgggaaaatagtgccacgcagagtagacaagtatcaggtcattttgttgtggaagtgaaacagatttatgaatggtatgttccttttgttgtggaagtgaaacagatttctgaatggttcgttcagttaagtaggaacatcaacctttagctaaaagcctacacacgtcgttggattactcccatgccttgagcccttggtaatgcatagaagatgttgtttgctcattggttgttcacgtaggtgttagtttatttttcttttagtctaaaacaaatttggtcctcgttttat

SEQ ID NO: 78981 - DNA, 1175 bp, Zea Mays
gtcgtgatctaattcagcttcagaataataaaataagccgaaatgtaaaaggcttctttttaggttttaggtttgtgtctggcggagtcatcgttagcgtcatcattaggttgcagctcgaggacgacctgcttgtctaggaggggtgtagtgtcagggcttaagagggcccgctaaagtgccgctgcagtgacgacggtactgtagcacacccttaggttggttagataaagataaggctagtttggaatatgattagaattagagataagataagatctagtgcttagaagtcaagtaaccctctctatataaggagagggattgtaccaattgaagtaagcaagagattagaaggaaatcccttctctcttgccggtcgtggggaaatccctgcggccggcctccccaacgcccctaaccctagccgtcgccctctaactcgcgcaactatccagtgaacggtaccgcgggtaatgtagcactgttcatccgcgtgaactgtaccacgcctccccggccaacagcccgacgacgcccaaacgtcgaggtcctggtcctagaccccaaacctacatctcgtactacctccgtaaccctagatccataatagttctcctgttcaatgcaatattgttgcaaaagttcatcagattgattatgcatgacaatcattctatattgtattccgtggtgtctagcaaaaaaaggttaccataactcgattgtcaccgggttttgatgaggttaattttgacagttggtggagcagatcagctgaacgtatccacgaagatgcccggaaggggtttaactctgtggtgattttaggagcttggagtgtttggcgccaccggaatgagtgtgtgtttaatgggtcgcaacctagtatcgctaagagcttgaccttagccggggatgggtatagtctgtgcctctgtggtgtattgttggggctaaagggccttctatgatgtcaggttttgttcatgacctaggttgaggtactgtggtgcttcctttggtgtctagtgtgggtgatggggttggatctggcagtgagtgtgttgtgggcgtgtgtgttggttcttgtatctctgtttctcttttctctttaatggaatgatgcgcagttatcttgcgtgttcgagagctaaaactgctttgccattcag

SEQ ID NO: 78982 - DNA, 761 bp, Zea Mays
attatgctagctatatatacaaatattatatgaacatatcattccatcaatcaatgcttcttggattggatagcttgcttatgcgcgttaataaccggatcggatatacatattccccggcaccatcagttccgacgttttgtttaaaattccgtctctggtcgatccaatgatgagctctgcttcttaaataatccaaccatcatccgctgctgccttgtaccggtggtgcatgcatgacgtcacctggtctatatccgagttgattccaactgccatggaaaaaagcaagcaagctgcagcatcatatatatcatataccgcgtaaaatatacatatatacgtacacaacatatattcttgctctcgatcgatcatgaaacgggtttaactaactatcatcacatgcgcgtacgtatagttatgtactagtgtactactacctaattgcaagtagcgagcattaacgaactaataacagccgtacatgcatgcttgtgtttgtgtgtgtatatatccaactttgctggtagtaggtagcttcagctgaataaattctactacatctcttgctgcccggacgaactgaatatactagcttaattatcttcagagagagatggccggaacaaagtactgcgaattaaacctcctttcggacgacgtgaagctccaccaaccatatgtgtgtacatgcatgtatatatatatgtactcgctggatcagctcgggccgtagcacgtacgcactgtacctgatc

SEQ ID NO: 78983 - DNA, 1098 bp, Zea Mays
gataaaggcagcagcaaaagcccgagaggcactaacctggccgctttcgacgtactggctgtgagtggaatggaactacataacgcgatgcatgtgctggcgccgaagtggatggccgatcaagtgtgttcatgtgttcgatagtagctgttcaaagacataacagatgtttggttggccatgcgaaagggaaagagacagattggctttaattaaggccatattcaacccaaagaacgcataatatcagtatagactttgtgaaattgcaaaacgttgggtaatgggggtctcgacgtgaacactccatggtctctcatgtactcccatccattagcgacaacatagacaacaacagtgatgccaaactaacagggtcgtatggaagggaagatactactgccacatctccgcgaaaaaggaggcagcaagcgcaacaataggaccaatgagaaagcagcaagtacgcaacaccatatatggccaacgggtcactgcgcactgcgctacgcgaaccacatagaaacacaacaacagtactgctagctagatgtgcaaaactcatcaataaggaaggctaacactttacaatgatcttccttaatgggttttgggtatttattgtgttccgcctttgtatgtaaagttccaatttgggtgtgctatattaacaaattttataagaaacaaccaacaagttctatggagttttgttcatttaaagcgaggaccggtggaacgattacctcaaccaactgaagttgatttagcttaactgaaccgacaccttacaaaaaagcacagttgtgtttttagttctgtgttcaggtgttttcagtttgactgaactgaaccgacagataacagtatatcggtcatccaaacagaaaatcagtttggactgaactaaaccgacagcctacagcttacagtcaaatacaggttaccgtatattggccatccaaacagaaaatcagtttttgtttacagactgattctattttatcatgcccatttcacactattgcctactcggttttctgctacttcagaaattcagtctgctcggttcagtctgctcggttttctgtcagaaat

SEQ ID NO: 78984 - DNA, 1530 bp, Zea Mays
gcggcctgtactggccatggccggcgatggctgccaagtctagctatcggggaggcataaccgacctaaggtgactcaggaaaacactcactaatcttagcttgaatactttgggaatggtctggccatgtgcacggcggagaccgtgatcacgagctcgcgttctcgcttaaccatggccgaattgagctaacggttgccacgacaagcttcacaagcatgcagagctactaaaacaacgctttaattggatagaatcttaccagagcgggctggccacggacgagctgttctcggcggcgcggctgaccgatttgggggaaaacggcgtcgtggcgtgctcgggtgaaattgagggcagagcttggggctatacagccacaagggactctagttttaccgtgcacaatcaatttgagaggaggaggaagaggcagcgtgaatttggcttcgattcaactcattgtgtgtgtgatgttcatacctcgccatggaccacagggctatttatagccgcggcggtccggcgatcacttcatggccacgtataaccttgttagcgcaagcttacacataaggaagagatacagtgaggtagaatcagggcatggatgacaccatggcaaaactggctgagtcacggtggccgccgtgactatctccggccacggtcgaccgggttcgcgaaatcatgccacgtttgaggctatccaccctggatcaatccctagcactggatcgcgcaagttcatccatttcaacagtgcccctgttcttatcgcttcatcagatatttgcagcgctcgatcttcggtttttgtctgaaccgaccaccttcttccatctttaactctggatttttgttaagaacagagcaatctcccttaataaagtttgttcttgattcaacagccttcaaaccttctacaggatatttgggtcaaaaccgagtggattcaaagatatggcgcatcaaatttagcctcatctcactgtgaccatttctgatctagggttcagtttcagttatctaacccagttctgatagagcaactttgggcttgcttttctccaattcttgcataacaaccaaagataatgtctgcatcaaagttgctctcctataataggtctataaaattgatgtggtgacctagggcaaaaaccttataatttgaaagttacaaagcctcaaagatgagctcaaatactgaatttcagacttagcctttagaacaccaatagggtctttttgcaaataggtccaaaattcagggtttagcttgtaaatcttcatgattgtgaaccatatgactaaggacaccttattatcatggtttttacactttagtccagaagtgcactgattttgcacttagccccctacggtttaggtttagggttttccagggttcctttttagggtttttggtatttcaggggtgtgaatgtaatgtgggtccattcttagtaacattttatgactatttcacttaagctttagggttttctctttttggattttgtttt

SEQ ID NO: 78985 - DNA, 659 bp, Zea Mays
tgcgaatctcgccaagtgtcttgtgcaagatttcttcctggcaccttgggctagttagttcgtgtaagttccaagggaatatctgccctagcttagaagatatgggggtgccaagtcttgtctgtcggcactattcaccagcgacaaaaatgatgccaaatcgtgtcaaacgaccctggtttggtttcaaattttttaggggtgtgccttgggtagtttggccactttttgttatttggtccaagtggttttggtgctagcacaaaggtgaacacatctgatctttaggctagggttggttttgggacttagagaaatttttgatggctctagtgtgctttccacttagtgaactaatttggggtttttgttgggcctttttgtaataccttccttaatacattttgtagatttactaatatacttcatctttggtaaaggtttccttttatgatttggccatttgcacaatcttttccctctaatcccatgtttagggtttaatggcttaagaggggatttagggttttagaatctttccatgagtgagaatgtatgaaggctagggtgtctctcttgttatgatcaatacttagcttagccatgattctaaggcttttagtgccttcactttccaattttagcatataggataagta

SEQ ID NO: 78986 - DNA, 580 bp, Zea Mays
agcgagcccgcgccggggaactcgataaccactgtggctctctcgccacgatcacgcccacaccgcagtataaagccttcccttccgtgcctacccttcccctcctgctctcgcgttgtagtcttttccctcgcagtcacgtcgcgccgccgacattgagccacttcatccctggctaacgacccatgcttgccccagtatcgagctgctctgtcccctactagtgatcttcgctcgccattactccactcacctcacctcgttgtgtttcgtcgtggcgcgtctcaccaacaagcaaccgagcaccacaccgaagcttcgcgggttgctgtctgtgcttccccctcgccacgcattgtcgtaaaggtgaggtctcctacctacccttctgtcttccacgcgcttgtagcggtcgagtgcctcggccccgccgcatgtgcttagatcgccgtcgagccgcagcctcccctatcgtgctgccatgctgagtcggccagaggtaggcgatgatctggtcaccattgattcctttgtggatagcctgattcatccaatataccaagttagttatgggccattg

SEQ ID NO: 78987 - DNA, 562 bp, Zea Mays
aacctgtcgtagccccacgagctgctacaggccctactctagtcctacgtcgacatcttcgctgcactgcgtggccttcctccacctcctcgacacgaccaccgcatcaggctgctgccagggacgccaccagtggcagtccgcccctaccgatacccctagttgttgaaagccgagattgagctctagtgcgaagacatgttgcagcaaggcatcattcgggagtgcacatctgcctactcttctccagtgctacttgtgaagaaagctgataaatcctgacatttttgcattgactatcgggcccttaataccaaaacagtgaaggacaagttccccatcccggtggtcaacgaactcttagataagttatgaggtgcctgcttcttcacaaagttggacctccgtagtggatatcaccaagtacgcatgcacccggatgatattgagaagacaacgttccgcacccaccgaggtcacttcgagtttctggtaatgccattcggcctcaccaatgcaccatctacatttcagtccctcatgaatgatgtcatgaaaccct

SEQ ID NO: 78988 - DNA, 478 bp, Zea Mays
tgatgatgaggaggtggttgatgttattgttgttgtggagggggtgggtggggatcttgttacatgaaggcctcctgccatttctacctggcctaattctgcggtggtggcggcttcaatggaggcggttggcagtgtggctctagctaccatgcccatctgcctcctttagccatggaatcttttagcatagttgtgtttgtgtatgtctcctttttgcctcctttgtcccttgcaaagttgacgtgcatcaaggctttcacaactgatccgactagtgcgctgtgaagcaatcctttagttagatgggcaccatatccactgaacctagaaaatttgggagcgcagggatagtgataaagtcaaagccctagaggtgaaggtggcaaaggaaggggaagaaaccctaaccctactagaacttagcgtcaagtcaattaaccatacatgtttagttccctttctaatatgattctgg

SEQ ID NO: 78989 - DNA, 700 bp, Zea Mays
ctggaatgggcgcatgaaaaaccagagaacccaggggcttcggtgcaaacttcttaggactcagtgaatagtggcgatggatggcaggttcattttctatttccaaagggtttcttatgtaaaaacgtcaggccgaagggggtatctactgatctcagccatccgatgaagcgcagatggcccggattagatcgtttccggttaaaatctcgctttcactctctgtcgttggatccgagatctatggcaggtatctgaacatgctagaacccgatctcggtcgtcggatggttattacatggcgcggattcaaaacgcgaaggagatacatcttcgcctaatcatagccgccaatcagaaatcccacggtcaccagccttcttctccatcgctcgcacgcacacagcgccccccgacgcaccggaactctcaccagcgacgaggagtgccaccagtcgttccctcgccatagttcatcccctcccaggcaccctagatagaatccccaaatccaacgccgcccatcgctatacgccgagcagctcccaggttcttcctcggccacgcatgaattgacgacgaggggagagaaagggagttcaaggtggtgccgtaccgaaggcttgcccgaccacaaggcttccatttgagcgctcgcacatgcccctatggtcccgcccaacagccgagagtaggcgtg

SEQ ID NO: 78990 - DNA, 476 bp, Zea Mays
acattttgcacggggtagttcgacgtggtcactggggcttcgcggtgtggagctatggcatgccatcaccgtcgcttacgggcggcaccgccgttgctctgcattggcgtagggaagagcgatctggaccgtagatctccatgcgtgtggctacgattagggcgtagcgtaacggtttgtcgtggaccattgatccctataggagcggtcgagattagattttggataccatttcagtcgattagattcagaccgacggatctcgatccagcgaccatcatctgatatcggttcgcttaaaaggatcagtctaatctggacccttgagatcagattgggcgacctgggatcaccgataccccttcggcctcagattagtgcaaaagacccctgactttgtccctattccacctgtcgtcctatatggtatagtagggctctctatttaatgtttaaattacaaacaagtccctggg

SEQ ID NO: 78991 - DNA, 365 bp, Zea Mays
ccagctttgaggaaactcttgaaaatcactatttcatctttctgtggcttcggagtagtttcttctccaccaaagcgaatcagctcttttttatcttcgctaaagtagcctgacttcaccatcttaggaaaatcagctttggagatggtcgactttccgaagtccaggtggctaggcttgctcggcactgtgatgttgtaatcatcttcagaatcggtctcttcaatatctgcttgctctgcttcagcagcagggacgtcttccggtgtcatcaacccagatcgcttcattgcttccgagataggaacagtttccacagcttcagtttcgtctccctcgcgatcgactcttgcagtagagcgaac

SEQ ID NO: 78992 - DNA, 320 bp, Zea Mays
cacctacccttcccaagccaacccacagctccggtgacctcccggtgacccgcctcctcgcccaagcacgaccaccatggccagaccatccccatccacctccactcgatccagtgcctcggctagcttccccagagcccagtagagctccctgaagcgagagaccgaacactacctcaccggagacgccgatccaccgtcaccggagttgttttccccgccgacgcgcatagccaaggctaaccggtaagccattattcaattactcgagtacacactttccccgacacccagtgaagctcatgtagaggcgctgcaat

SEQ ID NO: 78993 - DNA, 335 bp, Zea Mays
ccctaagggtgggatcaaatggattgagggtgaaatcgaagcatttgacgaagttctcactggcagggggatttttgtgtctgcgtcgacgctcggggagctatatctttggttgaaaaagctagctgtaaacatacgaaggctgtaattcggccagacttctcaatttcagagactgacatcaaagagccttcttccgaagctaatgcccttagcgagaaattttattccaaagtttggttgaacgacggtcgagagatagccgacgaagctatctgacaaaccgaagaagaatctcatcttacctcagaagaaatgagaaaagctgaagaagc

SEQ ID NO: 78994 - DNA, 494 bp, Zea Mays
ttaaactggcccttatcagcgctcttttccagcttttctccactccgctccttgcttctcacatctctcacttctgcctgcttccctctattcctacagcggtttggcaaagaatattcgctccctgtgactcccgcatcagcacatgagataaccagggagagaatccgggggatcaggtactttttgcttcaagggtgtggtacaaaatgagtagagcgggagtgattcacgtatggagtcggacgcaaaaacactgttactccgcaaaatctggggagtaggagcgctgacccctccctgggggtgtgttctggagtgtgcttgtttcgagcaagtgaatctagatggtctctcaacttgatagtatatgaaattgtcccagatctcaactactactagatccgtagcagtcccaggtctcaggtctgcgtctgtcattatctgcattggtgagcattgaaggtcgcaaaatctgcgttgtcagctccccc

SEQ ID NO: 78995 - DNA, 335 bp, Zea Mays
gaaagtcagcggtacatgggaccactttgtctgcacaaccggaccggtgatggcgacgtggttgatgctgcggtagtggtcccgcttctgccgcttcgtgtcgaagtcggtgctggacccccagtgatcatatgaatgactctgcgatacggctgatcggcgaagtcctcttgtttcggggcatgggggtggtgggtgttttgttgttgctgatgtggaagagggggtgggggaggtacgatttgtacttcctggtggtgttggtatgcatggtgcggtggatgcggagcgggggcgtggatgtatggtggagggggctgctgatatgtgtgtgc

SEQ ID NO: 78996 - DNA, 850 bp, Zea Mays
gatcatttattcttcaagtgctcaattgtcatatatgtgtggagagtgattcaagttgctttacatttggatttcatttcaaaaaatattaaagaactttgtgatagctggatgaaaggtgctaagaataaaatcactaatatgttgatgtttggatgtggtgctattttttgggacatatggagaaccagaaatgattggtgctttggtgaaatttttttgcttgatccctctaacgtcatttttttttgttgcttctggttggatttctggcctattcgacagaaagagaaggaaaaaatgacctttggtccaaggaagcaaactcatcagaaagatagcaagtgaagttttatgctggacatatggttggagacctagagatcgtcgcatttctgggtagtgggttttgtggctgttagtgttatctgtcatgtatccgtttgtgctttacttctatagaacggctctgtttacctcgcttcctagctggggtgattgatgatataataagcaaagcttatgaccttgttcaggtttggcatcgcgctatgttaggtatcttgcttatcgcttctggtattgtaacgttgccttatagtatgatggtttgcctagtttttgttgggctagcttttctgagtgattacctgatgtaatgacacttttcctattttctaatgaaataggggttctgcccttctggaaaaaaaacatacctcatggcggagcatattgtggcagctcatttatggagtggtagatgcaggagtaacatgctcacatctgcgtcgaattgtttcaggattggagtcaactcaactaaacattatatggctctgtactcaaa

SEQ ID NO: 78997 - DNA, 422 bp, Zea Mays
tttggtcaatacaatattctcgataatcaaaattgatatggtgctttggtagctaataatgcatatgagtgctagattaatatgtaatgaatctatatcattaaaacatgatagacaaagatcaaaataagaatggcattttaggtaaattttgtatacatgccaagaaaaccttttaattgtatagatttgatctaaatggcatcgtcattaacataaacattgagtgggtaatatatattagatgatattgctactataagtaaaaactaaagatatgatatctctatgtaaaatagcagaaattgattgctcatggttaatttgttgttgctcaagtctatataatgagagccccacaacaatagggagactcaattctatacatgcaaaaaaccagaaagcatacaagcgtcatcaag

SEQ ID NO: 78998 - DNA, 278 bp, Zea Mays
gtaacagacaactttgatggaagtctttaatctaatcagatgctcctctttagcgacatttgtctgcttgttaaaaatattaccaatttattgtctgggcttcaaaagattgtcacatctcttcatagttgtgtcatgaaaactatcacatttgctgcctacatgatctcgaagcctatcagatttgttccagccatcccaaccatctattacaaatgcatcattcccaccttggcctttgttgcaatctctaaacaagtagcactgtaaacaaaaac

SEQ ID NO: 78999 - DNA, 422 bp, Zea Mays
ctcgatgatccaagagaggaccacactgtctggctagcactaggatgggaatgtggggcatatagtgttgatgaatacatgatcatagaggacgtatcactgaagggttaggaggacgaggtcacactagcgggcacaagaggaggagctcaggtctaggaggacgagaataagtgaccggatcttctgaataccagtcactagagcatggtggttggtgatgaccatgactttatacgcttgagggatctcgacctcgtggtactctagggggtcagtgacgatggcaataccgagttgcacttagcctctacacattagagagcaagggcatcagtggtgttgctctcttgttcttaggtgaaggttgtagcatgctcacgctctcgggttgctacgacttgcgagcgcaacgatgaggg

SEQ ID NO: 79000 - DNA, 295 bp, Zea Mays
tcagactagggttaattgcttcaagacctctttcccaccatgttctgaacttgaccatatgttggaatggggggtgcaaacaaaacgtaatgcatcgatgaaaattgaggaatctgtgattcgggaaaaagcaaaagtggagcttaagaaggtttgggtccagttcattggtttaccatctgtgatgattcaatttcttcttatatgggtggtgggttcaattttaggtgtgaccaaggcagttgatataaagttcaccaacaagtttgatgtatgtcagctagaagtgtcagtt

SEQ ID NO: 79001 - DNA, 1431 bp, Zea Mays
gccaaagcaagttgagtagaaacattacccacagatttttggctccaggattgcaggtcctttgcaagtctcttaaatttaagagataatctctccatgggacaagcagccaaaatagaagcattccaggaaccagccaccacctcctgaaaaccttgcatcttgggccaaaaactctcaaaatgaaaacgcttctttcccttaaaggtcacattaagccttaggatcagaggacagtgatcagacatattagaggcagaactctacagagaacaatcaggaaataaatcctcccaatcagaagtgtagaatactctgtccagcttgactaatgtaggaacatctctttgatttgactaggtgaatcttcttccagttagaggcaactccttgagggagtgattattaatccaaatatttaagttgtccataagagttctattgatatttgaattactcttgtcatcagtgcatctgatcatattgaagtcccctgcaatcacccaggggccaggacaactggttctgaccagagaaagctcttctaaaaaagccaatttctcctcaactctatggggtccatagacacccgagaaccaccaagcggtgctgttttctttcataaaacagactaacactgaatggttatgaatttttgagtctatagcagaaatgagccctctacgccaggctatcaagatacctcctctagtaccactagaaggtaagaaaacaaaatccccaaactctgagccaagacaggaagcaacatcccagtgagagatagaattcatcttggtttcttgaatacacacaatagtaggcatcacacagtttattaatgatcggagagtatccctgcgatgagggtcattcagacacctcacattccaaaccagtatagcaaaattattcattgtgagatagaatacgaccatgtgggataatccacattacgaggcttgcagtagcccatcagctggacaaacgaggaactcctcatcagggatctcccatcgaaacaaggtagctaaagcctttacctgactgacggaaagaggcttatcaaattctctagcacggcgttctagatcatccgcagaaacaggagcctgcccatttttcaaccccagcttcaaacaaatagtgtgagccgctgagttccccctaaggggaggaagtttgcctacacgtcttgatcttcttggcacgaagttgggcgggatagactttctggctttaagctttggagatgaaggaaccggcaacacatttgtgagaggctttacgatcttgttaatgaatgtcatagccacctcctcctcctctgaagttatacgactttgcttggggtgttttcttcgagaatacacttgcaagaccttgcaaggctgctggaccagggcagaagatggctgcataatgtccaaa

SEQ ID NO: 79002 - DNA, 769 bp, Zea Mays
gaaatgatagtcgacgccagatgggtgtctaggcgggataagcaccatgtcatagccaaagccaagggacatgaactcgagactttcgaaccagatcaccgtgtcgagctgcaaagggtgctcaagaatggccatctagagtcttggtgggaatgtggtgtcaacacgcaacgaccccgtacctggcgcgccaactatcggtgtgtcaacctaagggtcctaatcaactagtgaattagtgttgtgtgccctgtccagatgggtgatgcaagaagacacaagttttatcctggtttgggcaatagaaggccctacttacagcaagggggtgagacttatattatcttgcacctatgtgcttctagtagggggtacaagctagtcgagagagggagtgaatcccaagtctctgaagatgattgaggcgagtgcaaatatcggtcgtggagggtgaaaacccgtgaagtgttctcctctcttgtttgaagccctaggctcctccttttatagcctcaaggagggatctcaggagcgcctaggtttgtcgtatgaggagaggagatgagcccgagcccctatagcagcatggccaccaaaattgcctttgtacttgcggttgacttggagcaaggagaggacgtccgacccctgttatctcgcatcttgaccgaggagagagccgaggccaggtcaggggctcgaacgcgtacctaggcctatcttgtggatgtgttgtcagagtcgtagttgttggaatagtgataataag

SEQ ID NO: 79003 - DNA, 552 bp, Zea Mays
gattgatgcggagtagcatactatatgagaaacttattctcatgcaagagactatatgaaattactaagataaagcaatagtctcaacataatcaaaatataagaatgaactcccctaaagatatgcatcaagaacttattctcatgctttgataccaattgaaagaattgattttgatgcattcacctttaaaggcacaaagggagacccattacacaccttgatcgagacttataaaatttgccataatcaacttaagcctggtaattccataatgaaaaggatttggaatgcttacaaccacaccatcgattgttgtgaagaccttattgtccaagtaggtgttattgtccttgatgttcttcctttttcattttgagtgtcctccctttgtagttgtctctttttccttccaagctcattgaaaatactcaagagagatgttaatagcgcaagggagtatatggtgaaagatgattactttagataattaacatacatgattcatcatccacaagtcacacagacatgaagtaaaatccttaacattt

SEQ ID NO: 79004 - DNA, 349 bp, Zea Mays
cgatgccgcacgcatgccaaacacacacagaggaacggacatgtttggtcaagtgtggcctcacatcctaacttggtggcgtggtgtctgcctcacttcctatatttcgccatcgttgatcccttcctctcttgcaggcctttgaaaatctttagtccctcgtctcgacatgactgcattgctcctttgcaccacgtccacttctaccaaagttatcatatctatacccattgagtaatacatattggaacacatcaaggatacaaataccccaaagacagctttttagatactctagattacaattgagttggacctgttcagcacatcaacaatgcaaaaactccaa

SEQ ID NO: 79005 - DNA, 734 bp, Zea Mays
gtttgttcatgaccatggtaagctcgttttgagtaacaaaacgcggtagcatttaaattaaagctagggcaagtatcactgactcaccagaggtatggtacacacatgaatttgaacggaggaagcataggaggcccagtcgacgtaagggcgctctcgggagtgttctgcagatggcaatgcgatgttctcgatgccctgctgcagtagcgttcaatcggtcgagacagtgagcttcactattactagaggacactaaaacatggctcagaggggcacgagataacctgagaagggcttgccatgatggggtgtctcacggtagcgacggtgaccagttttggggaaatccggtgaacttgcgctctggtgaacgagaagggtcggctaagagtggactgggtttgtaacaaagagactgagcaaggggaacgctcaatttatagcgatcgtccgtgtgctttgcgaatttgggacgaaagtgcacacggtggtgaatagatgagccaccagagctcatctaccgtggcactcaacggagtaaagtctcgggatggtaactggctatctctcacgaccaacaacgacgtggtaacatggtctatggcgtgacacgaccgagatcaccgagggtccacgacaccgtcgaccgcttggccacgtcgcggagccagtgaatctcgaccgatgaactggtgtcagggactacgttcaccgcccctcctcgatctttt

SEQ ID NO: 79006 - DNA, 510 bp, Zea Mays
cgggtagtcaatccaggctccgctgctcgagcaggcggagagagaaagaagaagggagctaacgatgcggcctggatcgacctccagaccttctccgcgccggtgcctctatgtctatggctccgcctccgcgctcccgaagctgctgctgctgcttctagctgcatcatcatccgcgcaagcccagcaagcggcgaggatgaagaccgatccagtcgaaggtgagtagtgtctccagttcttctctggaatggaatcaacccaaaggctttcgaaccagcacgaatgatcgatccgttcgtcatgctggccaccttcatttggacacagcagttcatcacgcttcttgctctgtctgccttctcttgctccgaagaaagcttttaaattttccatgccatggcgattttagtcggtcgtgggttttcctgcgggttgccgtgcaagcaaccccccgctaggtttacacttactagttgcaaacgtgatgatgtcttcctctgctacctc

SEQ ID NO: 79007 - DNA, 387 bp, Zea Mays
cttgaatattcttgttgttctgagttttagcttttgtagctttagcgacatcatcacgcacagtagcctcggggtacatgggaagcaaaataattttcttatcatgctgtatgagagaataccgatttgagataccatgatgcatacaatctgtatcaaattgccatggtctacctagcagaatattacaggcatccataggcacaacgtcatagtcaacaacatcacgatatgaaccaatagcaaaattaattcttaccagcttggttaccttgaccttaccactattgttatgccattgaatgtgatatggatgctggtctggtttggacgtaagtacaagcttcccaccatgtcgcgctagccaagttgttgcaactacctcca

SEQ ID NO: 79008 - DNA, 367 bp, Zea Mays
ttctggtgacttaaactatatctcggtggagcccacattgcaagagcaaatagtcagggcacagattgaagataagggtgttcaggttatcaaagacatgagcatgtagaaggcagaaaaatacaagtgcttccgtcaggacagcaagggaattttatggtttggagatcgattggttgttcccaaggaccctgaactcagaaggaggatattggatgaagctcacctttccaaattctccatgcaccctggtagcaacaagatgtatcatgatctcagatccttatactggtggaccaggaggaagagggaaattgccaagtatatatctgagtgtgacacctgccaaaggattaagccagtcatt

SEQ ID NO: 79009 - DNA, 700 bp, Zea Mays
tttgtcagtgttcgttagagaagccttagttggccctctacgagaccgagttctatcgtgtgtgtgccctcccttttaaaacccaagcaaggcacgtacatggtgaccaagccccgacatgtgggacaaataatctattgctatatatggagtaagtggagtggcagttcgtggacaacgaatatcttctcctggtcttcgtatagatcttctgtcttgtcatgtccttgcctcgtctaatcggagcagtgcgcagaagtaggttgtggcgtaggttgatgcgctacctcatgtaggggtgctcaagcgatgttgtcctgtcttcttcgactatttccctttacctcggtaatgtgcaggttatagtgggagtcataatgacagcagcccaagcgacacagagagtcaatggtcttgcctcagtaacgtgcgagttactgtgcgggccgtggacgcactgcctgccactgggttgggcatgtatatgtctcgtccacagttaatgcatatgtgcttcacacttagaggcagacgttaggcctgccctgatggcttacgtcacgcgtcataaaacacgtggcagcaccaggcctcgccttgtgtggggagtagtgattgggactgcccttcctcatgataggtccagaccacccttggctagggctctggatggtgcttgggggacgttacatctcctccg

SEQ ID NO: 79010 - DNA, 549 bp, Zea Mays
ctcagatcctccattggtagctgctactcaggtataccctgaggcacttcttgagttgtgacacatgaaaggcatcatgtacatccgatagtttatcaggtagctcgagttgataagccatctctccaactcgcctagaaactctgaatggtccaatatagcgaggggacgatttgcccttgactttaaatctcctcattccacgaagtggtgacatcttgaggtacacatgatcaccttcctcaaactctagtggtcttcttctattatcagcgtagctcctttgcccggtctgagctaccctcaagttctccctgattatacagacttgttcttctgcctcttgaataagttcaggtccaaagaactgtcttcctccagtctggtcctaatatagaggagtcatgcacttcctgccatatagagcatcaaatggtgacatcttcagactggcctggtaactattattatatgagaacttagcataagatagactcttgtcccaactactaccatgctgaagggcacaagctctcaacacgtcctcca

SEQ ID NO: 79011 - DNA, 530 bp, Zea Mays
cccggggcctggatggaggaatggttttatgttaagaataatctaattgagagggaggatattaaggaaattatccagcgccccatctggtctcgcttcggccttcgaagaccgaaggtggctattgaaagtgatgccgaagcgtgtcagaaggcttttagcaatgtatgtgctttcattggcacaagagacataattcaagagcacatagcctacagagtatggccacttgtggacagctgggagatgccgaaggagactactactgaatccagctaaggtggactagttcgattgaaatataccttcagatttagggaccggtttgacgaaccaaatgatgactggttgaaatgcattgaggctactagcgacgagttgcttgggacatataccagagccgaggatgatgccttctcctcagccttcgggggtcggggcaaggaaagattgaacatggtttttgatgcaattggcttcatatatcctgattactgctaccccttgagaaggcaaggaaaaaagaggaa

SEQ ID NO: 79012 - DNA, 365 bp, Zea Mays
agattttcaggtggatgaacagcagtagtattagcagtttctgggaatttttcgtgggcaattagtggggatcagtgggagaatcatgtagagctttgtcatacctttccaacgagtattatgcgctcgattcggagttataatttaggagatatcgttgtttgaatccggttatgttgctgtccaaaaaaacagattttcaggtggatgaacagcagtagtattagcagtttctggggatttttcgtgggaaattagtgataatcaatatgagaatcatgtagatctttgtcatacctttccaacgagtacttatgcgctcgattcggagttatattttaggagatatcgttgtttgaatccgg

SEQ ID NO: 79013 - DNA, 347 bp, Zea Mays
ccgctggctatccatcacccggattgtccgacgctctgcatggactgtccggtgatttatagctcaggggggtgaccgaacccaagagcggcctcttcagttgtacaattgtcagactgtccggtgggtggcactggattgtcgatgctacctagaccaacccactttcttctattttgtgccaaaacttttttggcttcttttagcttgacttgaggagttccctagtacttagacaaatatagttagtaactaacaattgactaagtgatagaatcatacccttttctcatcttttcacaggggtttgcaatatgtgcaaccactgatccgaaaagtgattttct

SEQ ID NO: 79014 - DNA, 482 bp, Zea Mays
gagacaatcatgtttctacacgtcacacatatatctctactactatgaagaatgtaagggggtaggctgccatcccgttctgccctgcccccgttctgttactattccacagcaaaaaaacattccaaattccaaccgtggggatcgaaccgtgtatctcttgagagaactgcctaccatacaccctctagccaacgtgacttgtgttcaattacgtacaacctcaacaaaaaatgtcttttgtgtcgttttagggtgttcagcaaacaacaccaaccacatttacccctagccggcggcggattaccctgagccacggtccgtcttcgttctccaggcgtccggtcttcgttctccaggcgtccttctccaccgacggcggcctccatcgcctctccccttagctggcggctactcccttagctggcggctaccacagctcgttcccagcccggtggtcgatggcggccttctcccccggc

SEQ ID NO: 79015 - DNA, 536 bp, Zea Mays
ttctgcaggatatgttacttgggtatgtattcatggaatatatttaagttcatgttatagcattgccttcgctaatacatatcatgtttagtggtccaatgttatttttcgacccttctgcacgatatgttacttggggatgtattcatggaatatatttaagttcatgctacaacattgccttcttaaaaatctctttactcgtgtttcaagtgatatgaacaaataacatttttaggtgtgatgttaatcgcatatgctttggttccttggtggtttgtagttaggagtcaaggcgtacatttgctggaattggatctttgagtgaccagaatcatataggtaaacattgtgctttatgtgactatactctgaatttttgtgctttgtttatttatgctagaaatgtgtatatgtagctatttgtgctttggtagatagttgtacggtcgcaagaattggatctttcatcagcccaaacatataggtgaatactatgctcattatcactacctatgtagatattgatttcttcc

SEQ ID NO: 79016 - DNA, 328 bp, Zea Mays
ttaattttctctttatactatgtatgtttgtattgatgtagattgtaatgcctcgaatttgagagttaaatttttctttctccatcactcgccaaattcggccgttacctttcctctttctttttcttctcgctatgccttgttctttttcaaagattctagcgagatttagcttgagaccttgtgtgagtaaaccctagaaatatttttctcagttgttgcatcatgctggatcatgattttcttgcttgtggttgactgatttgtgaaaagtatttttggattgaagtttatagctaaataggaaaaagggaaaatagaaacaccc

SEQ ID NO: 79017 - DNA, 418 bp, Zea Mays
tctattggacacgttgacgcggaggtggaacttgatgacgatcatgataggatggacgacatgttgcatgatcttggtagggaggttgaaatgaacgctgaggagccggggcagcttccacgcgatgctcaggaattcttccggctactcgccgtgggagaagagagactgcacgagcgcactcagatgtcagttcttgggactctcacaagactaatggtgataaagtcgaagcacaacatttcaaatagtgcttacaacgacatcgtccaactgatgggtgaggttctcccggagaatcataagttgctaaagaatatgtacttcgcaaagaagatgttggctggtcttgggatgacatatgagaagatcgacgtgtgtcccaatagttgcatgctattctttgaggaggatgaca

SEQ ID NO: 79018 - DNA, 573 bp, Zea Mays
attgatatgaattgggagagattttgatttactagagattgaaacctctcaaacccccttaattttatatgaattgaagtagaatcgaacatggcctaagacggcacatggcttgtgggtggactgtacgaccaagatggtggtaatattttgacacacgaattttgtatatcatagtgatgtttgtcatttcataactatgttttatgctaattgttaactctcgtgacaacgcacgagcacatacctagtaactagttaaagcttcgattaaagtctagctcacccattattagctctcatatttggatcctcaagagctaaactttagcaactactagatattagttcattggatccaagcattatcctaaagagaaattttgaaatttaacacccaattcgtatgccttttaagatttcacatcctgacccacatgtcaatagtgaccccaccccacatgtcattgtgataagggtgtcaaatcttgaaaggcttaccaactaggtgtcaaatttcaaaatctctccctaagaacacaaatgactactatctcaactaatacctcaaaa

SEQ ID NO: 79019 - DNA, 284 bp, Zea Mays
gctgaagttcggtgcataccttagacatagaatgaagtttagttgggaagatgaaactggcagctgggtcccccattcagagatgtgagctcggatggccgatgatactagcaaccggaggtccacatggcggtggccaaagtgcacatgtgcatgggatgaaggctggcacgctgggaagtccatgagcatgtgagggagtggtggttgtcgagtgggaccaatggttcagtgaccagctggccctaggggtccccctgttagtgccaaggggagctgagtgg

SEQ ID NO: 79020 - DNA, 624 bp, Zea Mays
gatgcaaccacacaaacagttgtatggaggccgtgaattattctctctctaagtctctatatatagtaaatcatatggtagtacctagtacaattcttgtgtgataatgtcctctcctctcctccgctccataaataaaggacggagcatgcagttaaaggagagcacgacactacgattcagcttcaacatgcgatggcaaaaagagagacgatgttctcaggtagacaattgctctgtactctgtaggattggaagccatcaggagggatctttacaatctgcagctgaccattcgcggtatctcatggtagatgtagactttgaagtacgtatgatcatcttagcacgaatggatgatttctaacaacttctttttggacaatgaaatcaaacattcgtccacacaaacgctaccaaatggaggtccagtatgtcttcagtgtataacctagctgttatgtcttcagtgtataacctagctgtgatcttgctcgatttgtatctcttctacctctgtcttgctctctagcatgtaattcgttgtaattccttcttcgccacgacagatgattaatgaattttcaggtggggaccctctcccccataaccagctaaaaaaac

SEQ ID NO: 79021 - DNA, 1011 bp, Zea Mays
atcagaatggatgggctatatgtttctctacgaggtttatattccaatgctatctcttttcattgcattcaacgtgctcctacttctatcagttcttaattcttctacttttttgtagagtatgatgtcgtcttcggtttagattgttaggttttctgctaatgtgatttactttcctggaactgatgggtttagttttttctgttaattgtaatgcaggttgttgcacctatcaagatgactttccatatgtaaaacaatcactttttcccttctacatgtacaagtctgactcttagtcagttgcctccacttaatgcagatacaattagtgccttcttcgcttcaagttctctggagagcgtatctaattttagtttctacgagtatttgtcttttgtcatagacacatgtacattgatgtggccggttgggagattgtatcttgcggtcctgccaaccctaatcatgccaaacacttaagaaggaggtattagtatagagagttgtgtacctctccaatttcctagcaggtttatgcaagatttttctccctcctgtaatatctgtcttttcttttaatgtgatttatgacctatttggtggatttttattcttcttttttggctgtgactcgggcgaatttcttgaggggttttggtgatggaacatgtgagaagacttcataaccatcaattgaattaatccccacaagcgcctctggttttggtttccccaaaacttccccatagggttcccgaatttctttaaatttgtgttattagtttgatactttgagatatttggtaaaatggtccgacattaggtttgtgagtgactcaaatcttgtgcatgttagatttgttttgttttgatttgacatcttcagggaaatatgaacaacaatatgctatatatcattcctgaaactataactccgttctctaaaggtctgtatttgtgctgctgatctgtgtacttgtgtttctctagggaatcaattgatagcta

SEQ ID NO: 79022 - DNA, 601 bp, Zea Mays
aaaaaaataccaaacgacacagatcaagatggcagcggcgacgcgaagcatgcgtactggatctatgggactgtcgctcacttggggataacagaaggcggcgacgcagaaccctagctctcccttttctcacctccctccttcctgtgcaggggtttgggatgcgatcgagcgagctgagaggagagccaggacgggttgaattgttatatatgacgtggaggaggagataggggaccactgcagccggccagccgtcgtgcctgaatgggggaccggatttggcgcggatagataagtatcgtcggcgtgagcgtggatggataacgtcgtcggcgtggggatggcagaggagctattactcgcgagggcgattgctgaggaagcgggcgggcgggtgaccggaggagacggaggtgcgcgacttcatcgggcgttgggcaccgtgcgacgttggagtgcgggcggatggatcgacacaccagatcgataagtggcagaacggtagaactagggaagacacatagtagagatagttttagaattgcgggttgattctgaagagacgaggggtctttgaaaaatattgacacggaatgac

SEQ ID NO: 79023 - DNA, 334 bp, Zea Mays
tggacatgtcacaagaaaatcaatcacttgtctttattgatgatgatgaagtggtgttcttgcacaaaggttcacggagtttacgacagaaaaacgactagaacggattagcaaggccagaggccacaaaatttcagcaaggtgccaaatgcaggatccgagttttgactggctcccctgtactgacgtctaaccaccactgaccttggatgaactcgaaacaaccatgcgacggtaccaaaaatgacgggggggagagtgtgtcacgaaacagtggttccatttccatctgatcggatacaaccactgaatgactgaatcacaagtaaagcag

SEQ ID NO: 79024 - DNA, 725 bp, Zea Mays
attaaatatactaaagtagtcctgaaacatcacgtcattgtctctgcacctctacataattatatgatgcttaaagtctaccacatttgttatttcaacatgaaccacaggctgccctgaatacttatttttgttgcatttttaatgaccttactgctagatctagatgctagatgttgaacttgagtcctaatatagataatggagcacaaacctggaatgtgcattgtaaagtctctgtccacagatacaacatccaaacctggaatgtgcattgtaaagcacgaggtcaaagaagagccattgtctgaagaggtgggatgtcatcttaagttgggacttaggaaaaaagcaatggccagtgggtaattagcaagagagtggatgctgatctggtgccgtcttctggtaacgaccatgaccattcaggatacgatgaaaacaaaaactgcatcactcactcaagcaatattgatgatacaaacattgcagatgaaggttataatttagagccagcaacaaatggttatcccatgacccatgtccacgatcttgactcttcatccgcagacgaaaatggtcctccaacatcaacagggcaggatatagtagttttgagtgactcaaatgatgatgttctcatggtgttgtctcccggtgctgtgaactgtggctcgatgcataacaacactggaaatctgtttccactcaccattgtattcacg

SEQ ID NO: 79025 - DNA, 648 bp, Zea Mays
catgcaccttcgatgcgccaccaccaactgcccagcctccacccctataccacaaacacgagttagcgaaaatagaatcaccctacttaaaaccataagacattccacttaccagcaggcggcaccccggtccgagcgtcgaacatggtaacgcccccaccaggtagtcgtcgatagacaactcctggcctattccccaagtctccgacatcgccgtttcaacaacgcacggtggcgaagacgccttcgtaggcaccgctggcgccatgggggggcaccatcacagccagaacaacccctcttgtgctggggcgcgatgtcttggcatcgctacatgggtccaccagccgaagcggggctttccgtttcttccgctgggtctcttgacgatctttctccatcactgctgacacaataacaccaatatttcttctgtaaggaaagattttcaactcgcgagccaaacaagacataaaatagtcatcgccggtggcccagagaatagggtccttcctatgtcatcgacccccggtaaccttcagcatgagcgaagatgtttctcggtgctcgggcgaagtcataacctccctaggcccagcacatgtccccgtcaactcctcaagaaaagcctagaggccttcgccccca

SEQ ID NO: 79026 - DNA, 380 bp, Zea Mays
ccgccgtacccgcctgagtcacagccgctgtggataggttcgccggagttagccacctcacgaccttgcgccacgtgccctggcatcttaccacgtcgcagtagctcgcgttatgcatatccggtgatcgccggtgagctcgccacggtgaaagccactaatcgcttgcgccagtgcatccccttccctccgatcgccaccgcgcattcacaaattcatgggccaccactcaagggccctataaattgagcacaccctcgactcggctatgtaattgtgtactcaacagacccactcatgcctccaattactcaccagagcccccgaatcgctcagttcccccaaatcagttttccgccaccgtgaacaagctctcaccg

SEQ ID NO: 79027 - DNA, 511 bp, Zea Mays
attcggagttagaatgcggaagttatgaattttctaagttttctataattattcttatactataaatcaatttcccacggtttattcatttttttcgtttatttattcccattgaaatggcatgcgggttcgatttctagagatgatagggtgctcggtgtaaaaatctggacctatctgcgattactattgactaggcatggacggcggcctgattatgcaaaaatgtagggactctttagcaaaacctccgccgcgaaggggtatgcctcaaccagatccgtccgattcaaaagccgcggcctagattagatcgacctataactgaaacggtacgcacccgcgaccctcgatcccgagatcaacggcccggattctatatctacgcgatccgatcgtaaccgtccgatcccgatccaacgtttcacaatcgccacggccaaaatgttccctcccccaaatctccactgttggatgctaattcaacggcgagctaaccatctcccacctc

SEQ ID NO: 79028 - DNA, 409 bp, Zea Mays
tgtttccgctatgatgttcctcgaccaatgaagtggattccaaccgggtaagaatattgtcgaatttctaaatttcattgtcatgtatatgggtccttttaaaattgttcacattttttgcatgtaggatggatccaaattcagcctgtagagttattgttaaggttcctgcatatgtagaattgccatatcaggagtaccatgtaactgaaaatctgaagttcgtggtggataaagatactacaaattggatggattttttggcagacctaaagttaaagattaagcatggcaaggagcaagtgttgcatgtatcttttatggataaaaatagtcaagtgcattatgatgtcaagtatcatgagtcatctcaatgagaaaagcaggaatttgcattatgatgttgagt

SEQ ID NO: 79029 - DNA, 468 bp, Zea Mays
atttttgaaccttgtattttggtctaagtcttggtaaactgaaactgaattttagtttcatgagttgtactttggagctccttatctcccaaatcaagacaagctagatcaaaatcctaaaagcaatgttgttgtgctcattttgctctacaattgttattatgagaccttgatcttttgtcacttggtttggaaattagtgaggggagaaaggagcagttttagttggctccatggccaattcaaatagtcatgtgtgtgacctggtcgaccagtgtagagcacacgtgtgataggatctagattgctacagtggggtgaatagaattataaggaaaatggaacaatgcccattggtagttgagttttggtgtctgatgatcaacataactatttcaactaacattatttgctagtgactttagttataatttaaaggatgcagagtggacttggacaaagaaaaag

SEQ ID NO: 79030 - DNA, 552 bp, Zea Mays
gattgtagctggattatagggctagaaatttgttaaaggtggattagcaagttattacatggaaatttgagatttgggcgctgcaaactgttctgtcagatgctctgaatgactttctaatggtacagtaaactgaatgagatcataggtgcagtgcaccttgccgctagcgacccctgcgcttggattcacgccggcgatgcgatcgtgcgcactggtgcccggataacgcctcggggtgaaaagatcttcactgtggatgagcttgagatactattccgcctcggccgccgtgtccgcttgactcacggccggttcagataagctcactggaattggccgcttgttgatcggttgccacatgcctaggtgctctaccacgtcgcagtaactcgccttggcgtgtccgttcatcgccggtgaccttgccgcggtgaaagccacgcatctcttgcgctagtgctctcccctctcaccggccgccagcgctccattccaaattcatgagccaccgacctcgggccctataaattgagcgtgccatcagctccg

SEQ ID NO: 79031 - DNA, 667 bp, Zea Mays
cgaccggagacagtacgtgtaatacgtatgtggctttctcttgttcatacgtgtcgtggtgcatgcatgcatgtacgatcgaacagcatttgttgctgcaccatgcacataaccgtacgtgcttgtcatacgtacggtacgacctggatgctagtgatagattttgacgcgctggtactacactacagggccttcggagcatcgatctgttagatgcatttaagcctgatgaatcagtggatcatatatatatatatacacacattaagcacgcacttgagctcaagaactagctaggtgggagagcgtctcgatcgactccgttcccttgtcagcactccggtttttctgagagtacaacgagcgctgtgcgcaaaagaacgacgaggacacgccgtttcttatgacacgtgctgtggtacagtggtagtgtggcgcatgtacgtgtcttccactctacgtgcaggaaaagaagaagggccatggacctacgaggcagagcctagctagctagtacgtggaaagcctcccgcaagaggtagtacagtgcagagaaaagagcgcgcagtttgtcggttgggttgaacccacgtttggccaggcggacggtcggtacgtccctccctctaggccggatgttacttggtctgcacggtttgtgtgtgcg

SEQ ID NO: 79032 - DNA, 404 bp, Zea Mays
cgaagactgacaaaattgaagaatcgagaatcgaagggacgaaaacattagaagttctaagcccttcggcaggagtggaggtgtcgaagacacaaaaaggtctagcagcgaccccaagagaaaaaggatggctagtgtactagatgtgctggagacaataaaagcttcaagctctactccagggaaaattgctaaggcttcgaaagcgcagattgaaaccgagacaaagctgaccgaagccaaagctacaatgagccaggctgacgccgaagctgggccttcagagcccgccaaggagaaatcctcagaaattggagaaaaggcagcggaggaagaagctatagaacagattttgcctgaaaaagttgccgctcctactcccgaaacgccttccaaagtcctga

SEQ ID NO: 79033 - DNA, 300 bp, Zea Mays
ccaaactgtgctttcatgtcacgtgatgcacggacgcgataatgcatgaagttaagttgacaagcaagtggccggggtggcaaattgtctctctgattgggaggcgctggagacttacttgtccggcaagctctaagccacagcatctctagctactagcaagctagtgtaagtgtaaaaggggtctggaattaggcaaagctaaggtggttaagaaaatcaagtgtgcatgcatggatctgtcatgcacacgtacgcaatctgtgaattgtccttctccaagatcaagtcctatcccct

SEQ ID NO: 79034 - DNA, 566 bp, Zea Mays
cttcggaagatgcttcgggagtaggagtggtagttttttcaggcagaatttgttctgcagcttctttttccgtttccttttctccggtttccaaggattactccttggcgggctctgaaggcccagcttcggtctcggcctggctctttgcagcttcggcttcggttagttttgtctcagtctgcgcttttgaagctttggtagttttccttggagtagagcttgaagtctttatcgtctccagcgcatctagtacgttgaccatccttttcctcttggggatcgctgtaagacctttttgtgtctttcgcactgtcacttctgccgaagggcttataacttctaatatctttgttccttcgacccctatctcttcaatattatcggccttcggctcagctaatttgactgaggatgccttcggcattggagtcggctcttcaatcttttgcgtaagtgcaggttctttggcttcagtagccgaagaggactcaccgccaaattcgggcactgtggccggttcaatgtagcacggtcggtgagtaagaaccttcacttttctcctc

SEQ ID NO: 79035 - DNA, 543 bp, Zea Mays
gatgaatagacttttgcacctgtgaaacaattaactaggcaaactagttagtccacaaggttgtgatggtcatcaagcaccaaaatcaatttagagaaaatggcaaaatcccatttccctttcatatgggaacaagggatcttgttcaagagtatctggtgtttaaattgtggtcgttaagatttgagtgggagatgtcgaagatgactgaaaaggatgctttggatgcggagactgggctagtcggacttcgctataagtataagtttgaagatgcgttggggagccttgtgatgagcgattaggttctgttgaggcgaagtgcaatgatattcttaggaactttagtaaaccagaagttgaagcattgtatagggcctttgcagcacgaaagaatcgtcgattaaatcgtgttttttatgttatcggcttgttttaacctgaccacccttatgcggttcaggagacaaagaagaggaagaagcaaatgtcgaaggtgacgaccaagcgtcgcaaaattctgaacgtgaaggccaaggaaac

SEQ ID NO: 79036 - DNA, 325 bp, Zea Mays
caagcggccaatgccggtgaggatcatctcggccggccgcagagcaagtgggtacggtgaaccatccagtgaccgggtccgagcatatcctagcgccaagaccttttactccccgcagttatccactttgcgccgagcacgaatcgtggcggccggcgcaaatccaagcgcagggatcaccggtggcaaggttcagtgaactcaagatcttcttcagtctactgtaccattgaaaccttccttcagggtgccagacagagcgaattagagggcctagttcttcaatttttatgtgacaacttgatcatctgtctgcagagaaatt

SEQ ID NO: 79037 - DNA, 881 bp, Zea Mays
tttgatgactgctttttatgcaacattgttagtaatcttcttaaatagaagacttgagatttttttgtggtgtgcagatgtggctgcaagtcgtaatcaccaccatcctctccacctttgccggctttagcatcgctaggcggaccttgagatcgctctacacctgctttcttggagaaatagtactacggtctaccatcaaaccgtaataccaaggaacgcaaaatctctccctgaaaaccatagagactgcatagaaaacgaaacctggatcagctatattagcacaaacatcacccgcaaacagaccagaactccctataacgctttctttatcaataaattcctcatgtaagggctccacccccttctgtaagggaaaggtgtaggtagaggcgagcaggaggacagggaaggagagagagggtgcggccgccatcggtcaacctgacatgggggaggcaagatcgaatcgaggtttttccccgtatagtgggtgttgtacgagggagaaggaaatagcggaggttgttgtttactatatcaggaggagatcgagtagcatagaggattttcatgaaacccccactgggccaatcccatggatcgcgaccacgatggagcaagagaagacctaggtgccgccgtccatcaacgtcaacctcctagaccccaaccttgttcttgcagcacccatccaccgtcggcactcgccaccgccgaagtggaggtccaaaaaaactctcggttctccttctagacctcgatgtcgttgtacacctccttcttccatatttacacctccttctccatgacgtcggtgaggtgcgtggtggaggcggctacaaacacgctggcctcaccgatagggtcgagcctag

SEQ ID NO: 79038 - DNA, 672 bp, Zea Mays
cgactttaggcaccttcagcactacaatcggctcttcagtactctacacaatcggagcagcttccttggcctcggcagctgaagaggtccccgcgccaaatttaggcaccactgtcggttcaatgtaacgcggccggtgggtcagaaccttcatctttttgcccttcaactcagctgctttagccgaagcagcagtctttctctttttctcttgccctcaaagcgggtaatggtgatcagggtatacaaagccaatagcatcaaataccctgttcaatctcttcttgccccgacccccgaaagctgcggacaaagcattatcttcggccttggagtatgccccaagtagctcatcactggtagcttcgatacatttcaactagtcatcgtctggctcatcaaacttctccctaaatatgaaggtatacttgaatcggaccagaccaccctcactagaatcggaggtggtctcctttggcatatcccagctttccacaagtggccataccctgaaggctatatgctcttgaatcaaatccctggtgccaatgaagacacacacagtgctaaaggccttctgacatgcttcaacattgccatcaatttccaacttcggccttcggaggctgaagcgagaccagatgggtcgctgaatgatttctttgatgtctt

SEQ ID NO: 79039 - DNA, 414 bp, Zea Mays
gctgctagagaagtcattggaaggaaggggttcagatccctgattgtcaattgccaaagcaaccgggccattgaactataggggaagttgtggctagatgttcccttgtctaagatgttgtacgatatcctgttcatgaggatcatcttgtcgctgatgatcatgattgggccattcctcacaaccaattaggttgtcttattcctagtcatggttgttgggctattcatcccaaccaataagatagctaggttcacattgtccattgcaggaagttcaatcaaatcaaaaggtgtaggatcaacaggttaccttcccaactaaataaataaaaaggcaacacatggtccttagggtctttaggtgggaccgagtcttcatcagcaggtaaggccactccctcccccacctgtc

SEQ ID NO: 79040 - DNA, 768 bp, Zea Mays
ccctcttcaaaatgctacccagttgtcggcgcaaggatgatccggcgagtcccttcctccgaccgcattctttcccgtggacgagggctctccattcccatacggtgacacctttgagggactttgatgccttgcgaagactcgcccaacagtcccacactccgtttcggcactccaatccttcttttgcccctcgccacagtcggggcaaccgtagacgaagactacgccacagtcggggcaaccttaggtgaagactccaccaaagacaaatctaatgccataaaataatctaagacatcttccgaggaatcatcgtccatcctagcgaatgggctcagcaaaccctcactttccgatgaccatgggtcaacatcagattccccactactaagcactaccaaactttggcacatcaacgatttgtcatttccattgtcaccaaaatatgcctgtgcaggcccaagcatcagaacctatgcagcagtcgactttaagtatcatacaaattaaaagcgctattgtaccacccctgctctattcattacacctacgcggaagtccgtgtcgtcgtagggtcttcagcgctgccttttatgagtgaagactgctcttcagctcctgcctcaactttggcatcttttcgagccaccgagctctctaggccggcgaggacctcaacttctttgtccctcatctcctacgaagacaacacaacaacgcattagacaatacaaacataaaagacacctttactaagggtgcaaa

SEQ ID NO: 79041 - DNA, 305 bp, Zea Mays
ggcaaattcaacctttctctcgggtggcatgcccgttagctcctcgggaaacacatccggaaagtcggacacaaccttgatagcctcgagcgggttgggctccttactatcaattgaaatctgatgacagactccctcttctgatttaggaatccttagctcggccactacctcttctcctgacggggacttcaatgttacggtcctcttgtcacaactaacatttgcttcatacttcattaaccagttcatccctacaataacatctatcccgggggtgtctagtactattaagtcactgggga

SEQ ID NO: 79042 - DNA, 607 bp, Zea Mays
ctctgctgcaaaggtgtgcaggcatttgggtttctgtgacgagaaggaacatatctccttcaccttcacagatgcaagaagatatgctaaactgttcgaatcacctctttctagagagcacattactgcgttggcagccctgttcggatgggaggtgcctccacctagtcagttttgagcagtgcgttggtggagctgactgaattttcatggattcaaatggtattctgatatggaatgtgaggggcctcaacgatcgtgctgagagagactctattaaatctttgatcttgacacaatgccttctattgtctgtctgcaagaaaccaagctgtcatccatctctgatttcgatattctttcaattcttgggtcggcatatggtaattttatttttaaccctgcccttggaactaggggggtattcttgtagcatggcgcgatagacccctttccactggtgtttctgtcatcaaggagttctctgtgtcagttcaatttcagttgatgtccggtcaactttggtggttcacaggtgtgtatgggcctcatcaggataacctcaagcatgcctttcttcaggaactcggtgaggtcaggaatgaat

SEQ ID NO: 79043 - DNA, 324 bp, Zea Mays
cgaagagtatgttataagttgtaaggtagaaacataggctaacctcatatgcttatagaaaaagaatgataattgccagttatttattttatcaataataaataaaaacattaagtaaagactcctaagcatagaagatgatgaagatttaggattcaaggttacttacattagcaaacgcattgctgagttgttgcagcaagcccaccagggagcgcctaacgttgtgtggcttcactggcaagtagaaaccctttactgaagtgataacgtgtagaagcttcccgttgcaaaccttcaactgggcacataatgaaaaactcc

SEQ ID NO: 79044 - DNA, 716 bp, Zea Mays
tcctcaattgatgataacccgagttcaaatcaattttggagaacacctgggcacccctcaactgttcaaagaggacctcaatacagggaagcggatatttattcttgattgtcacttgattcaaagcgcgataatccacacacagccgcttgcttttatccttcttctcaacaaacaatactggggaagcccatggagacctgctaggcctaatgaaacccttagccagtagatcatctaattgtcgcttcaattcaacctgctcctttagggccattcgatacggggccttatgaataagctgcgtacccggaatcaacttaatctcaaaagcaacatcgcgctccagaggaatgcctggaagctctgccggaaacacgtcagcaaagtcacacaccacccggatgtcctgtacccgcaaggcagcctcaccctccaccaccatggagaaaaagatccccgacttccttgaccggtaatctggaagcaattgcgccaacaaggataacgtgaactttagggaacttcccaagaataccacctccttacccgacggcgcctgcaataacactgtcttccaaaaacaggatataactgcgcgatactgggataaccaatccatacccaagataacatcgaatgcccccaaggaaatcaccaccagattggccgaaaagacctcttcagcaagaatgatggaacacccctgacaaact

SEQ ID NO: 79045 - DNA, 456 bp, Zea Mays
aggggatacacatacacctctacgaaaaggtgcagcgatctgctagggtgtgtatggcggtgaccaagcccatgtttccgctcaaagcggcagtgcggtgatctgggcgcaataaccagcatcgtccagtgattgattattcttctcgtcaccaacacaaagctaagcaagcgctttgaggccgatccaatccgacatcccgacctcgtcctcctcccacctccatccactccagtccactccaagcacgccctttgccccccacaccaaacaaacagctcagcctgtccgtccctttcgccaccacgatccagcgcagtttattaatttaaaccctcgagcacgcgcctggcaggtcagcagtaacatgctcgctttgccaatggccgtccctcccgtcccgccgtttcgaagccgacaaatccgcgcgtcatcagtgctaatctcgccatcaac

SEQ ID NO: 79046 - DNA, 279 bp, Zea Mays
catgcctatatttatgataggaaattcactagtcatgtttataatgatagatgctatgatcgtattgtttctcacgattctacatttaattctcatgctatgtttgcatcaagttccgcttttgttcatggtagaagtaggcctaggagaaactatgctccttctcatgcacttaggaaagtttgcaatggacctactactgtttatcatgcctgcaatgcttcgtttgtgctttcatgtaaaaatgcaaaagtggtagctagaaaattgagatctaaa

SEQ ID NO: 79047 - DNA, 1518 bp, Zea Mays
cacgagcgtgatcgtctagggcaaatgtgtcactatacacgactcctagatagaattattcccctcctaagtcaccaccgcaaaacctacctcattgatggtagctcgcactaacttcttgcaacaaacaacatgccagcacccacaactacatcacactcacaacaaagcactactacacaaactccatcatcgtcagattggacccccgccaatcattcacaaatccatcacactgacaatgaagcactactacacaaacgccatcaccgccatgttggaaaccccacaatcactgctcgacgattgtttgatttagtgatgaagattgttgtatctcggtaattagtttcttaatttggttgtgataaggaatagatcactaatggatcattcttgatctagaggtatattagcatcgattgctttagaaccgatattgtcgtggtttcgggaaccggtgacaatagaatttgtattcgggtggggaatgatagcacgaactcactccgaatggtgaatcgcagggattccagagggggtctatgtcaaggggttatactggttcaggcgcgcaccctagtccagtgtagtgataattgcagtattgcttgaggactatgttacagatggtgtgtgtgtgtgtgtgttgaaggaggaagagggccttcccttttatagctcaagggaagaaccttacagagaaggcatgttttctactagagagggaagatctgtagccccaggttgacgtggtatccctgaggttatccatagggtcatgtgtagccataccccagatatggcgtaccgccttgcttgctcgtcatataggtccttgtagcgagtccattgctgatgtcttcttagtagtgtgtgctgggtcccatggatcagtctcatggtgcggtcgcgtgtggcgtggcttcatctatcgtcatgagccctatttcacctaccagcgtgcgtaggcatacactcggtatggcgcactgtcccgtctttcctggtatttgggtcactttagagactccggtgttgaggtcctcccacgactgaggtcgactgaccctacaagtcagtggtgatacacttgagatcgttcgtgggggcatacaattatgttgatggtgacctccctgtgccccttcggtatgctgcagttatgtccgaacgtgggtcggtgatgacgcgccttatcatagctgatgagggtcatcggaactagattgggacctccattttgttgagtttcttggaggggacttggtcagccgctccatgtcgcaggcttgcttggctaggacttggtcgatcgctctgcctcgcaggtttgctcggcgaggacttggtcggtctcttggccacgcaggcttgctctgctaaggacctggtcatcgctccacctcgcaggcttgaatagtaaatgggtcgtacggaggtcatgggcctgcttccccggtacccaacagcaacccccgggccttcgtgtaacttcttggagttgtgcgaaggctt

SEQ ID NO: 79048 - DNA, 464 bp, Zea Mays
agcaaccttggagatctatagttggagaacattttctcttgagaaggtggggtttggtagtgtacaaaaataggaataaatctgccctaaatgctctatgtcaggttagtttggtgctaaaccatgttcaatttattgaggcagtgaatttgggttaaccttggagtagggtaactcttgatctgtgagcttttggcttggggttgatgtgtcaagattgtagagttaagttttgtgagcatatttggttagcattggttgacctattgctgttggaaatggagaaataaaggggtcgacaaaaggggtttaggtggacagtaggatgctggacgcccggactcaataaaaattcagtgttggtttccaactctgaacaagattttttgtatctctgttgtactccactggtttgtcaagattgagttatggataagtattgcacggagtagcctgggagtttc

SEQ ID NO: 79049 - DNA, 527 bp, Zea Mays
ttacacatggctagatggaagaaaagagagggttgagaaagaaacaacagatgatcagaggatgtgtgaaaacaacaacggggcaagcaggctatttatagaggtcggtagcaactgttcatctcctaccacgctcaccgaacagtcgcaagtattcaataagcaattcaaatcgtctaaaggcgagtcaggcagcagacgccgctttgcgtaacacgacaccatttggactaagttcaactgcttgggcaatatgattacgccccacggtcacgtcaagttactactccaggacaatgtgctaaacgctctgcgtaccaagacgtcccttggtcacacacattggaaaacacccattgggtgggggacgaccaggaattttcaatagattttctgaagcagtcacatccataaagtatacgcaatgaatatattaagacagaaggaagatatcgatagagatcaaaggatagccaaatatagctactgaaccgcaagtctagtcagcagaagcattgaagcacaaa

SEQ ID NO: 79050 - DNA, 522 bp, Zea Mays
tttggttgttgctgagcatttttctctttatgtgcttcatatcaaatgtcaattctatccaaatttacgatggtgttcttgacaagttcaatttggaggtattgaaccttagtgaatttttgcaaactagttgccaaattgttgttttcttgctttatattaccatgggtatccaaggttcatttagtgaacaagaacctgatgggtgggtccaagggttcgaccacggtgcctagggactcaacccacatgccagcaaggtatctaacccgtaaggcagactagagttgataaggacggcaatatcctatcagattaaaagataagatcgatatccatgtaaatatggtaaagctcgtataggtgcaatgcctatactaaagaatgtgttgaagaattgagtacaccagacatgtaggtgtgcaccagacgccacaccatataggacacccagtaagggttacattatggacacaagattttacaatgcaccgacgtgtcgggtggcacaccaaatcttgc

SEQ ID NO: 79051 - DNA, 284 bp, Zea Mays
tgcgtggaaggcatttgacgagtttgatcccgattttgccaacgaccctaggagtgtacggcttggtctatcgatggacgggttcacacctttcaatagcagtgcaagcccttactcgtgttggtctgtcttcattgtgccatataatcttccttctgagttggtcaataaagaagagttcatgttccttgcactagtcatcccaggccccgagcatccagggccaaagttgaatatctttgttcagccctttaattgaagagctgaaacaattgtggagaggt

SEQ ID NO: 79052 - DNA, 779 bp, Zea Mays
ccaaggaacgcttcttcaatctctgcagtagcaacattcaaggtcaataagtggtctgccatcccttgtcgattccatatacaacatcacctctctagccaactctagctgcatcttgaaattgcccactttcttgtcactccaacattgcagtccgttagttgtagccttgaacttgagggagagggatttgagggagcaagaggtattctggacagagttccaagcacaagaaaccacatcttgaaagccctcaaattttggccaaaatgactcaaaataaaactgcctcttgccctgatgattatccttcaatccaaggaggagagagcaatgatcggagtcctctaaagtagagctttgaagtaagaaatctaggaatttctattcccactccaaggaacagattaccctgtccccatgcagatcaatatctttaattccgaagtcttgaatacatttcctgaatcttctcatcatggctcggttgagattgtgattatttttgtcctcatctctatagattaagttgaagtctccaccaaaaatccaaggtccaacacatttagctctaatcaggtgcaattcttgtagtaacaagacttcttatcgttaccctgagtaaacaaaatttaactaagatacgtgcgacaatgttacacaccaactatctactcatccacggctaaatggcagcaaagagggtgagctatggtgcataattgtattgatcgtttatctaaccctttctgtttcttgtatattctgatcatcaattt

SEQ ID NO: 79053 - DNA, 478 bp, Zea Mays
ccggcctaatccgcaagatggtgaatcagctcgaagttatcccgccccgaccgtccctatctccagttcgcttggacacatctgaatcccacagtaccatggatcttaccttcagatatttccccgagccactgatcttccttactcaactgaatcggcttccttcaatcccctttttcgcttgattcttgttaagaacaggttaatctctattaacaagaattgttcaccagacaatggtcttcaatcttactataggattcttggacttaaactgaatagattctcaaatctggtactctcaaatcggccacatttcactgggaccactactgttctgaatctggttttcagcgtcacccaaatcacgcaactcacttctgacagagcaacttcgtgccactatttctttgatttttatacaacaacccgttaggacgactgtaccaaagttactcccctacaaaccagttttaac

SEQ ID NO: 79054 - DNA, 1021 bp, Zea Mays
gatggattgaatgaaaggcgttactgtgtgtactattttctaattattgtgcgtctctgttcctcttgcagtctcgctctgactttgactctgcgcgcggcgcgtccttgtgaagagttgaagacaaaagcttggcacatgcactgcacgtataaaacaaaaagatacaggatgggggttgagtgaaagacgtaacttttttcctccttcgaaggccacacagggtatacactagagattttcagtaagtttaagattcatttttgtaggcatcgatttatcacatggcgaaaatcttgtatgatctgagttgttttttttctttttgaactactgatggtcacaagtgcggtggctgcttaatcttaaatcaagatagatacctgtttaatgaacagcacatgagactaactaaatcgatttcaaaagaatgaacccaattcagttccaactatccaagtaacctgcttcttcgggaaaaaaaagaagaagatctggagctatgccaatttattgtcttctgctagtgcaaggaattgggatcggtgatgttggtttatagcagtaattaagatagctaaattcagcagcttgtgttcatagctccgtcgtctctgcttgccacaaaaaaaaagatcatagtaaacttaaattcaattaccacaacatcatctactggccgattcgaagtgacttgctatcccaaatcttagttcagtctagcttcatgattgtctttgtgatctgatacctttttgcaagctttttccccctttgtgattgtctttgtgattctgattctgacgtagtttctttctttctacagaagtgtccgtgagaccgtgacgtgctctcttgtagagagtgtactgccacagtggacgaggtgacatgaggcgatgtactgcacagtggacgaggtgacatgaggcgctgttgttgtactatatagctagccgcgcaatcccaattccaattccatagctgcgctccgcgtctggctcagatgcacggaccctcg

SEQ ID NO: 79055 - DNA, 1087 bp, Zea Mays
atttgaataattagttaagaatccttgcacactattcatctgtgtctctgatgtttgcactaaggccctcggagttctatttctttaccacgtcaagtccacgacggtgaacgacgacgagcattctccgacgaacccataccaaccggaatacgcaatgagtaggcttctcacttggtcgacacctaattccacccctggcgaccctaatccctccatcaattgcaagattctggcccaaaatccctctgtccatgacgacgacggaaaccgaggataacccgaggtgtttccgacgatctagcgtggtctagcgtgcaagggtgctgaaatgagggttaggagggaaagagcggacctggagacggcggtccacgccgcggtggctcacggcggcgcggagaaccgatttgggggaaatcccaaattggggcacggtggtggatgatcggaggtgaggacaggtgtactgagcgcgtaataacctaacagagctcactaaggcatcaatttatagagagcgatcgcgagtgcgacgaatttgggaggagaagagctggcggtaagaaaggggaggagtcaccatagaccgctcaatgtggcattcactgagctaagtccccggcgacagaggggctatctaccacgatctactacgacgtggtaacaaggtaagtagcgtggcatgctcgggttaacgacgatcatcaccacgacgaccgcgcggccacgtcgcaacgcaagtgggtatggcaacagggcggccacagtgccccgacctcatccacgtcaaagatcttttcacccttagtcgttatccacgcatcaccggacgcaaatcacagcgtcggcgtgaatccgagcgcaagggtcaccggcggcgaggtgcattgcacctgaagatcttcttcagtactgtaccatgggagctccattcagggcgcctgacagagcaacttgtagggccttgatctctaatttttatgtggcaacttattaatccatctataacaaagttgttgtcctataatccaactttgattttgttatagcaactatgtgggggacagaatcccccgggtccact

SEQ ID NO: 79056 - DNA, 527 bp, Zea Mays
tcccattccatacttggtagccatggcatgcaaccccggcctcaatcatctgctattaaaatgatggacagcgcagacaaggactctattgtactctcctctgattcgtcgattcgcccccgttatattcaactcaaaaggtacgtccgcatctggatggttgctagattgagtagggtgcttgttgatttcccccacccattcgtttccatccagttcgatgcgtgatgtctgcagtcgcgtttccgcactactcctgagtttagtttagtttctctaaggagtcgtttctgatttcggcgccttttcctctttgatagctattgaatatggctggaaatgtttttttgttagccggacattaccttttccatgcgattttgttgtgttcggactcgtgttggttgccacaatcgcatttggatggttgctggattgagtagagtgcctattgatttcttccacccatcgatttccatcctgctcgatttgaaatttgattatatatctgcagatgtgtgttcaca

SEQ ID NO: 79057 - DNA, 444 bp, Zea Mays
ggtacctcagaccttggtacaatcaggagcgtgtttgcttatgaccccttcttactcaagcgtttagggattttagggttgtggtctaggtatccctaattatggttcctgacactaggcaagcaataaataaagtgagaaagtttaattgagatggaaatgcatactccagtcaacgactttaatattttactaaggtatcaagaagctcatgagtccccctagtccttgttgaagtctctcgcatgggccaagttctcagtcatgtaaatccacggatagcatctgggccttttccactcataagtggatgtcccatatggcctcttctggaccgacccctgccatcttcaatatcaacctcccgggcaacccgtcatgggtcatgttccctccactatatggtggcagccaccccttactacaagtccctctgagttatag

SEQ ID NO: 79058 - DNA, 491 bp, Zea Mays
atccatcaggattttgtcgtcttctgtgatgcctcgaggcaaggcttagggtgtgtgctgatgcaaaacgaaaaaggcattgcttatgcatcatgcctacttaagccgcatgagcagaattaccccacccacgatttggaattggcagccatattgcacgctttgaagatatggaggcattacctaatcgggaacaaatgttacattttcactgatcacaagagtctgaggtatatcttcactcaaccagatctcaatctccgtcaacgaaggtggttggagctgatcaaggattatgaccttgagattcattatcaccctggaaaggccaacgtggtagcagacgccctcagtcaaaaaccattcagaataaagggaaccaactttttagaagattggaagaaagaatcagctcaactgaatacatgtttgggaaacaacggcagtctcgaagtcaaaccaatgctagaagacctcattggcaaagctca

SEQ ID NO: 79059 - DNA, 766 bp, Zea Mays
cgttggctcaccattgttgagaatggcccttgactcaccctttaggagaggtcaaggggggacaagttcccaaaaaccacccacctgtcccatggaaagcgactcttggagcaaccttgacgaaggccctccagcgtgggacacttgttgggatccatggttgggagagaggatcgcaaagggtttcagaccaggttacactccaaacagaatgttgttttgggggaggcagagaagtggtggctgaagtcagatggggtaagtgcagaaggaacctttacttatagcgcccgactggatcctagatgccaatagcaggcctcgcgaagcctcacgttaatcacaagcgaccatctaacccttcattagcacttgaggggagacattctcccctcgggggctcaggggctactatcggggatatgatccttggttcctggggcccattagtaagcgagcacgctggggaaaaggcttccgacaactagggcttgctggttagttagaggagataggtagcgtccaccatggaagaacccaccccaggacgaaccctgtggcaccgagcctggggtcgggcgtggcggaccagacagggggctgggcgtactgaagagaaaccactcaagtggatcccacgcctggcccgagaccgacccatcataaatgactagccatgttaactatgtctagcgtagtgccacagcggatgcgccagcctgcctcccactcatgacctatgaacccttcgggccgtagatcactc

SEQ ID NO: 79060 - DNA, 308 bp, Zea Mays
atgttctactctatggtatgaccaaaagaaaaagaaaagattcaaatgctaatttacatgtctatctacattctaccccatcaaaacctggaactagccaatccttagcattctctctcatcatttaaaaaccaaaattgaacattatcacccgggggcatgaaatccatatacgtccaatcaatcatcatcataatgagccaacttattttatctatgcaaaacacacacattagtaataataatctatcgctgtcattaaccactgaaacacaaccaggcgtctagatgctctcggctaagaagcg

SEQ ID NO: 79061 - DNA, 353 bp, Zea Mays
ccatgagaagggtggttcatgttccctctgctcaacttagaacctcttcgctcatctatggaatctgtttgtgggagtgggtctttttgggtggctgaggacttataggaaggggtcactagagatgtcagttgggtgtcatgtgtgttcctgagatggttagattttggacacaacacttgtttctgaggtggggctctcacaagctcgacaaacactccatcaccacattggggtggcagatttaggtggagtgattttgacaagctttggggaggataaatgtctctttgaagaactcaaaccactacactcaccaaccttaccaaagcaagcgtcactcccagccttag

SEQ ID NO: 79062 - DNA, 648 bp, Zea Mays
caccttaccactcttggaaggagaggaactaagaagttgtgtgcagcaccaatgctcgagcgcttgcattgctgagttggacaccacaataccttttggcacatatatcttgtcattctagcaaacgtcagccagttggccgcatggagagatactacagcttctggtcaaaatcggtgagctacccgtagacacctctatgcttcttgtcctccacgtccgtgagattggcctatagaatccagaagaaaggaaaaccaaggcgtagggaggagcggagcatgctggcaggcagacggggcacggacacaccagcctcttggcgatggcgcagctccccacggcggcgacgtccgcgcctccgcagtctaggagaaggtcgtcacggccatgggccaggtcctagtgtcgagcgctgcctgcaaggccctgctcatgtccggtagtgtcgtgggacgtgagaaggcccaggggaagagagaagggctggagatcctggcgacgtgcagtgcaactcgacaagaaaaatacatttgaggggttgaggctcttggcgacgtgtagctctgcgagaagaagcagcttcgtggccggacggccgcgccgacgcgcgaacgttgaggaaaaggatggggtttctggcgacgt

SEQ ID NO: 79063 - DNA, 529 bp, Zea Mays
atggcctgacacggaaactcctcccattcactagataccctcttaaggtcctcctctagctcgcggaccctctcagccagaggtgtcgcctctcaccgagccaaggtggcctcgtccctcagctccgagcaaagcacctgaagatccaccacttcagcactcttctaagcaagctactcatttgactgagcaagcaggaccctctgacaccgtagcgaatcctagacgcctcgctcacgtcagaggaacacagacttggccacaaatttcgccataagctcctaaaagaaaaaacaatgccatcaaggcacatcttacgcaaaggaatgtgttgccgaaagcccttccccttacacgtcaaggagctggaagtcctaccacatctccttctcctcctagtcatcaagggcaaacgttggctcaccgttcggagaggcgcagtcctgccacataatccgtggacctccccacccgaagggattcctcccaacggggacgacggcggtgctctcctcatcggggaagagca

SEQ ID NO: 79064 - DNA, 1498 bp, Zea Mays
tcctgatagctgttgttataagcgaactcagcccaggtgagatgatcctcccagctacccttccatgacagaacacaagcacgcaacatgtcttccaaggtttggatagtttgctccgactaaccatcagtctaagggtgaaaaccaacactaagggaaagcttggtacccaaagcactgtgaagactctcctagaatttggatacaaatttggagtctcgatctgaaacaatggacttaggcacaccgtgaagcctgattacttctttcatatacaagggaaccaactctgaagctgaatttgtggtcttcatgggaataaagtgcgcagacttagttaagcgatccacgacaacccatatagcatccttgcctcgagaagaacgaggtaagccaaccacgaaatctatagtgatatgctcccacttccactctggaatttccaacagcttcaataaacctgcaggtctcttatgttcagccttcacgcgttggcacacctcacaggctgccacatacttagaaacaccaaccttcattctcttccactagaagttttgcttcaaatccctatacattttggtttcgccagggtgaacagtgtaaagcgttttatgagcttctctcaagatatccgtcttcacctctgatttctgtggcacataaaggtggcccctgaaacgaaccaaatcattctcatcaatgatgaactcacgatgtttaccatcgccaaccctctttcgagcttcctgcaacaaacgatcctgctgttgtgccacgcgcactctctccagaagggaggattgaatgagcatatgagtctcctccctagctgtgccaacattgcacaaagcaactcccatacggtccagatctgcaatcaaaggcatggccacttttggaacattagtcctactaggggcatcagccaccacatttgccttccctaggtgatattgaattgacagatcaaaatcctttatcaactcaagccatcgacgctgcctcaaattcagctctttctgagtgaaaatatacttgagactcttatggtcggtgtaaatgtcataagatttgccatagagataatgcctccatgattttagggcaaaaacaacagcgaccaactcgaggtcatgtgtaggataattcccctcatgcttcttcaactgcctcgagccataagcaatcactccgccttcctagatcaacacacagccaaggccaatacgagaagcatccgtataaactgtgaaacgcttaccacttcaggcaaggctaagataggagcattcaccaacttgttcttcaatgcctgataactgaccacataatcgttggaccagacaaaaggaacacccttctccaagagtctagtcaatggcttagtaatgctggaaaaatttggcacgaaataccgataatatccggcaagccccaagaaacttcggatttctgagacactagagggtctcttccactccaccacaacagtgac

SEQ ID NO: 79065 - DNA, 485 bp, Zea Mays
attaataagtatataatctcatgctggattttgattgtgctttttattttgaagtttaaatttgaacccagaatcaaatttgaatttgaaatttgcaaaacaactagaaataataaaaaaagaaataaacaaaagggagagaagactgcctgggccggattcctattcttatggtccaagacctttctaccttcatgccagcccagcaccaacccacgcagcaccacatccggtcactgacaatcagtcctagccactagaccctttccgttcacgcacacgcggcctccgcgctgacgagtgggccttactgctcgggtccgtcgtcgacctcgcgttatggggcgtagatgtgcaacagaagaatccaccgtatatctcgcgggaccgtttctggctccagctgggaccccgagcgccaccagaatatataacccaaaatcatctactctttctcccagaacttttcaatcgctcaccccgtc

SEQ ID NO: 79066 - DNA, 390 bp, Zea Mays
ttttgcttcgctgaaatagcctagcttcaccattttgggaagatcaacttcagagatggtggactttccaaagtccaaatgactaggtttacttggcaccccgcagctgtactcatcttcggaaccaacttcttcaacgtcagcttgtgttgcttcggcagcaggtgtgtctgatgaaaccagcccagaacgcctcattgcttcagaaatcggaacagtttcaacggcttcggtctcatctccatcacgctcaaccctagcagtggagcgtactttggccatttgattttaaattttcttgaaaattccttggaagttaataaccttttttccgaagctcttctcgtgacgaagcagaatccaaactggagcttcgtttgaatgcaaaag

SEQ ID NO: 79067 - DNA, 583 bp, Zea Mays
gtcagaggttatcaaactgaggaatgaagctgcagagaaggacaaaattctgctctccttggtggacagagtcaaggctggtgaagccaatcttaccgcgcaattcgaagctcatagagccaaaattgaagacttaaagaaaaaacttgccgagaagaatgaagattttgaagtggctaaagcaaaataggaaataagcgagtggactagcgcaagattgctaaagaatgtagatgagcttcgggattcgaaggagagatattacgaaaaatccttggattgtgccaagaagctaaaagacagttttgcaaaggtgggtgcttactcatccgagcagaaatttattagaggcgaccccgaaggaatcatcgaatggatcggtgaagaagctgaagcttttgaagagatccttagtgatcatggtgatttttgcgcctttgccggtgccagaggggttgcagcaattttggaaaaatctagctgcgagcacgttaaagctgcaacctagacagaggccgtcttcactatggagaacacgaagaatccttcgactgaggcgactctgatgggcagaaaattttac

SEQ ID NO: 79068 - DNA, 400 bp, Zea Mays
accagctctaagaggcaaagggggaagaagctttggaggaaggttcagcactcaacctaggagattgttctactttttctatggggaggataagggacacacaacaaggacatgccaagtcacgatccaaaagcagaaggagatcgctgaagccgaagcacaacagaatcagccgaagcaagtcttgcatactgcttcatgctatttgccatatatctttgaatatgtgggcaaccagcaacccacgacatcagttgctttggcaagtcattctcaagctgcttgggctcagttaccaccgccaccaccactggcacctaccttggttcataaccagcagccagaagggcatcaccaggcgcaacaacagcgcgacactcaggaggagtccgaagcttgt

SEQ ID NO: 79069 - DNA, 499 bp, Zea Mays
tacctagcggagttctctgaggcttcaatttatagaactcaacgttggtggcactcaatttggaggagaagcgctggcgaccggggagaggggaggttaatggcgcaaggaattcgtggctttcaccgtggcaagttctcgggtgatggacaggcttgctacaccggttcatggcaacgtgctaagcttccaagacgcgtggcgcatgatcgttaagcggctaacgccggtgaggatcatcccggccagccacagtccaagtgggtacggcggccacaacggtgagcgagcccgaaccaatccgagcactaagatctttccttctctccgttatccacttgcgatgggcacgaatcacaacggccggcgcgaatccaggcgctcaatcaccggcgacgaggggcggtgaccttggagatctttttcagtactataccatggcgattaccatcagagtgtctgatggagggatttcaggagccaggatctttgaatttca

SEQ ID NO: 79070 - DNA, 529 bp, Zea Mays
cttattctcgacttaacaggagttacagaaaaatgccccgggtgcacgatctccatgttctgtctcatctgcaccatgttgcgtccggctacagttaacgagtcgcccgtcgatttccccgcacactgcatgctcaggacgcaaccgacttgtctcacacctacgcttggacgtttgtagttcccatctgattgaggcccgctaggcaccttttaggtagcccactagtggcctttcggatggcccacaagacataactgatctatggtgacctggggcatatctatcccccacaggcccccgaggcttaagctagtttctgaatataattggctcaagattccctgaagtgaattctgattcagatggtgagttcttgttgagtagactggttgcttcctctgagtggtgcacccaatgggtgtagccccccgagctttgagccaacttgagtagcaatcgactggaaggtcccagagaattttccttcaatggatcgctgtgttttctttgtaccgagttgattgag

SEQ ID NO: 79071 - DNA, 602 bp, Zea Mays
gccacctgccagtgactccgagatcaaagttgttctcggcatgatggctggggagtcctctgagtctacgcgacttgatttggggtgtggagcccccgagcactcaagcactggagggaagaaggtaggtagtctcgcgagtccatggtgtaagcggtcgtgctagtcggatgcccaggccgagtccacagagtacaagaagaagaagaagctctagcgttcgtctgacctacagtcagtaactgcctaggccgagccgaaccccgatgatggcgtggtggatgttggtttggaggatggtgtggaaggtggaagtggggtgaaagcgactaggtatgtggaggaggaggaagatgatgatgaggacggagaggtacttccgttggtttggcacgaacgacgctccaaggctcgaagtaatacttcgagtcttgctgcttgagcaaagatggtggaaatgcagggtttgtctatgtcggttgttgatgatatacttgaagaggtcgttcctgatgagctgctgcttgagttaactgaaatcaacaatattgatgtccgcatagattgccaagatgaggtacctttcgctagtttgctggtcg

SEQ ID NO: 79072 - DNA, 271 bp, Zea Mays
attaatttccataaaagcgaggtcgtttgctttggatcagctaaagattctaaaaatctttattcttaaatcctcacatgtcctattaaatctctccctcttaaatttctgggtattcctcttgatcacaaaaagttgtgctctactcagtggcaacaagtggtagaaaaaatggagaagatgttgtggggtggaaagttaggttcttaagtttggatgggatgctaactttgattaataacagactatctaatgttcccgtttgcatgtt

SEQ ID NO: 79073 - DNA, 551 bp, Zea Mays
taaacattaaatcgtaagacacagtaaacaaccacacgctagcgttagctatctacacgtcatcgggtgcacaacatcaacaccaccggaaggacgacgattactacctataattaaccaacgcaaacacgacatcacatgtacaagcatttaccacattcactttaaccatttatcagttactctattatcaaactacttaagcacacatacattcactgtgacttctaaatgtcatacagacaaacttagtttaatagggaataatcacttaattggattctaccaacattctcaatattctaatgcaagcacacacccaagagaacacgtagaaggtgatagactaatcacactgcttattatactaccctaatgaggttggttatttagcaatgttgattgaagctgattacttactagacttcaacaatttaatttactacatagagagacgtgcactagttacttacatataacccaattatattagttactatcattattactcatattcacttaaaaccaaaacaagcaagcagtcactcaag

SEQ ID NO: 79074 - DNA, 1088 bp, Zea Mays
gtggcggacgcaaggggtgggcaatgggggccacggacccaccttgatttttataaactcttatacatatacttaaatatataataaaataaacaaacttttatatagacttagatatataataagataaataaacttttatatagtaggttgcactaaatttaatgaaaactagactttgatctaactttttctcggtgcttcaccactcagcccactccccacccgaatcgtggtgctcgtcgccacgtcggtatcctgcacgcagcacaactactttgccttctaatccgcaccgacggatgggtaggctattagtgggattctaccttggcatcacagcaccacccgccctcgctatctcacaagggtctcatcatgccgtcgcaacgcgacaatggctgacgcttgctgccaccgccttttgcctcctcgtcgccatctaccgtagcgtcatcgcctgccctcgctatcccacgcctattgtcgcctcaccgtcgtcattttgcggtggagtagctgactctccataccgacgtgttgatgcgtccgtttcgctctaacgtcgagtctccgccagtccacccctttgttctctccaactctcctttagggtggccaaaataaagtttcggtgttcatgttattttagaacactactcatattatcacttaatctccgtgttattatcatggaactatttttatcaaatggtctagtatattgatttgtctcctacgttatcgtcccacctgaaattttgtcctgcgttcgccactgatgacaagtgcactcagatctaggtttaattgatcatgagtgggccgcagtcctagggacccgtaggtcaagagtggaaggaagaccaactctcatgttgtgactcggtgccaggcgcggttaatacggtcagttacttatgacgggtcgatcctagatcagacgtgaaatccactcgagtggcttcctctcggttcgcccgaaccttctggctctgccttgcgcgatcccgggctcggtgcctcgggactatccggaggctggtcctttctgggtgggcttttccctcatcctcctgctggctcgt

SEQ ID NO: 79075 - DNA, 937 bp, Zea Mays
ccctagacgttattactacaacaccattcacccttgtcgcccctcctccccatcaccgtagctgcgtctggtagctggcacgacatgcttcggcgatgccccatctttcttgcgtcgtcagcgggcatcctatatatccgggcccttaatgccagatccacctcttgcaatgcctcgatatcttgactgtgcctcatcacctctagtcaattccagccctggagccatggccacctagtacccgtagagcgggtgtcgtcgtggtcatgcctgtctgctttcaggacggcatgcgtaggctattgtcgcgatcttgggttcgatttggtgcgagtaggtcccgggcaaaagccttcctgacgagttcgttgggacgacaacgacgacacttatgagagttgtgagccctcttaacggtgttgttgtgaaaccgctccattggattgtatggttggttgctttgttgtgctctcgatggctatgactagtcctcctcatcctaggtgctcgggcttgacccctgtctcttcctcgctatagttatccaaggcctatgcactaaccctgatgttctttggtttggtgtaacttcgcgacgactaccttgttggcctcgggtgaaagccctcctaggctcttgggcgacggtggcttcgatgatgccttgtgcgtcattcaccttgttggaggtgggccctatggtttgtggtcgcctttgttgctggtttgctctttgactcggttgatgctcactgttggcggcctcttctttgtcgtcggactccttgtttagggtgccttcgattttttttgttgagggtgtccatgcttattcgccctccctcctttgtggcttcatcctcacaaagggtgttggatggtggttcatggagatcatatgtgctgtgaaaaggtgtcttcatcaactacaagagag

SEQ ID NO: 79076 - DNA, 308 bp, Zea Mays
cgacattaaaaatgacatcaaccaataatgcttcatctgtgtagtcctactgaaaatccacaaaaggaacagctccaattccagataaagttcataaaaacaattgttgcattatatgaaagaccaattaaccattcaacttgcagccacacaattaaccatttagcttgcagccacagttttgtcgtgcctgttttagtaaatgaattatgggctttttaattgttactccctccattcatcaagttttgtaacatcgtccaacacgtaatattttatagaaatataaaaacaatgataatgtgttg

SEQ ID NO: 79077 - DNA, 1089 bp, Zea Mays
tcttgtattgaattgattgtatggcacgaaaaaagcccaagtctaatatattaaaatctagggaattcgtcggttgacaagtgagacgaacgtcgaaaccatcttgttgtgtagcttcacaaaacattggatcgttaacttcaatatgagatggcgcgttgtcttgttgaatataaattggtttgttgacatcttcacgtggccacttagctttaatagatggaagtaccttctgtatcatgaactctctaacgacatctctctttatcgaagtgatggatttcacttccattgttccagctggacgattaatactactcctttttgcacgttcaaaagtaactaaagggaagcatccaatcttcccatcgaacgtgcaaattccattctcaaatcttggacgagcggtggcacataagaacatgagcttcgggatgttgttcttactccaacaagtacgataaggctcatcctcatcgggcaacaaataatacctctcagatttttgagtaatgaagaaccacttctcatcaatgaaaacatgatcaaaaagactcttaaaccttggattgtcatgcaaagtctcatgctcaagcatgtcaacacaccactgtagcctagacttcttgttttcatcggtaagatgcggtttgatactactcgtatgccttctaactttctcttgtttcacgtgtttcaaaagtgttctcttgcaaacaccaagtactttagctaaatcttcaagagtggttctttccttaagaggaacatagcgcaatcgctcatagtttactggacttggcttacgaccacatttacctctctttttactagcaaaactaaccataataccaagatcaagtgagagtttaccttcagcccaacatcgttgtacagttcgaattccaagattatacattacgacaacttcgctagtagcattccttggtagcaccccattcttacttcttcgcaacagttcctggaatacttgatttaaaacaacttcggaagcatctttccgctgaacactctcaactggtgccgccacattcaggtcaaacaagtgaactggttcttggttcaaat

SEQ ID NO: 79078 - DNA, 843 bp, Zea Mays
gttcctgtacatttactaaacagaggacacaaattcatataaaaagttgcacacaaaacaaagataaaaggaaaacaatgatactaaacggcgccctggtggtctcctctagcctcgtcggctgactcggcgaggtacccatgctcttctttgaggacgactttgagctctaggacccacccaccttccaggttgatatgacaccatatttattgcatagttggctccactgcaaacaatgatattacattttgctaacataactaaacatcctcattatcatccatgctaataaaatcactggtatgtgaatatgagatcttatagagatattttttggattagcaatcatgtattcatgttgttccttgcctaacattgtttagacttggactgcaacaagaattgtttgtactaaatcttgtaattgtaatgtgacaaacatattttgttttattagttgtattagttccttttcctctactttgcatttagaatatgtaaacaaatactttacttcgtgaaaagtattacaatgggttgtggatgatcgatttggaatagactatgtaatggctagataacaagaggagaaggtgggtgcacctaatgaaaaaatatatttatgatgccattttttgttactataatgtctgcttttctaacaaatgaatctaatattagcttttttggttgactcaactgaaggcaatagctttagaaagtgtaatctcttgatgccatataatccctcgagctaggcaatacaggaaatgcattcagagttgctaacgctcacaagagcagtttgaattggtctaatcagtggaatttgagatcaac

SEQ ID NO: 79079 - DNA, 562 bp, Zea Mays
ctagagccataatattttattttacacgatctgttgcggacaaccgaaatagagtgagtgtagtagcgaaaagcacaaaaccacatgcatatattagaacttgggtactagattcagctgggatactacggacaaccatgtattggactatgatttaggttctcaagagaggatgattcaaattctactgctaagaatggtgaagtaatagactgtagttgaagtagttggcaggtacatttcacatgacatctaaaggaagtgtcaaatcgtagcccatgtttggatcggcttttggagccgattctggccggaataagcgctttgaggttccaaacgcatcgcttttggaacagcttctgtgcgccgcgattctggcggccacagttgttacacgcggaagcggaagcggtggaaaggccgcgtcgcccagaagcgtctgacgacagttctttttctgtgccttaacttttacacgctttcgaatatatttcgtataaaaaatcaataccgaatacggtagcactaaaagaacataattaataagtgatgtccaaatgag

SEQ ID NO: 79080 - DNA, 391 bp, Zea Mays
ataggatactcagaatatgtcaagtctggttctagggcaacatccgttacgtcaatggttcgatcgggaacccgaagacacttcttcaactgagacacgtggaacacattatgtactgcagacaaggttttgggtagttgaagtcggtatgccactggtccacattgttcaagtatagggaatggaccaatgtaccggggtgcaagcttccctttaaccccgaaacgtgttactcccttcattggtgaaactttcaggtagacatagtctccaactggaaagtacaagggtatccggtgtgtgtctgcataactcttctgacgagcttgagctttcttcaaattatgaattattcgttgaaccttctcttctatctcttttaccatatcag

SEQ ID NO: 79081 - DNA, 408 bp, Zea Mays
tcattatggcacaatgaggatattttgccactaacacctaaccttataggtttctgccatcagggctttagaggatacagtaattccacatcaagtggaaaataccataagtaaaactcgtggaatgcacatgtgcttattcggtgaacttcaagttctttggtacctcatcttattccttttcgggtatgtatgggtctttatcccttaataggggttatcaaactttggtgttcaacacagattttatttcttctggaaaggttccatcaaggaactataatctcatctaggagatattctctctacataggagagtgttcattcgtcaggaatgtattattcggtacgagatttatatgttgcatatttataattcaaagatatgggtcctccaaggatctcatg

SEQ ID NO: 79082 - DNA, 1909 bp, Zea Mays
taaaaactctcaacaaactgtacttggccgatcacatcttgatcccgcccctattttggcgttggcccggccagcatcgtgcaaacgtccgaccccacatgacatctctccccccttcgatgtgcagctcgtcctcgagctagaacctggggtagcgctccatgaatgtgtcgatgtcttcctaagtagcagatgatggtggttggtcttgccactgaatgaggacctggcgcatgcctgtgtccaaccatgcctgagtgccgctgctggaactggaatagctacgccatgatgcgtaggcggcaggggttgtgtagactccggtggctgacctcgaaagaggttgaggaggccaacatggaagacatcgtgtatgtgggctctcggtggaagacgaaggcggacaactactttgttgatgacttccatcacctgatcggttcgtagaagcgcatactcagcttgtcggtggttgcctgtggcagggataggggggtacggtgccgaacccgcaaccagacccaatcgcctaccttgtaggacaactttcgatcgtagtgtgccttgtaggatgcttgggcctgctccagtctgtaccacgcgtccttaagcatctcatcgtgttcagtcattgtcttggccaccgcttctacacgcgtttctccctgcttgtatgaccttatcgttggcggatcacgactatacaccagtttgaatggcgtatcctttagggatatctggaaggcggtgttgtaggtgtactccacccagggaagccaccgcagccattggcgtggtcgatcccctgtgaaacagtgtaggtacatggatatcaccttgttggtggccttgacctggccgtctgcttggaggtggaaggcggtggtcatgtggagcttggcatcggagagggtgtggagctccttctagaacgcggatgtgaacactgggtcgcgctgcggaattccgtgtaggcgaactatctcctcgaagaagaccttggcgactccttctgccgagtaggggtggacgagggggatgaagtggccgtacttggagaagtgtggtccacaaaggtgaggatgacagacttgcctttggcagtccatcgttgaagtccggcgcgatgtcggtccaaaccagttttggaactggaaggagaagcaggaggccgcctgacagcatgtggtcggttttgtagcgctggcatgtgaggtaccccttgacgaattcctgcactgcagcacgaaggttaggggcgtagaagtcacggcagaggcgatgaagagttcgctagatgccctcgtggtcatcattgtggatgtcgtgcactatctcctggagaagggcggaggacgacatgatgtacagcttggagtcgaacgtgaccatgccgtccaccatgccccatggcgtcacatggcgcgtgtactgatgtcgtcgctgagggcggccagtgctggatcggttctgtgtgcttggcgcaagttgtcgatgaaggagaactgaggtgccgccatcgtgaatgctgaagcctcttccatgtcgcagcaggagggcatcggcgatgatgttggtgctgcccggtttgtactgaaccttgaagtcgaatcccagtagcttcccacccaatgatgttgagggatggttgccaggcgttggtcgaggaggaacttgaggctgtagtggtcggtgcggacgcagaaatgcctgccacacaggtatggcctccaatggcgaacatcctatacgaggccaatgagttccctcgtatgccgcaagggaagcatgtcgaggggccactggcctactgtagaatgccaggggtctcttgtcttgcagcaacatggctccaaactcgtaggaggaggcgtcgcactcgacgatgaaaatcttggtgaagtccgac

SEQ ID NO: 79083 - DNA, 272 bp, Zea Mays
ggaatgtcctgtgcggttcttcctcaagcgcgatgactaggggaatcgcctgcgcgtatgggtgctcgtcgtggcatcgttgatgggaaagatccttggcgtcaccgcaatttctccccggagttatgggcgccgccgcggatcgcacttccctatgggccgctgtcgtggtccctggctttctacggcatttggagtgttgggcacggtcattgctgttcgcctggtcttggggaagctagctccaccgccaatttgatgaacaaccggtg

SEQ ID NO: 79084 - DNA, 677 bp, Zea Mays
gttagggagcagtaggtgttagtataatgcaatggacatgttaggataatggagcacacatagagcacttgtagctgtaacatattttgccccatttgttcagaatatatatgttttacccttgcaggatctctctcatagcataatccattccctgttagggagcagtaggtgttagctgtacaaacccaagatacacaaagggcacgaaaataagttattactcaaataaattggcaaatttatgaaaattattcatcaaaaaagaagagttgttacttaggaagagaaggggtatcactattcacatattcaacaacctgacattgaaggtgttgctagcaatcctagaagaaagagtgaaaggttagctaaggatataaacaaaagttacaatatgatgaattaattatccagactaaaaatgaagcatctaaaaatatgatccccactgttttaaatatcagaatcatcaactaaatttaatgtaggcagtaataagtcagaagtttgaagtagctacaaattattgtccaatatttgcacaagtttctaatttattaacaccttaaaacgatattgatagcccatatgtggaaatcataaatgtcataacttcaactatgcagtgtacaacttatttccaggaataccattatacaagcaaccaaaattca

SEQ ID NO: 79085 - DNA, 895 bp, Zea Mays
cttacacgactcagggtgatcactataccctactaacagagcaatcggcttaagtcggaaacgccttaagtcggtgggacatgctcacgtttacacgacgcatggtgatcactataccctactaacggagcaatcagcttaagtcgaaaatgccttaagtcggtgctacatgctcacgcttacataactcagggtgatcactataccctactaacgaattaatcggcttaagtcggaaacgccttaggtcggtgcgacatgctcacgcttacatgacttagggtgatcactataacctactaacagagcaatcggcttaagtcagaaacgccttgagtcggtgtgacatgcttacgcttgcgcgacttagggtgaacaccataccctactgacaaaacagtcaactcaaatttggagcacttcaaaggaagataattcgtttgcatcctcgagggtgtttctagcatcctgctaacagaacgatcaattccaaacatagtacaattacatacacagaattcatactacactttctctctaaaagcgttaactcaataacaaagtgttttcaattcaagcaaatcactacgctggagcatttttgtaggaagcttcgattgcaggagtagcggaagaagatggtcggctcgcgatatcagacgcggcaagaacatcagcgacaatgtcttcaggcaccacaatgctaggcctcctcatcaggatccgcccggcacgaacaaccttatccatggccttgtcgcacatcgccttcataacgaggcggtcatcctccaaggccttgatgttgaggcgagtgacctccagctcctgagtaacaagcttcttggaagcgcgcagctccttgatgacagaatctttggtagacagtagctta

SEQ ID NO: 79086 - DNA, 825 bp, Zea Mays
cgacggtgatgagattccaatccgagggcggtgagaaaggggaggggtatcatggctggccggggtggcatccagctcaccggcggcgaggatttttactaggctgtgcttatctgacagccacggcgcacgaatcacggcgagcaatgatcaacggcggcaggccaccgacgacgagcttagctggcagtctgatccatcgagacactgtaccatggcatattttcgtcaggcacctgaaccaacccccttctaccgactgtttcccctgattcttgtgaataaccgggcaagactccttaatagagtttgttcttgattcaacaatcttcaatccatatacaggacatttgggtcaaaaccgaggggattcaatgatagggcgcatcaaacttgcactcatctcactggaaccttattttgactttaggttcagtttcagctttctgaaactgttctgacagagcaacgtgtaacaagtttttctctaatttttgtgtcacaactcaagaggatatctacatcaaagttgttctcctataataggttaacaaaattgatgtggtgacctagggcaaaaaccctagaatttgaaagatacaaagctcaaaagttgagcccatagcactgtttttcagacttagtatagaactcatttgaggtctattttgcaattaagtccaaaactcagggtttggcttgtaaatcttcccaaatgtgaaccatgtgactttatatgtttaaacatagtagtttttacactttagtccaaatgtgcactgtttttgcacctaagcccctagggtttggatttaggcttttcta

SEQ ID NO: 79087 - DNA, 506 bp, Zea Mays
gtggcatcaccttagcagcagtggcagccttggcggccatggccctaggccctgacccaccagcagccgtcgcccgaagagcttttgtctcccgacgaggatccatcagatgcaatggagccctcgaggtcttcctcttctttgaggactcctttcgatccttatccatcagagttgatacaacaacgccaatatttcatctgtaaggaaacaatctaaagtactaggccagataagtcgtatagtagtcctcgccagaagccctaggaatggggtcatccttatgccactcacccctagacatttttaacatccatgcggaggcgtctcgaagaacaaacaaagtcacaattactcgggctctgcgcacgtcttggccagattttcggtaaaactggttgatgccttctcctcttgtgccaaaccgctcccccaacattattgctagccaaaccatgtctacccttcttttttttcttcttcagcgatggagccgcgtccttccc

SEQ ID NO: 79088 - DNA, 500 bp, Zea Mays
ggtagccgaggcctggttcaggcgaggcagagcttgcacccgaggttgagtttagcgtcgggccagacggaactcgtgccctaggtcttgacccgcgtcttgtcatattatgcgtcccattaggagctgtcaggtggcgtccacacgtgtaatgatgtaggtgaaactttgacaagatcgcggtcctattgaaagattcacctgcagcccgacgtgaggtagatgcactcattgaatgcggttgttcccaacagccctcgggcaagctttgtctttactgcctaaggcgggctcgggtgagatggacatggccaccttggtgtgagggagcctcgaccgggacggagattctcctgagcttccgtcctgcccgagacaagcctcagacaaggcgaagttttgggaagacccacgaggggggacttcgagcgaggcagcattttagtaagaccccttaggaggacctcgggcaaggcggggttttggttccttgccctcgg

SEQ ID NO: 79089 - DNA, 582 bp, Zea Mays
aaagaaaatatatcctgctagtgttggtattttctagcccttgagtgttttacccttgaagttgcacctgcacaacttgtagacccccatagcttaaccactagccaaaccgaaacttccttgtgcatttgttgtgtaaaaaaattttgttgtttggtgtctagttgcacaaaccctatcaaggccatgtttctttccatagaccatgtcccgaatcttcatagcatttctgctgctcatcctagcagatcttgttttcctacctctcctttgtctgaatctggtaatcattttcctcgtgaatcatgttgtggctttatcatccaaatctctggatccttcatcgattttgccccgttatctggttatctgctataacccgtccacaagtaatggatgttgatttgcctaaatctctcatttctggtcattctcacacccccttctccgaggatcatgacgcttgttttatcaacttatctctaaacgacatatccatgtggattaatggatgttgctgttatctttggatctctcatgtctctaaaagcttatcaatctcgatctcatggttggttcctc

SEQ ID NO: 79090 - DNA, 312 bp, Zea Mays
gagccatggtgcttcgtgtggattgccggtggatcgtcgtagcctgattgggggggaatcgaccctagggtggccagaatccatcaccatacacatcgagccgctgcgtcgcgtgggcaacaccaaagtcgctccgatccgcggtgaggaacatcccatatagtttgtcttgctcccctctttcacacgtgttcacgctaaggttgggttgccggagcgctgtgccagtcttccctggcatggccacctctctgtggatcgggccgcaccgcaactctggtcgtctagggaagaaccagccgtggccctaga

SEQ ID NO: 79091 - DNA, 684 bp, Zea Mays
ccgcccctgccgtgccatctccgccactccccgctccggccatcgacatcctccctgcgcagaccgaagtggagcgacacaagtgcttaaacaaagattggtggtactaactttcataaacctcggtgcaatttacttcaggcatttatatacttagaatttcaatgctattatagggttggaaattagagtgttaaattctttctcacacattagtcactcgagtgatgttgggcttgcaattaggatttaatttttgcaagaaaatttagagaatcctaatacacacccctaacttagggcatcatgatcctttagcactttgtcccatggtttgtttttggtagtccggtgatagcccagtctaatctttgtatccaacatgtttgggaaagttattagaacttaggtgttcttgtgcttgatagcttagcacccttctcactgctttctattgctaagtggcctttcgacatgaagtacaattgtgtataaatattgatgattgtttgatgtaacttgtcttgttaagttagaatcatgcaagtagaaatagatctttaaaaaccttgtgctcacttgttctcagcactaattagattgctctattacctttggagtgtatactttaggtgaattttttcttactgtgtgcatgtcagccatcgtgctgttagttttatt

SEQ ID NO: 79092 - DNA, 1148 bp, Zea Mays
atcagctctttagcgtaatgctctatttcggcaacttgccctactgatagttgcttccccgaagcatgtcaaataataaaatttaaatcatccctagaaggtgcttagggagcaggtgtcgaggatttctctggaaggctctcttttacaaaaccttccgctgccatttctgaaggttcagcttcggcaggaactcctgctggtccagtttcagtagtagtctgagccatgctggcggtgtcattttttccccgaaactttaacctccgttctaagtgctttggcagaagcaagagttgatgttctcacagaatccataacagcatctagcacactggcctttctccttttcctcggagttgctgcggggatgttcgatggctttgatagttccgttgcacatggtggactcagtgccttcaactgttctaccatttttctagcttcggctcttcagtcacacttgtcttagcttcgattggcatagagtgacttggctctgttataggagcggccacctcaattagcttcggcacgacggtcgtttcaatatgcctgggtcggcacgtcaaaactttaaccttttttttaccttgacgcactggaagtcgccgaggtagcagctttcctcttctttccttgctttcgggaaggataatagtagtctggatacacaaacccaatgacatagaataccctattcaacctatttttgccccgacctccaaaggcagttgtcatggcttcatcttcggcctttgaatatgctccaagcagctcatcactagttgcctctatggtatctcgccagtcatcattcggctcattaaactggctcctgtatcaaaaagtatattttagatagaccataccattttggctggagcctgcggcagtctcctttggcatctcccacccgtttgcaagtggccacactctgtaagcaatgtgctcttggactaagtctcttatgccgatgtaagtacacactgtattgaaagctgcttggcacgcctgcacatagtttccaagtgtaatgacatgcctcctactgccgaagtgagaccatataggacgctgaataacccctattatatcttccctttcactcaaatcaacattcacataaaaccattcttgcatccaag

SEQ ID NO: 79093 - DNA, 747 bp, Zea Mays
agcgactcatttcacgaattctttcggacggtccacgcctaaggctcggatggtccacgatagcacagggtattcttcaccacataaaattgaatctcgcctcctaggagggaccctgtcggggaggagagatccaagggttgtcttggggtcggtaggccacccaagacgcctctagataatgttgagccgaggagaggtgaactaatagatcaaggaagactaatactagggctaaactaagtttagattactcctactcctaatgaatggaaagaacaatgtgaataaggtaaatttgataaataaaattgattggatcgattgtggaggttcaatctgtcgtaccacttcacctatataaacgggaaggtttagacctattacaagtcggttcccaaacaaaaaccatggaatttgctaacaaacctaaggaatcaggaaccctaactgattctgttcacgcgcaaaccgttcgcaccaccaccacggacggtctagacaacagaccatccaacctatggggctagacaatccgatggctaatttgatgctcaacacatgcccctgccttttggtggaggtttacgaaccaaaggcatctgcactatcaacacccttcgagaaacaataaatctcactagtcattttgttcccaaagtaagaactaagcccaacgcaagtcactggcttttcaatctaatagggcgattattcaacaaagttctaatacatcaaggccattta

SEQ ID NO: 79094 - DNA, 843 bp, Zea Mays
acgatgagctagcctagctaaaagttcattgggaacatgtgtggcttgaccaagtgtgcatcagatgtagctcaacgatgaggaggcagtggtgggggcaaagacagagtgggtcggtgcaaagctccggtacagagcagtggaagtgagcagtgatgtgggattcgatcaatacaataggacaaccgatgacatgtggtggattagtatgcatgggttgacggttggtgtgtcctgcctaatcatggcatcagaaatgtcttaggtctacgacatttgagataggcactggattgcatggttaggacgtgacttggtctgcccactgccatgatgacatggggataattctcaatgagacctagctactgtcatggcggagcacggatatggaacgattgagcaattaagatcttgatgcggggcactaacggtccaggaatgaggcatgatctagcaataaagatatggatggaggatacacttggtgcaaggaggccaagatctgacacctaaaaagggtgcttctcttggtagagatagatcaatttctttaggggtacgcaatgcggaagcgatgtcttctttagattgaaacttgaactcgtgattagggatgaaaacgatcataaacggttgataaacactaaaaccattgccctttttatttttttttacggaaacgaaataaaaaatggttactctggaaacataaacgatatcggtattcggaacatcgaaaacaaaagtttgatacggaaaatagagtggtaacggtcgagatctaaaatacgatcagtaaacatatcaatataaaaatatctcagtataataagttcacaa

SEQ ID NO: 79095 - DNA, 290 bp, Zea Mays
taatcatacaggaaaggtattggtgatgatgtaatacaactgaaggcataagtattatataatatgttgcataaattaatctataaaaaatataaaactaaatgaactttagttatgctttattggtgagctgaataatgtaagtgaaaaagaagcataactattagtaccttcatgctgtggatcatgcttcgtcgcagcccttagaactttgtctatcatttctccaaatgcctcggatagttcaatctgcttggacacaagcatgtgatggctttgttgaagagaag

SEQ ID NO: 79096 - DNA, 438 bp, Zea Mays
aaaaacttgacccaaccactgcaactggcatgtacgggctatagtttttgacatgcaacaatccatgggttgagcacatgccatgatttttgacccaaaacccgacccaaagccaaaaaaacccaacctgacatgcccaatagagaagcacgggacaatctgaccgacccaacactagacacgggtcaagtacgagtcatgccaaacaacccacaactcgaccttgacccgacccaaacccaacgtttgaacaagtctacatgagattagaccatggttatggtccacaacaaaagaagcgatatattacctactatcttgatttaacctctcatatatacacacattacgtccacatcttgtctatgagtgcttcttttgcttgtttggtttagcacatctctttgtgaaaccttcccttgaacacacaaactcttg

SEQ ID NO: 79097 - DNA, 947 bp, Zea Mays
ctcggaccaggatcaaatggatcacattaaactagggacccacccgaagcgatatgctttcccagtcgtagattcatggatgctcatcattcaacgcctgactcctaccctcttcttttaatctgaaatgcacatgccagattggatggccctgcatcatcgttacttgtccgtgctacacaggtagtggcgccgagctcgctgaggcggcgaccacgccggtgacacccagatcaagcactcaggcacccatacaatgcaccgattgacccaacccgacacactcatctccctgatttggaccaacccacacatgacttcgattatcgagccctgacacccggccacaataataaatagccatgcagaaccacccatctctggtgagcaatacacggctacccacaccccaagcccaaaccaaaaccggtggatatgactgcggggacgacgcgaacatggtaggggaggccatacctgatttctacacggttgtcgcccagtccacgatggtccacacctcaacagctttctagaactttgacgtgtgattcccgactgtctggtcgatgatcccatcgattggggaaacacccactccctcacggcaccatgaagccctgaggcttaatcctagaccccgagcgtcttcataggtgatcgtcaacggcggtgggtttctctctcgcacgattcatggtggcggtcagaacacaagcggcgtacgaagggtttggtagcgccagcgagactcgggaatttatatagcgtgcactaatagaggccgaggtgatagggaggttgttgcttcatctggctccagggaattgcagcggtggtttgttgtgcggttggatcccatggcaaagaagatgcacaacggccttgtggtgagatcgacatgcaggccccatctggcagcggcaccgggtgaggtcatgcatgat

SEQ ID NO: 79098 - DNA, 360 bp, Zea Mays
gcccacgcgctagcccaaaccgcgcacgcttctgcatggtcaatcactgacctcgcaggcctgcttgacaggtctccatcgcctcacagttaccacttacgcgtgggttctgcttgtcagctccttcttcaacagaatcgcgcgcatggcaggcgtcgctgccacatcccatgtgtggatctcgcctggggagtccgcgactgaaagttgcctagaggagggggtgaataggcaagtggaaactttttcaacaaaaactagaaacgaactgggtaaaaccggttcaaccggtgtcaaaactggttcaaccagtttgcacgagctcaactaaagaatgagatataaattgaattgatctcg

SEQ ID NO: 79099 - DNA, 379 bp, Zea Mays
tttatctgtccagaagagagtgtttgcctcatttccaacaatagaacaaacagaggctgcgaagagggctgtagcaaatctgtgcacctttatttcaaaatcagcccaaggcctatctggttcagttttctggagccaaagccatctcaaatttaaagaccatcccatcacttccaaattatgaattcccaacccaccaagggagatgggtcggcagaccttagaccacccaacgacacaatgacctcctcttatatcagttctacctttccaaagaaaaccccttcgaatcttatctattgccttgatcacccatcttggacattgcaatgctatgaggtgataaatgggaatagcagtgagcacagctttaaccaaa

SEQ ID NO: 79100 - DNA, 820 bp, Zea Mays
cctggagcaacttgcaatgaatcagcaggaaccaattcagtgtcatcagcagaacccaaaactttgtcgtcaggtacgctagcctctaaagcgactccttgaccaaaggcttgggctaccaccatgcaaccagagtgtggaggagaagaccctacgtgaacatccatggaagtacaagagggagaacccgctcggacaccctcggggactgggtcatagttcgcgctacccattcaagccggatcatatccggcaacaccctcaggggctgggtcgcaacttgcgctacccatccgagccaaatcatccctggcaacaccctcgggggctgggtgagcgccaacaccatccttgagggccgagttctctgtagcagccacctctaaggctgaaggtccctcagtcacttccatgggagcaggacaatccaagtcagcttcctgaccctcaagaccgcgctccaaggtcgatgaggtgcaggacgctgcccgggatgaccccaacccggtgtcgagcacatcagcacaaacatccatcgcgtcaccatccgctagttctgataacagatcctctggaaccatatcttcaatagtttgatcaaagtttgccagagataattcttgtagaccaatgagggcagacaaagcaggagaaggaactccactactttccccactagctatgtagcgccgactgttcttctgaatcagagggatttcatcttcttcttcctcctcattttcatcagcaacacggacagcacacccattggggtcagcgtcagatgggtcacacccattgggattagtttcagtaaatt

SEQ ID NO: 79101 - DNA, 590 bp, Zea Mays
tctgtgtggcctccaattgccccatcttttcattcgtcacctgcaagtcattatcaagaccttccgtgtgcgtcttcaccagccttacaaagtgttgtatgatgcccttggtgcgaggagagtgtggcatattacgagaagcatcatcaacctccaatcctgccatggttagatgaacagaggcaacaagataaaaaattgaaggaataaaaactctacaactattaggatgtagctactgcaaggcgctcactctcaacctgccacacaagctcttaccaattcttaccttgctcaacaggaggggccagcaaccatcaagtctgcaaccgtggaataagtgtatcggtgccgcagcaacacgacctgtcaaactgtagtcgaaatatgtagagttgtaggtgggctgaagcaaggaatacactagtaccatgttagttacaaaagcaagctgaataatctatcaacggtggtactgtgctggtcctaggctaaaccatgctagagacgtgagcctaggcacaaaggtagtcaatgaaaaagaacaactagcacaacacaaagagaaacaatagatttagagattcaac

SEQ ID NO: 79102 - DNA, 530 bp, Zea Mays
tgaagcaatggttctatgtgaaaatgacttggacaagagggaggactttaaaggtataatttagtggcctatctgatctctctttgcataaagaggccagctattgtgaccatagaagaagaccaagcctgcctggtagagtttaacgcagtgtgcacttacattcgcacctgagatttggtcctggagcatatagcttttaaagtttggccccttgtcaatgaatgggaaataccaaaggggattgaggatgggtcaagccagagtgacagaaaaggtggtttggtatatctgaaatatacatatcgatacagaaacaagtttggtgaacctgttgatgaatggcttgaagctattgaggcaacttgcgatgaaatgttgggagcttatacgaagggtgaagacaaagatatgaataccacacttggtgcccgaggaaagagaaggttaagcaaggtgtctaatgttattgggtttatctatcctgactactgtttccctgcccgaaggaaaggccaaaagaggaaaag

SEQ ID NO: 79103 - DNA, 730 bp, Zea Mays
cgaccacacaggtcaaggcgatcccttactcaattttgcccacaaagagccggtgatacagaatgttcttaggatcgtccacaaaattggagactctcaatacaagattacaagcacacaaggaacgacacattccaagaacaataagattgcaagtaaaaaacgatttgcaccaaccagagataaagagaatgaagaacttgaatcaaaatcgcgctttagattgaaaacttgtctcacactgatgaatcttcccaccgattgaagggggaacaatttaggacacgagatgggagttgaaatgctctgaatcagaggaggacaatcgtcactagggtttggttcgtcaattctagggtttgggtgaggagaggaaaggtttttatagccccacagattagacctggttgattatgtgcgtctgcgcaaatcctggttgaaccggccctaaacctggctggaccggaaaaatccatagaagaactcagtcattttaggttgaaccggcctagaacccggttgaatcggcctgcactagaaaatcatagattttgaaatgaagggggagaaagcgcatggcgactttgcaacttttcaaagctataattttgaagcggatagaaatagttggtgtgtaccatccttaccttgcaaaggaactaatcatacaaagatccctattactaatcaggaataatcaaaatacttggggatctccgccagaaaccac

SEQ ID NO: 79104 - DNA, 1380 bp, Zea Mays
gtgaaaggacgcaacagttggagaaagtgcggaagcgtaactgctggtcacgggatgaatccccttctcaaagagggctctcctgctcgcaccccgggaaatcacatctgacgcgcacctagcgctcacagtgacctaggccctgacatgggggcccgggtccacatgtcacgcacctggagtaccggtttccgagcacggagaaggcaaaccgtcatcccgggagcaaaccgtcgtgcatgaccgcacgtcgcctaggggccgctgaggaatatttttaacttaggcggcagcagcaagacgccccgcgcacggcccgacaaaaccgctaggcgtgggggccacgtacctgtcagttgcggggacagatgtggcagacggcatgactgaaggcgggttggcggtgactacgtcagaaagtgcccgaaaatggcacgcaagctttggccccacctgcaggcttgtaacctcccctgaggtgggcccaggggccactgtcggtaccctataacaggggtaccctatgctatagtatgaaggcacggtacccatgtgtctatccctagacgcgtgataaacaacgcccgatcccaccacatggacgactccagggccgccatgtgtcaaaagaaagtaacatatgccacgatatcaccagtggatccggaccccagcatacatagcctagacccccaggtacgacccaggacctccacgatatcccgttgggacccggaccccacgacaagatcctaggacgatgcataccctgacctaggtcagggacgtacaggggtccggcgcttacgcttgtcaggactttgaccaaagcgtttccgctccccgcttagatagagactcgatgctgccacgtggcctagtacccgtgacgtaagccagcgggcagagcatgacataaggcctctgggccacacaatctttacatttattgcggaaaagacgtgtcgcctatctgcccttctgacaggtgatgtgccgccttggcatttaatgtgccccgtccactccgctggcaggcgacgaccaggccaccctacaagcggtgtgcctgtccaatcagacagcgggcgtacgcctataccaccgcacgcgccatggtcatcatgacttgtacgttgtcagggaaacttctgctgcaagctaatactatggagatcgtagatatcagggcacgaggagattgcactggattaatggctccaagtactacacccgttatgttcctgggcccaaatgttggggctcaacgttcttgtacgtgccccccttgagctataaaaggggaggcatgcaacgttacaacacagtcccaagtcatccaagacacaacacaagctcacgagcaatacaacacacagt

SEQ ID NO: 79105 - DNA, 556 bp, Zea Mays
aattaccgcagcggatgaactcgaggcctttctcttgggcgccatctcgaatctactggcgaacagagcgagagctgaattgcagagaggatttggaggcagaaaaacaagaactagggcacagaaagcagaggcagctgaaagcactgtataagcgggatattcctgagctggatgtcgtttccaaaagcgcccagtcagcacccggcggttacttctaaaacaccggtgtgccacatcatcactcggcggttacctctaaaaccccgatgtgccacatcatcactcggctattatcctcaaaagtggccgacgcggcccgttctaactcggctgtcatttctaagacgctgacgttatcaccaatggctcggcatttgcctctaaagcgccgacgatgtcttcattcgcttggcagctatctctaaagcgtcaacaacatcttcggtcattcggcagttacctctaaaacgccgacgcaactttcagtcattccgtcgctgacacagtttcataatcactcggacgctattttaaaagcgcaaatggtgacaac

SEQ ID NO: 79106 - DNA, 1020 bp, Zea Mays
acaacaaaatggtagagctatgttagtagttcaagtttgattaagagactaagccttggagctgcatggaaaagggagataaatggacctaaaggtgggctgtcagtcaccactgaagctgaaattcgactgtccgtgaactaagatgaactttgagatcgattttgaataggatccagtggatgtttgatcgaggttgctataacaaaattaaagatggtttgtagaagaacaattttgctgcatatgaattagggagctgttacatgaaaattagcgaacggggctcctcaacttgatcggtcaggcgctctgaatggagctcctatggtacggtaacctaaatcagattccagtttcagtgaacgtcgcagccggtgaacttgcaccgcgattcacgccggccgccacgattcgtgccagtgtgaagtggataactgtggcgggtgaaaagatcttaggtgaggagaacttaggcctgagctggatcatcgccgtacccacttgccgcgcggttagtgaaatatcgccgctggtgctcgccgtggtcatagtgaaaggcacgtagtcacctgcttccccatacggtcgtggtcgtggcaagcagccagttgacacccttgaaccgttccccctcacgcgccacagtaagccggccaccatagaaatatctaggctgcggtgaacttgatccccatccaaaattcgtgatcagctcaaccaggatctataaattgaagacaccccctgctccgcctcctttttacgcgtccaacccactcccaactagccctctagtgcactgtagcgcccgaatttagttcttcccccaaatcggtcgtctgcgccgccgtgagacgccacgccgtggccagccacccataggtctgccctcgtccttcttgaccgtgttttaacaccctcgtacgcttgtgatgctcatcgactctgtcaattgagctataccacgctagatcattgggaacgagccgggaaagcctcaaatccatgggtgcccat

SEQ ID NO: 79107 - DNA, 624 bp, Zea Mays
tcggcgaaggaccaagtctcccactgcgaaggatcgatgtcgtatggccttatcatgatagcgcctcagggtttgctggtatctagctgactgaattactgtattcaatcattcttcttccaatacatcaatatcttctagtctggtaggttttgcttcagctatgttttcgaagaccagccttggtgccccaaacctgaggtcggcaggtagtactgcctccgaaccatagaccatgaagaagggagtgttaccatgcaaagctcgactaggttgagttcttaggctccaaaccatatatggcaactctttgatccacttcccgctaacttttcattcttgtcgaagactttcttcctgagtgcttccaatatcattccattagccctttctacctgaccgttggctcttgggtgtgctactgacgcatatttgatctggatgcttctttgttcgcagaaatcaaagaattcagagctagtgaaattggatcccaagtcagttataatgctattcggtattccaaacctgaatattatatcttgtatgaattccactgccttagctgaagttagagaagcaatggtttgtactctatccatttagtgaatttgtcaatggcaa

SEQ ID NO: 79108 - DNA, 477 bp, Zea Mays
ccaatgcatgacaaccatttcagatacatcttctttggccatgactatctgatcaatttgtcaaaaagtacaaaattatggtgcccctatcccgagtaatcaaacgagctatacatgtaatacagattcatcgccgcactttcccatgcttgagcaggacaaaacattggcgatgagtagatgggtgaaaagtgccatgacatccctagagactgatgggcaggcgacattagttgcgccacttcgcaggctgatttagtcaacctttgctcttgcatagtttgtttctttcttgcgaaacattttgatcgttttgttggccgattgtgccgaatgacctttttattcacatacttagaaaaaagctgatcaaacgtaggaccagatttagtaaattcacccaaagccttagcctcattctgcttcttggtcccgtctaccatcaccccatgggactttgatttgcctctgacagca

SEQ ID NO: 79109 - DNA, 741 bp, Zea Mays
gaattggaatctgaatttgaggcaagaaaaaaataccaagaaggcaaatgcacacacctatatgttgctgcaagcaagtgaagtgtacactccagttatttttgaagctttccaaagtgaatatgaaagatccatggctgcatgtagtagattattagataatgataaatatgctattgctattgggagattccatggtgatttacaatttgagcaagagcgcatagtgataagtgatcctttgaaccaaacagtttcatgtagttgtggaatgttcaataggactggaatattgtgtgcatatggtctgaaagttcttgatttgatgaatatcaagatattgccaacacattatgtgttaaagagatggactaaagcagcacacaatgggagtgtacaagataaggaaggaaggaatgtggtagcaaatccaatgctggaatctcaacttcgctacaaggacttgtctcataaatttctcaatttggcacataaagctgttcactctccagaatgttgtttgatgatagaaaatgcacttgattgccttggtacacagctagaggataaactcaatgcatctacttctactatgagcaacccatgcaatgaccaagaaaatgttgaaccaaatgtccagcaaggagatgacttgcttcgtgctgcacatttgaagaaaaaggaggtcaaatccaaaaattcaaggagaaataaaagttggcttgataaattcaacaagag

SEQ ID NO: 79110 - DNA, 382 bp, Zea Mays
gtgagaatgcaggggcttgcctgccgccgagcgccatggagacggggaggacatggaagtggaagatgccatggccaatgcgtctactctatagaacagagaggagcgacgtttaaaggatggctacagcatggtgattggctgggaggaacgacatcacccattggcgcagggacacggtggccacgcattggtcaaactcggcggcgcaggctattggcacagagtttggtggccagccataggccatggcgggcgatgacatgccagcggtcgagaccgccagcgaggctagcatgcacgaattttgttttgaaccactccagctacgatgaacaaaaatctaaaaaatcggcagaacttcaaatcgattcgcccaaca

SEQ ID NO: 79111 - DNA, 346 bp, Zea Mays
gaactctccaacactgtttctctatttatgctggtgatatggttatatttatccaaccaacagtcggggatatcagtactgtgctggacattcttcatatctttggggaggcttctgggttgcgaaccaatatccaaaaaagcagtgtatacacaatcagatgcggggaacaagacttgaccttgctgcaaaacttgttgctgtgtgagatctcgcaatttccctgcagatacttgggtctacctcttgccatcaagaaacttaccaaggaccaagtacaaccgattattgataaaatcgccaaccaactgcaggggtggaaagctgatttcatgactaagggtag

SEQ ID NO: 79112 - DNA, 553 bp, Zea Mays
tgaaaaaatacgttggatggcaagggttcgcccttcgctgctgctttggctaacatgtcatcttctccgttcttgttccactcaatgtgctgtaaggtgaatcctttgaattgcttttctagacttcagacagtagtgagatattgcatgagtactgactctttggtggagtagtatttttcgatttggccggcgactaccatggaatcagctttgactatgcatgtggtcactctgagggctcgcagcttgcgaaggcctaagataattgcttcgtattcagcaatgttatttgtacatttatctgagtccagtgcgaaacgaagacgcgcgacatatctatgtttgagtcttgtgggtgatgtaatgattgctgcagcgccggtgcctgcgtgacaccatgccccatcatagtggatggtccagagagtctttgcctgaatttgttgtggctctaaaggccctgtccaatctactatgaaatcagccaaaacttgggatttgattgctgtcctgggttcgaaggtgatgttgcaaccagagagttcagcgg

SEQ ID NO: 79113 - DNA, 1176 bp, Zea Mays
ggcgtctaggtctactaaaaatcagctcccaaatggtcggttgtaaggatcataccgacgtctcctccaccaacattatcaagccaactctggaggcactcccggctgatgactagcagcccctttgatgaccgcgcgaagcgtaagaaggaagaggtgctgcaacaacttgccaaatggcgggaaaaggcagaggaagaatacctatcatacttcatggtgtatcgccactagaatatcatccgtcaaggggagatcgatatggaatctctcctactttcgccttaggctcctatgtaagtattccatatccatcttttaaggctttcatggaatagcggggaggctagttaaaaaatatatagatgaatctgttaaaggatgggcgcgttcatatgaaaaatctattgtccctagttttctctcgtaggaacctaatacggagccacccgcatctaacaaatcgactacaaatgggtcatcttgtatccaaccattgtatggagtgccgatgaatacatcatatcaccacgacagccaccgccacttgactcgtgatcggctctagacacagttggactgtccgagagtcgactcggaccgtctggctacgtcgtggaccatccgacatattctattaggtcgtccaaccatacataggcctacgcgcacaccacccaggtggcaccatatacgaccggaccatccgggtaatacctaggcctgttcagcatggtcgtggaccgtctgaccccttacaccggactgtactggtacacgtacttagaaccagctactacacaatatacacaattattacactcatcgcagcaggactacatgaccccactgacaacatattataaccatggcatgccaccttatatgcacaaggccgaatattcttcggccaccaaagagtccgaaagatatagggtgggagggggtagcattaataggacacctaatatgtagtttgaacatccgtgggaggaaaagccgacaaaataatgttcggcaacctgaggttttcaccccaaacttaatggatggtcaccagatgtggtgaaaaaattagggacgaggtagccgagttgttcatagacaagatcagtgttagtgtgtcaggcacgggataggcatatcataaaccttataatcaccgatttgacgttg

SEQ ID NO: 79114 - DNA, 424 bp, Zea Mays
gaccattcaaggtcgagggacgatcttgttgaaatgcaggaatggcgctcatcatgtcctcgccggagtctacctggtccctcgactcacgaccaacattgtgagtttgggacaactcgaggaagacgaccacaagatactgctgctccatggaaggctcaagatctgggatgtcaagggccagctggtggcgaatgtggcgcgcgcagcaaatagactctatgtcctagagctcgtggtcgcgcgcccgatttgtctcatggcgcagggcgacagcgcagcctagaggtggcatgcacggtttggccacctcaactttcgtggattgcgccgactagctgaggagaacatggtgcgagggctgccatagattgatcacaatgatcaggtctgcgacagctgcctcgccgggaagcaacgtcga

SEQ ID NO: 79115 - DNA, 1282 bp, Zea Mays
attgatttgttttcagtctgctgtaacttttctgaaattattttggcagcacagataagaaaaaaaaagaaacattctactttcttaaatttaggaccaagttgccattttcgcaccatttaactgaactcttatctcactaaaaataactaatgtgctacattgttccacaaaacgatcctgagaactgctttggtagtccagttggggtgtgtgtgatgtaatggggttctctccccctttcttattcttctattaattcaaagatgcgcagctctcctgcgtattccagaaaaaagaactgctttggtagtccagttcaatatggggtgcctaactttctgattcctatatgcattctgctactgattccttcatggccttacatagcatcctgcatccctttctctatttgaagcataggaacaaagcaacggctggcattgagtctggcagtggaggcaacaaaggatactggtatcagtgcttgcagctacatcttcagacaactgatgttcttgaagacgaaggttgatgcggactagcaacgtgctttttctcctattcttcaacgaatgaggatgcagcatttgttctctatacattaaacatctctctttgcagatttatatgcaaacctgggtgcctccacaaaagtctaaacccttatacatcttgttatatttcctctccaaatggtaaggtttgaatggatcttaattttttttattttttcccagagatagaactaactcatattcagatttacttcacatgtgtatctcaagaatcatttgtttccattttttatggagctagtagtttcaatctcaactgcttatgttcattgttggcatgtcttagttatagaaaagtacataaaagttgatagtgtgtttcacagatctagactcactcaaaataggtctttctgtactcaaacatttctataacaataatttgatccaataaccctgtgactgtaagctgggtgaagggacatcatctatcagactatgaactttagaaatccgggtcatcttttgtggctctcttcgagctcaataatgtctgtatactattactgtgtacacatggtgacatggatatactatttttttttaccaacaccatgtcttgatggctgttgtgcttgaataattggaagcgagaagtactatcaaagaatcttttttggggaaaatgtgagaatggtttcttcaccacttctcacttcacagttgtgtaggcatggttttttcattgtgacctccattacaac

SEQ ID NO: 79116 - DNA, 354 bp, Zea Mays
cttcaacgtctgcgagtgcaccgtctttatgccaaattgtcaaaatgtgatttttggctaaaggaaatcaaattcttgggtcacactatctctcaggcaggcatagctgttgatcccaataaggtgcaagaggtgacgaactggaagccaccaacgattgtccgtcagattcgaagttttctgggattggctggttattatcgaagattcatttcggatttctctcgaattgcgaagcccataactgaattgttgaagaaagaagccaagtttgtttggggtcagaagtgcaaagatgccttccacacattgaggcaacatctcaccacaacgccggtgttagcgcaacccaat

SEQ ID NO: 79117 - DNA, 761 bp, Zea Mays
atgggtcgaggagcatcaggagaacctaaggacactgaaacagaagagcagagagcatgaataaacctgaaatgagctagccacggcgaggtcactatgcacggtgtttcggaccgatttggaggaatcccaaattggggctatctggtgagtaattggaggcacgagtgggtggattggatgcttgaatacctaatggagtcgagggtgtgctcaatttataggacccttaatcggtggctcgtgaatttgaaggagacgcgcggcggccggagatgaggaagagcactggcgcaagcgattggtggcatttaccgtggcgggctcaccggcgatgaccagatgtgctagagcgagtcactatgatgaagcactgcatctgggcacgtgtcatccgagcggcaggcagctaactccggtgaacttatctgaattcggccgtgagccaagcggacatggcggccgggcggaacagtgccctaagctcaatagcggtgaagatctttctaccctgaggtgttatccgggcacaagtgatcatgaatcaccttgccggtgtgaatccacgcatgggggtcaccggcggcaagttcactgagccattggatcttttcggttactgtaccatcaagaacttcttcagtcagcctgacagagcgaatggcagggagatttgctccaaatttcatgcagtgactcgatcatctcactatatcaaagttgtagcctaacaaaccagctttagctttgttacaatgttc

SEQ ID NO: 79118 - DNA, 497 bp, Zea Mays
caatgaaggctctatgaacatgattcatcaatctcataaatgtactaggtgcatttgttaacccaaagggcatcaccaaccattcatacaacccaaattttgttttaaagcttgttttccattcatatccttgttttatatgaatctgatgataaccacttcttaagtcaattttggtgaaaataaaaacaccgctaagttcatcaagcatatcatctaatctagaaaatggatgtctataccttacgatgatgttattgatagatcgacaaaccacacacattctccaagatccatctttcttaggaactagaaggacaagacaacacaacggaaagattctcttgtacgtacccattttgaatcaactcctccacatgttgaatctcctttgtttcttctgggttggtgcggtaggcagcacgatttgggagggaagcactgtatacgagatctacttgatgttcaatccctcccttaggtagtagccctgataa

SEQ ID NO: 79119 - DNA, 678 bp, Zea Mays
ctctaggtgacatggctggtgccacgtccgatggagtaacggacatgccagtgagtgtaaaattgttcttagatgatttacaactttctaggtaccctatctgatgcatcatacccaatgcacaccggtcatgttggtgcgtattagaaacatcatagggcacatctctcatctggtgtggtatctggtgaagcatcaaacacatatggtgctaccgtggactgtctaacttgtgttttcaaccgttttaattggtttttcttcaaaacatctcgtgggctctcttgggttatatagcactagtttttcataagtgtgcaccaacaacacataactagattttgcctaggtcaagtcacccatctcatgcccctctttatagttcgactaaaagaaaacaaaatgtcgtatcactactctaagtgtctaacaactcgatcgacacttagaactagctaaactttaaccttttcaatcattccctgtaaaataaatcattgatattcattaactcgggcatgaatggtagacacagtaatattgtattgtcattaattaccaaaaccaagcagaggcctagatgctttcacctacctttgtagtattcaacttttgtcataagtcactaccctaacacctttgactattgacattcaacatcctcattcttggattcag

SEQ ID NO: 79120 - DNA, 619 bp, Zea Mays
gatgaaattaaaccctagccacggcggcggaaagcttgagcacccttcgaatacctaccaaacgtaaccctgacctaaaccgaacgatcttagggtatggatttaactagcaagcactacaccgacctactcgtacccacaatggggttccgggtccgtgatgcttgttcccaagacaacaacaccgtagagctcaaacgaagggaacatggagcaccagtaggtcatatagtacacgatgcttgcgtgaaccggcttaggaccgacgggaatcggttggtcgacacaggggcagttcgcggagttagtccgcgatgccgagctcacgttccaatctagctataacagtaatgaccaaacggccacttcggtgagcttcaccaacaaacatggacactagaatgctagatcagaggcgttgaaccataccgtgcccgcttgatcgcatgaggttgctatgtcggcgacatggtcaccaggctcgcgaaagcactgagcaagaaacttgagtaaaccttgggtataattttggggaagggaaagtgatagcactacacagatgtgaaccacaatgatccacggtgatcttggctgggcttggagatgacaaggatctttc

SEQ ID NO: 79121 - DNA, 794 bp, Zea Mays
ccaaagcacacggtgtttaggctccatcttcacaaagccatcaccttgccttttgttgtccaataggtaggtaaggcaagtcatcaagtcctcatcagtgaaacctggaatactcatgcaaatttgatacagatcagggtggacatttatggtctggactacaacaggtgcttggacagcttcagccaatttgttcacagctccagtaagccctgtcataatccccaactcttcatcattgagtctccttttctttccatatgatccataggaactaccagcaccagcaccactatgagaagggttggcaccagcagaaccagaggcagtagtaccaacaagacatggttcttcaaatgcaccagcaccttcagtgatatctgagatggtgccaaggggctcatttgaggccatggcatacttgcgagtagcttgcccagctccaaatataatatgcatctgcacatagttttcaattggcacattgaggaattcatcatcttttgggttgtcttttgtatggcccagcaagtgttcatcatcaaggatgattatgaatgtattctcatcccaatgagcaccgcttaggtccttgagcctacaaaccctgatccattttttatgccacttcctcaaatgattgtagacctggatgcctgtgacttcttggccactgaattcagtcaatgccttggcaatagagttgacatggacctccttgaaccctttattcgtttttactccttgcccaaccaagtctgcaaacttcctcaggatataggctgacatcacag

SEQ ID NO: 79122 - DNA, 527 bp, Zea Mays
gtcagcgacaccgacgtcccgataggtggtaagacctcgttcatagtattccctgcgatgttaccttcattttaggctagtttgtcgtatatgggttggctctggtgccactttggttactcgcaggtcggccaccaccgctagtgcgggcgtcgccgccgtggtccagcgagctaaggctctcagtcaaagttagggtagagtacaccgttgattcgggcgcggacggctgcgatggcgcccagcgtaccgattcgggttgggtgatccgcgaccgccagatcggatacggatgggcgagattagatcaagaaataccctttcaccggttgcatttgtgtcgttggatcgcgggtatgcgatcgtgatcggatctggtcttcgtaagttttgcgctgttggatctaatctaggtggctcgtagcaaaggataccccttcggcctggcataatcgctaaagagtccctgtcgttttaacaaatcaacccgcaatcccaagtagttgaaagaaccttacactgaggcc

SEQ ID NO: 79123 - DNA, 813 bp, Zea Mays
gaccacaccgtcgagtttgggacctcgaggataatttcgggccacgtgctggagatgcagcgctaaggttactttgggaatggtgtcgggtgggctctaggggcagaagaggtccctgagccggaggggcaattggttgttttttaatcctttttcactgctggtcttcgcctgccgacgcatcgatttgtagtagaggttttgcggaggttcgaggtacaggttcatcagttgacaccaaatgcagtggtggcgcttgcgaagtatgtctgggtcgtctcctcatacggcggacagccatctatggatgtctttgcgaagaattattgtctacactggtagaagagaaaaataggtgataagatagctcaatttcgatcgtgaactttcacactgaggactaggaagacctcggctgaagttgttggcattgttccctgtactaggaataagtggggcaattggtgggacttttggttttatgtggctcccggggatatcgaagggttgtcaagtttgcctcggccatcatgtgttcacattgttatgtggcgtttccacaatttgaggtggcagaagaagatgaagacgagggggcccttcgatatgtggcccgcctgagtagcggaagcgacttggtcgaggagtttattgcctacggggtttggcccctagtgcatggttggcactgggtgaggttaccgcccgcttgatgccaacactggggggccagctactgcgaagtcctgtcttcgccatggatctacgtggccgagacgcggccgcgtttgtgcgtgaggtcgaggccgaagc

SEQ ID NO: 79124 - DNA, 765 bp, Zea Mays
gattggatgcgcacgatcaaaaggaaactggaagccattggttgcccagagaatcaccgtgttcaactggctgcccaccaactttctgggatggccttagcctggtgggacaccttcaacgtcaccatcagagatgctacctgggcggaatttgaagcagctttccgggaacaccatgtgccccagggacttgtacagcttaaggaggacgagttctgagaattgactcaagacggaagatctgtcagcgaatatgtgcacaagttcactgagttagcccgctacgcgccagatgatgtcagtaccgagagcaagaagatggcccgtttcctgaagggactcaggccagaactcaagacaattctggctagccaagacttcctcaacttctctcacctttccaacaaggccatgcaagttgaaagggctaaggaggaagaaaaaggacatctcaaaaggaagttccaggttctccgggcacagcagcaggaccggcaccagaagactcgatcatttgggtttccaccccaaggggcccagcttcagtagaccagctggacccactccatcacgattcagccagctgagtcagagctcttttcattccccctcagtggcaagcaaccaacccccggcaaatgcatgttggcactgcggtgatccaagtcacttcaagaacaactgtccgcagctgaagccaccaggacccgcctactccaactcggtgaatggccccaagaatacctcggcatccgcccccaaggc

SEQ ID NO: 79125 - DNA, 677 bp, Zea Mays
cattatccttataactgtgaatgtgatacctaaggtttgttgagatcctaaaacaacgaggttgtcacgatcaaagacatttctaacccttgctagagccttcccaaaataagagcgtttaatggatctgatatttaagtacaagtaccctacaaaaattcacgaacaacaacaacaatgccttgaaacggaaacacatgatccgacaacgactggactaggataataccccaatcttcatgaagtgtgggttgtaaatgagtaaccgcgagtaccttttttcgggtgctgaattagagcagcaaccaaaccttgtggcaagaatggtgcaagatccacccagcaatacgccatggaagtagttggttccgaagcaaatgacggagagtgtgagagtggaggaagtggtggatgtaaggagtaaattggtgcgacgagggtattgtggaacagtgtaagttcgagcatgactatggaagacaaagggccacctctaaagttgatcgccccaacaatttttgaaaaggtggtgaaccagggaggtgtttatggcccacatgtcatagagctaaggttggattggaaccagatattgggagatgaggcccacgatgtgccactgaacttactagaaaatgaatcgataatttcagcgcctagttggaaaccaatttttg

SEQ ID NO: 79126 - DNA, 501 bp, Zea Mays
gtcaaagatttaattgaattgaagaagaaaatagaagaattactagaaaaaggtttgatttgccccagttcgtctccgtggggagccccagttctatttgtgaacaagaaagatggttcaaggagaatgtgtgtcgactatagaagcttgaacgaagtaacaattaagaacaaatacccgctacctcggattcaagatctgtgtgatcagatgagaggagctaaagtattctcaaaaatagatctaagatcagactatcatcagttgaagattcaaaccgaagatatacctaaaacagcattcactacaagatatggactctatgagtttttagtcatgtcttttggactgactaatgctccggcttactttatgaacttgatgaataaagtattcatggaatacctcgaccagtttgtggtggtattcatcgacaacatacttatatactctcagagtgaagaagcacatgaaaatcatctgagattagttctacaaaag

SEQ ID NO: 79127 - DNA, 1007 bp, Zea Mays
gtgaaattagttcatcttcctttggaaaaattgaaatcccttgaaaaaatacccaaactagccctaaagaaattccacactgcttctccacgtacatcggcagagacgaaagagaggcagggaatccggcgtcaggatggtgcacgggtatccggcggcgtggggaaggaagggaaggcgtcgatgcttacaacaactggtcggtgacgcgggtgagaaatggcgatgtcggtgcttgctagcactggccgatggcgcaggagagcaaggcaagacagagggccaccgtgaagataagccgacggttgcacgcttggtctaacgagaagaacataggcgtggccgatggagttaggtttcgtggaatagaaatgaaacattttttctctgtaatagaaggtattagtgggtaaatatcacagaactccatgtctacaactattttggagtggtttggagttgggaaagaggtgctccaaactcctgattcaaaatgaactagagctccaccaactccatggagttggactgctccaaaaaaaggtagagttggagtatttggttggctccactcaactctagtatggaatttgaagttggagccatgccaaacaactactgttcggtggagcaaagttatgccaaatacgccctaagtaatatagagatgtaaactctcatcgtgacatgtctgatgcatttaagtgagctagccatcgtgacatacatgtctagttcatagaatctggtgcacacctacatgtctagtgttcgatatgtagctgccctattctttacacaacatcggatattgttctgtggcatgtttgaggtgcctcatgtgtctggtactaccgagatgcatgtatttttcttcatttcttcgtgtgtcttctttcagacttcttccatctagactgtttgtacatatttgtagatcttcaatatgccctatgatgttttgtttgatatgttgatcatgcaggtcgtcacttgttaagtacaag

SEQ ID NO: 79128 - DNA, 286 bp, Zea Mays
cgccatcaaggtgctccggaaggcggacatgatccggaagaacgcggtggagagcatcctggcggagcgcgacatcctcatctccgcgcgcaaccccttcgtggtccgcttcttctactccttcacgtgcagggagaacctgtacctggtcatggagtacctcaacgggggagacctctactccctgctcaggaacctcggctgcctcgacgaggacatggccaggacatacatcgccgagctcgtgagtcgccagcggtgccgttgtttgtttcgtcgtcgtctt

SEQ ID NO: 79129 - DNA, 937 bp, Zea Mays
attcctcgtactttgggatattggcaatggattgctaatagatctcagttttgtataatttgtttgtttcagtttgtgatgttcatacatacatgtgcatagatctcaacggattattcgtactcattttagttttgttggtatgaatcattgtgtctttgttgcaagtgtgatatttatttacttttttggtctcatttgtcaattgctggatttaaggtgattgttagacgttagtaggcaatgtaggtgtattctttcatattttttgggtcgtttcttgatggccgaatattaattctccattatccgttaatttgagagagagtgcagtagaacgcagacctaaacggatttagcacataggagataatgtggtaaaacattttcaaggcattgttagttgaaggggtccaaagtgattttcatatcagtaacttaaaatcaagtagagcaataaaaaagactacccaataatttatttgtatgcaaggtgtagggaaaataaacaaggtaacctattaggatgcaaggtgtatggcatggaaagactccatcttgaatggtggatcttgactcatctggagatcttgttctgactcttatccttcgttgacgaggttgaacttctcttctcgggtcttggtgttgtcatctaatttagacacatgtagagatttgtaggtataccaaatagcttagtaggtagagcagatggcttaagctaaatgagaataggtagaatctgatttagttgttttgcttctaggtggggctagataggttatacaatccactatgcaggttaggttgttgtttatggccaagttggtctaagacaccaatttagggtggattgaagaattaggttaaaacatgtttataggagtagggtctaatctatttcacaagtattagctaacatgttaagttagcc

SEQ ID NO: 79130 - DNA, 657 bp, Zea Mays
ctttctctcgagcagaacaggtactcctttgcaatcacacccacgctcgctcgttgtacagtcacaccggtcactgtttgccacatgcagtgctggtaagaaccttgtaagagcagggtaagacgcttaataacttgtgttccaccaccaccaccaccctgagagatagttgtagggttcacattgttgattgcctttttgtctctattttgtgctaacaatgacaggaccaaagaaccaaatggacaaggagaaggggcctaagcttaacgacgatgagtgtgtctctcaactggaattgaaggagatgatgcgcgcgatgactgaagcttttaaaaaataccaggactctgcgtcgacatcctatgagcagtttgatcgacgagttgctgaacttgttacacgcatggacgtactggaggctcgtcccccaccgccaactccagccccagctgctggtgcagtactgctctctcctgtggacgacgacgacgacgacgatgtttatgcaccgctgtgacgacgcctcgcacataatcgacaaggtatgggaggtaatggtatacgtcatcatcataatcctgaaccagaaaatgatccatttgctaagattaagttctctattccaccgttcatgggttcttatgatgatgaagc

SEQ ID NO: 79131 - DNA, 764 bp, Zea Mays
gacctggtgcagtgccaagggctgctgcctgcaccactgcaaagcacacagtgctgcacctgcatagtagcagctataccagctgctgagctgctttgcattgcatttaaaggtggctgtggctgtatacttaaaatatttgggacggcgggaaagcgtggtgctcttatttactagcattagagagagaaggtgattagagtgctctcagagctctgtctctacgtgcctctgtctcagcgctgcactgcagtgcactgcaccgcgtgaccaaagagaagtcccgagacgtgggtcctgtagacacaggagccatgcatgactgcgaaacaggcgctgttaatctctctctctctgctttgcagttcatcatatatacatgtcgaccagctagtagcacaagttcttgagggcagcaaaagttgtcaagtttgaacatggaccagttgaagtccgaacagaacaggcagctcaagtttttttcttcttctcccccttgcacgttctaaagctcgccgttgctaggcactatatagctagaggcagaaatagtactccacatctgtacctggtacaagcatcatgcatgcacaaccctaattcttgtacaaagtcatctcttgcacaaagtcttctagggcccggcacagaaagtgtgtcgagagagagagatagagagatcaagtcggtcggcaggcactgatgatcagcctcatcctcattccccttgttccctctcgcctcatacaataataataactctg

SEQ ID NO: 79132 - DNA, 376 bp, Zea Mays
acgatccagctgcaaaggctagtgattctgccaacggggtgggcgtaggtagaaactcctccgagctgtcctctagaatgactctgttctccacccaaatgcgagggagatccacagggatttcctagactaccactaggtagacagaaacttgccatggcggagggatgtagttggtgttgattcgagtggtttggatagtacgaaccatctataagagaaaatgtcaacttagttgatgtctaaagaggtaaggttgataaaataattttgtaagaacaaaattagcatgttttgaacaaactagcctttccatttctaactagtctagcgacctatagtcagcatagctttgataccacttctatcacacccg

SEQ ID NO: 79133 - DNA, 561 bp, Zea Mays
ctggacctgaaattgccctggatgttgctcgttatatggtgaaggtggtgcttgcatgggcagttgaggcaagacgaatcgagccaaagaatgacatgccaaagcaactaaggctgagggttgtggacttgggtgttgactacggacatactctgagatgtatggagaataatatgaggcagtgtgaaggacctgcttcggctgattttgttgtgcttcagcttcgacgttccttctgtttttggattgtgacttgacatgttcttgttgtatgccccttgtcttctccacaggatagacagaataatttcctttgttgggagttgaatctccctcaaaaactccttcctcttcttccacctcttggaactggtgctctgaaggtactctggtgagttgctgttgattgagagtgattttgctgcccttgagtatggttgtttttgtctttgttgacttggattatggatggttctgacatgccctagattgaaccgtccaccgaagccccttgtcattttggaatatctgaaggcctcctctttcctttgtcgaaaatca

SEQ ID NO: 79134 - DNA, 975 bp, Zea Mays
aaaggaaacgaacaagagcgggatagggaaaacaacactctcggattgaaatggaataagtgaggctaagaaaaataggtaaacatcatggtaagtatggagagaggtcaagggtcaaaggtgataataggcaaggatataaaggaagaggtaaatgtgcataaaaacaggaatctaggtacaaccaaaaatagagttaagataagtcttgcaagtggtaaagtataggatatatccacgggtgagataagtaagagaccacgcttgaactaaggtgggagattggaggttttagataacgaacatagcgtaatcgccaagttaagattgagagatgagaagggtaaagccaataagaaacaaaagcacaacaaaggatgaggttacaaactcgcgagccaaagaagaggatacgaccaagagaaggaaggtatgagacggaagaggggcggtttttaagggcaggtatgagacaaccatcaatgtaggatatagaggtgtcaagggtgcatatgataataagtaaaagcatgacaaaggatataattaaggaaagactcgcgaaacaacaatgtggagaaaacatcatgtgtaagataggtaaggttccaacagaagggttgaagtaacagaaattattaccgagggaagttatgaggaaacggtgagatcatcaaggatgtgtgaaatagaatggtcgctcatggaccatcaagaagcaagggtgatcaaaggcatattaatcgaaaggttttgaacaatcattgggatatgaaggtaagcatatataaaaatattagtatgcaagattccaatggtacgagcataccaagaccaagggaataggaaaagctaaaagataacggcttcaaaacggaatagaaaggggtctcaggagacaagaactccacggacatataaactgaaatgtctaagtaggtagtggaaattcagatgtaagtatttgaaacaaga

SEQ ID NO: 79135 - DNA, 571 bp, Zea Mays
gaggaacattatcctactcatgatctggagttagctgtggtggttcatgccctaaagatctggcgtcattatctgctgggtaatgtctgtcatatctatacagaccataaaagcttgaaatacatcttcacccagtcagaattgaatatgagacaaaggcgatggctcgagctaatcaaggattatgaattagaaatccattatcaccgaggaaaagcaaatgtagtggcagacgcgctcagtcgcaaggcttcttgccattgtttaacagtgaggacttctgacattacattatgccaggagatggagaaattaaacctggggatgattcaacatgggacttcaaatcatttaaagctggagtcagtcatcttacaaagaataattgacacacaaaaagatgatgagggtatgaagcacatacgtgagaagataatggctggaacagccaaatgtttcaaagaagacgatcaaggtgtgatatggttcaataaccgcatagtggtgccgaagaatgaagaactccgccagcaaatcttagatgaagcgcatcttagtcactattctattc

SEQ ID NO: 79136 - DNA, 686 bp, Zea Mays
cgagcacctttaccggccgattggggcaacgacaagggtctccgagcgactgacacaaaattggatccatcccaagccattcccccaacttaatttcactaatgatcaagtggtttgctctggccacggtgaccatgagcattacggctataccgtcgtgttcccggcgatctaaggctattccgttcaattgattgggtcgatgggcatcacgggcatacgagagcacttaaacaaggtttgaattgggtagagtcgtaccagaacaggctggccacggtgaacttggtttcacggtgttcttcgactgatttgggggaaatcccaaattcgagctctcggttgcaagactggaggcaatactggctgatgtagtgcgtgatgatattgcgaagctaacagcgggctcaatttataggttcagcgagcggtgaccgtgaatttgggcgctgacgcgcggcggccggaggtgaagaagaacactggtgcggtgaatacgtgttcagtgtcgtggcagtaattccggtggtcgacgggaagctagagggagtcacggcgatgcggtggcgaggttgggacacgcggcgcaaggccggaaaacggcgattcaccggcgagcttatcggctcaagccgcagggtagaggggaagtacggggggggtcaccggagtggagtccagctcac

SEQ ID NO: 79137 - DNA, 336 bp, Zea Mays
ttcagtttagccctgccagttgtcttgtgttaccaacttctaatgttaagtactgagtgtactaatatcaagcactaacactatcggattgttcaacacagttatcttagcctagactagatcacatggatgccatgtggctttacctgtgcttacaataaaaaacgacagccatttagtctaaagcctagagcaagttggggtaggctaggcctactatgtaattgatgtaaacaaatgctagatgagctaaactagctgttaatcaatggatttcctgaaatttattttcaccagttacttacaattcctgaaaaagaagtaagataggatccc

SEQ ID NO: 79138 - DNA, 1404 bp, Zea Mays
cggcgaaggtggtccgaacaagcggtaataaatgcataaacgtggtatgctaacctattcggtcaaaagccctcgcttaatttgaaggattcaaccctaattgagcttgttcatggtcacggcggtgagacgaccctggtgatcgcgttccaaacgactaacgacatggctgctaaaattgaagcatgggttagcttcatgggttcaccagaggttatgcacacgcttgaatttggatttaacaagaatagaagagcgggtcgacagagagggtgtcgcggcggcgttctacgggacaattgggtgttccggagtgtgggcttcggtaaagtttaattggtcagctccgagagcaatagaaggccagagtcaagctagaataggaagtaatttggcatgtactgacccgaggagtgctggccacggaggggtttttcacggcagcggaagaaaccgattcaagggaactccgatgatcactaagggtggtggacagaatagagtgactagtgattcattggcttcgcaacgaagggacgaagagctgtgctcggttgatttggatgaagggggaagagagcgtggtgaatttataggcccaatgagccaccgcgacggccatggtgataaccatcaccggaccttgcttgccaccaacgacgacatcggcactgcccttttctaagagtttgccacgttccgccgcgacagtaatgccatcagatcggcgatggcatggatggacggagaagagtggcgctggtgaccaagcttggccggaaggatcagtggtcgcgtggcggccggaataattatcttccaccgcgacgatcttacccacttccagaatatcatcgcgaggagatgctcgccgaatgctcagcccgaccatggcgcaaatcacggcgcagatcagtaccggcggcgaggtgtgcggtactagagatttttcttgctactgtaccattgggacttctgcttaaagcgcctgacatagcataatcaaggcataatttctccataatctatgtgacaacgtcataatgcatctgcatcaaagttatagatctataatccatcttcatttttgctatagcatccctagtcgaattcctactgaatccaacccaaacttgaacttcaaacatggccaatgtcactggtggtcatacttttctgaaattggtgttcagaactgtccaattgacttctgacagcacgccttctcactcatttatcttcaatttctattcaacaccagtgtttagttacttaatcaaaattgttctccttacatggttctacaaacttgatgtgttgacttagggcaaaaacttcataatttgaaagatatagggcttcaaagttgagccaaatgcactgaaattcagacttaaccattgg

SEQ ID NO: 79139 - DNA, 696 bp, Zea Mays
gggatgactacggagatactaagtaatgatgaaggtagaggggaccatggtgatccaactatgaacattcaggaggagatataggatgatgaggcggtgattgttgggtctatcccatgttccaccgtagggaagttgaatgagaaacatggggagcatcctgattgttccattggaagacaagtgaatgaaaaacatgggaagcaacctatagtatactatcagaagcggactaagaagcagggggagcaaccacaacccgaacaagttgaagctccagtcccatatctctcttcaaaatcctctccagatctaactagtaatgtctctccaatctctgtttctcccatccctgaacatgaagagttacctcttgcacaaagaagagaacctagaatgaatgctgggaaacctccttctcgttattgttatgaacatgacattgctaagtatgtctcatactctagtgtctcttcttcatatagaaccttcattgcatcattacaaactgtgtctatcccgaaagattggaggtgtgctaaacaggatccaaagtggaaggatgccatgaaagaagagttgtttgcccttcaaaagaacaagacatgggaacttgttcatcttccagaaggaaagaaggtggtgggatgcaagtgggtcttcacagtaaagcagactccagaaggaaaggttgac

SEQ ID NO: 79140 - DNA, 278 bp, Zea Mays
tagccctgtgggtctaggaacctggggtccggttctagagaatggacacacgtcccctggggtggtctagagccgtgtagccgcttagcctggtcccgtaccataagcctacatgctccaccactctgtgatgggtgtcctagtatctggaactgtgattcagggggtccaggcacacggcttggcttccaggccaaatcctacaggtcctgttgcatgaatcaaaggatggctgataccagacgatgggtcctaatgggtgtgctactaacacttcc

SEQ ID NO: 79141 - DNA, 317 bp, Zea Mays
gcaggcctttcaaggtatcacacatgcgcacaacacgcaacaaccgatatatgtgttgtaattcatgcatcctctctacgacaattctattcattcgcattgcggcgatcttcaccctcaattcataattctgtcttctttgatctgtttgtggatccgctgccgcataaccgaactctttttattgtacccaactatcaaaaaatataaaacaccaaatgcacccaccgccccaccatcccctatctatgtccattcctgttgtttgcctgcggttgacagaaaatggttggactgtggcgattgaagtagattgc

SEQ ID NO: 79142 - DNA, 852 bp, Zea Mays
gatgacccaattgtctgaaggactcatgcatgggcgccaaacagaaagaagcttcggcttacgtacgtaaacatcgtcgtcatatcatataggagtaccgaaaaacaagtgccgtgagagagtgaaactacattgctaacccgtactgctagcacacacagatgacgacctacctcagcaagcattactgctttcagagagttaagattccgatcccctctaagagcaactccaacagagcacgctaaaacaccccaaaaaagatttattagcaaaacagctcttttcagcgctccaacagtccatctattccccccccccacccaaacccgaataaccagcgctcgtccccgcatatttccgcgtcacgactccgtccccaatcttgcgcgcgcgcgaaatctactattcccgtgccaaaatttgctgaagcaagttcgcgttcgtgctggaaggagctgctccatggcgggatctggcttgagcggcggaggcagtaccggagggggaggattgggcagcagtggaggaggcggacgcggtcgcggtcgcggctgtggaggagacggacgcggtcgcggctgtggaggagcagggcgattcggtggtgcaggaggagccgaacatggtggaggaggcggactcgatgttggggcaggaggcggacacgacggtggaggtggtggaggcggacgcggcggcgactactggcagtgtggatcaacgtctgctcgatctgcgactcctactgttccggcaaactccattggcggtgggttcccccaaatgcatgtcacctgcggagaagaaatcgacctcgacggtggacataccgtgccaggcacattccat

SEQ ID NO: 79143 - DNA, 392 bp, Zea Mays
attgtgaactgcagtatgtgatataaattcattaaatatacacttcagctgcttcaccagtttcggaatggtaagatagatagatgcaaagtggaactgcagcacagaaacaattggagcatccttggcttgcaggagcgtgcatgtcgagacggagaacaaggatgagcaaggtatcaggcgaactgagtaaatgacacgtgacacacccgagtaagctatgaattgcgggcgtcgactataaatccggcgtgagcgtcgtcttgctcttgctcccagttgccttgccttgcctgtccccatcatggcctcaaacctcatctccgcctccagcctcgagacagagacagccatggcggatcctggcgaaggacctactgctccacccccgc

SEQ ID NO: 79144 - DNA, 341 bp, Zea Mays
caattatgaacccttcccatttgaatggtgatgtggacgcttttatcagcaagggaaatgcacgtcggagcggtgtctacgagtggctgaaaagccaagttgttagcatcaatttagcttctcccacagattgtttcggttagttcagagtccatttcggaaaggaggagtagcaggctgtaagacatggagtagagcagcctctatatagagtaccggctgagtcattgtaatcaagaaagcagtagactcaattccactcaatcaggttgctcagagcctctgtttgaggtcgagtacgtgtacgtctacacctgttatcccttcctacttataacaag

SEQ ID NO: 79145 - DNA, 1443 bp, Zea Mays
tgtggttctatcaaggctacctcttatacattacctattttcattgttagttcagctcggtcacaaaaaggacggtggttcacgtatctcttgctttaacaattattttgttgttcagctcgttaatgcagttaattctacctgatctcaagaggatgaggtgaccacacaataggctatgttgggaatcatatagtgcatatgtatttagcatcttgtaaaattcattataaaataatcatagtgcctaaaaatacgattcatgtcttgtccattcacatatgccaaatgttggttgcttaaaatattgttgtacatgcttttgggattcttaaacttgtagttccagtaagttggctatgcataaaagctgatttgctggcaaccaatttttatcctagaggaaggctgccattgatgatgaaactttataacaactcagcatttctagtgaatcacttatgctctataacaatatagtgttacgccatatgtttccgtatgtagcttttatgcctactgaactactatgcattgcagttcatgatctaaattttctaaaacaaaacagatacaacatgagttgaaccatttggaaagttactttagggagtgttacaacggaaaccaacgcccaagtatgtgttttctgaattacaattactagggaaaggtaaattgcaagaactacttttccctacgtgttttactttaaaaaacattttttcgtgctggctacaaggtttggcatgctctgatggtgctttctactcaggtgtaatttgcaatccaaggcttcttagtcacaattctgtcaacttctatctctaaggtagctacacgaatcctagcagtccaagcatacaccttagagcttctgcttgccacattgtgtcccctttgattctcgagacctcccagtcctaatgaaagaaacaatactctatgtggtctgttcgcacgcacatgcataagcacatacttcctccttctccttctcttttctatttctatccgctatggttttacaagtgacttatatttaccatgtatcacattccacgatggtagaccattttatagcacgaaagctctaatttatttgtgactcgtttgaattgtgtaattatttccattgttcaatatcacacttaaaaatgtgtgaaatttgataatgtattttagcattaatgtacccctttacaacatgaatagtatagtcatttccataatttattgcaacatgaatgtccccactagcaaatatatgataatttaagtattttatttctatgattcgtgttaatgattgtagttactagtccattaactcgttcttaggtcttgatgtttttcttaaacgacgctaatgtaaatccaaccttgcggtgtgtgtgtcggggtgtgggtgcctaagccattggctaggcggctgcatctttc

SEQ ID NO: 79146 - DNA, 608 bp, Zea Mays
gcatctcctcagaacaagtatggtactccttgtataaaggtttttgacaatgagactataaaagatttgactagagctgacaaacgtggcccccgccaatctggagaaccatttggtcatgtagaggttagccatttacatttgttttgttgttgacacggatgttctagttcaaatacatgctaacattaatcatgtgtatttaaacagttctgtagccgaacagagacttgttatgttactgctccagaacggccagtgcccgagatattcaatatatacgtcccacgcatcaaacacttgattgccaacaagtttatttgcttgcccacccagcatcatccaatgtttgagccactgtttgatgcgcatgacaaggaggttgacaagtactacacttctcttgaacaaagccatcacatgcttgtgtccaagtagattgaactctctgaggcacttggagaaatgatagacgaagttctacgagctgcgacgcagggtgaggcacaacatgaagacgctaatggtgtttatttgttcatgtacatatcacaatttatgttcaaatagtgttgtttcattcattaccacgttttgcatatcacaat

SEQ ID NO: 79147 - DNA, 711 bp, Zea Mays
gagctctagtgctatggtgcttggtgtggagggcaagtcggcatggggcgggaggctagctggcgtacgaggcacctgcgtggaggagggcggcaaccaacatgggaaaggcacgaggagggcagcatatagagaggatagggcagcatgcgacatagggagggaaggcacatgcatggagggcaggctagcatgagatgcgcagctaattggcattggaggtgcctgtgtggaagagggcgacaagtgtcatggggaggggtggtgcctgcatggagggcaactggtattggagaaggcatagggatggcgatgacatcaaaggtggggagggtggagtccgacatggggagggcagtggccaatgtgggaggcgcctgagaaggacgatgattggcttagggaaggcacgagaagggttgtggccgacgtgggaagggtcatcgaccgacgtgggctctagatctatgggaagaaaggtcctttatcaatgttgaagggtagaagagtacaaagggagagaaaatataaataacagtttgcacccttaatcgatggcatctatcaaagtttgttggctctcaccgctagaaaaaagtagtttgatgtctacttcactaattgaactactacttcacaaatcgaagtgctgaaaagcaactatggtgggaaaagtagtgtttgatataagtttttttatttagctttcta

SEQ ID NO: 79148 - DNA, 273 bp, Zea Mays
aaaacaggtaataaaattcaattttttaatgttaaactatttggaacatatgagtatgtatggtcatatattttttgtaacaggaaggagaaataataataatgctggggagggaatggatgaagatgacaattcaattacatgccacaaaatagtatgtaaaagataaatatataatcttgcatgaagtagtgtatgtaatgaatatatgaaatcaatgtactaaaaaatattttattatgtaggatgatcataacattatgactggatgtg

SEQ ID NO: 79149 - DNA, 564 bp, Zea Mays
gtggcgaaggcggtcatggacgcgtacgggaggttcggatccctcgcggatgctctcctgttgttcgacgaaatggcgcgccccgacgcggtgtgctggaacatcctcatcactgcatgctctcgccgtgggctttttgaggacgcctttattttgttccggtcgatgctctcttgtggcgtgggacagggcatgccgactgcagtgacggtggctgtaattgttccggcatgcgcgaagtggaggcatttgcagaccggcagaagcgtccattgctacgtggtgaaaactggtttggaatcagatactctgtgtggaaatgcattggtgtcaatgtacgcaaaatgtggtggaagtagggtaatggttgatgcacatagagcattttcttctattcgctgtaaagacgttgtttcatggaattcagtcattgctggatatatagagaatcagttatttggagaggcgcttgcgctgttcagtcagatgatctcacagggatatcttccaaattattcaacagtggctagtattcttcctgtgtgctcattcacagagtttggg

SEQ ID NO: 79150 - DNA, 523 bp, Zea Mays
atggggagtaaacttggttaagatggatgggtttgttgtcgaggggatttgggtgatagaggggcttaaacagggaggtatgcagagggagcagcatgcctgatgaagttgagggctggttggcaattggtaactaaagaagatcattttctttactggtatcacttgagtatttggttggaaagtaagtctagatatatcaccaaagatctaagggcttctctccactgaaaatatccagttgggtggcttggaaatagtgaacaatggagtatttaatgagtttgtttgctgtatgtagtagtagacaagaaggatatttgtgagttgtggataaactagcccaagttcagtgctctggggtgttccactcgactgaaaggcttgagaattgagtgaagtatataacgaaggttctagtggtccagttctactgcagaaaatatcaccttgaaccaattaaagcttattcatagggatatttgtgtgctacagttgcaagtggactaagttcaacgtccca

SEQ ID NO: 79151 - DNA, 589 bp, Zea Mays
tagcatttcaatcgatccgcgagttcgtcgcgtcgctgcatgcaattggatctactatttgacgtctttgagtttagccaatttccatgtcgtcctcggtcggtggtggtgccaatttatttacataagttgctgccgagaggcagaattaattacagttaccaaatcttatgtggtggtgtatgatccatctataaaaggagaaaaagttattgccaacattgtctttatttgcagaagtcgtgaagctcgctcattctaccgcgttccttggcaaccatcaagtgcatgcggatcgaagaaataattaagtttttgttgtcttgcttctgttcatctatctacagaagtcatgaaactcgttccgtcgcatactctagcaaccatcaagtgcacatggatcgaagaaacacttgagtttctcttgtcttgcttctgttaatcgatatgggagaaaaaaaaaatcagatttcaagttatttgttatgcacattcaagcaaattgccacaagattttaagttcattgttgaacatgcacatgctgtgtactaggctgtagttttttataggtttacacctagatttctg

SEQ ID NO: 79152 - DNA, 412 bp, Zea Mays
ccccgtaagccgcacaccatcccacatacaccctgtaggttataagtgggtatttgtccgcaagagaaatgaaaataatgaaatattaaggtacaaagcaaggctagtcgctcaaggtttcactcagcgccttggagttgattatgaagaaacttactctccagtcatgggaggaattacctttagatacttgatctcattggcagtgaacttaaatttaaaaatgaaactaatggatgttgtgacgacttatctttatggaaacttggatacaaacatctatatgaaaataccagaaggaatcccagtcccaaatcgagacgagaaaaatagagcattatacagtgttaaacttaagaaatcaatgtatggattgaaacaatcaggaagatgtggtataatcgcctgagtg

SEQ ID NO: 79153 - DNA, 902 bp, Zea Mays
atttggcattttggttcatgtggacacgctcacgcatcatctcccctcgtcctctcatccactgcaagcgggtccgaatagcagcatgttcatcttccttcatacgttcgtgaccaacactccatcgcgcactcagactttggcccggctgctcgcggctacagcgcaacatttgtgatcaatggcgcaccaatctgccgtatccctcccctctcgcctatataaggacaagctacctcccttcctccaatcgcaagcaacacaatagaccattttactattcatcttccccatccacgccattctcactgctgctgttcctgctcgtctctacgccgcgtcagctctcctatgtgacgttctcctccctccccctctcatctcccatccagtgaagcttgtggacgcgcctatgtcgcccagccgaatcgccaccactactgcgccgctctgaaccattcctctccctttcttattcatggcggcagttccttccccatctccattaacagccaacgctattattggagctccatcgctagcgtctctcggcctcctctgctcgcctataaaatcaccccctcgatctcgccggttaattccttgcctcaattccacctccccgtgcactgttgctatcgccttgctgccgcgccgcttgctgcagtcacccaccgcgtcaagacacaacacctcgccgtcgaacctgttccttgcttcactctcactctctgttatcgtgccggtgcagcactcgcactgatgctgctcgcccgttgattgccacacctgctcaccgttgtcgccgtgtcgtgccgtgctgctggttacgccaacgatcgcgtcgtcgactcccttgtgctcgcctctgtgcgtcgccacacatcgaggaccactatcgt

SEQ ID NO: 79154 - DNA, 304 bp, Zea Mays
ggagaaaccaagggctcttaacacatcaaggagatatgcccaatttatggagtcgaaggctctggagatgtcaagcttgatgaagagcgcacgctgaccactcttgtgcagcttcgtaatcaccctctgaacatataggaagttatcatgaattgaccgcttttgaatgaaggcattctgggcgacggagacaatctcgttcatacgcggtgccagtctgtttgccaaaattttggtgacaattttcataaagctgtttattagactgataggtctaaacttatcgatgctatctgagacctct

SEQ ID NO: 79155 - DNA, 377 bp, Zea Mays
ggagtatctggcggtcacgtcgaggtaccggtcggtgtctctggtgctcggagctggtctggccacaaaactaggcggtggagcttgtcggtgcaacctgtaccagccataccacagcggtagagctcaatcagaccgcatagggaggtttactgggtggctgggagtgtgtgtgcgcaaggaatcgaagcatggataggtagattacctaggccacgtacttcgacgggtgaaggaagtccgacaaggtgttctggcttctccggcgaggtaccatttggtccaagtggctgggaagctctgctagcctctaaggaagctggctgaggagctagattgaacggggttgggctggagtgaccggtccacggcggtcg

SEQ ID NO: 79156 - DNA, 947 bp, Zea Mays
gaatctttactttttctgcttcagcacagcaaaagaagcctttagtgcaacttttctcttttgcccatttttcggacaggacaacaataatcagggtaaataaacccaatggcatcaaaaccctattttatcttcttccttgggcaccaaaggcggtattcatagcttcgtactcagctttggtgtaggcccctaacaattcatcactggttacttcgatagcatcaagccattcgtcatctagctcaccaaattgatttctgtaattataagtatatttcagatatatcaaactacttctggcactttgactcgaaccagccccagtatcctttggcatttcctagtcggcagccaagggccacaccttgaaggctatatgctcctgcactaagtctctagtgctgatgtagccacagacaacattaaacgctgctaggcaggcttgagatttttcgtgttcacaatagccggcctctttattccgaagcaggatcggatgggccattggattacatccctaacttcacttctctggctcaggtcattcttcacataaatacattgcttcttccacgagcccagccatttcttccgaaaggttggcacgggatacctgacatttgatcagtacatgaaggtataacatccaaagttattatgatattactcttttccaatggacatcgtctagtaggacaactcatgaaaattgcaaaaacaatcagcatctggttccagtccttggctccttattgctcagatgaagattccaactttaatcaaagcttcaggagtaagatgatgaagaaatatttcaaacttgtttaagacttcaaccaacatcctgtgcagggggaagcacagcctagctttcatgaagcatcgaaaaaccaccacctcatctttctcaggaagaggaacaacgttttcacctccgattctca

SEQ ID NO: 79157 - DNA, 568 bp, Zea Mays
tagagaagatggctagagttgatcaaggattatgacctggaggtacattatcacccaagaaaagccaatgtcgtagcagatgccttgagtcggaagttgcagtgcaattgtattctgatggattctcgcatcaacaccttgtgtgatgagttgagcaagatgcaaatagaagtgattccttctggtgctctatctcacttttttgtcgagccatctttgcaagaccagatcatcatggcccagctcagtgacaagggagtgcagattatcaaggagaatctccatcagaaggttgaaaagtataaatgtttccgccaagatgaaaagggtgtattatggttcaaaagcagattggtgattcctaaaaacaaggacctcaagaggaaaatcttggacgaggctcatctctccaaattctctatgcatcccggaagcaccaaaatgtaccatgatctgaagcctttgtattggtggaccagaatgaagagggagatagcccagtatgtatcggaatgtgacacctgtcagaggataaaggcaagccacttgaaatcagctagagctttgc

SEQ ID NO: 79158 - DNA, 408 bp, Zea Mays
cttattttgaagagaaagcgaagctgaaactattctttaagtcaaattgtgagagagtttgcctaaccacggattgttggacttctcaacaacaagacagctacatgacagtaacttcacattttattgacaaggattggcaacttcataagaaggtcattagcttctttaaggtaaaggggcatagaggagatgacattgggaagaacctacaaaggtgcttgactgaatggggattagaaaaggttatgtgtgtcacagttgacaatgctagttctaatgacagtggtgtcagttacttgaggaggatgatgaatattgcaaatacaagcataactgaaggcaagtttcttcatatgagatgtgctgcacacattgtcaatcttattgtacaagatggcctcagac

SEQ ID NO: 79159 - DNA, 925 bp, Zea Mays
gcaatgacttaagtcggtgcaacatgctcactctaactcaacttagggtgaccactatataccctatcaactgagcaatcggcttaagtcagcaatgacttaagtcggtgcgacatgctcactctaactcaacttagggtgaccactataccctatcaacggagcaatcggcttaagtcggcaatgacttaagtcggtgcgacatgctcatgctaactcaacttagggtgaccactataccctatcaacatagcaatcggcttaagtcggcaatgacttaagtcggtgcaacatgctcacgctaactcaacttagggtgaccactataccctatcaatggaacaatcggcttaagtcagcaatgacttaagtcggtgcgacatgctcacgctaactcgacttagggtgaccactataccctatcaatggagcaatcagcttaagtcagcgacgacttaagtcgaagcaacatgctcacgctaactcgactcagggtgaccgctatacccaactaatggaacgatcgatttaagtcgacagtgacttaagtcagagcagtatgtttgcatccactcatcttagggtgaccactatgccctacctgttatgtgatcagtttaagtctggaaatgctttaaacctacttggcactcttactttcgcaactgatcaaggtggtttctataccctaatggcaaaacaattagcactccaggaaacaaaaagaacatcctgctcgttagcattaggggcagcttctgatgccctgctcacaaaacattcaagttctaatacaatcttcacatacatatagactccatatcacgtcaagtgttttgtaggacatcactgcattgaaacatctttactagtgacgtccttcacaggagcgacggaagaagaaggacgactcgaagcatcgggt

SEQ ID NO: 79160 - DNA, 544 bp, Zea Mays
ggagaggtcgtgcttgcgtgtcgtggcgagttcttggcggatctgaatgacccgcgccttggaggaggaggcatacttcttttggagggaatcccacaccgccttagcagatgtggcatccgagacatcctggagaacctcaggagtcatggacgaaagcaaaccgccgagcagctattgctcttggtcataccagcgctcgtagttgggattgggggcattcgtcgtgccgaccgacgtgataatcggcttggtcttgagaggagcggcattggatccatcgaggaacccgagaagcttcgaactgcgaaaatatggcaggagttgtgcacgccaaaggagatagtttgtttttgtgggcttgatggtgatgacttggtggatgggaattggtggagaggagaacgatggcgtggtggtcatggcagaggcagcgagagatagatggagaaggagaggaggcggtggagaaaattgtggagaatgattaggatttcgttggctctgttaccatattaagataatggaaggccctaccttctag

SEQ ID NO: 79161 - DNA, 515 bp, Zea Mays
gtctttattgaccttcgtctgagaagcattatacccgtaaggagataatgcttcgaaggacgaaggtccttaatgattcacaattgtgttgccttgtccttgactcacaacatttgagaacaagcaccaacacaagtctagcaaggtgtcaagtgggttcctgagatggttaggtttggtacaccacacttgtttttgaggtggggctctcacaggctccacaagcactccatctctcacaataggggtggtagatttgggtggagtgattttgacaagcttttggaggggctggatgtttccctaatggtgtcaagccacttcactcaccaaccttaccaaaggaagcgtcacgcccagccttagtagcaaatcctaaccctagttcagcagttcccctcttgaactgactgaccatcatgcccaattggggctcactgctaaacagccagctcaagaccgatcgaaggtgtgtgttttcctcctcgattctagccttttcgtgtctacaggac

SEQ ID NO: 79162 - DNA, 463 bp, Zea Mays
gccgtggggcacgccactcttggcaggcacaggcacagccatcgccatgcctccgagctgggcggctggctacctcagttttctactgccactgaagcagcagttgtgcagggtgcatgcatatgtatgtgggtggcgttacctctcctagtgctcaactcccctaggcataccccttcttcagagtgcttctaattattagaaacagtactcctcgctgtagtagactagtagcacaatcagttgtgtggttaagtcaaagatgaccgaggtctgtgctatgttgttcactggtgcatcagcctaatctcattttgtgcagctcaagtatggtatggtggtttttgctcttgattctggattttgcttttgggtgagaggatagatattattcagaaactcatccaatgaaactgaactacatttgcaaatcattccagctggttttgttcctaggctggaa

SEQ ID NO: 79163 - DNA, 356 bp, Zea Mays
tgaatctgatagagttcagtccattttacagtctgtttcactgatagagttcagtccatgtgaatctgaaagagttcaatccatttcactgacccagtccaaagttcacagtcagtggccaagttacatggacatctgttcatgtaactgaaaatgaactgaaaatctgggactgggtcagtgcagaaaataaccatgtaacttggtcatgcatggaatgcgcaaggaatgtggtgtcttacatgaagttgttggccatggactgaaatgaagctgttgggcatatttcagtcccagattcttcacatgggttgtttcctcctgaactgatgaactgaaaatctgggaccgcaatg

SEQ ID NO: 79164 - DNA, 338 bp, Zea Mays
cacattctgttctgcggttccagttcatgcctatcccatcgctggactcctcatcgattcataatccttcgcaagttgggcttactgattggctttccagctctgcacgatgaggaggcttgccagctctgcaagaagacgactcatgagtcatgatgtatccagttttgcatcaaatgcttccagatctacaagagtaagtactgtatgtatgtgttagtttgtcatcatacatgacaattgattgggtcttggcaactagaggaagatggcagatgttgaccgtatacggctgggcttggaacgaggcccgttccacatggatcggcgggactcgg

SEQ ID NO: 79165 - DNA, 784 bp, Zea Mays
ccgacggtagacagcgctcggccgttctccgatgagctcatgctggccggacctcgcaacggctgggactctcgtgcaacagacactgaattggacccctcccgagcatttcccctcaaacaatttcatcaatggggcattgactcaaccaattcatggtgacagggcggatggttatagggatgaacgcgttccgaccaaccaatggcgtgaacgaccaaattgcggctggggaaaggttcacaggttcaccaggggttaggtacacattttggtttgggcagaataagaaccgaagagcgggtcgacagagggggtgtcacggcggcgttctacagagcaggtgtgtgttccggtgaaaggcttcgaccgaacttcaattggttagtactgagagcaataggaggctacaaacgagctaaaatagggagcaattgggaagttactaacccgaagagcactgaccacggtggagttcttcacggcggagttaagaacagggagaaaggggatttgtggactgtgtgagttctccggtgaaattgaatcgagtgcttagtcactgaggtgcgagatgtggtgaagaagcggagtctgggctcaatttataggccgacgaccggaatcgaatgaggatcgtggatttcagatcgcgctggcgagcttaccgcgcggcagaaccacggtgatggcacgatggccgccgtttaaccggggcttgccacctccccgctttaacgccacatcgcaaaagtcttttaccgtggccgccgatgacccatcc

SEQ ID NO: 79166 - DNA, 322 bp, Zea Mays
taacaatctctagaatgacaggaatatgtgcgacatcagtttgtattgtagtggtctgatcaaaccttccaaaaatagctcctctttttctcatcgtcatcaacttcaccaggagcatatcgagatagttggatgaatttgtctcggtattcacttactgacatgcctccctgttttagggataggaactccttcttaatcttcataaggccagcaagaatatggtaattcctgaagtgagtggagaattctgcctaggtaatggtgttggcagcagcgtgagcagcgcagtatgcatcccaccaatccacagcgagtccgg

SEQ ID NO: 79167 - DNA, 842 bp, Zea Mays
tgctctgtctgaccagattgacagtgtgacggggaggaaaggggtttggattctttttgttgttttgttgccttattggtatttctaataatgtggtcagtacgtctgtgttcgaggttgagatgctctgctttccttccattaccgtgtgttttcggcaatttgttgtcgaaggcacaggatctcttataagaaaagaagaaaaagatcacaagacttgagaatttgtactttctcttacagcaatttgctagatgtttggccagaggttgtgagcacgtcactttcctggaaaggcaagcgagagtgcgagagagaatctgccttataggtttgccgtcttgccgagcatttttgggaggtgtgactcggctagtcaagttgtatcgtatacgatatagagcacggaataatcgcgctccgcactgcttttcaacctggtgttccaggacgggttgtcctcttgttcaatgttctttacttctttttcttcgtccgttgatttttttccaagaaaaaagagcaaaaagcacaatacaatttctaagaagagcaaaaagagccatacaaaaatcacccaacttggctaaacgagagtaaagaatagagccatagcaacaactattcctgagaaggcaatgcgctattggtcgcgagaccggttctcattctacgtttccatctcgttttactccattgcctcagctatataactgtttggtacaatttttttttctaaaaaccttttataaaaacttggattcatggataatttaactgagaatatgaatatcacggggttatgtgtgtgtggagaaagttgaaggattcgtagggtttaa

SEQ ID NO: 79168 - DNA, 757 bp, Zea Mays
gaagaagttgttattccgaaggttcaaggggttgccgctctagcctctcttttagagagtgaggaagaagaagatgaggagcgcatagctctggtaatgagttcattttttctgattatgatgaagatgaggatgacaaggaagaagacactgctacaattacttaagcggtgaaggatattgtgttgcctgctgtagctgagaggaggccaatgagcccaaaggttgaacggattctcccagtaacaactcctttggcgatgatagtggccaaagagaaaacttgttctactaagcctgttatgatagaagacaagagcaagcggcctgcaaagattgaagagggtaagaaggccattgaggatgagacgccacttggagaagggcccttcgacgaagagttcgggggtcagaaatatagagttcaccatacaactaggaagattatgtgtatgaaacaactagccgaagccattggctatgttgaacaacttggataccctttggggtccactatcttcgggggagggccaaacgattatctatattactgctcggataatctagagacggaagtgtgtcgccacatgacagacaatattggttttccaaagctagagaccatgctttcaaccatgtcctccaaagatttcttggaccgcctcgcttacacccatttgaaggtaatttctattgactgtgcttccaagcttcgagttagattgttacaacacttagttaattttttgacttctca

SEQ ID NO: 79169 - DNA, 576 bp, Zea Mays
gttcgagtactacgttctacagcgaacgaacttaccacggggtaactgcaatgcactgcgtgctggaggcacagttcaatcatgaagacgacgcacgcacgcacgcactgtagattctactttgcacgagcgtacgtagagaggtgctactactttgtacgtacgtactacaatagagtagtaggatctgctggcaggcatgaggcaacaatttgctttgcctaacatggcgtgcggccttcccttcgagtctttgaccgttatacagtggaacggaacccccgaatcgaacggctgcatgcagctgcagctagcacatttgaaacgcagcaacgacttgcagcgacactgcattgaccgatcgatcctgctgccttgcgtgcttgggtttcctcgccggcttcggcttgtctgtctgtcgcgcggtgccgctgccgccatcatgggtgtcgtgtcgtgtggtgttgcaccctctgtcttcgcgcagcatgcatggatatggatcgctgcggcgtcgcagtctgcagctctagtagtagccctgatgcatgatggcgatcgctctgccactgccac

SEQ ID NO: 79170 - DNA, 303 bp, Zea Mays
ggccttacaggccacatttacaggatgggagttctcttctattccttttatcttgtcgtgaggtcgttcaggacgagcatgcatgcatttctaaattaacaaatggatacggagtaaggacttaaaaacaagaaaataacctactaagttctcagtaccattttatttaactagcgaaaggctgagtcttatttttcttgttctctttatagttctttttcttttacttacgcttaaccgtacacagatgacttctcacggatcctcagaggacggtaatgcactgtcccacactgacgggct

SEQ ID NO: 79171 - DNA, 353 bp, Zea Mays
aaaaaccatttttgcccaaaacttaagaaaatgagaaaggcactggaaaataatgaacagttaatgcaattatttttcctagtccacttaagtaacgaagaacctaggaaaaataaatggaaccctagtccagaacaaattcaaggtgaaatgttttattaagcactaatcaaactagaaagacaattattagaattatgaaaacaatttcaaaattgataagaaaaattcagtggacttgtaaccactaagataccactacaaaaatgataaacaccccagcccatcattttaagtagggtaaacaaatagaacttggtattaagccatatttcaattaaatcataagcaag

SEQ ID NO: 79172 - DNA, 800 bp, Zea Mays
gtgagtgtgccgtgccgattcaagtcactaccgactaaaaccgaccgctctgttagtagggtatagtagtcaccctgagttacgtaagagtgagcatgtcacaccgccttaagtcgattgctccgttagtagggtatagtggtcaccctgagttaagtaagcgtgagcatgtcacaccgccttaagtcattgccgacttaagtcgattgctccgttagtagggtatagtggtcaccttgagttaagtaagcgtgagcatgtcacaccgccttaagtcgttgccgacttaagtcgattgcttcgttagtagggtatagtggtcaccctgagttaagtaagtgtgagcatgtcacaccgccttaagtcgttgccgacttaagtcgattgctccgttagtagggtatagtggtcaccctgagttaagtgagcatgctgacagtaaacaagttgagcacctttgagaatgaagtctttttattgatgatatatttcccattttacagaatacaaggccgtcccaatagcttttgaaatatagctaggggtaaaacttcctgagatgttctatattccatgagttcccaatttccatgatgtccatttgagtaagacgatatgatccaggccgagtgacttctgctactatgaatggcccttcccatagtggtgacagtttgtgtcgtccctcccccgttagaatttggcggaggacgaggtctcctactgcaaaggatcgatgtcgtatggccttgtcatgatagcgcctcagagtttgctgataccgggttgactgaatcacc

SEQ ID NO: 79173 - DNA, 725 bp, Zea Mays
gccgcgagacggcagagacgtagtacgtaataatgctcagcgaattaactcgcgagcagcatcgctcccccatccctcaagctccatggccgatagcgtgctcgcttgaaaagatgcagaggcacctgttccccccaggccccatcccaagtcccaaccgtctcctgtgtccgtccatgccagtgcgtacgttttagggtcccggaaaggcactccacaacactgccgctttatttgccctgcaccatcgcgagtgggcacagagatgggcagaaccaacgagatggtcgggggtcgacgggggcgcgccgcgggcgagcaggcaggtaggttgcccatgtccggtgttggcagccgccgacgtcgcgggctttggccacttgtgtctgtcactcactcactggtcatttgcagtgcagacgtgcagtcagttgaactctgagagcggatggaaggggttgtcctggcagcgtcgcttcgcattgcactaccactgctgcgtacgtcctggccaccaaactgtttgttggatcactagacattgctgactgactgttgttagggatggtccgcaaggaggacggacttcacagacagcacgacaatcaggttcctggcgctggcgcttcactcctgtgctctcgccggtcacttcccctccaccccactgtttcccattgctgttctcgcacggcgcagcagcagcagtgctgcctggatagaaa

SEQ ID NO: 79174 - DNA, 969 bp, Zea Mays
agtaaaagggaagtcgtgggagtttggtggtgtggtgactgattttgatggcaagaaacattcgaaggatctggagttcatattgatgccgacttgaattcacgtttttaatgtacgcttggtctgatgattgatgtcactaggaggaaatcattgacaaggtggtaaaggtcatggtggaccctaatgaacatggatcaacagttgaggaatatatcaaaattatagttaagctgaatatttgcaaggcacttcgtgggtgatgatgcaaatggatgtaggaggaaagccttgctggtgcccaatcagacatgaatttcttccaaactatgtatgttgtgaattttgggtcatatgggtaaagaatgtgatgagaaatgcgggaacgatgagacgaaacaatatggagaattcttgcgggtcaatctttcatgttgaagagtggcctcttgtaccgagaataaagggacaataggaatctaggatcatggatagttgggggaaggagaagagcaaaatgactacttcatggtcaaacgacacatcccccgcacacagagaaacctatgatgaagttacaagccatctaaaaaaattattaaccgctagtgaagcctaagggtataccatacaaaatttactttgaccggagggctagagaaggatgaatttactaaaactgtgatggggaggaggaattctctactactttaaagcaccaatttcgtgtgtcgtacgtcacatacgaagtgcagaagtctatccctatttcccgtttctcgcctaacaaatgtgcacaataaatccacacaagcccaacacgacatagttctctcatatagtaccatctcgctagctgaagggagacgaacaaccgagtgagatataaaacatagggccaggctcctattcaacttatagtttacctttcttggtcttttgtctaagataaagtataatgtttgtttt

SEQ ID NO: 79175 - DNA, 404 bp, Zea Mays
cttactagagactagcgtaagggaaggccgacccaatgatacgagcccacgttggcgggacaatacgggtcatcaccacactacatctaggcctcgggtacaacatcgaatggtctctgacagatgtcagatgacacctcggcacgtactgtcttaggcgaacccccatcgactaatagggacagtcaatcccagtctaagggatctcagcattagagtctctatagtgaccatcatatcgggaaagatgtaatggatacaccatatcgggtgtatcgcacgatggcaaatgacacaggctcatgatgatgggcaaagctacactacacgctaccaggacatgggactgacccacaggacccaccacactactacaaagatgtcagcagaggactcacaacaag

SEQ ID NO: 79176 - DNA, 853 bp, Zea Mays
aaaagctagaaggattctaatggcttcaaacaggctcaaaagaggcaacaaaaactaagtgagcaaaatgagaaatctgccgtgacctggagcgagtgactcgcttatgaagctccccgatcatctactgaggtgggtgatgacgttgaatgggtcgtggagcctccctcaaggaagtggcctccccctcaacagtagcttgaccgtctccacgtgcaacaggcactggcttgagcggaccccaagtgatggaagaagaggggtcaggtccatgagccgaagtagtggagcaggcttgactaggtaagctagtagagttggctcggggtcaccccaataaatgtcgtcgtgctccacctccacaaagatggtttgtcccatctgatctagacctgtaggctcaaatacaagggatggacaaggtgcaacctcatcgaatgtaacctcacaagtctccatgatgcggttagtctccaggttaagaacacgataagcacaagaatgtaatgcataacctaggaaaccccatcagaagactgagactcaaaattgtccaaaattccttgttttagcacaaagcacctgcaacaaaataccctaaaatggctaaccttgggtggtcgtccaaaccgcaactcatatgaagtcttgttcaagaaagctcgaagaaagatgtggttcgacacatggcaaacattgttgatcgctttgccccgaaaatgcctaggagtcctatgctcatcgagcatcgtcctagccatctcaataagggtatgattcttgtgttcaacaataccattatgctaaggcacatacatagaggaaaattgatgatcaagtcctaaagaatcac

SEQ ID NO: 79177 - DNA, 397 bp, Zea Mays
gaagatgtctgtacttcgtgttgtgcagctgctaccggtaagtgtggctgagggaccatagagttcgcctagcagcattgctgacagaagtaccataggtggatagtggtgtcaaagactcatgagctgatatagtcctgaaccctctatcctctaaatccatcaccctgacatgaatgcgagtgatgtagtagcaagcccgagggggctcgtacactcgcttggtctcatacaggggtcggacgtaggttcccaacacatgcaaaacatcctataacaggttagggaagtgccccgtctcaaacattgatgtataatgttcggtgatagtccatatccgcacgaagtggtcctgttgttcactgttggcttcctcactgacgttctcctcttcttc

SEQ ID NO: 79178 - DNA, 549 bp, Zea Mays
caagatgcttcgagggtcgaggcaagaggtgctccagggggtcgaagcatgatgtgccttgggggatgaggcaagaggcgcctcgtggctgatgcccgaggttccctaggggttaggggaggaggtgccctaagggttgaagtaggaggtgtcctgtagaccgatgcacgaggtgccctcatgaccgatgcataaggtgccttgagggtcgatagtcgaggttccctagggaacgatgtgcaaggtgctacaggggtcggggctagaggtgccctagattcaatcaagtgtcattgctatgtaataatgaaagcaccctaaagatagccaccaacctagtttaacattcaaggacaaagtattttgatatttgccaccatttttttagagatcatcaagctaaatggaatatcacagtttagagtatgagcattaaagatcaactagccaacatattcaccaagccacttgatgaagctagattttacaagctgagaatgagtttagcaatctagacttctccaacaagagttgaatgcaccctcttag

SEQ ID NO: 79179 - DNA, 460 bp, Zea Mays
cttcgtcagatttctttaaggtttcgccctctctgttaggcgctgaagtaggagtttgtaccttcacagattccattacatcatctaatacactggccattctcctcctccttggagttgctgcaggaacatttaatgcccttagcagctccgtctctcgcaacgaactcaaagccttcggttgctccgctgctttcttcaattctggctcctcggttgattccatcctactttcggcaggagcggagtaacttagctcagatacagaagacccctcaataggcttcagccctttggccgtttcaaagcgcttgggcaggtgtgttagaaccttcactttttcggcttcggcgttctagaaatcgctgaagcagcagtctttctcttcttttcttgctttcgtgaaggataacaataatctaggtatacaaacccgatgacatcaaaaactctattcaat

SEQ ID NO: 79180 - DNA, 448 bp, Zea Mays
ggatgatatggatatactactcttaggtgtgacggttgtatacaagctccatgtcttggtccctcagggtgtggtgtcattggtactcgagcatgagtggaacaatgggcagtcgactattgcttagtctcttactattgagtttgctctacctatgggtgctcctatatgaccttagtgatatgaatagagccactcctaccaccttgctctatggcatctactacataggaaacatctagatccctctgagcctctatgttagctagtttgggcttcctaacgctcttagtctatactgtcttgcccttatcattggctaaagagagttctggcaatctgccatggtcattgtcacttggaccactgccaacattctttctgcaaaccatctcaataagatacaagagagacactagtcaatactctctctattactattaattac

SEQ ID NO: 79181 - DNA, 337 bp, Zea Mays
agggcagtgtccacgtcgaccggccaaaccgtagctcctccggtcgaactcaggtgagcaccgtatacttgatggatcaccggtactagtcgtgacctatgattgaaccctaccgtgcttgacaccttggtctacctcatcggaactcgttgctccgccgtcgacatggctagtgaggctctaggtagtttgaggttgtttaacttaggggaaataggaggtaagtctcgaggatcacgttggtaggctcgatttcatcagaaatggtcaccgtcgatgggtctaggcgacggatggctggcgctcgccggggttagaccgtggaccggagtttgtg

SEQ ID NO: 79182 - DNA, 513 bp, Zea Mays
caagattcaggaactttcttacgatactgaaggtctttctgaatctgcattgcctcttctttgatgtgactttctggtgcttgcagacatttgcggagctaggatacatgaaacacattgtggatgtcggacatggatttcggtaattcaagacagtatgatgcgggtcctaccctgccaatgatgggatagggaccgatgaatcgcggtgctagcttcccttttacttggaacctcttgacaccacgcattggagaaaccttgaggtagacgaagtctccttcctcaaatctgagttccctccgcctgttgtccgcataactcttctgccgactctgagcttcaagtaaccttctgcggatcagagcaactttctcttccgcctccttgacaaaggcaggtccttctagtgctttttcccctacgttggaccacatgagagcggtctggcatttccgtccatacaatgcttcgaacggtgacatcttgatgctggcctaatagctgttgttg

SEQ ID NO: 79183 - DNA, 336 bp, Zea Mays
tggagcacccacattgggatcaacaacagaaggggcacacccattgagatcagcagcagattgggtacacccattggggtcagtgtcaataaattcagttacaggcatttcttcagcagcaggaaccgaagtaccagcgtcccgatccaaactggatactcgtcggaggcgcctccttttctttttctgctcgtcagcagaaggatcgggctgattggctcggcaagggcgcctcgggcgagtactggcaggcttttgagtatccaaagtggtatcagcctctgggaggggcgctactaccgatgtcccagcaggagcagcgtcagaagagtcctc

SEQ ID NO: 79184 - DNA, 306 bp, Zea Mays
tcaggagatagtgaggggagaagtcgggtttggctcactgccgagcacagagagaagatcccgggtttgacgtgtccagagcacgcgtcccgatgccatcttctggcatgaggtagagaggttagttagacacatttttgtcaatgggagcattaggatttgagctaaggatcaaggtgaacgtgctcggttttggttcaaaggttgaaaatatagaaatctgaatttcagatttccccatcgaagctccacttgaaaggcttgtttggagtttttaacaaactattttagccaagctttcagaat

SEQ ID NO: 79185 - DNA, 627 bp, Zea Mays
gatctcttagcccgatatacaggtaggcaggatgaactctatccttgagaggttgaacattcttgagaatgaaatcaataaccacagcttcagcagtcaaaacatctatctttcaaaccagcaactttggctagcaagattttggcttcaacaacttcagagtcagttggggcctctatccaactcggcacacaaacatcaggctgccttccagagtgagtaggcaaagacttgttatgattctccatggtgaaccaatcaaagcgccatcccttaatgttgtcctttatagggatgtcgagatacttatcctttctaccccaacgaagttcaaggctggcaccaccaaccacttgatgatgcccccatcattcctagcttgcagtgatataagtacttccacaatctgaaatgcgggctaatcctgaggtagacttcgcagagatgaacaaagataccaatttgaagaatagagttgtgattcaaatgggtcaaattgagggagtaaaaattgagaaggccacagaaaaaaggagaaacaggtaaacctagatcatgaatcaggaaatggacgaagactacagactcatgggtatcctctgtgggtatggtgatcccttgccaaac

SEQ ID NO: 79186 - DNA, 634 bp, Zea Mays
aaccagtccgccaccggtgctgagccaggagaggagagagagtgtcgttgtagtcagcgccgacgcaccggggatctctggtggaagagcgctgtgcctcggggtgccttcacgtgggagtcatcatcggatctagcgctgatggcatgggagactcccttggacgcggggattctgcttgatgcttgattggcgcggcaaatcctatgggcgtcgtggccagcttctccgatgcttcctccgctggtgagaactaattctagtaatccgattttgtctctgcgtcgtgttggaatggtagtaatgagagttggggtggaattgcacggaattggtgcgctggtaatggcgccaccatagatgtcgtcacggcgccagttggcctatgcgcgagaggaagatgatggcatgccatccgtcgatctgccagggaacgatcaagattagaagcgtggtgcaccgattcgggtttagttctcggtcatccgatacaaatcgggcgggtgagatgggattcgactataataaaatcgggggcattggtctccgatcctgtggtctctggcgcataccggttcacttaaagaaataggtggtctatgccgcggaattctaatccgatggccggaaagcc

SEQ ID NO: 79187 - DNA, 2205 bp, Zea Mays
gaagtgtagagtttctccacttggggctttgtaggtcctatcctatgttcaaaccaacttccttccataattaagcaagggtaaggctgtatagaaaatccctcgactccaccatgtgtgggagatttcagcacaaggcatgcccttttatatctctactatattggaatggaaaatgcaatggtaaatacaaatcgaaaaaatatatagaatctaaattagatttgtttttcccgaagcgcaagagagttgcgcatctttatatattagagaggagaaaatgtcttacaaaagagggagccttgctaggcaagatcccataaatcacacacacaagaggactattacataatgggaacataactcgacctagccacattaagagcttcagctaagccaaaactcacaagaagtttagctcccgccatcatccagcaaactaattcatctaagaagtttctttgcactttgcctatggaaggagattccccatcaaagatgacccggttaagcaagaaggggttgtttttgctaaggattttagacatattagcctcattcatagttttgccaagctctttaccaaggtgcttgctaaaaggctacgggatcacatggagaaactgatatccaaaaatcaaagtactttcatcaaagggtgcttcatccaagataatttcatgcttgttcaacaaacgactagattcctcctctcagaaataaccaaggattctcctcaaattggacatttccagagcattcgatttcgtttcctggccttttcttctagaggtgttagagagggttggttttgggcctgaatggcgcgatgtgctcagtgggctgctcatgacatcctctactcatatccttctcaatgggatgcctggtgatttcattacacatagaagggggctgcagcaaggggaccctttgtccccattgttgtttgtgctagtcatggacaatctcaatgcgcttattatcagggcatcggatgatggactgctccaacctctatcttcgcgttctattcaacattggatctctatatgttgatgatgtggtactctttttacggccggggttgctagtgaccttaatattgttgctcggattttggatctttttggagatgctacttgtttgaaaaccaacatttagaagagtagagtggtgtcgattcagtgttctcctgctaatatgcagacggtccaagattgttttccttgtggtttggatgtgtttccaaccatgtatttgggtttacctcttaccctaaagaagctcagtaaggctcagttgcaacccataattgaattactagctgacctccttcctgcttggaaggccaatttgatgactaggctagcagggccatcctagttcagtctgtcctcactgccaccattattaaccgtgttatggctcttgaccttccaaagtgggtgattaaggcctttgataagattcgtcgcaatttcctttagaggtcgcaatttcctttgataggaatatttcttatctgattccagattccatgtgtctatcttcctgttcagttaaggtcacttcttgaacataatcccagagtctgaaaaattctgcaaaatgctgccaggaaagcccaccctgaatgtcattgacccagttattattattattcaggacttcaacaacatattttcttcctcttgttctaactgagacattagcaaaattgttggtgccaggttctgaacagattttccatctatccattgatccattcagaatagggtgttgttaccatttccaacctctgtcactactattgctgagaaaagggccatagcatcattgggatgagaggggagttccaagtctgtccacggtcgatcagccctcactttcttatggcattgccaccttatctgcaaagcccatgccatgacattcaaattgggtataccaagtcctcccaactctattggtcgagtgaccttatcccaagccactagacagcaacccccattggcatgttctctgccgttccacaagaatcattttctgattttatccactgccttcatgaaccacttgggaacattagtagcaattagcaaataaataggtattgcaaatagaacatatctaaccatggtggctctgccagccctgttcattagagttcctttccatgttggaagcttgactgcaattttc

SEQ ID NO: 79188 - DNA, 577 bp, Zea Mays
ggaatgcctcctgaaactccaaaccccaatgccacagaacatgaaagaaaagagaaatggaaatttaacttcttttcagaaaattgaggtatcacactctaccccccttaaaaagaattcgtcctcgaattcgaccacttccaagcaaagcatccaaggtaccccatatagcaccaccattcaaaacatgggtccattattggtcttaattaacacaagaacctctacctcagactaattgtctaaggaaactacacaacctgatatcaagcatgaaacaacatgcaatgaagctcaaagcaagtcatagatgcaatcaacactacgatttcacaccatcgaatttggatgcagctatacatcaacatcaatgtcttaaaacaacactctttttatgaaggggtaatatgcactaagcacaacccttaccagcttgaacaattcattttaattcaatagtgaaacatccacaccagatgaatgtataagaagatcaaagacctcacctcaaagcaccaccaaaacaagtagttctattgaaacaaaactcctaatcttcgtaaaccttgttcttgcc

SEQ ID NO: 79189 - DNA, 1223 bp, Zea Mays
ccaaaacactgcctcgcccgaggtcccccttaggggtcttcccaaaactccgcctcgcccgagcccgatctcagacagtgcgtgagctcgattaaaatctacgtcccgactgaggctctcccaccctagggaagccatgtctgcctcgcccgagcctgtctctggcgagagggacaagacttgtggcagggctcgcatgaaggccactagggtagccgcattcaatgcacgtacctagcccacacagggttgcaggtgtacagtgacgacaagaccgtggtcctttcaaaaatttacccactatgattacacatgtgcactccgcctgacagcccctgatgggacatgtaatatgacatgagcgcagaccatccctcgggcacaaacttcgtctcgcccgacacaaagcttgccctcaggacaaacttcacctcacccgagcccggcctcggctacctgctcccctgcgaatcctttgtgaatctggtgcacttcattaaatctcaggatagcctcggtcccgacctcaggcggacatccacctcgcccgagcccgatctgcccttgatgtctgtgacggagaatgccccaacgtcataaaatatagtggagcagacacattccttaagaggcttttcccatacttagcactgtgtcaagcactacggtatgggcaacccctcaccagggggtttgggtacgtgatcgagccctcggcctcggcctcggctctcagcgggaaacaagtgggcgcaagtcatgaacacatcacaataccataccgtctataagatatgaaagacaacctctcacagtatgcagcagactcccatcctccaggaagcacctcttgagcctataaatagtttatcctaccgcttctcaaagggaggcggatacttcacaagtcttctccactcagtattggcacttgcctcaatcatcccctaggacatgggacacttccctttctcgctctgcttgtaaaccctactgcaagcacttaggtgtgagtaatataagtcctgccccctctactggaagtagggcctctcttagcctgaacgaggataaacgacttgtgtcaactcgcatcaccatctgggtctggggcatgcgtcattattttactagtttgttaggtccacagatccaaaacaccaacacatgggtacacaacacataatcttatactctggttagtcactgactacaccaaaaca

SEQ ID NO: 79190 - DNA, 656 bp, Zea Mays
ccggaatagcacaacaagtgcgttaatcgaagtcttctactaaagactctccgtgcaaaagtcgcctaagggtgcagccggaatagcacaacaagtgcattaatcgaagtctcctactaaagagtctccgcgcaaaagtcgcccaagggtgcagccggaatagcacaacaactgcatcaatcaaagtcttttatttaaaagacactccgcgcaaaagtcacccacgggtgcagccggatcaacacaggcgtacgaatacggccaacacgccacattaccatacaaattatagttacatacacacggcgagggcatcacatattacataggctcaaccttcgggatgatacccatctccctgtaattaatcagcattatcctcaattcctcaccctcaaaaagattccgaagatccccctcgcctatgctcgccccaatcggcgaggacaacaattctcgtttaccaacccggtctactcggagacggccacgctccatccccatacgacggtgcctaccactttgcgaaaagtcacccacactacgttttcccaccacccttcgccgcctacaaccagtactcgcactaggaagttccccggcaccctccacacacggtgaagtctccaccgcagccacatccaatgcaacaaaat

SEQ ID NO: 79191 - DNA, 368 bp, Zea Mays
ctagatgcattgctctagtcctctataatagttgtccttcactagccaagtgagtgcataccaatttcttaccaacttccttcatagccatccttacttcccacctttttactaggtccaaatattgaagaatggtctcgatgtgggcaaacttgaaaccccatagcccaacatgattatcttgtgatactgtaggaatgtgtcaccgaagaataaacttcttactcactaaagcccctacatttagtttcattcatgcccttctttatagtcagatttgggagccggagcacacaaaaagtatcactcatcaatggttttgaagtgggagtaaagatgacctttcacccttacaacttccacggtgc

SEQ ID NO: 79192 - DNA, 410 bp, Zea Mays
tttaggccaaaaaacaggcgccgctgatttttgacaaattttggacatcatcttgctatgacgatactgatcagctccaactgtatattgatgtgggactagttgggttggacaacttatctccttagctttccaatgatatctagaacgtcaaaaacaaagtctgtatgtagcctaggttcctattttcgcgagacccactcctgcagtccgaactggattcgcgaataagctgcacttcaaccccccttgagtttgagactctatgtttgattgggccttgacagctatgtactcatcactatactacataccttatgcttcccatgttgctatgaatgcatatgttgttaaaatttatctgttacctatgcatagggggagttagtctattcaatcatgtcttgttc

SEQ ID NO: 79193 - DNA, 279 bp, Zea Mays
agaaatctggaatgaatcgccgataatatcctgccaatcccagaaaactctgaatctgccgcacggtggtaggaggcttccaatccatcacttcttgcactttctcaggatcaactgataccccgtcctgagaaatggtgtgacccaaaaacttgatttccttcagccagaaatcacatttggacaacttagcatataaacgatgatcgtgcagtctctgaagtactgtatgcaagtgtttagtatgcccctgctcgttccttgaatataccagaatgt

SEQ ID NO: 79194 - DNA, 297 bp, Zea Mays
gtcgcttgtgtggttgtattgatggcagtgatgttctcatcatcctccccttcttgtagtagagtcgtcctcgactctagtgtgtgctcctcacccaagtatatctttaaatctgatgatgtggtttcttggttgggaatgttggaaatatcattacttggtccccaatcaacttctttgttcctcaatgtcttcgtagcaggagccattaacatggtcatatccgtgtgggttatgttctcatcattctccccttcttcacagcaaaccgtcctcggttttgcatcatgattgatg

SEQ ID NO: 79195 - DNA, 711 bp, Zea Mays
atcgacaaaaggatgtctgacgtcaccagaagttgcagagctgacgtcgcacactctacgtatcgccaagagcttttgtcatacttaccactgctccaaccactacgactcggacaactcctccatcggacaggctcgggtacgtgtccaagccccatatcttggcctcgactctctgctcgatcaaagatgcgaatacaggaaccggacatccccttctcagctcaagtcaacagcaagtacggggacatactgttgaccatgctggctacaggggctcggacgcacctcctctcccacatgtgacaagtcgtgacgctcttggtagcccttgttgaggctataaataaaggagcccaggacctcaggcaggaggaggaacacttcacggttttcacctccacgtggatattggcacttgcctcaatcaaccccagtgacttggggtcctttccctctctcgaccaacttgtattccctactgcaaacactttggtgcaagtaatataagtctcatcacctctctactgcaagtagagccttctcttgcccgaaccaggataaaagacttgtgtctccttgcatcacccatctgggccaggacatgcaacactaattcactagttggtaggatcctcatgtcaaaacaccgacaatgttggtgtaatattttagactttatgtggttcaaatatatggaccgacatggtc

SEQ ID NO: 79196 - DNA, 926 bp, Zea Mays
gccaagaagagggtggggtcaggcagcctttttgatagagagctaggactcgtcggttctccaaacttgtcagccatcagccactagggacggagcacgtcattacatggcgagtaagattagatctaccggacagactagcgtcgcgacaaagacgagagagccaggggcgtcaaaaaagagataggggtcggacagcgtcgcacggcgagaaggggttgtggcgggcagcattgggacaaacaaccgagggggtggggcatggatccgcccgtctgccacaaataatgcagctgactaatatagcttaactcgaaaggaaaacgacaggacaaataactgtaatgcagacaatgcaatagagcaatgtagtggcaatcaaacaataccgaaaagtcaaagaccagcagaattccggccaaccagcccggactgcactcacagattattgcatcgaacagcagaattctaggtgctggttgcaagaaaaaggtctgccatcccaaacaatgcatgctagtcacctctagtaaaaagtaacgcttcttcctcttcagtttctgatacaacaaaacaggaagtcaatcctctccagtaactgacgtgtggagctagatgctgatcggcccggccagcacctactttagatagtgtttggttcaagagtataccagaacagagccattctattctagtgttgagcttgtttggttcgattccaaatagaatagagtcactccaatttaagaatatttcttgaagatactgcatctggtggctccgcaaaatcaatcgaacctaacgactcctgagcggctcgtttctcactagttctcttctccctcccttgcccacccaagccgacgacctctccctcgcactgctcattgtgcgccatagatacccgaagcagagctcccgttgcc

SEQ ID NO: 79197 - DNA, 378 bp, Zea Mays
tcctcattacccaatcacaccaagtgctcccaaaaccttttttctccatcatagtatagaggaaatgccaatttactttgtcataggctttttcaaaatcaatttttaaaaccactccactttgatttttcctcttaacctcatgaagaatttcattgagggagatgaccccatccataatatatctatttttaatgaaaccgtattgagaatcacttatcacttttgtgatacacctcgcaagcctgttattcagaactttggaaataattttgtaacacacattcaaaaggcagataggtctaaaattcttcatgtcagccgcattatccacctttggtaataaagtaaccatcccataattcagccttttatctt

SEQ ID NO: 79198 - DNA, 325 bp, Zea Mays
gtctcaaggaggtgctgggcaagtttgttagccatcaaatgatggttaaaaatgagaagtacattgacgacgtcgccaatgggagccaccccttcaacgagacacaagttgtcgcgttcaaagcgataaatgatgaggtgtaacaccccaggtgttactcagggtttctactcaacacccacacccttgacatgttatcacttgtggtttagttgagcaaaaggcaccaaacttgagaaccagggtcttaattaagtgttaatcattttggagtactaccttagccatatcatgcacataaaaagggggaagtgcttaaacccta

SEQ ID NO: 79199 - DNA, 383 bp, Zea Mays
cgcaggcgctgatctgtggcccccccctggccaacctctttatttcgtggcctgaagcatcttggtctggtgggccaatgctgtcggctgtttcctctcctcgacgaatccatctagaagttggccgcataaaacgacgtaggttcgttgcgattagcttgaatcgcgtaactacctggccaggttccgccgcgttataagatagcacagggcccttgctccatcctatggccgacgtgttcacatggtgatgaagccgagcgagaagcgtcgagttaggagagagagggcagtgagatctgtcgtgggctagatgagagccatgtcggtgataggcccgtggcgggctcaaggttaatcccgggcgtcctcggcgctgctcc

SEQ ID NO: 79200 - DNA, 596 bp, Zea Mays
ttcttttatagctcaagggtaggaccttacagtggagacttgttctctactggtaagagggtgatttgttgccccgggttgaggtagcattcctgacgtcgttcgtagggtcatgtgtagtcgtattcccaggatagtgtaccaccttatttgtctgccatacaggtccctgtagtgagtcaattgttgatgtctttatagtagtgtgtggtaggtccaacagatcagactcatggtgcggtcatgcatggtgcgactccaattgtcgtcatgagccctacgtcacctgccagcgtgcgtaggcatacactcggtatggtgtactatcccatatttaccgatatacaaggcaatgtagagactccagtgctgaggtccttccacgactaaggttggctgaccccacagggcagtggggacacgcctgagaccgtacgtgggggcttatagtcacgttgatagtgtcctcccgatgccccttcagtatgctgcacgtatctccaaacgtggcatggtgaggacgtgtcttatcatagctggcgtggatcaatagtacttggattgagacctccgcctcacctagttgctcggtcggg

SEQ ID NO: 79201 - DNA, 847 bp, Zea Mays
gtgaattcaaggagagatgttatgagaaatccttggattgcacaaagaaactgaaagacagttttgcaaaggtgggtgcatactcatcggagcaaaaatttatccgaggcgatcccgaaggagtcgttcaatggatcaacgaagaagttgaagattttgaagaaacactttgcgaccgtggggatttttgtgccttcgccggtgcccaaggggttgcagcggttttggagaaaactggctgtgaacatgttaaaactgtagcccaagcagaagtcatcttctccatagacgatacgaaggaaccttcagccgaagctactctgatgggcgggaaattttattccgatgtttggacgaagggcgaccatgaaatagtcgacgaagcaataaagaaaagtgaaaaagaatcgatgatgcccaagtaaaagaaaaggaagctgaagaagctgccgaacgtgcactgattataggtacctctatttaatgcccttttgctttattattcatttatatctttgaaccctaattatcatatactttgctacagccggcctttcgcccccaccagagccattcaatcctgagggtgaccccgtcatgaaagaagctttggatgtgatgaaggtcgccaatacaatcgttgacgaatttgttgacaagctattgaatgaagctgccgaaaggatactaaaagaagactaggttcttgttaactaggaaatgtaatatttatgtatgggccagacatcagatgtttatatatatgaatgcattttctttgcgatgtatgaaatttgtgtacataccctttttgagccttcggcaaaaaaacaccttcccttctttt

SEQ ID NO: 79202 - DNA, 347 bp, Zea Mays
gctctgcataaattccaggactaaacggtaatggtcttaaccctgacttggacgacgggttagtttaggaaaagccgaggggcctttttgcaacatcgcacgaccgaaggggtatcggcaactgtgggccgttggatctatatgctacggttgcgattagatcttaataagacccgaaccggtatcggatacggaccatcagattaccatccaagggtcgggatctaacgacactagcgctcccgctcacccacacatccgtagatccacggctcctatccattagcgcgaaggggtatccacaacttaatcatagtcgtctgataagatcaaacggtgcacatcct

SEQ ID NO: 79203 - DNA, 675 bp, Zea Mays
ggtcaaaaaatcctcctacagctccatctgcattgtctgacgatgatttcatggatgctccaacattgaagcgcaatttcagatcagctgcaccctccacttcagtaaataaccgttcaaaaaagaagtctcgtgtattgaaaatagacatccctcccccacaagtccccattgtgtcaagcagatcaaagtctgatattgatgtcaagtcaaagatcattatgaatacaagctcacccaaacagaggacacccagaaaatcctaggtactatgtatatatttatttttgcttaggtgttaattttggtgcacaatcaatgttgtattacccaaatattacattttatatattattattttggtatgctttttattttgttggtgttgttagactatagttatttacaaccatctaataaatattatatgtagatctatattatctttagttataacaatatatatacactgtgtattaatacatattcatttattccagcagaaattgaatatccgttgcatcccgtatgatgtcattgtgtcaacttggataatgagtgatcgatagcgtgacgctgttgctaggttggaatttcaaagtatatttgatttgtgtaccgatgcattagagagtaggtctctcataaggtggttgatggataagctggatccag

SEQ ID NO: 79204 - DNA, 456 bp, Zea Mays
taaatctttatatggtcttaaagaggcacaatgggcttagttttctcgattgagtaacacctttcttcggttgggatttcatgtttctctatttatttttaatcagggcagtattcacatgtatatcctcatctatgtggatgacattatcaatgttagctcctcgtctttagctactaattgcctcctcgaacaacttcaagttgagtttgtggtgaaggatcttggccgactcgataattttctacacattgaagctcatcatacatctaccagattgatcctcacacaacgcaaatacattaaggaccttctattacgcaccaacatcaagaattctaccgaatataaggaggtcattaatgctactgcataacttatttgggtgcatgtgctgcttcaggaacatggcatagcatgaccatggccaacgacactctggtgtgacaatatgag

SEQ ID NO: 79205 - DNA, 594 bp, Zea Mays
aacgaggcggatttggaggaatctctcttaccgagaatcaccatgtatataatcccgacgattacacgcagcgacattgcggccacccgcaacaccggcgaggaattgcttctgttgcagttgctccatgtgcttggaaacgacacctacttgttccttgtgctttggcgccatcaccagagccttccttggtcaccgattgacgatgagttccaacataaatggaggcagcacatggtcccccatctctgatcccctcccctccggtagcttctggtgctggtgttccgaccacatgggtagacaacgaggcacgaatttatagtctagcgggactcggtcttatccctggcgagagtgcaacaacccaaggaggggtacacggagccgacgcttaggttgttacgatctggttgacgacgatgctgacagaacggtcccacacaccgatcacagcaggacgagggcgatgccggtgggactgcatgatggggcccgcatgccagcaaccttatgcctaggcgctcgcgcgaatagaagtggtggggtgagagactgtagtactagccccaccagttgacgctgatgttttcc

SEQ ID NO: 79206 - DNA, 378 bp, Zea Mays
gcatgttatttgtgtatttttattccaaagaaaaaaatattctacttgtctctgccaccaagaagggacattgaagatgtttcgccatcagattagtgtctgtacaatatggcttgaagcttgaacagatgagttaaaaacctcacggaaatttattatgcgatctcatatttctcaaaacatcatgtgttggtttctgacaaaacttccattcttcaaatggtacactgtacatttgaactacatggttctatgggcatgattcctacaaagagcatctaggtcactcacatgctgcaacaggacaatatctggatctgtctgctagaaagctaatagatttgtacttctaagttattcatcagagtagcaattaaa

SEQ ID NO: 79207 - DNA, 404 bp, Zea Mays
ggtttggacactcgataggctctcttggaaataggggtggtgccaggtataagctctatggcaaactcaactttatgctcaggtggcatgcttggtaactcctcagggaacacgtcagggaactccgacacaattctaatctcctcaaacaggttggcctccttgccatctataaataaatggtgacattctccttcttctaattcaggcatgaacagttaagttactacttctttcccggatgggaacactaactttactatcctcttgtcacaactaacagtggcttggtttctatgcagccaattcatccctaggatgacatctaacccttgagtacccattactactaggttagcggggaaatctatcccccttatttcaatccttagattcgggcacat

SEQ ID NO: 79208 - DNA, 505 bp, Zea Mays
ccgccgtatactacacggtctccaccgttgtcgggtttgagtgaggaagaagcgtgtgcgttgtcagatcttgatggacggtgtggattagaaatagtataccggttcggcttgggcttgtcctggccgttggattatcgacgtgggggcgagatcggatcgtgcacataataaatcagcccttgatcatagatccgatgaaccagattgcgtaccgattcattaaagaccagatctaatcctaagcgctgaacccagatccaacagtcagaaaccctagatacccctttggtcctgtaaaactgcaaagagaccctctgttattttagaaacaacccgcgacccagtctaactgttcactatgtctagggattcttacactggagcccctgtgctttctggaatttgacgcctagtccagagaagaataaaaatagagaaataaatatagaaatgggtttttaatataaaaataattttagaaacttggaaaattcatattaaa

SEQ ID NO: 79209 - DNA, 355 bp, Zea Mays
gtaaatcatctatctgtgcagttgatagatgtagtgacaacatgtgcatatgtggtcactggattatggtatttatggagtcttgaaggattccaaatacataatcaccaatcacaaattcgcaatgcttggaaagtctttgtgacttagagcatcctggtcaaatatggtacattcgacctagtgaatccttctttttgaaaggatacacaaagtatggtatgttaagtgtaaatatgtgcaacatattttaaacatacattacttatcgacggagtttaagatagaggatatgaattgaaagagatttccaattcaaagtaaagtatcttaagtatcttgatacaaagttgtc

SEQ ID NO: 79210 - DNA, 433 bp, Zea Mays
gagggcagagcagcgctctcagaagaaggaatggtgtcccaaacaacaggaagctgatgcggaggtcgatgaggaggccgatgagacaccattggctagtataaacatggtatttgtgctccctctagaattttcacgcaccaaagcctaaagatttatttgtggctcgaattgatctcggcccacaaccagttgtgttcaaaaagtcaccagagaaaggttatagacatatgaaggccttgtacctcaaggagtatatcaatggcaaacccctcaacagaatgatggtggacaacagagtagcagtaaacatcatgccatactccatgctacgccgtttggggcggtctactgaggatttaatcaagacaaacatgatgcttaattacttcaatggctagccatcagcagcacaagcgtcctcaacatggag

SEQ ID NO: 79211 - DNA, 839 bp, Zea Mays
gatgcattcctctaacttgtgctaccttgtttttgttgccatgaataaattaagaataggtaaccaacattggcgccctctccagtgatgtcacaaccacaccaagctacatcatgctgccaaagaaggcaacggcaaccggtgttgtcctcacgcccctggacacgaaccatgaaggcgaagctctctttcgggaagcaaggatcaggaagaggaaggccatcagctttgagccacaagacaataaatgtgatcgtgagatcaacaatctcgaagcaatccaccaataagtggagaagcacagggagaagatgctccatctctataagctacagatgaagattgacgaaacaactgaatagatgtgtaacatcaaatcacatgataactagtataattacgaagaccttcgtcatgagggtcacaactatgacaaccttcatcctgaggcgtacaacttccaacacttcatatatgacaaagcttccccgctcacacgagagttgcaagccataccttggccaccattatacagacctcccacattgcccatgtacgatggtctgtctaacccgaagcaatttctaatctgctacgaagccactatatcctcctatggtggcaactcaactgtcatggtgaagtcattcgtcatggcggtcagaagcatagcccaaacctggtattcatcactttgaccaagaactgttacttcatggcagaagttaaaggatatgcttcttaccagcttcccgagtttctagtcgaagcctgtcactacataagccttgttctagtgcacacaagactcggacgaatacctacagtcatttgttcga

SEQ ID NO: 79212 - DNA, 301 bp, Zea Mays
ggcatcttgaccatgggatttgatatggagggctcggattaaatctgcataagcgctgaaccggtacacgatcgtggtcgtcggattcgcgatcaatggctatgcttttaagatgatgcgatatactctggatcaccggatccaaatctaacggcctgagttcaatccaggtgaaggggtacacggttctaatcttgatcgttcaatctaaatctggcggctgcaacatcatcaaccctagatcaaatcttggcccttggtttgcgatgaacggttaggagtgcttctcccacctcgcaac

SEQ ID NO: 79213 - DNA, 662 bp, Zea Mays
gatcaataatgcatcaggaaatagaattattagctttcttgacggtaatgctggatataaccagatttttatggccgaagaagatgcgtctaaaacgacctttatatgtctaggcttcattggtttatttgagtgggttgtcatgacatttggtctgaaaaatgttggtgctacttatcagagggctatgaatttgatctttcacgagctagtgggaaacactgtggaagtctacattgatgatattgtagtcaaatcagctgagtttagttctcatatagctaatttgtgtaaagcctttgataaaatgtgtcggtatggtctgaaaatgaacccacgtaaatgcgcttttggggtgtcggctggtaagttcttagaattcatcattcatgaacatggtatagagatagaccctgaccgaattaaatccatttggaatgtgggacctccgacctgtaagcttgaagtgcagaagttcctcggcaagataaattatttacggaggtttatttctaacctagccgagaaaattgatgccttcactcctatccttcggcttaaaaatgatgtcgaattcacttggggggcagaacagcaggaagcgtttaatctcatcagaaattatttgtcttcgattcccgtgttaaaagcgccacaggtag

SEQ ID NO: 79214 - DNA, 1238 bp, Zea Mays
gctaactctctagttcagttgccttcgcctctatttgtagcctctcactatctatttcaatgtggattctatatgaagttcgaacttcgatacgttcaccgacctactcgattagtaatctccacaacgtcacgagatctctgttaatgtgggacatgtctttttttaatggtctttctcccgtccttcatcagtaggaggatgtttctgcttgtacccattatatgggttcgcaacctctatttcaataatcatattttcctcctctgtatccataccggccattcattgatgctcctcctatcaccaacagttctccttctaccataaagctcctgacattgacactcctcttccttaaccttttgcttatccgtacacatatgggtatccatatgatgctcctcctaccaccaacagttctccttctaccactaaagctctaacactgacactcctcctccttaaccttttgcttatccgtactcgtatgggtatccatatgatgctcctcttaccaccaccaactctccttctaccactaaagctccctggactaacactcctccttaaccttttgcttatctgtactcggtatgggtatctatatgctcctcctccttatggattatatggtgctactcctccatatggtgcctctcatccgttctctcccccatttggtgctcctcccctatatagtgcttgtccatttcatcctcctgcaggcataatagtgccctaagcagcctcaacgatgcagactctctcgggctctcctgatgcaaaagttggggctatcgaccctctctctttacaatgatgaaactaacttcgatgattgatggagaaaatcggttgggatggttcataatgaccttaaagctggtttcaattcattattggtgttaggttcttggtgtatttggcaccaccgtaatgacatgttttttaacagtgtacgacatagtatctccatggcctcatggtggctgaagatgattttaggttgtggtgtctagctggagcaaagggtccgtccttggtctcagcttatgtgctcgacctagattgaggtgttcttggggctatggcttgtgtgttgtgtgagggttgagtgtggggggctatggttgccattttgcagtgtgctcttcttactcttttctctctttaatgaaatgataagcaactctcctacgtgtttgaaaaatgtgatgcagcctcgaaccagtcca

SEQ ID NO: 79215 - DNA, 584 bp, Zea Mays
cacgcccagtgggaaatgcagaatccttgggtgactcgaaatcatttagaaacccccattaccaccagaagctgttgcttgttaatccacagcgtttctgaacagcctttgttagtggggatcccactagaagcgtcaatagcagaggaattaatgcaaagtgccaccacccacgctgctttgttatagtgttgcattagtttaaaccagctacagatccaacatcactttctgtctcaagattttcagcaactatagtagtacataataactttttttttccaacaaaggttgatgataaaatctttctggtaatgattagagttcacatttggctataaaagttcagagttcagcacttgtacagaaccatgattactgcctccagcagctccactattttatcacataatatttcaaactttatcctgcaaacatccactactttacacgatccaccgaagacaacaatggcggatacagaaacggatcaaaggaggggctactagcctactaagataagactaatttttctttagacaaaactaaatgatctaattgatgtttaatataatatagtaaca

SEQ ID NO: 79216 - DNA, 528 bp, Zea Mays
caaacgtcttatatggtcgcgcttcggcatcaggaggccatcgattgcaattgggaatgaagtgcaagcatgcctaatggctttcaataccgtatgcacctacatcggtaccagagatttagttcaagaacacatcgctttcaaagtatggcctcttgcagatgaatgggaaatgccgaaggaagctgccgctggctatagccaaggtggcttggtttatcttaagtacaccttctggtatagaagccaatttgatgagccaaatgatgattggctagacgctatagaggcaacgagtgatgagctacttggagcctactcgaggacagaagacgaagccatgacagttgcctttggcgctcatgggaaaaagcggctaaatagggtcttcgatgttattgggtttgtttacccagattcttgttttcccatgcgaaggcaaggggggaaaaggaaaattgctgcttcaacctcttttagcgcgccgaagccgaagagagccaaggtcttgacacgtaggccgaagcc

SEQ ID NO: 79217 - DNA, 355 bp, Zea Mays
ggtttatttagcacaagggtagggttcttttggtgaggtagcttggtaatatttccacggaataaatgtagggtcctttaggtctagtttaatggataaataaattaagggttaaatagcaagagaatcatttatatggatcctctctattttcattatgtctactaaaccagcgctagaggagtggagggaggcggccatgcatggctagtcctcagcgagcgaccaagggcaactgctaatgttggctgtggactgcgactaagggcatccagggtgtgactacgcctgatgactaacgtggctagcaaggcgatcaaggtcaactatgtccgactgatgcaggatagaggcg

SEQ ID NO: 79218 - DNA, 418 bp, Zea Mays
tccatcttcccatcatctcccttctgcatcaccgtgaacttggtgaagtggtcccaaaccttggaggtaggctttttgtttgttttttcctcttctcaccacgtcctaatttcttggtgccattggactcatctcgagcttcttcagtattaacaacattttcgacacttccaccttttataaccatagcaccgacaagttgttgtgttctaggtgcagactgattagtgccaatgggtgatatagcagcaggagatgctcctgtgcttgcacatacactcccacttccagaccttagcactaatggattgacagccattgtcagtttgacagcctctcaatctcggaccaaataatgaacaaacactactccaaagtccaaacaggcaaacaatgaacgagcaccagtccagcaagc

SEQ ID NO: 79219 - DNA, 960 bp, Zea Mays
ctcatcttggtgccttagttcatggtgtaagaggtactttagctcgagaggaccgatggatagtggtcgactatgcctactcagcatgcaccgtctaagactactcctatgtgacatcgatcaaacaaatggatccactcctaccttctatcttagatacctcatttgcctatgctacctcaagggccctataggcctctctatcactgagctttctcttatgggatctctccatctaaattgccttgcaattctcttaggtagaggacgaggtgactgttagtcatggttgttgtctcctgggccaccaccaacattcttggtgagagccatactgaatatctcaagaaaactaactcaacttttctgatagctgactcaaaatcccaatgtcacttacaattgcctctcaacattgtgaggctgggccttaacttttactaaaggtttggccttgagttcagtgacttgctgctctcaaacactatcactgactagcacactacacaatagagttgaacgagagtaaataagcattatattctagagataagaggtcctaaaataagcaagcactttagatgggaaatggaatgagagttaagctacctataggaacccaaaaggacaactatcgtagcctaaaattttctaaaagcaatttggagtcaagccaagagagaatagtgaagaattagaagagaactccattgagacattctatccaacatgtggtgtgcatagacagtactagagaaggtggttattggaggccctcgtaaggatgccacaccaaagccaagctcctaatcaggtaactccgtggatagcctttaagtctccctcacgatcaactagggctccaagatgacccctctcgaactgctccttgtcatcttcactatcgagcttctagtcaaaccatcacagccttgttccctctgatacatggtggcggac

SEQ ID NO: 79220 - DNA, 1544 bp, Zea Mays
ttgtagggcatgatgaaacccggccaacaagagtatgaagttgaactgttgttgtaaggagtgaaaccataagtggacaagcctagacgaacactcctagcgtctcttgcaaattgtcggtcaaaacgatccagagccttccaagcatcgccatctgatggatgcatcataatgtctgggtcttggatctcacgttctccttccttatgccacaacattagcttcgcagtttcaggggttaaaaacagacgtttaagccttggagtgatgggcatatatcgaagctgtttaactgccacttttgtagcaaaagtagctccattctcttttagtacctccgcatatcttgatttaccgcatttctaacaatgggtggccgcttcatattccttccagaacaacatgcaattatctttgcacacatcaatcttcttatacttcatcccaagaccggacacaatctttttagactggtataagtcttttggcatcttatggtttgatgggatgagatcaataatcagattgattatatcgttatagcagttattcgagaagttatactttgccttcattgccataagacgtgtaaccacctgcaacacagtcacagtggtgttgtcatgcattttttcctctgacgcgtgaagaagcttataaaactcctgcacttcctctggtgtagcctgttccgaggccaatgttggatactctctactaatatcagccaccaattcatccatccgaccctcctcctcatcatcaattctttctgactctgtgatattctactctacttctccatgtgagcgccacacaagatagttaggcataaacccattcttgcaaaggtgatgctctagttcttcgatctttctcacatacttaaaattctgacacttggtacacggacacttcaccacacgaggtccaccgaaaaatgcgagatccacgaattgttttgcaaccctaacccattcctttgagtgacctagagtcacgctattgaatccatcatacatcgcccttcttctattgtcatccatttccaaaactaaataactcaatgcataaaaaatatgtaaataaacatcattaagtatacaaacataaataaaaaatgtgtaaataaacatcattaagcatacaaacataaataaaaatgtgtaaataaacatcattaagcccttcttctattaggaaggatcactagacataaaaaacatttaaccaaacattgaacctaacatcgattaatttacaatgaacaagaaattatgcatcaattgtaacaactacccaaaaatcatgcatcaaattttaactaacaaactaattctaataatatgcatcaaagaaagaagaaaaataccttcacggagaccgtcaaggtggtgacggtcgaggagacgcgggcagacctgtagttagagtggagagagagaccggagactagagtcaaatgggcctacaattagatggaaacacggctttaggtttcataaaaaatgcaacagtcaatgcaaggaggtggggtgttgctt

SEQ ID NO: 79221 - DNA, 488 bp, Zea Mays
tacctttcaaataccgcaacactctctcaagagcacgctagtgatcatctcctggttttgacacaaaccgactcagcttactcacaacatatgagatgtccggtcttgttgcacttgcaaggtacatgagtgagccaatgatgtgggagtatgccaattgatccctcgctattctccgattctttctcaatagcatgctagggtcataaggtgttggagcaggatcacagtcactaaaaccaaagcgactcaataccttttccacataatgagattgtaacaaagttaccccaccatcaccttctctaaaaagtttgatgtttagaatgacatcggcttctcccaaatctttcatctcgaagttgctcgatagaatatttttaacttcctcaatcacattgagatttgatccaaagatcaagatgtcatcaacataaaggcatagcataacagactcactcccaccataccgataatatacacacgcg

SEQ ID NO: 79222 - DNA, 1013 bp, Zea Mays
cactgatcgacaactgctgccattccttcttcctcctctctgctacccgacaggcggcgctggtttcctccgtggcgatgcccaagcaggagcgatgggcacctcaccggagaacatgaattatgtgacccggtcacctaaatccaaatctaacagacgctactcgaagtaaggaagacaacaaatatcagggccattatctcaccagcaattaaggtcatggccgtgcagaccacgagaagggcaactcggcggcgatgatggagctccgatgagagatctcccatactccgatcaactattccacactacaaatcctcgtacgcgggtggcgtgcaccgacgacttctcccatgcacgtgattggaggtaggcagcctggagcatgaaggtcaaccgcggtggcctcctctccctctcatctggatgctaaagtgaggcaggcgtcgacggtcgaggagggatgtgtgaagatgccgatatatatggttgcggaaaggatcccgaatcgactaacaaacctcggtcaggtttgctacgatcccaacaaccctcggttgttgcccgcgccggacgtagtgaatgcgaggggcaggggacgcgaggtctgataccagggcccactcggtagcgggggaaagtttcctccccacatgcgtgttgtgatgctgcgaaagggccccacctgtaggtgcttaaattgagttgggccagtggtgcaaacgggtaagtggaccgacaaagtgagttaaactggaccgaccgagaaacttggcccacgagtaggtttgcccctttttgttttcctttttatttattttttctagttctgatttctatttcctttcctatttgaatattcaaattcaaatcaaattttggagatcaaatttaagtttaaatgcacatccaaaattccagcacgaggtgcaataatattttatctgtttattatttttaaaaacaaatgtttttaaacatgagattcatacgctcaaaatagttattttaaa

SEQ ID NO: 79223 - DNA, 423 bp, Zea Mays
ccacaaccccagcacaaatgatgacagggcaaaccacactcaaggcaaccaacaaagctcacaatcttcaggaatgcagcaaacctcttacaggccaccagctctaagaggcagaggaggaagaagcttcggaggaagattcagtgcccaacctaggagattgttctgcttattctgtggggaggataagggacatacaacaaggatgtgccaagtcacgatctaaaagcaaaaaggagatagctgaagccaaagcacggcagaatcagccgaagcaggtcttgcacactacttgatgctattcgccatatatccttgagtatgtgagaaaccaacaacctacgacatcagttgcttcggcaggtcattctcaagctgtatgggttcagttaccaccaccaccacctttgacaccaacctttg

SEQ ID NO: 79224 - DNA, 930 bp, Zea Mays
gttaagtcttccactagggtcgaccctctcttagtcttgaccacgatgtcatcaatgtacacctctaccctgtccctaatcaggtccccgaaagtcttactcatcgcccatacaaatgttggcaaggagtttttcagatcgtaaggcattacaatataacagtaaagcccatccactgttacaaaagcggtatgcttcctatcttgtctagacatctggatctgatggaaaccagagtaagcatctaaaaaggacaggaggtcgcacccggaggtagaatccacgatttgatctatccgtgggagtggatatgggtccttcggacaggccttattgaggttggtgtagtcgatgcacatccgaagcttcccgttagccttggggacgatgactggattggccagccatactgggtgatcgatctcttcgatgaagccagcatccaacatcttccggacctccttacggatgaagtcctgccgctcaatggactgtctccgaggtttctgactcaccggtttggcatcagggtggatcttcagatggtgctcgatcacctccctggggatcccaggcatctgcgacggttcccatgcgaatacgtcggcatttgcctggaggaaggcgatgagcgcgagttcctatttctcctccatatcactcgcgatgagagtggtctgggaggaatccgcgctgagccaaatggtcttgacagggacgccgtctgtcccagatggttgcacctttggcaccttggcagtcgtcttggtataggaggtcgaggggtccctccccccatcatctgggcgagcagcttctgccgccaggtcgtgcaacttctcgacagctgcaagcgcagcggggcggtcgtcccgcatggtgaggaccccagcagtggacgacatcttgaggaccaagtacccgtaatgg

SEQ ID NO: 79225 - DNA, 568 bp, Zea Mays
ccgagaaccatgcggacgaaggaacgtgttcccggcgatgggtgatggtccagttcaattgaaagggtcgaagagcttgaggagggtctagggacactagaacaggcaacgaagagacttgaactaacctgagttgagctggccgcggtgaggtgttcttcatggtgttcttgcgtggttttggggaaagttaaaaattcgcacactctggtgaacgatcgaggctaattcttggtgactggatacttaactaccttatggagctcgcggcagggtcaatttatactacggaagggcggtggctgggaatttgaacggtgacgcgcgacggtcagagaaagggaaagtttactggagcaatggcttggtgtccagcgccgtggcaattgctccggcgatcaacggggagctagcgtgagtcacggtgatgcgatagacaggtagagacacgcggcggacggcggtgagggcttaacggtgatgagaaccttatccgaaggatcagtgcgtaatggagaggcacgacgacgagccggagtggcgtccagctcaccggcagcgaagatct

SEQ ID NO: 79226 - DNA, 636 bp, Zea Mays
cagccatttagtgcggtagccaatcacgggggccttggtatctttccggtacgcaaaattatagcatctaaagttcttgtgcagaccatctgctctagctttcgtctaataatgaagttcgtgcacgcgagagaacccttcggcattgtcactttttccttggcttcagagagcccatatgtaaacgctaagcctcacaatagtgttcggggtcagctgatggagatatatctcaaatctctttaaaacttcccctatcatatcataaaggggaaccgaagccccactctgaagaagctcttgaacacaacaacatcatcttccttcggctctagaattacttcttctccagcaaagcgaatcagtccatcttcattttctccaaaataacctagcttcttcatcacaaccaggtcctctgcttttactatggattttccaaattcaatatgactaggtttggttgggcacaaaatactatcatcctcttcacttttgttatcactcccgacttcagccacaacttgttcagcttcggcgttggaggtaccttcggcagtagctccctcttacacaaccagacctgatcgtctcatcacttctgatatgggtgttgtctcgattacttcagtctca

SEQ ID NO: 79227 - DNA, 538 bp, Zea Mays
aaaaaggtttgaccctatttccctttcagttatccacattctcatcaacccttaccactgcaccatccacctctgcattttcagtttcagttcttgcctcaatctcatcatcaggttcagaggacatctacataattgaatagtaatacaaatcactcaaatagtctgtattggggccttggggcaacaaatagaatagatttgacgaaggaaaaacatgagtacacctagtttcacaactaagaaaatctagggataagagcatacttacgttgcaattacaagactcaaaggactccgttgcgagctggggagtggtgactttgagcgttggagaggccgagttcccgagcagctgacgtcgagcgagcggaggaagactccactacaggacacagacaatactggtaagctaaaaatagacacagtacaaagtgagactaacaaggtttagggtaccaattctaaagaaaaattaccatctatttaacagagtagagcatatccaatcagtctaaaaacaaacagagaaatagag

SEQ ID NO: 79228 - DNA, 487 bp, Zea Mays
cttcaatctcatctcccttgatgcttcatcaatcacagcatgtgctaatccctttgtaaaagggtccgccaagtttcgagcagtattaatatactctacagcgatctctccagtatttctcaaatgccttactgatttgatacgtcgtttcacttgtcttaagaactttgcatttttctttgcaatgcctacaattgtgatcatgctttgattatcacaatgcaacagaatggctggtaccagtttatcaaccattagcaagtccatcaagagctctttcaaccactctgccttagtagtgactgactcaagtgctacaagttttgcctccatagtagactttgttaagatagtctgcttacgagacctccaagaaactgcagccccaccaattctgaatatatatatccacttgtggccttgatctcagctgcagcaaagatcgagttggaatcattatacccttcaagtacagctgggtacccag

SEQ ID NO: 79229 - DNA, 443 bp, Zea Mays
actctagaataacaaccatgatctaatccaaattgagttacttaaacaagttagataatgttggcgacaaaaaaataggccctaattctataaacatatcttaccctaaattaatcccttggactaactcgtccgtaaacaacaacataacctacatcataggttgcctaacccatttgttcaaaaagcaaagtaaaactctgttcaaacctacctacctcgtgtaacccggctatcctaactacttgtccctaattcggataaagacttcaagaacgaagatcgaagatgatcgacctcatcaaatcgaggaaggaaaagattcaagccagatcttcaaaaggaatcaagatccacaatcttggatagaatctttcctcaccctaccctttcttaaccaaacctatctatgctctaaagacatcttctatcctacataataa

SEQ ID NO: 79230 - DNA, 789 bp, Zea Mays
ggccaatgaagggccccaaatggctaattgccacaagtgttcctagattggtctactcttgtcatggtagagatagatggtcatttgggagggaaacaaatgtagagctaggagatacgcaattgatgtgatcgtcactcctaaacgcggttccaacctcctctaggtgctagaggtggtcatgttctagatgtgccacctagcttgacctatcagctagggagggtctgtagtgattagtgaatcgctctacagatacacaacaacagataaaacatcaaattccagcctgatcatgtggatcgggccatgtttatcgcactgaacaagtcccttgagttgattgtcctttttctaagttggctataataggtaaaaagacatccattgaaagctaccaaaaaataaattttcctatagcatgatttaggcaatcattagtcctagaccagggcatgccacacacacacaaccaaagataaagaaacaggatagagagtcatcaagattactcacgtcatatgccaaacctagggccagataaacggtaaaccattcataggaacaccacgaatcctatctagctgaggactgacaatgcttcggatttggagagttaaaatcttttctaaagcgtgtttaaaaagcgactaagttttggggtcggtgatccacctagaggggtccaaagttgcacatctctatgtgtccttgtgcagaccgttcggctagggtcataggaccgtctgtaggtgacaaattggatttgggcagggactgtgtgttttg

SEQ ID NO: 79231 - DNA, 648 bp, Zea Mays
gcaattgctcgccgtcgcgagccgacaccgcgaagtcgctccgcaacgtgagcagaatctgtgcacatccgacccacttaagcgatggctctatgtgatatgctagaggctccgcttcctagatctcgagttgggggtaggaatcagggctctaggccgcgattgggtgtttctccgacgatgctccaccgtgtggggaggtatacgccgtcgtcgggcgcatcgtgggggaagatgagtcgtcggccgcggatccgcgaatgaatggttaggattaagtccatcgtacccctttggtcaagtgtatctatgcccttagatcttgatcggatgcctcagcgtttgggttggacactttaaaatctggtgcattaatcatcaatcggatgggagccagcgcttaccggttgatgggcaggtagatctaatcctattcgtagatgtaggatcgttcggccctggttgaaacataccccttcggccagatgactttataaaagagaccctgagttatcactgaatcaacccgccgtccactcgggttattcactgagtcttggaaaactttggtttagccccctgcgctttctgaaatttgacgccaagtccagagaggaatagaaatagagaaataattgtagaaattgg

SEQ ID NO: 79232 - DNA, 371 bp, Zea Mays
aagccactcgacgccaggcgagcgatgggatctcgacgaggtgtgtgagggtgatcgtgggggatgggaaggctagagccaggtgaggaatgaggggatgatccaaaaaaacatttactgttggagcgattgattaagataggggaggtaaatgaagcgatctaaagtgttggttttaatggtgagatttggatgtggataatttgttatgtgcacttagtgatgttttagctgctagattataaagaggtatagattagatccatcatactagttagaggtttatatgtttattgatgctgataggatcacatgggtatataaagatgatgaattgcatacattgtccgtgcatagactgcaaaaatatt

SEQ ID NO: 79233 - DNA, 379 bp, Zea Mays
tgacgggtacgggcgagtggtcttaccagtgattttacacgacagcgagcagtccacggaacgaaggttgttccgccccagatttgaactccggcgagcacacacctgacccccggtcgccaaacctccacagcgagatcccagatactatactcagggcgcgacggggcatccacacgacgtgacgacgacgaattggcggattaacggcggcttccgctgcgctctctctcccgtgggcaacagcgatggcggcaagctggatgaggtgagaagaaaaggtcgcggggcccaatttatagcccagggcgaggacgagctcggttaggcttaccccgagattcaagcgtggatttaggggttgttacggcatcccctg

SEQ ID NO: 79234 - DNA, 644 bp, Zea Mays
cactcggaggatatttagacaaccccagccacaaccagtagagatggatcctccgccaccgcctccaccagcaggagttgacccactggttgcagctcagatgaggatgatgcaacaaatggcagataccatggtgaatatgtgtgctcagatgcagcaagaacgccaggagatgcaccaggaacgagaagagatacgtcgggagctacgccaagagcgagaggagatatgccaggaaaggagggcacagcagcaacagcagcaacaatagcaagcaccactgcctccaccaccaccaccagttccaccccgagataagcaccgggagttcatgagccataagccaatgacatttgctagttctcctgatctactagacgctgatgattggctgaagtccatagagaagatgttgaacattgctcagtgcactgaccgggagaaggttttatatgcttctagatgtctcacatgtcctgctgctgattggtgggattcatatactgctgcccacgacgctgctgacactatcacatgggcgaagttttctacgcagttcaggaactatcatataccagttggactaatgaagattaagaagaaagaatttctgtcgctaaagcaaggaaacatgtcaatcagtg

SEQ ID NO: 79235 - DNA, 522 bp, Zea Mays
cagacactacaggatgcatgtccattgaagtagatgtacctgttgacctatgcacagacgctacagattgcatgtcatcgccagcaccggtgctagacattccctcgccgttaatcaccgcccggtgctgtcccttccgccgccgttaatcgccgccaataacacagatacgaacatggatctactacagctgtaaattaaaattgatttccttctactaatgctcctcaaaccgtatctgtccctttattttcacgattgtgcagcacgtctttccttatctcaaaccggtcaagttttatatattgcatggtttatgctatcatgttacacatctttatgcagtcctaaatggtgtgcacatggtaatattcgttccccgtgattcgtgatacaaaagattccttctatgcatgatttatgcatattactccatatatttatgcgttcgtatattgcctgacgcgtttcatccgggattcgtggctatcatctgcatggctgacgcaagcacgcatacac

SEQ ID NO: 79236 - DNA, 475 bp, Zea Mays
ggttttctaggttgtggacgcatccttgaagcagtctgttggtgcactgttcgatcggatgtggggtccacatggtcgctctgccgttagggagagggctagccgagcaatggagcaggcgaagaccttttctagttgtatggaatgttgtgtttcatgtttgtgatttctgatgcgtcatttttttgttcctcaggctcgaagggatgaggaggtcgaagatcttggatgcttagagaactcattggctactctagacggcggtggcgttgagaagggtgttgaggagcagtcttcgtgtgtggaggcttgcactagtgagcccatcactatgaagtctttgtgtcattctgctcatgtgcatgtgtaatcgggtgaatacttttctaggggggttgtgttaaggtgtgcattgacgctgacttggtgcatgcgccagttccgatggtatggcctatgcaggggaattttggtt

SEQ ID NO: 79237 - DNA, 857 bp, Zea Mays
gtttgagccagtcctctgttgccaccacaaggtgtatgggtaggaactggatgatgaggtaatcatccttgatccctgccatccgacatgtgaggcggtagtcttccagccacacactagtgttagtggacccagggtacatggaaaagttgtccggcgcacgcaccttagggggaactatgctttttttatttctcgcccgaaagcgcgtggtctccgtcccggtgggctgggactgtgctcacgcctcctttcacgtagttactcaacttcctcctactcttgacgcctgttgtcgaggatgccctgagcgtcgcggatgttccctaggcaatccctcatgaggacatgtgtccttgtggaccaggtgggttgtgccccatgttccaagatgaggtcgtttgcgggacatggctctggtgccgagggagaactgtcgattgatctcagcctgttgtaccgggaccctctccacgaggttgcggaggttctgatccggctcgcctggctctaggatggagcggagcatcatggccgctgcagctatgttttatgtggggttgaggaaatactatgtgtcgtggttgatttcagcgagttggtcacacaccttcggtcgaggcctttctgcttcgacgcgccttcgctcgacatcgtcgtatacacagtcgagcttttacacgagggcgtcgagctcctcctactaacggagcgaggcctctagcgccaggatgcgtgcctggcgctgtcattggtacacctcctcttgattgcgggcctccttgcctcccctgccgtttttgtttagcggggacattgccacgaagcagaccctttctagcacctcctcggcgtcg

SEQ ID NO: 79238 - DNA, 1230 bp, Zea Mays
caggaatcgtccaactcaaggaagaggaattatgtgacctgactcaaggacggcgagctgttagtgagtacatccacaagttcatagagcttgctcgctatgcactggaggatgtgagtacaaaggtcatgaagatgggttgtttcctaaaaggattaaggctagatctcaagactattctagccagacaagactttcacaacttctctcatctctcgaacaaagccatccaagtggaaagagctagagaagaagaaagaggtcacctcaagaggaagtttcaaattctctagtctcaatagcagaaaaggcaccagaggacccgttcctttgggtttcctcccaaagggcaaaacttcaacaagccagcaaggtccaccccatagtgtttcgactagccaagttagagctctttttgcacttagtttgtagcaagcagtcaacctccagccaatgcttgttagcaccgtggtgaccccagtcacttcaagaacaactgcccacgactaaagccagcaacatctgccttctccaactcgttgaatggccccaagaatgtctcagcactagcctccaaggcaccttcctccaacagccaggtgagcaagcaacatttccataaccgggctcgggtgaaccacattgacgcccaggaagctcagtagcacctagagtagtactcggtgagttcttggtagaatttacccctaccgtagtacttattgattttggagcatctcattctttcatagccactagttttgtggaaaagcatggcattccaactgcacagttagaaatccccttaatcacccggaccctagggttagaccttctatgccacctcaagcgctcctaaatcaggattcttttaagtggggtagtgttcttggcagacctagtagtgataccatcgcaatgaatcgatgtaatccttggaacagattagttgtcccggcacaatgacatcataggttgtgcaaacaagacaatccttctcaccgatcatcaagggaagtcagtttcttgtcaagcccgaccgacagctcaagacccgatgatattcagtctagcagcagaaagcatatccgtggtggaagaattcatggatgcgtttacagaagagaagtagagttctacattgatccccttccaggaacaacaccgatcgtaaagagaccgtattgcatggcacctatagagttggtagaattgaagtcgcaaatcgca

SEQ ID NO: 79239 - DNA, 558 bp, Zea Mays
ctaatagggatcggtggagacggtgagatggcatcgaacttgatggaggtgtactgactgcccaaagtataggtccattgatgatcaggcaaattctctagaccttgcattttcagtaagattttagcaaaaaggcacattgtaggcctgctaagacattggaggtctgaaaagatttaacaagttttgggcctgaagcccatgttggactgacgtagctgcatttgtcactgattcgtaaaacagttttcccagatgctaatggatgatcctgagccaacagactgggaatatccttccagtagcctttaggggatacgtgcaagatggggtacttttgaggaacggtaagttgattagattagctgaacttatcttgttgttctgtatgtattctggtttaacaaaattaatatgcttaaagttagaattttttgggcgcacaacagcttaagtaaaatctattttaatgtgtttcatctaaaaaataactaaaacaatatagttgcacagggaaggccagaaacggaattagtgaaaccaccaaaaccgtttgac

SEQ ID NO: 79240 - DNA, 590 bp, Zea Mays
gcggtcttaacgtgaattattaccccccgctcgactggcagtattggaagtgtgattatctcaccagtaggtgaaggcaatcctaggttgaacaacatagtcaacctagtcgatgtgctcaatactgagctagaccacactcttaacgagctgagtaaggctcgtgctgagatcgcagagttgcgagctgagcgtgtggagcgccttcatgaggattatggttctcctgcctctgctaggactcagcacccgtaccgctcaccgccacaagggtaccatgcttatggtacgcctgactgtagaaccaaaacaaatttggatcattagaccgctagcatcggagattgtaataagtcttaagtcaagtgtcttagtcttagttagtcaagatagttcgcttatcctgtgttttatgctatgtcatgatgaacatgtgatggatttggatctttgtaatggctgtcaccaaaatatgggtgttccctgcagtttggtttaattatagtgttaataaagttagttatttggttgggcaaccttttacttccactttcctctttatttaagagctgtgtttggctatgttgaga

SEQ ID NO: 79241 - DNA, 303 bp, Zea Mays
gagcctgcaggtggggccaaagtttgattggtgattggcacgctggttctgcgtgcccactgccgtaattactgcttgttcacctttgatcgcaccaattgttacgcctatccccgcggctgactgacccgtgacttctgtacttgacggctttgctgggccatgcgcggggtgccttgttactgccgcattagtttcgaaaatttaacctctccatcttctgtggcggccccgaggaggcgcggtattggcgcgagcggcggtttgacttctctgtacccagggaccggtacccgagggatg

SEQ ID NO: 79242 - DNA, 612 bp, Zea Mays
atgagcttgacagcaaatttggcttttcccgagacaagaggcccgaaaacccaaaagctaagcacgttttttagcccgacacgagcttgatccggtattacacgaataagtaggtcagactcgaacagaaaactaacctaaggtgctagcccagttcaacccgtttaccgctaagcccaccaaacccgcttttttattaaaccatgcttaccagctcacttttccgtatctaccgagctcatgggcttggaaggtccagcctagtttctaaccgtgcttgacggatcagacccaaatcggatcgggcttcaccgggtcccgggccgagcggccggttggccatctctacaagagggtcaactgatcggttcttctgtgtcttatatcactcagacattcagctcaagtagtggtctctgtacgtacgtgcttggtgatattgatcgacttgcagtttagctccggcatccaataatggctggcttgaaggcagctctgatgaggttcgcagtgcgccgccgcgcggcttcgcttgtacctccggcatcgctgacaccccgggagctgaagcggttgtcggacatagacgaccatgacaggctgcgggtccac

SEQ ID NO: 79243 - DNA, 1112 bp, Zea Mays
caattttggatacactcgggcctcaggttctcgagccacgctcgtgccaagtccaccaagtataggggggttccagattatgaagtagttgtggtctgcccctcccacctgacacgttggccagtaatctcctagccagagattggggtttgattatcctaagtactttgtgatgttggtggggggcctgtatcgttgtggtactggcgcccagaggttgtggcgtctaaaggcccaaggtattgttgtggatgcggtacactggtcatccttcggctaccggcgccgtgacatggaagtctcagcctgctgttgcacggtgaggtcaatgaggcctcgaatttcttggtgagttcttcgttcgctccgagtttccacctcagagtgtttgtccaggagtaccacagtggctacgatgttctggctcacccgatggaaccgtggttcgctggccccatcataggtcagacggcggcaaacactagttgttgtgtcatgagtctgccaaccaccccggtgtaaccgccccgtcctccatcgcgacaacccccatctcctagtcatgggaccttggctactctaggaagagcttggtcttagtggcggtttttgggaaggcgggtcgagccgaggtagggtagatgtggtggcatgcattgtggtacgagtagggttccccttgggatgcttcacgagcagggagtggtcctttagtgggttggccacaacgcactactggaccagactgtggctagacctgcttgatgaggatttaagtccgcctaccgatcctgaaaggaggaggtcatggaatgagtctcggacgggctctagcattcccacgatctcagtgaaggcgggtcgcagtgcgcagcgctgcctgccacctccttgaggagaaccaagctggaggctgtcgaggcttctagcaatgtcaagcaagttgctcgcctagggaactggggattctggggcctagatcatcgtccctctgtcgttgatgacgaagtcaagactcccaaaacgtatggtcgttctaggggtccaaactacgccactattgttgttggccatccggagcctgaagagttcgtcaagaacatgcaaggccc

SEQ ID NO: 79244 - DNA, 373 bp, Zea Mays
aattgtgtgaaggatgctcacgatggtcatgtgactaaagggtggtgtagtggcaaagcgagaagtaagtttaatatttttaacgattagttgatagcatctatcggtgtcgtcatgatttctgttgtatggtggatcgatgccttgctttgtcaaatattgcattccattcccattggataaataaatatcatgttgattgattagaggtcttatatgagcgttatcgcagccaaataattattggaggcgagtagcgtccataagtcggtccttgttaaaattgaagaacaatccgataagatatacacataagtgctttaggtccttcagtagccaatgtagtcttatggagttgtacgccacgtgttaa

SEQ ID NO: 79245 - DNA, 376 bp, Zea Mays
ctctggcctcgatttgggggaaggttgcaggcatgcaagtgctacttggacaagcagagaaatctcgtgcctctccgctaatgttggcgatgatggacgcttgtccaaagtctccgttgcaagctggtgatgctgtccttgcagtgaattattggaccgcagctcagtagggtatctccccatcactatctccagcagaaccacaccgaagctgtagacatcgcatttcgtcgtcaccgctggcgtgtgtgaaagctctacagcgttgcacagataacagcattagagtgaaaatgaagaataatatgcttggtaaaataaatcaagctgcatgtatacctggagctatataaccgtatgttcctgctagttcgct

SEQ ID NO: 79246 - DNA, 665 bp, Zea Mays
gggagggcgagctgtaccagtgggttcgcaagcctctgtgacagcctcatcggcacctccataccgttgtcggctcagttcagccgagatgtctgaacgcaaggagaagggtctttgttacaactgcgatgaggtatactcgaggggacatcgctgccagcgtttgtttcatctcgaagtgctcagcgaggatgaagaagatgatgtgattgaggaggagcctaccctgtctgcgctagccatgcatgggtcgaagaccagccgcacaatgccggtcattctggttatggggcaacagcgactagtgggcttggtggatagtggaagcacacacaatttcattagcagccatgtggcttccttgctccaagttccccaactgtcaggaaccaagcagcaggtgcaggtggccaatggagctcgattgccatgtctggggcgtctggcggctgttcagtttggtatacaggatcattccttctcggattccttcttggtgattcccttggaagggtttgatgcagttctcgaggtgcaatggctccagaaattgggtgatatcagctggaactttgactccctccaaatgtcttttttcctcgagggtggacatgtcagtttgcaaggccttctacatcatgggaagtccgttcagttacgcagtt

SEQ ID NO: 79247 - DNA, 635 bp, Zea Mays
gaattttccaagaacgagtagcggctacggcaatcatagtacgaactgtagtcatgtgggcaacaggagcaaaagtctcatcataatctcgaccctgactttgctgaaaacctctagcaacaagacgagccttgtatcgctcaacagaaccatctgatttggtcttgactttgaagacccatttgcatgttatcggtacagcatgtgacggtaaaggaacaatatcccaagtaccggtgcggtcaagtgtagcaagctcctcaatcatagcaagttgccactcgtgaataccagcagcttcctgataagtagtaggttcaacaattacgacagcagaacatggataacgataacgatctggaggtgctattgtagtacgatcacgtaaattatatctctgggcaacctgcaactcatcagaattgttagtatcatcaaaaacaggagtatcaggactgaccagaggcgacggaacaggtacaggtggagggttagtgggacgacgagtatagacacgagtaataggtagtcgatctgacaaagctggtggtgaagatgtctctggtggagatatagacaaaaggggatcaggcaagtgtggggatagaacgttgtcattattagaaggaaaggat

SEQ ID NO: 79248 - DNA, 364 bp, Zea Mays
cgacggcgagactgggaagatgacggactctaagaagcttgatcgcattctggggcaactcgccaccatgaatcatcgattggacactcatgtgcagtgcatcactctcctagagcaggacccctccacccagacgggctcgctgcgggtacaaccttcgccctcgacgaccctgcctacgggtcctgtactcgagagccatgttggcgcggggcacactgcctctggtggcagtgacgacggacatggaagtggtcgccggggcattctcggcggacaccatgatcgccacgacgacagaggaccacgccggcccaatttctcttttcctcattatgatggtgattctgatctcttgccatgg

SEQ ID NO: 79249 - DNA, 501 bp, Zea Mays
ctaacccagggttattcacaatctcaatgagacaatgacaacttcaacctggggaatacatattacaacaagccaaacctatgtgctattttaattactacatttgtttccttaaatgaaaggtcaacattttcaatagctttggataatgcaataaaaacaatgcccctcgcgaagttactgtcacctaggagaaatagtacagttattagaaggacctaaaaacatggcttgtaaagttaattctaatatacatattcgtataatatagcctaacctttattaccaatatttatccaactataaaggtaatttccaaaatatggatagaacaaataaaagcctcgaaacttctgctaatgtcgtccttagatgggtcactgggtcagtacttttagcagtatgttttgtatggtgcagtgagatgagaaagctccaactaaagtcgcttgactcaatatccatcatggaagccattccaagcctctcccaaaggattcc

SEQ ID NO: 79250 - DNA, 1065 bp, Zea Mays
gctatggctcccggtttatagaaacaaatactcgcgtagtccaccatgaatagttggataaataaggaaataaataatgtctatggactagtttggaagtaagtggaggcaaatccaaggaaagaaaatttcatataaataactaaatatcttatttataaaacatctcttgacgattgctaccctaaaaatgacaaggattctaaaaaaatttgagttttcaaactaaatggcgaggatccaaaggaggtctgtctaacagaacacgcgtcgctcagagcggccatttcaaaattttgaaatcgtcttcgggacgaaaaggccaaaaggggaggaactaagaagcgtcagccctcccccgcctcccgcagttccgctcgcctttcctcttcgaccgctgattccgttctgtcccactccccccacctcgccgtcgccctgtccgccctcgtgtacaggactagtggactacaggtacatgcacaccttcgtccctcccctttgttttcaccttcgacggcctctgcttcgattgccgggtgtaaacgctgtacggtgcgatgatcgctcctattccctttcatttgggcacttccgatgcttttccttcttcctatcgggttctaagatcttgttgatgtgcatttggtggcgctttgggggtgatattatcctctgtatagatagcgcgatcgtgtagcgttggtgccgtgttgcgtgatgctagagacagaaacggctcattgtagatttcccctcattcagtttgaaaacagctagcgagtggcttcactgcaacagaataggaatgttgatttctgaatggggggaacgagaggagcagagcagatgcattgatatggttttgtggaatgctggatacggctgagcaacgcatattctaaaacaactacagtttgcctttcagcagaacgaactgtcctgattcagtatatttgttgctccctccacaaacgtgtagaattatttattaatccagaaacatttcttataaacacgattttcctttcattctgtgtaatacatgagtattgcaatgcatcc

SEQ ID NO: 79251 - DNA, 636 bp, Zea Mays
gcctccgaagcagcgacggcagcagcacgcgccgcttctacagcatcacaaaccaattggctcggacgaacatccatcggcagaggagatctctcgggagaggagcagagatggcggctaggttcctcatttctggattggggaagacagagcaagacgcgcaagctacgacggctagggtttctggattggggatgaagcacacgtgaagcaagcaacggcggcgccaggattttaacggcgtgagcacagagagaattaaacggtggccccagacgcaaatcactgtctcatgtccatatcagcaatagtcggacgggtgcgtctccaaaacatataagccatccccaacgcctccatttcatcgaaaccgcgtctcttttgtttcataatggcaattgtctctcgagagggaggctagtaggcgacggcttcacgagagtggatacggggaaacccttcctgaccctttgaggtcaggggcgaaaatgtcgtgctcccccgcggaatgggccagggtgcatggtcatcaaacgagaaaaacatttgtccgagggtgatttggcccgcggtttctggggccagggaatgggccgggatcccaagctaccaaaggagcccttatggatttcgtcc

SEQ ID NO: 79252 - DNA, 392 bp, Zea Mays
catccatggaagtgtggaagggagaactcactcggacaccctcgggggctgggtcatagcttgcgctacccatccgagctggatcatctccggcaacaccctcgggggctgggtaagcgccagcaccatccttgagggccgagtcctctgcaacagccacctctaaggctgaaggacccttagtcacttccgtgggagcagtgcaatccagaccagcctcctgaccctcaagaccgtgctctaaggtcgatgaggcgcgggacactgcccgagatgaccccaacctggcatcgggcacatcagcacaaacatccatcgcgccaccatctgccggctctgacaacagatcttctagaaccatgtcttcaagagtctgatcgaagttcgtcaaa

SEQ ID NO: 79253 - DNA, 503 bp, Zea Mays
ccctacagtgctactccgtgtgtacgatagtgccgctttgtctaacttatgaagatcaagatgaaacttcgaccatagttacacagggatgattcaagaccattccccaaacttgaactccaaaagattaaaccatcgaaatcatatcaagaattgcacagttgaattagggttttcaaagattggttcaaactactggtaacttgtactcctaatgaatcaacccataccacttgttggctatgattctaggggtctttagaatttcagtgcagcccaaacatccacacgaactcagattcaaaaatcattcaaaattttcaaaaaagagcctaggagagaagaaccacaacaagaactcaaattaattagatttgcaaagggagtaacctcaaaggaaccaccatggttaggggaatgcttcccaagttgaaaaaacatagatgcaaattttttctctacaacatctatggatctccctaatagatgaaaggtaaaaaaac

SEQ ID NO: 79254 - DNA, 587 bp, Zea Mays
gcccacaaagggattaattagcctttttgctaagatagggacgagggtgggtgttcctagggcaccaatctcttgttctcctttcccgcacactgcgtcctacgctcaagtcctgtcaaagccaatggagggtggcggtgataaaggaaggaaaaagtccttattgttatagatgtatcacaagggtcattctatgcaagcatgtgcgacacgcaaggttttaaagtcgtccgactagtcgcgattagttggccttatcgctaatccaagctcgattaaggtcttcgacttgactagagcgactaggtagcgattagtcgttcctagtcgtccgactaggggttatgatcgactagttatgcctgttttgggccactaatacgacctttattatgggggtcggcccaccatctgtacacagcatacactattttgccctaccctcctctcctgtcgccctgttgtgctctggcggccctctgatcgagcagcagctatgccccctccatcgtgcggccgctgtagtctgtagagaccctcctccagcgcgctcccgtcctcctctgttttctgttcagcggctgaac

SEQ ID NO: 79255 - DNA, 980 bp, Zea Mays
gacttaagccgattgctccgttagcagggcatagtggtcaccccgagttaagtaagcgcgagtatgttgcaccgtcttaagtcgttgccgacttaagccgattgctccgttagcagggcatagtggtcaccccgagttaagtaagcgcgagcatgttgcaccgtcttaagtcgttgccgacttaagtcgattgctccgttagcagggcatagtggtcaccccgagttaaataagaatgccggtcaatcatgaacaaactgagtattcttgaagccttttttattgatgacatatttcccattttacagagtacattatcgtcccgatagcttttgaaatacagctaggggtaaaactttctgaggtgttctatattccaggagttcccaatttctgtgtcgtccatttgagtgagacaatatgatcccggccgagtgacttttgctactatgaatggtccttcccataagggtgacaacttgtgtcgtccctcccccgttagaatttggcggaggacgagatctcccactgaaaaggatcgtcgtcgtacggccttgtcgtgatagcgtctcagagtctgctggtatcgtgctgattgaattactgcgttcagccgttcttcttcgagtacatcaatgtcctccagcctagtagcttcggcttctgctatgctttcgaagaccaaccttgacgccccaaacttgaggtcagcgggtaacactgcttctgacccatagaccatgaagaaaggagtgtttccatccagagctcgactcggttgggttcttaggctccaaacgacgtagggcaattcccttatccattttcctgcgaacttttcatttttatcgaagacctttttcctgagtgcttccaatatcatcacgttagctcgttcaacctgcccgttggctcttaggtgtgctaccgaagcataattgctctgaatgcttttttgctcacagaaatcgaagaactct

SEQ ID NO: 79256 - DNA, 478 bp, Zea Mays
tcggctttggttgagtttggatactaaccatgacatgagtttgtggtgcaacatgtctcttggcttgtggtatgcaggtgtggagcacagaggcagtggttgacgatgaaggtgaaggtcaagtgcgtccatgccaatggattgtgagtggtggaggagggacgccaaggcttggaccgagggatagaagaagctagagaaatgaccgtggtgactgacaccttcagacatcaacaagtgcaagagtacagggatgggtatatcatgttgacaaagtcaagatgacgttgatcatgtcaagtggaggcatgggaggacttggtgatcgagtggtcaaggacttgtagtgacatacattgagatcgtgaagagagcgtatcgaatatactactcacaaaggatttagtgatttgggactcaaaaacatcgtgtgaactatttattgagtttgggcctctaaaccgggatggagttttag

SEQ ID NO: 79257 - DNA, 716 bp, Zea Mays
ggatcacattgcccatcacgttcagccacccctccaacttttgcaccaagcggctatagttcgatgtggtgaacttcccgaggtgctacaacaccatactcgggataccttgctatgctaagttcaaggccgtgccaaaatacacatatctgaagctaaagatgcctaggtcgcgtgggaacatcacgatttcagcttcgttcagggctacatacgtctacgagcaagacaactgcgagctcgcctcaacgctggccgggcacccagagcccgctcttggggaccagggaggcgaagagtacacctccaccaacgttgcggacgtcgtcaagcatgcacaaactaggatatagcaaggcaccagcatggcggcacggggcccttgcaagatccctaacaaaactttgtagaaactagggtttcgatcggtggaagtcatgtactcattaaaaggaatcaatggaaatcaataaatgcgcgttgatcgccccgatagaatcccgacattctaagatcgaccctagccttacggggcatggtgatcgagtcaccatatctcccaaaaaggaacatcacacaccaaagccgcgcaacgtccccatcaaaggaaacgaggatgaccgacattgaagaccagaatcagaggagggaaatgaaagaaatagtgtgccatcaaaagggattcactcagccattaaaagagttcatcacaaaac

SEQ ID NO: 79258 - DNA, 532 bp, Zea Mays
aaagcggagacgcggagtgagactatttacgggggtcgggaaataggtaagacgctttggtttacgtcatacccgggctattcatctcctacacttatatcaattggcttatattcacctaccttgtttctttggaaatcctatgaaccaaaggagtccttaatgtcacatatatatgtgatgttgaagttctgttagctctattttttgtctatttattgatgtacctgatacaatggccaatcccttggaatcgtactcgtacatgagaagagaatgtcacgtgtctgcaaaatcaggaagtgacacggcacgggctactcaagagagagcccagtttgacacaatccaaaaatatatatgtacactacctcacacgatacatgcaaaaatctcgtgtcgtgtcgcgtctctaatggcgacctgaggggcttctgttcccgctgaggaagtccagcttatccatgtacgtctgcttgaggttggtcatgatgtttggcagcttcatcagcctgccgtcgtcctgcgccgg

SEQ ID NO: 79259 - DNA, 1157 bp, Zea Mays
ggagattctgccgaaattctgtctcggatacgagtatagcatggaaactaacctcatacttagtttgacattctaagttgctcgtacttagtttgacattccaagttgctcgtacttagtttgacattagacattcggtatggccgacaacaaacactattcttagtagggccagttcagcctcacaggtgacaccttttatcctccaagactgctattcaagggcgatgtctggaagattctccaaggctgtcatctcatgctgttggatcgcctgatctctttctaaagtcatttgatccaagtctgcttgaagcttctcgatctgttcatcatagtctcgctgcaattgacgcttctcttcctgagccaagctaaggaaagtagataccatccccaaccttcactccacagctcggtatgctttcatcactgcaaacatcaacacctcagatgggttcgatgactccaagcgattagcggcggcaggagttaatccacaaccatcggtgttcaacagggtgactccacatcctccagcaacctgctctgacttcgccggacgtcggccgaggccaatacctaccaagtgcgaggtcggtgaaagaaaaggaaagacctggaagactcgatcgtttcaacacgtatcagatccgatctaatttcgccagcaagcctagaagatgcacctacgatgcgtgattagagtcagacccaagcatccatgccgaattaaagtctccatgtaactctgcatgcatcctgcgttgctcagatcaacacatcgggtcatcacctttgcaagactacgtcgatccaatgtcaaaggacggagtagcatgtgtttgtctatacatggtcgtacaagctagcatccatgctttagatcagatacggagtaatccatgattaattagcagccagccagagctacgttttcattggtcccctgcaggactccgtcgatacaagcaaagaaagcctgtgaatatgacatggcgacatcgacaacgtcagcctgatccgagctaaaaaattaattgtgcttctcatcgtcaacgtcctgcggcagtctcgtcgttgtccgagctatcaaaaccaaccctctgagctgttcagcaaccgtccgagctgttcagcgattgtccgagctgtcg

SEQ ID NO: 79260 - DNA, 527 bp, Zea Mays
ttttattaatggcttcaatagatacgagtatgtatacttaatgagacacaagtatgaatcgtttgagaagttcaaataatttcataataaggtataaaattagttgggctaaactattaagcttctacgattagattgtggaggtgaatatttgagtcataagtgtgtcggccatctaaaacaatttttttctacatttggatacacctggtatgcctcaatggaatggggtctccgagcaaaggaaccatactttgttagatatggtttggtcaatgatgagccaagctgatcattgattttctttctagggatatgctctagatattgttgtgtttacatattaaacggagttccatctaaattggtggataagacgccatgtgagacatggatcaggaaatgccctaggctacctttcgttaagacatggggttgcaatacctatgtgaaatgcttgacgattcataaactctatcccaaatctgacaagtgcttatctgtaggtatcctagcaaaaccaaaag

SEQ ID NO: 79261 - DNA, 298 bp, Zea Mays
cttgacataatttatatttagtttccacttgaaatccttccatgcatggcatgtacgaataaaaggaaaataaatcataaatcccaagaaatgatgcaaacaggatcaaacaatctcgagaagtcaatccttactcatagatttcaaagcgaccttcttcacactgagggtatgggtttcatcccttggcatgacaaatttctttgacacatcctcccataggtttgattttaccactgtaggcacttttcgccaatcctttatcctaatatcaacacgcatgcgtgctatataacca

SEQ ID NO: 79262 - DNA, 621 bp, Zea Mays
gtacgaaatatgttcattttaaaactgcaaggaaaaaagcaacatagaggaggggttcaccctgctagcccccaagggaagcttggtattgaaagcaaggccgagcctcccttgaaagctattctttattaattatgaaaatcatagtacaattaggcatgtatgcctaaggatagaagcaatgtagttgttctatgttccatgcgttgttgtagacctctccttcctcgttgtatgcctaaggatagaaaaaatgtagttgttctatgttccatgcgttgttgtagacctctccttgctcgttgcagagcttgtacatccttggcttcagcactttggcgatgatgaagggtccttcctagggggagtgagcttgtggcaccctcggttgtcttgtcgtaaccgaagtactaagtcaacctcttggaacccccggggtcggacacgccttttgttggtacttggccgaatgaaggagtgctacgtcccgagcttcctctagttggtcgagcgagtcttcacagatgatttgattgttgtgttcgttgtatgcttgtaaccttggggaaccgtattctaggtccgtgtgtaagacagcctcgggcccatagactaagaaga

SEQ ID NO: 79263 - DNA, 351 bp, Zea Mays
gctacatgaaggtaaaacaaccttctcatcatggaagtgtagttggtcattatcgaggattattcggcaatgaacttttggggtagatcgtgagatcaagaactggagataaatgcataagagatgtgaagatttagacaggttcaggctctcaatacgagataataccctatgtcatgtatgctggtggctattgcttatgatctaatgatctgccctgttggtgtgcttcgtccctccttttgtagtacaaggaggggaggttacaggaaggttatctagtcttgtaccatataaggatacgtaataggatacatatcatactaaccaagtctagctaggactcttagt

SEQ ID NO: 79264 - DNA, 865 bp, Zea Mays
gttttattttaatattgatacaggccaaaacttggttgcaaattgcaaaaaggctaatgccagacggtcgaatcatggtaaattgtggtggatcagacactgaagaatctctctcatcgccttgggttcaaaaccctacagttaaagcactttgttccgcatttcctggacaggtatggtaccattcatcagcaatacacgtatttggacttcaattactaaagacacttatttcaactgctagtttgctactagttggtgacaatttcgaagcagtgatttttgaagtatgaaagagtttgtgtttgttgtttcgtcctctttgtactgttagcatttttcctctgcactaaatacaatgcacctttattattgtgtgtgacatattactatattttaggattaattgtatacatgccactctacttttgcaaaattagatggttagttcattttttatgccatgtcgtggcatgaaaacgaactaaattttaggatagccatatcgttttttgtaaacttgcaaaaaaaaatgtcccactgaactttatgcggtagcctaacatgaactttgctaaactgtaaagatatagaagccacattctaaactcttgtagagtaagggaatttttagcctaggatgccagtttattgcgacctgttagatcagttaccttatgagaaattgggcagtatcgtgccaccatttggccctagactgttttgctaaatgaaacgttgttgaattgcaggtaagctggaagagactatcggagaaagagagtgtaaactatgttgccctgactggacctctcccagacctggacgggtggtcggcgtcggttcctagtgagctaagcacgaa

SEQ ID NO: 79265 - DNA, 1195 bp, Zea Mays
ccaaccactgaccgctcacggcgagagagagtggatcggtcgtcgccgcacagggaaggctagggctatcgtcatcaatcgtcgagctctgggctggggaaagaccgaatgcgatactcgcgcgcattggtgacctttcgaggtgggagtgttgctcggggcaccgccgattgctcgtcggagctatcaagccatcgtcgatccgcgcgttgccgtggtcgtgggtgattcactccaaatttaagtatgaagcttcccagatacttttgtcattacctccgcatcgtttatcgcgtaccagcgttaagtttaggtcatcaacacggtcaggggcatgcgtcatctagggcgctgcctccgtgcttcgtcaccggttggggcgtgcgatctcggtcgtcgatccatgggtggatggcagagattagacgctaggtaatggttcggccgatgtgtacacaaccataggattccgggcgaatggtcggattagctcccggccccgatatctcgtctaccattgattcaccattgtgtggccacaattagaattaaggtaatgattcaatgcgtgtgatcctggccgctggatggtgatctaagggttgtgataggagcactgtgtggatgtattgtgagccatacgatttagatccgagagctctcggttgcgtactgtttcacaggggcactgatctaatttggcgcgtagattacggatcgtgtggtcgacattaactcataccccttcacggcgtctgtgttactaaagaacccctacattttactggaattaattcgccatccacactggtgttgagaacttacaagttggccctagaattttacaggatgggccctgatctttttagaaatatcatgcgcagttcagatacttaataaatctctactactcttaagaagatactagtatggtgcccgtgcgttgcaacggaacacaaactattcgttaaaagcttattactcgtgcatatctatgttcttgaagcggcgtggtagactggttaccttatttaaactactgaatttccacggcataagaatctgcaaaatatcagtcattaagtttgcaaagaagtgccatttataaatatcagtcataagaacctgcgtctcccacccgagggaggtcacaaacgagccgtgactgcatctcccgcccaaggttggcctcggg

SEQ ID NO: 79266 - DNA, 375 bp, Zea Mays
ttctcgatggactaccggacttgacctatttttgggttaagttgggcggtttcggcacactatctaccttaccatgtgttttattgatggtttacatgatcacattaagtctgttgtacttttgcaacgaccctcttcttgggatactgttgggttgttggctcaattgcaggaagaaatggctaaacatgccaagaggaaagaccacaggagactagaattcactcctgtcaagacttcttttaagtcggcttatctgctactgtcaccaccacgtgtggacaagctcggtgccggttctgttgatgattaccgcactctagaaccacgtgctccttccactgaagataaatgggctgctctacgggcttatca

SEQ ID NO: 79267 - DNA, 479 bp, Zea Mays
gaatactggaaacttaactgattatgtgcaacaagctttttcaatgtccaactggtgcagggtcgtgggaacaagcaacatgcccagctagctggttggtgctgtgtagtagagtgtagagctttcgcctcagaacatacagtacagctccatcctccgtccatgcaagaaaaagctagctagcatgccagcaaccgacatatctgggaggtgtaccgaaccgatcgagcagttcgcgcgcggctttagctagctttgtgggctgtcgacggatctctcgcccatgcgtgcgtgcacgtacactgcattcggcacaagaccagggccctgcctctgccacagctagctcgtacgtgatgaagaaaagcaaggagggatggggagagcgaggttgagatctcgcagggcccggccgggatcggaaagggcgtgtgatctggtggggctcggcatgccggcgactcgcccttcgggacgac

SEQ ID NO: 79268 - DNA, 692 bp, Zea Mays
ctttgatgcagagcattgatctagtcaccatacaaaatctagaggaaatttgccccaaacatgatctgtcagactgactgaaggagttcctgatggtacagtaaccagaaagatctgttggttcagtgaaccggccgccggcgaccccgggcgtggattcacgccggtgaggtgatttgtgcgcacttaggcccggataacgcctcagggtagaaaggtcttcacctctattgagccatggtgtccgctaagccccggtcgctttgaatctaccctcgccagagttagacacctcgcggtcttgtgccacgtgcctcagcactttaaccacgccgccgtgactcatactaacctatccagtgatcaccggtgaggttgccacggttatggccaccgatcgtgtgcgccagtgcccctcttcctctccgaccgccagcgcgccaatccaaaattggaagccatcgatcttgaacactataaattaagcacactgctagctccgctagataatcacgaagccagagcacccgctcctgcctccgattagccaccatagctctccaatttctcttctccccaaatctgttttccgccaccgtgaaagagccctcaccgtggccagcttgttccaggtcggttcatactctttgatcgttcgttttagtgtccttaggctctcctaatgctgctcg

SEQ ID NO: 79269 - DNA, 368 bp, Zea Mays
gctccgacatcctgaaccattctaaattcttgtgtacttgttttcatccttctagtcaggtaaacctctaggccccctcctcatcttaggaccagagcgggtgcattccgccacccatccaaagaatttccccttcaacatttggcacgccgggtaggggttcggagcccttagcctgacccctggcttgatatgatatcccactcgtccatcagcgggctcaaccggggtgaatctgccgacatttggcgcaaggcacagaagcggcgccttaagggacttgtcgtccatctcaaacggtgcctcaacatgcgtacaaccaccatcaagcggaaggtggcgggagcctcacacttggtcgttgaggc

SEQ ID NO: 79270 - DNA, 1102 bp, Zea Mays
atatttccaaagctctgctgaaaaagaaaaaggaaaaggcttcaacagtaatgggctggtttcagcccagtcggcccagtccagaggggaaagcgcccgcgcccccgcgcgcgctggcgactttgcacacggaccctcgcgtttctatttaactgcgaacgggttcagatactattctcatgtgtcgctgacagattacagaaaggcccttcggttttcatttcttcacaggggaaagtccacgatggcggtgggcgcagggaggctccggcgagcacctgcaccggccgatttacctaaggactgatgctctacttcggtcgaaaccgaattcatgccccaaccattgattcccctaagttaattgcacaaatggtgaactaatgtggtctggccacggtgagcgcgcggatgaaccaaagatccatgcgttcccgacggtcagtggacccctagtccaattggacgggtcagcaagcatcgtagacatgtgataatgcttaaacgagggagagggagggttggactgaccggagtatggctggccgcggtgaggttgggcttcgggtggcggagaacagatttggggcgaacgtgaaattggagagctgtggggagtaatcggagctacgcgtgggttctctggatgcacaattacctagcggcactggccgaggctccaatttataggcagcttcgacggtggctgggaattttaacggcgatgtgtggcggtcgaagataaggaagaggtctggcgttgtggttacgtgtccccagtcgtggcgagctcatcgacgatgatgggacggcagtagggaatcacgacggtgccgtggaaaggctcggacatgcggcgggcacagagatggcatgacgacggcgagcggccttatctacggcggtgagcaaaagggggaaagtattacggctgaccggggtggcttccagctcgacggcgacgacgatctttttttccacgcagcgttatccggttgccagcgaacgttaatcttaacgcagcggcgcgaatccttgcgcgggggagggtcaccggtggcaagcacgcgatgctggcatcctgatccactcgagctactgt

SEQ ID NO: 79271 - DNA, 337 bp, Zea Mays
gcatctgaagattttttggtactgtaccatggccaccaccttcagtcgttctgacagagcattttgcagcgcgatttgcttcagatttaccaactctctgcatcaaagttgtagtcctataatccagctacaaatcgactataaagacttggctcatttgcccactcctttgagcttgaatcgagtccaaagttgatcaaatctcactgtcagtaaaaattcaggctataggggtgactgacagcagtacttggagtccatttaactccatcttttgtacaacacttatgcctgatgacttaaccaaagttatactcctttagtagctctataattt

SEQ ID NO: 79272 - DNA, 853 bp, Zea Mays
gatgtattgatatttggtgtgtttgcttccaagcagcataaggagaggagatggttgagcgccatgggcaggactataactggaggacccaaccaatcaaccttgaggcatcatatgctagcacgggaggacaagccatggatggtgagagtattttatttcaatttctaagttatgctaatatgcttgtgattgtactgaatccattgttcactcatgtaggttgagtatatttgattctacgattgactctagggagatgagacgtcgaggacgaaggtctgtatcatcgtcctagtaggtgtctcattctcgctcctccacctaggacatggagattgccaagatgtaggaagttataaggcagcaggcagagtatcaaagccagtagatgaagtatcataggcagcaagctaagcaccaaaggaagaaggatgagtactatactaacctctaggcctagtagcaggttttcctctcggcaagttgcagtaatatgttattcatacaactacaagcttgtttggttttttgcgcctcaaaagttacttgcatctaatttgtagcaagtggcacaacaaatgggcatctagatgccaagctttgggatgccacctccaccacttgcaccaccgcctctacctccgccatgtttacctttggatcgtctagatcaggtattcgttggttcatatgtacatatatgtgtgtgtaatggaaatgaagaacacaatgttcaatatctaggcttttgtgttacaggacttccagacacatcctacttcggttgcagtacctagagaggcatctagctaagacgatgccacgacttcatgattgaacaaccttttcg

SEQ ID NO: 79273 - DNA, 548 bp, Zea Mays
ccttctcacatagtccgagaaaaccccaaaccactggcccacccatacacagcgacaccacaaccctgttagaggggcaccgcaaccctgttagaggggctggccacagaccctattttagggtttagcgaggggatttttttgtaccctagggttccccagcggcaccaacacggacacactgaggttcgatctatggctagctaggagcggtcaagctgtgctaactggcccgaccaaaggtctaagatgagtcacaaatcctgaggtatcgaagatttatcactccctagtcctcatttgagaactgtagcccagcacaagggtgttgctcccccttgatcacgcaaggaccatgtgctctctatgggttggttctttgccactccggcatggtgtgctcccacaatcatgtacgcattgagttgggtcacccataagctttttggtgatcattgaactcctgatcaccaccaaaccatttaggtgatgccgatcatcaagagtaacaaacgcaagctctcacccgacattgaacaatgcttgca

SEQ ID NO: 79274 - DNA, 520 bp, Zea Mays
gtcaggttctgttgagtcggctcaaggagtggtttagtgatgtcttaagtacaacttcatcttccatcattccttaacgccatctttcatcatgcgttggtgcgcgtcttgtacgacatagcgccatgtccccctcgagtgtatgggtcactgtagagatcccgatgctaaggtttctacggtcggggtcgtccggtcccatgggtcagcagggatacatatccgtcgtcatgtttgacaaagaccccacgatgccacgtgtcgacgttgcttgacagtactaggccggctcttcctgggattcgactgtcgtcttgctaggttgctcgtaggacaggttggtcggctccctcgcctcgctaggttgctcggtgcgcagattagtcggtagccccgcctcgctggcttgctcgacggatatttgttcggtgggcatgtcgacttggtgggccatccctggtggccttttgggccttctcgctgaacttctttgtaggaaacgggtgacgcctaagagggg

SEQ ID NO: 79275 - DNA, 394 bp, Zea Mays
ggataacatcgtttcctatttggtacggccagaatgttagaactaatcttgttatttaggtgttaatgttttagcaagtgtgttaggtactaaccgagctgccaagtggtgtggcatgctggtggaacagtgattcgtgtgtgtgcgtccgctggcatagcagatgattgagcggtttgtgtggaggagctggtcatgcggatcatagttgcatgaatggacattggatcaggccgagtgcatctggtgtctgtctgagtacagggagagagcttacaagaaaatttcaggccttaagataagaaggcaaccaacatgaggagaggctggaaacaagcgtgtgcgtgttgtgcggataaggctgcacgtggagagcagtaaatcgaattttttt

SEQ ID NO: 79276 - DNA, 305 bp, Zea Mays
ccttcaaaccaaatacagctgtgtgaactgaagatttcaccattgagtgctcaggaattgagaaattagggatcaggacaggttgaaggcttgcttctctgtagagttcagattcatgcactagaggaaagattaggatgggatacaggctgagtgccaaatcatcattcgaatttgagaaagcgttgcgaaactaaatttttgagagggaataagggggaacaagcctagagccactctggttgctccaaaagaactatcgcgtctatatacctaccggcgacaaagggggagaagccgatgcg

SEQ ID NO: 79277 - DNA, 461 bp, Zea Mays
tccgggtgtgacatgttcagtcgtccatagcagtaagggcacaccaaaagctggcgttcaaattttttggaccatttcggattgaacagagagttggcttggttgcgtacaagttgcggcttccagccacatccaagattcacccagtgatccatgtttctcagttgaagcgcgcagtcggttcggggtttgtggcttcgccttcattacctactagggattattgttttagtgttcctcttaaaattctatggcgacgaactgttactcgtggtgtaaactctggtgtacaggtcctggtgcagtggtccttcatgccaccagccctagcgacttgggaggatgagcagcagctacgtattcagtttcctaatgccgctgcttgggggcaatcagctattttagcagctaaggaatgtgggcatcactgaagggcagcaaggcattggccgggacaagtc

SEQ ID NO: 79278 - DNA, 627 bp, Zea Mays
cgtttctccttccctgtcgaattgttgatacgcttatccccttgtggccttcgatctctattggagttccattatctaatctcctccactgtagctgctgccttcgctagcttctcatataattctctctgggaagtgggaatgcaatgtgttggttgatgaaaataccggccggtagtgtagtatcaggaccatgatagataaattatgcttgcatcagaaaaatatgtactactatctgtcactaattagtttgggtttcagttcagatttttattttcagtgcatgatgcagatgcgttctaggttcagtcgatgaattgctaacttgcgccctgccctgccctagcagtagacgaagaagaaagacgacctggtcagccggccagagaatgaatgcggtgtggtgtataccagtacgaccatgcggcgattcgtcagctgctgccatggacgccactgctaccggcagagcacgaggtgcctatccaatgcaagtacgcccgccccggccacattccgcgaaactgccatcaaattaaatggtatcgtactactagacagcactattattgttttttaggcacttctttttcaggcatggcctttcgatgttttcaagctctg

SEQ ID NO: 79279 - DNA, 1102 bp, Zea Mays
aggttttgttagggttttctcaaatttgatcaaaacaaaatgagaccagatcacgaccacaaactgctcaaaccagatgtttgcagtgatccaaagactgcatcccaccccattatagtccccaaatcaatcctccactcaagaaaccaaagattctccaaaaatccaaagagagggattgagaaaagagaaagtgaatagaaaacttcagcgagatcaaacttgacacaaaactgaagcaacgctggaccgtatgtggttacgaccacacttccttacaatatcaccagtacatagatgcggagttcagaacatctgtggataactagagagtgaaaaactagggttttctaaaacaagtgcctaatgagatagccaaaagagatggctgtaacaacatccctcccacctgtttatagggggttatttcactagtctaaactaccattagatacatagagctcatccacttaaccggggcaaaatggaccaacacctggaatatgcatctaacaaccacgtggtcttcacgaagttgcttcgtctcgacgcaacctttgggatgacgccacgtgccgctctgattctcgctggaaccacaccaccaagttttgaggcccaaactcggcgaaaccaacgaaccgtagagttgggtggttttaaggctcaaccactgaaaccaccgtgagtagtgcactccatacgtgtcacccacgtactggacacgtgtttcgctggtccgcgaccacgtcggcaacacgatctgctcctccacttcctcgcacaagtatgtgtcccaagtgttagccaccatagctagtcacccagcttctccagtccctcgatcaagacccaacgctcgtccttcgctgctatcggctcatcggcatgaacccacactatcttctccttcatcgtcgaccaccatccttggacaacacacatatacaccacaatccgagagatggttgcacaacacaagctcgtactctggttagaccaagactcacaccaaaatgactatccatgttgacaatcactcatcatcaacccaaaccacaagggacaagtcaaccttgtgttcgcatcgaggatagtggat

SEQ ID NO: 79280 - DNA, 971 bp, Zea Mays
gggatgctaagtgatacatagctgccctacaccaccagatattgtatacatccaacaaggaattagatttcattttaaagaactgtttgaactttataaagtttttttctatgcactcacttctttatagttcatccttacgttgtatactccctgttgaggtaagatttagggcaacgactgtggtgcaagaaactcctatttacaagcgtgcaagcaacaatccttgaaccttggattcatgacgtacggtagtttatactttaacacataaaccccccaccagatattgatgtttccaaaataaccccctaaaaatcctttgaccgatggaagtcttctcagatcggattgacctgacgtccaacgagacccctaaaaacccttcccccgttccgttcccagattgtttggaagaatattaatttctgcggcagggtgaacatcaattccatgcgctctcttcatgcctgatctgcccgaggcgacgcaaggctacggtgagcagcaggatcccaccgcccagtctatgcataatttgtttttgtctttgcccgccagcgccgccatgcaagaattcaatgcacaggccctactcgaggccacgcaagactccagcgagaagctcctacccgatgcaatgcaacgcgactgttagcccttgcacgacgacagcgttaaacatgtagatcagatgactatgacaggaccaccgcagtggcattgcatcaccgctcatagagccatagcagggcgatcagagattgcacacgaattcacggattagcccgacgttgatgacatgttccctccgcctttttttgccgcacgacgtcatttctatagcatgtggcacattatgaaaaaattgcctgagaaaattgatgcgcgtcttctaaaggacaacgagtttagaaaaatggtaaactcatgtgtatggggatcagaaaaccaaatggagtttgagagca

SEQ ID NO: 79281 - DNA, 387 bp, Zea Mays
tatgatgactttcacctaatgggcaatactaaacaaagtctatttatgaggatttcttcctaggatatgctcagtttggaacttatgagaggatgtggagaacttcggtacaacctaaatgtcatttctttctctgcttagtggcccataaccgtgatggccgatagattgcctcacacgatgtgggctacctcatctagagtgatgccctctttgtaactagcaagatgagactatcaaacaccttctaccctcttgtgcctttgttaagcaattttgctaccacattgtaatgtaggttagccttcaatccttcccatcacaacctttagatgcgccttggacagttagtggggaaaagatattggagcaaaaagtggtttgata

SEQ ID NO: 79282 - DNA, 431 bp, Zea Mays
caaacattagctttataattaaatatgatgtgatagtggtcgaagttgtatctctaatacctaatgagaatataatggagggaatatgtgtttttatttcttcatccagagactagcacctaacggtgtgtttatgcaatatagtttcataatttcacatttcaattagtatttaccttattggtcgaccttcttcataactctgtaggtattactgtcaacaacacagctcgtgcaattcgtaactttgaaggtattcatccaaagcaggtatgtgtattgtcgatgttccacgtatttcaaattctctctcccataaacctgtggttccatgtatgtacaaatatgcaatgaggctgcatgctcaccactaccactgcaattatattttctctgttctgtattgtaaaatcatactgatctggttggtg

SEQ ID NO: 79283 - DNA, 573 bp, Zea Mays
ggaagatatgttgagggcttgtgctcttaaacatggtggcagttgggacaatagtctaccctacgcagagttctcctataataacaattattaggcaagtttaaagatgtccttgtttgaggcattatacgggagaaagtgtagaaccccattgtattgggatcagactatgaaagatagttctttgggctagaaattatccaagaagcagaggaataggttcggataatcagagagaacctaaggacagcgcaatcaaggcagaaaagttctgcagccagccgaagaagacagttagagtttgagaagggtgatcatgtatacctaaaggtttcaccaatcacggctatgcggagattcaaggttaaaggaaagttgtcaccttgctttattggaccctttaaaatcctaaagcgagtgggcaagtggcctctcggttggagttacccggtcatctgtctgatgtgcatgacgtgtttcatgtatcccagttgaagaaatgcctcagagttccagaagagcaactaccaatggaagaacttagtgtgcagggtgatctaacctatacggagt

SEQ ID NO: 79284 - DNA, 911 bp, Zea Mays
gaaaccgggcagagagcgctaggcttccaccagagcaaattcaaggctacaccgttaaccctaccccgattagtggacagaaagcttcactgatcggctctgatggtggccgtggcctcggtgcactgagaagatcactggaagcccttcaatttctcgccgtcgttcatttaccgccaaagatccacccttggcgtggacaaaagctcctgcgccaccctattctgtaagactcagtcctcttcattcaactttattccctaatgcgtagcgcctgatagattggaatttggagcacttgaagaccaggtcgcggctctctggcggggtgggtgctggggctagcatgggtgccaccgctatgctatgtctaggggaggaagacaaatgggtaccgttgattcttggagtagcggttgtgattcgatatgcgggacgattcggtctgaatgatcagaaccgtcggatccaaatcgcgcgactgtgattggaagccaacttaatggtcagggactgatcgaggatcgttggtcacaaatccggtggtctggtgagcatgttgatttgggttgtgtgcattgttgttcccgaaacgggcatgccagattagacccgagatacccccattaccaggttccgatctaaccgttgatcctagatcaagcgggtcctattcaatctggggtgctttaaacctatgtcattgatcttcgatctaatggacattgtcgcgtaccggttcggttgaagtgcgatctaatctggcgcgtaggagtttgatcggacgaccatgatccatccaaaccccttcggccgtgcaaacattcaaaagaggccgtaggtttagttagaataaacccgtcatccacgtgcggttgaaaacagttacaaataggtccccagaatttgca

SEQ ID NO: 79285 - DNA, 517 bp, Zea Mays
aatttcttcaacttctgtctcgaatcattaacccttgttgtgtaaccgttcacgaggattaactttgtacattacccacgtggcttccagctttgtacatggatatggtatgtagtacacctggtcaacttggtgagcaagaacaaatttgctacatgtatttgttttgagctcatgtttgacttctaccatgccaaattggttttctatagtcccttgattaggatcaaaccaatcacatttgaaaacacgaccttaagatttttgataccagcaaagtcatacttgagtatgtcattaataactccataataattcatctctcttcaacgatcatcgactgccctgcatacaactccagtatttcttgtcgccgcaaatggacgagtagactcaaatttggccgaacgaaaacaaaaccccttaatgtcgtaacgaccgtaacttctgacttttacgattgcgtaagacatctgaagcaagtcctcgtctaaatttggaattttatcacactgtc

SEQ ID NO: 79286 - DNA, 417 bp, Zea Mays
gtgatttaccaggaggaatgacggaacgagaagagctaagttacctgaagattagaaaagaatgaaggcaatcccaagtcatgagaagccatgttgtagctcgacgaaggaaggtcaactggaacaatctgaagagcatcgtcgggggttgatttagctccactagcagatatcagaattctggcatccggctcgccgacctctaaggtgactccctcgctcaaagctaaagaagtatgcatcgctatcactccatcagatcatggtggagacgacccgacgtggacgtccatggaggtgtgggaaggagagctcgctcggacaccctcaggggctgggtggcagcttgcactacccatcggagccagatcactaccagcaacaccctcgggggctgggttgcagcttgcgctaccc

SEQ ID NO: 79287 - DNA, 1161 bp, Zea Mays
tggggatgagagaagtttggttctgagctatggtccttgtcaggtacttcacttatcaaagctactgcacatatgctgatttcctttttttctgaaattttcttattcattgcagtttccaaccctaggattcattgttgagcgtttctgggagattcaagctcatgaacctgaagagttctggacaataaattgtactcatacttcagatgaaggcactgcatcttttggttggatgtaagatgacatttagaagttcttctgtcattttcgtaatggagggcatatgaccttttcttgttcttggcagacgtggtcatttgtttgattattcatgtgctattagtatctatgaaatgtgtgtttcagaaccaatggcaacagtgagtgctttctgatctatttggttaacatcaatagtttgaaattaaaatgtctttgctaacaatggatggatctgtagtaacacttcttatttgttttgtattgttcattgcaggtacaaaatgttaggaatcaagagaagctaaaataccccccatatccactaagtacagtggagcttcagaaacgtgcttctaggtactttagaatgagttcagagcacacaatgaaggtctaagaatatcttgtcttatagttttaatttcccttccagttccactatctaataatggacatacctcagtagcttcgttgtttgcttgttttttctttggtggtctcttccctttcaacaccaggtggctgaagaactttatcaagctggattcattagttatccgaggacagaaactgataacttctccccaaacactgacctgcatgttagtattggattttacttgtttgacttgtttcaaattctttctttttgttttcttgatgattttgcttacagttaacagtttcttgtttacacctataactttgcttgacaattgacatcgttaaacaatacaccaatactagtttctttgaaaagtgataaggaatatgttctcatacagttggtccacagcacacgcaagtttttttttttgacttttttcagtcgcagcaacatgtttctcctagtcgctcccatcacattaagacaatggattattagtcattcattgataaaatcccactgagaaaattgtaaaaatgaactccgtc

SEQ ID NO: 79288 - DNA, 301 bp, Zea Mays
aatctgtctatcctcacctaacatcaaacaaacttttaacctacatcatgtagactatctcatcttgacaaaattctatcctacctttggatattcaccttatacgactaattaccccaatatggacataaaacaaagattaagccctgctaaagaatcttcagatcataaccagctactagcctattcattatgcttaccaaatacttttcattgcaaaactatcctaccatatgcttctaactctcatggtcaataccgggaagggaagattatcaggcaacagcaaacagaaatgaat

SEQ ID NO: 79289 - DNA, 640 bp, Zea Mays
caggggctcatttataatactacagaggtcgaaggggtttcggacgtcctcaaccgttggatcgaacccaatgactcagattagatcgtgcagggttatgcaccggcatgcgctcactgcccttggatcaaggatcgatggcccaaaaccgtccacgtcgcagggcaagcaagggcactctgatctatgatgtacggtctagattttatgatagtttgattcgctccacaccaatggatagaagatctacgactatcattcaatgcagcaaataggtatgcggggttttaatctcatccgttggttatacatccgacgacaataccacccttcccccctcatcaccctcaaccctgctctcctaaccggcagcgttcatggcccgagcggcggcggccatggccgacaaccttgcgcaggtgcgccggtacacgaaacatataaacgatcagttctacttcacgaacagggcacgacgaacgacaacagcggatagttacccgctattggcccacgtgaacgcccaacgatggtggatggtggttgggtgatttcccccaagtctggcgagcgatttctcttcgtccagtcgtcgtccgagcgtttggtcgccttgaccatgagcaggagaccccggcga

SEQ ID NO: 79290 - DNA, 343 bp, Zea Mays
ttggtctttgtcaggtaggttctgtatttggcaaaagtccatagcagaaggatggcctttgtagtaatgtaatcccattagttttatccaagatcccttgtaaggaaggaacaaccatttgttagaccagtgtaccatcatagggctgaacatttccaaccaatccatacctatgatcaagtcatacgtctgcaatggcaacaccggtaggttggatttgaattcatagcctgaaagagaccacactgctcctagtagctcctgagaacaattcatcactgacccattagctactttaactgacaacttctgaggcatctaagagagtcctgttacatgagca

SEQ ID NO: 79291 - DNA, 533 bp, Zea Mays
aacagcatacaaaattctgcaagtgtttttatacatagtctaatcatcccccttcaggaatctctcagcagcttcgtttaaaagtctattcacagcttcatcaattgttgcatttgctattctgatttcatcgagagtactctttagggtcggatcagcgtcagggttgtatggctctggaggaagagacaatttagctacaccaaaattataagcttttgtcatatacgaagctaatatacttacgaagctaaaatatgacaaacatacatatacatcttccgtgctcagcggcctcttcaacttttcttgcttcttccgaggcaagatgagactcttcttcatttcgcctgatagcttcgtctgctatttctcgatcgtcgttcatccacacttcagaatagaatttcccactaagggcagtagcttcggctaaaggctctttgatgtcagtcactgaaactgagaagtctagctgaattacagcctgagcatgttcacagccagctttttctagcagtgatacagccccc

SEQ ID NO: 79292 - DNA, 466 bp, Zea Mays
gtcctattgaaattgcttgggcaggctgtacgtgtgggcgtgaatatttggggatccttcttcggactgggaaaggttacaccagaggaggctccataaagttctggaatgagtgggagggcgggggtcagtgcctttgtggaaatgcgaatatatctttccgcgtgtaaatttttttccactctttcttcctaaaactatggcgcactgaagtagtcgctgttgcctgtagcccgtaggtgctgggtaaatggtcatgtattcgatttgggcgatcgacttaaagcctggttgaccagctgaccttatgcagtggctttgtactttcccagtcgccaattcgccatcggtaagatggtccgtgtctcgtgtttattgcaggacaatgtaagcacatgtcaggaccagtcatgcgagttgaacttgaatcttgttgtgtcagctgtgagctgtcactgtaggaatt

SEQ ID NO: 79293 - DNA, 482 bp, Zea Mays
gccatcaagaatttcatcctttggccttaaagggatgtcgaattgtttgatccaccaccgccgtcgacatcacatctccaaccatctccgcctcctcaaactgtagttactattgtacatccatcatcacctcctcaaacttcatatgttgctcctcatcctctttctgacccaccgtctctaccacaagaatcgccattcagggctccaccaccttctcctcctcatcctcttggagacccattgtctacaccagtagcaagggacccaccttctccacagacatcaagggatccatggccatcaaagaaatctaaatttcctatagcaaaattggtgtccacgttcgagaaaaataagagtaaaactactactgctggcacaactcgatttttgaaagggattgcacgggacctcatgtcgcatactattgatttggccgagcatgaggagtctgcaaaaaaggctgaggcaatgtccgc

SEQ ID NO: 79294 - DNA, 637 bp, Zea Mays
aaaagcgcgattaagcgcccgcctaatcacgattagacgctaagcggcatgttagcgctgcgcttaggccctgggcggtggtttccgcggtgggcgcgtgtaggcggcgcatgatttgcgctatgcgcgttgaggcggaaacgaggcgtgtggaagcggggttcgacgcgcagggaaaagatgagcacggaagctgctgcgcgggaatagaaagtgaataggagggaaagaggcgggaactgttgttgcccgggagagagtgaaacaggttgggagctgcagctgctgttgcatgggagaggaggaaaatagggtcgccgccagaccggtcctcttccccagccgtccagggccgccaccatcggtgtcctcttccccttctggtcaagtcgtccaggccgccggggtcatcgcctctctgctccttttccctagctatccaggcgtgctctccctctccctcctttgcttttgctctgctcctccatctcttctgttctatacttttattcattattccaggtaagtacccctaattcctagctaaaacttttttttctgtgcaaatatatattatattgtatattcctacaaacgcttaagcacgattaatctacgcctaagctctctaggcgct

SEQ ID NO: 79295 - DNA, 772 bp, Zea Mays
cttgaaaaaaagttagccctcacaatctcattcacacacacagcaacaccagagggagccacacagtcacagaatcgatatatgggcataacacaagaattagccattggcacacactgaaataacatgatttagaagtacacaagtatgtcaactaattgagtcggtggaaggcataactgttttgtcatataccaatctcttttatatgcataggttgtatttagttgtctgcttcttttatacaatgcacagtggagaatctagtttcttcgagtaaacacaggtcgaccaaaggacgtctggacaacaaatcaaacaagagcacacaccaattagacgagtagggcgcggaggaatatgtccctatcaaaaacggacctgtaaccacgaaggattggacacgatctaggtcacgggcggcgtcagcagcaactcagacaagcccattggtacggctgtcgacagcagcaaaagcccatgtcccaatcctataccttcatctacagcaagagcagcatatcttgtgtgcatactacttcatctagcagcagcaaatggattgttttggacttggtccagacgtgatagagcaacagtctccgactcttcgtgctgtgctataataaagaaagtatgcaataataatgcaaggatcaggtcaatctttacctttgcttctacactttgttctcaggtaagtcttctcgcgacaaaaataccacctcagtagtttgtcaggtccgatccatagatcgtagccttgcattgg

SEQ ID NO: 79296 - DNA, 728 bp, Zea Mays
acggaggccaacttggtacctgaacgaacgaactgacatcagcgcagcagctagcagttgcgacagggaattgagcgaagaaggcagccatgtgtttcctgttcatgccacagaaagaaagaaagaaaggagaaaaaaaaaagcaatgatcagtgagtgatggacaaggatgaccccgggccagctgctcagctcagccaagtgatggtagtggaataactaaagaaagcgtcaccaccagatgagtggacaaacgaaggaacgagatgccaaacgaaattgtgcctgaaaacacgcgcctcctagatctgcatatctgaccgaaaacgacgcacgttcggtcctttgtcccctctgcactgcagtctagctgcagatatgggaggaaccctagctaggtgtgcctctccttttctatccatcctcctgcttgctgatcatcaagttgactcggcagccctatccaaagcgcgcgtcctggttctccgacgacgtcatcgcctccacacttgcacaggctagtacagccacaggtggtcactcagcttccagtgcacttgtgacagcaacagtctcccactaaatcaaagcaaagcaagaaaaaggaaggaagaggaaactggtgtctgatcagacagagttgggagggagaaagaaccaacagccatgcatgacgcatctacagtacatggctcgattattggatcccaaagcgatagcaccggccg

SEQ ID NO: 79297 - DNA, 573 bp, Zea Mays
accttcagactattgtatgcaaggctatccgcaagatcgtccttcgtcatggcacagaggccagcttcaagcttcggaaaccccatacttctggccatttcctggcagacgaataattctttgttgtttgggaggcaatacaaaaagtcatcttcatctgtaccattaaacactaaggcccctttcgggtacttcagttctcgggcatagtgtttagcttcaaaaatttcttcttcagataatctttttcccgaagcatgacgaataatataatcaaggtcttcggaaggcgcttcgggagcaggagcggcaaatttttcaggaaaaatctgttctatagcttcttcattcgctgccttttctccaatttccgagggtttctccttggcaggctctgaaggcccagcttcggcgctagcctggctcattgtagcttcggcttcagtcagttttgtttcggtttcaatttgcactttcgaagccttggcaattttccctggagtagagcttgaagcttttatcgtctccaacacatctagtacactggccattctttttctcttgggggttgct

SEQ ID NO: 79298 - DNA, 561 bp, Zea Mays
taacaaacagaggcaaaaacatgtgtgtaaatcaactatgttttcaattttacatttttgagtattacaaatcctaccccccccccttaaaaagaatcccgtcctcgagatttaggaaggactagagaaaagatggagaaaatctatgcgaaactcttcttctctttcccacattgcttcatcctctccatggtgactccattgcactttgcacatctttatcaccttatttcttgtaactcgagtcaaagtatccaaaatcttgatcggttactccatgtaagtcaaatcaccctgaacactgagctcttccattggtaattgttcctcagggacacggagacacttcttcggttgagacacttagaatacattgtgcacatcagatagattatcaggtacctcgagttgataagccatctctccaacttgcctaaaaactctgaagggtccaataaagcgaggggacaatttgcccttaactttaaatctcctcattccacgaagtggtgacaccttgaggtacacatgatttctttcctcaaattccagtggtcttct

SEQ ID NO: 79299 - DNA, 538 bp, Zea Mays
ggtctcgcaaaagacaagattttgctatctttggttgaaaggctgaaattcagcgaagctaagctatctgctcaagtagaagcgcacaaagctgaagtgcaagagttagaaaagaaagttgccgaagcaactgaaaattttaatgtggagatgacaaaacatgaaatatgtgaaatcgaacaattaagggcatagagaaatgttgacaagctttgtgcagctaaagaaaaatgctacaatgtagttatggaatgcgctaagaatttgaagaacatcttttccaaagttggtgcactttattcagagcagaaattcatctgcggtgaccccgatggagttatccaatggattaacggtgaggtcggagcctttgaagagatttttagtgacataggggatttttgtgcttttgccggtgcccgtggggtcgtgtcaattctgaaaaaggtcggctgtgatcatgccaaggcttttgctcagtcagaatttgccttctcatcgaacgatattaaaaatccttcggctgaagctactatac

SEQ ID NO: 79300 - DNA, 432 bp, Zea Mays
agttcccagatgtgttcccaaaggacttaccaggcatgccacccgagcgaaaagttgagtttgccatagagcttcttcctggaaccgccgccatctttaagagagcttacagagtatctggaccagagttagttgaactcaagaagcagattgatgagctgtcagagaaaagatacatccggccaagcacctcggcttgggccgcccctgtcctattcatggagaataaagatggcaccagaaggatgtgtatcgattatcgagctctgaatgaggtcacgatcaagaacaagtaccccttgcccagaataaaagatctattcgaccagttgagaggagccagcgtgttctccaagatagatctgaggtcaggttaccaccagctcaggattcgaccttcagacattctgaagacgacattcattaccatgt

SEQ ID NO: 79301 - DNA, 917 bp, Zea Mays
gcaggaattagccctcgtggcgaggtcaatcgtgcagttcatggttgataaccagaggagaagtggtgctgcgattgcggggttctagtcgtgttgattggaagccggatcgtctgtgtgacatctccaccaaatcgatagttatcttcacctgacggaagatcgggcacccccgttcctatcaagtgcctttgagaatgaagtctttttattgatgatgtatttttctgattaccgaatacaatgctgccccgatatcttttgaaatctagctaggggtaaaactttctgagatgctctatattccatgaattccctatcttcgtgccatccatttgagtaagtcgatatgatcctggccgagtgacttctgctaccatgaatggcccttcccatagtggcgacaatttgtgtcgtccttcccccgttggaattcggcgaaggaccaaatctcccactgcgaaggatcgaggtcgtatggccttatcatgataacgcctcatggtctgctggtacctagctgactgaattactgtattcaatcgtttttcttccaatatatcaatatccaccagtctagtagcttctgcctcagctatgttttcgaagatcagccttggtgacccaaacctgagatcggcaggtagcactgcctccgaaccatagaccatgaagaagggagtgtttccatgcaaagctcggctaggctgagttcttaggctccaaaccacatacgacaactctccgatccactttcctgcgaacttctcattcttgtcgaagactttcttcctgagtgcttccaatatcattccattagccctttctacctaaccgttggctcttgggtgcgctactgacacatatttgatctggatgctcctttgctcgcagaaatcaaagaattccgagctagt

SEQ ID NO: 79302 - DNA, 630 bp, Zea Mays
gtgcttccgtgctcttatggtgagggcgcctccgtcgctttcttccacgcttggaaggggaggcttgatcctaaaaagaggcccttccctgaacagaggcccctgccgacataggggaggtgtgcactaccctatcctgtccagctgacaggggggtaattctcttccacacttgtttacgtttctccatcacttgtggctgaggcatgaccttgatgcgctgccaggaaggctctttatgcgtagcccgccacttgagacgttgccacaccggaacacgaaccggcagagcaacttgcatgggtgagtccaccggactaggtacaactggacagatagcaacccggtgaccagggagcctgcatatgatacagcgcgtggcctggcggcattgggatgcacgatgggttgtggcggcgaggcagttgaagcatctacctcggaggtccaaagggacttgacgacctgccacccatcatcactcgagcggacgttgctcgaggccttccactggcgacgccaggagggaatggaggccttgaccgcaatcccgggcgacttcggaagctcccgcaccgaacccgccggggagcgtccactgccgtcgtcctcaggagcgcgtccttgaaa

SEQ ID NO: 79303 - DNA, 547 bp, Zea Mays
cggtagtgctaatattgccttctatgttagaaatgaaatatctggagtggctcaagaagcagaggcacctcctccagtagtgctgccagcaacagatgaagccttaacggtagaatcatctcctacagacttaggcatgatcttttctatagcttctacatgaggcatgagcatggcgttagtccacctctacagaaaaggaattggttcagaccaactttagactttagagttttagttcaacttcaacactggaaaagagaggagtgcagggcaagatttcatgcaacgtcgaaagatagaacataatggcatagggactcaccgtcggtggagttgctcattgtcgaggaggagaagtgtagaacagggacacatggcatttgttgccgagaagaactactatagaacacactgctagggaacacaccaccaaggagaacacataggctaagtgtgtggtggctaatgatttgtttatattccaaaccctaatggtctagaattaagggcttgtttggatgcatatgaattggagggaattgag

SEQ ID NO: 79304 - DNA, 534 bp, Zea Mays
ggcgcgccagattgaccccaacacactttttggcgactccactaggggtagggcatttggttccattaaatcggcccctaatgtccgcttccaaagaccactccaatgtttcccccaacaatatcaccgagccaaatatggagactctatcggctaaagatcagcaagaattagaaagtcatccatatacgggacaataacctggcatcactctgacctgctgcaggtacccccaatgtaagtaacacgaacggcatccaaactcttcgatcttacatagatgaacaacaggaacagatgcaataaatagtagagggtgtacaataagattataggaggctagcaagtgtttatgataaatatgccattactaattttccatcgcacgatgttgaaactaaagaaaacccacaagatccatcaactgcaaatgggcatgcccaatctaggcaactttatgggatgccaatgaactctaacaccgaatagcgacatcctccaccacctatatgggaacaacacgtgcccctgcgc

SEQ ID NO: 79305 - DNA, 351 bp, Zea Mays
agacttgatgtgtggttaaccctaggttagagtgcttaaccctagatttgggcttatggatacaagggaagcccaaacatgtgaaaacttcaaaagatatgagaaatgatcataggatgtcacatttaatggactttgatagcaccaaaaccctaaatatgtcaaaaccctaaaaagacctctggaaaacccaaaattggaaccctagggggctaggtgtaaaatttgtacacttttggacccaagtgcaaataccaaggaagtacaacatcacaaactatgtgtttctcacatttgaggatttgcaagccaaatgatgaagtttggacttatttgcaaaaaggacacccc

SEQ ID NO: 79306 - DNA, 413 bp, Zea Mays
aagtagttcatggggaagggagatgaattatccaactatctggacccttgattttgatagtgtgttaagtttgagtacattatgtttggtgaatttagtgggataatgagtatggggtgatttggttgtgtgacttttgcaaagtttaaactattggattatatagtggtaagagcataactctattctattatatataaatatatgtaactttctatctttaacgtatacaactttatatctaactttctatctttaacgtacataccattctatatttaacgcaagttttttattattattattttcccggccggtccccccctcccctcatcacctgtgcttccgcgaaacaacgctccgaattcaacagtgcctaaattaagtgacacaaccctaaactttcatatgac

SEQ ID NO: 79307 - DNA, 352 bp, Zea Mays
ttctaggatttcttttaaattctaaatttccacttgggaatttaatatatttcttgtcacattacttttatattgccacataatgcacacaaaataaagaaccaacatgatgcacattttttgtggtaagtcttttattaattattattttgttgaatatggtgttcacatgtgatgataagtaggttcaacatacacataaaatataggaaaataacttttctcctcttttattatctattacaaattaggtattacaaatcctaccccccttaaaaagaatctcgtcctcgagatttaagaaggtttagggaaaagatggggaaaatctatgtgaagctcttcttctctt

SEQ ID NO: 79308 - DNA, 486 bp, Zea Mays
atccaagtcatgatgaagactgatggacatcaatgaaaactatcttgctttgtaaagaaatgtcaagcctatcaaaagctaagatggaaattcatgattataatggagaccatgtggcgtagaacaaaggtgtgtcactccatgaactattgtattgcatttttgtatctaggctcttacatgctagtgtgtgcatgtatatgcaatatcttaagtcacaccataaggttgcacttgttgtgacgattaaagaatctctagatatttgattaatacctcttgtggtgatgtcataagttagttttaagtcatcttagtgaggtatgactcaaacttgctaacttctcaagaatcttggtttaaaatattgcatatcatgtctattagtataccttttgattatgagcaattccttcaattggtacgatttcacgttttcatactttatttgtaccaaggttcaaattgtagaacttaatcccctgg

SEQ ID NO: 79309 - DNA, 606 bp, Zea Mays
agcgagcttgtaccggccaagatacgcaatgaccggtgctcataagtggttgacacctaattcaacctataataatcatttccccataaccaatttcaaggttctagcccctaatctctctgcccacggtggtcgtgtgatcaacggacaactcgacacgtttccggtgatcctatgagttctagttcaattggccgggtcgagaagcatcacaagcacacaaggatgctaaaacaagagcgagaaaagcatgatcggacctgtggatcgctgaccgcgacgagctcacacacgcggtgtttttgaccgatttgggggaaatcccaaattggggagctctggtggatgatctgaggcacgggttggtgtattggatgcttgactacctagcagagccgatggcacactcaatttataggatccgggggcggtggctcatgaatttggattggcatgctggcggccggagagaaggaaagttactggtgcaggtgatactgtggccttcaccgtggcaagcttagagtccatttaactccatctttttgcaacacttatgcctgatgacttaaccaaagttatactcctttagtagctctataattt

SEQ ID NO: 79310 - DNA, 339 bp, Zea Mays
gtgtcactgttttccccaattcatctatctgtctgctacacaaatttgtgatctccctttattttaattatgagtcaactatgtctatcttcacacttttgtgaattgatttaagggtatcactatttttcccaattcatctatcaggctgctacacaaattcctaacctctctttattttaattgtgaattgatttaagagtaagttgcattcctcatccttttttaacataattctctcggtcaccttgtggatttttcctgctactatcctcacattttgctcgacctttcacttcccattacgaagcaaagcttttgcctagcttgatctatcaa

SEQ ID NO: 79311 - DNA, 572 bp, Zea Mays
atcgtttcgagttaggctcttgttaaaatgatgattaggctcttgttcagttaagtaggtctcggttctcttaaaatgatgattgttaggctcttgttagtaggtggagatgttatggccactgttgcagcgaatcatttttaagtgatgcaaaagtaaattcaaggatactattgtgaaccatgtgcttctgaattttggatggatgttttctttattagttcaaggtttctggaggtggacaagtagtttgccgatatacaagagcatgtatcaatttgctagatcactatatttataaatttatcagagatttgcttatgtagagcactaaaatttgcttgattaccaaaattgttcgttgaagttttttcaatttatgtacgtcactcaaaacactatggaatatttctaaatgatttgttataagtgctactgctttctgtgctctggttctgccaacaaacaatgcccaactgagaaaactgggtctgtactccctggccctgcagctgtccggtgcctccctctatgcatctctgtagtttgcatattaatagtactaactgctt

SEQ ID NO: 79312 - DNA, 796 bp, Zea Mays
caaacttctatttcttcacaggatggggtccccgacggtagacagcgctcggccgttctccgatgagctcacgctggccggacctcgcaacgactgggactcccgtgcgacagacactgaattggacccctcccgagcatttcccctcaaacaatttcatcaatggggcattgactcaaccaattcatggcgacagggcggatggttatagggatgaacacgttccgaccaaccgacggcatggacgaccaaattgcggctagggaaaggttcacgggttcaccaggggttatgtacacactttggtttgggcagaataagaaccgaagagcgggtcgacagagtgggtgtcacggaggcgttctacagagcaggtgcgtgtttcggtgaaaggcttcggccgaacttcaattggtcggtattgagagcaataggaggctacaaatgagctagaatagggagcaattgggaagttactaacccgaagagcgctgaccacggtggagttcttcacggcggaggtaagaatagggagaaaggggatttgtggactgtgtgagttctccggtgaaattgaatcgagtgcttagtcgctgaggtgcgggatgtggtgaagaagcgaagtccgggctcaatttataggctgacggtcggaatcggatgaagatcacggattttagatcgcgctggcgagcttaccgcgcggtagaatccggtgatggcacggtggccaccgtttaaccggggcctgccacctcctcgctttaacgccacatcgcaaagatctttaccgcgg

SEQ ID NO: 79313 - DNA, 513 bp, Zea Mays
cgaatttaccatttgttggacaaacaagaaattatcgtggatattccaccccttgatgaatgcactctgatttgcaaggaccaaggcatgcagcggtagggatagcctgttgggcaagatttttgacaccaatttggtaatgctatgaatcgggcttatgggtctataatccttaacctaattggcatcaacccgctttggcaggagggtgatgaaagttgtattgagcaacctgaacctagaaacatgtccaccttgaattactgatagtgcaagaaggatatcctcctttataacactccagcaagtcctgtaaaaatgaccagtgaacatgtccggtcttgaggatttgtccatagcatctctttgattgtagcccaaacctcttcctctgtgaatggagtatctagagaagacaaatcatgtcgatgaatgctttccctctcctcggtggtaccaaacaagttctcatagaaatttagaatagcttcttgtttgtcttcctaaatgact

SEQ ID NO: 79314 - DNA, 571 bp, Zea Mays
gtaattgtatcacatttgagtcccagaggattcgggatgcttcatactgcacccgagcatttcactagatcgggtagaggaatgcaatactctgagccaaccagagtcagattctaatgactggagggagccgatcatcaggtacataaagaatgaggaggaaccagatgacaaaaatgcagccgaacgcattgcgaggcagtcagctcattatattctcattggggaaacgctatacagaaagggtgcatcaggagtcctcatgaaatgcattctctcgactactgggaaacaacttctggatgaggtccatgctgggcaatgcgggatacacgcaacatttaggaccctggttgggaaagtcttcaggtcgggtttctactggccaacagcaaagagtgatgcagccgagttagttcagaggtgcgaagcctgccagtacttgtcaaaacagcagcatctaccagcacagcaactgcaaaccatacctgtaacctggtcgttcgcatgctggggactggatatgattggacccttcaagaaagctcaaggaggatacactcatgtactg

SEQ ID NO: 79315 - DNA, 558 bp, Zea Mays
aagccttcttctctcctctgatagagaccgggtgaccttcaagaatctgggggtcttcagctttgatgggttgaacagggttggatggagcgggctcctggatccgtagggctctacgttggttttgggtgaccaagtaggcctccatcaacttctggacatgctcatccttggcttgctttagggcttcaacagcaatgacttcatgactctccaaggcagctacacgggcttgagctgtggtgagatccacatggagctgacggttgcgcttctctgcatcttctgctcgggcaatcatctgacggtggtgccgagccaagaaatcatactgtgtatccagggtgagcaggtatgcagcgcggtacacgactatggggtcatcctcaagcagctgctgctcttccaatgcacgcatccttgcgatccaagcgggacggtctctctaaaagggaggaaagaatctgagcggggtgtcagtcacttcttcttcatagatctgacacagggcccacaatgccttgcgagcgacgacttggcaggtgtctctgaatctgt

SEQ ID NO: 79316 - DNA, 589 bp, Zea Mays
cggcgatcaactgttcgttggattgaccgccattcagctttgctccggtcagaaggcggagtacttcaacatccctatcccctcttccattcggtatgaaggcaagtggttctatgtgagcaacgtggctgcgagcggtccgtcgttcacctgtcgtgagctgatgtcctcagatgaatggtaacacggcggggaggcgagcctcaaaactgaggtagggaacctactgatggttgtcaagacgttgaagcagcacggtctctccggcacgcgactggtgcgtactttcatgcattgccggatctagcatctgatggtttgtcagaggtcgatgcatcaatactctagggtcgacgaccatgaccatcattcccctgcacggctcgctctatcgaagattgaggccagggtcaaggtcgttacggcgttatcatcgggatccttcatggatgaagacctgctccctcccgtgtccaaagacgttgtgagcactctggtgagccccttctccctggtgtgttgcttcatttctttccttctcccttttcctctgatgtgcgctctattggggatcgaacccttggtggtg

SEQ ID NO: 79317 - DNA, 605 bp, Zea Mays
attttgttttcctagagcactgattgtttctgttatcaggatgtaacagtcatcctgaacaattgcagaagtaaaatgcgacgtgctggtttttgagtttttttttctgacttatgtcaatcgcttagctggtaaggcatagtggtctccctaagataagtaggcgtgagaatgtcgcattgtcttaagtcgtcgctgacttaaactgattgctccgttagtagggtatagtggtcaccctaagttgagtaagcgtgagcatgtcacactgtcttaagtcgtcgccgacttaagccgattgctccattagtagggtatagtggtcaccctaagtcgagtaagcgtgagcatgttgcaccgtcttgagtcgtcgccgactaaagccgattgctctgttagtagggtatagtggtcaccctaagtcgagtaagcatgagcatgttgcaccgtcttgagtcgtcgccgaattaagtcgattgctccgttagtagggtatagtggtcactctaagtcgagtaagcgtgagcatgttgcaccgtcttaagtcgttgccgacttaagccaattgctctgttagtagggtatagtggtcaccctaagtcgag

SEQ ID NO: 79318 - DNA, 640 bp, Zea Mays
acccgaaaaatttgcgaatttgggtatcctggttccctgtgggtatgggtggtggtaaaatcggctgtcataaaacctccactatgactgccccccagggaccatgcttactccgagcttatctcggaacgccccagctatttcttccctcactatatcaatggcagccggtgcgagaccaccggctctctggtcaaacataggtgaggttgattggatattagcatgttgtcttcctccccattggtttgagttctgcggtgcattaatatttaccctatacggttcataggactaaccattcctttccggccttttaggtggagctagaaagtatttgcccccacgggtttgggacgttgtattaatgggctggtgcattgtatattgcgacgggaagtattactgagatggatgatgatttaggtaacaatcctcctcaaacatccttgtgccggaccgtccggtcggatacgcggaccgaccggttggatatgcagaccatccgtgatcatatacggacggtctgtctgggtggtttagggcttgtgtaacatgtggcagcttggacacaaatctcggtaactcattaaaaatgggaccagccgttgctggcctggacggtccgtgctcacgtgcg

SEQ ID NO: 79319 - DNA, 583 bp, Zea Mays
caagattgctctccgccctggatccgtgttctgcttcgggaccattttgtccgtggcagacgaagaaagaattctgcatcgtatagcggatccaccgaagaagaagccttcctcgaaaatctccgaaaaagccggaacaaggtagcaaatagcgcaacctccagcgccccaggctacctcctgcaagtcaggagcagagaattcatttacccgaagaaccctgttgtccacctcgtccacggaagagtggacatgaattacgaggaaaaaaaagaagcaaacggggtagaggcccgtcaagctgctcttctggtgccttcgccctcaaaggaggacagaaagaagcttgtcaccacatcaactcctttctgccccgatgtcctcttcatcgggggaagagtggaatcatctcccatctccgatgacgagccaaccatgcctggggaagaacctcctcagcgagaagctcgccgacggaggaaccgacaccgaaatattcggcgacatcacgaagcaggggaacgggacccggcgcagcctgtatcccgagatgaaatttcggaggtgggagaaactcctgacg

SEQ ID NO: 79320 - DNA, 1729 bp, Zea Mays
tcgagcgacagggggagcataacctacccaaggcgacctaggaacgagcttcactttggcttgaacactttgagaacggtctgcccacgtgaacggcggaaaccgtgatgttaatcccgtgttcccaatcacttacgcccgaatggtcaaacggatgctacggtgagcattacgtgcctacagagctgctagaacaacactcgagagaggcagagccttaccagagtgggtccggccacggagtgcagagtcttgtgctcaccggcgacagagaaaaggggaaaatgacgtcgcgtcgactctgggtgaaattgggggatgggattggggctatagaaccgtaagaggctgtgctttcatcgcgcgcaatcaatttgggcgaaggtggagagggcagtgcgaatttgacttcgatttggttcactggtgttcgtgatgaccgagcctcgccgtgatccagggggctatttatagccgcggaggtccggcgatcacttcccggccacggatagcttctttagtgcatgcctagcacatagaggagtggtacagtgaggtagaatcacggtgcagaggacaccacggcggaaaacgattgactcggtggccgccggtgaggtctccggctggactcggggtagggtgccacgtatgcgctatctaactccggcgttatttgttccctaccgcgcacggatttggacggcggcggcacgaatcttcgcgcagagaggtcgccggtggtgagcacacaacgctggcagtctgatccacatccgagcactgtaccatggcgtttcttcagtcagtcgacctgatagatcatcttggagctcgatttactcctgattttgtgtggtgaccaggctagctctctgtaccaaagttatagacctacagttaatcttcaactttgccatggagcttaccataaaatagttaccgaatccaactcaaaatcaggttcaaagtctacctaatttcactgttactggaaattcagacttaagatgtcctgacagcctgactttgagggtgattatctccaaattcttcacaacaattgagctcacactattaagcaaaattgttctcctatgattggtctacaactttgacgtggtgccctagggcaaaaaccctagaatttgaaagatacaaaggctcaaagttgaagcaatcacactgatttcagacttaggctatatagaggtcaagtggtactttttgcaattagccccaaaacttagggtttggcttgtaaatcttcccaaatgtgaaccatgtgactttatatgctttaacattatagtttttatactttagtccaaatgtgcactgtttttgcacataggcctctagggtttggatttagggttttccagggttccaatggggtttttggtatctcaggggtataaaagtgattcaagttcattcttgggaacattttataactattcccctaaagcttttaggttttctcaacttgggttaagttttacccctttaatccctatttaaggttaagttccctatccagggttctatttgcaaaatgctataacaatacaacttgtttgaaatttttacctagtgaatgcactctaggtgtgtcaaacatatgtaatgccaatgcttatgatgccatgctcaagttttagtagcagtaacaccaggggtgttaaatcctttcccccataaaagaatctcgtcccgagattaaaag

SEQ ID NO: 79321 - DNA, 793 bp, Zea Mays
cttggtagggccttcgcaaagttgttctcgggctcggattgggtggtggaggctcggagtgaccattcctcgtactcaggtggcggaccgtgaacgactggcggtggcggggcttctccggcgcggtagagttaactcgagcgagtctacaagctgtggaaggttgcgtggaagcttctggtgcgctcaattaggcgatgggatggtcggggtaacctgtccacgacggtgagtttcgggcagcaatggcgggcggtgcagagcttgccggagttgaggttatgctcggggaagtgaggcagggtgaggagtgaactgtcgcgcacctagggaggtttttataggcgctcctaggcacggctgggcgcatgcgcgaggtggagccgaccgcatgcggggtgcgcgcagagagccgccaatgcacggccaagcactggagcacggtatcgaacacgtggagatactcagtgtggtcgttttcaagcatccattggctccaaatctcagcgaattttgatcggatccttatgtgagatttcttcccccgactctactctaacgttttcgtgtggaggccgagtggttttcgggtctctgcgaggagtggtcatgtcgccaacgtgggtttgtttggctgcttcgtcccgagacaaaaaccacaccaagttgtgtcaaccagatcgggtttgttttcaaacatcaccagggtgttctaggggtcccctagcgccactttgtcaattaggccaagtgattttgagttttagaacatggtgaacgcgtttgatctttg

SEQ ID NO: 79322 - DNA, 304 bp, Zea Mays
catagatcttggtctatcaagaagcagtcttcctgaacattagaaagagaggcgaaatgcactacctcaattgccgaaaaaatttggttaaacaaaaggacatagtgcaggaatcctctaatggtctaaccgcaaactggaaaaaaacgatacgattaagacggtttttcttgccaaacaggctagacacggcaggaaatggaagtaatgtttcgcagccgcggctccctctaacagccaaatggaaaatatgaggaagcaaagacatcttcttgccacatatggctagctcctagacacggtg

SEQ ID NO: 79323 - DNA, 603 bp, Zea Mays
cccaccttctgtcctgatgcccgacacagcgacgagggcggctgcccgtgccaggaaacccaaaagtcgaacggcagagaagggccctagggagtccaacaaatgaagtcctttgctgacacggcaccgaccacctcataggcggccttgttgtacccttgataaggttctcgaagaccacggacggggtgccccgagaaggcatcgataggacacggatgtcaaccccaatagctgccccgcggtggatgctgaggtccacgacgttccgaacgcggctcggaatgtcgagcaggcgctatacgcgagttgctccacgtgcacagatgctctgggtcaccgaatcgacctcccagcacagctccgccaacttggtttcctgtcatgttcagaagacaaaaaggaacattagtttcgatgcccccgagaggcagaaagggattcagaagcagggtgagtggcatactcgccgcacgggcctccacgatggccaatgatcgagacgattccagtcgaccccgtagatcggcgatcgccaacaacggaaaggccgaggatgcaaccttgcaagacggcgcatgaggttctccaccggtcactttc

SEQ ID NO: 79324 - DNA, 367 bp, Zea Mays
acagacaagggcatgagagaaaagatgaaggcgtgagagagccagtggtatgagtgcaatgaagaatggagttgtgtccaagattacacgcggtaaaaaaagatatagccaagggtgaggtaagtaaaacaccgctctcaaattgggataggatattggagattatagatcacagacataatgtaatcaccaaggtatggtcgagatatgggaaaggtaaaggcaaaactaaacatgagcacaacaaagggtggtgttgaaaactcaagagcgatgaggaagagtatacaaccaaggggaaaataggtaaaatacaactttaaaattgagatagaagagagaaggttttagagcacaagtatactat

SEQ ID NO: 79325 - DNA, 544 bp, Zea Mays
ccggaatcgaatagtatggaagctgacatggaattaatgaggaacgtaccaatgacgatgttagaaccatcagtagtagcttcaacactgatctgattaaccctgacaatattatatatgtggttgctgaatggagtctgattctacttgttaggattactgcctcaagttggggtacttgtattcctctttggacagacattggtgtaatgcccaacttcaccacatttgaaacaagattgcccggggtggtgttctagctagtaggttttgctggagtttttgctagggctgctgggcgagggcgtgatgtttgcgttgtggcttgtggtgtttgcggaacagggcatggctatgactgctgcccaccgcctaaacaaactggggttccctgtggtggagcatagtgagggcggttgttgcttcctgcttgaccctgagtgatagcctttctcttcatcccgcctagcggaacacgcttgtgttccagagctattaccttgtctagaagtatctagacagatgggaatgagtgagacattag

SEQ ID NO: 79326 - DNA, 418 bp, Zea Mays
acttgactaggaggctaataccacctcatgatattacattaatagaaggttgcgacaacgatccgtgaaacccccgaaccgtatcctcccatcactaatagactgattcaagttgtccactctgcaagggcccatctaggcccaatggtggcacacagtcgagtcgtaactcaagagtgagaaaaagaatgacatatacaccttctacagtataatagacagggtcaaaccactaggctgaccccacatatcttgtaatctcatctcccctggtctataaaagggagagggagacccctttagcggagggactctctcttctcaccaacatacacacatttagccatttcaacatccaagcaatacaaaccagccactcccgagaggccgagaacgtagggtattacgcactagcgac

SEQ ID NO: 79327 - DNA, 385 bp, Zea Mays
ctggtgtattacaaaagagagatacatttcactcagctcgttaccatatctagggttgtgtggacgcctaaatcgtcgatatcattcctctcgccgtgtgcatggtgctattacactatcatcacggcatcttatctctgcatatgtggatactatgtatacactattgctgcatgtcatttagggtacgtaaagttttgatctagatgctttgtatatctgcgatgtgcatagtcgattggatctactttttattttgttgtagcacatattggaacaggccagatagttgtcattataatcacacaacttgtttacccctaccggctggtacgatcaatgcagttaatagtgtgtacctttaaaagctctacatatgatttta

SEQ ID NO: 79328 - DNA, 540 bp, Zea Mays
gagattcctcgcgcgtcagaaaatgcacaaatatccccgtgatcattcaaaatttccttgaaggcttcagcttctccacttatccattcaacaacgccctcggggtcgcctcgtatgaaattttcttcagaagagtaggcacccactttggcgaagctagtttttaatttcttcacgcaatccaaggatttctcaaagcacctttccttggattcgcgaagttcttcaacatttttctctagcttatttttccagtattcactgatctcttggttagcctgtgcgagcgcgcacctctcattagctttggccagatgcctccgaaggtcttcaacctcagttttttgggcttcggtttgagctttgtattgagcttcgccttcttttattttatttaccaatgaaatcaaaatcttgtctttctctagaccttcatttcttagctcaatcacctctgagcgaaggttgttaagggctattgtacagccctcgttgatgcgtcacgatgcccgattttcaagacgtaggatcaatcttcaa

SEQ ID NO: 79329 - DNA, 512 bp, Zea Mays
acgacttgttacgaaagagtgagatgctccagaatcaaataaaactgatgcaggtatggagttaataaggaacataccatacaccacatcggcatcctctagaactgtttttattgtcacatgattaattcttcccttaccctagttctgcggagtgttgttatgtgcagtaccatgagcaggtgtattctgatcaactctttgattgatgtttctctgggtgtctgtgagttgcgcttagggcaattattggcataatgaccaagttaaccacacttgaaacatccactaggttggactagagtagttgtattgttatttctagccggtgtgttcacgatgcttccttgacgattctgttgataaccacttgacctttgaccggtctgagagttgttcctctattggttctggtattggttgtttctctgtccttgctgtccagagcattgcatttgataattattgtttccactctgatttctagagaaaaactgagaaccttgagagtt

SEQ ID NO: 79330 - DNA, 294 bp, Zea Mays
gagatatttaatacaaaataggttggaaacaacttttaacacagctactcatctcacatttccagcaatagcgaaccatcggtggacggtggcacgcggatctgcagagtacctgcgacaaaatcatgatatggcgagcgcgcgtaccgaatcagcgaatctgcgtcatctcccctccgcagctgctcgtccgcatttgacaatccgcataggatcctgtgtatccgggcaagaacggccaaaaggtaactgacgtggccacttcccgcgccactcgctacggttactgctccc

SEQ ID NO: 79331 - DNA, 494 bp, Zea Mays
tataagaagtaatctaattatgaaatttatcacatgtagatgattggtattgtgggccgtgaattcgaggtcttggccccgtatggccaaaactacctcacgtgggcattatgttcaaattgtgcttggaggcaagaagctcaaggctgtaatcgggcttagccgaaaagatgaagtggccaccgacgagcaaaatgaccaagcattgcattttctgcggcaccatctctcgccaacactaaagaatgagtacatgtcagagagaaagaaaagcaacctctggaattcattgcaacaatgttttgagaggttaaagtacacagtcttgccccaagcacagcaagactaggctcgccttagatataccgactttaaaactatgggaaaatacaatgcaacattgcaccaaatatgcaccaaattatctctttgtggtaaggtgataagagatgaggaaaagattgaaaaaaccttgtctaccttccacccaagcg

SEQ ID NO: 79332 - DNA, 428 bp, Zea Mays
caaagttagttcaccagaatcaatatggtttcatcaaggctagatcgatctaggattgcttagcctgggcttttgaatacatttctctttgccacaagtctagaaaggaaatgtcattctaaagctagattttgaaaaggcttttgacaaattggaacatgtagctcttatggagtttttgagacgcaaggggttcggtgacaaatggattcactgggtttctatgattcttggttccagcacttcagaagttcttttgaatggaattcctgggaaaagatttcactgcaaacgcggagtcagacaaggagatcctctgtccccacttctttttgttattgcagctgatcttttgcagtcaattgtcaacaaggcttgcgaatgtggcattctacggctccccctaccgagcaattgtggtccggatt

SEQ ID NO: 79333 - DNA, 355 bp, Zea Mays
tttccctaaaaccctaactccccgctcaccatgtgctcggtgaaatgcccaaaccacccaaacttgctccaattgaacccaaatttttcaggcaccttcaccacacttccagtaacctacttgccaaatttgacaccaatccgaggtcccaggcttaaattttaccaaaattcccgttttgagcgatcgtttccgagccgagtgcccaaattcctatttcttcgcctaaattcaaaccgagcacacacttcactcattttgacctatataaacctattcgtgaagtatcggctcaattccataacatttcgtgcctcatttcgaattccaaacctcctatgtcactatttatcta

SEQ ID NO: 79334 - DNA, 348 bp, Zea Mays
atcctggttcgggctactcgtggccctacttccagcagaggagatgaggctcgtattacttgcaccttggtgcctgtagtaggggtttacaagcatagcgggagagggtaagtccccaagtctctagagatgattgaggcaagtgctaatatctaagacaaagtgagaaaacaagaactcgtctacgggtgtcgctctgcgtagatgtcccccctcccttgtggagggtcccctgccctatttatacacccaggggagcgcccttggtgaagccaggtcttgtattttgaaggagagatgccctgacgcctgacgtgacggcagaccgtgcagtagattcgcgcctgc

SEQ ID NO: 79335 - DNA, 593 bp, Zea Mays
aatgatccttggctctacttagctgccattgcatatatgtttttcgcaacttcttcgacatttggatcatcaaaagatacacccgcctcagtttccctgggttttctagcacggatccaattagccgttctttcaccaagttgctcgaaaagcgtcggcaaacctgtggccttcttctcggcgtcttcatgtctccatttagaaacttgacgcttgtaaccacctgtgcctaagtggtggtggtacttgttcttcttagatagttctgaatttgcctcgcttagagatatgaattcagggttgctcctctgctctagaaatactgcccactgaccttctgagattttatattttttgtcgggtctaggcctttctctgccaattttgtattcatctcagacctccagtttcgaaaattgattgcaagctgtttcattgtgtattccttcacgagttcttctgaaccccgaggtagaacaaacctcgttaatagcttattccatatttgattcttgacatcatctgacacatctttccaatatcggattgtgatgtcaagattatccctaactaagaacccaagtgcattccag

SEQ ID NO: 79336 - DNA, 606 bp, Zea Mays
gcctagtctccaatagatccttaaatttaggaactaaatcaaatttgaatctccgtttagaaaccaaaatcagaaaagcagaaactagcatttcagttcaggagtaagtgtaaagcaatgttattatggctctctgcatttgctgcaaatgccaattgtatatgcattttttagttcaacataggcgtttcacttcagttcaggctgaattttcagtttcagttagaatccaaacaaagaggagaagctaagaacaaaaattatatgggcaagagagtaactaaactgtagttaaaaattcaaatgatattacaaccaagagtctgcaagtgacatttacaaccagcaacaaactaagatggtggacttaaacaaagtgacattgacaactgctgtttggtctccagctgttgtaggtgagccgggtggtgaaataagtctgaaacatgctagcagagtgactcctgttgtttggtctccagctgttgtaggtgagccaggtggtgaaataagtctgaaacatgctagcagagcgactcccggcgacaaggcagttcagcgacctctttttgatgctccttcaaaggtatgttcagagcaaaaaat

SEQ ID NO: 79337 - DNA, 373 bp, Zea Mays
taatgccgaaggtacccatagccgagtcagtcgaggctaaggttggtaaggctgaagagtcaaagattgaagaaataataaaagtgccaaaaattatgagccctccgacagagataaaactgtcgaaggtgcaaaaggcttctgctgcaactcccaagaggaggagaatggccaacatgttggatgctgtgctggaaactacgaaggtcttaagccctgctactacaaagaaagttgctgaagctacaaaaacacaggccgaagccaaaactgggcaagcagaaaccgaagctgcgcaagctcaaactgaagccgaagctgggccttcagtgcccaccaagatggagcctgctgagcctaaggaaaaaacgac

SEQ ID NO: 79338 - DNA, 489 bp, Zea Mays
cccatgcgggtgggacgtgcgggatagtcttcggttttgctcccacggctatggtggtgctaaggctttccgctccttttctccgagtgatctgggtccactcccaggtgggtaacatggacaatggagtccgtcgtgccaagggtgttgtcttagtcggctaggtcacatgtgccagtatagccctgggcctggttgacacgaccgtggtcctgcgtggggcggaggtttggttgaggtctccatgcttcgaggttcatcgaagtagtccttgctggggttaggtggggcgagcctgagctcgcggtcgaagccatcgaagaagattccttctcgggtggatccgcgacgcggtgcaggacgcttttcctgtctgcgatgcaggagagcaatccaaagcggaaaacctccccggcgatgaagatgatcgggatgttgaagacaattgccatggagtcattgtgcatcaacgtcgcaccccctacctag

SEQ ID NO: 79339 - DNA, 513 bp, Zea Mays
cagatatattacatagcggaaccgtgtttactcaacacatatgtgggatgggtctctcacaagaccacttgaaccatcgcattcaccacacattatttcaatagtgcccataaatgtccgaacttcaagctcgcgacttttattttgctattattggtttagccttgattgcatttatcaatgacccgataagagagcttcaagcactcatgcctaggactttgttttggatccctttgcaatctatagaggcaagataggtgtcgacacattagtctcccacatttaataatgatctttgtcatttcccaaaaacaaaagattcattgttccgtattcctagcacaatgatattgtgcgcattgctaggaatttcatcatcaagacgaaccttttcgtgaggcaactcacgagcagggcgagttcatcggaggagagttatttacagaccacgtgaatctgcaatcagaacatatgctttgactaagaccaatggatcatattcacaggcat

SEQ ID NO: 79340 - DNA, 423 bp, Zea Mays
tttaaaagcttcatgaaaacttggcttcgcttctcactacacaagatgttggttgaagttctgaagacattcgaaatataccttcatcaacttacccccgaagcctttattaaagtgggggtttttatatgggctatgaggagtcaagggctagagccggatgctaggtgtttctggaatattcatgagttatcctaccagtcaaaggcaaccggaaaggaacaataccataataacttcggatgctatagcttcgtgccccattctgaggcaaattatcccatgccaacatttcggaagaagtgaccggactcttggatgaagcaacggttctacgtaaagaatgatctgaatcagagggaggatgtgaagggtatcattcaacgtccgatatggtcgcgcttcagcattagaagaccatca

SEQ ID NO: 79341 - DNA, 346 bp, Zea Mays
gaagatcatgtctttaggactgaaatcaaactaagcaaccacaggttcatcatcaccaataacagtataatcgacaaaaaagtaatcatgttaacttccataccttcgtgctgcggtgaggcttcgtaatccaccatgtcttctcccaataaatcatcatcgtcgccactctggtccatagggacctaggagtcttcggaagcttcctggtggggcacggatggtctggcccctatggtcggacggtccgccatagacccgggcagtttggctccaggagccggacggtccttgatacctgcaggggcccgtgtctctggtgtctcgtcttgcatttttgtgcctg

SEQ ID NO: 79342 - DNA, 813 bp, Zea Mays
ggcaggaccacgtagttgttgtgctgcgaataacggcttctgcgtttctgagcagcggagaagaccaaacgtttgttcaataacccgtatccactcatcggcttccaatgggtcctctgccttgacgaataggggtggacgggtttcagagaagtccagataggtggtttcacgggggccttgctgataaccccttcctgcctgctgctggaattgctgctgacccgccatttccctaaggaagcgggtattgtcggcggtggcattcaccaaggcggcaatcacctcggctaatgtgggaggaaccggaggtgggtttggggtaacatcccgtcccccagaagttccggctgcgtcctatcctcgagtcctggtcggcatctgtggcaaagaacatttgaagtaaacataatgtgccagagaaaccttccattttacattactataaaagtaatgatacagactcgatattacataacaggatacattacccattatacaaaagttcaccctattatacaacagtacaccctacaatacactactccacttctattacaccattagtcctgctttccattactcttggcggcctcatcgtcaggtgtgggagtccagacatcaaccaacctcaaagaaggagggggctcaaaaaggtctaactccccacccagcgcgcgtcccgcaacgtgagatggtccggcttccgcctcagcagggtgtgcaggcacactagggtgtaattgtgagtatagtacatggacttcctcatgcaacgtattgcagtagacctgcaggttgtcgacagttgag

SEQ ID NO: 79343 - DNA, 507 bp, Zea Mays
gcgtgggggaggtggcgttcgtagacaatgacgtatgggccttggtgggcctgcatcaaaggtctcgcttcgcgaagtgttgggtatgacgcccttgagtatttgcgaaggggaggtggcaaagttggacatgggttcttgtcgtgcttcgctgacgagggcgtcgagtggggtccccaatccttgtcgtatcggggagttgtagcttaggttgctctttgaaggcaaagagcttgagctgatgttgtataactttcgggaggctggtctcatttcaaaggaggagccttgcatatgtttgttttgtaacctaagggcgaagtctttgtagcttaatttggctatcttgaatattgtagttgactggcaacttggatgcggaacgctgccctcgcccctcttgctgaacgatgactatgttgtttgttggatccgaccgctcgtacgacttcgcacccttaggtgtactctcgcatttttcgtgttatttcggcagcacccttagtc

SEQ ID NO: 79344 - DNA, 510 bp, Zea Mays
agaagccagatcactctcgtcggacttcatccgcccgctggagcatgtggtccaagtaaaccagcgagccattcttcgattccttgcgtgcacacacccccatcactcagtgaagttccctatgtggtttgattgaccgctatcgccgtaatttggtcggagcaggcgcgaccgtcgatcaccgccgcctacgctcgtggccagaacaccttcagtcacctccgatgtcaaccagcacatcgacgtgaccgctagagactccccgacctcattcgacccttcgccggagctctatcaccacatgtaagccatgctaccatgattttcctttcgactattgtactggtgaacacagggaccgcgggttagacgccaggaaaattcagggggttaagtgttaagccacagacccagatgaataatatactagggactggattgtgagcaaaggcccagggacccgagagcaagatgtttttccttttctttttggaatatctaattcatttt

SEQ ID NO: 79345 - DNA, 698 bp, Zea Mays
tcaagaaaaatgattgcaacttggttcgaattgcaaaataaaaagtaaatagcagttgcaacttgggaaaacaaaaaaaccttttcagctcaggatcagaggcgatcttccgcctaagtgcaacaaccttggccaggggtatctcaggtcgattacgagggatcttgaacggggatatgtactccctaggcttcttcagcactctatcacctaggcgcttgaatatcatcctttgaaactcgctgaaatcagcctggtctactgagactttgtcttgagaaagtcggattggttgggtcaaattgttgatatcatcatcagactccgcagggaactggatatcatcaaatgatgagctggatcctgcctggccatcaatgctcttctccaaactgtcaatctcagctttggcctcctgacaaagcatgttcaacctatcatcgtactgttggtgttgctgagcatattcttttgacatttgtaactagaacatcttctttagcttggcagcgggcaccggctttttcaaagctttgatgttgtccttcagttgtttctggattgcaacctgtatccttttctcctccgcttcaaccttcttctcggcatcagccttcttcttcacagcttcttcagctgcagcctttctcttaatctcagcttcttcggcctcagcctttctcttattctcagcttct

SEQ ID NO: 79346 - DNA, 534 bp, Zea Mays
tagtagacccacgtgcgcgataactctttgctaccgggcgcagtagaaaggctcattaactgaataacaatagaacttaaggagacgagagtctggagagatgttgatgctttatttctgtaggtttgctactgtccaaaagttaaagttacatcctctctatttatacagaaaagatagagtttcagacaaatagtccacattgggcctagcttccatgccaagaaggttttgtcaacaatctgatcccaccccattggccattgcatgcaccgggcggctacccggctagctaatcgatcgatcacatcgcatcacatcgtatcttgacttgacgtccaccagtaatgaatgactctatagtctatactgcggcagaccagaaccagacggacgtggttgacttgttgcatgctgcccgtcactctcccggccgccttcacgtcaacttgcagcgaggtgacggaggaggtgaggaatggaggagggatgtggaaggcgagagacggagttctctctcttctccaatctcca

SEQ ID NO: 79347 - DNA, 730 bp, Zea Mays
ccagcctatttgtatagcactggtcatatggctagtatcgcatttattctttgcaaaatggttacactttcatggtaacatgagtggttgaaaaacagtaaatgtgtatcacacctgcgccccccaccgccgccaaggtgaggcgtgacgtggcatggtgccaccatcatagtcatggtcgtattgtagggtagcattttttggttgggtacataaactgcggatcagtttctaaatgtaacactaggagtttcagaacttaactttagaagtcatatgtttgatgacaaagagttacctgacctctgatttctcgtgccatttgagcactcccatactctggtgtctccctgactattcagctttcctgacttacctatcgaaatctcatcctaaaatttgctcttggtttgcttctctatcactgctcagctgtcacatgagcactacattccaatacttatgtgcacgagttctaggagaccaggcctccgaaattaaagtcgttcaagtgtttatatactcaggtgaaggacgacaatcacattttgggggaatattagcgatatgactgcttacttcctccacttctttttggtgtttttatggtgattgatacaacacagcaaaaacaacgcactgcatcgacctgtatgattatatcagctgacaatttctttgttaggtatgtatattatgaggggcttaaaactatgttactgtttatttt

SEQ ID NO: 79348 - DNA, 701 bp, Zea Mays
ttgagttgtggcttctcagaaattattatgaatgttgagatgtaaaaagttgttgtaggatgtggacgatgaaaataacgtaagttgtttgattcaaacaagtacaaaacttatctgctataaaataactctttattttcacaatctcaaaaggtatgaaatcaaaagctaaaggcagggtctaagacgctttcaaaatatactacccaaaactacagtttttttatttttcacccctttgattggcttttagaagaaaaagtagctctcaaatgctcgaccaaaggtaacctaaactcacaaccataattcgataaatccctgaaagtttgtcatttcttttagtttttttgtcgaggattatctaatttccatcgactatcgacgaggtttatttaattcccatcgagcaccatgggtcaacaggaatcactgtgttcagcccataactccagttcaccacctaattcgaggagttaacctaaacggtgccacgttagcgcttaactcccatcaacctgactagagtccacaagcaccacaacctattatgattttttcaaccaatttgaacacaacaaagcacaaataatatgaatcataattcacatacatcatatatcacaattcacatacatcatatacataacatttcaaattcatcaaagctcatcatagctaatcaataatcacaatctcat

SEQ ID NO: 79349 - DNA, 784 bp, Zea Mays
gcttccttagccagattgaggagcagcctatgggaactcaacattatgaaattccagtggatgcccatgccgagggatcaaggacaccagctgtacctaaaaatcctaatcaaagaacaaagctagcaaacttcactgctgatgaggacactagggtttgccatgcttggcttgctgttagttgtgatcccattattaacacagggcagaagcgtcaaggattttggagtcgaattactgaagcctacaactcaagacgaggaacattgcccgaaaggttgacaaaatctttgatgagtagatgggatactatcaaaacatagtgttccacttttgttggttacatgatgacagtcctccgacagaatcctagtggactcactgacgcagacaaggtacatctttactatgaaacattacataagtattgtaggtatttgtaaatatgttcctgctctaaccagcttttatctcccagacttcacttgcagcctctaggtttgcagctattgagaagaagcctttccactttttacattgttgggccatacttaaggaccaaccaaaatggatggacaaccacatgggtcaacaaaatcagcatggcaacgctaatcccacccaatctaacactgtcgatgtggatgcagaagaatctgtaccaactagcttcacatccaagaggccgctgggtcgagattcttcgaaggaaaatgcaaagcgaactaaatctgtggacacatcttcatcagattcggagttcatgacacagatgggagatctt

SEQ ID NO: 79350 - DNA, 936 bp, Zea Mays
gcagaagaaaggacagcttcggaggcattcttcagagttattgaataagcttcgacttgtaagtcttcaatcttcatcaacatcgccctgaaaataatgagacaaaggtattatgaagcataaatgtgagaaaactcgaagaagtatgaaagtaagaaaatcttcataccttgttcattaatgaccgtgcttcatctcctgcaatttcccgaccacccttagtccagatctgagtaataaatctattgcccacacttttggcttcagccaaaatgtcgactaaatctgatgatgaaaggtcgaaggttggtttattaacagtcttgaggtaattgcatccagccttggcaaaagcagcagttgttccatggatagccactagtgcgcaaaagtgaccgtggccaactatgactttgtcaagatcttcaatctctttctcaatccatctgagtgcccctgggatatcttcaacagaatggctggcttcctcatatgtagctccaatagaattgaaaatatctttcagccgagcaaagcattgcgttgcaaagccgaagcatctatcctggagatcttttagtgtctcactaagcttaaaactaaattggcttgtattttcttccaaaattgtttttgtttccttcagctctttactcaaattttcaattcttacatcctgatttgaaatcagaattccttgcttctcattttgaagtcgatcgtcggcaagagagccttcggctgagctaagcaaggcgtctttttccttcaaagaattttcaaggtcctcaatcttcttctctaagccactgataacaaatccgttctttctatcttcatcgtcttgttgcaatttcaaagccttgctcagtagcaaactctgtgtcaaaagacaaagttgaattagaccttcccttttgaaacactaaaactgat

SEQ ID NO: 79351 - DNA, 1024 bp, Zea Mays
ctaagaatagatgatcaaaacgctagtgaatcttcactggaaatcatctacagatctttacttttcatcgcttggttccctattagttcatctatttcattcttgtgcatccttttataatttaaaactaacatacactgggagtaaacttattaatgcatttttatttgttttgtccattaatcaccaaaaccctcaagaagttaattgcacttacaatctcccccttttgctacctagcttacccttgggcgtcgtggaagtgtgctacttggctctggcatccttagtcctctgtgtgctctagtgtggtcttctgtcgtctctgtttgagtcgtccgcgcgtctctatgtgtgagccgtatgtgatctctctgtgtgtttgttctcggtgaccctccccttttataggccaaggtggggatcagttaccggtagcttctcaaggaaggaggcaaggagctaatgcaccatggtaaaatgagacattctacctcgataatgtcaagcttgtcggcatgtgcctcggtcatctgagctactctggtcgtgctctttaagactggctgcgcgtgggcaacaaagagcttcggtgccatcgttactggcactgggccatgtcgacccctagcctccatagcctgggtctcagcgtggctcatcatgttgtgggtcttgtagacgaccagtgcactcaggcctaggcttgataggttatgagtgggtcacaggtctaggggcccatatgtcatgagtggaaggaggacctacccttttgctgcggctcagtgccagacgcagttaacgcagtcggtcacttatgctgggttagtcctaggtcaagcgcgaaacccactcgagtggtttcttctcggttcatccggcctcttatggctccgccttgcctgatctcggactcagtgccttaggactattagggggtgttcttccggacgtagttttcccttgtcctccagctgacttatggggcctgaggatctttcccctgacactactatctttt

SEQ ID NO: 79352 - DNA, 878 bp, Zea Mays
aaaaattcccgagactcagaccattggcgcatggactacatgttgatttttactttagtcagggtctctttagcaaaaatctagagccgaaggggtacgaggccatccgagccgttgaacttgtaatcgagtgctcggattaaacaaccccgccatcgaaccgatatgcgcctgcgatcgttagatcagtgatccgtggtcccgatttaaaataccttgattaaatcctatgtgtcagacctcaattgaacgactcaggtctatctccgaaacggtaccaggcggatctaatcctggccgccacgcaaggaatcaacggccagcgcgtcatcatcccaaacccaacccaatccgcgcagtccggtcactgcgcacggtggtggctcaccagagctcacaaattccggccatcccgagctccaaacaataattcactcggccctcgtgaaattaacgactgcccaaacctatttcgcccatcaatttttgccgccacacagcgcagacccccggcccacggtgctgtcaaaccctcggcggggaaaatcgcaccggcgagcaattacaagggttttatggtttgaacacggcacggtatgaactcctatcgaccaaagaaggttccgcaagcgagagggggaagttaccgtcgaggaatgcagaggagagcacaattgcggcgtcggtcgtccttggcggcaatggcggcgctcttctcactcagaggtgccgcaaaggcggtctgggcgaaggagggacagaggggacgggtacgtctcgggcttaataccggttgaggaaggaacgatcagggcgagatggtaggggggaatctgcttcccccggcgacgaagtcggaccgcgcctacgtcgtggca

SEQ ID NO: 79353 - DNA, 587 bp, Zea Mays
ttgggaagagttcaagctggcatttagggaacattatgtttcggaaggagtgctacaaatgaaactggaagagttcatccgactgaagcaaggggagattctgtgatgcaatatctcaataaattcaatcacctctcccaatacgccattgatcaggtggacacagacttgaaaaaagaagaattgcttcatgaggggactaaatgatagactccagcgcaagatggcaacgtgtctggacctcacatgtagcagggctgttagtacaacactgtcagttgaagtcaaaaatgtgggacaaggaaagtcaaaaggatatgcgagtgaaagatcaactcaaggacctgtaaagaggacaaggttggtaatccgacctttcaattcaaatcgttcttctcctcgcccacccagatatcccttgagacaacttgtgttcattcgtcccactcctgcccccgtctcgaccaatcagtcgagtgcccctggtgctcgtttccctgcacttcccagttcctccagtggttgcttcaattgtggaaagtccggatatttcatcaaggcctgcccatatccgaagcactcacgag

SEQ ID NO: 79354 - DNA, 489 bp, Zea Mays
ggatgaacttgggggcactattgcgctctgtcgctcatccacttgcgccagcgacatgactgagcggccgtcaccgggatgtacaccatttaccgcgattgcgccacaccttaggacatcttaccatgtcgtcgcgagtcgtagtgactgcctagtgaccgtcgtagctcattacccagtgaccgccacggtagatcgccacaatgactcacccctctctctcggccactagcgcgatttcttcaaattggacgccactgccatagaactctataaattgctgcccccgtgagttccgctaggtatttacgcgtccaacgcaccaacccttgcgtcagatcatccaccagagcccctcaatttctcatttcccccaaatcagtcagaacgccgccgtcagagagctcgccgtggccagacgtctacaggtccgttcataccctccttgccctcgtttcagcacccttatgtgctatggatgcttatcgg

SEQ ID NO: 79355 - DNA, 958 bp, Zea Mays
cgcaactggaatgggttgaaacggacttaaaatgagcaagttatggattttcaaagttatagaaattatttttattccaaaaatcaatttccagggttttattcatttactatgaattaaaatggattgcgggtataattagtaaagaaaacagggtctgaagtgaaaggttacaggacccgcttgttatgaatcttaaaggtggaagggccgcaggttgatttataaaggttccaggggttcttttgcaacttgacaagcgcgaaggggtatgaagcacccagagtcgttggatccacgtcgcacggcccagattaggttggcgatgtatcgaaacattatcttttaatctctaccatccgcagtggatcgaacggtccccggtcccttcatatagaccagcgcacgatcacagccgcccgacacgcaaccgatggctcagattcacccaaccacatccgatggctagcccaaatctgaaccgttcgacatacgatcgatgatggcacgatcatcttcatcctccagcagccaagcttggccgcgcacaccacgctcgcagcggcgcgcccatgagcgacggcaatggcccaccagagcaccacgccgcgaagcccgacgaccacgtcgaattactcggtgtaaaaagtaattggaatatgggcgatgcagagggaggttctacataccagctatgatgaatccgcggaggccgaccacggtggggggacggtttaacggcggggcacttgatggaggctcagaggaaggtggcttgggttcccaggcgcaacgcggctcgcccagaagtagtaccgagcggcgctcctccctttctctctcgggtgctatgatggtgagggctcacgacgctcggtggacggtggctgacggggaaacggccccagatttataccccgagaggtgcaccgaagtcgggagggtagttccgccagtt

SEQ ID NO: 79356 - DNA, 299 bp, Zea Mays
ttgatatcgtcgcttgttgccgcactgcgtggcggacagcttcgcaactccagggccggtaagaatttcaccagccgcttcgcttccacctctgcatcatgtatatccttgccgttgtccgtttggtacaccgggttgctgggtcggcgatcgccggaacaccgcgccgccgtccctaggaagcacaccactcgggtctgtacaggggtagaagacaggcccgtgatcgttgatcacgtaataaacggataagattagatcttgacttggagcattggcgaccgttggatctcggaatt

SEQ ID NO: 79357 - DNA, 280 bp, Zea Mays
acaaggttgttcagctgagcatatatttctgctgcgttcagatgtttaggcggtcctttggtgaccacgatgttctttataaagtttttcttatcgctcctaaaggggtgtttcttgggcaaccaacatcgatgacaattgaagtaagtgatcttttcaccatgagcaagacagaatcaatctgcatctgaaccgcaatatggacatgtcaatctaccatgtgtactccaaccagtaaaaatagcatacaccatgaagtcatgcaccgaccacaaatacg

SEQ ID NO: 79358 - DNA, 601 bp, Zea Mays
tccgatgcacccgtggtaggtgcatattttggggattcactccaatgactaattgaggggttggcgatataaataccccgtaaccgcccatttcaaggtacaagagctgtgactcaactcttacaaactagagcgatacctcatggagatcaaatagcctcccaagtaccattactgagaattgtgcaagagatagtcattctagagtggttcttgatagtgcctcgtgtgagtgctttgtgttgctgtgatcttgttcttggtgttctattgttgtaaaggctagcaagaggctctgagattgtagagtgtcttgcaaagactcagtctctaatctctcaagatctagagggatcaagcttgattattggaatcacttgagagggttgaaagagacctcatcctttggaacacctcaacggaaacatatgttctttggaaccgaacttcggaaaatcaaatccctgtgtctttgtgtgtgtttgcttttgttgcaatttgttcttgcctccccctcgctaaagttctcttgcatcgaatttgattcaaatcttaagcattgcttcctaagttaattccgcaatcatttgagcacactttg

SEQ ID NO: 79359 - DNA, 338 bp, Zea Mays
caactttgcagcccttttgttgtcgccttgaattttagggaaagggtcttgaggggacaagaagactgctgaacagaaccccaggcattagttatcgcttccagaaaaccatcaaatctgggccaaaatgattcaaaatgaaatctccgtttcccagtgtggttgtccttcaatcccaacaggagaggacagtggtctgaatcctctgaagccgaactttgcagcagataattggggaatttttcctcccaatccgaagaacagaaaacccggtccagcctgacttgcacattattagcgccagaccacgtatatttccggcctaaaaggttaatatc

SEQ ID NO: 79360 - DNA, 664 bp, Zea Mays
agaaaatccatgcgctgcagcttgcttgtgaagccacgagacctcgactggtcgctcaggagggatctcactgggggcgctagaagggtggacatcggtgtcggtggccagggacaacaggtgtcgcggggtgtgaatctcgccggacttggggtcgctgggcgttgctgccatggggatttgctgcatggatgaaggtaaggaagtataccattacgttctcctgagagccctctgcgtgtagtccgtttggatccgagtaatacggccggggttcgaactttgggtggtccgccatggcgcttccatggcgggttggccgccaccgtcatggcctgggtgttgatgtggtctggtgttgagaaggagggaagaagggccgctggccgttagattggagattgacgactaggttcagatttggggaaaatagctatgacccgttgatcctggcgcctacggtggagattagatcaagaccgtgatgaatccgagccatcgagatgagatcagaggagtgataatatattgggctataataaaatctagaccgttgcttttagatctagtggaatagattgggtaccgtttcggtttgagatgagtctaatctaggtcgtctgatgtagatcggacggttgatgccacccgataccccttcgcc

SEQ ID NO: 79361 - DNA, 674 bp, Zea Mays
aaacctttccctgcgcttgggccggaattatccctagtcggcccaactcgcacgctaaacactccctgcgcggcccatctcctcaccacgcgctcgcttcttgcgccgactggtggagcccacctgtcgagctcacatcggcgcgtcgctagttcgttgtggggaggacccgacctgtcagccagttccgcaccagcttcctttcttgctctcactgccgtgtgggcctccgtggtcggagttatcgtctcctcgtcgcgcgcgctccaggaaacagaatccgtgcgggcgcagcatgcaaacggcctatgattctcgggtgtccgctagtgccgtggcaccgtaaccgggtgtataagaggcgtgccacggttgagaatcccctccattctccataggaagcgtaaccgcgtcgtgactgctccacaccacctcatcgagcctggcgcgccccacgctcatatctcgcgtacaccgtcgtccgacactccaagagtggttggtagtgtccatcatccatcggggatcgcgctcggaccaactatccgacctcaagacatccaggcgaggaggaattcctcaccgttgtgcatcgtggccgtggtgccgccattcgttgtagcgcagctcatacttcacccgaccgccgataagtaacccttgaccacgttcgc

SEQ ID NO: 79362 - DNA, 363 bp, Zea Mays
agtaccctcgggggctgggcagtggcttgcgtttcccacccgagccgagtcatccccggcaacatcctcgggggtgggcaagtgtcaacaccatccttgaggaccaagttctccgcagtagccgcctctaaggctgagggtccctcaattacttccatgggagcaagacgatccaagtcagtttcctgaccctcgagaccgcgctctaaggtcgacgaggcgcgggacgctgccccggatgatcccaacccggcgtcgagcacgtcagcacaaacctccatcacaccatcgtccgctggctctgatagcaggtcttctggaaccatatcttcaagagtctgatcaaagtttgccagggacaac

SEQ ID NO: 79363 - DNA, 434 bp, Zea Mays
aatttacatctcaggcattcaatgattattgtatggcgctgggtattcaagtacagcactcggtaccatatgtccacacccagaatggtttggctgagtcactaatcaagaggattaaaatcattgcaaggccattattgatgaattgtaaattgccttcgtcgtgttggggtcatgtagttctgcacattgccgaccttatacaactacgaccaactgcatatcactgtacttcctcaatacaaatggtacgtggaaatccttcaagtgtttcccatttgcgtaaatttggatgttgtgtatacattccaatctcaccacctcagagaacagctatggccccacacaggaaagtggggatctatgtgggatttcaatctccattgatcattaagtacttagaacccttgacaggggatctatttatagcccat

SEQ ID NO: 79364 - DNA, 437 bp, Zea Mays
gtttagcaaccaggaagcaacaaccaggatatgcaagtgggcagcagagctctcagggtaccacatagtcttcaagtcgataaattcaatcaagtcacaagtcctcaccgactttatagtgcactagacagggccttcgccatcttaccatccagtctcagaaacacactggatattgtaagtgcaatcaacccgactaagggttttcgtgattaaatgacaaaacaaacagagtttctaacaactttgctcctagcatgtattcagttgttttaaagatagaaggagcacagattccatatttatgcagagcgtaaaacattgaggattaattatatacatcatatggcgtgcttcaagtgtttatgaacgacgaccatttaaatttttataattcttaagtcgtaggattcaccgttcaattaagagggatccac

SEQ ID NO: 79365 - DNA, 530 bp, Zea Mays
cttacttggaattcacagattatagatggttcgtgggtggcggtggatgagatctcctattaatctactggtggacgtgatggcaaaagagagggattattgtggtaggtgtacctccacagccttatatagcaggctagggagatatccctttataggtgaaaacttatctaaacctatctacttttgctattcttgcgcgtagactcttccggtggttgcttccctctgagttttgttttgaacgatccgccatcctatcacatgcggggtatgaattcggaattctgttggcccctctgtgatatatgcacatggatagcgtacttgtgccatactcttcgaaatccttcccactgagtgtgttatccctacgatagtatctgtttctcctgaaggtcgccctaatggtacacccaggtggatgacttattggggttcgtttaggcgacccatggaacgtatccatgtaacgatgacccatgggatatatatctcccataagcccctcaggctcaagccaatttctg

SEQ ID NO: 79366 - DNA, 427 bp, Zea Mays
gcaacgctatcccctaaattttctcacctataccgcattatgcaatcacgttacctagattccaccctctatttttctccctcccacaacggtttcccataaattcttcccctataccccactataactataaaatattgttttccatacctattcaacatccattattttactacaactaataaatactgacaggcacgtaaaacgaggtaatgggagccgaccgcttcaccctagatctagctcttgggtgtgcactccccctgcaatgtaacacgcgtagcgtgcaacgctgaagtagctagagcggtgttgtagccgctacatgcactacagtacaaggggaggggtgagcgatgcacctagccttagatgcgagaaccaaaggtgcagctctcgacgtgctcgcatgcagctggcgtcttcc

SEQ ID NO: 79367 - DNA, 303 bp, Zea Mays
gaaaagaggataattaatcacataggttccaaaattcccaaggcttatgtcttaaataaaatttttattttctccaattttttgggctttacaatggtcaggagagagaaattgtcgatgtttatcaaacgatgaatatttgccacccttcttcaaccaaatgaacctaagagcttccttgcaaactgggcatgagaacttacctgaacacaccaggcatagaatatcccatacgtcagtaagtcatgcatgcagtactggtaccaaacatgcattttgaagtttgtcttcgtagctcggtca

SEQ ID NO: 79368 - DNA, 562 bp, Zea Mays
gtgattaagtacttgttgcaaaacccaatcatgagtagtagaattggtaaatggattatgtacttatagaatatgacttggcttatgaatcattaaaatctatgaaaggccaggttgtagctgattttattgtagaacatcggattggtgatactcaggaactagacattcatacctcactattactccatggactctgtgttttgatggatcggtgtaatgagggacaagggattggcatcgtgcttgtttcaccaaagaatgtctcttttgacttctctagacgattgaaaacttattgcactaacaatcaagccaaatatgaagccctcttatttggtttataacttttatattatttgagagtgaaacatgtaagggcatttagtgattctcacctagttgtccagcaaattttagaggaatatcaatgtttagatggcactttaaatagttatcttgaaaatgttgggacataatatgttcttttgacgaatttgattttcggcatatatttagagctgagaattgcagagctaataactgggcacaagatgcatca

SEQ ID NO: 79369 - DNA, 982 bp, Zea Mays
gccgcatggtggctctgactgagccgatgtgaacaaatgatcctagctccggatcatctaatgataacgaagcaccacactctattgagcgtgatagggttagagcgcaacacaagggcaaaagtgtcagcaacgagtaacatcgaggacccttgacgaaagaaggccataatgaagagcctctataaggccagtgagaagttaaactatgccaagtttaacgattcattcactaaattgatggatcagaacacgaccgaagacacgagaagaatccagatgtcgacagttaaatgttggccatacgattaaaactagatgacaaaagaaacgagaaataagacgaggtggacgaggacaagtagttttatatagttttatctatttttaaatttatcgtattttatgagttttgtttaatttgtgtagttttaactatgttttaaggtgttattgtgtttttatttgaattaaaaatcgtgtttagttaagtgcatgagtctgtagaagaaaaattgatgtgagtgtaggttaacaataaagtctacacatcgaaaaaatttgatagataaaagctgtcgataatagacaatagataggggtagtcagtagtcaccacacgcatcggaaccagcatcatgtaaccgttgtgcatcgtcctctgtcactgtcctctgggcctataatcgaggcgtcgtcagcgtgggtcccgcgttgaacgtggtcagcccttcggcccatgctgctgacgtggagccaacgagccaacgtactaggcaacacagtaccaacgggttactgtcaccatcactctgcactgcgctccccaccaccttgttcgctctaattggtttgctgacagagtttagcaaagattctgcttattataatggtcccagaatcgatgtgagctgtagtactagcaaagagacaagcagaaagaaaaaaatatataaaaaatccgacagcagcagcggcggat

SEQ ID NO: 79370 - DNA, 395 bp, Zea Mays
cttataaggtctggcattaactggaatgacacgagacaccagagggatatggtgatcaaatggtctagcaggtaaagttgagttgggagagcaaagacatcctaaaattcatccaataaaggctgtaaatatgttgtagtatcagtttgatgtgtttcagaaatagactccaccaaagctagtgcccaaatatcattgcccttgcgccacttttctacctgcagattggacacttctaccacttcaccacattgtccacagttgcccaatagttggacatgttccccatcatcaataaacttaatcaccctaatctcccaatcgcattccattggactgtgcaactctaaccagtcataacccaatatagcatcataggctcctaagtcgatatc

SEQ ID NO: 79371 - DNA, 383 bp, Zea Mays
agactctggatatataggactgcaagcagcgacaaaggagataagtgaagtagatagtgatcacaacttgtaaagggataactctttgatcgggtatataaggccgagggggtcccctacaaaatcatctcatcccacatcatctcaccccatcctcatcgacagcagctgagccatcacaaagctcatgtgtaatccccatactctagaaatcaatacctaaccacaaaatgaagtagggtgttacgcaattaaaagcagcccgaacctatataaatctacgagcaataccgacgtgcctatgcacataccattgagtcacaatctacaacgttgtcctacccaaaagcatcacgtgggtaaccccgtggtgcacagtcggg

SEQ ID NO: 79372 - DNA, 1650 bp, Zea Mays
ccgggcccaggttcgacctaggatttttgtccaagaggtacagcagccgagcgtcaccgcagagcaggctaaggagtgccacgcattggaccaagcagacgcagatcccaatgactggagggagccaattatcaaatacataaaaaaatgaggaagaaccagatgacaaggccacggcagaacgcatcgtgagagagtcagcccactataccatcatagggggtctactatatagaagaggtgcaggaggagtcctcatgaagtgtgttcactcggctaccggaaggcagctgctggatgaaattcatgcggggcaatgtggcgtgcatgcagcatcaaggacatatgtagggaaagcttccaggtccgggttctactgaccaacaacagagaatgatgcagcagagttggttcagaagtgtgaagcatgccaattcttatcaaagcagcaacacttacccgcccaacatttgcaaactattcctgtaacctggcctttcgcgtgctgggggctggacatgattgggccattcaaaaaagttcaagggggtatacacacatactcgtcgctattaacaagttcacaaaatggatagagtacaagcccatcgcctctttgacctaagcaaaagctgtggaattcattcaaaaaataatgtttaggttcgggatacctaacagtattatcacagacctgagatctaacttcactagctcaaagttctttgatttctatgagcaaaggagcattcagatcaagtatgcatcagtggcacacccaagagctaataggcaggtggaaagagctaacgtaatgatacttgatgcactcaggaaaaaggtgttcgacaagagcgaaaagcttgtaggaaaatagatcagagaactatcgtatatggtctggagcctgcgaacctagccaagccgggccttgcatggaaacaccccattcttcatggtatatggatcagaagcagtattaccagcagatttgatctttggagcacccaggataacatttaaaagcatagctaaggcagaagaaactaggctagaagatgttgatatattataggaagaatgtctgaatgttgtcattcagttggccagatgccagcaaaccctgaggcgctaccacaacaaaacagtgcaacatcgatccttcgcagtaggagacctagtccttcaccgagtactgacgggagaaggatgacacaaactgtcacccccatgggaaggaccattcatcgttgcagaggttacccagccaggatcctaccggcttacccaaatagacggaaccggagtggggaattcgtggaatattgaacacctcaggaaattctatccatagcaatacctcggaactctggtggacaagctgtactttgtaagcaaaaggtttaattatcgataaagcttatgtgttctaccgcatagaaactctcgatcaacaatcggcttaagtcggaaacgacctaaaaccggcgcaacataccttcacacttacataacttagggtgatgactataccctactaacggagcaatcagtttaagtcgaaaatgccttaagtcggtgcgacatgctcacatttacatgacttagggtgattactataccctactaatggagcaatcggtttaagtc

SEQ ID NO: 79373 - DNA, 526 bp, Zea Mays
tgcgaggcgttgtcgcagcggtgcataaacatcgtcgtcatcatcgtcgtcgtccacaggagagtgagctggggctggagttggtggtggaggacgagcctccagtacgtccatgcgtgtaacaagttcagcaactcgtcgatcaagctgctcataggatgtcgccgcagagtcctggtatttttttaaaagcttcagtcatcacgcgcatcatctccttcaattccagctgagagacacactcatcgtcgttaagcttaagccccttgtccttatccatttgattctttggtcctgtcattgttagcacaaaacagagacaaaaaggtaacaaacaatgtgaaccctacaactatctctcagggtggtggtggtagaatataaattataaagcgtcttaccccgctcttacaacgttcttaccagcactgcaggtggcaaacagtgaccgatgtgactgtccaacgagcgtgggtgtgattgcaaaggagtacctgttctgctcgagagaaagctggagttctag

SEQ ID NO: 79374 - DNA, 676 bp, Zea Mays
cttttgcaaatggtgccggccgaaggggtatccgatgactggagccgtcgaatccgcgatgcacgacgaggattaaaagcaaaccggactccatcggtggtcgttagatttaggatctagggccgaacaacaccgagtgtattggaccatcgatccgttgatcagcgtcccgcgctaaacgcatcgaatggttaccctaccatctaatcatacgcgtcggtagcagatccaatggtggatataggatttggccccaacttctaatcctggccgctcctcctaacatcaatggcccacacccgtttttcaacctatcgcacaaccacggtggactgggacacagcacggcggcgcgcccgccggtatgcggccaacccgcttggacgactctcccccacaataaaatgttctacacggtgcggaaacgatggtaatttgacggaacgaaaacctaccgtcgatggtgccgtgggggatctggttcacgccgataggtggcttcacgactccactagatttcagtgagaaattcaccaaactttggcgacccacaagtgtcggagtacgagcgtacgcaaccaccacacgtcggcgaatcccaaattcttctctgcggacaccgagaagagcagaaggaagaaaactagggtggcgacgcaagctcctgttccgacgt

SEQ ID NO: 79375 - DNA, 1274 bp, Zea Mays
atctctggttaatctctatcgaagataggtatatatatgggtttccactgttttgtagatatagttttgcatcttgtaaggaccaatcataaatttatatacttcctaaagtacctatagtgaagcaatagagtgaactatgttgcttgtaattaacttacataacaaacaagatgagttatgccatagcagcctatgtatgtcatggaaaagatgtggtaatgtcttcatatatggtggactacaactacagttgaaagaaacaaacattcaattttagttgagattttgtacattttgactaatttgctgaccaccccttgctccttattgtggttgatggtagttggtatagtattattcgcctgtatggtactaatggatggtgtagttttctcttgtggactatttgtcgacagggaagggcatggtacaatatgctctatgggccaattgttggtgagggagtgcatggtagtgccacaattttcttctatggacttgaaccgttttattgtgacccatgaaggatggttagggctatgttgtcctatccaagatgaggttgtcgtgattccagagtacaaagttgttcttagcgtctcctaggtacgagatcctatccggagttggcatgtcaagctcatctaggagatgatttgggtagactttttacattgacacgtaggcatagtcgctcatgatcgaattgttgtggcacatgtagcctgacattgcctgttcccttggaaaccttcatcgctttcatcttttgcctatcataggggacaacaagcctacatgtcgtatcttcaacaatatcatcgatcgggagagaagtgactagcaaaataatttgtgtactagtgtgagtgttagcattgagtgctactagtgttcttgctttgatttcttttgagtaaagacttattacacttatacttagtgattgccatgacctatacgacatgttagtgcacttgggtgatccttcttggtgtagttcttgttgcagaggctcctattggtgtagatgatttgaaacccactattttagattgaagaagaggcattcatggatgaacttatgcttaaccaagtcttagtaactctttgtctatatataatctaggtgtatatttgtaagttgtgcaatggcacgatactatatataatctaggtgtatctttgtctctctttcattcttgtattgcttgttgtttgagcttgtttgtgtgcaagttcctttaatgataactaggattgcatgatag

SEQ ID NO: 79376 - DNA, 397 bp, Zea Mays
gtgaacggtaagggtgctgaatcccgacaggggcgggagaaccaccatccaaatagtggcgtgctacgcactcagcacgcaattccgcaaccttcgcccgaaccttgcccaactcgtcaagggtgtggtccaactctatgttgagcacgacagccaagttgaccatgttgttcagcatgggattgccctcaccgactggcgaggcaatcacacctccagcactgccggtcgaacgacgagggtagtactttaggtcaaggccatcaactaccccgctgaacaacgagcaatactgagaaagtgcctatcgtactgcatgttgcatggctgcctcggcagtatccctctcagtaatcgaatatgctctgagaaggcctctgcaccccggaggtcatcg

SEQ ID NO: 79377 - DNA, 454 bp, Zea Mays
gaaggtggtcagtccgtgaagagcaatcgccttgatagtatcctcagccctgtatccaaaagactctgaatccaacgaacgctagcctagctgcaagggatgaggctctagggtcatcctcaccctacagcggggcactcggtgcttctcgaacagctgcaccatgtactggggaagcgtcatgtaaccagctccctgaagtacctcccacaagatacgggggaaaccctctcgtgcaagcccgtccgtgtgggactgtgcattcccttcgtccgaggatccgtgagaagtcatctgtgtacggttaagcgtaagtaaaagaaaaagaactataaaatgaaaagggatcgcaactcagcctctctatgactacgacaatggcactgggtgtacttaatctgtcatcattgtgtattaaagttcttacccaattattaagtagtttaattaagga

SEQ ID NO: 79378 - DNA, 477 bp, Zea Mays
aaatgatgaaatgcaatgaactacactttttgagctgttgtaaataaagtttaattaacttcttaatttctctgtccaaggtgcacttctgataggattgtaacttaggacatctatgaggcccattcacttgcataagaaagccagtagaaacggattggattgtgatatttatttttttaattaggtctgctttactgaatgatcaagcactgtcagtctttcaacttgtgttttcctctgttgagcataaagtggaatcttgcagcttatgcatccattcctctttccagggcgtaacactttcgtcccttttgatagactaccaaccacaggtaatttttactccttaattctgtaatacttgtgaactaaattatagaggtagcacaaagtacaacaaaaataacaccttttaccatgtaataaagaaaaagaagtgtctctgcatctctttgcagaaaagacagtaaagtt

SEQ ID NO: 79379 - DNA, 461 bp, Zea Mays
gaaatatttagtgacgaaaagtaccagctttagaagattgttgatgaacttcgaagctcaagggaagactgcatctccgccccacccaatgctatcataggttgaaggacacttttgtttcaattgggactagttctagtgaaaaagactatgtcgatggtgataccactggagttgtgaaatggatcaacgacaaggtagtggcttttggtgaagttctatcaaccagggaggactactgcgcatggataggcgctcgaagcgcagcttcaatgttggagaaggtcgattgcgaacatgtgaaaattattggaaagcctgactttaaggtcttccaggatgatgtcgaaaatccctcgttgaagcctccaaaatgggacacaaagggggccacaacgtttagagtggcccaaaggttaaaagaacttgaaggtattgactttgcaacaattagagtggcc

SEQ ID NO: 79380 - DNA, 343 bp, Zea Mays
acacaagaccttttggatgcccatgtattcaccttaatccaacacaatccacatgtgttgggagtgtttaaattccacaccaaaccactccaacacacggattgatatcaatacatgggcacccaaacgagacctaatagagaaaagtcgttagagcaaagcagcattgttcataaatgcaatggattattgctggccaacataccgattgggttttccccctaatccctagcataaccgcaggtgaactccctaaattactcattcgttgatttaacaaaaagtgaatttcctaaattaccaaccctaggagtccacgctacaaggttccttactcaaggac

SEQ ID NO: 79381 - DNA, 431 bp, Zea Mays
ttgaatttttagaatgtccctccaccagaatgagcctactaatttcgctgaaggtagtgtgctgctgtagtggttggcccagattatgttgatccacggagtatcaactctgttataaaatttgtggtggtttttcattaggagggctttgttttgcaattctagatttataactccaagcccccctgagcttttggtttacaaactgttttccatgctacatggggaggtttctttgcatttatatctgctcctctccataaacagtgccttctgaatttatcagtatgcttaatcactgatttcgggagcttgaggatgcacatgtaatacattggtagggaggaaaataccgcgttgaccatttgcagtctgccagactaagatagaaaaacagaagttgtcgcaagtcttttctctatcttctgaat

SEQ ID NO: 79382 - DNA, 952 bp, Zea Mays
tgtatgtgaaatttttgcctgtgtgatactgaacctcggttgctgcgcaggttccgacgtttgggcctgcgcaagcaaccagtactgacaataccgattttgcggtggagacttcaattgcagtgcccgccaatgataatgtgcctggctctttgtctgaatgttttgagtccgatggtgagtctgggagtttgtttccttagacggaggagtcctcggacgaaggcttagattattttgttgcgttagatgtggctgcagcggagccttcgccccgcgtggggggttccgaggggttcccgggtgtgagtactgggtataggcggcgaagggcggttgcgaaatggagagtgagtgaattgtcacaaagtggtaggcgtgatcatagtgagatggagagtggtcgtcttcgcgaggacgggactagtaaacgggaattgttgtcctcgccgattggggcgagtgtaggtgaaggggagctacgaaatctttttgagggtgaggaattgaggataatgttgttcaactacagggagatgggtatcatcccgaaggttgagccaatgtaatatatgatgcccacgttatgtgtatgtaaccgtaatttgtatgataaggctccacgccttcgttgatatgagtcttttgtgaaagacttcgatctttacgtagttattgtgctgtttcggctgcacccttaggcaacttttgcacggagagctttgtttggaaaagacttcgattttgcgcacttattattccggctgcacccttaggcgacttttgcttggagagtctttttgaaaaagactttgattttgcgcacttattattccggctgcacccttaggcgacttttgcacggagagtcttttggaaaaagacttcgattatcgcacttgttgtgctgttccggctgcacccttgggcgacttttgcacggatagtcttt

SEQ ID NO: 79383 - DNA, 373 bp, Zea Mays
ggtggggtgggttttacggtggcggagatcgatttgggggaaacttcgaattcgcggatctcagcgaacggtcggggctaattcgaggtggctggttagcttactaccctacggagctcggggcggggtcaatttatagacgtagcaagcggcggtggcgaattcgaccgagtagtgctggcggccggaggagagacgagctctgtgcgtggaataagtggctttcaccgtgccaggttctccggtgatcaccggacatgcaccgcatgattcaccgtgacgagatccagcgctaaagcacgtggttgcgcgatggtgacagcacgacggcgatgagaccctatccgaaagatcagtgcgcaggggaggggca

SEQ ID NO: 79384 - DNA, 772 bp, Zea Mays
ccgccgcggcatggaacgtgtgcgccttcctcctccccaggaaatcccgcagatcccaacaacctcgcagccggtatttctcgtcacgtacgcctttcgtgtagaataaaggggggctggacaggggagtcttcgcccttgtttgcaactcagcgcaaaagggaacgtgaggagagagagagagagagagagagagaaggagttaggctctgcgctggtggtactccatcaggtgtcaggacactagtctggtgacgagccacatttccctgggcgttggactccggtgagttttgccctcattcctcgacgcgtaatccagggactgtagtagtcgtcttggtaactcggcgcggttggggcatcggtgcctccgggattctgtggactatggcggcggcatgggactccagccttggacgcggtcggctgtgctcggttgtcacgggttggatgacaccgataggtccgcagagccgagtacctgggtgtggggactgaccatggggcagctggggccgccaccgtagagtgcgagtgcggggtagaagacgcaagggcatcccttgatctcgcaatgtacggcaaggattagaggaacgggatgaagaaaactgggaccgtaggatggtgagcggagggggtagattaaatcttgcgtaccccttcgtaccgtggaatttgggcggttagattgtgatcgtgtggcctagatctgggcgggatttcataaagcgtggatctaatcgtgactatagatcttgaatcggac

SEQ ID NO: 79385 - DNA, 415 bp, Zea Mays
gggaaactaagatgcctacggaaccgtactgaggccaaaattgttagaaccctctccaaaagcattggcttgccgaagctggagactgacttgtgccgttatcaacgacaccacatcgccggaagcttgctttatgctaactttaaggtaacggatatttttgttattttattactattattactatcttttaggtcacgttttaacgaagatcgtttcgacagagcatattattaagcaaggttctaaaaatgcaacaagatctggaagaagagaaaaacaaagccgtcattcaagatttggctaaaaaagttgaaaatcacgaagccaatctgaaaaagaaagaccttataatccaagaccttggaatcatggtcaaagagcacgaaggtgcactggaaaagaaggattttgt

SEQ ID NO: 79386 - DNA, 286 bp, Zea Mays
tttgaatcgcagaatgccatcccggagggaaaaatttggaacagctgaattgtcgacagccaatttggtcaacagaaccttggtttcctcatcctgtaaataaccgtccataagagactgacaccattgtggcattgcgacagatagagcacaacaagaatttgtgtcatgagccttcctggaaagagcatcagccactctgttatcagtgccctgcttataaatgatcttgtattgcagacccaataacttggtaaaaaccttatgttgccatggtgtgttcaat

SEQ ID NO: 79387 - DNA, 448 bp, Zea Mays
ggcgttttatatacggaaaacttaaggatgccaagctgacatccttagtatgcatctgccgatcacatgaagaaagataacaagctatgagtctataacataatagtggaagaatttcaacgccacgtacgtacccaaagtttcatgatgagccaaggttcgtgctaagtactagtctattatgtattctttgatggattggacgatgacatggcaagtaacatggacctatataatattggccagaatctcattcaacacttgaaaataacaatacccgtaattttcggggtagtttggctgtctgattacttcacgttgatttgccctgtcgacgtgatagctcgacatgacattattctctcttatcgacttctgaacgtggaacatacatctaagcatgtatgcaatgtaacttccatatatatgcaaattgaatctgacaatc

SEQ ID NO: 79388 - DNA, 565 bp, Zea Mays
aacatggtgacggtggcaagaacatgccgaccaacacaaacgtcactcctatagcaacaccacatacagaatcttccgcgccgatatttgatgcgacgccgcaaataaaggtatgagtataccgcctcgttgtttttctatattattattagtactttactaaacatctaatccatttataccatatttgttagtttcccggcggcgtccaacaagcggcagaaacagatctatccgacagtggtccatgctttgatcagactccatctgaacatgtcagctcagtaattttcattttcattatagttatgcattagacaaagcagtgttatgcatatttgcacatacatgtatgctaagtagatgtacattcagtttgttacataactgttaattgcttatgatacattccacatacgtttatgccagtttgcaagtatatttatgacacttgattcagatcagtaatgtcagctcaataattttatgccagtttacgacacttgattccacatacgtttattccagtttatgtcagctcagtaattttcattttcattatagt

SEQ ID NO: 79389 - DNA, 788 bp, Zea Mays
tgcaggactccactgtattgggatcaaactggagaaagacagttctttggacctgaacttattcaagaggcagaagaacaagttcgaatgataagagaaaatttgagaattgcacaatctaggcaaaagagttatgctgataatagaaggagactactggagtttaaggagggtgatcatgtgtatctgaaggtgtcaccaatccggggtatgaggagatttaaagttaaaggaaagttgtcccctcgcttcattggacctttcttgatcttaaagtgagtgggagaagttgcatatcaactgaagctacccgatcacctgtcaggtgtacatgaagtatttcatgtgtctcagctaaagaagtgcctcagggtacctgaggagcaactaccaatggaggaccttagtgttcaagaggatttgacttatgctgagtaccccatcaagattctggatactttgattcgagttacgagaaataaggttataaagatgtgcaaagttcaatggagtcaccacggtgaagatgaagcaatgtgggaaagagaagaagagcttcgtataggttttccccaccttttccctaaatcttcttaaatctcgaggacgagattccttttaaggggggtagtatttgtaatacccaaaattgtaaaagcatagaaaatgatattatttccctcatatgtattgcctctattcatttacacatgtgaacaccacattagaaacaaatgaataataaaagacactaaaatggaatatgcatcatgctggagttttgcttt

SEQ ID NO: 79390 - DNA, 324 bp, Zea Mays
gcagatgccttgagtcggaagttgcaatgcaattgtattctgatggattctcgtgttaacaccttgtgtgatgagttgagcaagatgcaaattgaagtgatttcttctggttctttgtctcaaatggctgttgagccagctttgcaaaaccagattatcatggcccagcttaatgacaagggagtgcagattatcaagaagaatctccatcagaaggttgagaagtacaattgtttccgccaggatgagaagggtgtattatggttcaaaagcagattggtaattcctaaggaccaggatctcaagaggaaaattttggatgag

SEQ ID NO: 79391 - DNA, 1557 bp, Zea Mays
gggagagtggagacagcgcccatctttgacgacgagcccaccgtgctaggggaggagcccctccagcgcgatgcacgacgacatcggaacaggcgctataacatacgacgtcaccatgaagctggagagcgtgatctagcccaacctttcgctcgggacaaagcttctgaggtgggggagacccccgacgaaagaacacaccgagagcgccgcaattcccaccgttgggattgtcgccacgctcaggaacgcgagtgggaacaagtcgagcatgacgctcggctccgacacaaaaacccactcctctcccggaacctattccctgacttcgcacgggcaataaatatagtgagcaaggtttaggggtcctggcacagatttccaatggtctaccgcgcaccccagatgcggaaggctatcggcaagtgctcacccaggcggtaaatcacaatctgcccctcgctcacccaccgaacgacctacgccagtccatcaacagtcggcgagacgcgcgaagccacatcaacactttgcacgatcatcgacatgaggatgagataaggcgacgagaggagtatgatcaggatcatggcggaccgacgcatagctgtgcaactagaaccgagtcagcggcagcttccactagcaacctagccctaggatgatcgaggcgacatgacgctcgttcgcctccccgggaccaacgacacaatcaccgacgagagggtagggggacatgcagagtctcctctcttacccccgattctgagcaatccagtggccttcaaacttaaaagtctccaacgtcgacaagtacgagcccaagcacgacttgggaggctggttggcagtctacacaaccgttacgccgggctgctggggcaatggaggatgtcatgatagtgtacctgcccattgtcctggggcaggacgcgctgcagtggcttcgacatctaccacgacaatgcatcgatgactgggaaaacttcagccgtcggtttgtcacgaatttccaatccctctctaacaaaccggtgcaaccatgggacctcaagtccatcaagcgccagagcgatgagaccctccatttgtttcttaggagatgccaaaccatgaggaactgcattcctaaagtcacgaatgcaactgtgatcgaggatttctattgaggatccaatgactcggccttcatccgagccatcctccaaaaggcactcgtcaacttggaacaactgttccggcaggcggacatctacatcaccgccgacaagtgagcccaagacctcattggaagcgtgaagcctgcacctccagcacccaggaaggacatgaaccagcaatcgaacaaacgttgggtcaagaggcctcgcgaagaagtgcacaccgcctggccaccggctactcggacccatggtgcaccccacggtaaggtatggacactggatgagatcctcaactcccagtgtctgtacaaaaaggagatttgccacactctatgaaactgtcgggacttcaagaactctgttgggcacgaccgaccgttccaaccgctaccac

SEQ ID NO: 79392 - DNA, 697 bp, Zea Mays
ggtgatgtacatctaatcgaagatgtcgttcggggtcttgggtggggtgtggaggcttcgctccatggaagatttctcattagagttgatgtctgtcgcaggtccgagctcctcgtggtcgggaatccttgttccgaaatcgccggtgaggacccctctatgttgttcgcgttgcctttcttcacgtatggaactagttcgtgttgagtttcgtgcactggttgccgcttagggctgtcgccggccatggcaccaccgtgtttggcgctgtgccgccgacctggacttggggggaggaagaaggtccctgagccacttattttgtgatcgatggttgcgattagatcgtatcgtgtgtggtcctgtgaccgtcaattctagatgaacagtggagattagaaccactcataccctttcgttctaatgaatcatagccacagatctcgaaaccgagggttaggtgttgtggggtgtgctaaccgttgatctaagatccgaggatcacggttacataccattttatttaaatcgtgatctaatccgggccgccggatctagatcggacggctctgggtccccgatacatcttcgtcgttgcctttttgctaaagagcccctgtggatcatacaaattaacccacagaccagaggtagtgttaaggtattaaacttaagtcctaacatttttagaacggcc

SEQ ID NO: 79393 - DNA, 1010 bp, Zea Mays
agggatgaatagcacacaaactcgatggcatattgacccacttctagtggtaagttgtcatcacttcaaaacctagtggaggcatttgtccgagcagtacaacaaacatatagcctcatttgagtttcggaatcggagtagatgtgatctgggtgacgatgttattgatgacatgaatgtgcaccctgttttttggtgacaaaaccatggatccgagatgtcacccagatcaaacttggagatactctaaagtgaacatgggacacaagacaaaattttaggtggacgacactgtaagttacaaatcactagactatactactagataaaagaagttttaaaataacatgtaggttaagcgataataccaagagtgttccaaaaagatacgaataccataaagcgtttttggctgccctagggggagttggagaggggaaggggctgggggtatggcgttggggcaaagcagccacatcagagagtcgatgtggcgagtcggcgagtctaccataaaaaggtgacgatgaagcgacgacaaatggcgagggggatggggtagcgaatgcaggtggtgataggcgacagtggcgatgcagcaaggtgatggtgccaagcggcaacgattgtcgcattgtgatggcatgaagggaccctagtgaggagcgagggaaggtgatgctactgacagacaggatcccatcgatagcctgactgtctgtcggtgcaaactctgaggtaaagtagcagtgttgcatgtgggatcctcacgagatgacgagcatgcaatgtggtgccgacagtgggcgggttaggtcacccactaacctatcagtcgatgatcaaaggagtgagcgaggcactagtgggtcttcgctaggggagggaatcaaatgactcaagtggggagtgagcttaatagtggagcaccgaaaaaagctagatcaaaacctagttttctttagatttgacctcactgtaagtgcaatcgacccctaattgagggtttt

SEQ ID NO: 79394 - DNA, 684 bp, Zea Mays
aatggactgagcaccaggtcccagaaaacccagaagctgttgaagtctggaaaatgtactttgacgactcgttaagattgcaggggcaagagcggggatccttttcgttgcccctggaggtgaccaactcaagtatgcgcttcagttcctatttccagcacccaataatgtcgcggagtatgaggccatagttcatgggttaagcatcgtcatttcactaggcatcaaaaggttaatgctatacgacgactcgctagtaatcatcagcgaggtaaacaaggattggaactgcttaaccgactcaattaatagatactgcattgtggtgcggtagctagaagacaaattcgagggtttagaatttcaccacatggaaagggatcgcaatgcagcagcagatccattgtcaaaattgtggtccagtcgggcccaggttccacctgggattttcgtccaagaggtacagcaaccaagcgtcaccgcagagcatgctgaagaatgcaacgccttagaataagcaaaaatagatcccaatgactagaaggatccaattatcaggtacataaaaacgaggaagaatcgggtgacaaggccgcggcagaacgcatcgcaagacagatggccactataccatcatagggggtctgctatatagaagaggtgcaggaggagtcctcacgaaat

SEQ ID NO: 79395 - DNA, 323 bp, Zea Mays
atttttactcttctgtcggaacctcaattatattatacatgattgttttctccatttcgggactttttaagtcttgccttaactctgtccatggactatgcttttcatcattatcacctttatccttatcacctctatatcttaccttgatgtttatcttatatcggcctttaaaatctcccccttttccatctcaatctgagagtcgtactttacctacttttcccttagtcgtatcctcttctttgtcacctgtgagtttttaactctatcctttgttgtgtttttgtttgttatttcctttacccttctcgtcactctat

SEQ ID NO: 79396 - DNA, 433 bp, Zea Mays
ctccttttccctatggcctaccaagatacgacggaataccaaacatcccagccaccactgctccaattgtagccaccgccaactcctcgccatccatcccaaccgctgccatgacctcgtcatcagccatcccccctatcatcacccacatatgccctagttccgccttatgcctactccaccgcaccaagaatgcccttaccgatccactagataccgttcccgcattccccttcccgctccctagtttcactggccaccacatcccaccacacacctacaatgtccgtgcttcccccacctcgtctattgttcatccgtgggtagtaccgcgatttctccaaccagcaaccctacgacgcccaagcaccggggtcctggtcctcgacctcccacccaccactcgtactacctccataaccctagttccaac

SEQ ID NO: 79397 - DNA, 329 bp, Zea Mays
ccttttttccatgtctctccagcgtgaggaatcagtggccaaaccaaaccaaaacagaatgcgtgcatctacaactttcttagagtggagaacttaatacttgaggaagatggatgtatttttatttccccttagtccagaatcataggtgctctattaaacgcatgtcgcctacgtgtttactcaacacattgggtggaagctctttattgagcgaatccgcaaacatttgatctatatgtatatgctcaaggtcaattatttgatactagactctctcctttacaacataatacttagtgtcaatgtgctcgacaattgacttgtta

SEQ ID NO: 79398 - DNA, 316 bp, Zea Mays
tgatccttcttaccgcgcttgcccttgctgcctttccctagggccattggggttttctttcaaaagtggagaagtggaagcaagaaaggggaccagagcgagtgaagaagacagtcacaggcaggcggtctatttaaagaagccaagggttggccgttcggctcctgcccatacaacgaagagtcgcaaagccttcaagagccatgtaaatttccaagaaataggaagtcactaacacccattggcgtaacattgcaccggagaagagtaataccaaccgctcaggcacattattacaacatgtcccgtcagttta

SEQ ID NO: 79399 - DNA, 429 bp, Zea Mays
atgtattccaagtcaccatggggaggtgctttgggagcaggagatttagatttttcaggaacactctcttccaccagccctattggcacaactttcaaaggttcggcttcggcaagagcagtagtcgtggttgcagtaatcgtttctcttgcatcttcagatttctcacgagatgcttcgacagaagcaaaaactggcgctttcatagattccaagacatctaaaacagtagccattcttcttttccttggagtcgctgttgtagtacttgatggcttcgatagccctattacagctggtgggctcagcacctttggctgttctactgccttttctgattccggctctttgaccgggcctgcactagcttcgatcggcatcgcaggagctgtttctgtggctaagggggcaacttctgcacttccaata

SEQ ID NO: 79400 - DNA, 371 bp, Zea Mays
tcgggcctcaattaccaaaaagtgcaggggcttctgcgcataattttctaagactcagaatactatgcagtggacggcgggttggttctataaaaacagaggggccaaagtgtgaatccgacccacgaaggggtatcggcagagcttggccgctggatctaaaatgtgcgctctagattagaactggtcccccctgaaacggtatcggatctaagtcgtcggattaggaatctacggcacagatttttaaacactacataacccacactgcccgctcgatctgatttggacgctccagatcgactatcgcgaaggggtacgcgcggactaatcaccaccgttcgcgcggatccgacggcgcacgttctccg

SEQ ID NO: 79401 - DNA, 543 bp, Zea Mays
agggcctcttcctccgccagtttggctttttgcatggcggcttggagatgaagcacttcaagagctcgcactcgcggaacttgtggtggaagggaaagccgtggttttggcatggtgggtcattagtttatggaagtggtcgccccccatttttggtcggtgacctaggtggccgatccattgtggcaacttcttgctcgtcgcgtcgaggacgatgattcatcaacacttgtcggggtgctcctgacgttccttcttctcggtgctgggctcaccgatgtcacatgtgatcttccctttgcggaaaatagcacctaccacatcctccccataagcaaacttggtctctatattgaggaggtcgacggtggtcttcgatcgccgtcgcccgagctcgtggacaagcgcctcgttggcggtgccataagtgaaggcacttactacatcaacgtcggtggcattggggagttcattccttttatgggacaacctccggatgtagtcccaaagactctcctcgctcttctgggcacaccttttgag

SEQ ID NO: 79402 - DNA, 688 bp, Zea Mays
cagaaggctggccacaatgagctcattcacggtggcgtagagaacagaattgggggaaatcccaaattggagagatgtgggggatgattggtggtgagggctggttcactgtgtgcacaattacttagcggagcaggctagggcaccaatttatagtgtccaagggcggtggctcccaattttggaatggcgcgctggcagccggagagaaggaaggtcactggcggctcagtcgtggcgtcctctggtgcaatggttctgaaatggcaagcctaggcgtgccatggttactactacgcagtaaagagctacggtgtggcataaatgaggtcaccgaagtaccacggcgacaccggcggtccagccacgtcgcacggctacaggcgcaagtgataagcttcaccccgcgaccaaatccactccaataccgatcttttcaccccctcggtactatcatgcccgagtcctgcacgaatcaccgcgatcagcgcaaatccttgcacggaggtcaccggcagcgagggggatgaatctgaagatttttttagtactgtaccatggccaccacctttagtcgttctgacagcctaagttgaggagcaattttctccaatttttatgtgatagctcactaatcttcctgtatcaaagttattgatctataatccatcttcaattttgatatagc

SEQ ID NO: 79403 - DNA, 296 bp, Zea Mays
gcgcactcgtccagtttctgcaagataaccgagaggtattcgcgtggcaacctgcagatatgccgggagtctcgagagaaccgggcaagcacatactgaaggtctatccccaggcgaggccgatccgacaaaagttgcgtcgtttcacgcccgacaagagagaagctatccgtgccgagctagctcgcttagttgcagcagggttcattagagaagtgttgcatcctgagtggttagcaaatcctgttcttgtactcaaaaagaataaagtggattggcgcatgtgcgtcgactat

SEQ ID NO: 79404 - DNA, 314 bp, Zea Mays
agctcaaagaagaaaatgagaggctaaagatgagcttgacacaacttaaagggaagtgcattgctcaaccttctcaagataaccgtgatcacatggtgaagaagcttgagacagagacaaccgtggcatgcactaaatcccttgaagaaaatgtcaaggacttgaggattgccaagaggagggaacaaaagaagaaaatcaatacctcttccaaaagcctcaaccatacctccatacaaggtaacatccaaggtaatgatcaagccacacttcacactaagagaagtaaaaagtgtagtgaatgctttgaaaag

SEQ ID NO: 79405 - DNA, 510 bp, Zea Mays
aaaaatttggaattaaccgatagtctaaagcagctaacacacttagaacactcactatctctagcagtaggggtcgctagcgcctcgctgatcgccgcccctgccctgcggagcggcggcacgatgcgggcagggacgactgtgccctataatgtcggataccatataatttgccaccatgttggcataattttgctataccatatatataatttgctattttctgtttgcatacaacatacatcaccatacactgttcagactatcctaaaccataaattacacatgatactgaaatcattggctcatgatgcaaatcatcatacgctgttgaggctatcctcaaccataaattaacacgaaacagaaaccactggctgacgagttaaaaacaggtgtgagaaatactcaccgtttatgattgctataagaaacagaaaattattttttgtgtcgtgtatttgtggtcgtccatgattttatagtatacgatgtattcttataatagag

SEQ ID NO: 79406 - DNA, 322 bp, Zea Mays
accgaagataggcgatcccgagctctgatgttctagcgatggcacagataagcctatacatagcagagaggatcacaaattgggtgtagggatccttacccaagttggggtgtagaggtgccccgccacagcacagggcggactctggtgggggtagttcgcgtaggtgaggaattccaggtgctccggccgtctacacgcttggtggcaccccgcacacaatcgatgccccagggagacacccacgaccacaccgcgggctcccagcgacagtggagccgaggaactacgacagcgacgatttttatctcttggtaatggc

SEQ ID NO: 79407 - DNA, 533 bp, Zea Mays
ctcttgcacaaagtctctagtactgatgtgctcggccaccactctaaattctacttcagccagctggcagggtaaccccaattgcatattgcatatgggtcgagtcatgccgaagatcaactctaacggactcataaccatgctcattagcttctccctctttttctcatccgctttcatgtagaaccattcattagtccatccactcggccacttggtacgatagccaataaccggggcctttgtatccttccgatacgcaaaattgtagtagccaaagttcttgtgaaggccatctgctctagccttcgtctggtagtgaagttcgtgcacccgacagaaagctttggcattcgcatccattccctggcttcggagagcccatatgtatacactaagtctaacaatggcattgggggtcatctgatgaaggtatatttcaaagttctttagaacctcccctatcatgtcatttagcgggaaccaaagccctgctctgaagaagctcttaaagatggtaacttcatcatccc

SEQ ID NO: 79408 - DNA, 903 bp, Zea Mays
ccacatttggtcgataatggcagtcgatagctgagtggttgcctctggtctgagttgtttcattagttcgaatttgaaaataatccaaaaaatcataattccatcctataaatagagaggggggcttgaattcattcacacactttcacctccgattctcaaaccctctccttcattcgcatattttcatctccgtttcgattcggttgctttaacctttgtttcatatagatctgaggtggagtcacaacaataaaacattcacatactttctcaatgagcaaactccacaacgtcctaagacccctgctagtgcggggcaagttttcttcgatggtcattctctagtccaccatcagcgtcaggaaggtacttctcgtcccgatggcataactcctcaacctctctttctttacatgtatgcccctcctccatatccatactgaccatgtgtaaaagctccctcctactattaagccaccaacgaccaatgctcctcctagcactgatgaagcctcttccaccgatgctcatcctacacaacctttcacttatttgtatcctcctccatacatgtacaagtatccatacactcctcatccatatggtgctcctcttgcgttctttcccaccaatggtgttcctcccatatatggtgttcttactccatctcatgctccctcaagcacgatagtatcaccaagaaggtagtgttgatgcccatcctgtcgactggctacaacagtatagtgttgatgcccatcatgttgaaggcatggaagaatatatcatgttggcctggctgccattgtccatgagggccttgtgtatttctcatcctgctatgttacaatttatgaccattgcgtttgtatgtggggcattgcaaaggttgacgtcgct

SEQ ID NO: 79409 - DNA, 727 bp, Zea Mays
ttagggcgacgattagtcgacctaatcggtcctggtcgacctctggtcgtccgttagtcgtcctatagatttaaggacatatgtatatgtatataactatatattaactatataaacactgcatttctgcaataatataggcataattagtagcagactagcagtaattcagtacaagtgtaaaactgaatccatccaaagtccaaactgaaagtaatattggcatcattacttgcagtaattcagtaaaaactaaaaagtactgcatagtctgcattacctgctggctgctacctagagcagatcagcatccaaacaaaattacttgctggctgctacctagagcactgacgccgctggacggttagagcacttggaggctggaccactggagcagagacgtcagcaaggacagaggagaggagagagatgtcggcaaggacagaggagaggagaggagtagggttttctggcggctgggaaatgttctggcggctggaagggtcctggcggctgggagggtttttgaaggggcggctactatagatgggccaaaaaccagagggaagcccagtaccaaaagtccaaaactgcaacgaccaaaaacgaccaaacagtgctcgaccagacgactaatcgcccaggtcgacgactagtcggacgactaggacgactagaaaccctaatcgtgtcgtcttcctaatcgcccacttccacgcgaccagcc

SEQ ID NO: 79410 - DNA, 391 bp, Zea Mays
aaaagattagcgcaatagctagctgacgtggcaatgagatccatgtgcaacggaccggtccattggccaccttagttggaaagtgtcaatcaagatcgcggggaaggtgtgcatggacccggactcgttcggtgcccatgtcgagagcagaattctggcagttttacaaggaaggaggcaacgactataaaagggacctctagacgcctccaacgagtacccaagcacctcaagcacataccaacactttcaaacttcgcaacctcgcattctagtgatttgagatagtttcgagcgcctatgatgttcttgtgtgatcttgtacttgcgttcctggctttgcattttttacgtgtattactatgatttgctcttatgtatgtactctttc

SEQ ID NO: 79411 - DNA, 479 bp, Zea Mays
gcatggttgattattgtattgccaactagatccgcaccacagtctccaagggcatcttcgacatcatccgttgcgaccgcaatgacgccttctctctgtggcacgccatcgaaggcttgtttcaagacaacgaacttcatcgtgatgtgtaccttgaagccgagctacgttccctgcagcaaggtgacttgtcaatgaatgcctactgcaccaagttgaagcgtcttgccgatcaacttcgcgacgtcggccatcctatctccgaacccagtcaggtgctcaacctccttcgtgggctcaatccaaagtaccgctacgtcaagcccatgatcacctccaagttcccagcgcacaccttcatgagtgctcaatccttcctcatgcttgaggaggccagcatcgaacacgatgtcgccgttgaggccactcacgcactgaccgtcacacatggtgactcgtccagtgctgttcctccatct

SEQ ID NO: 79412 - DNA, 800 bp, Zea Mays
accacagggctctgcttcgtcattagatgtttcggatacgtctcgttctgcagcgctctagctgcaaccttttgtttcttggcatgtactggaccttttgtttcagtattctgaaagaaaaaaaatacacggaaaggcggcgggtgcagcagttgtgtacgtattcaagaagctctctactgcttcaattgattaattattcaagagtagaagacgagttgtacgtacagagtccagaactttatcacctgatcagacattgggccgggaaaaacaaagcggttccactaaacatctgtcgacatcgtctgtcttgggaataacaaaaaagcaagaagaagaagaaggagaagaagaaaaacaaagcaaaccggacacaagagtggtgacctcgcactcaggctgtattcaaataattgtgccatatattctccaaaactcatgtggtgtctgctacacatatgataacctcagtagagtgctaaaagcaggatgacaaagcactgataataagggccgtatgccaggtaataatcttgtttagattccttgctccaaaaaaccagaaacgatgcggcatgggcattagcaggatttttcatgtcgtcatgcagccggcaatatatgcccaagtgccaaaacatgttgctgaacgcatccccatattgcattcccgattcctgtaaatccaaaccgccctttttttagttgtagatagaggagttcgggagattgaccatggttgttgacacccgggacaagtgtatatagaggagtaaatcttattaaccaagtcaagc

SEQ ID NO: 79413 - DNA, 863 bp, Zea Mays
ccaggacccacctacaggggtccagactgcatacgtgggggtccgagtcccacctgcaggggtccggactcattaaaagttgtgggggatggatatccccctgggtccacacgcgcatggaaacacgcccgaggccacctagcaggcttcctcttgggatgtcctacggtggatcggccaaaagtaaccaggcagagcaagcccattctgaaccagcaaaggccaacgcccgagttaggcgccacgagagcacgggtatatcgggtggaacggttgcgctcacctgacaggctaagcctctggcagtaacttgggcggatgagcgaagaggattcccgaaatgtaggaagacagttccctacaaaccgagagataggtgaatggattatgtttgtcacatgtgcgagatagatatccttggtcgtgcatgtaaggccaagaggaacccctaccattttcatctcaccttagcctaccatactcatagttcacaacttgtaatctcatcccaataccaagatcaccacaggatgtatggtgttacaccattcacgcggcccaaacctgtttaagcctgtgtgatctcctatcgtgccaccgcacgaaccatcaagtcacgatcaacgacgtcgttcagtccaaaagcatcacatgggtaaccatgtggtgtgcggttgggtaacgaacaacgacagctggcgcgccaggtagggggtgcgacattgataagcgccgactccatggcagtcaccttcaagagcatgatcaccttcagtccaggagcagtcttctactttggaaccatctcctgtgtcatggacatggagggaactctacaccgcgaaggcagccatggggaaacc

SEQ ID NO: 79414 - DNA, 354 bp, Zea Mays
ggaacctggcatgacgcctctgggctacgcgcgccttcgcattcattacggataaggcgtgcgcctgtccattccactgacaggcggcgtgcccagtccacgatacgtgggccgcacaattactcacacgttaccatatcaagggcaatgactcaccattactcgtgcgggttactgcctatcaatgctgcatggactgcagccatcatgacttccgctgattactcatgcgttactctatcagcattagttattcccataatgtatttcttccattatgatcctgggctcgcatgtcggggctcagcatccttgtatgtgcctcccttaaactataaaagggaaggcacacat

SEQ ID NO: 79415 - DNA, 397 bp, Zea Mays
gagcggttagaagtactgcgtataatagcttctaaacttgagggtaccttatcttcgagggaccgaggacttcgctgataaagtaaatcggatgttgtactggatacgagcgccctatttctgcccgctcgactaccaacgtagtgcttaccatgtgagtcgtgcaggatatatatagtagcaggtctttagccggttgatcgaatgtagctcggcgtggtggcttgagtactggtggtgtggtcagaaacttctttagtgcttccaaggcttcctgagcttctgtggtccactagaatttatccacctttttgagcagtttatagaatggcatccctttctcatcaagccttgatatgaatctactaagtgttgacatgcatccagtgagcctttg

SEQ ID NO: 79416 - DNA, 791 bp, Zea Mays
tcaaccactctgttctcttcatgtatattgtgccaacgacggaaccgcagataggaacgactctgcaagccttgctgacacaaaagaggagcacacacgaaatttgaaaaaaaatgttcctttttttaattttacatatgctatggcactaagagcatatctgacaaattacttattattctcccccaccactgcttgaaatatgcaatataaagggattgtggatcctccaataggttactcattatacccctctgattacctagaagtttcaaataatcactcaaaatccaccccaaccgtctccttgaaatatatccaccctccttctcctctgtccacttgtgaaggtattggcaaactgttgaggatgacaaagaagagcatccatatttattatgatatagaacagtatcagaaaatgcatcatataaactatttttataatctgcttattttgatgctataagttttggtattctttactataaagttggacaaacctcaaggtagtttgacttaaggtgattctaggagttaatttgtttttggatgaagctaactaagggagcataacgagttagggtttcccttcattaaaatgatctgttgaattctagctatatatatacatactctggtagtccatcatcatgtttatttttcgactccgtctattttaagttctaagcttcgttgtttaagcagttactagaaaacatgcatgtgaccttgtgactattcattcttgtaaccagttgcatccattgcaatttgattactacatgcga

SEQ ID NO: 79417 - DNA, 568 bp, Zea Mays
aggccactccttcaaactgcggcacacgtcatcgaatctcaatatgggctcggtcacgaccttgggcggacttgcgcctcgcccgagcccggttctgccctcgatatctgtgacagaggatgcccccaacgtcattagatacattggagctgtcgcatcccttaagaagctttttcccatactaaacactgtctcaaccactatggtatgggcaacccctcgctagtggggctcgagtacatgaccgagccctcagcctcgacctcggctctcagcaagtaacaagcagggacaagtcaacaacaaagtacaagaccatatcgtctacggatacaaaagaaatcccctcacagtatgcagtcgactcccatcctccacgaagcaccccttgagcctataaagagggtagtctacgacttcttaaggggcaggcgaacacttcacgagtcttcccctccacacagtattggcacttgcctcaatcaatccagggacttgggatccttccctctcatgctctgcttgtaatccctactgcaagcacttaggtgcgagtaacatatgtctc

SEQ ID NO: 79418 - DNA, 296 bp, Zea Mays
aaagaaatcattcagcgacccatctggtctcgcttcggcctccgaaggccaaaggtagaaattgatggtaatgtcgaagcatgtcagagagcttttagcattgtttgtgccttcattggcacaagggatttgattcaagagcatatatccttcagggtatggccacttgtggagagctaggatatgccgaaggagaccaccgccgattctagtgagagtggtttagtccgactgaagtataccttcagatttagggagaagtttgatgagccaaacgacgattggctcaagtgtgt

SEQ ID NO: 79419 - DNA, 768 bp, Zea Mays
atcttgatcccgtcaaaacctagtcacttggattttgaaaaatctactgtttctgaagctgatatgcccatgatgatgaagctgggctacttcggagaagccaagaaaaagctgattcgttcgttttgctggggaagagaccactccgacaccgaaagttgatgaagtggtggttttcaaaagttttttcagagccggattacggtttccgctgaacgagattattggagaaattttagctaattatgaaaaatttcttcatcatctaacccctaacaccattgttaggctcagtatttttatctgggcccttcgaagccaggggatggacccgaatgctgaagctttttgccgagtacatgagctacattaccatatgaaggctagagaagacgggctccatgaaaattttggctgctataacttcgcgtatcgcaaggatacaaaggccccagtcctgagctatcggtccaaatggccaactggatggaaaagtgagtggttttatgttaaagctgacgagaagaaaagggagaagctgaagaagctggtcatgagcccactaagcctaagcttcgggatgacccgacccctgtgcaacatgaaaccagggttaccatgccaactagccatggtagaattcagagtggtggctgagcatatcagtaccagagatctagtgcaagaatacctggtgaacagggtatctccaacattgagtaattggagcatgccgaagctgaaaggatcaaagaagataggtgaact

SEQ ID NO: 79420 - DNA, 325 bp, Zea Mays
gttgttgcttgaaacgatagagcatggtttttaaaatgaacaatttcacctcttcgtcgcctttatttgacttcggcataccataatcggaccttatagggaacacatgattcataagaaatcattgcaccaagtcttgtgtaccaaacctgtcaagcatggtgttaaatgcaatgatggtcgtttgagcatccccactcatgttgcagatgggtctctttaagctgaagtttaccttcaatggctttatcactatgtccataaattcctctctcttatttttgtttactttagcgtaaaaccattccttagcccactagcccgg

SEQ ID NO: 79421 - DNA, 1932 bp, Zea Mays
gcttaagtcagaaacgccttaagtcggcgcgacatgctcacgcttacatgacttagggtgatcactatgccctactaacggagcaatcggcttaagtcagaaacaccttaagtcggtgcgacatgctcacgctcacatgatttagggtgatcactataccctagtaacaaaacagccaactcgaattgggagtacttcaaaaaacaagaaatatctcgcttacagtgccaggggtgttttttagcaccctacccacgaagcaatcagttcgaacatagctgtcgtgcacatacagaactcacattacactttttctctaaaaaaggctaactcgataaacaagtgtttttcaggcaaatcattgcgctggagtattcctgcgggcgacatcatttccaagagcaacagaagaagatggacggcttgcggcatcaggcgcggccatgacatcagcgacaatgtcatcaggcaccactacgtcgggtctcctcatcaggatccgcccagcgcgaacggccatatccatggacttgttgcacattgccttcatgacgacgtggtcatcctccaaggccttgatagtgaggcgggtggcctccaactcgtgcatgaaaagcttcttggaggcgcgcaactccttgatggtggaatccttggtggacaatagcttgccgagtcgagagacttcatcctaagatgtccgcagctcgttgcgatgatggtccaagtcagacatggtaaagagatgggtcctctccagaatggtcaaggagtactagcatcacgatacagcctatatagattatcgcgagatgcaatgagtgctcgtttttcctcctgcaagcaagaacagcactgagcattgaagcaagagagcaaagcaggagcagccaagaaagtttacctcatgtgccatcttcttggagttgagttgtgcatttagagaggagttcaaggagcgagcaccatccaagaaagcagaagtttggattaagttagcctggctctgggaatacttctcttcaatgtcagagcaccgccgagccaaatctgataaagcagcaaaagaagagcgcaagattcagaatgagccgagtaatgaaagcaaatagggaagctatgagctcacaaaccaatatttgatgccctcaaatcatctatttgtttttgaagcagtggaggtttccactacattagagacgaaacttgatcggggacaggagcaccgcaggatctctgttgggcagataaaccacaaagaacatcctatgattatgaaaagataagcaaaaaaactagttagccagcaggaacagtaaaagagcgaaagttgattcacctgaagattggagaggaacaagggaagacccaaagcaggaagagttgatgcattgcttgatgaggggagatcagcaggaatgatatcaaaggcatgacttagaggaacttcagtcccatcagcaggcgataggcacctggcgtctggttcactggcctctaaagtaaccagaccagcaagagctatagatagacgtgtcaccacagcctcttcagattggactggtggcgatccaacgtggacatccatggaagcagcagaaggggaacctgccccaacaccctcgggggttgggtcctccgcggcagccacctctagggatggagatccctcaaccacgtccataggagtcgggtgactcagatcagcatcttcgcgaggaagaccgccctctaaggtcgacgaggcacgagaagctacccgggttatctcttgcccggcagaatcatgcggcagaagaccatcttctgggacctctgaacagataatggggttgtcagctttaggaggctctgacaaaagctcttcagggatgatatcttccagcgcttggtcaaaatcagatattgacaacccttgaaggcttacaaggc

SEQ ID NO: 79422 - DNA, 431 bp, Zea Mays
atccagtggcctatccaatcttgcttcgaactgaggaggcctgctattgtgaatacagagaaatcgcaaggttgtctgtcgacatttgctgttgtgtgtaactacatcagtactagggacttagtgcaagagcatatagctttcaaggtgtggcccttgactgctgagtgggaaatgtcgaagactgttgatgctgatattaatataggaaaaagcagtctggtgcgtctgaagtatacgtatcgattcaggaatcaatttggtgagccagacgatgattggctcgatgccattgaggcaacaagtgatgaatttctagggagctacacgaaggctgaggatgaggctatgtatactgccttcggtgctcgagggaaacgaaggttgaacagggtctttgatgctattggatttgtttatcctgattaccg

SEQ ID NO: 79423 - DNA, 548 bp, Zea Mays
acccaggtaaggccaatgttgtggcagatgctttgagcagaaagacccagtgcaattgtatgagcatggatgtaagagttaccaccctgtgtgatgaattgtgcaagctgaacctagaagttgtttctccgggtgacataagctatatcgcggtagagcccacattgcaagagcaaatagttcaggcacagattggggataagggtgttcaggttatcaaagatatgctcaagcaaaaggcagagaaatacaagtgcttccgataggacagcaagggaattctatggtttggagatcgattggttgtccccaggaccctgagctcagaaagaagatattggatgaagctcacctttccaagttctctatgcaccctggtagcaacaagatgtaccatgatatcagatctctttattggtggactagaatgaaaagggaaattgccaagtacatatccgagtgtgacacttgccagagggttaaggctagtcacttaaaggcagtaggccctctgcaaccccttcccataccatcttggaaatgggagg

SEQ ID NO: 79424 - DNA, 548 bp, Zea Mays
ccagattgtatacatagtattatgttattatgtggttagtttttagttattagttagtacttggttattagttaattatcgagtagttattagtgggttgtggttaggcaataaccatccatagtggacatggaatgtttaattcgtgcttcaaatagatggacaattttttgagcttatatcatggaggcaatgtggaagaagatccctatggaaatgccaagttcattgacatgtgacacgtgcccgcgctattcgttggtagaccattcttgagtgatgtgtttactaaggctaaacaaaagctaggttaccatgaagatgatgacattgcggttgacgaagtgtttaacattggtcatgcaccaaatgtcataagacgagtcatcccaattgattctcaactggattgggagaattatgttacttcggctatgaagacccagttgcaactcatggaggttgtggtgcggcgggttgtagtagaccgtccccctgaagactatgactgttcccctaaatttcgatactatctataagaatcacaa

SEQ ID NO: 79425 - DNA, 361 bp, Zea Mays
gcagtatagaaagtcatcttcattggtgccattatacaccaaggcccccttcgggtacttcagttcccgggcgtagtgtttgacttccgcaatttcctcttcagacaactttttacccgaagcatgtcgaataataaagtcaagctcttcaataggtgcttcgggagtaggagattcaaccttcttgggcgcgtcttctttctcaagaaccagactgacgtctgaaggtccttgttcattactctgcccagttccagtaggctctgtttcaatgggcactgaggtcccagcttcggtttcaacgtgaactgtagcagcttcaacagtctcctttgcaggagcaggagttgacacccttatc

SEQ ID NO: 79426 - DNA, 444 bp, Zea Mays
tggccatgtagtaggggagtgaggaagcaacttgcgaggcatcatcgcccatgtcgatcgttacgcagaggcaggcaaagggcaactcgctcctgcaactgttgtgtactaccagttcgttcatcctcaggcatcgcccatgctgatcgtcaggcaggctgcacccaggggggaggaatgagtgcgaggatcactgcaatgatgcggcgtgactgaaatcgcgaagcatatgaggccacacgccggggagggaggaagcgttgttgacggctggtttgataattgtaggcactgattctgttctgctgcccactagtactaatcagttgtatatctgtgtagtctatgaatgcggttgtttgccgtgcacacacaactttctttatcttttttcttttcttttttgctcggaatcaatacttagtttaaagcctttcagctcac

SEQ ID NO: 79427 - DNA, 323 bp, Zea Mays
cgaagagcaccctcaccggatcgacagtgccaccagatggcgggacacaaccttcacgcagtggaactccagacccgcctgcttcaccacatgttgctgccgccggacagcgaaaatggatcccgtcgggacaccctcgccctctgtcgtagataccgtcgcagccagctccaccacccccggccatggatcccgtcggaccttcccctcctccaacatggatcctgctgcagccaactcgccccccgccatagatccagtcgcggcctcctcgccctccgacgtggacctcgtcggaatcgcagctgcctccacccgcgcca

SEQ ID NO: 79428 - DNA, 367 bp, Zea Mays
tatgattatgtcaaactcaaggctagatttatgccacatttgtaatagcacaatatttcactcgatcttgtagtggattatagcttatgactaactctttattcacatcatgattaacgctttaatcacatcaacatgactatacactttcttaatatgatcatatcgagggacccaaagacatctcttccgttatgtaggaggaacaaattccatcttacttcgcttacacccccatcatatgtttgatggtacatccaaaaactacttttataaatagctatttacatagcactatatgatagccctagaatctatcagtacacatagtgaaaaacaattacggtctcaggtctaaggatccaac

SEQ ID NO: 79429 - DNA, 681 bp, Zea Mays
actgcccaggattgttcgccaacgcctgggaaggttgtctgcggccgcaattgataggagagcgtcggcgggtttggtgaattgctcgtcagagcagtgtgtgcgccgtccttccacctctcaccgtggcacgtcgcctccacctcgccattgccggtattaagcactctcacttgtctgccgcaccctcaatttggcttagcacctaggtaatcgtggtatggcgcccggaatcgctaggaagggttcgctggcaagctctgtcgccggggagttgtgtggcgccgccgcgtccacgctcgggacggggacgatttcgctcggccgttggatggctagcggacgacggtgatcgtaacgtaggatacccccttgcttgattaaaccatggctgtcgatatccgatctggtggtcgcgtggcatgttgcgcgggttcattaaaccgagacccttggatttggatccgatggcatagatcggataccggttcgatgtaatatagagctaatcttcgcccttcaaatctaatcggacggccgcgatcggcccatacctctttggcctatcaatttagcaattaagcccctacagaaaatagaaaccaacccgccatccgcctccatgcgctctgtgtctacagatttttaccccgaggcccctgagttctctgaaaatagtgc

SEQ ID NO: 79430 - DNA, 1192 bp, Zea Mays
tttagctacagtaatttaatcgacttcagtttcagagttcagtgttattgctcgatctttggtgctatttatctctcgatccgttaagttttgatcaacaatccttatatcaaagttgtagagctatgattgataaacaacttatgttctcgggattgatgtgttgctacatggattcgggagaaaactcaagctcaagttgcggttttaggtgatgaacagtgctctctctatctatcagcttactctctgtctgctcaccggtcgccgccaacgccaccgtcatccaccgcgcgcgctcgcgcgcgaagcacgcaattgctttgtcttatacacgtccttggtggaggtggcaagctctggagtagctcgcgccacgtgaagatcaccagcgacgccatgacctccttatcggcgtttccatcactgtcgtcgtttcctcccttctccagccaaattggacgatcttggcatgtctctctttaaattgagcacaccactcgcttcacctctattttatgcaccacatagaccttttcttgcttctcctcctcaaccgtatccaccacacgccgatgtcttctccgcgggcggccaccggcgccgccgtaggtaggttcatcgtggacatgccaccatggtgctttgcttagtaattagtcactcgttctttgttacttatcttctctggttgctcaccaacctaccggtttgaactctattcttcagggctagccggaacaacgccctcgtcactggagaacgtcgctgcggcacggtttcccaatgaccaccgctctctggtcttcacccgttccaataatcacgtgcaccagctttggggtgagtcattgatcattttcctactctcaattccacctctactaccttgtctagctcggtacattagtcaccggaccaccgtgccgtcgtggtgagccgcatgctctctgtagaacatttccactgtttttcctggctccaatagatgcgcaatcgattagaacacggtttagagcaggtttagactattcccgttcccgagccttcaccaccgtatccgtaacctccgactcgccagagctcggacgagggcgaggaccagggtttgtaaattcaaaggaagataggggttatttgcaaattcgctgactcatgtgaatagctctttggaccggtttgctgttatttc

SEQ ID NO: 79431 - DNA, 729 bp, Zea Mays
ctccagaccacgtatggaagttccctgatccattttctagcaagcttctcactcttatcgaataccttctttctgagtgcttccagtatcattctgttggctctttccacttggccattggctctcgggtgtgccactgatgcgtacttaatctggatattcctttgctcgcagaaatcaaagaattcagagctggtgaagttgggtcccaggtcagtgatgatgctattcggtatcccaaacctaaatattatgtcttgaataaactccactgctttggctgaggtcaaagaggcgattgacttgtactctatccattttgtgaatttgtcaatggcaaccagtatatgagtatagcctccctaagctttcttgaaaggtccaatcatgtctagcccccagtatgcaaacaaccatgttacaggaatggtctgcagctgctgtgtgggtaagtgttgttgctttgataggaattgacatgcctcacacttctggactaactcggcagcatcgctctttgcagttggctagtagaaaccaaatctgaaagccttcccaaccagagtccttgatgccgcatgtaccccacactgcccagcatggatttcatccaacaattgtttcccagtagttgagtgaatgcatttcatgaggactccttttgcacctctcctgtacagtaagccccctatgatggtgtagtgggccgactgcctcgcgatgtgtttt

SEQ ID NO: 79432 - DNA, 470 bp, Zea Mays
ataacatcgaagactgcccaaaaattcttctggcaaaacattgtttgccgcttcggagtcccgtccgaactcaccattgacaatggcaagcaatttgacagccaagacatcaaggatttctgcttctccattggcaccaagcttaccttcgcctcagtgtaccacccgcaatccaacagagttgtggaatgcgcaaatggcaaaattttcacagccgtcaagaagatgctcctcgacgacaaaaagggcaagtgggccaacctattacctgaagcggtctgggcactgaacacgactaagtgcagggcgactgggttcacccctttccaccttctatatggatcagaggccatgaccccgcaagaaataaaacatgggtcaccacggacagtcccgtcagccgtccccgatgtggacgagcccacttcgaatgacctcatcgacggagaccgcgtcttcgccctacaagc

SEQ ID NO: 79433 - DNA, 755 bp, Zea Mays
ctccgctttagtgatgggggaccagggtttgaggattttctcacttggtaccattgcttgcagatgagtctctctctttaaatcttagagaggttgggtgatcattctctcatttctctcttagagtcgatgcactcaaccgcaacggtttgtcctctcaaaaattgcatcactatcctgcatgcccacttatagtagtgttgttgagtccattggtgagtataccaaaatttggagaagcttcgccttagagtgtattaaacatttatgtaggagtgtcatttcatgttttggtaaagagtatacccattccactgttgacgattttaggcgtcttttagttaaggggaggagtagatttcttggtatagtagagagtatacattgcatgcattgaaagtagatgaattgtctattggatggtaagagtagtttactagggggacattggaaccttgaccattatgctccaagcagttgtctcatatgactttcggatttagcaaacgttttgggggtagcgagatcgaacaacgtcgtatatgtagttaatgtattcaaataattgtcgttgtcaagtgacatgctcacaggtgaagcaccaatgtgaacttcatgataaatggacatgagtagaagcataggtactacctcactcaaggcatcaatctccaatggccggtgtttgtgaagaccattcctcttccacagactccgaagcagtagatgtttgttgcatgctaagaggacatgtg

SEQ ID NO: 79434 - DNA, 330 bp, Zea Mays
gggtatgagtccgatctaatattagccgctggatcaaaatccaacggactcacccctttcttcctcccctggtcctctattcggcggagcacagcgtcagtgcggcggcgccatgactagagcataggatccgcgtgattccgcccccactcgttgcaataacgggcgctacacgatgaaaatgactaggcgatcgaggctaggggtttcttaccggcgattgaagcagcggcgaggcaggccacacgacatggcggatccgcggcaggatacaactacggcgaagaatcctcagcaggtcgaagcctcgttcacccaattacttctccg

SEQ ID NO: 79435 - DNA, 496 bp, Zea Mays
atttaatggtatcgtttagtattcagtagttgtagattatataaagggtgctcgaagactgtatgtgtcgaatatggttaactagatgttatgcgcatgataattggtacagatgattttgtgtagaaagttatggagatgatcgcctctatggttgaaatgtttggtggtaggtcgtagttggttgtgttcgcaacatggaattatggtaggcatcgtcagtgcccatgatgtattagattaagctttgttatacgataaaactagaaatgtgaatgtcatatgtggtgtttcaattgagttagcccgtagatttaatatgtgtcgttcgcaatgaattatcagtagggcctaaatggtgagttatgtgtgaattgtgttagcgcccatccgagataaatatatttaacctatgatgtgttgtcatacaaataacctagaaaggtggtatatgttaataattggaagaacagtcgttcaaattggtcaatccgat

SEQ ID NO: 79436 - DNA, 488 bp, Zea Mays
gttacaaccggtgtgctcatgtcaaaagaaagagggggtccttcccttttgtagttcaagggctgtactttaaagtggggactcgtattctactggaggaagctcggacggtggcccttgggtggcgtggttcttttgacatcgtccgtagggtcgtgcgtagtcgtactcccattatggcatagttgaaagtagcatagaggggcgaatatgctacacctaaaatttctcaccaaaaactttgagatagagtcaaattccaagttgcactggtgcaacctgattcagctggtataaatcttggctgaatcagttttgaacctgctcaacttaggttaaattaataacaaacgaacaatgcagagtatactgagagattctttctaaaagcttgccctatagaaaatccatgcaaataggtgacaaatcaatgtgagccaagtcaacaagatccacacacaagataaaactacactatgctaaccaac

SEQ ID NO: 79437 - DNA, 527 bp, Zea Mays
atttgtatgaaccagtggatcaatgtcaacttcatcagggcaactttctaatagtacacgaatatgttgttgccttaacagtaattcatgtacctgtgtgtctgtcaactgcgtctcatgctgggatgctggagtagacatatcctgtacagtttgagtggccggactcgtacatccttctttacgtatcatttaagcaaaaaatacatcgatttaataatgacatcataacgatattgaaaatgtttgtataactgtttagattgacgtaaagaccataaaactaactaacctgccgaatggggaagaatatcatctgattttttagttggttgctgcacatcataaccatcctcattgtcctccgactcagcacagaggacctcatcaattaactcgccaaaaacatcagatagattgtattgtttctcaacaatctgctgaagagtctgtttaataactgaacaagccttgccaacctccgtatcataatgtgacaacttctctatgaatcccaggcggtggcg

SEQ ID NO: 79438 - DNA, 636 bp, Zea Mays
agcagccaccgttacataccaagcagggttgaacccccccggcgggttttggctagacaatgaggacgggcatcgtgctggcaaccccatcctggaggccaccagtccgaggcggtacagcacgttcttctactgcaattccaccgcattcgtgtcatctgtggtcatcatcgccctgctccagagcagcttggtcgctgccggtgccatgaaacggtacgcgctgcagacagccatggttttcgatctcttcggtatgatgggggcatacgctgctggcagcagccggaccttctccacgtctttgtacgtgatgatcttggtcttccttgtcttctcttacgtcatggtccacgtcctgctcttagtgtgcacacgacgacgaggctctggcgatgatgatggaccagcagcttttcaggaagtagacggcgacgaccctgaactgaaacatctggagaagcggcgcaagtttctggtgttgcttgctgttctggcagcgtcgagcacgtatcaggctggcataaacccaccgggtggcttctggcccgacgacagcgatgggcaccgagcaggctatccgatgctcaacgatgagttcccacgccgctacgtggtcttcttctacctaaactc

SEQ ID NO: 79439 - DNA, 290 bp, Zea Mays
cgggggagatcctccgcttttatcgagtttgtcacaatctttctgagaacttttgtatggcttctagcaacattgcgcttcttgacaggtggcatgaagtcgcgtcgtcatcgccagaacccatttgctctactgtttcgttgatgacagttggtctctcaacatgtgaaggattttcctcaacatgacttggattggattgttctgtgtaggcctcaagtgtgggatgtcaacgctgaagcgctcctggctttactgaattgttatacgcttaggattagtcgggggac

SEQ ID NO: 79440 - DNA, 382 bp, Zea Mays
ggaggcagcaaccaccatatgacagacagttcatggttcatgttgattgtagagcatatcaaactttgcatgctgatttattcacattgtaagccatattttatgcatgggtacgtttgaggtctgtgctttgatttgctcttcttttgcaaagatgttgcatgtgggtcagatgtgaagcttgccatgttcttaggaacgtgtaccatgcattatgcatgactgtttattaattgtacaatgttagctatcaagaaaagcattgaagtgataatataagcatattttactggtgggaggaatgataaagtgtgtggcgattggcgtatcattattggttattctggagttcttctggattctaacggatctggtagtaaaa

SEQ ID NO: 79441 - DNA, 1189 bp, Zea Mays
agttgctcaaaatttgactgtcaggtggttggtgacttagtttattcagaactgaaagtctgaaatcaatatttttagtgcagttttgaagctgtgtagtgcctgttctaggtggttttaaaccgaagtttctgtagcaagtttgaagaccatgtgttatagaacaacttcctttaagtgagttgggcttgaccccacacacaaagtggtgtaaagactacccaaagatggactctcagttgcagagactgaatttcattcagctgcctgaaaactgaatttgtagtgtgtggtgtcagtttggggaacacttttgtgaccattccatctggttttagattaggaactatataacaaagttggataccaagtgatgaggaacaagtatcctaaagtgagatggacttggtgttgtataaactttggagtaaaatgcaccaatacctcctctgtcaggctgtctatgggctatttcagttaactgaaacaaatattcaaggagctgggttcattttgagcccatgcagtttctgttctgggtaatttcgacctaggattgttgaagcaacctgatagaactatgtttagagaataactttagaaagggagattggtctgttgccatataaaattgtgaggtccaaaggcttaaacagggaggtgtgcaatggggcagcagggctggtgcaagtgatcagtgttgatgtaggattctgaagtaggtccctatctccatgttctacttcatatggtagtataaattgagatagagttgatgtgcctaactgaggtctataagccttactctctattgaaaatacccaggtttttggaccgttctgtgggcagtgaatacttgtctgttggtcccttgacagtatgagcaagaacaaattcagtgttggcctgcaacctggaataatatcctaatgcactattaaatggttgttgttgttgaccagtggggttggggataactgaagacgtctgtgggggtaaggatagaattaaagctttaaatatctgaaactagaagggtctgaaacctatccacaagtggagaccacgtctgtttggtttactatcttcaaaactggacaaaagggatatgtgtgttgaagcatgagctggagagatatgtgtgcatgtttgccgtgtgggtcagccatgcactgctggcacttaatag

SEQ ID NO: 79442 - DNA, 988 bp, Zea Mays
ctcgctgcatcagatcgttgtggccgccctccattgcgttgcttcggtgggccgtttcctcggccacgcacctggacgcgtccacgctgaccacggccacgggaattgcccgagccacggctgccattgccacgaccacgattcaccatgcgggcatatgagccaccatcttgcagctccaatctggtctcgaaactgagcaattgtgaataaagctcaggaatcgagatgggatccaatctagctgtgaccgaggtcacaactggattgtaatcagcatcaaggccattgcagatatgcgccaccagttcttcatcatctagggccttgccgacagcagccatttcatctgcaaaacctttcatcttggcaacataatctgtgatcaacatggtacctttcttcgtagtggcgagggcaagcctcacattcattgtcttggcgcgagtctgcgcagagtacattttctccacggccgaccatgcttgtgccgccgtctgggcagcgacgatctgcgcctgaacttccttcccaacgtttgagagaatgagcccgaggatctgttgatcccgagcataccatgtctcaaacgtagggttcggattggtgacggccgtgccgtccgccgccttctcgacgacctcagcatcagggggctcggtcttgctgttgatgtgcccctcgtagcgagcaccgcggatgacggtgaggatctgcgctttccatagcgcatgattggtcttggataacttttcggtcacctggaaaccgaagaagggattgctgacgatgcttgaacccgtcgccatggaacactaggctctgattaccatgtgagaatttcagaggtgcttggaaggtggaaacgccggagacaggcgtgttgcgtgttgattttctgagtggctggaaaagccccagccgtggcttacatagaggatgccaggagatgattgaggagataaaatagaaacaaactatttctttc

SEQ ID NO: 79443 - DNA, 488 bp, Zea Mays
cgttcaatgcgccatgttctttggctcgcgtagcattcgattgtgtgggaagctatgcacttgggtgggggcatgctgctccggtgtgttcgccgtcgggaggtgagcggcgatgctgcccagtccgtcgtggggtggaagatggccttcgggccgttggattcacaagcgacgatctagattaggcggaacataccccttcgcctatctcgaaactgggtcgttgatggttgatcctgcgaccacaattgcgtaccggttcggattgaagacaactttaatctgagccctcaattgcagatctaacgtcggtcatgtacatacaccctttcggctccgccgttttgcaaaagagacctcatagttttagtttaacaacccgccatccacgcggggtgaatatgagtcttagggaacttatgttttaacccctgcattcttataaaattgtgcgcccagtccaggaattaaagaaaataggaaaaaga

SEQ ID NO: 79444 - DNA, 609 bp, Zea Mays
cgagtaaaagatgcatcaacacctatgtgtttagtaagttcatgcttcactggatcatgagcaatctgtatagcactcaagttatcacataacagaggtgtagaagtgtcacaagtgacaccaagatcagccaagagccagcgcaaccaaataatttcagcagtggtagtagcaagtgcccgaagttcgacttcagcactagaacgagatatggccgcttgcttcttggatttccaggcaatgggaaatgatccaagaagaatacagtaacctgtagtagaacaacggtcaataggatcacttgaccaagcggcatcagaatacgcatgaagctgaagtgggctatcagaagcatagagtaaacatctggatcttgtcccacgtaaatatcgaagcacacgaagcaaatgaccataatgaactgaagtaggtgttgatacaaattggctcaacatatgaacaacatgagcaatatcaggtctggtgatggtgaggtaaacaagactacccacaatatgacgataccgagttgggtctgctagtggtgtcccatccttcggacgaagttttaaatggagatccatcggtgttgcaacagtgcgtgtatca

SEQ ID NO: 79445 - DNA, 701 bp, Zea Mays
cgctaccgtacttttcgattctggagcatcccactccttcatagccactagctttgtggaaaagtatggcattccctctactcctctagagattcccttggtcacccgaaccccagggtccgaccttctatgccagctcaaatgctcccaagtcagaatccttttaagtggggtagtattcctagcaaacttaaccgtcttgccatccaaaggaattgatgtgatcctagggatggattggctaactaaacacaaaggcatcatcagttgcgcagacaagacagtcctcctcaccgaccagcagggaaagtcagtcacttgtcaggcacagccacccgccagtgacccaatgatgttcaatctagcaacggaaagtatatcagtagtagaagaattcatggacgtgtttccagaagaattgccaggaatgccaccagaaagagaagtggagttctacatagatctgatccctggaacggcacccatcgcgaagagaccataccgcatggctccgaccgagttagcagaactgaagcttcaaatcgcagatcttcagcaaaagggatacattcgtcccagctcatcaccttggggagcaccagtcctattcatctctaagaaagatggaagcatgagaatgtgtattgattaccgatcgttaaatgaagttaccatcaagaacaagtatccacttcctcgga

SEQ ID NO: 79446 - DNA, 555 bp, Zea Mays
gcacattaacatttttgtgcgacctcgctacaaaaaacatgcaaaatccacaggtgatacgaggcaaccacttcaaacatgatggtcgaggatcgaatgccccctttgtaagttgtcctctccatccaactggacaattcatccacttctaatgcatgcaatttgtactttgtatcatactaggaaaccccctcctcccccttagctaaaaataatctaagatcatcaatagttggacgacgactatactactcaccaaaacatgaaatatcacccagacagaaatattcaaggcattctaagatcgtcctttttccccattttgatacaatcatcaatcgagtcagcaacactaccatagacgagcatgcataggaaaacaatgcattttttgtggagggagaaaccagtgcggttgagtgcatcagttctaagaacgaagtagggggaatactcacccagcctctacaagatttgaagaaaaaggctcctccgcatgtggtagctaggcaaaagtaaagcagagtgtagatgtacaagttattggagtagtct

SEQ ID NO: 79447 - DNA, 474 bp, Zea Mays
tgcggcggaggatcacgaagagggataacgaggaggcgcgacgggagaggagcctctatacaacggcagcgactatggtggcaaaaccctagcggggagggtggggagtgtgcagcgggatgaggcgcgaatgggggtttcggggcgacggccatctcgaggaacgggcgggcgttgggagtggacggctgaaacgacattttgggcccacctgtcggagagaaagcagagggaagcagagccacgatgcacaaattgatggtttacatgaggcagagctaccgtgtactgatggtttacattataatcttatagagtagtagagatatgtctacatctaacatcatatgaaatactccacatcttcactccatgcatatttgcaaaatccatgcatcgaccatagtcactggacctggctagaccacggccacggggtctgctctgccgtgcatcggccgtcgccagtcgtgc

SEQ ID NO: 79448 - DNA, 1007 bp, Zea Mays
aaaattaaagttggattataggacaacaactttgttatggatagattaacaagttgccacataaaaattagagatcaaggccctgcaaagtgctctgttaggtactctgaatggggcttcccattgtacagtagaatgaaaagatgaccggttcgctgcacttcgccgtcggtgacccccgcgctcagattcacggcggtgccgcgattcgtgccctctgtggtgtggatcacgatcggcaataaaaagatcttcgctagggatgaacttggggcactgtttcgccctgtcgccgtacccacttgcaccagcgacgtggctgcgcgaccgtcgccattgtgccgccatctggctcggttgtgacacgccttaagtcatctcaccactcgtcgcaagccgtgaagacttggcagtgaccgccgtagaccgtcaactagtgaacgccacattagcaaactccggtgactcttcccccttctcatcgcgagcgcttctccattcaaattcacccttctcacagccgtccactataaattgatgcctcgacctgttccgctagattgttacgaagctagagcacccaccctcgccctcgattagccaccatagtcggagaatttttcttcccccaaatctgttgtctgcgccaccgtgagatgttgcgccatggccagccacctccaggtccgccctcgctctccttgtccgtgtttcagctcccacgcatgcttgtgatgctcatcggctcaactcattgagctagaccatgctcaatcgaccgaaacaccttgatttgtatacggtgttcgccgtcgccgtgggtgggagaatctagggccggattggttcaattggggcatggtttaggtttgcctcgggtcagggacgctagcccaacatttagtttaggcagtcgacgccggtcatggcaggtcttagcaacgagatggccgacggtgagcgtgccgttgccagggtttgttttggagaagaaacataaatcagag

SEQ ID NO: 79449 - DNA, 1127 bp, Zea Mays
gaactttggagctctgttgaagaaaatccggtaactatttgagtctgaccaccatagcaagattgtagctggtatgaaggactgcaagtttgttactgagagattagcaagttctcatgcagaaattggagttatgggtcctgcaagttggtcggacagaggctctgaattggagttctcatggtatagtgaactgaagaagatcttcaaatacatcgcccctcgccgcctgtgactgtcgcgccgtgattcgtgtcgtcactacgattcgttccctctagtatggagataatcacggccgcgtaaagatcttggcgccagataaactcagacccgatcgacggggagttcgccgcacccacttggattgcggtcggccgaattggtcctcaccggcgctggccgcttaccgaccatgcgtcacgtgcccgagcgtcttaccacgtcgcagtaggtcatgttaagcatatccggtgatcgccggtgagtccgccacggtgaaagccactaatcgtttgcgccagtgccccttctcctctccgaccgccgcgcgtctccatcaaattcactgaccaccgctcaagcacactataaattgcacgcacccttggctccgctaagtagtcaagcaccaaatccagcaactcgtgcctcaaatcatccactagagcgcgccaatttcaaagttcccccaaatcggtttctgccaccgtgaaagcgtcgtcgtcgtggctagtttgttctaggtttgttcatactctctgctctctcgtctcagcatccttaggttctcctaatgctgctcaacccattcgattgagttggactgccctagatcaccgggaacacgtttgttcatccattgtatgcgttgtctccgtggactggacgaattagagctccgctagtgaaattgattgaggggaaacggttgttaagggttgaattaggtgtcagccatgtgggagcatcggtcatcgcgtatcctggccaatgcaagctcgccggagccattgctccgccgcccatggtcggggacctcaattcgcgaaagaatacaaggtgagggtccttgacgcaaatgtcagtgacacatagaaatagtgcgcagaactattaactagttt

SEQ ID NO: 79450 - DNA, 697 bp, Zea Mays
ttatacaacagtacaatctacaatacactactctacttttattacaccattagtcctgctttccattactcttggcggcctcatcgtcaggtgtgggagtccagacgtcaaccaacctcaaagaaggagggggctcaaaaaggtctaactccccacccagcgcgcgtcccgcaacgtgagagggtccggctttcgcctcagcagggtgtgcaggcacactagggtgtaattgtgagtatagtatatggacttcctcatgcaacgtattgcagtagacctgcaggttgtcgacagttgagctaagttctttaattcgggcctgagcccttgcttccttagcacatgctagcaaacgagactgtacggcccagtcaagtgctaagtctcgatcagcaagctgatcctgcaggtgacggatgtcccttcttagttcattgattttatctccgtctgcgacccaagcatcggtcctgtgttgaagcgccgcttgaagtcgactcactcgggcttcaagatctccgatggggtcattacttccactgctgctgctttcatgtcgaggggccagttgatgccgaggcactccaattggtcccgttgacatgcgtgccgttagccttgtgcgtggcggcatctttctaagggggaaaatgttattagtataattcttagcatgatgcatgtgtaattacagaat

SEQ ID NO: 79451 - DNA, 589 bp, Zea Mays
gcgatctaaggtagcttagctcaatcgagttggtcgaggagcatcaggggcacacgagaacactaaaacgagagggaagaggctatgagcggacctaagatgagctgaccacggcgaggtcacaccgctcggtgttcttgagtgatttgggggaaatcccaaactagggagttctagtggatgattcgaggcatgggttgcttctctggttgcacaattacatagcggagtaggcggggtcagcaatttataggcttccacagtggtggcgtccaatttcgtgaagatgtgctggcggccggagaggaagaaagttactggcgctcgggattagtggctttcaccgtggcaagctcccaggcgatcaccgggcatgcacgatgtgattcactgcgacgtggccaagcgctttagcacgtggtgcacagtagtaatcagccaacggcggtgaggtctatctgaccgattcgacgagcaagtgggtacggtgagcttagctgtgaccgagcccgagtcggtccaggcgccaagatctttacttgcccacggttatccgcatgtcacagcgcacgaatcgcagcggctggcg

SEQ ID NO: 79452 - DNA, 504 bp, Zea Mays
cttcaagtgactagctttgattctctggcaagtgtcacactcaaatatgtacttggcaatttccctcttcattctggtccaccaatataaagatttgagatcatggtacatcttgttgctaccagggtgcatggaaaatttcgaaagatgagcttcgtccagtatcttccttctgagcttcgggtccttgggaacaaccaatcgatcatcaaaccatagaattcccttgttgtcctgacggaagcacttgtatttttctgccttttgcttgatcatttccttgatcatctgaacacccttatcttcaatctatgccctgactatttgctcttgcaatgtgggttccaccgagatgtagcctaagtcacctgaagaaacaacttccaggttcagcttgcatagcccatcgcacagggtggtaactcttgcatccatgctcatacaattgcactagcctttctgctcaaggcatctgccacaacattggctttgctgggatggtaa

SEQ ID NO: 79453 - DNA, 426 bp, Zea Mays
ttgacgaaggtgcttcaaatgctgaagctgaacaaactgtggtggagggtgaaaatgttaatgagagtgaggaagactatagcattctgatcccaacaaaggctagtcatcttgattttgaaaaatctactgtgacggaagatgacatgcctatgatgatgaaattgggctattttggagaggcagagagcaaacttattcgatttgctggagaagaggtaatcccatagccgaagaaggatgaagttgttgttttcaagagcttctttagagcagggctgtgattccccttgagtgaaatgataggtgtagttttaaagacctttgagatatatcttcatcagctaactcccaatgctattgttagactcagcgtctatatctgggccctccgaagccaagggatgagtccagatgccgaagctt

SEQ ID NO: 79454 - DNA, 409 bp, Zea Mays
aaacattctgcaggcaagtgggatgaacatatattttgcttcggttagacacccagagtccaacagattggttgaaaaagaaaatggtataatacttctgggaatcacgaagtccttggttgggatgccgaagggaaaatggacataagagcttttcaaagttgtgtggaatcacaatacaccagtatcaaagtccacagattttacatcgttcagacttctctttggagacgaagaagttaccctcgaagagatcaaattgagctcatcaagggctttagcttcgacagaagatgaggaaaatgaaaaagtttcaaaagacacaattgaagaatccagacttgaagcaaccgagcatatgaggaaatatcaatcagaaacaataaggtggcgggatagaaaggtcaag

SEQ ID NO: 79455 - DNA, 533 bp, Zea Mays
gaaaaagggcatggttgtggacagatgaagcacatttggcttttgagaagcttaagcatgctatgactcatacacctgttctagccttgcctaggtttgatatggtttttgcagtggaaattgatgcctgtgatgaaggcattggtgctgttttgatgcaggagaacaaaccattggccttcctaagtaaagcactagagctgaagaataaacagttgtccatttacgaggagtttctggctctaattattgcagtggatagatggagaccatatttgcaaaggtcatctttcactataatgactgaccatcagtctttgtctttcttgggagagcagcaactacaatctgagctgcaaaggaaagctatggctaaactcatgggtcttcagttcaaaatagtctacaagaagggtttggagaatgtggtggatgatgccttatctagggtgggagcatctatgacattggcgttgatatctgaggtgcaaccagtgtggcttcaggaagtcttgaattcctatgtcatagat

SEQ ID NO: 79456 - DNA, 1814 bp, Zea Mays
gcgcatcaaatcgtgcaggatattggatcatgccatgaatataggccaggacggtttaggcgagtataggatctgcaaaaaatgggttacacacagccgccgccgcttttgttcagagctctcgaagagttagggcatgcacaatggagacagccaggggatcggagcagtgtggagaagatacagcgacgacgacaccctatacgaccgatggtcggcatgctgtaactccaccggctgcgttaccggcaccaggaattcttgaagacagcaacacagttcatccaagtttggtgggaacaactcagcggatacccatgcggacaatcgatgaacatgagcaggacacaccacacattctccaaagccatgtaagttcaaaggaatacccatgtatttgttataaatttccgtgcaagttatgatttaaccgaatacacatgtattattagttatacagtccgtgcaatttatgaagacctagaaattcaccatgctataagcttattttttatatatgtgcactgcatgacgactccattaattgaataggacgatagtatagatcaacaattggtaccgaaggtcggtatgacatttagtaatgtggacgaggcgtacaaattctatagcagatatgcatatgaagttggatttccattgaagagatatagggagagaaaaaattgcaagtggttgaattgttcaatggaaggcaagcgtgccgaaagaggatatggtaatccaaaagtgtgaaatacaatttccaagcgaacacaatgcaaagctggaatgaaacttaaaaaaatctatgacgatgccaaagagaatatcatttcagtgcggattgatcttattcatttggaacataatcatgagttcttcaggaaggatacggaaaagaatcagttacagtgcaacaagacacatgatccagaatacatggagttccttagtgcgatgcaagaaagcaggattccgcaacactgtataatggattttgtttcagaaatgcatggtggaccagagaatgtaccgttaactacacaagacatgatcaacctgtaagttatgttgttatttacactgatataatgacataatgacgttgtgtacgtattgactaaggcatattgtttaatgttcacaggaagaaagcgcgacaaagagaaagaaatgtcaatgatgtgtctaagctcctatctttttttgcattgtgtaaaaaagataacccacagtttttctctgacttccaactagaccaagaaggaaagattttgagcatttttggtcccatgctagccaacaagcagattacattgactttggagatgcagttacctttgatacaactcataagacaaatctatatgacaaacccctgggaatgtttgttggttgtaaccaccatctgcagtgcaccgtatttggtttcacattgttgggtgacgaaactgtagacacattcgagtgggttttcaatgcattcaaaacgtgcatgggagctgaatgaccacgagtaatgcttacaggtatgattaataagcttaacaattattacgttctactatgaatgtattgaatgcaattatagttggtaatgtgttgcataatgttgtgaaaatttatgattttagatcaagatccagcaatgccagttgcactaggcagggtatttccaaacacaatccatcgtttgtgtttgtggcatgttcaaaacaggtatatgccgtatttaaacgagttgtacgctagatttgaggaagaggatttcaaaacaaggttccaatctataatacatcatcctttaactg

SEQ ID NO: 79457 - DNA, 597 bp, Zea Mays
gtatttccatgtagagctggactgggttgagttcgcaggctccagaccatgtatggcagttctctgatccattttcctgcaagcttttcactcttatcgaataccttttttctgagtgcttccagtatcattccgttggctctttccacctggccattggctcttgggtgtgccactgatgcgtacttgatctggatgctcctttgcttgcagaaatcgaagaacttagatctggcgaagttggatcccaggtcagcaatgatgctattatgtatcccaaacctgaatattatatcctagataaactccactgcttttgttgaggtgaaagaggcaatcggcttgtactctatccattttgtgaatttgtcaatggcaaccagtatatgtgtatagcctccctgagccttcttgaaaggttcgatcatgtccagccgctagcatgcaaatgaccatgttacaggaatggtctacagctgctgtgtgggcaagtgctgttgctttgataggaattggcacgcttcacacttctggactaactcggcaacatcactctttgcagttggccagtagaaactggatctgaaagccttcccg

SEQ ID NO: 79458 - DNA, 564 bp, Zea Mays
cgagaaggtgtattccaatcaactctttgactgctgttcctctggggtgtctgtgggttgtgcttagggcaattgttggcataatgaccaagttcaccacacttgaaacatccactaggttggactggagtagttgtattgttatttctggccggtgtgttcacgacgcttccttgactattttgttgataaccattagacctttcaccggtctgagaactgttcccctgctggttctggttgtttctctgtccttgcttccagagcgttgcacttgacagttgttatttccactctaatttctagagcaaaactgagaaccttgagagttgttttgtcgggtgtttctgctagactgtccttggaatttccgcttatgatcagacaattcccttctcttgctttctaggccaattgccttgttgagtatagtttggaaattgggaaagccatggctctgtaactgatagtttaatggtctaatcagaccttccaagaatcgctcttggcacttctcatctgtttcaacttcctccggtgcgtagcaagaaagttgggtgaaac

SEQ ID NO: 79459 - DNA, 557 bp, Zea Mays
cgccccttccagaggttgatacaaccttggatgtcccgaaacctgtcagtactcgcccgaagcgccccagccggaccagtcagcctgagccttctgctgacgagcaaaagaagaagagaagacgcctccggcgagtatccagttttgatgaggacgccagtaccttagctcctgctgctgaagaagtgcctgcaaccggccttaccgacgctgaccccaatgggtgtgaccaaactgctgctgatcccaatgggtgtgctccatgtgttgccaatcccaatgggggtgctgcttgcgttgttgctgtggaagatgaggaggaagaagatgaggctcctttaactcggaaaaacagtcggcagttcatcgccagcggtggaagtagtggagttccttctcctgctttatctgcccttattggtctgcaagaactgtccctggccaactttgagcaaactctggaggatatggtcccagaggacttgttatcagagcctgtggatgatgatgcgacaggggcttgtgctgctgtgcctgatgctgggttgaggtcatcc

SEQ ID NO: 79460 - DNA, 676 bp, Zea Mays
gcaaaactccttgactcgagcatcgcggactgtccgacacttccacacagacgatccggtgctcatgcggacggcccggctgactcagccggacagtctgcccatgaccataggcgtcagcctctacacaaagcaaggaaagagacgcaagggaaaaacgaacataacacacatggtcgactggtgaaagttggccctactttcgatcaattgctcgccaaatatgctggaaagaaggtcgttctatgcgatcgaccaataaaggaaccccggtcacccgctaaaacaaaacgatcgaataaaacagctcgaaaggcgatgcaacaagcctcgcctatttatcatgtgttgccaggatactctccacccgcctactcatcgtcgatatattttcctatccaaatatggaattgtacgacgatgaacccatagtacatgcatagtccctttgtctattgaggctgggggcacctccattctataccttttgatccatggtcatggccgagaaagatgcaatccaaaatggcctatatccattagagctctattgaatgatcaccctattggtctgaaaagccggtggctcgcatcaggcttagtacatatgcttttggttcgtcaacctccaccaaaaggcagggggcatatgttgagcgcagaaaagtgtcgcgcg

SEQ ID NO: 79461 - DNA, 1027 bp, Zea Mays
tggttgtccatatgtcggatcgggtgcagggtgtatacatatgcaggtagaggaggtagttgtccatacccatatatgacgatggtggtattggatcgggtggtagtgcccatgcactgtacaagtgttggtcacgtcgaggtggataactgtaactcgagccgactgagctatggctaccatcatcaacaagtccgcaaaccaaatgacataattgtgaatgaggtgctccccctagaactatatgctccagcgtcatatgttgggaggcatggctacccctagaactatatgctccagcgtcatatgttctagcatggctacccctagccccaacaccatatgctccagcatcacctccaccatcctcgtggctaacatcacagtcgtctccatcatcctcatggctatcatcattgttgtcgccgtcaccttcactactgctttcgttagtgtcaaactcttattcctcatcatcaaatttaatccttttttctttgctttatgagggaccaagttttgttcttctcttttccaggtgggtgtcaccaactattgtatcaacccattcatatacatcctctatgtgtccatgcttttgggaaattgatgtaaacaaattgttaggaacaggtgtgtcactatgagatgagtcatcatctaatgttggaggtgcattggatctccctctctccatccattcatgaatggcttcgttatacctatgtaatgagagatccatgagggctaaggaaagatcaaactcactagacccaggcgtacctgatgcacgttcagtccgtagacataggttgtaattaatgaacatcaactcatgtagcttctcgtatcctagtatgttgtggagctctatatgaatgaaagcgaatgtactccaattgcgctcacacttacttccaccacccctctcttgagccagatccaccacccccattataccatgcactagctcttttctgaattcatgctcctctcgagactgatgtagtgtagcctgaggttcagc

SEQ ID NO: 79462 - DNA, 505 bp, Zea Mays
gtgtttcgtgcgctgatgttgcacaagattggtggagaggtagaccgcgctgacgctgtcgtagtaaacgagggtggagcgattgagggggctgtggagctcctgcagaagctggcggacctaggaggtctcggccacgccgttggccacaacgcgatactcggccttagtgttggagcgggagatgatgagctaccacttcgaggcccaggagacgaggttggagcctaggaacatgacgtagccagatgtggaccgacacgtgtcggggcagccaacccagtcagtgtcggtgtagaccacgagcttcgaagtcggtgagggttgaaggaaaggcagtagtcgatggatccatggagctagcgaagaatccgcttgatagcagtgaggtggggctctcgtggggtgtgcatgtgaaggcactcctgttgaacgacataggtgatgtcgggtcgggtcgggagaacgtcaggtactggagagcgccggtgaggctccggtacgc

SEQ ID NO: 79463 - DNA, 492 bp, Zea Mays
gggccatccaattataaagtaccataaccaaacgacatacatagccaatactaggccagtttcatggtgcaccaaaataaaacccaaccaaaagttccagtattcgaaaagaaaaccatccccaaaagactaatcacccccatgtttacttctttggatcatcattgtcattgtccttcttgtcatttcctttcttgtcttcagaatgagaagaattgactaaccgagaagaggttttccttttcttcaagtttttttcaagcaagtcatcttcagtcatcttgcaaaacttggaccccaggcttctgatcacctttgacgatagagtgggcggaccatcaaacttatattggcacatcagacagtttctttttgaacacgatccaggcttgaagctagccctagagtccttcagtcttttacttctcctcaaatcagaatccactaaagtaggttgagaggagaggtgcttattaatttcaatcgagggag

SEQ ID NO: 79464 - DNA, 849 bp, Zea Mays
tcagtcagtcccctgacgagtgatgagcttgcattgcattgcaggtggtcacagccgggttcagaaaaccaaccataggaattaatcagatcgtctccatctggcaccaggcagtgcaagaacactgctcctccacagcacggacgctgacacagccgccgggctcctcctcctctggctctggctctgtgtctgtgaccaccgtccctgcctcgccgtttgggacactgttccacttccacgacggatgctgacacagcccaacaaacaaaccgcacagtaccagtgcatctcgttctcggggcgcccactggactgaagaggagatctcatcgccaataaagaaaaaacgccaccgagtggctgcagcgagggccacgacagccagcctgtttctgacaatgaacctaaggcttgctaaagcaaaggattcagccagatcgagcaatagtgtcacgtcttcttaataacgactactcctctctgttctaaattagaaaaaaatttaaaactttttatatacattagtttcgctatatatctataatgagtagtaagtgataacaaacctaggatattttacgtatgattttaaaatagatggagcagcaaataattcggcaacgaaacctagtaccgacagggaaattaaatgtactacagcaacagcacgcctggcctggcactggcagcaccgtctggtccggtgtccggtgagcatgatcgagctcagcagagttgatgagctagtagtggtcctgctacacaatcacatgaccttcccctctccgactccaattattggacaagtacgagccactccactgcacaggttgtgaaccgagacag

SEQ ID NO: 79465 - DNA, 747 bp, Zea Mays
aatggatacactgtttaaagataaaattgataaaacaatgtcatgatcctcagagaagagtatgagaacgatcataatgagatatttaggcagatccacatctaatacatgagaacaggttataccagataaccagataacggggcagaatcattaagggatccgaagattcagatgataaagccaacatgattcacaaggaaaagattaccagatccaggtgaagagagaggtagtcaaatgagatcgattaggatgagcactagaaaggttatgaagattggggacatgatctacggagaggaacatggccttgatagggtttgtgcaactagacaccaaacaacaatttttttgacacaacaagtgcacaaggagacttgggttggtctagtggtcaagctatgggggtctacaagttgtgcaggtgtaacttcaaggataaacacataaggcctagaaaacactaacacaagcataaatatttttttgatttttcacttgctaaactcaaggttgtttggggtctttttatgggcaaacaaacaactttttttgcaaaaagggttaaacaatttcaataccacctagaaagcaaggcaagataaacacataacacgacctaacaagactcaccaatctaacacaaggtaaggcatttcttacagttcctaacatagtagtgcatcacattattcacaagttcttattattagaataaaggtgagagaagcatgttgatgcaaa

SEQ ID NO: 79466 - DNA, 521 bp, Zea Mays
tttttgttgattggcacattcactttagctaagaaaccccaagaacgcaaatatgagagatttaatcttctcttttcccattcctcaaatggtgtgatctctttgttctttgttggaactctattcaggacatgacacactgtcaaaatcgcctcaccccaccatgccttggataatctcgctgtactcaacatggcattcaccaaatctgttagagtgcggttttcctttcaacaatcccattggattgtggtgagaatggcggtgtcctctcatgaataataccatgttccacgcagaactcatcgaacacattagagaaatattctccacctcgatcggaccttaaccgttttattttcctctcaagttggttctcaacttcagctttataggtcttaaaataattgaacgcttcatcttttgtttttaagagatacacatagcaaaatctagtggagtcatctataaaagtgagaaagtatcttttaccacctttgatcaaaattccatatatctcg

SEQ ID NO: 79467 - DNA, 393 bp, Zea Mays
tgctgctctgtaggtcggcggccgacgagtagcgtggctgcgggatgcacgcatggacgttgtgggctcgcaggcggggcctcgcgtcgagggcatctcgcggtgcgcatggaaagttttcatcaggtcaggtatgtgtagaagtgctattaataaaaggaagatttgataaagtaaaagatggtttggtattgtagcttttgtgctaattatctcaagatttggtcaaacaagaagctagtacagattataattttcctcatccatatgcctacctagcactattgcaggaacaaataataaaatactaccgggaggatggtgtttgcacgtagcactaatttctctcatctagatcccgaagttgctgcttgcacgtagcactaatttgcc

SEQ ID NO: 79468 - DNA, 812 bp, Zea Mays
ttcaagcaccatacaagcattcatttgaacagggatacatggtacaacgaattacaataacgtggctcaacttttaagggtcggtcgaaacaacttgactactggttcctacggcacggtcttcgggatctttgtctttagcctcacggggtgacacggaaggtgtgggtggtaccaattcaccaattctcctgtgtggttgggacaaggagtacagtgggattccctctaggatatgcggctcagtaccagtcctgggatggcgttccttgcgcttggcacagtccacaaggtagacacccctaaggagctgactatggcggtctgcctgctccctaaggttctcttcagctgcagcaaagcggctttcagcttccgctgctcgggcttctgcttgagctaaggccagcttagccctatgccaatgggactccgctttctcggcgcgctggatgaggtctctcacacgctgatgcagttggtcgcacaaatcgtcaaggctaagcaaatagccagacatagcgacaattgtggggtccttctcagttcctgcgttgctatccaggttgcggatccttgccgcccaaccaggacggttacgatccagcggaggaaagtacttcatgggagtggaacccaggtgccattcaaacatatggcaaaggtaccgcaacgctttgcgagctgcaagctggatggtgtcagacatacgggctccagtggcagtgacactccagggttgcatctccaagaacttgtcactggcgtcaatatgcacggtgacttcacagctctcggtgccacgctccatg

SEQ ID NO: 79469 - DNA, 1232 bp, Zea Mays
cttccatgttcagtttgtagctctcttttcagtttatgttcatgtgactgaaaacagaatcgaaaatagaaactgaaaacagaaacccaggttcacaggtggacatacacaacttcagaaagaagctttatgttcatgtgactgaaaacagaaaccgaaaacagaaacccaggtcgacaggtggacatacacaacttcagaaagaagctaactcttatgatgcatggaacaagttcactaccaggttcataaacttcagtcatacatacccaagttcacagtagttcactaccaagttcagttacataataaggttattgaaatactcagataaccttacacaagctaactcttacacagataacacatccagtgcccattccacaccacccatactactctacttcctctgacgaccccgaatctcttcataattgacatcatccagtgcccattccccaccacccatatcttgatcttcagcaaattggttattgaaatactcagataatggtggcgacggaccagcttcgagatcttctaaacgttgtgcttcctcctcaagtgactgagcaagctcatacacgcgccacattgcgaagttcactgacacctctttggccgtatctggcgaatccataatctcgtctccagccaaatctttcaactcctcccaactacatgcatctttgcaatggcttgggcgaggtcactacgaaccgtttcaaatcaggttatttgcgaaaccacaaacaatgttgttggaattgaacatagtactgcaaaagtttacaaaccacaaccctaaattaggtggaagggaaaccttaccgacactgaacgaggtgccgagcactgcttgaagacagaatgggtctgccgttgggaagtaaattgcatctagctgttgtaggattagggatgttgctggtgagtttgttgggtgtagcacgtacctgatgtggccgcgcaggtgacatccttgccgatggagtgctccttgccgctaccgtcgcctgtaggcttggcgatgattgacacagacaatcgactgaaggcggcaaccacttcggcctcactgtcgacctcgacatcgacgtcgacgaccagccgtttcttccctctcgtcggagtcgccatcggaggaactagcacagaaagattgacagaaagattggcggcgctgtggaatggaaagaggagttaggttttcacccggctccgtggttaaa

SEQ ID NO: 79470 - DNA, 481 bp, Zea Mays
ctcgttcacggaccatccttctatttcaatgttcgttcatacagatcgcatcaattcaatactttataatttcgcattagaaaaggaaaggaacactcgcgttccaaaatcatatcagtaactttggtctttcagaacgagtttggaaaaactcaaatctctactatattaaagcatcaatttcaatgatcgtctcgcatcatcattttacaaagaaccatttgtatttcttcaaaatcaacccgcgctaccagattatatctcatctctatcctatttattcgcacaacaacgttctcgtagctgtcgctctagcaacaaactccgtccatttcgcaacaacctccacctgcttcttacgtcgttgcaccgccaccagcgaggaggattagggcgctcgtctccggataaggatgctcactagacgataaaagttgcatcgagttcagctaactctgaacctcctcatcgccaaaagggg

SEQ ID NO: 79471 - DNA, 867 bp, Zea Mays
caactggctccatccttgcaccaatcgatcccaagcaagggaacaaagctctcaacagagaagcaaggaactagaagagggccacctgcccaccacccagagaagaggaacttgacgaggatattgccaatcttgaggtcatccaccaacaagttgagaagcacaaggagaaaatgcattgtctttcagagctctagaggaagatcaacgaagcaactgaagagatgtgcaacatcaaagcgcatgagaacatgaacaactacaaagaccaaaattacgatggatgcgattatgacaaccttcgtcatgaagtatacaatgtctaggatttcctttatgatgaaaattccccactaacaccagaattacaagctaaaccatggtcaccactatataagactcctacactgccaatctatgatggcctgaccaacctgaagcagttcctcatgagctacaaggctaccatatccttgtatggttgtaattcaccagtcatggtgaagtctttcatcatgccagtttgaagtgtgtcccagacctagtattcatcacttcagccaaggactattaattcttggctgaagctcaaagaaatgcttcttataagcttccagggtttttagtccaagcccgtcactacataagccttgtttcagtgcacccatgagccagatgagtaccttcaatcatatgtctgaaggttccccaggctttgggatcatgctccgacggtttaggatgacattgtcattgaatctatggtcaaggggctcagaccaggaccagctgcccagtattttgcaaggaagcctcctcattcccttgaaaaattactgtagaaattagatgagtacataagggatg

SEQ ID NO: 79472 - DNA, 486 bp, Zea Mays
cagatatatctgctaagatcacaacccgtactccacgtatcgttcaggaaaacgtcaccgaagatttgcgtgacgcacaacaacaaacgtttcgcttccccttccgacaaaaaatggtttcgcgttgtggagattgccatttccagagagaacaaactgaaattgaaccgctaacctccttgtgcggttgtgctggtcctcgctgaccggtcagtccgccggggaggcgaaagagaaaatgaacaagtcacctgtggcgattcgccgattccaaacggctctcgacttcccgtcaagatgagggcgcgcggcgcgctcgtggcgttaaacgacgggggtagatgctcgggagctgttcgacggaatgcccaaccggcaccaaatactacggcttactaacggaccggcccgcacttcaggctgctagctatcggaggagaagagcaaaatgcaatcgaagaacgaaggagaagatgcggctgttca

SEQ ID NO: 79473 - DNA, 311 bp, Zea Mays
aagaccaactggttgttcccaagaatccagaactcagaaagaaaattttggacgagtctcatctctccaaattttccatgcatcccgaaagcaacaaaatgtatcatgacctaagatccttgtactggtggaccaggatgaaaagagaaattgctaagtacatatctgagtgcgacacttgccaaagaatcaaagccagtcatttgaaggtagcaggtaccttgcaacctctccccataccatcttggaaatgggaggacatttgcatggactttattatgggattgcccaacacctcccggcaccaccat

SEQ ID NO: 79474 - DNA, 549 bp, Zea Mays
gtgaacttcatggatgaatggttacgagtacaaccaagggtactaccttgtcgatagcatctactctcagtggttggtgttgtgaagatcatttccctcccacggaatctaaagcagcagatgtttgctacatgctaggagggcgcatagaaggacatagagaggacatttgggggtgctcaaggctcgattccatattctcgctaccatagatcattcctttttccaccaggtactttttgtgatgatgcatgcatatatcattttgcacgatatgatcaatgaggatgagtgtggaggatcgtactcaatgtgatgctgtaatgcatgcaagctcgatgcatgatcaactccaaaatgatttgatggttccatcctcctcttttgtctcttctttctcatttaattttagtttatttgtcaaattttaaggccaaattgtccgccctttttgtgtcttcgtccatgtcagtggtggagcaaactatcaatttgttgatttgcttaaataatttagcttgagccatcatatggatagccttatgcaac

SEQ ID NO: 79475 - DNA, 305 bp, Zea Mays
aacttttggcctccgattttcaaatgttttagtatccattattatggacaattgatcaaaattttattagtagagatttgagatttggtatatggtttgactgtacaggacaagaagaagcttgtggagtctattaaattcgctatagactaattttgactatctagcttgttcaaacgactgagcttctgaacttatgacatcagtgcaagtgtgtaaagctaaatattaaatgttctcccctggtttatgaataatattaactcgaacaaagaattctattgttgtcaaatgccattttttac

SEQ ID NO: 79476 - DNA, 866 bp, Zea Mays
ctccaggttctgcatatcgttgttgttcgaaagaaatggctcgtgcctcattcttcaggctggcagccgctgtccttaaaacgcaacagcggatcctgcaactactgatggtacaggaaaagttaaatcttcttttcctgtggccgtctaggattctgcaactactgatactactgaactactgatgagtggcagcaagaaaaaggtgaaatgattagtcataatattagtattaagttatcgagtaggtagtttgtgtgacagtgataggtcaatcaagggaggtatcaggtctgtgtatcaaaggacgtgaatggatttgcccccggtactaccggagcaacgcaggtcccagcatttttgctatctgcataggaagttctatattattttgagaagagcaagacagaaaagtaaagcttttttatgtgtctcctgagtggctctggcacagtggtgtctgaaattggattgaacttgggtctgtgcatctctagttgggctacagaatgtcatcctctgatattcattgttgatcacgacgatgcttcgactccgaggaccaaagtatcatccaccatgtttgttgcggctttaatctagctgcggatacggtttctacaatattttgtccctatagacagttgatgctactagctgataagtctgagatagtgtcatgtgagtatgtgactatcatacaaccgtttagcatcactttttttagagtgatgcgaaattctttgatgcactcaaactttcctccaatattcattgtatccaattactagcaaccatgaggcgtctcctgtatctggggtggggagctgttcgatacccttggctactgtctggttgcatcaaca

SEQ ID NO: 79477 - DNA, 814 bp, Zea Mays
gttggtgtttgtgaccctactgcgcaccacaggattacccacgtgatacttttgggtaggacggcgtcgttgattgcgattcgatggtacatgcggaggcacatacagggtcggaccgctttaaattgcgtaacaccatacttcctgttgtggctaggtattgatttctagagtatggggattacaaatgagctttatgatggctcaactgctgttgacatacaggttcaggccgctttaaattgcgtaacaccctacttcctgttgtggctaggtattgatttctagagtatggggattacaaataagctttatgatcgctcagctgttgttgatgagggtggagtgagatgatgtgagatggttttgtagggtcccccctcggccttatatacacgaccagagaattatcccattacaagttgtaatcactatctacttcacttatctcctttgtcgcagcttgcagtctgatatatctgaagtcttgatcatcttctcgtccgagttatcgcaagatgcatagctccttaggtccttacaactgcaccacccaagatatcagttcctcggtagcgcctaactcggacatcggtcttggtcttcttggatgaggctcgcctaacccggctataacttgccagcccatcccgtaggacgacccaatgggaggcccattaggcggcccgtgatacgttttagtgttcatgaggacccgggggatatctatcctccacaagccctgaggctcaagccaacttttgagagtagttggctcgagactctgaggaggaatgatgtcctttgtttcttc

SEQ ID NO: 79478 - DNA, 275 bp, Zea Mays
gaggaagtggtgaccgagttagtcccgcctgagccaaggaaaggaagttgtcatcagatggctattgatagcaaggagccagattcactcgagattatcaaggttgcgtccaagttcccagatgtgttcctggaagacttaccaggcatgccaccagagcggaaagttgagtttgctatagaacttcttcgtggcatcgcccctatctctaaaagagcctacagagtatctggaccagtgttagttgaacttaagaagcagatcgatgagctgtc

SEQ ID NO: 79479 - DNA, 309 bp, Zea Mays
aaactcttagccacaaaatggaccattggagaatttataaaatgtggagatggttatcttctccgacaaaagcttgatcaggaacacatttgtcccgtgaacatgtccccgtttcatgcgtagtcgtatctcatagctcagaaccgtgttccagcctagcaatgtaaccgtacctaacccatatgtccctggctagctctctgccgatcacggtgtcacgttagatgaccaatcaatcttgcattagtcacctcgatcttgttcacgctgccatggcatttcttccatgccatcacaatgcaagttggc

SEQ ID NO: 79480 - DNA, 1166 bp, Zea Mays
cttgtagagctatgttaggagtacaagttttattaagtgactaaacattggtattgtacaaaaagtggaaataaaaggacttaaagtcaggccgacagtcagtctttgaactgaatattggctagtactgaagttaggtgaactttgagatcagacttgatcatgatcccgtgattgttagactatgattgctatagcaagattaaagctggagtatagatcaataactttgttacaggaaggttaataagttatcacataaaaatttgagatcaagaccctgaaacctgctctgtcaggcacctgaatcaagctccaatggtacagtgacctgacaaagatcgccaggttcagtgtatcatcgccagtgatcccgcgtcgtgatcgtcaccatcgttgcgattcatgcttagtgaagtgcggataaccatgtagggtgaaaaatctagcgctggggatgagcttgggaaactgttccgccctggccgccgtacccacttgcctcacggccggtccagataacctcgccggagttggctgcctaccgctcgggtgccacatgcctagacgcaataccacgtcaccgtgacttgccttagcatgtccggtcatcgcgggtggtcttggcacggtaaccctgcaccagtaactctttccctctccgatcaccagcgcgccattccaaattcaagagccacagccctcgggccctataaattaagtgtgccatcggctccgttgggtcatcacgaagccaaagcacccactcctgcctccgattagccaccagagagctccaatttctttctctccccaaatcagttttctgcacgccgtgaaccacctcgtcgtggccagcctcctgcaggttagctcaagcatccttgattgatgttctagcctcactcatgtccctcgttgctcacagaaccattcaattgaactagaccgccttgaactacctagaacaccctagattaccctcggttttcgttgtcgtcgtgagcagagagatttcaagctcaaatagtgcaaataatggagggattaggatcgctgaagggggtattagatgacagctgagttaggggtccggtcgttgcttattttggccggtataggatcgccggagggcatgttcaccggcgttcagcatcggggacttg

SEQ ID NO: 79481 - DNA, 894 bp, Zea Mays
caagggttgtgcatgtcgtcgttcatcggtttctgagacccaactcgtaatcaacatagttttggttgcattcttcatgttcttgcttgtgtttttattgcacttacaggggtaagccttatgggtgaggtcattcatgtgtcattggtgataaccaacggaactatggtgtagtgattgtggagattcgtgtgtcatctgagatactcctagattgttggctctttgatgtatctagctagcgcaacacaccctaacatttcatttgttgtaagcaagctgagtatattttcaatgaatgcaggaaatgattattggtgttgtattgactgtgttatgcgctaactgaagggtacaatgaattatagaattcacattcagcgtacccaagtgtacttgaaggatacagagattcaaattggattacatacgctaatgagatgaaggtcactagtggatatatattcaggttgggtagtggcattgcctcttggagatcatgtaagtacacatggaggtagagctcatggcactggacatatcttctatagatgctaagtggttaagggaactattgatggacttaccgatggttgagaaatcaattcccatcattctcataaactatataatcaaacagtgatcatgaaggtgaagaatagtcaggataatatgaagtccaacaaacatataaaatgtagactaaagactatgaggaaattgcgaagctctagagtaatagttgtggattatatcttgacagctaagaacttggcaaatcccttcactaagggactatcatgtactatgattgataatgcatcgaaggagatgggattgagacacatgtgagctaacttcagtagtaacccaacctatgtgaccagagatccc

SEQ ID NO: 79482 - DNA, 789 bp, Zea Mays
aactgagggactcttttgtaataacacatggctgaaaagatatgaactaatctggaccgttcgatgaaaggcgaacgtcttggattcaatcgcgttgaagcgttaagtaaactaatcctagccggtcgtgatcggatcaacggtcatgattcacttgaacgaaggggtatgtcacgttctaatcctggccgcccataatcaaatcgacgatcacccatttccccccaaatgccagtagctgagcacggcggcgcaacgacctgagcactaattccaccccgcgcatggtgattcggagtgagattacaagggtgacacagcacggttcacgtctatggtgattaatggagcagacaattctgcccacgacggcggacggtgccgaacccgcgccatcgccgaccatcacccacagtgcggaaatcctgcccccaattcgcgactatcgtataatatgcagagaagaaaagtaggcgatccataccgtgggtgttcctaccggaattagggcgatttgatcggcgagcgacagagcgaggcggaaccggggcggagtaccactccggcgagaaattcacaatgcttgtgctgtccaccgtgcgattgcttgccggtaccaactctgccacaaaccaacgatcaccagcgcacccgaatcaaccgcgacaccacacagccagacgccagcggcaattcccgtgccaacgcaacgctccgtgaacacggcgatggcggacggttctaggagaggtggagggttgcggctaggtaaacggcgcggggacccgg

SEQ ID NO: 79483 - DNA, 949 bp, Zea Mays
tgttcttatccatgaaacaaaaatcatctgaaataaaatggtccaagttcaagcaagcactgtgtatcctcataccttttctaggtctccacccctagcttctcaaggtggctttttatagcagccatctggtatgcctttttggcttgcagtattggagacgccatgccaaggacctcatactacttggagttgttgctcctccttggagcatgcccaaacatgtatttcaatcacacgacaattcccatgcaatcctaaaaagagagataaaactcaactaaatcaactaaagaaaagtagcctaaaatcacctattgaaatattcattctatagcagaccttgaaagacaaacaattttgggatattgagttttttatttgcagttgtctttggtgtaagaaatagatagttcactttgctgtgtgaatgaaatgtttctctgattttggatgtaatcaagtttacatcacacaattgtctgtactgcaccatttcacactttctaagctattgtattatggtccttcaagaatcaagtatgaactacaattgtacggatgattcatgttgatccctgtgttttagatctgattaattaatctaaaacgttaatgcaaatacttatcatgtggtacaaccccatcttcctccctccccaagattctacttggagccacgcactaccacacgccaatatccagccactttccctggtgacttgcagcaactgctccaaatcttcaagtattatagttcattgtttactgaaacttttggtgggtatctctgtgctaacggtgatccatctcgctttctcggatggcggtttactgaaactttttcgtggatctctccccaccctccctgctgctgaacccgccctgatccatcgacatgaacgacgacaagtcgcacgacgcctccctgtcgctagcacacccaggc

SEQ ID NO: 79484 - DNA, 452 bp, Zea Mays
atttttctcgaaacctttctccaccatttagcaaaattattatcttgttgtctgggggccaaggttgagaggttcagagtggagaacagagaaaaccagacttgtctggcaaccacacaagaagttaacagatgttggatggtatcatcctcttgatcacagaggggacatctgtctggatgaggtaggcctcttctagcaagccgatcagaagtccaacatctatttctgacagccagccacataaacatcttgcatttgtttggcgcccatgatttttagattctcttccatggttcaaaggtactagaaccctcaaagaatgtcctgtaagctgattttgaggagtatgtcccatctgattccagcttccatatgtgtctatcttcctgatcagttaaggtcacatcctaaatatgatcccaaagtctgaaaaattctgcaaaatgctg

SEQ ID NO: 79485 - DNA, 1068 bp, Zea Mays
ctggaagctgctagacgctggcttcatcgaagaggttcatcacccaatatggctggccaacccagtcatcgtcccccaagggcaaatgggaagcttcagatgtgcatcgactacaccagcctgaataaggcctggcccaaggacccgtatccactgccacgtatagaccaaatcgtggattctacctccggatgcgacctattgtcattcttagacgcctactctgttttccatcaaatccatatgtctagggaagataggaagcataccgcttttgtaatagtggatgggctatactgctatgttgttatgacgtacggtctgaaaaacgccttgcctacatttgtgcgggcgatgagtaagacttttggggacctgattagggacaaagtggaagtctacgtcgatgacatcgtggtcaagactaagagagggtcgaccctagtggaagacttaaccctggtcttcgacaagctgcgggcaacccgcacgaaactgaacccggacaaatgcgtttttggcgtttccgctaggaagttgctgggattcctggtttcgtaccggggcattgaagcgaacccggagaaaattagagcgattgaggcaatgagggccccagcccgagtcaaggacgtccagaagcttatgggatcattagccgcccttagccgcttcatttcgaggctggctgagagagcgctgcccttcttcaagttgctgcggaagttcgggcccttctcttggaccaaagaggcggagcaagccttccaggagttgaagcagcacctggtgtccctaccaatattggtagctccggaaccagaggagccactgtatttatacatcacggcggtcgcggaagcggtgagcatggtgctggtcgtcaagagaccgacaccagaaagccaggaacctgaggactcgggaccggccacaggggtccgaaccattcaaaggctggtctactacatcagcgaggtccttcatgaggcgaaaaccaggtaccttgagacgcacaaactcctctatgctgtgctgatcgcgtctaggaagccgcgccattatttc

SEQ ID NO: 79486 - DNA, 416 bp, Zea Mays
atagagcgagcatcaccactgtgcactcaccctctatagcatagaatgtggctgaaaaggccacaaatagtgctaggaattgggccgggctgacatggtccggacctatcgtgcttcgggacaaacaggctcgggccgagaaggcccaaaaaactttcgggttgtgccatgacaacctaaagagtacaaatagtggcccaacttggtcctaaagcacgtcgagccttcttcttcgggtcgggttggctcaagcctggctcatatgtgtgggtcgtgctagagcccaacagtccgaaatttgaggctcgaccaaggcctatcttcgagccgtgctagcccgatctataccacattgtgtcgggccatgcattgagctcttatttctggaccgtgctcatgctggctcaaaaagccta

SEQ ID NO: 79487 - DNA, 703 bp, Zea Mays
attttttttagaagtccactggatagagccggctcttatagttcgtgtatggtttaagggttggcgttgctaaaagaaaaggttaccgacttagggttatctcttaggttgagagatgagcacgtcggtcttataaaacaatgataaagatgtttcagggctaaaatcaaaatacactatcttataatgctaagatcctttttgtattgatttttatagaaaaaaacattacatgctagaagcagggcgtgaacctcttgaccgtgatatagcgggtctatttttgtacaacaacactctgataaagatgttttagtgctaaaatcaaaatgcattagaaaagataaaattatgataatatgttttaatcaaaatgcatataaaaaagttacacgctagaaggagggctaaaattagaaaagataaaattatgataaatatgttataatcaaaatgcattgacactctgataaagatgttttagtgctaaaatcaaaatgcattagaaaagataaaattatgataatatgttttaatcaaaatgcatataaaaaagttacacgctagaaagagggctaaaattataaaagataaaattatgataaataaaatacattggaaaagaaaaaaattatacacgctagaaggagggcttgaacctccgaccttgtggttaacagccacacgctctaaccaactgagc

SEQ ID NO: 79488 - DNA, 458 bp, Zea Mays
gataaggggcttcgggggaagatttcatccaagacatgttagaacaatacacaacccaggacaaagtgaagacaagagcagccataataaagggcagtagagtcactcccaatcaacaaggacacaccataattccttcagaccacctgcccaagaggcaggggaggatgaagctttggaggaaaatacaactcctagccaagaagactattctacctgttctatggagaggataagggacatacaacaaggacttgccaagtcacaatacaaaagcagaagaaaatagctgaagccgaagcaaggcagaatcagccaaaacaagttcttcatactacttcgtactactctccatacatcctagagtatgtacgcaaccaacagccacttcaacagcctacaactttagttgcctcaataagccactctccggctaggtgggccttacctcaaccacc

SEQ ID NO: 79489 - DNA, 355 bp, Zea Mays
agaaagttggtgggcagccagttgaacacgctgattttctggacatctgatggcttccagctttcttttaatcgtgtgcatccaatcgtctgcatcgagggggttgctagacccggcaaacgtgggaggcttgagtctcaggaaatcccccattctatcttgcggtcttccaccattcggtcgttgattttctagacttcgagtgaggacctcgatgagtcaggtttgattggctagaacttgggctagatctaagggtagttgcggaggtgcggggaggtgggtttcactttcctctctatcggcttccccttcagctctcaggggaaaccctgctccaatcccaaaggcggta

SEQ ID NO: 79490 - DNA, 349 bp, Zea Mays
cgagatctatcttcatcatctgactcctaacgctatcgttaggctcaacgtcttcatctgggctctccgaagccagggagcagacccgaatgccgaagccttctgccgagtgcacgagctccattatcagacggaggccaaaaaagatggtcttcatgagaactttggttgttacaacttcgcctaccgcaaagatatgaagactctggtggttagctatcgtaccaagtggccaactggttggaaaaatgagtggttttatgtgaaggccgatgagaagaagagggagaagctcaagatgctagtactgagccctctgagcttaagcttcaggctgactaggccgctg

SEQ ID NO: 79491 - DNA, 1077 bp, Zea Mays
gccattcaccgagttggagtaggttggtccgggtgccttcaactgagggcagttgttcttgaagtgactggggtctccgcagtgccaacaggcgtttgctggcggctggttgcttgcgacggagggtgcccgatgggagctctgactctgctgactgtagcgtgatggagagggcccagattgtttattgaagcttggacccctgggtggaagcccaaagggtcgagctctctggtgacgttcttgctgttgcgctcggaggacttggaatttcctcttgatgtgcccttttcttcctcttttgctctttccacttgaatagctttgttggagaggtgagagaagctgtggaagtcttggctggcaaggatggtcttaagctcgggtcttaatcccctcaggaaacgggccatctttctggactcggtgctgacatcctcaggcgcgtagcgggccagctctgtgaacttgtgcacatactcactgactgttcttccgccttgagttagcttccggaactcatcctccttgagttgaactatcccttgaggtacgtggtgctcacggaaggctgcttcaaaatctgcctaggtagcatctctgacggcttcactgaaagtgtcccaccatgctaaagccattcctgaaagctgatgagctgccagctgaacacgctgattctcaggacaagcgatggcttccaacttcctcttgatcgtgcgaagccagtcatctgcatcgaggggattgctggaccccgcgaacgtgggaggcttgagtcttaaaaattcccccatcctgtcctgaggccttccaccgcctgggcgctggttttccagacttcgagtgaggacttcaatgagtcgggtttgattggccagaacttgggctaggtctaatggtagttctggaggtgcggggaggtgggtctcacccccttctccgccagcctctccttcagctcctagaggaagtcttgctccaatcccggaggcggtaggcgtggttctatccgaagccatctgccatgggaaaagggtcactattatgcacatgccatttttttaactagttatt

SEQ ID NO: 79492 - DNA, 761 bp, Zea Mays
aatttataaaaagcgcccaccacccaaacctatattgtactagatctaggtatgaaatcagaaatcccactccactagataagagtattgtaaagtttatgtaccataaaaatgatttaatttacctgaaaacaacctggaaggcttgaatttgagcattcttgtgattgtgatcgccaatttaaaaaaaacttgcaaagcagtgttgcaataccttagagtgagaataatggagtgataaaaatgtttaccaaaatgaagttcactattaatatcggttactggctttgtagcattgttggtaacttggtattatctagctatgttgttttcctttcataaaaacggttccctcaatcaaatgttcttagttggcaatttaaatgttaaaatctatgacatgtactgattcctatgatttacaaggacatgtaaattttcccaatgtttaaaaacatgtatcttttgcaatgattgtcaaactaggacatggtttttgaggcgctgcggcgtcctgtggcgctgggggtacgcctggacgccttataggcgatgcctaggcgatatggcatagctaaaaccctgtggtaccccacggtgcctgtagtacacctcaacaccatgaactaggaaatgataccatgagtgcattaaagataggtggaactgaagtattcaaccataaatttcaccaaatcagtaccaaattttctcttatctctctattgtttattttggagtcggacgacagtgagtttggc

SEQ ID NO: 79493 - DNA, 328 bp, Zea Mays
cggagcacgagctcgacccggtgagcttcaccacgccaccaagtttctcctccgggtcttcgcgggcaaaacggtgaagggcgcgcggcgaactgctcgtcggatcttcaaggccgcgtctcaccgtgggcagggaatcccactgctccgatctcggtgagaattacttctttagattcgctatgttccccgattcgatttgcgctagtcggtcggcgagtgaggatcttgggtcgcgggaacgctatcgccggcaatggcctccgccgtggggtctggcggtgaggccgtcgggtcggccggagaatgggggcaaggatgttggccg

SEQ ID NO: 79494 - DNA, 541 bp, Zea Mays
taccatttccttattagcaaggtctcaaccaaacaacaccctagctagagttggacgctcgtataatataatgaatatgtaaacggaggctatcaatccagatctgatgatctaacgcattacgcgtggttcacgtggctgacaataatagccttcaaaattttaaccacgggacgatatagcctcgttatcatactgacagggcatgcatgggtatcaaactaaaccaaacaaaatcgcacaagatccaatcatgtatgctagtataggaaaatatatatatatttgtatatattcaacaatatataattgtgtggtacactgatctgggttaactacatgaattgatgaatttggtagactgattggatggaatatggtagactgattattggaggttgaagatttgtatatgcagtagtgcatgcatgaataatagcatgtactcgtgtgactttttattgtctaggtagtactggcaatcgggaaaaaaaattgatttgcatccatcgagaaccaatccagcccatccacatctgat

SEQ ID NO: 79495 - DNA, 528 bp, Zea Mays
tcaaatgcgtatgtggaaaatacactcttattattttcattctattttcacggttgagctgccactgaagtttttccccctcccaaatctattgcgcacggagagttgggagagctagcatccgaagtttcgaacccaccatccgtcgaggcatttgttcggtgcacaggcgatcaggtttctggagagcgtcgtcatgactgctcgttggtggtattcatcttctttcactataaccaggggtgagaacggtcggatactaggttatcccatatcctaccatgatataattatgtcagatacatgatcagatactgatagttaaaattcgggacggatacaaaacggaatcgaataataattagggcgagtaagaaatagatattggatattattaaaaaagataacggatatttgtcgaatagttcgtcctaatgatattagttgcccaaccatccaacaaacgaacaaaaaaaggaatacataatcatgtactagctagtagctcgtgcttttactatggttttt

SEQ ID NO: 79496 - DNA, 351 bp, Zea Mays
cccctctgatcccggtgctattttttgggtccgatcgtcggtgttggccatgatcctcgacagttcgtccctctcctcttcctcgccctaacctcctgtcaatccggtcccttgtcaagtttgcactcgtcagtctcctctcgtgtattaagctgtgaaagagtctccttaactaatgaggaatttggttctatactcgatgccctatgatataatcctctaaattatgttgagggttactacacattgagggatgtgtgatacatgagggagttgtgtttgtttgcacatttaacagaaagagctcgactgcttatgtggtgtgtgtgcactgatggttgtcctgacatg

SEQ ID NO: 79497 - DNA, 708 bp, Zea Mays
gagcatgcgcgtgatagtcaccacatcgctgagttgtcagcagaggttgagtgtttgtagcgagaggttgtggagcgggatagagctattaactgggctgtaaattcacgatctatagccagggattgcgagacaactgctcgagcccgggtggaagagctaagcatagccctgaaaaatctgcaagtgtataataatgctatacacgaggaagtgcacgtgttgtatgaccaactacatccgaacatgccaccgtaggttgcggcaatgggagctggtgcagtaggagcagctaacggaggaccttatggggagctggatctctttggagcccctccttccatgaacatcgtggatgattgtcctcctgaagctagcagtggagcaggagcagccaaggacgcggatgactcgattactgtagtagtaggttgtttccttatgtaatctaaataaggaaaagtgagttgtataagttaagtatgcataatttgaacaagtttggaataatgtaacacaggctgtgtaattgtgatatgtaataaccaagtatgttttcttctttagatgccgtccagaactcttggtcatgatggggatgaaacttcccgtggtggggaggaaactctgatcccaccgcctgtacctcccacgctagcagaggccattgctgctttgattaatgccactgctgataatactcgcttt

SEQ ID NO: 79498 - DNA, 938 bp, Zea Mays
gctcttgcattttctatacctcattctactctcttgcatatcttaggaggagatttctttttgagggggagttgctgtttttgtgcatctatgtggttcttgccgagtgtgtgtatcaacacggaggagaattttggagggggttcatacccacacaaatcttgttggggatgcatgaatttctttgtgaggttctaagtacttatggggatttgactttgacaggggaagtttttgaggtatgtgtcttgctagttgtgttgagtcatttgcctctttttggaggaactagcttttttcagctatgttgttgtctttgcttggtcgtgttgagccgatgcccatatcttaggggaccaagatttgctcactttcatgacttgcatttggcctttctctagcttcttgtcatttgaatgggtttctccctagtttttctctcttctgctgatttttgtgtttctatggtggtgttgacaatgtactcgtcaagggggagattgcaaaaacaaggttgacatgtgcccttgtgtttgggttgtgttgagttgttgttaattgtcggggaaatgatcctcagggccctagggcccattagttagtagaagggcgtgggagaggtctaacccagatggacccgccctggataagcatgaagcaccgaacaaagggttaggtgagagtgtgaggcggagccgcaaggggtcaggcggatcaaggggaagcccctcgagtggagtccacacctgactaggactgaccgattgtgccacattaaccacgcctagcggcgaaccatagagggtgagttgatccacttaccaatcataacccatgggccctaggcttgcggtacactcatggcctatcaagccaaggtctgagcacgttggtcgcctacaggccctgcaaacacgacaagtcatgccgagacccaa

SEQ ID NO: 79499 - DNA, 685 bp, Zea Mays
cggccccaacggaattcagttggcgaggatcgcgcctgatcctccccgggctccgcaccccggagcatataagaccgacccgccccggagcttccccaaaccatcaaaccgagacaccggaccaccgtctaggcagggatgagaaaacgagggaggtgtgcggagagggaggggatttagccgccggcgtggatccacggttacaccgacgtcgaggcctcggtaccaaacttgggagcttcactgcgttcctacggaggtgatcatggccacgcctgggcgtattggcgaccgggcacagcggaattgctcaccagagttgatccccgccgcgaatccgcacctcgccgcgaactgacttcttcacgacatcaccaccggtaagggctgtctccacatgttcgcgatctcgtactagatgattagcactcgtcaatctcgggtttggagcgctcggacgtcatattgccgcgcgccggcaagcatcgccgccacgggacctcggccaccgccgtgccctgggatcgttgaagcgggtcgcgtgggagccatggatcccagaatcaacggacgagatcatagcgagataacggtatggctgtaggaaacgtggtccgttggatctggcattgatggctgtgattagatgtaggataccccttcacgcgttacaatccgggccact

SEQ ID NO: 79500 - DNA, 472 bp, Zea Mays
aaaagctatggacgttacgacgtcaatggatatcgctttcgttcaagcattttcgaatctagtcatcctatggccgccactcaaaatagtggagttgttactagggcaaccgacatggaaggacacgaaggctgctattacgggaaaatcaaaaatataactgagattacatttgctggaaataagcctttagcgctagttttcttttagtgtaagcggtatgacccgaagtattataggaccgaatttgggatgacacagatccaacctgaaaaattgcttcaaggacacgacacgtatatccttgcccatcaagcagaccaagtttatttctcggcatatccatgcaaaaagttgtctacatggagggttgtgtacaatgtaaatccccatgaacgcctatacactcctggtgaggatgaatatcaatttggtcaccttgagcaggttgatgaggtgtttcaagaagaag

SEQ ID NO: 79501 - DNA, 582 bp, Zea Mays
tgaggggcagggtcttgaatgctggtgctcccttagcttactctgcatggaacctgcctccgaatagtcccttttctgattttgtctccaatcctcctgctcgagatggtaccacgggccatagagtgcggccctccccagaggacattgaggccttgattgctccccatgtaaatcttcctgaggctgagaagcaaactcacttcaagatgccatccaacactgatgatgctgagatggacattgtacttagcctgctggccggggaatcatctgactctacccgtactgagccgatggcaattgcgactgggcaagagtttggcgaagatgaggaaatccagaaacccgaaagtgcccaccggaagtgttcacgtcgagtgaaccacccagctgcacctgtcaaggaggagaagaagaaaaggcgactccggtggttgtcatgcctggaacaagacgctggcccttccacattattccttggcagtggcctgacgagcgccatccccgagaacaatgccgaaggttgtgatgatgctcaggtttctagcggtgtgcttgatgagcaagaagaggaagaag

SEQ ID NO: 79502 - DNA, 543 bp, Zea Mays
tcgaatctttcaacgctgattgggtacggtgatggagagacggcacgacgagaccggcgacggtaacacgagcggggtccatgaaatcaatctatgcgatagccacggcatgcatgcatgtcagcatgtgtatatatgtgaacgcatgcatgctgtgggatatattacttccgtgttcgatcgggtacagtcagctagccccgccgcgtcacggtcgacgaaattgcgcctaacgtaacgtacgtgacatccaaaaaagtcaatgatatatatggatcctcgatcgtgtggacccccctgaggctgagcacgcacgatctgtaatccgatgcgattattatcggaggattaattaatccccggccccgctagcttttctttgatgcagatcccatctgacgccgatccatcgaagcgcgacgagcacaatcgtcgtatggatgtcgtccttccatgtcacaggtcgcttaatcagtttcgcgcgaatttggcaaacccacccccgcgcggtacggctttggaggctcgtgccgacactccccg

SEQ ID NO: 79503 - DNA, 599 bp, Zea Mays
ctgatgggccgcacaagaacttcagatgctacaacttcgtataccgaaaggatactaaagcacctgtgattggttatcacagcaagtggccgactggctggacaaatgaatggttttacgtgaaagctgatgagaagagggagaagcttatgactatggtgatgagtcctttgagactgagcttggcatgacacgacccttgtgcaacatgcaactcgggtccccctaccagttggccaaagtggaatctagagttgtggctcccaggaaacgaaagtctgccatgttgactcctgctgagacgaaggtacaagatgtaccagaaaagagtgccaacacttgttcatcttcctctaccggtgttacagaaatattgaaggtaatgactgaacccttcccatttgctatgctaagtcccctggggtcagatctgactagcctattacagtcaaatgagaaggggattgaataaggctcgaaagggaagaaggatgcttcggcaactgggggaaatgctagggttcaaaagaaacaacaaatgtggccgtaatgaatgctatccataagacctcgcccccagtgtcacacctgggttttgg

SEQ ID NO: 79504 - DNA, 508 bp, Zea Mays
tgtaccggaccaatcaagtattaatgatcatccaatggctagctaacatggaggctggcgtggcaaggtctggtggtagaccagatctatctgatgagcctaacaagactactccacgtcgaacagtcacttgcaacaacattctgacaagacctggtggcgcacatgatcatcaatgtgcaaggtctggtgtatacgccgactgtgcagattttggcattcaataccaatggctatttgagtggttgggggctataaaaatacatccccaactagctcattcaacacacaactcttgagcattcattcctacaagttagagaagacttccttacacatccaagtgattcaagtgccccatttgagtagagaaaaagagtgtgcacatgtgtttgagctaaaagagagtgtatttggtgttgttgtgtcttggtgcaaagcatccattgagattgtaaaggctagcaagaggctctgatgttttggagtaccttgcgaagacttaggt

SEQ ID NO: 79505 - DNA, 413 bp, Zea Mays
gattaatatgataaaatacattgatatgcaaactctcttgccaaccttcttgagcacatggtttcatcaaccgccatcatactttcattttcactgtcttctgctgatgatagtgaagacctcgcaatcctagagtcatgagaactggggaatcctggttttagtactacaatttttgttggctaagacaaatttgaatttgttggggaaaatccaaactctgatggcgcatgtatctgtttcgttcactttcacctccatctccatctgaaagcagttgtctccccacaaggatgttgtcttttctcttttctaattatgatggcttcagtatggttatttgctttacttcagaaggtggtgcaacatgttggaactcataaccgttgcttgataatagaggatttggctcg

SEQ ID NO: 79506 - DNA, 464 bp, Zea Mays
ggatggagccacccaaaacatgaaaaggagctccgacgctagaagacaaactagccccgttgaacacgtttatagcaagactagctgaatgaagccttcttttctttgaggtgctaaggtctattgaaataatccaatggggtccaaactagtaaaaaacttttgaagagctaaaacaatactagattcagttgactaccctctccgcaccaaagctaggagcttcattgcaattatatgtagctgcttctcactcaatgagaagcactaccttgatacaagaatgaattgaggaaggacacaaaagcatcacccattatacttcgtattcaaggatttgagttcatcaaagtcaaattgctcaaaagttgacaaagtactatatacagtagtaatagccttaagcaaacttcaacattattttcaatctcatcacgtattagtaccttcatctcaactagtac

SEQ ID NO: 79507 - DNA, 337 bp, Zea Mays
aaagaaaacaacaaacgctggataacagaacctctctgtagcagcaggagtaccgttgaaaagcagcacacggtattagcaatggcatgacaaaaccaccaaaatgaaagctgtccgaaaaacaaaaggtccactggtcgtttcagatgctcgtttgttgtgcacagtacaatccccgctgcactgcaacaacagttgcttcttcatgcggaagcacacagaaatacaaaatggttgtacatagcgattttacagtgttgccgataagctgacagcaatacaacattgcagtgttcgtgaaagtactggaacgaataaactggtgggaatttgattt

SEQ ID NO: 79508 - DNA, 698 bp, Zea Mays
cagaaagcatagagagtatcagtgaccatgcaaggttatggtgctcaccaaaatcttcttgaatgaactatagttgggtcagacgatgttggtcctgtccatggtggtgttcaccgtctgtcaaggcggcgttccagacaactctgtgcggtacaaatcaatcaggcaggcgcataagcttcaccacaggcaaaggatactagaacttgagaaaagatacacagagggatattaaatgcacctggccacggtgaggggaaaagatgtctgttgtggtcactaaccacagtacccaccgcaagttcaaggtttctcaatgggatcagagggatgtggaagatggagaacttaaactagaggtgtgagaatagtgtgacgcggtgaagaagtatgaagtcggctagaacttggagatctcagattatgctcttgtatacccaaaacaaagacaacagttgtagccggcttggcctttcctttagggtcatatacagagggccaaagagagccaacatgctccatttttcacctacatgacccccacgtaagggtatatgcacagggaaacatcagaggtagtcaatcctcccatggacagcaaaccagcacagtaaataagcaggtgagtcatggctgtcaggctgcagattgatccaatccaaaaaaacccctgggctataaaaatcgttcctgtgaac

SEQ ID NO: 79509 - DNA, 652 bp, Zea Mays
aaattgttagcttcgagaatcgagagccttcgaccatttgaactgaaactgaaatatgactggtaataaggggcccttctattagctgttagaccttctatctagtacttcctctgtttatttttatttgacaccgattagtataaaattgaactaactggcgtcaaataaataaaaatggaggtagtatatcaaaaatggaggtagtatatctagtgacatcatgcgttaggttcaaatcactgagtcgccacaggcccactagatgtccactttgcgcggcatggctcgacaccgaactggcatcgtgcacccacgcatctttcaagaaccttttttgtttcagcttggaaagccatcccaagcaggcaagcttgcacgtctgaacacagtcctgagctgaaacagacaaggccgcctaagcgtgcacgtatactagacaggagaacgaaaaacctcaaaatcgcaccagtagattagaccaccagcttataactaattgacgatgcaatgcaatgttatgctatgaatttatacatcaacccatctctatatctgctatctgctttccaatcttatcacggatgaacaacagtttgtccactctgatattcagatctctatcatatgccctagcacattgatgtttcct

SEQ ID NO: 79510 - DNA, 290 bp, Zea Mays
tggagtcaacacggagaagatgaagcaacttgggaaagagaagaagagcttcgcatagatttttcccatcttttccctaaaccttcttaaatctcgaggacgaaattcaatttaagggggtaggatttgtaatacccaaatatttggagtataaaaatacctgagtatggggagattataaaaagatttatgtgatcacttaatttttccctttttcatattctactaatggaattgaattaggcaaatgataaatgaataaatacagagatgtgcatgtcatgctggcg

SEQ ID NO: 79511 - DNA, 1051 bp, Zea Mays
cacaaatgttcatgttgctaccagatcaggcatcataccagcaagcaactcggtgtgtaagctgcggtgccgaaaccaggatcaaaaataaaaaaaaaataaaacgcacataagtttaaaggtgagtattttttgaaaaaaaaaactaaaaaattctgtacaactgctggagggtgcggaacgacagggcggacctgtggaacatgtacggaagagtccttcctgcttttttaaatattagagaatacagatgtattataacctacactaaatgtcactaattaatggccatacatatatatatatacatccactataccactaaagtagccgaaaccaacaggaattcttctggggaacctataaaaaggacacgctattagattgcaggtcagatcaatgtgcaagacagcttaataagttgtcaacattagcttaaattaacaatgccatgatcattgggagagaatgcaaacagaacatatattagttaataaattatagcccatagactttatacacagacaaaaaaggatatgcaaggtcagatcaataatgtgcaagatgcatatatatacggcatgtccgatcagaaaacctctctctctctctccattattcgactagccaagtcaatgcgatcaaatcaaacggcctaaaacttggtcggtctttgtgtgcatgggagctagcggcctgccagttgttagatttcaatatttcatgtttgtttgtaactttgtacggttcgccatgcatatcgtctgactaagctaataagaccatatatacgcaagctagtcaaataattaagtaaaccctgcattcacagtgtatgtaaaccatatataaacagctgttgacacgtcgatccctaacatatatactgcaccgaacgatcgaagagagatgcatgggttgttcttatctgtcaagtgatgaactatctttgactccggctccaagcttagcacacgctacaatcatccatgcgcgatatccgggcactgctactgcatgcatgcttgtgatcactttggccgttgtttac

SEQ ID NO: 79512 - DNA, 505 bp, Zea Mays
gagatgcatctgcatggggaacgtatcgtgtgagcacaggtcttacgtgcacacgtgagcactttaattgtgaagccttcatctctaatccaacgttcagtgcctcttttacatctaacccctcccacctcggccacttagcccataatcactttactaatcaccccctgacgtggtacagagaccaggatcgtgacggaacgaccaggtgcgcctgtacagcatctgtacaccatttcagccgccctctgtacaacattgtacctcataatcccacacacacaaggtgctgtccagaattaacacaaatattgaatttggaatttcaactaaaagcttataattgttatgaagatgctccatacatgtactaacaagaaaagttacgaaataaccatgttcatgcatctgaacagaaattacataaatcatgcatctacagaacatgtggttcttgactgtcattctttcgttttcttgccttaggtagttctttgaatttttt

SEQ ID NO: 79513 - DNA, 836 bp, Zea Mays
gctaagtaagggtttggaggatcacagcaagagcagggtcaatggcaggaggggcagcaggggcaacactagaactcctagcctcatgatcatgtgagcgtggaggcataggaggcggaggcggaatcccaaaatcatcatcatcagcgggaactgttgtgccctgagtctcgaactgatgaaaggtcgtatcctctgcctgagtgtctgtcattggatcaggtgtcgacactgggtcctcaagggctggacggtaagagccaaagaggaggcgagaggcctcaagagtgccctggaactgcggtggccggattagctgtgcgaagatgtggcagagatagtgagcatatggcagctgacgccgggcacgaagtccatccaatacggtgtcctcgatctcacagagaaggaagtcaacaacatcaaactctgaatgagagaccagggcaccgaggagccagagctggatatgagtagcagcctccctataacacatccgtggcagaagcgtccgtctcatgagctgatataagaacttggccgctatagtgaaatctgccggagaacgtcacgacccatctgagaagggcggtcaaaacaaagccgcgacgtgagctgtagctggagcaactccgtcgtgagggcgacgaggaggatcagaggtaccgtagcacaaactgtgaagacgactcgatgactcgttgaatccaaacaactggcaaatctggctagcatgaagtgtaacatcctctcgctcaaagcggaacctcatccactggtgatcagggtcgatccatacagaagcatagaaaactcggacccattcctcaacatat

SEQ ID NO: 79514 - DNA, 694 bp, Zea Mays
gcattttatggtttgaagaccaacttgttgttcccaaggatccataactcagaaagaaaattatggacgaggatcatctctccaaattctccatgcatcctggaagcaacaaaatgtatcatgacttcagatccttgtactggtggaccagaatgaaaagagaaattggtaagtacgtatctgagtgcgacactagccaaagaatcaaagcaagtcatttgaaggtagcaggtaccttacagccactccctataccatcttggaaatgggaggacatttgcatggactttattgtgcgattgcccaacacctcccggcaccacgattccatatgggtcattgtggataggataaccaagacagctcatttcttgccagtgcataccacccaaagggcagaaaggtacgcagagatctatattgaccaaatagtgcgcttgcatggaataccaaggaccatcgtctcagatagaggaacgccattcgtagcatgtttctgggaacagctacagaagtcacttggaacaaccgtgattagtagctctgcatatcatcctcaaactgatggccaaacggaaagagtaaatcagattctcgaggacatgttgagagcgtgtgtgatacactatggcaaaaattgggacaaatgtctttcactggcagaattctcttataataacagctaccaatccag

SEQ ID NO: 79515 - DNA, 633 bp, Zea Mays
atattatcaaaccaaatcaacccgacataaccatctaatgttccgctatgcacaataagcgcatggtctggggcttaatcatccggaataaccatccgatcttctggtaagcatagtaagcgtatggttcacgactttgtcattcggaataaccattagattttccggtatgcactgaaagcaaatgatccggggttttggtaggtgtaacgttgttaggtgaatgcgtatgttggctgctgttgcacgtgcgaactgctgtgtggaagctgctgggtcctcctctattatgtgtggcttgtggcgggcttggactgctctcatggcttcgtcacttggaactgctcgtccgtccggtcctgcgtgcatctctctctcctagctggaggcgtggtggcctggtggtttctctgtgtttttctttttacgacggcttctcttgttggctagggttggcatcaggggcccggtcagctatgctccctcagcttttataggcagcgaaccaccgcaggcagagcagagataaagattccaactgcatccatctacaaacaaggatctcgacggaagagataaaagcatgcagcacaattgccgctgccctactgcagccttgactctcgtcaattg

SEQ ID NO: 79516 - DNA, 413 bp, Zea Mays
ggtatgtctaatgcttgtttgtagtttgtcaaggttaaagaggaacttgttggatatgttgattcatattatggagcagatttggacaagagaatatctttaatatgttatgtattcatagttggtggatgtgcagtcagttggagggcttgtctatagcctataattgctttatctactatagaggcagagtatgttgcagcttgtgatgcttgcaaaggggtcgtttggttgaaaggtatatatgtcgagttttgtggagatacatcttgcattacattgttttgtgacagtgagagtgctattttccttacaaaggatcatatgtttatgagaggacaaagcacattaatatcaagtatcattatgtccgggaaatagttgcagaaggtaaattgaggttatgcaagata

SEQ ID NO: 79517 - DNA, 386 bp, Zea Mays
ttctgcttgcccttcgactctaatggacagctgcgctccaacaaaaataggaaagaggctaacaacagctacaccttcatcaacctcaccacgacgaagcagcctgtcggctgagggaggccctcatgggggcccgccacgcgcactattgaattttcaatgccggcaccaagacccaactcgtcggccattgctcaagctccatggtgttcgaggcagtagccatcagccaccatcaagctctggccttggctatcggctaccgctaccatccccatctagtgtccaccatgcttgaggtcgcctttgttgacccccagctaaggatagtggcgttcgatgttgccggtgtaggccaacaaccaagcgtcgaggctaacaccatc

SEQ ID NO: 79518 - DNA, 1403 bp, Zea Mays
gggagaccccgctcggacaccctcgggggctgggccatagtttgcgctacccacttgagccggatcatctccggcaataccctcgggggctgggtcgtggcttgcgcttcccacccgagccgaatcatccccggcaacaccctcgggggctgggtaagtgtcagcaccatcctcgaggaccaagttctctgcagtagccgcctctaaggctgaaggtccctcagttacttccatgggaacaagatgatccaagtcagctccctgaccctcaagatcgcgctccaaggtcgatgaggcgcgagacgctgcctgggatgaccccaacccagcgttgagcacatcagcacaaacatccatcacaccaccatccgctggctctgataacagatcctctggaaccatatcttcaagagtctgatcaaagttcgccagggacaattcttgtagaccaatgagggcagacaaagcaggagaaagaactccactactttccccactggcgacatattgccgactgttcttccgaatcaaagggacctcatcttcttcctccccgtcgttttcattagcaacacagacaacacccccattgggatcagcggcaaatggagcacacccattgggatcagcggcagatggagcacacccattgggatcagcgacagatggatcacacccattggggtcagcgtcagtaaattcaagcacaggcacttcctcagcagcaggaaccgaatgaccaacatcccgatccaaactggatactcgccgaaaacgtctctttttctttttctgctcatcagcaggagaatcaagttgattggctcggcaagggcgtttcaggcgaacgctgacaggtttctgaatatacaagcttgtaccagcttccgggagaggcgccaccaccaatgtcccagtaggagcaccagaagagtcctcggccagcatatcaagcatagcacttatctctgcatcactaggatctaaaggcacctcaaagtggacctgccgttcatcatcaggaatttcttcgagcgaagcaaccaaagcgctaacttctttggcacagggtcgtactctaaggcccaaaccgccatcagcgacaggtggattcgacacaaaatgagtgaaggccttggaaggaggcaggttccaggccgagtatgccacaggggcaccaacatttgataccttgcctctaagaatcatttcaagccggttcaccaagtctacagcgggaattcttctgttggtgacccgggttgagtcagctagacctcggtacagataggccgggtatgccctgtccttcaatggctgaatgttcttgaagacaaaatcagcaaccacagcctctgcagtcagacccctctccttcagcagtccaacttcagccagcaaag

SEQ ID NO: 79519 - DNA, 500 bp, Zea Mays
cagggacatggggaatcgagtggtagggcaccaaattgacagcgggtaagaaaattgggtaggaatccactgcgccacaagggaaaagacagggctgagtctgaccgcacatgtgctctttgagggctagtttgggagctacaacaccggaggggattggagtggttaaaatcaccttcttattcataatttgggaaatcgatcgcttggagcccagacaacttcatgaagaggggagagaggaaaagaggaggcagtgggcctaattggatctcttggtggcaacagagacagtggccctgtatctcccgcttgagcgctcctctattgatgtcagtctcctctctctcacttctggctatccgcacctgccgccctctaccgtcagccaccctcaacatgtctgttcgcccgctttgagtcccgcaggtccatccgccccacacatgtatgtcgcttcaagtctgtccacacctgaatgtgctgtcctccccataggt

SEQ ID NO: 79520 - DNA, 318 bp, Zea Mays
atgggctcctccgtcattgctgtcatgttcaattcgatttgttctactttgaacagaccgaatggggagcagattgctatttggtaatagattcagatagtgcaagtcctgatttcgtagtttatccacatttttgggggttagggtttagggtttacccatattcgcccaaaggtaccacagccggagtatcctatcttcatatgttccttggtcgccgagcaccaagcctcggcggcatggagaacggagacgacactcttttcggcgagcccccgttgcctcgctgctgctagcgttgttcaaaatatcttaatt

SEQ ID NO: 79521 - DNA, 692 bp, Zea Mays
gggtttcacatcccaaatagccatttcaccgtcgtttaaaaaaacccacaagccaagtgcttggtgaaaagcataaaccagtcaaaatagctcaaatcaaccccaattttttccagcacactacaactactgccagtacctctcacgccaaatttcacacatatccgatatttcagacacctgtttcacaacctatttatctttatggtgatccgtttcgagccgagtgccaaaaatgtttttcctctgccaaacttcaaaccaagcactcatttcactcattttcatacatatatatctatccatgaagtattggctcatttccttgtcatttcgtgccccgttttgaatttcaaactctctatgacacaattcaccgttcaaaagccgttctcgcgccgtttgacctctggttctccaaatctctcagtttttatgtcataactctctgtgtatgtatttattcacatttcatatacttgttattatgtgactaatacgtgctcacctcttctatcatttcagtgattccgcctgcccgcttacgcttctcctgtcctgcttggttcctctctctcgagacgttcccaggtagctatttcactctaatcaggccttacctactgctctactgctctcacttaccttttctccttatcttgcagtgtgtcagcagtcattttaggatggtg

SEQ ID NO: 79522 - DNA, 343 bp, Zea Mays
tcatttctctccccctttggcatcaatttccacaaggggacatcactacgcaccatgtgtaggacacggatacatgctgtaatagtcggagctgaagctgtcaaatatagaagtgaactgactgaaatcattttgaagttgttgctgcctttcatctagtgagtgaatgctgtcactggtagatagagactcgaattggttggacagagcacccatattatcttgaaaactttgatgcatgttgttcattcgactcaaaattggatcatgtataatagattgaatatgagaacgaagattagtaaactgtgaatgaactccatccagctgagagtcaacaaca

SEQ ID NO: 79523 - DNA, 768 bp, Zea Mays
ctttcaatcgctatctcggctagtctccgatggatagacgtattacattttaagttcatctttctagtgatcgtttgtgtgtggttatctagttgttgatgtatttttgatgtcttcctgtgctgtaatagccttcttcaggcgtagttggtgtggtttcgctaaaacatcgtctgtgtccttttatggcccttagatatctcgtcttcttaggctggctccaacaacaaacagctatattgcccagctatttcatggtttacctgctccctgtattttacctggtcaacgatggacctcctgtttgcaacagaacaggcaaactggctgtgaccattggtacaatctgtttttgcgccaaagaaacaaagtatgctattggtccaaaataaatggctgctgtgccaaagacaagccaatttgcctgttctctctcctcgcatgcaatttgcctgggctagatagctggtccattggatgcgctacagtaccagttgcaagctaaattagctttggctggccgaatgcctggcctattggagctagccttaggagcgttttacctttcaaaaacttggtctagataggatagctcctgtgagatttatcttgtgggccttgatgggtcctaagtatggtgcattgaatgtaaaaaaactcgtttgcctattttataatgaactagggggaaaaccccttcgttaaaaaagatatctccaacagctatcctatcccatcctttatcgcatcatctatttcaaattccac

SEQ ID NO: 79524 - DNA, 1355 bp, Zea Mays
gagagcggcgaggcgttctctggacggcttctttcaggtacgcggttagggtttccagtagatttcttaggttcgcattcttttccccatcttgcttcgcgtctttctcgcctctggtctcttccgagttcgtcgcgcgaaagtttctgtggggggtggatctcctctccgcttcgcccgccttcgcttggtgaggagtggcctcttccgggtcgctctggtgtgtcggctccgatggattcgaagaatcgaaaccctaactgggatcgatggggtccgaaggaggggccgcaaggttctcagtcgtgggggaagaatcggaacctcagctggcgtttgaagtccggatccggaaaacctgatatcaaagaagacattcctgtctccactcccggtgatgccggtcagccaggtatcctcaaaaaccccccgcctcccattctaaaatccgagaatgatttggtgcgtagggttttttgccagaaatgtggtttggatggtcatcatgctagggaatgttttaagtctttgtggtgcgagatctgtcgcaaagaaacccacaacactgctcggtgtgttcttcccaaacagaataaacctagtatgccgattgttggtatggcggcggatgggttagggttttactcttctcatttcgccaaacccctttccaacaaacctaaacgcagttttattggcttggttaaaatcgttgagggtttgatcaccgctaaagatctggagaaggatttcggttttcactttccttggggccgcacttggaaagctactaagtgtcattctggcttcctcatgcaattcccctctcaagagagattggatgaaatgattaatttccctgaattgaaaatgaaattgtctgcagccaaaatctctgtctcctcttggagttctcaggctaagcctaaatctaaactgcactctgtgtggattgtggctgagaatgtgccagaagagttgcaaaattatcaggccatttgtgaattgggatccactattggggcagtggaagaagtggatattaactctttaaactctaaagaaattgtgagattcaaagttcatgtgaagagtgttgctatgatcccccctatcattgaagttggtgtcaaacctttcctgtatgacatcttcaaaattgacaacatcactgatgaaggttggaatgatgactctgttaatctgggtaagagggcttcggttgatagacaagggtttggtgacatctctcttggcaaatatgctaaaaaggccaaaagtggtgatgaggactctggcaaggacatcaagggaaaatctcccttaaaaatatcctccagtcaggccaatgttgc

SEQ ID NO: 79525 - DNA, 773 bp, Zea Mays
aaacaatattaatatgagagtaatgcaactagaatggatcaaaaaggatcaaaaatgaattaagtatgaattaaaccagtttctagaattatttttctactagaaatcaatttctgaattttcccaatggttttggaccgcggatatgatttccggagagctcggggtttaaaccgcgaaaaaccggacctaggtgcaattacttgttcacagaggtggaccgcgggtataataggggatttcttagggtctcttttagaagagcgctcggctgaatttacctgggcgaatatgagccgttcgatcccgatctgacggatccgttataacaacgaagcggtacgcgcttccgaccaccagatctagatccgatggtgaggatcccaccaacctaaacgttatctagcgattaaatcatgagcgcatgatggccgatcaacgagcgagagaaaccccagccaaagggaaatgcagatctaacgagcaccgttagatccctatttaacgaccaacgctcatcacccacctcgcaactccggagtttggcgacactccctgccccatggtggctgagctcattagagcatgctaatcccacccatggagagtaaattctaatgctgactgagcggaacagagagaagagtaaggcaaacactacggggtgtgccatacctgcaatccagctacgcagacttccccccacgacgaatggtggccccgccgttcagcgcgacgagggactcaccggcgaggacgccaagaggctcaag

SEQ ID NO: 79526 - DNA, 1890 bp, Zea Mays
cttatagtagggagtacaagctggtcgggagagggaaggatcctaagtccctggggttgattgaggcaagtgccaatatcatcatgaaggtgaaaaccatgaagtgttcgcctgccttgtctgaagccctggatgtctctatttatagcctcaaggaggacctccaggagcactggggtttgtcgcatatgggagaggaggtgtggccgagcccctgtagccggtatggcccttgtactcactgttgacttataccgggaggggatgtctggttcctgtatttgcatctttgactacggggagagccgaggccaaggccgagggctcggtcacgtacccgagccagtctgatggggaagctgtccaagtcgtagtggttggagtagtggtgggtatggcgaaaagctcttggtaatacgtcagctctattgcttctggtgacgtcgtgtatcctcccgttggtattatcgaggtcgaatccatgctcgggcaaggcggaagtcttcccgaggccgtgaccaaaccgaccccgggactcgcagccgtgcatgacaaaatcaaaggagtggccttctgtgggattcacggggagcaggtagccgaggctaagctcgggcgaggcgtaatttcctcccgcggatcagcacacgctttatcgtacgcgcgtcccatctggagttggcagacagcgtggggggaacagtagccgttattcatgggcacacgtcaccgtagttggtgaaagtgaacatgactgtggtcatgtcactcctgttcgcctgtgatgttgtgtggggtaggtatgcgcattgaatgctcatgtcccctgtggccttcagctgaggcttggctcggggttgtcttccttatccgagacgagctctgccgaggtggaaaacgacagtcccgtggagaggggacctcgggcgggacaagaatttccccgagtacgtccctcgtccgaggataggctcaggcgtggtggagttttgaacgactgccgagtggagcctcgggcgaatcgtggttcatgctctcttgacctcggggaaagtgtcggacggtagcctcagggttaagcgagattagggacgtaatctaggtaactctaattacgatatctgacatctttcatcatgtttaatgtgatggacatgagccttatatagccccttagtaccacacaaccttcttgagtagaggcaaacatgacattggagtcatactttttgaggtcgcctgccctcggggcaagaccaaccgtattccttagtatgtagggggcatacttagctgagcggttatctttgttttctacatgaagggcctcgggcctcgagtcttggtcactgaccaagaagcctccaaggctgaaggctctgagggatctagaagaagcattggagcatgggagtatcctaaaacctggagagccctcgcgatgttatactaaacgctaaacggtaaacagtcggtcatcctatgtttaacgtttaatcgaactacacaggtgtttaaacagactaaaaacggattatacgggattaaacggattaaacgacataaacagcctaaatgattagctaccgaatagcatttaaacgacgtttaaatgatctaaacaaccatttaaggtaacagtgagccctggagaccctaggagccaggattcgtccatcctcacgagcaccagaggcggagagggccttgacggtccagaaggatccgagatcagttcctctagcatgaggggtcccaaccttaactagaactaaagctaagccatataggacgcagggcctcagaggcacgtggcactggcagcgttagttgggcatttaacaaaattttctattgggatttttagaatgcgtcttagcggcattcaac

SEQ ID NO: 79527 - DNA, 1053 bp, Zea Mays
atgttatgttattgtctgtgctagtttgacattatctgaagagttgctatgccaatcttatttacttattattctcatccctgtggctgcagctatgtcgtctcgtagggctcggggtagtccgcaagttcctagtggggactcgatgagtccggcggcaatgttagccgcgatgcaggccatgcagcaggagttggcccttctgaggcaagccattcctgttgcccctgcaggtgctgctcagggtgctggtggtggagaagtgcccgggggcgctgtccctgcgggtgctgttccaggtggcggggccgaggtgcctcttccagtcagtggtctttctctaatgtagtggatgggcatgaagttggattcttttgatggcagtggtactccggtcgaggcggcagattggttgacttacgtggaggataagatgaatgtcttcgagattgtgtatggagatcgagttcgctttggcacacagctgctgaagggagaggctcaaatttggtggaggggcgtgcaggcagcgcagtcctcctcaccaggagtcctgtcttgggatgtcttcatcagacagtttgaaaggagattctacccggtcaccttcctggagaaaatgaagattgatttgcagtcctacaagcaggagaagaagtctgccaccaagtatgaagtgggcttcaacaagatggtccgctttgttactcatgtggcttataatgagaaggaaaaggcgagccagttccgtcagggtctgaaaccttctatcaggcatgcactgggagcctttccgttggtggacttccgtactacggtggagcaggcactgggtgtggagatgcaacaccagtataccatggagtcgcagaagtcttcgggtgttgatcagcctcgtggccaggacgcgaggaggggcaacacgggaggtccagcccacaagaaaggcaattctcagcatcagcgccatcatccttatcgtggcaaatcttctgactcgggtacttcgggaggaagtactcagaggtttcgggctattcctaagcccgggct

SEQ ID NO: 79528 - DNA, 1124 bp, Zea Mays
agttattgacatctttaggaaactggcataatattatgtagctttaatgcccattctgcccctcgttaaatcgaacctacatgttttatgtggggtgcgttactatctatatgtgcgattagtaggatgaaatggactcatgggcggacgtagtcacaaagttcctgggacgattaggtcgtggaacaggggatgaggaacatgatatgctccttaaaaaaggtttttcacttcggggatgatattgttcctggaacggaaacggcgttcccggtgacgaacatgtgatggtgctcatgggattgagtatgcataatgaaagattttgaggaaccatcatgtggatgtgctggactatggcaacattctcggtttaatgtccaatcacatgtctaaagcatgctggtgatttttataagaattcagacataaacattggcgcccaaaggtttgagcattggtctttgttgtgaactgcattctatcctgtggcgagatcagatggtgatgcagtttgaatggagttctgcattgcagtctttcaggtatatttgtacaatatggctgaaaggaagtaaaagtaacagcattgttctgttgatgaaaaaatagcttcagaattcagaatgttgtgccatgagttagttgggttgtcggatcttcttgttgataatgtttgacaccaaagacgaccgtgtcctgtgaagtcagctagctacattggcaaactgctctttctccatggtaacatggagtgaacactcggcaggccacatgtgcaaatttggagaccattaacatgtgcaaatttggagaccattgtgcaagtttggcaatttctttgtaggaataacattatggcaattttatcgagccctcaagcatgtttacttctttaggtcgtacctagcctaccagtaccagcgtattagaattttgctagcacagtttgaaaaccatgcgtgtgcaggtttgccaaatcaagattgcaaaggctgctgcttacatatacggtctggagaggtagagcagcctgagctatgcatgggctgtatggtggcatgctgctacttatttcttgcaagaatctgtaggttgaactattcgtctgaactaaccaaggg

SEQ ID NO: 79529 - DNA, 316 bp, Zea Mays
gagcaatcatctcacggtggtgtcgagccaagaaatcatactgtgcatccagggtgagcaggtatgcagtgaggtacacgactgtggggtcgtcctcaagcagttgctgcccttccaatgcacgcatcctggccatccaaacggtacggtctctctgaaagggcggaaagaatctaagcggggtgtcggccacttcttcttcataaatttgacacagggccctcaatgccttgcgagcgacgacttggcaggtgtctttaaatctgtgtcccgcagcagtgacactccattccacatggtgcggactagatccaat

SEQ ID NO: 79530 - DNA, 728 bp, Zea Mays
gctagatctgcaaaaacagggcaagggttccgctggggagcagcttgtaataatttttggctttgtaagatacttttgagaactatttaatcaaacaacacttatctgtatgctatttgtcctcaatgtgtgtagcgttaccaacttctccctggtacttggcccccctaggatgtaggctcaacatgttgaggctagataccaatatacctaagggaaaattagttgccggtccctaggaggtagtctctacggttggagactacctgcgtctggattgggacctagacctgcacacagcttcggctttgaagtattagtagctcacccataagacccatcgtctagtatctgccatcttttgattcatgcaacatgatgtgcaggatttagcctaggaagccaagccgtatgtccggacccacaggatcacagctccaaatactagggtacccgctgcagagtggtggaggtgcaggcttatggtacagaaccagtctaagcggctacacagctccggaccactctaggaaacgagcgcccattctttagaaccggacccacagtttgtcggaccccctgtagtaggagaggggtcctgaactgcaagcctggcttactcaattcggatgtcatcataccagcaagggtgggaactgtatgggtgggttagataaaaaataatgctcgtacactgaagtagaatgaaacatcacaaaagctcctct

SEQ ID NO: 79531 - DNA, 349 bp, Zea Mays
cacaaaaccaccttctgtattggccacgagcccatctatctgttgacgaattttggcaccagtcatcgttgcaggtgggtggtctgtcactacgacacctttcataaagttcttgatgtctaggcggaatggatggtcagcagggagaaattgtcgatgtttattgaaggacaaatatttgccaccctttttcaaccaaatgaacctgggagcttccttgcaaattgggcatgggaacttaacgtgaacacaccaggcacagaatagcccatacaccggtaagtcatgcatggagtactggtaccaaacatgcattctgaagtttgtcttcgtagctcggtcatacgtc

SEQ ID NO: 79532 - DNA, 532 bp, Zea Mays
gtcccgaaccggtactcatcagctaatctggaccgcagatcgcgcgatcaacgtaccctgtccaacttggctttccccagtcgactctggcagcggcgcccaccaaacggcggtggagcaaggtcaactaccgacctagtgcgcaaaatccaaaggggagatgtgctatacgcaggtgagggtaacgtgaacaacacgagggacatctcacctgtgattccggtgcagagatccgaggtgacgacgaggcacggctccacgacggaggagatgcgccgtgcgacgagcaatccactccgctatgttggtcttctctcccaattgccgacgcggacgacttccccaggcgtaggcgcacctccttggtcacaccccgaggacggaaatctgaaaccaccgagagtcaccggcggcgatccaagtccctccctcacggtctccctccctccctgcgacaacacgtttttcggtgaagcgcagacgaccaacttctaggggtcccaggctgggcagcggggccactatgtagagc

SEQ ID NO: 79533 - DNA, 282 bp, Zea Mays
tgtcgttctccttttagctacactatattttcttatggcgaaccaataggaaaaagttacccaacagattgcatcaaaatcacctagccaagcttggagttgtttgacggttgcgtcaaaagcacctagccatttctactattgttcaagagcacttttgtgttgtgtggtattgctgaagtttggattaaggagaatagttcgaccaaaaatctgtctgataggtatcaatctgaatagtctggtattatttgaatagtgacgtcatgttaattttcttgt

SEQ ID NO: 79534 - DNA, 622 bp, Zea Mays
tatttgaagcaatttgattgttgaatttacattatgatttatcattttcaactataaacattaacacattttgcagtctaaggaactaggccaccctcctcgaagagatgaactctatatcaaaacacatacgcgaaaatggagtaccaacaagacttgctgaaccagttattataagtattgtgaacttgacatttattgtaaggtactttttgcatcacatttgctttttcctatagtggtagggactgaacctttcttctttgcaactcaatttgtgtagaacaaacttaaagaaattttttaggcccatccaaagttgaaggaaagaacaattcaagaatgggatgcatttgttgttgtttgtggagagaaagagccaagaggatgtgtccgagttttgggtctaggactaactccccaaaatattagtacccagggcctaagaagttacacacccacaagactccaaatggaagtactagcccgcaaaaaggctgaacgtgagaaagctgctctagaacaatgcatagcagaaatggaggagaaaatgcaggagcaaaggatggctcatgaaatgagagatgtggaaatcatctcgcatgatggttctaatacacga

SEQ ID NO: 79535 - DNA, 596 bp, Zea Mays
gcaggtggtggtggtccacgaacacaagtagataggcccaggttttgctgtgtgcgcgtttccgggttttatttgcatctctctctttatcttgtagtgtctgcaaacagatagtttgacgcatatatgtcgtatgttctactactacactttaagcaaagagctagttaatttgtgggcactggtgattggccagaggccagagcactcagaggaagattaacccttacttttcttgttaatagctaggaaatcaatcagtaccttcagctacaacgaactcgctttgatctgtgcctgtttaggaattgtgagacgaacaagatcgatgcaaagtggcagactactagcagcagtgcatgtacatgcacgtacatggcacagtcatggctgcatttactgagggaacagtacagaatgcagagtcagccggatgcgatcctatatggctgtggcacagggagtgggagtgagtacgtagctgtacatcacactgtctgatcacgctagctggtgtggactcaggcccagctacgcgaccacatcctcagctcagcctcgtatactccatctcttctgatttagtttacgattac

SEQ ID NO: 79536 - DNA, 380 bp, Zea Mays
agaaggtttggtcgatgtggttagaaattgatttggcttgtatagagaagtggcgacatgccgaagtagtcatcgcttcctatatgctcgtaagtcgaatcaatgcatgttatatgttcgttgaattacgcttcgcatatagtgtatggttgcattcgtagaggtaaagtagacgcatcgagcttgattggtggagcctaggtgagatgcaaggttacataggaaatggatttagaattccttcgactagttaaggagttggttagagttgttgtgttactttggattgtgtggtgaagtgatagcatgactacgtagccaccacgtcatctattgtgtgaccatgcttaagtgtaactcgatatagattacaagtcgat

SEQ ID NO: 79537 - DNA, 555 bp, Zea Mays
tgggaatccgctacacgctttcggagctgaggtcatgctaggtgttgcctcgggtatgagctctaatcctcctctggggctcgagtctgctctccatattgcttctgctagtaccccgtcgttcgatggcacgtcggcaccttcggctttgggatttcctttgttcctttctaaccttcaggtgagctgatccttgtcctgctttatttttgtcgacgaaagaatcatttgctaattattgtatttgcagaatgtccttaactctgtgtcggctcagttgaggtcttgcggtgcccctgtccccgatcaggttttatccttgctgtagtggaatccctctcctgcttctgaaacagatagataatctgaaagcctcgaatattggttagtgggttgatagctttctttgttgttcgttgcttcctagttttaccccctgtaccttttcctcttgcccttccagttctgactcaacgatgttccgacgctaaggagaggtatgcttagaatcaaaccgatgtaatccaggtttctgcattcttggatggtgcccga

SEQ ID NO: 79538 - DNA, 640 bp, Zea Mays
caaaccttgtccaaaacgactccttttttaggactagagggagtatgtactagccattatcgactgttgggtacactcatatagtctgatgtctatttttcctatctagaacctttttgtgtgatggccagactacgtcttcagtggttcaacactctatgaatagtagagttcaatgccttctatgaatatgaacaatgggactgtttcatccaatgctcttgcctcaacaggcccaacgcatgtgttcaattctttcaattcttttgcgggttaggattggctccaactgtatggtctgatgcttcttttaggatggtgcaacatctattaaacacttttcttcactttgttttttcatgatattcgcgtctgacttggttcgatcttatgtcttagactcttgcatgttattgaatgtcttaattgagtcttctaatatctttcttgaagtgttgataatttggatcattcttttccttcatccatgtcttgaactataacaataaaacactagcaaataatattagtttaagtgattatattgatcatcaaacatcaaaacttaattgtcaatagaccttggtctatttttcttatacatatatgtatgtcttgttgtataatcttaaacttaact

SEQ ID NO: 79539 - DNA, 380 bp, Zea Mays
gaaagcagggaaagaaaaggaaaactgctgcctcggccatttctgttgtgccgaagggcaagaagatcaaggttttgacctactggccaagatacattgaaacatccatagtgccgaaatttggtgaaggaacatcttccactgtcgaagcagaacaagctgctcctgccagtcggagcgtcgaagaattggctgcagtaccgaaggtttctgcaaccggatcggccaaggtgatgatacaaactgccgaagctgaaggaaaaacggtcgagatgccagaccgagaggaaacagcaggaccgtcggagccagaattgccgaaggtggcaaaaactcctgcaataactcccaagaggagaagaatggcaagcgtgttggac

SEQ ID NO: 79540 - DNA, 1029 bp, Zea Mays
tattaccataaaaacaaagtggcgtgagagatgtcatattcatcatcataaaactccttcaatagatgcataaaatattataaatagtaggcataaaacccaatcatagaaggcataaacatggatcggggaggtcatcaccggaggacggccctgaggcaaccggatcggaggatgcctcggaggccaccagatcggaggacgtcatagaggccaccggatcggaggtggtcgttgtcggaggacgcctgagacgcgtcgggtcagaggatgtcgttgtcgtcgcatgctgctttaggtggtcaccgtcgacgtcgtcgatcacgcctcggacagtcgccgctgaaaaagttctaatataggcccaaccaataaccccgctgaaaattaggggcggttttatggccgatacaaatttgtgtcaaaaattaggacggtttggccaggcgcccacgcaggatcatgtatgtgtgtgttgttacgctaggcgatgatcacccacgttggaatgactcaacacaattcatgaatagcttaataattaataaaaattggttaagcgattttaaggtgatgatcattatcgtgacgaatggactgctacatatatgaccactcacatatacatgacgaatagctgccacatatatacacaatagtcaaggtcaaggtcaaggtcaaggtgtcgtgtccgtcacgtttgaagtctaatttttttcaagcatctctcgactgcgtgtgtataggtgtagatctagtttaccaatagtttttttttgtgtacgtgtggtatgctgtggtgtaaattcatgcttaagtttagatattacagcttatatttgaagtatgaaaaacatttgccctctgtcaaatcgatattgatgcctgatttggagtttggacccggcaattacttggacactatgatttattaggtcgaaagtcatctccatgtggattcctgggattaatgagtagacgcggaaaggggaacaactgggaaggtcgaaaagacgaactttctttggc

SEQ ID NO: 79541 - DNA, 433 bp, Zea Mays
ctaagaagaaatttcgtgtaaaaattcccctcatcgatagctccaatgtcaaaaactgccggatttactcctaaaatcattcctccggatctacctcttggtggcatagtgtgccagagaaaatcaatcccaccacttatatgccgcaaagagaagtccgagaaaaagtccctgcctgtctcaaatatcgctaagaagtcgagacgatgatctttagctaaggtagaaagataattatgtttagccaagtctgcaagacctctgctattccaaaaaatacccttcattttaaactaattttagaaagggtgactggttttttagaaggacgagaagccctccttactgaagtaaaatgattcgtctttttacggcgtgaaacaacactaagatcataaccccactctagaccgtcttggtcagagttatcgtc

SEQ ID NO: 79542 - DNA, 580 bp, Zea Mays
aaatggtgaaaaatagccactcagggcattaccaccacaaaagcttcagaaaggtagccaaaggtagagagaatgaatggagttgggtacggactgtgtaaggtgacttgcttggaggccatgaagtcaaggatgcggaggaggaacctcaccaaagagaaatttagactgactaccacatgtgagtagaaatttgttagttctaaactccatgccaattgcacatttcctattgtaagatgtttactgaagcagcaaaagtaattaatattttgtgtagtttctgaactccatggaccttttcacaatctaaattcttccttatcctggacttcttctgaaggacctattctggggatctagaactctgtccaattccatgtgccttttgtatcctaaggttgttatcattatatccatcatctatatctatcctttacatatttctctaaaagattcttctctatatatcttatttctctcccatagtgtcctctatacgtcaaagactcatattagagaagtatcttgctccagatttttatatttacgtgtttgttgtattctaaaatcaaatccc

SEQ ID NO: 79543 - DNA, 631 bp, Zea Mays
agaaaaggaagtacaacccatctccgtcgtcgtccttttcatcgattcggtccctcgtcatcgaggaaggtgaaatacctctcctcactgccctcttcgcttagatctgtttcatttgtacacagatagatttagggttcatatacgcgtagactagcagatgtgtcgaatttgttacattaatttggatctggggtactcgtgtattcatcatgaattagtccagagtcataccaccccctaccctcagatttttgcacaaaaatctgaagtttcagaccccacccctcccccgattctttgacactcggtctggtcggcccgccggttggatctcggcgatgtcttgtatcgtgtggttgtgttgtgttcgagcttggtggtctggcgcgataagctagctggtctgtccttcgccttgagtgtttaggatttcgcttcacgaggattgtgttgccgcccagccgcgattgccctgagttgattggagctttgcctgcagcttatacagttggttttgggagatgtaatggcagatgcttgatatgctattgcggcataagtggtaccctgctatattgccagggagcagtgaagtttagacctccacaggatttcctgaaggcttttc

SEQ ID NO: 79544 - DNA, 521 bp, Zea Mays
gttttttgaaatgacctcgatagctaacgtgccaagcagttgggcatcgttcccactcccagtgcatgcaatctatgctccctaacattcccggaaaccccctcctttgggcaacgtcaagcaaagatgttatgtcatgtgcgtttggttttctaaggaattctggtccaaacaagtgtactatagacattgtgaactgggcaacagtttctaggatagtactctcccccatccgtaagtactcatcgaggctatctgctggtccaccataagctaacatacgaatgacatcagttaccttttgtatggggtgaaatccgggttgatgtgctgcattgtatgattgcctgaagtaggggttcaccacttgtagagcttctgttatgtgttcgaacatggatttcgtcatccggaatctgaaaaaagaacacctcattacatatcatattgccacgaaaatgaaacaatggtaaccagggtactaccgttgtctgaaaatgtcgtcattgtacacagggatg

SEQ ID NO: 79545 - DNA, 289 bp, Zea Mays
tggcggtgcttgttgttgcgtctccaacacagcaagtatgtcgatgatctgggacaatcgtcgatccagcctctcgtaagtcttgccaaggttcatgtcaatgaaggcatcatgcactgacttgtggaccgtctcctgcatttgctccttcaggagcttgttgtttgcctcaagatctttgaggctaatacattcatcgaagtcagtagggatccttgcttcttcgtcgtcgcctgccatcgaaacacaaaaataggaaacaaacggtgacggttatccctaataattt

SEQ ID NO: 79546 - DNA, 345 bp, Zea Mays
gttgcagaaggaaggtcctgatcggcgtcgcggccgtgatgctggtcctcgtgcatgttggcttcggtgagcataaattgctctgaccaagtcttcaaatcaaaagaaagatatatatactagtacttgaaattacgagaccatttatttttctgattcttacgcaatttctatcctcaacctattgcagcgttctcgttgaccgggaagaagtcgcttgtgtccacgtaagcacaatagcacatacatagagcttacgcgcgttcgattagatatttggtgtgtgtgctaaagactaatgttttacaatttctgaattttggcagagcgttgtttcttgcatgg

SEQ ID NO: 79547 - DNA, 749 bp, Zea Mays
gggctggccccacggccgtgcagcccagcgaggtaccctgccaagcgattcaacgcactagagcccaacccgaaaagtgctacacaacacaaagttcatggtgaaacaaagggtaggaccttacttgcaaacgtgtagcatggtgccccggcgtcgtgcatggtggctcggcggtgaaggaggaccttcagagaagaattccggcgactctaaccaagctcaggatgttcatgccctcacacagcgtgccccagcgatgcaccctggccaccctgagactttaaacagcagtcatcgatctgatcgatgatggcggctcctgctggcttcccattggtttccgcccgtgcacgagattgtggccgagacttgggatttcaggtctactctatcgcttttatatcctgggcagaggctataacagcccaggagattctggtgtggggtttgttatgatcgcgtcatggtttgttggagataatcacgctggatttctggttggtggcgctctgttaatgtgtggaggagctactacttacgaagctggtccacacagcagcggaacacctgagcgcactgacttctccttggcttgcatgccttgcatgtcatgataacctcatgcgcggcaagaaactaaaaaatgggacggacgtgtggggaggcaaatatggtctacggtcgagtgagcccaagagaatattcattctttttttctattccaatttcatatttcaaaactggttatt

SEQ ID NO: 79548 - DNA, 871 bp, Zea Mays
gaatgggaagctttggatgtgcatcgactacaccagcctgaataaggcctgtcccaaggacccgtatccactgccacgtgtagaccaaatcgtggattctacctccgggcgcgatttgatatcattcttagacgcttactctggtttccatcaaatccaaatgtctaggtaagataggaagcatactacttttgtaacagtggatgggctttactgctatgttgttatgccgcacggtctgaaaaacgccttgcctacatttgtgcgggcgatgagtaagactttcggggacctgattagggacaaagtagaagtctacatcgatgacatcgtggtcaagactaagagagggtcgaccctagtggaagacctgaccctggtcttcgacaagctgtggggccacccgcacgaagctgaacccggacaaatgcatttttggcatttccgccgggaagttgctgggattcctggtttcgtaccgaggcattgaagcgaacccagagaagatcagagcaattgaggcgatgaggcccctggcccgagtcaaggacgtccagaatcttacgggatcattagccgcccttagccgcttcatttcaaggttggttgagagagcgctacccttctttaagctgttgcggaagtccaggcctttctcttggaccgaagaggtggaacaagccttccaggagttgaagcagcacttggtgtccctaccaatattggtagctccggaactagaggagccgctatatttatacttcgcggcggccgcagaagcagtgtgcatggtgctggtcgtcgagagaccggcaccagaaagccaggaacctgaggactcgggaccggctgcaagggtccgaaccattca

SEQ ID NO: 79549 - DNA, 336 bp, Zea Mays
gtagggggatgagaaggggaagtctgtgtcgacgaaaacatgatgggagatcaagatgtgatgagtggcgaggtcaggcatcggtttcccttgtgctcagggagtacccaaggaagacacaacatgaggagcggggggaaagcttatggggagcagttgcagaaaggttagggtagcacgcacccccaaagacgcgaagatgtaggaaggcgactaatgaagtatgtggcggcgtggaggctcttaggctagtagcgagaaagaatggagtcctagaagagcaaggagcggatgttgttagttgtgcgaattagctgctcaacattgccattctgg

SEQ ID NO: 79550 - DNA, 1341 bp, Zea Mays
ctctaattggactaattcgggccaggatgtgcctgaccacggtgactgtggatactgaactcagatcgaggtgttccggttgattaggtgaagtcaagctccaagggctgggcaggtgacgatcacaagcacatgtgggtgctaaaacacgaacaacaagggcgaggacggacatggaatcagctagccgcgagtaggcgattcacggcggcgcagtcgaccgaattgggggaagaagggaattctccggctacggtggttaattgagggtgagaacgggtgcttcggcttcgcgataacatagcgcagctgacccggccttcaatttatagagggcttaagcggtggtgctcaatttggccgagcagtgctggcggccggaggggaggaagagtactggcgcaacgaattcgtgtcccacgccgtggcagttactccggtgatcaacggagagcgagagcaggtcacggcgttgcggtggaaaggtatagacatgcggcacaaggccgagaggcggcggtcaccggcgtgcttatcagaatccaccgcggcgagctctgtacggtggctggaatattttactggccgtagcttatccacggcgacgtactccgagcgttatccacttacacagagcacgaatcgagacggtgatggcacgaatcacggcggagggatcgtcagtggcgagatctctgacctggcagctctatccagttagtgtaccatcgctgcgcctattcagtgggtctgacagagcaacatgaagctcggtttcttccagatttcatacatcaaccgatccaactctctgtatcaaaattatagtcccatgttccagctacaattttgttatggggatcatgcccaaacttgcacaggatcatgtttaaatttgggttcaaggattgcctcactacactgtcagactaagttcagtcttcagacagcctgacagcccgactttgggtttaattatctccaatttctttatgtaaccatggcttagtacctataacaaagttgttcccttattatagctttacaaaattaatgtggtgacctagggcaaaatcctttttatttggaagttacatggccccaaagatgagttcattacactgaaattcagatttaatcaaaagagttcaagtgtggctcttttgcaattaagtccaaatctcaagttttggattgcaaatcctcatgattggggaccatatgacttaagatactttaacatcatggtttttgcactttagtccaaaagtgcactaattttgcacttagccccctagggttttggtttagggttttctagggtcctttttagggtttttg

SEQ ID NO: 79551 - DNA, 1057 bp, Zea Mays
ctgtcttctttccgcatggcctgtccactgggtcaatgaccaacctgccccaccggtcagccaaggcgtgtaccgcccgatcacctgcacacatcggtcactgtggcgtgggcccattcgtcaatccctcaagaagccggacccgcgacacactcatctcgctgccattcgggacccacttgacagttgtttcctccccaatggaacgcgaacttggcggacgaaatcccctccctgcgtcgagttccgttcgttcaaatcgcgagatgtccgcgagattttcttcatcaggagtataaatccctgtcgccctagtcccttggccaccattgacgaaccgagagccacgaccgccatggccgctgagagggaagaagaaagggaggctaccgcggtcaatcctcgcagttgctggcgttgagtactcactgggagctcgggactgatggtcggggtatttcgaccactcccatagcattcccatgcggtgtggtggttgggagtcgtcgcaatggctcgttggcgcacggtgcccgccgccaaactacacgttgacgaagaccaccttctctgcgccattcccctagggtatggattgccctgggatgttcacgcgtgtcggtatgacgtgtgaagatcaacgatgttgataaccgctagcttgtaatggggaatttctcgtcgttgttggattggacagagccgccgcgaggcgtttgggcaagcttcaaccacaacttcaacggccggtaagttggctactaacctgctcatcatgtcgtcgtcaaatcatgtagcagattcgcttagttctaggccactaggttggctcagtaccgtgctccggcggggcatagtggccgaacaatgagcgctgccgtagtttgggtcggctgggtagctgggaaaggagatgtgcccggtgccattggatctcggagggatggctcggatttgaatgtatgggcaccggttctgtgggtggatctgtgccgttgggtccgaatgagcggacgagattagaactcagtcgtgtaaaacccgggctattggatct

SEQ ID NO: 79552 - DNA, 326 bp, Zea Mays
gattccgaaacatactcaggtattactatagcagctagctagggtgcaatgcatcacgcacatcagcatccatccatcaagcattcagctaataacgcactgcgtcctgcaaaagaaattgtgcgatccattccatggatgggtgtccggttgaaaggcagcttttgctttgcagggtggtgtggtgttttccgttttgctgcgacgggacgggagacacggatcagatgccaaacaactgttactatgcttgctattaaactagctagtcgactttttatactggtcggtgatcacgacgtatatacgtccacaccgatcgatgc

SEQ ID NO: 79553 - DNA, 307 bp, Zea Mays
gcggtggcaaaaaacgctaatgcatggaagtggtcctgggatttgaaatggcgagcaatcgagcagcagtgcggtcgggggaatctatacacaccaccccgcgcaacagtgtcacctcggtaacccaacggtcaagtcaagtgccccctcgaggcggttcaccggagagggcagcgttcgtccccctttacttaaagtgtcttcgggaatgtcccatcaggatgaaccactcccttggggggctactgttgggtggaggtcgaacatgtcctcgtttaaccaaacaaagaccatatttttctaccaa

SEQ ID NO: 79554 - DNA, 289 bp, Zea Mays
gccttaagtcggtgcgacatgctcacgcttacatgacttagggtgatcactatgccctactaacagagcaatcggcttaagtcggaaacgccttaagtcggtgcgacatgctcacgcttacatgacttagggtgatcactatgcccaactaacggagcaatcagcttaagtcggaaacgccttaagtcggtgcgacatgctcacacttacatgacttagggtgatcgctataccctactaacagagcaattgacttaagtcggaaacgccttaagtcggtgcgacatgc

SEQ ID NO: 79555 - DNA, 541 bp, Zea Mays
cgccccaaacatgatatgtcagactgactgaagaagatcctgatggtacagtgaccagaaaaatctgttggttcagtgaatcggtcgtcggcgacccgcgcatggattcacgccggtgaggtgattcatgctcaccggcgcccggataacgtttcacggtgaaaagatcattccccccggatgagcttaaggcactgttcgtccggccaccgtgtccgctctaccaccgatcgccttgaatcaaccctcgctggagttagacacctcacggtcttgtgccacgtgcctcagcactttaaccacgccgccgtgactcgtactgacctatccggagattgccggtgagccgccacggtagatgccaccaagctctcgcgacagtactcttctcactctccggccgccaccatgccaaaccaaattcactggccaccgcttagcgccactataaattgatggcacggtctgctgcgttaagttatcaccaagcctgagcacccgctcctgcctccgattagccaccacaactctccaatttccc

SEQ ID NO: 79556 - DNA, 650 bp, Zea Mays
aaggaagtctagtgtgtcgaccgagctgacacgcatgacataaatggtgactatcatctttattacacgagatggctttggagctaatgattttggacaaaacttcatgcccaagatgcccaagacgacggtgccatagcgaggtgggtgcagcgaggaatgcggaggtgctggtggctggaggaaaaaacgggtagaggtcgctagagctattgcacctggcgatcatgttcctggtttccaaatccttcacagaaagaccaaacagatcaaattcgatggagcaattattgtcggtggtaaaacgatgaatggaaatcaagttcttaattatgtgatgtgaaactaagacattgttaagaactagattgtgatgcagaaaagaaaaggtatgtgatctgatggcagcgacaggaagtaaagcaccattgcccacaatgatagacgaaggtgtggagaatgtgggcgaggatagggtggaaattttaccagcatccgcagtcatatgcgagccggcaccagagtcggcgtaccactccgatggtgccgggggggtgagcgtcatggtgttgaagttctgcaccagggagtccgggttccatgcacctccatgtgtgggattcttgggggcaaccggcagctggtatgac

SEQ ID NO: 79557 - DNA, 544 bp, Zea Mays
ttccaattaagttttcagcctttgatttgatctatatatatatatctcatggcgggacggaatcagcaaccatccatcggaccaaccaactaatgctacagcaaaaaaaaaaaaaaaatcggcaaacctcttattttagcggctctgagtgatgctgaaacggaaacagcacactaattaattaaaatctctgatgctgtaccaaccatttattaatttaagatgtccagctagcgccgcaagcaacatgatggatggtccaggagtcgatcagatggggaccaactgttagttagttagttagatataacacagcagtcgcccgtaagtacacactttcatcctgcccaaatgattgtcacaggtccggtcgtcgtcttgggatgggaagaatcagacaggggcatcatatcggttagctggaacatcatcagaacccattcacctcacttcctgtcgatctcgaccgatcagccgggccccctgcttgcattggttgcctcttctcttcaacagtgtgcaatatatatagacatctgcttgc

SEQ ID NO: 79558 - DNA, 437 bp, Zea Mays
gaggctgttgaggctaaggccgagttgcttcgtgcttagctcatcgagtctgacggtcacgtaatcggagaggcatatctcccttgctcacttcctagatttctcaccccttctcttaccttggtcgtttctcctgacagttttcgaagccgagctagagaaactacactgccgcctaggtcagaccatggactacgtcgagtcccatggttcctctctggtggaacttctagacaatgcccggtgtcatatttgggacattgttgattgcagcattcaccgaggagccacagtggcgctgctcgtcggagatctcaggtttgattgtggcctctgggacgttgtcggtcctccttcgtccctttcgaacaaagggctggaggacgtgctggagggcttcaacgaggtggccagtcgcatcatgtagaagttgtctg

SEQ ID NO: 79559 - DNA, 336 bp, Zea Mays
ctggtgggcaaattttgcagctattcaacctaaaggacatcttgtcacatgggcagagttcaagcaggcgttcagggaacattatattccagaggggggtttacagatgaagcttgaggagtttatacgtttaaagcaaggaggagacttagtgatgcaacgccaaattcaatcatctctcccagtatggtatagagcaagtggacacggatctgaagaaaaagaagtgcttcatgagaggtctaaatgatcgactacagcgaaagatggccacttgcttggacctcacttatagtagggtcgtgagcacagcgctttcggtggaagccaagaatg

SEQ ID NO: 79560 - DNA, 670 bp, Zea Mays
gacgcggtaaatatcctcggcaacgtggcagcaaatcactgaggtggcaggctccggttaaacggcggccaccgtgccatcaccgggttccgccgcgcggagagctcgcctgcgcaatctaaagtccgcggtcctcatccaattccggccgttggcctataaattgtgcctgggttccacttctttatcacatcccgcacctccacgatcgagcactcggctcaatttcaccgaagaacccacaaatccctctctcctctgttcttgctccgccgtgaagaactccttcgtggccagcgctcctcgggtcagtaattatcaaattgttccctgtttcagttagtctttgatctcttattgctcttggatgcggcaaattgaagtttggccgaagcccatcaccggaacgcacccgtgcgctgtaaaacgccgccatgacaccctttccgtcgccccacctttctgctcatgcctagcccaaaacttagcgtgtgcgtcatctctggtgaacccaggaaccttttcccagcttcaatttggccagccaagccttcggttatccggaacatcttagttcacttgatcacccgcactgtcaccgtggacagagcttgatagaccacctctagcaaaattgattggggggaaaggtgcggtaggcatctaattt

SEQ ID NO: 79561 - DNA, 625 bp, Zea Mays
ttcaaacttctataatcaacacacattctccttgaaccatccttcttgtccacaaatagaactggggctccccaaggggatgaacttgggcgaataaaacctttgtctagtaattcttctatttgtttcttcagttctactaaatccttgacatccattctataaggtcttttcgagataggtgcgtttctgggtaataattcaatagaaaactctatatcacggtcaggtggcatacctggtaattcctccggaaatatgtctgggtactcacacactactttgatattttacaagggcttttcttccaagtgattaatcactgtcttcccttttgcatatgttgacttgtctatgctaacttggattctttcaccttgaggacttgtcaacgtaattgttccgttggcacactgtatcactccatcacaacttttcaaccagtcgcatccaagaatcacatcaataccattggatcctaggaccactaggttgactgaaaaatatattccttgaatcttgagattaacatgggggcatgagtgtgtggccttcatgttacctcctggtgaactaatatgtaacatcttcttaagggggtacttaggtatgttgtgattttcct

SEQ ID NO: 79562 - DNA, 815 bp, Zea Mays
cggcgagcggcggaccggtcagcccagcctgaaattcaagaacgaacgagatctatgcactgtgcgtagtttagacgatgacgaaacccataggggaattcttaccggtagatttggatgccacagcgtcgcacgcgacgatcaacatcccgacggcaatgcatctgtttcgacgaaggatcgcatgcacatcggctactccagtcgctaagcgcccgtgatgaggccacgatgtgcgcgacattcaccggttgtcatccaccagcgccacaggaacgacaccagagctagcgcgcaaatcgacatccatgtgctccaggcaatattctatggagagctagcgatgtggagacaccccaggtgtggcggctcccctatatctccctggcatgaatcaccaggtgctagcgctcatggccaaaggtgaggagctctactatttatggacgagcaggcgcggattctacggagggtaggaggtaaccgaatccctccatagcaggagcggttgttgcgctggcaaatcacatgtagcaatggctaccgcgagatctccgttccccgtggttctgttattgccaccagggagaagatggatccaggcttgcttgcatgttgacatcatgatgatgcaagccacgacaagagaataaataaaagataaattggagatgtggagagagaacgtggctggcctagtgctatttagcgcaggagcaaaaaggagagatgggccagggagacggccacgaggcttccttctctttgtttatttttatttattttttacttctaatttcagttttcatttccta

SEQ ID NO: 79563 - DNA, 822 bp, Zea Mays
gaattatactaataacattttcccccttagaaagatgccgccacgcacaaggctaacggcacgtaagtccactggaccaattggagtgccccggcatcaactggctcctcgacatgaaagcagtagcagtgggagtaatgaccccataggagatcttgaagcccaagtgagtcgacttcaagcagcgttgcaacacaggaccgatgcttgggtcgcagacggagatagaatcaatgaactaagaagggacatccgtcacctgcaggatcagcttgctgatcgggacttagcacttgactgggcagtacagtcccgttttgctggcatgtgctaaggaagcaagggctcaggcccgaattaaggaacttagctcaactgtcgatgacctgcagatttattgcaatacgttgcatgaggaagtccatgtactatactcgcaattacaccctagtgcacctgcacaccctactgaggcggaagccggaccctctcacattgcgggacgcgcgctgggtggggagttagacctttttgagcctcctccttccttgaggttggttgacgtctggactcccacacctgacgatgaggccgccaagagtaatggaaagcaggactaatggtgtaatagaagtagagtagtgtattgtaggttgtactgttgtataataggttgaacttttgtataatgggtaatgtgtcctgttatgtaacatcgagtctgtatcattactttttatagtaatgtaaaatggaaggtttctctggcatattatgtttactttaaatgttctttgccacagatgccgaccaggactcgag

SEQ ID NO: 79564 - DNA, 318 bp, Zea Mays
gaagttcggactcatccgatgcacggagacccagaagccattatttgcggctcagcagttaagaggccctgccagtacctggtggggaaattatgtggccattcagcctgccggacatcaagtcacctgggacgaatttaaattggcatttcgttagcactacattccagaaggagtgctccatatgaagcaagaagaattcatgaaactcaagcaaggagtatctcaataaattcaatcatttgtcccagtacgcaattgaccaggtcaatactgacctgaaaaagaggaactattttatgagaggcctcaatgacc

SEQ ID NO: 79565 - DNA, 741 bp, Zea Mays
ctcgcccgtgcatgcccaacccacgcctcccaaatcgccgccaactccccaagctccacgagatctcgtgtcattggtattgcctcccccatcgctgacttctcctcctagccagtagtctctccaccaccccacccctcgatcccacccactccgtagctaatcttgccgtgatcgtagatctagaaggtagcatcggatggctccatagggaatggaagcatggatgcaggcgttgacgggggtggcgaggatgaaggcgactatgatgaggaggacatcggaccactgcttagcttcgatgagatgttgcacctccacacggtgtgcggcgtggcacttccaggcgacatgatggaggcaagccggtgccgaggatcccacagccgtggacatcgccgacactgaccacaccaaggtccgacgacatgtggttgttttcgtgcttccgttctagatggagatgccttttccgctctagctttcaattttgggccgtgcgactctattttttgtactagttgatttcagttagtttattagatggcaattgaactgggtttggtttctttatgtgctgttgtgtagagtctagccctttcgttctgcttagagagagattactggttcggtgaaactcaatttatatagtactaatacgtttttgtctgtcacgtcgtcaaacgctttcgcttttcggtgatatttttttgtaaactgaaagttttgctgtattttgtc

SEQ ID NO: 79566 - DNA, 859 bp, Zea Mays
gagagttcagttgcaccatagtataagtgtttgttagctccaaagctgaaataatctacgaagttaggtcatgatagatatacctataagtcttgcgtgttctgcagcttcttcaactttcgtggcctcttcaaagcagcatgagactctttctcattttttctgatagtttcgtcagctacctctcggccacccttcaaccagacttcggaataaatattttcactcagcgcagcgacttcgactgaagggttttttatgtcatttgctgagaccgagaattctgactgaactacagcctttgtatgctcgcagtcaaccttctcaagaactgagacagctccacgggtggtggcgaaggcacaaaagtctcccctgtcactaagaatttcgtcaaaaagcattggcctcaccgccgatctaatgaatgaccccatcaggatcaccacggataaaattttgctccgtagagaatgcgccaactttggcaaagctatatttcaatttattacaacactccatggcaacattgtagcattcttcttttgctcgacaaagctcctcaacattattctgaaccctcagccgttcagtatcagatatttcgcgttttgtttgctcgacattaaaatatttagtcacttcatcgagtttcttttctaatccttgcacttcagatctgtgcaattccacttgaacagatagcgcatactccaagtcagcaatgcgcttcacatctttttgttgcttctcttcaaactccttgacggaaaggctacaaagcctagcttcactagattttaatctctccaccaaagagagcaggatcttatccttctcgagagcttcgtttctcaga

SEQ ID NO: 79567 - DNA, 440 bp, Zea Mays
ttggaggatttcctcatactaggtgtaatggagatgtggtatgatatgtagttggggaagttgaataagatcagcagtgtgtaaaatggcatgaccccaacaagaagtaggtaaattgcattcatgaagtaaaggtcttgcgatgagtttgatcctcttaataagagattcagctaaaccattttgagtatgtacataaggcacataatgttcaatgtgtattccctggaccatacaataatcattgaatgctctagaagagaattcagccgcattatctaggcggattttctggatttgatgttcaggataatgtgctttcaatcgaatgacttgcgttatgattttagcaaaagcatggttacgtgtagacagaaggcacacatgtgaccatcgtgtagatgcgtctattaataccatgaagtatctgaatagtccag

SEQ ID NO: 79568 - DNA, 586 bp, Zea Mays
ggagttaaagccatctctgaggtccttaggagtaacctcagccgatctactccaccaagcttcaaaattgatatcttccatcccgggggcaagggcggacaggccgacacgttggaggagaagataccaaaattgcctcgcgaggacacaggaaacaagcaagtgatgaatagactctccttcctggtcacataaggggcaagaactaggatggggaagacccctcttagcgagccggtcagccacccaacatttattatgtaggaccaaccagaggaaaaactgacacttaggcggcgcccaggtgctccacactctttcaaagcccgccagggaggtagaaccacataacattatctcataagcagatttggccgaatagataccatcggaagagaacctccaataatgtttatctggaactcccgattgaagatcaacgtcagccacaacatctgccagcaaaatgaagtcaacaatgacctcccatgttaccactccccttaaatccccaatccatgatgagctgcacagagcatcagccactgtccttcgcttcaccagccttttaggaaccaaactaaaa

SEQ ID NO: 79569 - DNA, 719 bp, Zea Mays
ggtatgacatgtctagtttatgagtatcattaatccgatgttctacaataaaatctgctacgacctggcctctcatagatttcagtggttcataggccaagtcatattctataagtgcataagcccacttaccaattctatcactcataattgggttatgcaacatgtatttaattacatcggtttgaccagaaacagtgcaatgactagacagtaaataacatctacacttggtgcatgcataaaacaagcataagcataacttctcaataaaagtgtacctcgtttcagcatccaccaacctccgacttagatatgtcaccacatgttcctttccttcattttcttgtgtcagaacaaccccaatgaccttatcttcagctgcaatgtataatcggaatggtactcctgctcgtggtgcttttaatacgggagccgaagacaagtattttttaatgagatcaaatgcttcctgttgctctgctccccaagcgaattcgacatcattcttaagccgaagaataggggtgaaggcatcaattttcccggctaggttagaaataaaccttcgtaaataattcaccttgccgagaaacttctgcacttcgaccttacaggtcggaggtcccacattccgaatagacttgatttggtcagggtctatttctataccatgttcatggatgataaatcctaaaaacttaccagccgacaatcca

SEQ ID NO: 79570 - DNA, 545 bp, Zea Mays
ctgagcgaaacaaagttcaaaagaatattgaagagcttcatcaagcaaaggaagaatgtttttctgttgcaatgcaatgttctaacaagctgaagagttcttttgctaagttggcatgttttcaactgaacaaaattttatccacggtgatcccgaagatgtaattaaatggatcgaatgtgaagttgaagcttttgacgaagtccttactggtagagaggatttctgtgcctgtctaggtgcctaaggggtcgtgtcattgattgaaaaagctggctgtgaacacacaaaggctgtaattcagccagaattttctgtttcagtgaatgatattaaggaaccttcagctgaagctactgcccttggtgggaaatttttctctgaagtctggatgaacggtggaatggagacagccgacgaagctatcaggtaaaatgaagagcaaacccatcgagcttcagaagaggccaagagagttgaagaagctgcggagcgagaaagacttataggtatatgtttttgctaagctctagcttcgtaattgc

SEQ ID NO: 79571 - DNA, 645 bp, Zea Mays
tcaaggtaactgtttagagtaccatcaaaacattgatactcttctaatacatgttggacaaccagttgagaatcaccaaataccttcacatgttttactcccatacaatttaaaagttccaagccgaacaaaagggcatcatattcggcttgattgttagtgcaataagttttcaatcggctagagaagtcgaaggagacattacttggtgaaacaagcacgatgtcgattaattgtcctttattgcaaacagatccatcaaaatataaagtccaggattaacagtgaggtatgatatgtctagtttatgagtatcatcaatccgatgttctacaataaaatctgctacgacctggcctttcatagatttcaatggttcataggccaagtcatattctatgagtgcataatcccatttaccaattctaccactcataatcgggtttcgcaatatgtattttatcacatcggtttgaccagcaacggtgcaatgactagatagtaaataacatctacacttggtgcatgcataaaacaggcataagcataacttctcaataaaagtgtacctcgtttcggcatccaccactctccgacttaggtaggtcactacatgctcctttccttcagtttcttgcgtcagga

SEQ ID NO: 79572 - DNA, 445 bp, Zea Mays
attagtgccctacaaatggccctgtcagataaactgaatggtgttctgattgaacagtaactgaataagatcgcagattcaccccctcgccgccggtgaccttgcgcctagatccacgcccagtcgaacacggataacgctcctcggtaagaaatatcgcgccgtagataacctccggccactgttctcaccggccgtcgtgtcctgccgcggttaatcgcgctggcatcaccggagttcgccgttatccggcccggctgcgtgcctcaaagccttaccacatcgcagtgagtcaccgtaagccgctctatatcactggctcgtcgccggtgagtctgccacgatgaaagacacgcagctcttgcgccagtacatctcctctccgaccgccaccgcgccaactccaattcacgcgccaccgcccctggagcctataaattgagca

SEQ ID NO: 79573 - DNA, 459 bp, Zea Mays
ctcccacgcgcctggctggccagcgaaggccgtttactccatctccgtgcgtgcagatggatggtagaatattggtctagcctgcacctgcacatgcaggtcggtatcgttacatacaagcaaccaatcacaatcttgtatccggtcaaagcgtgtggagagcctagttgtttctatacaatcaaccaatcacatagatagtgtagacgtccacactgatatggtgcacggttctgcctcccactcgcacccgcaccgccatccgcgtcgcgatctcctaccaacaatggccgccatcaacggaatctatactaccaacaacggcgccatgcacggttctgccgagaatcatttagcttcctgatttgtttcctgaaacacggctgttgtccgtgctgccgcagatttgtgccgaggatcgccccaccatcaatcacggaaggtggccgatgatctccg

SEQ ID NO: 79574 - DNA, 1318 bp, Zea Mays
tgagactctcctattgcttagcacacacttttccttgacatggaccacattatttggtttttagtggagaccacttatcggtcaaatacatgtgttagccattgatattaacaaaaactcacgctttggctgttttttgtccaaaatactagcaatatgcccattgatcattggtaagagtctcctattaatcaccacacacatggttaattgacataaaccacattacttggtatttggtggagaccatttatcggccaaaaattcatagatgttagccttcgatattaacaaaaactcacgctttgcctgttttcggccaaaaaatactggccatatgcccattgatcttcagtgagggtctcctattacttaccttacacatgtttccttgacataaacatcattattttattttggtggagaccatttatcggtcaaaaatccataggtgttaggtttcggtattaacgaaaactcacattttggctgttttcggccaaaaatactggccatatgcccattgatcatcagtagtcacctattacttacaccgcacatttttccttgatataagccacactatttcgtttttggtggagaccatttatcggtcaaaaatcaataggtgttagctttcgatattaacgaaaactcatgctttggttgatttcggccaaaaatgatggccatatgcccattgatcatgagtgagactctcctattacttatcacacacaagtttacttgacataaaccacattgtttggtttttggtggagaccatttatcagtcaaaaatccataggtgtgtgtcctcgatttaaacaaaaactcaagctttagctattttcagccataaatgttggtcatatgcccaccgattgtgagtaagacaatcctgttacttacccacacttgtttgtttgacacaacccacattatttggtttttggtgttgatcatttatcggtcaaaaaaacatagatgatagccttcgatattaacaaaaactcaaggtttggtcagtttcagccaaaaatactaaccatatgtccattgatcattagtgagaggcttctattaattactccacacatgcttccttaacataaaccccattgtttggtttttggtggagaccatttatcgatcaaaatccataggagttagactttgatgttaacgaaagctcacgctttagccgttttcggccaaaaatgtgcccattgatcgtgattgagagtactctattacttaccctacacatgtttccttgacataaatgtgaaagggaaatgtgcccttgggccatttc

SEQ ID NO: 79575 - DNA, 435 bp, Zea Mays
aaaacacttttccttggattcgcgaagttcttcaacatttttctctagcttattcttccaatattcactaatctcttggttagcctgtgcgagcgcgcagttctcattagcttcggccagttgtctccgaaggtcttcaacctcagctttttgggcttcggcctgagcattgtacttagcttcgtcttcttttattttactcaccaatcaaataaaaattttgtctttctctagaccttcgtttcttagttcaatcacctctaagcgaaggttgctgagagctattgtacagccttcgtcttcggcgctcttttgtgccctcaaggcattactaagaatcaagccctgcaaaaaagaagaaagaattgagcatgacaataagatacttcatttccaacttcaaagttaacttctatacctttatactattgtacg

SEQ ID NO: 79576 - DNA, 722 bp, Zea Mays
actagatttacatatatgcaatgcaagcaagcaaagtaaagttctgatccgcagataagctacaggctgtgcgtgcacctccaccctacagacaccactttgacaaatgcagaattaaaacttttgtgaaccacgacaagcaaaacaaagggtgttccccatatagaaggatttgaatgcagttgatcggcttgcattggggacaagcaagcaaaaactaagggtttgatcggccggcttgcattggggtcaagcaagcaaaaactaaggattttagccgaaggatgcatgcaatcctcattcgcttacatcttcccttgtgaatcttgctatggattcgacgtgtaccaaatttatctagaccggcttcgatttttcaacaggaattttacggctcgtgattttttaagcacctcaatttcacagtagtagtcagtttcagtttttcaacaggagttttacatacgtagctaaaatcgactcgtgtttttatgtaccgccgatttctcaatagtactgaaaccaacaataatccgatctccaatttctcaatagtagtgaaacgaacaatccgatctacgaggctgagcaaacgactgtcacgccgcaattctcgtaagcaaacctagattgatcccacgctacaaaacacacgtcgccgccgccgccgcaaagcggttaacgctggcgataattgaaagaacaaaaaaaaaactcacccg

SEQ ID NO: 79577 - DNA, 447 bp, Zea Mays
ggataattttgctcatggggtttgagtgccctggatacataggcaatgactcagttgtcttgcatcaaaacacaacccagtctagtgccagaggcatcacaatacacatcaaacgacttgatgttgttaggctatgctaacacaggtgctgtggtcagatgttgcctcaaagtgtgaaaggcatcttcacatttctgaccccattcaaattttgctcccttcttcaacaattgtgtcatgggcttcgcaattcaggagaagtctggtatgaatcgtcgataatacccgaccaatcccagaaaactctgaatctagcgaacagttgtgggtggcttctagttcattacttcttgcaccttatctggatccactgctattcccttttgagagatagtgtgccccaagaatttaatctcctttagccagaaatcacactttgacaatttg

SEQ ID NO: 79578 - DNA, 651 bp, Zea Mays
aaaccgagctagagtggagtgagttcgagacgagaggtaataaacatgaagacattttgattagatccaatcctcaactggcctccctactctactctcttagctactattgctgcttctgcaactgctcgagtggcgctatccaactttctcttcttcttgcctccctactgctcaaggtagacatccttgcccttgtcctgtctgaaagggcgaggagggtcctgatcatcgcctccccctgctgaggtgacattttcggtcctcaccatcctgactgatcactaacatgctgcatgagaaccagagagataagcaagagtagcaaagtaggagataaggatggagaaggaaagagctagctacctggggcacgtctctcgagagaaaaaccaagtaggagagaagtcacgcgagcgggcacgccgtcacaatgaaaatgaaagaagaggtgagcatgagttagtcacatagtcataagcatatgaattgtgaactaaacacatatacgcatgagaggatacaaggattttgagttgttggtacaagggttgataagtatgtggtcatatgaatatggcacatggatctttttaggtatggagacaactttggacaataggataactaggtgagtaatttttggctttg

SEQ ID NO: 79579 - DNA, 460 bp, Zea Mays
cagagacagacaagagatgggagaggtcaggggtgagcacgaaaagatgccaagggtgcgtgtgtgcgtctctctctctctcgtaggagtatagtactaccatgcagccatgcacgggagctgcgagaggccggccaaaagctgggatcgaccaaatcttggccgcctgcacgcctaattatcccccttgcatgccttgacccacaccattgtcgtctcccatcgccgtcactgactgactcatcaatcatcatctcagctgttaaccgacactgctttcttctgctccgctgctaaacaggggggacgacggccggggttagtaactagagaccggcaagccttctgctgcttgctacccccgtaaaccttcagtatcccaactttgttcagtagtactactgaagctcttatatatgtttaaggaacgacaaacatgaccgaatatctttgtgtggtt

SEQ ID NO: 79580 - DNA, 429 bp, Zea Mays
taactgtcttgtgcccacaccctatttcggtgacgtagctccgtccgaagctgttccactttggcttcaaagtctccgatggggttgttgctgccgctgctgttcccttcatgtctgggggctaactgatgacaaggcacaccaaaaggtccagtggacttgcgcgtggtcttcctcgtacgtgccatatctccataagaggggaagatttattagtataacttttaaacatgatgcatgcataacccaatacttacggaatcaacttttgttaatccctcaacttcctatatattgcactatattacctggtcttataagatgagagctttcagagagtggtatggtaagaatgaaagaatatttctggataagtatttgaaaattctttttgaagtgcttcataatatctgaagagatgggcttcgc

SEQ ID NO: 79581 - DNA, 434 bp, Zea Mays
gtttagttaggggtggaataaccgggacaaggtagcttttagttttcctggtcattctgctacaagttgttatgtcgaaacgctgaaaattctggtttaaccaatgagacttgagatcctggctggcagccaattttcctggtcggccgtcagctgtagttggcagctaccatggctgcctccctgtgtcctctcctggctgggcagctagatgtagctgacctcggctgtcttgacgactgctccatggctgggggatgggcagcacgatggaaacggttctgaaccttggaatctgatgaagtcaggtgaaacttgattaaaatggctaatgacattgctgtttcaaaatagctgctgtgggacagttgttttttggagttgttcttttgtccaagttttatggatgctcttggagttgctcttaatttgac

SEQ ID NO: 79582 - DNA, 869 bp, Zea Mays
tgttacccaaaaattggagataatcaaacacaaagtcgggctgtcaggctgtttgatgtctgaaattcagactaacagtggtactgagtcatcttgggagctctgcagatcaagaacttcaaagaatttgtcccgagtcaatatagcaaagttatagagccattgtagaggaacaactttgctataggtgtttgggcttggtaccatatgaaattgagagaaatttggccctaaactttgactgtcaggtgcactgaatggaatggccatggtacaatatctgaagtggattagaccgccagctcagtttctcaccgccgacgatctctccgcctcgattcgtgccgccgccgtttcgattcgtgctcaggttgatcggatagcgctcagggtcacacaaatatcatcgccgtggataactccggccagtaaactattccggccatcgtaccgcactcaccacggtggaatcggttgagctcgccggtgaccgccgccttccggccttgcgccgcatgtccaggcacttccactgcatcgccgtgacctgctctcgctccccgttgatcgccggagtgactgccacggcgtaggtcatgaattcgttgtgccagtaccttttctcttctccggccgccagcacaccctggtgaaattggacgccacagccattagaggctataaattgccgccaccgttcgctccgttaggtaattacgcaaccagtgaagcaactcgcacctcgaatcatcccttagagctcgcaaatttctcgtttcccccaattcggtttttcgccaccataaaagcaacctcgccgcggtctgcttaatccaggtttgatctttccatttatgttcttgtctcag

SEQ ID NO: 79583 - DNA, 683 bp, Zea Mays
ccatatagcatctctgccccgaggagaacgaggtaaacccaccacaaaatccatggtgatatgctcccatttccactccagaatttccaatggcttcagtaaacctgcaggctgcttatgctcggccttcacgcgctgacatacttcacaggcgaccacatacttagaaacgtcaaccttcatccgcttccaccagaagttttgcttcagatctcggtacatcttggtttcgccagggtgaacggtgtaaggcgttttatcagcttttctcaatatatccatcttcacctctgatttttgaggcacacaaaggcggcccctgaaacgaaccaaatcattctcatcgatggagaactcctggggtttaccatcaccaaccctctttcgagcttcctgcaataaacgatcctgctgctgagccacacgcactctctccatgagggtagattgaataagcatgcgagtctcctcactagcggtgccgacatagcacaaggtgatccctaaatgatccagatcagcaatcaactgcaaggccacttttggaaccccggacctgctaagggcatcagcgaccacatttgccttccctgggtgataatgaatagacaaatcataatctttaatcaattcgagccaccgacgctgcctcaaattcagctccttctgagtaaaaatatact

SEQ ID NO: 79584 - DNA, 509 bp, Zea Mays
aaaagttttcgaaatatatcgaattatcttatatatgttttcgagagatttcaggagcctttcgattatcttccctattattattaaatatgaatttcatcatttttatactattttaatccctaaaacttaatatttgctaaaaccaaaatattctgggaacccaacaatatatatatatctttctcttgctgatcctgttctagatcttatgtcctttcctcgagatcatcaaccgtctgtccgtctcttctccttaatgtcgtgctcctcgcgtctagcccctcctcctcgacatctaccagcgtctatcccttggaactaccttcatctacccctaccaaccctacctcgcctcgcttcgccgtgcaacccctgcttccctgaccgcgcgcacttctcaccgctacatatcctactagcttgaacccccgtgtcagcttcctcttgccaaatcgtcgtctgtttcacacacacgtgtgacacggctgcagttgcaaccacctcgc

SEQ ID NO: 79585 - DNA, 384 bp, Zea Mays
atcttttcttgcctcgacctccgaaggccgctgtcatagcatcatcttcgttccttgagtaggcaccatgcaattcatcgttggttgcttcaatggcatctagccagccgtcgtttggctcatcaaattggctcttgtatttgaatgtatacttcaaataaatcaagccatcttggctagacccagtagcagcctccttcggcatctctcacccacttccgagtggccacactttgtaggcaatgtgctcttggactaagtccctggtgcctatgtaagtgcatactaagttataagcagcttggcacgcttgtatgtcgttcccaagggcaagggatggtctcctaatgccgaagtgagaccatataggacgttggataatcc

SEQ ID NO: 79586 - DNA, 306 bp, Zea Mays
cttcactttaaattgtggaaaaaccacataatagtgcaaacacaagatagacgggggcatcccaggcaccccttcgatgtcctccggtgccacacaaaaccagaaatccaaccaattaccccacttgttcttggcacacgacacaatctcaacaacttcggtcaaagtcttcccagtcctcggcgtaaacgtgcatgacccaaattgggcaatcaacccagcaatcttctttttctgccaatgaagacagtaattcttggtgaagacctcaaccgacggttccccaccatacgaagtcaccaccca

SEQ ID NO: 79587 - DNA, 316 bp, Zea Mays
gaaaggcccaattgccccaaaagacttgttcgatggggaaggatggctctctcttttaaggtggcttcctcctcctaagttaagcaaggtgggataattctgaggcacacacagtcaccgtctgactacaattgggccaactgtgtctttgctaatgggtaatagcggaggatgtcctcatcaatggaagacccttaatggagatgtctacaaactatgagcttgtcaagacatgaacatggatgtctccgacaacaacgcgatcatggtcaaagtgaagatcgatctcaacatgttttgtgagctagtgttggac

SEQ ID NO: 79588 - DNA, 771 bp, Zea Mays
attattctttttatctagtttgacgtgtagatggcagaaattgatcaaagtggtactaaaaggttcctaaatgcattctttttcaatgtctatcgaactgtacatcaaaacatgattgcattttggcaagcaaatattttgtgcgcgcagaaatgtgattatatttttgtcattagaagtgtgctaattctagtcacattatgtttggttgccaaataatttcctaaatcaacatgttgaaaaagagcaagatttggcattcatcaagtttcttccaagcaaggcgtggttcttcgtggcaatatccaactcattattgcagagccaattacttactagagatagagcatatccatgccaggcccaagagatatcttttgaaagatcatgaaatttgccaataataataaataatgcatgctttgaaacatgtgggagataaatcttgaacaaatgttcatgaagaaagaaaaaaaattgaatggaacgaaggacctccaatgatgtgactaaaattactaggattagcatattactccgacaattatgtatggttttaattgtttcttgatccgtggtataggagttctattcgagatgccagccttttccttttgtgacttgcattcacctaaaacatcttcgcaccaacttttctgccgttggtcattcattattgtcactacccggccggccagtcttcttccatctcttagatattattatacttatagcaattaatgacagtttggaatgcaacgcctctctctc

SEQ ID NO: 79589 - DNA, 481 bp, Zea Mays
gtggatcatgtatgctagtaatacttcattaactactcctagtcgtagtttcgtactaaaatatgttctgtatgttcccaaatccaagaaaaaccttgtctccattcattgacttacatttgataattaaataattattgaactatgtcctactttctttctcattaaagattagaaaactaagattcagcttggaaggacatgcatgagagctatatccgcttttaatgtcaatgagaaagaaagtttacaacgcttggaggtcatcgataaacatgacatacttgtcttggccacccatcttttagtattgttgagcaagttgttagcactgacaatttgttatgttcacaagagtctatgagggagtctaatcacaatgtttgccaacaatctaagagtcatatcctaagtctaccagtgtgtctaattttttgtcgtaacttgtgcatactatgctgatgtctagggccatcaccag

SEQ ID NO: 79590 - DNA, 612 bp, Zea Mays
aaattttaaggggtgggtcttacattgttgtctctctttgagagagacagagaaagagtagaaggagaaaaagtcctttggttgtcgtggcaggtgcccctcccctggtcgtgcaaagtagtacccccgctatggtgtcgtccgtcactcctgttcatgtggcgtgttcatggctgaggtcccatggttagcctcagggctcgatggacgcggcgcgactttctcttgtcatcgtgggccctactttgtccttccgtgcgcacggattcgcccattcgatatggtgacccgtcctgttgcttctgacataccagctactgtggaggctctagtgctgaggtcgcccctaacccggctgcctcatcccatcagacagtgtggtatgcttattataagaaagaggcgtacagtcgtgcctacgactattgtgtgggctcctggcaacgtgtcctgatgtggttgacgtatgcttgtggcgctggcctagcgcttgggctcactcggtgggtacttgatcggtcattccgcctcgtagacttgctcagcggggacttggtcgtccactctgccttgcagatttgttcgacgggcacttggtcgtcctctctgccc

SEQ ID NO: 79591 - DNA, 585 bp, Zea Mays
gttggcagccttcctcttttggctccttgcttcttgaaggagtgcttcttctccttggttgggatccaagcatgaggacgacactagttgtcgtcgattgcttcagcggcatggtgaagtttgttgtggtcgtgaaataaccagatgtgggcgccaatgttggtcacttgcttttgattgctaaaggatatcaaaatcaaggcaacacaagttattaaatcataagcttctcccttcaatcaatcctttttcgaaggtaaattcaagggagaaggcgaagggtggagatgaagtacatattaagaaggacgatgagtatgcaatagagagcaagtcatgttacacatctgaatgttcacacacatattatttcattccttgttgtatatcaaatgattacaagtatacctttggctccacacaagcgatggcttgaaggtatcttcgaagacttagcaaattagtgttctaaactctcgggagatgaatttatgtatggcaccgattatctatttataggggacaggtatagattcatgtgaaattacaagtatgcctacaaattttacacacatgattcacaag

SEQ ID NO: 79592 - DNA, 700 bp, Zea Mays
ggaatactgatgacgataaggtccaactaatgatttctttcattaataggtacatgactgtgagcacggggttgctgcgaaacagcgaccacctcaacctacacctcaatggtatgctactctgtgtgcttgatatattgttcctttttcccacaaccaaaaaaacatttccctaaaataagttgcagatatagcttggatgtttgaacaattttccatcatttttttagttctaagcttctcaacaattggattgtactttctatactcaaataaactgattcttagccagatgaaaagtttattccaaatgggctcctggacattttaatgttgtcgcgtttaaatgctctcattccgtccttcctgataaatggtcttctcttacagttttttgagaaattactgtgaaggaccgtactagaggaaccattggaagaacgccacctctgtgtagaatttgagtaagttcccactctatgcaataaatatccatattacgcatgtgtgcagattacggcatatgctacaatagcaaaggacacatttgtggcatattgctttcctttcaaaacttgagaatcatgtagtcatgcattagattgacatgcaccaaatttaagctaactggaaagtggggcaaaaggttgaggcaagcaaaatattcaataactctcatttgataacaaaccaaaaaaat

SEQ ID NO: 79593 - DNA, 363 bp, Zea Mays
cttggatctcctgatcccccctaagggtagatctggtggacttttggttggttttaatactgatatctttgatgttattagtcaggatacaagtgagtttatgatttcttgtttgatccatcataagtataagaacatttcatggaatttcataaatgtttatggcgcggcccagattgaaaataaagacagatttcttagtgaattctcttctatttgttcgaaaagtaaaggcccgaccatctttggtggtgattttaatgtcattagaaccaatgaagagaaaaataaacctggtatcttgagtaaatggagtaacctcttcaactcgattatagaaatgcatggtcttattgagttaga

SEQ ID NO: 79594 - DNA, 1345 bp, Zea Mays
taaactactatattgattgaccccatgtgcttcttgaggttgcccatggcgagtgttgttagcaatgttgcgaagctctgcctccatatttcgctgcaagttctccatattcctttgagctcctagaaattgcgcaaagaattgctcgggtgtgtacgacggaggtggagaaagtggtacttcttgattaccctcctggttagcactactagaagctccagcggctcccgagttgatgcagcgagtggtcaccatctgcacattttcattatgggtaggcggtgagtcatgttgcaacttatgtgaaagaaggaaatcatgccatacaagatctcatagaagaaaacttcatgtgaaaaatcataaggcaagaaccacatcccaacacacacaacattttcatcacatatgtcataatatttaaatgcacatacaagccaggtgttccgctcgcatgcacaaccatccataagagagtttttcccacacgcacacatgtcagaagccatcattacattggccttgcaccatatgtcctactcctaggaacactgtccaaaaggggttagcctatcatctagcgacagctaacaaactactcctgcacgctactggcctcggagtctgcacctccatcgtcggcttcggcggcatctgcttcctctagttgtggcaggttgaccgggttcagctgggcatgcaactgatgaacctcctcgtgcagattagcattccaagcctcgatggtattcagctgctgcatcaggttgacctgtgttgccctgagctaggctatctcagaccaggctgcattcctctctttgatgacctctactagcaaattctggtagtcctggcattcgccaatccatagcagattgtcaagcatagccacatccctggcctagacggcttcattcttctcaagagtaacttgggccaactctgcttgtacttgagctaactctgcaacatgtgcttcctgagcctggtacaacttgttctgagtcatagcaatagaactgttgaccattcccaaattgcgctctgagttgttatacagttgcataactgcaaacataacactagaagttgtggtgtcactgtgctgctgctcgctgtcacctcctgtcagagctctaccctcaggctggtccctcttagggttgaaaggatcacccctaggaaatattccttgcatgacggaaccaatctctctaggaaaacggtccaacaaatcctggagtatcttgtaagctgctctgcatgccccttctctgggtgtgcggcctaaagatccaaagtgccagccacccataactggattctctgcccgaggctttac

SEQ ID NO: 79595 - DNA, 302 bp, Zea Mays
ttgatttcctgcttactctatgactagtgttgttttagtggtaaacttttcttttgacatgcttaaaattgaatcaaaatgcttattcttcacatatcatgtacatatgataagtttgagcatcgttagcacgtgcatttattattgcatgcatcgcacaacactacttagatcatctttgcactctagttgctatactcctaaagctctagcattatttgcatttttctgcattctccttttgatccttgcattccctcagggtttgggggctgaatttcatgcaagggggagagtttttt

SEQ ID NO: 79596 - DNA, 540 bp, Zea Mays
taaatccaatgctgcaaaataatctaaatcatcctccgaggattcgtcatctatccaagaaaaagtgctccccaactttccaccctccaaagaccacgacccaacatcatattccctagacgcattactactaagaaacaccgcatttccatgcatcaaaatatcatcatttgtgtcatcatcagggtttgcttgcgcaggcccagacgccggaacctgcgcatcaatcgatcttcagtatcacacaaaacgaacaatgccaatctattccctattacactttctcaacctacaacgaagcgtctgccgtcacaggacccccaatgccacctccttggagcatggtttgctctttggctcctgcctccgtcgaagcatccctccgggtcactgagctttttaggctggtgaggtcctccacatcttcttcgttcatcgcctgcaaagacaacacaataacatttcaaacaacaaacacacacaacacccctcgccaaacccataacatacctgcaccagcgctcggtctgccctctcctg

SEQ ID NO: 79597 - DNA, 294 bp, Zea Mays
cggatagattttccctagtgcaagagttcaaataagggggatagagttccccgctgatctaatagttatgggtaactaggatgcgactatagatgtcatcctagggatgaattggctaaccaagtatcaagccagtcttagctgtgacaagagaacggtgaagttagtgtccttatcaggagaagaagtgttagtggagttggtcttgtctggaccaaggaaaggaagctatcaccaagtcaccgcccatattgaggagattgaaccatcagaggctatcaatgtagtatcaga

SEQ ID NO: 79598 - DNA, 700 bp, Zea Mays
gcgtgacgctggcaagcccaacagcgaaaggggagatcgacgggagcaccttgacagatgtcggaggaactactaccccacgcacaccaaggaaggagaagtcactaccgctgatcagccacccatgccgctggcgaagaacaacaatgaccatttccaaaagttgatggattcaccgtgtcaaaatcaaaacttccccgtccaccgcaaacttcaggaatgcgagctcctaaagcgcttcatctccaagccaccggccaaaaaggcgaaccaggaagagccgacaaagctggcagaataagaaaccccatcgaggacttccctaaaaaccacgagctatatcatgatcttcagcgggggagaagcatacagtgctagacgccgccgcaaggcagctcgacgagaggcgttcatcacggagctcgtcgtcctgcggtaccttcgatagttagaattctcgatcgtcttctactgctgtgaccaccctgatgtgatcctgcatcttgagacctaccccctcatcattgagcagatcatggcatcaaaacgcctcaccaaggtgctgatggacgggggaagcgatctcaacatcatgtacatcgagaccttcgatagtttgggaatcacacgctcagcgttgcaccccagctcgacatcgctccatggcgtcatccttggccatgaagcctacccccttggg

SEQ ID NO: 79599 - DNA, 365 bp, Zea Mays
tggaggaacagtacctgaagcacttcaagatggatcgacaccataagatcatcaagcaaggagagatcgagatgtcatccgtcctacccccatcaaaccccaatgtaagtaaatcaaacgacttttagtcccttaaacaatgcgtagatctgcaatggaattagttgcaacaacacattgggggatcgaagacacacttaagaaactcacgcgtacgatagaaaatcagccgtgtctaatttttcatcgcacgaggttgcgattgagtcatcctcaccaaaatgatcggctacaaaaatgggactatacaagtatgtcgattaatacattcgcgacacaaccacaaccctcccaactgatctagg

SEQ ID NO: 79600 - DNA, 833 bp, Zea Mays
tgggcgattggcctggccgtaggttggatattcagggagtgttcgacgtcctcccttgggattcccagcatatccgtgggcttccaagcgaagacatcatggctggcttggaggaaatcgataagggctctttcttgtttgtcaaagagcactgcctcaattcgaaagtgcttgaagaggtcgacgtcgttgatcggggcatcctttgtgtcatcagcggatttggatgtaccaaaactagccttgggagcgtccagttcggcctgcgagtcggtgcccttccgaagctaagtcaattctctcgtggtggcctgcactgacgtgagctcgcaattggcttgctcacacacgtaagccgcttggaacaaggtggacaccataatgaccccatggggaccggacatctttagcttgaggtatgtgtagttgggaaagacaatgaatttgataaagcatggcctccacaaaatggcattttaagcccccagaaagtccatcacctcagtcgcttggtgcggaaattggagggtctctgaacgtaacgtgtagaacaattcatccgatatggcaggcgtcgtggtgaggtgtgatgccatggatcggtgtggtgttgcgcgcagcgttgagcatgcaattcccagggcatcgaaagtctcaacatacatgattttgagagtgctcccctcgtccatgaggatcgtgtagagacattttgggctaataattgacccgatgacgagagagcaagtttcgagatgggggatcctactcggatgatcgcgtcggtcgaaggcgattgggacctccagccatgaggggcacgacggtccgga

SEQ ID NO: 79601 - DNA, 476 bp, Zea Mays
cgccggtgcttccgccgtgggggtgtggcggcgccacctgtgctgaccgggaaggaagaaaggtccctcaccgtcgatccgtggatggacggatatcgttgatcctaggcataccatttctataccgttgatccagagataaacgcttacgattagatcttgtgtatccctcgcttgagtaaatctggtccatcgatatcaggatgaacggatgctgttagatcacgcgtaaataaaaccccgaccgtggatctcggatcctacggtggacagaacgtaccgattcgtgttataggcgatctaatctgggcccttggttcttgatcaagcggccccgggcactccataccccttcgccgtgtccgagttataaaagaacccctggggtctccatgaattaacccgcattccgcgcagtggcgctctttgtcttgggattcttgcaccaagacccctgcctttctctgaaatattgc

SEQ ID NO: 79602 - DNA, 785 bp, Zea Mays
atgggttcggcggtcaagctagggttatgcgctggtgtaggtggcgcgtggggtcaaaattcaaattagtgggaatgacaattggttgtggctggtaaatattctttcttgcgtgtcccgtttgtgctaggctgcaaattttgttctggagaggagaaccatttcgtcttgtggattcccccaattgtttggtttcctaggaaagggcccatctttcaggcaaatgagacggctttcagtttcgtggctctttcctatgtgtgcaggcttcggttgttggttgtggcatgttttgtttggtgcttgactgcgtgcagcactgctataatctgctggatagaataggggtcattgtggatttggctttaggctgtttggtctgggtgtctgtaatttaaactaatgcttgtaaaatgataaatgtgaaatgacctgcattgaacatttcaggtctgtacgcattaccattttttattgcatacctatgctttattgtctgtattttattcgccacgtttgatgttctgtaaacgcctatcatggtttggatcaagttgttcttgagattgtggagatattcaaatcgaataggattggatattgaggtctgacaattcctaatgctcccttaatttgaatcggaggcttggtatagtggtttagactggacctttaaaactactgtagatgtagatactatgggctgtaaatttgctgtatataaattgttggttgagctagttatcctccactccctgtatatatccttcctattcctttgtact

SEQ ID NO: 79603 - DNA, 375 bp, Zea Mays
atcctatgggatcattgctcccactgctgctcccctcatgatgaggagccaactggtgatgaggcacaccctgaagtctagtttttttccgaagggtggtctttgtgtgtgccatgtctctataaaaggggagataacttagtattaattaaacatgaaacatgcatgatcctacgatcatgaaatcaactccttattgaccccatactccatacatataacctagtaatatgcactcttttgcctaacttcttaaaaggtaagttgctataataaggggtcaaggtaaggatgaaagaatattcagaggtaagtagcttaagtaatgtcctaagaaatgggtgccgctctgataccagctatcatggaaccttc

SEQ ID NO: 79604 - DNA, 887 bp, Zea Mays
aggaagaccgaacggtccggccatgtggcctggacggttcgcacgccggacggtccgcgattagattagatcaagcgagtcatccccttttttcttgtgtgtttagcaactaaccgcatggattttgttggggaatgtcttggaacgagtccagtcctcccctatatatgtgaagtggatacgatcgattgcacacatcatcagtcgaatcaatcaatccaatctactttatttcccttgttcttcatcgcattagaagtaggcgtaatttagacctagcttagcctttttccccaacctcaaatattcatcccttttcgactctacgtcatctagggacgtcccgggtggtctaccgatcctggggtatcctctagaactctcctccctaacaaggtccttctcgagaggcgagatctagggttcgtcgacccaacacactttttttatgactccactagggacgtaattaggtgtgacctgccaaagatcgaccagagatggtcggttcaaaggatcgcactaacgtttctcccagcaacatcatgaagtcgactcttgaaagctgtcggttgaggatcagcagcgattcgaggaatacctgatgcaacaaagagaagagacattgtgacgagacgcacaagaaatcaaataagatcatcaagcaaggagagatcaaaatgtcatccctcctacctctgtcaaaccccaatgtgagtaaatcaaacgacatctagacccttaaacaatacgtagatcttcatgggaatcatttgcaacaacacattggagcgatcgaagacacgcttaagaaattcacacatatgatagaaaaatttgtcgtgtctaattttccatcacatgtggttgcgattcagtcaacctca

SEQ ID NO: 79605 - DNA, 655 bp, Zea Mays
gctgatgatgtcctcataaaaaaaaatcttatttgaaagcattatctccttgttacacttttattgctagaaatactgtagcctaacataaattatagatctataagattgaaaatcatgccaagtcatacctctttatattttgatatggatggagtaccgtcttaattagtctcactcgtcttcttttaatagaagaaggcactaggtctcctcacccaacaaagcatcatgacaattgcctagaaagatgagatatggactaataggagcacttcaacgcctactatactagtgggagggggagaaagtcagcaaaaaaaaagttggtcagtgtcattccactaaaacatcgattagactttgtgaattccattgcctttttgactttggtccctaaacgaactatctaggttgcatgacatacgccataaaaaggggcccagatggggcaaccgaaggaattccattattgagagcttgagagatagcgtactgcactgtcgactagactactacccttgcaatgaagagggcaccggctgtgtgtcttctggccaccttgttggcattctacttcttggttccctccattgctgtagctctctcaagtgagttatctctctcaatctgcctgcttgattccttcctttgt

SEQ ID NO: 79606 - DNA, 335 bp, Zea Mays
tttgattcccgacgctgtagcctgttgggcttagctgctctgctcatacagtggcgatcactttttggtactagtggctagtgatgattttgcgtgagtaatgcgcaatgtcttcatatctgacataagacattctcaaattgaacctggatgcttggtttggttgaaatagtggtcatccttttaaacaggcatgtcttacttattagaaatgttaagcgttgtcatgttaaaaattgcctcttgaaattgttgttctgatcatgtgtcccctttgttgtacaatatggttttgttcttcttaatcgtatgtttttacttcactagtaaaacat

SEQ ID NO: 79607 - DNA, 485 bp, Zea Mays
aaaaagtatagagaggtaatacagaggaaccgttgtaaacagtctaaagacatttctgaatgccaggttcatgcccctaccctcaattgttgttcgtggtgtcgtcgatgagatgcgctcttactaatgatgtgcatattcccatcgttatcagctgacatggtcagagcctatcttgttgtggttgatggatccactagtgtggataagaaaatgcctcccaggttgatggtggtgctgccgtccttctccctccaccagtccaccgccgccaccacctcttggtctctaatctctgatggaaaagagatagatctgctttcttcaaatggtagtattgctacatggtcgtgaggagaaaaatgctctggcccttatactgtgactatacatcgtaactttctattcatcttagagtacgaagtcatatatttaaatcctaaaaagtaaaatatggctcagggtcataaaaacatttacggctc

SEQ ID NO: 79608 - DNA, 1175 bp, Zea Mays
acgtggctaacacgcaacactccataatcattaagccactgcatcttatatggactaggatgatgccttgattttaattctaatctatccaccaattcttgactagcaatgttgttgcagctaccattatcaacaatgatgcggcaaacttatctttaatcatacctcgagtatggaaaatattgtggcgctatcctttttcttctctttcagcagtcacacttagcactcgaagagagataaaatagttatgatctccttcttctggatggatctcattctctgcctgttgaatttcttcatcaaactttggttcgtcgtcttctggatcactgtctgattcccactcacctttttcattcaacaacattgttcttatacttggacattgagcagcaatgtgcccacgaccatggcacttatggcacacaatttctcttgtacgggtacaagaaatagcgactgaagcttcagtcgggtctgatgtactagtagcaggtcgctgcttatttgcagggaatgaccctatagaagccaccatctttgatgtaccattggatggagaagacctagctgcatttccttgggaccatcctccaccaaaagaagcaatggattgctgtttgtgccatgagacaatattataatgacttgcataagattttccacgtgacacttgctgattttttctctttgtatgcattgcttgatcaactagatcttgcaaggtatggtatgggaacatctcgacaaatccagaaatctcttcattgagtctgcctagaaatcttgccatggttgacttgggatcttctctgattccagtccacactaatagcaactccatcttcttaaaatattcatcaacagatttctttccttccttcaataattgcaatcgatttcgaagatcacgttgatagctggaaggaacaaatcgcttcttcatcacttgcttcatctcttcccatgtattaatatgtcttagtcccaatttaagttaatgttcttgcagttgattccaccaagtaagagcataaccagaaaactcgactgaggccaagttcactcggtgttgatctaaaaaattgtgaactctaaaaatttgatcacactgcacagcccaattaaggtattcatctgcactttctttcccagtaaatttaggaatatcc

SEQ ID NO: 79609 - DNA, 415 bp, Zea Mays
caatggttaacaaaccttatggggtagaagattgcggcattagctgtgggtcatacaagcatatgtctagtctggctcactaatccacataatgtaacagtacagagttaagactggagacctcacacgttctagggcgatcacactaatcccttaggaccctttgcgacataggtcccacataacgggataagccttggggccctcatgttcggagacatctagctagataagccatcgaggcgatgaggtccctaatgagataagtcccgaggacccttgtgtcggggacacctaatggtataagcttccgaggccctcatgccatggggcctaatggaataagccccccaaggcccttatgtcttgatgcacctaaagggatagcccccaaggccctgacacggttctaagc

SEQ ID NO: 79610 - DNA, 325 bp, Zea Mays
cttcgttctcaccctgttgaaaaagttgcgtaagaacataaggaaaaatgtcactctcgcaaagaagaaaaatggcacacgcgtagttcgacgcaggacacggagaggtcacacacttacaggtgtctcgagaggttcaaagctcaagcttgcgagcacagggaaagagagaaaaaaactgtagattccagttaaaatttggccgaactttatgaaaaaaacacacacaggaagtcaggaaccttctagctgaatcgacggtctgaatttggtggcatttagtagttcctaaatgccgttctgcttcggtaggctccaattttcg

SEQ ID NO: 79611 - DNA, 343 bp, Zea Mays
ataaaactgatgggttattattcaatgcgatatgatggtcttctggccatcatcttttgtcccatcagtttgtaatggttgctttgctatgaagtgaaatgatgtgtgtttagagatagtcatatgcatcacaactcctgttatgacactcttgcacccctcggatggttgtatttagtatggtcttggtcactatctctaaatgtgttgctcacatgacatattatgtcaaaacattggattcacacttgtgcacacatttagggggagccatctacatacaatcattcaaaagaaattttctatttcaaatgtttatctttttgaccttaattgttttggc

SEQ ID NO: 79612 - DNA, 786 bp, Zea Mays
ttcagccttcgtttcggccgggtgccgaaggcagcagtcattagctgatcttctttcttcgtatagtttccaagaattccattgcacatggtttctatcaattctaaccattcagtgcatggttctttaaatcttttctgaaaattgaaatggtacgaaagacgaacaagctcgtatttcttcccctcttctttcttcttcggcattccccagccgccagaagtagggaacgtcctgtttgccaggtattcttgtaccaaatctttcgtgccaatatgctcagtcatgaccctaaattccaattcagctagttggcaaggagaccccagttgcatgttgcacagaggccgagtcatcccgaagttcagtcttagtggacccatcaccatgctcataagcttttccctcttcttctcgtctgccttgacgtaaaaccattcactcgtccaaccagtgggccacttggttcggtagcctatcacgggggccttcgtatccttccggtatgcaaagttgtagcatccgaaatttttgtggagatcgtcagctcttgcctttgtctgataatgaagttcatgaacacggcaaaaacctttggtgttagcactcttcccttggcttcggagagtccaaatgtaaacgctaagcctgacgatagcgttcgaggtcagctgatggagatatatctcaaatttctttaaaacttcccctaccatctcgtaaagggggaaccgaagccccgccctgaagaagctcttgaacaccacaacttcatcttcctttggc

SEQ ID NO: 79613 - DNA, 573 bp, Zea Mays
ggataagtagcaaaagcagggcccaaactgctttcaaaattgtactatagagaagctgcttttttcaaagtagctgcataaaaattgaacctctttggttcagcttgcgcttttttcaaagtagaagcagtttaaaaaaactgaactaaacgcaccctgtatgtcccattaaattcaatggttattgaaatttggttggataacatttgaaaccagtctaggatacaatattcgggagtatttagtccaaataatatacctctgcaacagctgaaccatcactaaagaaagcatcaagcaacctttcatctcagtttagcactcatgttctaaatatgagaaaaatttatcctcgatgagaacatacataaggaccataatcatggttaatagacaccgttcatgtttaaaataagcaacttcctatgaattctccgcaatgttttcaagtcgtctagtcggacctagtcgtatagttaatcgaccctaatcgagctgatcgtccgtttcgtcgtccatatgtttctagacatatatacttatatagtatatagtaataggatacatacacac

SEQ ID NO: 79614 - DNA, 463 bp, Zea Mays
gccaaagctccctggatcgtagcttcggcatgtaccttcgcgttgtgtttgattatatgtcgatctttcgaaggtatttctgcttagaggaccttcggcgatgaagtaggcccccaacagaagccaagggacggacccaaatgctgaagctttctgccgagtgcatgaattgcactaccaaacgaaggccagagaatatgggctacatgaaaattttggttgttatatcttcgtgtatcgcaaggatacgaaggcttcggtcctcagctatcgcaccaagtggccaactggctggaagagtgagtggttttacattaagaccgatgagaagaaaagagggaaactgatgacgatggtgatgagcccgctggctttaagcttcgggatgaccagacccttgtgcaacatgacggcagggtcagcatgccaactagctgtagcagaattcagagtggtggctgaa

SEQ ID NO: 79615 - DNA, 467 bp, Zea Mays
gggaagcaggccttcgtttcctcgaatggatgcatgaggagctgttggtgctccagaccattgtggagcgtttcatgtccttcgcctccctcgtcacctgcgaggggggcatgaatgcgttgtcccgcgagggctgcaggcactacgagatcttcgaccaatcagacgagaactttgaacacgagattttcaaggtcgacgaccctgtggtgaagtagtcaggggggcacttttcgataggatgtggggtccacatggtcgggaggctgtcagggagcgatccgaccgggcgagagagcaggtgagggtcattttttgtatggtagtgtgtgggtatgcttggtttttgctgagtgactggtgttgctgcagatggagcgtgctgaggacgtcgaggacttcggagctctggccggcgcgcctgcccaaggctgcggaggtcaaaccggtgctgccctcggatgcag

SEQ ID NO: 79616 - DNA, 760 bp, Zea Mays
gatgacagcgggttgtcgtagtgttgttgtgatgggtgcaaaaattgcgcatattatgcagctccgtgtttcgcgtaagcatacctagacggtcaggtgtaagcgaccaggcggtccacgaccaagtcgaacgatctagggttatactcagacagtctggtcgtatatggcgctgcctaggtggtttgtgcgtgggcttgtgtagggtcggacgacccagcaaaggatgccagacggtccgtgaggtagccggacggtccgagatgactctcggacaattcgatcatgtttagagccagttgcatgctagacgacggtggttatggtggtgctatgaacgtattcatagacataccatacaatggctaggtctaggatgatctatttctagccgacgtgttaggtgtgtttggctccatattagttcgtgcgagggaaaactaggggcagtagatttttcatacgaacacacccatcatttaacagattagtctatatattgttttaactgatcccccgctgttctatgaaagccttaaaaggttgaaacgaaatgcttatagtgggagtttgaggcgaaggtaggagagatgttatatcgatctcccattgacggatgatcttctggtagcgagccaccgtgaagtgtgatagatactttttcctttgccttctcgcgctgtttagcgagttgtcgcagcacttcttcatcttctcgtctcatgaggccctcaaaatgctgttgtccataagccaagag

SEQ ID NO: 79617 - DNA, 640 bp, Zea Mays
aagctttcaagcttgaacttagcatgatctgagaggcgggtgacaaaggccatagggagagggtgggacaagacgccacaaacagtttggtacgtatttttattatgagacatgggggcggagaactttgtggcaaggtcgtcatctaagcactagacatcgtgccagaatgaggtacctttttccatcgtgtatgacataggtggtgatagcacgatagagggggagtaaggagcgcaaggaggccgagtgagcgcctgggaggtcacctgtggggcttgccaggtaggcgcggtggtggaccctaaacgtccttggtgctaaagatactgtgtggagctatgttgcacatcaagaggaacatgatgaagtgtggaggtggtggatgctcgagatcctggacgcagcgtttttgctctcgagaaccatgtaccagcggttgatgttatcaagccactttattaccatactgtgctaatgagcttggtctatcagcatttggacaaaatctgtagctcgtgactccatattttgatggcatgacaggctctgggagctgtcgtggacttctgtagaggatgtagctattaacattgtagtccagtgatccagtctcaccgtctttccaaaataccgtcgt

SEQ ID NO: 79618 - DNA, 464 bp, Zea Mays
gtggtaggcaaaagcaaagtggtcagcatcgaggaaggcggagcttgggaaaattgggatcatggcttcacaatgcatacagggatagggaggagaggtagcaagtattaatagggaggaaggtaccacacgatgggtcgtaccgaggagcacacaatggcttcacccatgcctggacactattgaggcgtggatgaactgtgaaggcgtgggcgacgggatcgccaaggattggcacacgacgacagaatagtcaggtacgtagtgactagtgatctgcctctcttcttgtcgccactgaatgtgaggcgtcacgcaagcagggaccaccagaccagtgacaactgggccacgccgcgaggacgatagcgcgcagagaggatgacaccccatggcgggtgtagattgacgtgtcctagacatccacctacccaccacagacatgatttgagatgtgtagaggt

SEQ ID NO: 79619 - DNA, 529 bp, Zea Mays
atgaacatatttttcctagtatacttaagtgataaagaacatagaaaaaatacagagaaacctaggttaattattttattaggcactaataaatccagaaaagccataattaaaaatataaggaccatttcaaaaatgataagaaaaattcagtagactcctaactgctagaacaccactacaaaaatagtagataccccaacccatcataataagtgggttgaacaattcaaacttaattttggcccatgttccaattaaatcataagaaagccaaaattgtgcaaaattaggcaaagaaaattttacccaactattgatgaagtagaccacgagagaaaaatatgaaacctagttaaaaatgtaaggtaacacccattaccccctaccccatgaaaaaggatatataatccaagaatttctaccaccctctcccataagtaaacagttgccaaattctagaatgattgctcttgcacaaagaagaagataggaaaaattagaaatctgttgtttgacatttttcaag

SEQ ID NO: 79620 - DNA, 697 bp, Zea Mays
tcgacgggtgcaaaggataatgaagctagtcaaagcaactaggatctgtttaggcctcatttggaacacagggatgatacatgaatttaatagggatttgttcaaaaacataggaaaaacacaacatttagaaaatattcctttgttccaaaggaggccttagatagttgaaatgtaggattgcatgtaagttaagggagttacttgagatagcgactaaaaaatatgtaaatatcttatgcatccaagagactgaatggcagggttagaagatgaaggaggtggacaatactagcttcaagcttggtacacaaagataatactggcttcaagctttggtatacaaagacaatactggcttgaagtgattttgattgataagaccctcaagagtgatgtggtggatgtgtcaaggcaaggaggaggtatgattatcttagtaaagtttatagatagtaatttggtgctccacacattcgggaggaaaggacgacgatacccttaacaggctctgcaattgcatttataggatttgaggtcatgattataattctatgcaaagttatgtattgtgctgcccctataaataggggcacattgcccatgcacggggtagcaatccacataattatgtatcgaattgctctgcatccgaagcttcaggatttacctacctttgagcatccttcggaaacac

SEQ ID NO: 79621 - DNA, 1388 bp, Zea Mays
gggatacctctaatcccacatctggagtgtcagagtagacgtccatcatatcaccatcagttggctctaacagcatatcttcaggaacaacatcctcgatagcctgatcaaaatttgctatgaataattcttgcaggctaacgagggcagacaaagttggagaaggaatatcgctattccccccactgactctgtaacgccgactgttcttccgaatcaatgggactttctcttcttcttcttcgtcctcgtcaacaatacggacaataaacggcgcagggtcacacccattaggattggctctggtagggtcacacccattgagatcagctcttgcagggtcacacccattgggatcagctctagctgggtcacacccattgggtttagctctggaagggtcacacccattgggatcagcattagcagggtcacacccattgggttcagctccagtaaagatttccaccggtacttcttcagcagcaggagtagaagggccagcaccctggtctagacatgatactcaccgaagccgtctcttcttcttcttcccctcggcaggtacagttggatgactaacctggcggagacgtttcgagcgagtaccctcaggctttcgggtgtccacggttccttcaagctctgggatagttgcaacagccattgttttagcagggaccgagtcagaagaatccccagccaacatgtctagcataacactcatctctgcatcagctggactcgtaggcatctcaaagtgaacttgcctctcatcattgggaagatcactaagtgaagcaaccaggacctcaatatcttcaagagagggtcgcactctaagacccaaaccactatcaccggtaggacgattggacacaaaatcgaaaaaggacttagaaggtggcagattccaagcagaatatgcaacaggagcaccaatatttgatactttgcccctcaagatcatctctagtcggctcaccaaatccacagctggaatcctcttgttggtaacctgggttgagtcggtaacaccactgtacaaataagtcggatatgctctgtccttcagtggctgaatattcttaaaaacaaagtctgcaaccacagcttcagcggcagacctttctccttcaacaaacaaatttcagcaagcagaatcttggcttctgttatctccaaggctgtaggagactcaatccaacttggagtgcgaacatccggctgtctccctgaccgagggggagggacttgccatggttttccacaatgaaccactctaagcgccatcctttaatgctatccttaagtgggatgtcaaggtattctgttttcctcccacggcgcatctctagactcgcaccgcccacgagctggtgctgccc

SEQ ID NO: 79622 - DNA, 605 bp, Zea Mays
gagcttggaggaagttttggtccctctcctctatcccttcgtatgtatcaggcatgtcggtctcagctgtcgcccgttcttccacccaccactatcccttcttagaggcataccttgttagggccaagtggtgaaagttaatgtttctctttgtgagctctgagaactacttgctcttggatttttcttctgaggtttgcttttgtttggtgaagacttcccatacttcaggcgttacgtagttgtaatgttcaaagggagtattccctttctacacgtaatccttattgagattgtacttgaagtttcgaagggctttccctacagcgtacatcacatgtgccttgcacttctcctcgtcatagccttcggttgtatacatgaaccgctagttcacctctgcacacacaagatccttgaagtcttgcgagaccgtctcctagctctcataaatgatcaacaccttatccttgactatgcataagatttggttgctgtagacaccaaggatcttaattgggtgcaatggctagctctccttgtggccctagctcatgtatcacatgcacatcatctttcttcttgtgcatgttgtgttcaccctt

SEQ ID NO: 79623 - DNA, 1158 bp, Zea Mays
cgcggtcagatccttccccaactcgtcgcagatcccgctcggtctcgaacagaagcagcagtcacccacctccgttcatagcgcaggttccagcggagtcgtttacgaaaaatccaggcaggattcatctgtatcctccccttccatggttcatcccaacgtagcatcgggctcctccttcactgtagcaaatgcaacaaaattccacgtgattcacgggcaccgcgccgccaggtcgggttctcaaggtataagtatgggcaccagcgatctcccctcatccatccgctgccatgccatgatggttatgctcggggcagaccaccgccgctagggaaggggaggcgagaagtagagaaatcaccgccgcgccatgtgatggacatattgaggtgtgtggaggtccgccgccagcgggtttcgtgcgtgtgctgccgttgggtctacgccgtggaccttggtgttcgccttagcattgggaccatgtccaaggtggcggactagcacattatgactcaacgtcgcagtaatttcacgtcgccgttcgtgtatcacggccatgccacccttcaccgtggtcaagtagctctgcgccctaatgtctggtaagtaatccgtaacagtgttcgccataattctctcctcctatttctggtatctacgtgtggatttggggcttgtgcgccatctggtgggattcgccagagttccagccgtgcatagtagctggcgtcgccgccctgctgtttggggaagaagagagggttgggggaaattcgtgcgagccatcgatcccgtgttttacggccgtgatcggatccttagtgtttaaagtaggcaccgtgggatcttgatccaatggccaggtttgcataccggtttggagggctcagatttaatctgagcgctagaactaggatccaacggctgaaatctatccatacctcttcgtcgttgcctttttgctaaatagcccttctggaaattagaaaataaccctcgacccactgctgtgtaaaaataattccacataggccctagactttgtagattcgaccctggactcttctgaaattgtggccccggtccagaagttgaataaaataattatattaatatggaaaataggtttttagtataaaaacaaatctagaaact

SEQ ID NO: 79624 - DNA, 479 bp, Zea Mays
ccacacttgactcacttgatgaagtctgaatttcagtgtgattgattcaactttgagcctttgtatctttcaaaatattgagaatttgccctaggtcaccacatcaactatgtagatctatcttaggtgaacaatttttcttaagagtgtaagcaaggttgttatgaagaatttggagataatcacactcaaagtcaggctgtcaggtcaacttaagtctgaatttttagactgacagtgcactgcaggaactttgggcacaaattcaaacatgatttagtagggatttggctatggctgctatggcaaaattttagctggtttgtagctctccaactttgttgcaggactttaggaaggttgccatggaaatttgagagaaaattgagcccaaacattggctgtcaggtgcactgatgggagcttgccatggtacagtaccagaactggatcagaacgccagcgcggcaacctcaccg

SEQ ID NO: 79625 - DNA, 422 bp, Zea Mays
ctttcggtggcatgttcggatgtagctggtcatacagcacgtgcacttcctcgtgcagagcattattatacacttgcagattttccacggccatgcttagctcttccactcatcctggggcagtcgccacgcgatcccaggctatagatcgtgaatttacagcccagtcaatagccctattcccgctccacaatctcccgctgtaaatgctcaacctctgctgacaacttagcgatgcagtgactatcacacgcacgctccctgcctccatggcacagttccatcattagacattcaactctagcctctagagcccctatgggatcattactcctgctactgctcccctcatgtcgaggagccaattggtgctgaggtacatcctgaggtccggccgcctttcgaagggtagtcattgtgcg

SEQ ID NO: 79626 - DNA, 277 bp, Zea Mays
ccacacaaacttaacatgattcttgagcaactcagtaatgggcttagctatcttagagaaatctggaataaaacgacggtaatatcccgccattcccagaaaacttcggacctgatgcactgtagtaggtggtttccattccaaaatgtccttgactttacttgggtcgaccgcaacaccatcggcagataagatatgacccaagaacggaattgtgtccaaccaaaattcacatttactgaacttggcatatagttgatgttctcttaaccttgtc

SEQ ID NO: 79627 - DNA, 383 bp, Zea Mays
atcgcgatatctgggccgttggatcgactacctacggatcagattagatattcataactgtgaaccggtacgcaactcaagccattggatcaaagatctatgttctggattttattagggtgcgatcagatctagttcatccgatatctaatcaacgactcagatttaacctaacgaaaggcattcaacacttaatcagggtcgtttattctgatcggatggccacgattctacagcgttgaaggggggactccgattaaatcggagccacacattttccgatcaaaggtcagcacactctcttccctcccaagctctggtcatggcggcgctgcccaccgcggcgtacgctacatcgccgattggtgattccgcccaacgat

SEQ ID NO: 79628 - DNA, 512 bp, Zea Mays
gctgcacatcaatcggttccaactcgatttgatggtccggatctcgcaaaaacttcctcaacatagagacatgaaataccaggtgtaactctgccatggattctggcaattgcaagcgataagccaagctgccaacccgggccaagatagagaacggtccaatgtatctcgggctaagcttctcggagacaccgaaccgaacaactcctctagtaggtgataccctgagaaggacttgatcacccactgcaaattccaagtcccgcctcctcacatcagcataactcttctgacagctctgagcggccaaaatattctgacaaatttcccgaaccttttcagatgtctgctgaacccaatcaggaccaaccagagatctctctcccaaagtctcccagcacaaaggggagatacatcgcctgccatataaggcttcatatggtgccatcttgatgctagcctgatagttgttgttataagcgaactcagccaaggcgagatgttcctcctag

SEQ ID NO: 79629 - DNA, 432 bp, Zea Mays
gccttcttcacgcctcaggccagctatatgacatgtggggccgggcccccatgtcatagggtgggaaccctggtgtgcattgggggagactttgcccgtgacgctttggggcacgagcgggggaatctgcctttaaaaaggggttcatcccttgagtagcagccatgccttgcttctctcccactcgtggtgccctttcgccttcgagctctctgcgcccctttgccttcaaggtttctgctttgtgctgccacagtttaccatggccttgtaagttcatctcgagcatgcccagactgagtgggtgctcaagatggtgtgccgcctacttggatgggatgcaccggcgttcggcggaaggatttgcgccggcgccctccaccccggtgaacttgccgctggagagttcgtgccttttgtcctccccagcga

SEQ ID NO: 79630 - DNA, 661 bp, Zea Mays
gtaaaaataaaataatctcgcgcggccgcgtacgtgctgcccccggccggcgacggcgggctgatgcttgtggttttcctagccgacgctttttttctctctctctctctctctcccagatcaaagcactataagcatgcagtcgcgaatcgatcgcttctcgctgacagtgtggtcctgcctgccgaaacgttacccagcacacgcggggacggaaaggctgcggatcacgtcaggcgcccgtgcttacatgacaagccaaggaacagagattgcacttgcacagcaagttttgaccaagcgcccgacagacagcaaggcttatagatttcgattatcaacgtgaaccttctccagggtacctcatacaaaacgtactagtacacaagtactaccgatcgatcattatattgcacgagcacagctgcgcggccgaactgcctactgttgcactgccggtggcatcgcaggcgatgggaagcgacgactcccggacaagagcatcctgactgaatgaaagccggatggggaggtcaaggcacaggaacaaggctgccattcctacgatctataatatatcctacgacgtccgtgcaggcccatctccctccgctccgaccaacaatctctgcgcccgccatccccctatccctgcaaagcc

SEQ ID NO: 79631 - DNA, 842 bp, Zea Mays
ggaataccttgacatccccctcaaggacagcatcaagggatggcgcctcaagtggttcaccatggagaatcacaacaaatcgctccccctcaatcagggaggcaaccagatgttcgcacgcccagctgggtagaatcccccacctattaagaggtagccgaagccaaggtgttgcttgctgaaatttgctcgctgaaggacagaggactgactgccgaagtcatggttgctgactttgtcttcaaaaacattcaacctttgaaggatagagtctaccctgcttacttgtatatcggtgtgaacgattctattcaagtcactaacaggcaaattcccaatgaggacctactaagccgatttgatatgatgctgagggacagggtttcgaatgttggtgctcccttatcctactctgcatggaacctgcctccacagagtcttttctctgattttgtctccaatcctcctgttcgagatggtagcccgggccatagagtgcaaccctcttcataggacattgaggccttaattgctcccctccgaaatcttcctgatgctgagaaacaaactcactttgagatgccatccagcaccgatgatgctgagatggatgttgttcttagcctgctggccggagaatcatctaactctgcccgcactgagccgatggcaattgcgactgggcaagtgtttggtgaagacgaggaaattctgaaaccagaaggtgctcgtcggaaacattcacgccgagtgaaccatccagctgcacctatcgaggagaagaagaagaaacgacgacttcggtggttgtcatgcctggaacaagacgcaggcccctccac

SEQ ID NO: 79632 - DNA, 643 bp, Zea Mays
atattttaaaagaataaacagaaatgatttaaaggaaaaaggttttgcatctggatccctggtgaaaggttctaagttcattacagacaggtcctcggtttactattcatatgagtctatgactatgtagaaaaccccctaggtttctgcaaaaacgaacccgcgatccttcccctaatggaacagtgaccgcggcggaggaaagggcggacgggcttatcggcggcgagactgctccagtgaagtggtcgacggtgtaggggaggtcttgatggtcacgccaatgtgcggatcgtctccggtgattgtcggagtaggtcggttcacgtgcgctggcgggcgagctcgtcggcggcgaggattttggcctatccagggcagtatagttcaattgagcgggtcagagagcttcactggatgctaggaaagacgtaggcgcgaggaatttgaaaatggcttacctgatagctcggttcacgcgcggtggcgggtgaccgaagtccggcgagggcaattctactcctccggtgaggcaatgtctcggctcaagcttggagaagcttcacagggtcttggggaagctatccaagggttggtggaggctgaaggtctcttgaaatggctggccacggtgaccggcgct

SEQ ID NO: 79633 - DNA, 533 bp, Zea Mays
ccagaaattccaaataattgacgattattgcctgaaatagaatttccccaggtaatacgagagtcattcatcacagggccgggagggccattaatgctggagacaaacttatgcccagaaatctccgggtgatgcttcaatatcttcttgggccaccaaattaaattccgcgaagcccaaggccgaacacgggagccccttaatgatgaccgaatgttaagcctctcaaagcggctgttactggaatttgaataattttgaaattgtgaacgcctagcaaactcagcagaagaatttgatcgagaagccaactgatcgacagagtgatgaatagggtaagaaatccgattgaacactgaagatctctgttgcaaacctgaggaagaatgcctggccctgaccagacaaccaaaggaaccaaatttgctccagataaagctggctttcaaacaatatcagcaaacgaggcctgcagattacggtgatgggaaaccaatttccaagaacttgattcttcatcagaatagagctgc

SEQ ID NO: 79634 - DNA, 734 bp, Zea Mays
gaagaatcaatcgaaaaactcacacgtgcgttcaaaaaatctactatccctagcttctgatcacatgaggctagcactgggatgtctatgcctaacccagcggctgcaaatgggcccatgcaagcccaaccattatatggtatgctgatgaactctatccaaggccaccatcgacaccaccttcattatacgatagaccaatgacactgagcacgaccggatagtcaggtacgatctcggaccgttcgaccctatgacgtaccgcttggtgcctcatgctagactttccagtgccgcgccaagcctagatcttgataggttggcaatgcaaagcatgaccgaacagtctgggcatgaccatggactgtccgaccatatcaaggaccgtccgccaccctacgtcggactgtctgatgtcacatagaaccatttgaccacctagttagactatctgggcacacatattcagaacatgctatgtgtaacacttagtttttccacacaccacaacagtaccaccctcctctatcttcagcgcaccaaggctgaagcatggccgtacttagaaccgaatatcttttgacacatagggagttggaggggttcacaccaccacacgcagattatcatcatatggataaccgacataacaatgcccaaccacctgagcatcacgtcttagattcaatcctttaccatcaactaccatggataaaattcaggaagaaagagcc

SEQ ID NO: 79635 - DNA, 990 bp, Zea Mays
cgttgttatcctagtaagggtattataaatgggtccatgtaaaatttgggctacaatggcacctatttacactgttgtatagaatatcctcgggatgtagaaagtaaccaagggtaggcccatactttgagatcctaccctttagttaccaataaataccctcgccagaacggtgagagggggacattgacaagacacttgagagccattatttcacatgtctcgttattgtgccttcattgcttctcttgttcgggtctcacctatcaaaacccaacaccttcttcatggtactttgtcatagatagtttactgcactttgccctctgaagatgccactcatcctgattatgtgtgccaccttaatcattcactttatggatttaagcagacacctcacgcttggcacaacaggtttgcttcccaccttctatagcttgattttgttgtagccaaatcagacacatctctatttgtttatcaacatggagcggacatcgtttaccttctactctatgttgatgcattgtactgatagcttcctcaattgttctgctctcacgtatcattagtgtccttcaacagtagttctttttgaaggatcttggcactcttcataacttatttgggtatgcatgtttagcacataggtttgagtttcttcctctcccagtggtagtccatgattgagatccttgaggatgctagaatggttgggcgcaagccatgctccacgtccattgatatcaattcgaagctctcaacagatggctagcctatacctgatctgacgaatttctacaacattgttggtgctcttcggtatctaactttcactagaatctgatttcactaggttacgcatctcttaaatcattcatcaagtgtatctccacatgcatgatccccaggagccacaccttgcacatgagtttgtttttgcaactctgtcctcagtaaaacttggtcgtctactttgatgttgattgg

SEQ ID NO: 79636 - DNA, 386 bp, Zea Mays
gtttcttgatgacaaaacctcatctcttggtcctccaagtatcagcctgtggtctcccgcttcggtgctaagggctgaagctgagtattaggatatcgctaatggggtggttgaggcgagctggctgagccagctccttcaggagtttcatagctcccttactaggagtacgcttgtctactgcgggaatgttagcgtcgtgtacctctccaccaatcccgtccaacaccagtgtaagaagcatactgagatcgatcttcactttgtttgtgagtgtgttaccgttggggtcggggacgttcatttcctgcacatctcgacgatctcgtggttcaccaatgtcttcaccaaggggcgtccatcctcagtgttctcagagtttcgat

SEQ ID NO: 79637 - DNA, 512 bp, Zea Mays
ctagtttctcataattgtatcacgaggtctcttaattgtctctgatccttaaaaatcgaaccagtcttaggggttgtacaagccctaacgccgcaacagttctgtagttgtttctatgcagcgcagttgaatgtggcaatagttctgtagttgtttttgtgcagcgcaatttcaacaaaaatcgaaatgacgctacattggggccgtcatcaccgactcacaggcatgcccagatgggaaggccgataggccaaccgtacctcgatgaaatttgcgcaagtgtctatcgcgacagctaacagactatggggaaagaagcttgatttcagacactgagtggcctttcatatgatcactcgttgatttgtaaaatgaaatgcattcattcatcaaaatctgatggaccacatcaatcctcaaaaaccaaacacccaagagattacaaacatacatgttatctactcataattcactaggggtatgggaacctatagcttactcgaatatttgtc

SEQ ID NO: 79638 - DNA, 562 bp, Zea Mays
ttgaacggtcctactcatgagcctcaacccatcgctctcaaggcaacgaggagtaaggaggcactaccaagagtagcattttaatttttagggcactattttgaagagatttgttgaagacgctaggatatatcgcatgtgacttacatataagggaaaaggaacatatctggttgtgcaaccattagagcaggatatcgagccttggctcgcttgttatgaaccaagctagagaatcagctcagcttgtctcgttaagctctcgagccacaacaaaaaactatatataaatatgtatcatactcaaatgctagtttatttcaaaccgaatttaacaaattgtcattgatggttctgctcaaggatcgaatcaagtccaattcactaaatgcggtttaataaatttagtatagctatgcaagacatcaaggagggatttaggggccatttcatgtgttgatatcacgctacaacgacgtcctcatcatcgtcctcgtcaaaatcagtttctcaactgccatctcatggcagtgaccatttgaagcttcttcgttagcttcaa

SEQ ID NO: 79639 - DNA, 630 bp, Zea Mays
cccgacgaaggattctgtactgcagcggagtgcttccgtcggttgatgcagctaacctaatttcagaactcggaatgtgggccgtgagcttggagtcaacattttcggtgatggagcggcggaattggacttgcggtgggtcgtggacgtaaatggtttgaaattcgtgcggcgtagtatgttattccttttcatttgggatggctgtacagattgagaccctataagcttctacgtaggtgcggaaaattttgcttggtaacgagagacacttggttgattgtggtgaggagatagatgtgacagtctgttgccatgctcatttctgattagcaaacagacttgtttctatcgaccagggaataggttggactttaaattgttaagtctgaactttggttttggtctgaagagtttagttacagtacgttctttgttttggtttttaaattctctcttttttttcccgttattcactaattcaactgctagcattgtggatgttggtagtttctggttgggcttttttagggtcaagactcaagagaggggaaatggtttttctacaaagcatctaatctttttaaataaggaaagcaacagcaaatattttagataagacaaattatt

SEQ ID NO: 79640 - DNA, 489 bp, Zea Mays
ccgcgcatcgtcatccaaattcccggccaccaccgttgagccctataaattgaagtcccaaccagccccgcaagatcgtcacccacccagccaccgagaatcgttagcaatcgttcgccagagctcgtgaatttcgaattctccccaaactggtctccgccaccgcatgatcaagctcgccgtggccagctcgattcaggttagcccaagttcctctgctgcttgttctagcatccttaggtaccccgcaaacccctcgacccctttaattgaaccggatcgctagggattaccgggaacgcgtaccattgtcctcatcgtccgcagttcacgtggacagagcttgatagcttaccaattgtgaaattaagttaggggaatcgttcggggagggttccaatccggtgtacatcgctcgggagcaccggtcgttgcgtaaatccaccggcacaacctcaccgtagttcatcctccgcgctaccgtcgtcg

SEQ ID NO: 79641 - DNA, 356 bp, Zea Mays
tcaaacttcgagttgcgtatttgtggtcggtgcatgacttcatggtgtatgctatttttgtcggttagagtacacatggtagattgacatgtccatattgcggttcagatacagattgcttccgtcttgctcatggtggaaagatcacttacttcgattaccattgatgctggatgcccaagaaacacccctttaggagcgataagaaaaactttataaagaacatcgtggtcaccaaaggaccaccaaaatgtctgaacgcagcagaaatatattctcagctaaacaaccttgtcctaaatgaaaagggggacaagtaccaaggattcggagtggaccacaactagacacatata

SEQ ID NO: 79642 - DNA, 558 bp, Zea Mays
agggtggtagccgtacgtctcgtggtgtcgaacgcgtccgctgagacggtcatgaactgcttgggttggcggttgtctcggagacgatcgcccaccgtgggtgccctctctctggtagccgttgggtgcaccgaggtctccctctcgaggcgagagggccctagctgattacttgaggcaggatctcaaagccgagaggcagagctctcggcctgctagactgcagcgctttctaggagttctcagagttcgtagtggatgaggcgtccctcgttggtggagggctccggcatggtgcagagtaggagtgctaccgctgtgagactttgactggctcggttgaggatgggaaatgcgccggcgtcgacgtcttccattatgcgacactggacgtcacgtgcctttgcgcgtgcgcccccatcgagggttttgttggcggcttctctctctagcgcctgtcgtagttgctgctgccgttgttgttcttcttcgagcttatcgtttagctcccggagttgctcgaggtgagccatgtgtcttccaggaggggtccgggcg

SEQ ID NO: 79643 - DNA, 495 bp, Zea Mays
taaaacagtgatgtttgatatgtagttgaaagttgctgtgcaacagtgcaagtcgcagagcatttctaccttttaagatattgtgggggctaggcgatgctaacatgctggtgtttgtagttctctaggcagttaatgctaggcagggaaagggggtgaagagggtttactgggaaaggtgcaaaattgagtggagagttgatagagattttttccaatcttttgctagggtgtacaaacatcataggcttctaacattcatattcttgcaaaccactgaattattcaaaattgattctgggttaaggaacatgacattggacaaattggttttagccactcagctaagattatagcttactacctctagttacctgggtagttgcttttgtctggcatttctaagaaaatgttggcagctatagtaaatgcacaaacatagctgaatcaatgaacactagatgctagtaaaactcttgtcacctgcatttcaga

SEQ ID NO: 79644 - DNA, 567 bp, Zea Mays
tttcctttacgttaccctttgaattatcaggaatgtccatgattgttgcccaatgttcctcgacgatattattttcagtgtgcatcatgtcaatattgtgtggaaggagaaggtcatcgtaatagaggacctgagtcaagctcgacttatgggtccagatatgcttctcaccatatcccacaaaaccaccttctagattaaccacgagaccatctatctgttgatgaacttcggcaccagtcatcattgttggtgggcggtctatcactacgacacctttcgtaaagttcttgatgtctagtcagaatgcatggtcaggagggagaaattgtcgatgtttatcgaacgatgaatatttgccaccgttcttcaaccaaatgaacctaagatcttccttgcaaactgcgcatgggaacttaccgtgaactcactaggcacaaaatatcccatacatcggatagtcatgcatggagtactggtaccaaacatgtattttgaagtttgtctttgtagctcggttgtatgtccataccccttcctcctaagcacgaaccaattcatcattca

SEQ ID NO: 79645 - DNA, 296 bp, Zea Mays
ccgggttgtaaatatgttagctcagtgatggaggacctggtatggccaagtatggcagctgccatacctaaacttttgacagtcttatatcttcaactgttagaataaaaccatgtctattgcagtggttgcgctttggtgtttcaattagcacatcttgggtatgattcctatagtgtgcgttatttcccccctttttctatctgcaatgttcgattcctgcatgcaccatttcctcaattttgtttccttttttctactagctactagttatattgccataccttatatttctt

SEQ ID NO: 79646 - DNA, 480 bp, Zea Mays
gcgggtctttgcctgagcgggaagtgaagggcaaagcccggacatgtgtcagcgtcggacccccacctgcgctaaggtccaccttgttccgggaccttgctgaggttcggatcttactcggaggctccggacttacacgtactgggatgtgtccttctgtggcggtccggacccccatgatacgtactgggatgtgttgtcctttcttgccgcgtggcgcccttaggcctgcccacgcgatgaggtcaggcgccattctccgtgtggcctagagtcatcgtatgggtgcggcgtctttatgctctagaagagggtacccctaatttagggtactgacagtggcccccgggcctgcctcaggagaggatacgatcctattggtggggccagagtcttattggtggttggcctgctgctcctgcgcgcctgttgatgcagttgctgccggcccgcctatggtcacgccggcggccatgcctg

SEQ ID NO: 79647 - DNA, 292 bp, Zea Mays
gaggtgatggtgtggtactgtggctgggtactgcatgcctatagtcaggggggcgtacttactacctgtaaaaaacgaaccaacacacggcaagaggcagtcgggtgaaacggtgacacctacgtagacgtgctcccgtccacgtgatgccgtcagtctgctcaccacttggtccaaacaaatcaacccatcccgttgcattttcaccattgccgcgacctggcggggttcagttcaaaccgccacctgctgctcttgagattgaagctgtgacagcgatcgagttgtcttg

SEQ ID NO: 79648 - DNA, 833 bp, Zea Mays
ggttactatagcaagatcaaagtttaattatatatcaacaactttgtcacaggaggataaacaagttatcacataaaaatttgagatctaggccctgaaaacttgctctgtcagacgctctgatggtgatcaccatggtataatgactgaataagatcacaggttcagcccccctcaccgccggtgacctcgcgaccagattcgcgtcggcgtcacgatttacgcccggtcgaacgcggataacgatcctcggtgaaaaatcgggtgctggggatgagcttgggacactgttctgccctggccgccgtacccacttgtctcacggcgatccagataacctcgccggaattggccgcgtgccgctcgggtgccacgtgcctaaacactgtgcttcatcgtagtgactcgccttagcttgtccggtcatcgctggtggtcttgccacggtaaccctgtaccagtaactctccccctctccggccgccagcacgccaccacaaaaatggacgccaccgcccttggaacctataaaacttagtaatcacacacccaacgcaccagcctgtgcctcagattgtccaccagagcgctccaatttttaagtccccccaaatcagtcaaaactccgtcgtgagtgaggtcaccgtggctagctctttgcaggtccattcacaacctccttgctctcgtttcaatacccctgtgtgctgtagatactcatcggcccaaccaattgaactaaacctgggtagatcaccaggaacactctgaattgtcctcggtttgcgccgtcaccgtggacagagtgattgtgagccagaaccttgcaattg

SEQ ID NO: 79649 - DNA, 579 bp, Zea Mays
ccgcccttcccctaagggaccctgttggtactgagaacggtgggcccaagcaatcgggagcagtgtgacaggtggcaaataggtgacacagaagcatggccaaatgttaggcagggaattgtagcgtattgttgtgtgtgtcccatccgtgtatagaaagggtgtatttataggtaactggggtgggtaggtagactaatgtaccattatgcccccggttacctgctacattcttggaatattccacacaacggggccattacacaatggaggatgcttaaggtcgtcgcctagatgttgatcccttcgccttgtggagaccgccaaaagcatcttcgtcatgaagttgtcttcgtcctgtgaagggggccttcacccgtagcggcacaagaaacggggagccccacttcttgcatagtcctccacgcagttgccttcgcgcgggggtagtcgaggacctccttgctaacaggaaacgaagtctcctaccattctggtcctttcattcaaacatggttaactctagctaggtaagtctaattgaggttgggtttggcctttgctccaacactagcccca

SEQ ID NO: 79650 - DNA, 333 bp, Zea Mays
ggtaacatggttggacaattgggaagaagcccaatcttgtagttgccaaactttggtaaacttgtatctggtcgagcttcatgtaatgcaatgctaagtcttctcattattaatctggaccaaggtattttcgttccatttatcaacaattgatcattgtggatttgtttccaggtagtgcctccaagcaatggcccataaggatttgaatctaaaatgtctattcgacgaagttgaaagttgattgcataaagggtctagtgactacgacgtagcataggaaccatgatctgttaacatatatgtataagtttatgaatgaacaataatagg

SEQ ID NO: 79651 - DNA, 654 bp, Zea Mays
gtgccgaagctaattgaggggtccgctcctatttgtgagccaagtcgctctgtgcctatcatagctagaacaaatgtgactgaggagccggaagtggagaaaacatcagaacagttgaaggcaccaagtccaccacacgcaacggaattgccgaagccatcaaagatccccgcatcaactccaagaaaaaggagaatgactagtgtgctggatgctgtaatggagtctgtgaaaacatcaactcctgcttctgccgaagcacctaggacggaagccaaagtttcaaagaaatctgacgaggccggaatggcgcagactatttttgaagctggacaatcagttcctgccaaagcaagatcttcggaaatcgcaccgataatcctggaaaaagagggtgcctctgagaaatccaaatctcctggtcctggagcacctaccaaagagctgtaatttattgtgcggtatgcttcggggaagcaattatcagaaaagcaaattgtcgaagtatgcaaaaatctaaagtacccccgagggtccttggtgtatggtggcgatgacgaagatgttttcctttattgtctgccagacaatagagcgataaatgtctgccgagaaatggcgaacaatttaggctatccgaagcttgagctcgac

SEQ ID NO: 79652 - DNA, 524 bp, Zea Mays
tgaatttttttggcaatgccaagccatcagggaaagcctccattagtagatctagtagcatatcaaaacttttatctgtccaccctccaagcaatttcaagtgaagaattcttattaagacatgcaactttgagaacttcttataccctgggtatagctcttgggtattatctatcgctaattgattgatgcttctaaatctacgttagtttcatctgaaccatcagatacttcaaaatcccctttatcatctagaccaccagctaagtcatgaaccaaattggctatgtcatcttcatctgaattgtttacaacctctatatcaatgtagtcatgactattaataggcacagagtctctttctccatgataagtccaccttttgtatccctcttgaaagccatcacatatcaagtgcgcacgaacttcattttcatctttccatagagaattaacacattttctacatggacatagaattttgtttccacctatagaattgctaaacgcaaactcaataaatc

SEQ ID NO: 79653 - DNA, 666 bp, Zea Mays
ggcttgcgctgaaaatatttttcgtgctatcaagctttgtgctatgtttgtcgttttagctttctacctctgtgatcgtaattgttttttcagcttcagctttctgttgtaatcatcgctgaaatggccgaagataagaaaagtgtggaccccacgctagctggtttctatgaagccatggataggaccaatgttgagaaaatcactgatgagatgttagctgggctgtctggggactaaagcgacagcgagagttttgatgttgagagtgacaacgaagatgccaaagatcggccatggaggcaagtcatgttgtttttggaaaatccactgttaagcaagggtagattgaaacaatgaagggcaaatatttctatgatatatccaaagtgagggctggaggagagaatattgttcctcttcatgaggcagacgaaatggtagtattcaaaagttttaagaaggctgggtttcactttcccttgcataagatgctccatggctaggccacacatgcccctcttgtccgaatacccttctccattctgaagtatccatttccaccccaagtcatcccccaagagttcttcatcagccagtacttggtactatcgctagattcttctcgtccacttttgtttcgtgcgtcgttaccgcagaaccgaa

SEQ ID NO: 79654 - DNA, 446 bp, Zea Mays
tttgttgtattaccatcatttgggcggcaaccacttgatcgattccaaccagtggaggatctagaggattcatttctgtttgttgttgcctgataatctttccttcctggtattgaccacgagagtcagaagcatatggtaggatagttttgcaatggaaagtatttgtaagcagaattaataggctagtaaccggttatgatctgaagattctttagcagggcttaatctttgttttatgaccagattggggtaactagtcgtataaggtgaatgtccaaaggtaggatagaactttgcaagataagatagtctacatgatgtaggttaaaagtttgtttgatgttaggtggggatagatagattataccattcatcatgactctaaggttgggttaactcttttgccattggttgagttggtctaatgcactaattttaggttt

SEQ ID NO: 79655 - DNA, 295 bp, Zea Mays
gagaagagaaaagtgggaaaagaagaaacagacgatcagaagatgtgtgaagacactagcaaggcaggcagtctatttatagaggccagaggcaactgctcgtcttctaccacgatcaccgaacagtcgcacgtattcaataagcaattcaaatcatctggaaacaagtcaggcagcagacgctgcttcacgtaacacaacaccatttggactaaggtcaactgcttggacgaaatgattacaccccgcggtcacatcaagttactactcaaggatagtttgctaaatgctcggc

SEQ ID NO: 79656 - DNA, 556 bp, Zea Mays
gttgctgtctttcatctagtgagtgaatgctgtcactggtagacagagattcaaattggctggacaaagcacccatattatcttgaaagctttgatccatgttgttcattctgctcataattggattgtgcacagtagattgattatgagaacgaagatcagtgaactgtgtatgaaccccatccagctgagagtcaacaacggtaaatcgatcatgcaaatcaaagaattgaccatcaaatgtggattgcatgtgatcaaaccggtcatcgacatgtgacatcatgccctaaaactgaccatctatatgagtctggagtccttgatgcatttgttgaaaataaggatcaaaatagccaagtgtaggctgccagtactgtccttgctgcggtggaggaggaggaggatgaggcatttgctgagcgggatgcgcttcaagatgagcatcaaaatcatctccctgagctccctcatcatcaggaaatggtgtgagaggcctggtaagaaaaccaatttcatttttgaatggcctgaacggagtgtgagcagtttcaca

SEQ ID NO: 79657 - DNA, 441 bp, Zea Mays
ggcataatgaggcatggaattttcactccctcaactttaatagggaatgttggttaatgttgttggcttttccttttgattattggtcacatgaacacattcagaatgctattggggctttcgggatgttgcttatgagggaagcggatcattcaaatataacaaggttattgctcagggctccctcaactttaatagggaatgttggttaatgttgttggcttttccttttgattattggtcacatgaacacattcagaatgctattggggctttcgggatgctgcttatgagggaagcagatcattcaaatataacaaggttattgctcggggctagggtaatagcgcttgaagaagtgccacattttatagtcttttctgttacagaagtgtttcaaggtttttctcggaccatacaatgtgatatcattcagaatga

SEQ ID NO: 79658 - DNA, 309 bp, Zea Mays
cgtgaactcctggcttcggtgtttgaggcgcttggcctcgttgatgtcggttggatggtagtatccctgcaggaacagggttattggtgcccgccagtcttcggtcatgatgaggttgactatgcggtggccctcgctgtcattggttatttggagcccctctgggttggggacggctggcgtgccgatgacgtggtagaacacgtcggagggtagggccttgcccctggcggctgccttggccaatgcatcggcctcctcattcttggctcggtccacgtgttgcaacgtaaaacccttgaattgtct

SEQ ID NO: 79659 - DNA, 560 bp, Zea Mays
tcctgataggagacacggatggaaagattaaagtgaaccatgtgcccttacaaaactaaaaaagttctaaagccaaagaaagccaacacacattgttcatattatttctggcacctgcgaaagttgtacaatttggcacgaatatccgcgtggtggaacctctgtgtttaagtgtaaaccagtgccattggaaaggtaggagaggtgcttaggccaattttgagtgatagtttcatcacataattttcaatgttgccacatcatccttattttccccaacattcgcctacttcatttatgtaccctcaccagctcgtgcacagctctcctccattgaaggtcacacaacctccctttgtgttcttggtgatatcttttgagattgggtttagaaagtgggtgagaaagcaccaaagcaagaggaaaactttctagcgccttggttatccctctatattggtgttcgagtttattagtcatggagcttggctcctgacatctagaggttgtccagaagctcccaatcatgagcattgaaagtttgtaatgcccttccatcg

SEQ ID NO: 79660 - DNA, 325 bp, Zea Mays
aaaatggaatttctatgaattttacaagtttctagaattgtttttgtattaaaaactaaattctataatcattttctcggtttttaatatccccaggactaggcctcgaattccagaaaactcaggggtctcttcgcaagaagtacgagacccagtgcacagtcagataggatggcgggttgatttgttatttttccaggggctctttaataaaaatgcgccgcgaaggggtatcgggtgttatgagccgttggatctaagtcatgcggccgagattaggtggatcactatccgaaaacgttgagcactgagacccactggatcc

SEQ ID NO: 79661 - DNA, 393 bp, Zea Mays
ataaggacatgtcaatctaccatgcatgctccatccagagaaaataccatatgccataaaatcatgaaccgggaacaaatacgcaacctagagattgaatttctacttcttaaagcagtcataggcttccactccttctcatagcttctttaactcttcaataagtggttgaagcatcccattgaggcgtacgcaggatgctcaggcccaagtacaacaagacataagaacataaactcatacttcatgcaaagtgtaggtggaaggttgtacggtatggcaatgataggccaacatgagtacaacacagtggtcatattgaaaggcgtgaaaccatcagttgccaagccgatacgaacgtttcttgcatcgctggcaaactctggatcaaag

SEQ ID NO: 79662 - DNA, 458 bp, Zea Mays
caaaaactttggatgatacaatcatactggaaaggtacgaaggctcatgtaattggataccgcaccaagtggcctattggctggactagcgaatggttttacttaaaagctgacaagaagaaaagggaaaattatgaatatggtgatgagtccttcaaagttgagcttcgacatgacgaggtcgttatgttttatgaagattggctcccatgcgaggtagccaacgtgcaattcagagttgtggtagaaaaaaataagcactcgagatgtggttcaagaatatttagcgaacaaagttcttccaacacaacatgggttggggatgccgaagctaaaggacaaagggaacaagctagaactagtgagtctactgtatcgcttcaaatttcaagataccttcaacgacccctatgccaaatggctggagatgatcgaaatgatgtgcaacgaaattctag

SEQ ID NO: 79663 - DNA, 801 bp, Zea Mays
cgggtataagtcctcattctagaaagttgttggaagtgaatacaacaagttaaagggagcatcatacctgaactgaattctatgtagctgggaaggctgtcgggatcttaccaaagagcaagttaccaagtttgtgccatatcaccagcaagtgatcaacgaaaaccacagtgccctattggataccgacaaggtaacataacctgattccattatattatgcatgatacatgtacgttacacaaaaccactttaacatgatacattttatagattgatgctgccatcaccttgtacaataacttggagaaaaaggtcattcattgtgtctcattgttgtgagggctcaaggatgaagcaaaatggttagccttggaacgtggcaatcaaaatgttgatatgttggtaaccaaaaatatagattccacccccatggatgatggcagttcatgtccagtttcgtagccaataacaagaggccggtcgagagggacatcaacaaatctaccaagaggaagacgtcataaggcacgacattcggtagcgcagagtacatcttgaagatgtcggatttgacaccgaagaagattggatactaggagaggtcgaatggcacacttggcgacaacattcactaactcgtttaaatagactggcttgccatcatagacaagaaagaggagtgggtggtagaactcatggctatggcatgggcaaagagagatggacagattattggaatcgatttagaatcttgtaatccaacactatggtcattttataaagccatgaagtgtgaga

SEQ ID NO: 79664 - DNA, 733 bp, Zea Mays
gaaggcaactcaactgtcgccagctctcaacacttcaacaagacaaggagcaccacaacaagcaccaggaggtcgtggccaggcctacaaccgtggaaaggtgaaccacttggaggctgaagtaatctaggatgctcaggacgtgacaataggtatgtttccagttgaatcctatgtagcaaaagtattatttgatactggtgccacacattcttttgtttctacattatgggtataagcacataacatccctgtagaaccaatgattccacctttaagagttaattcagttgggggaaagttcattctgataaaatgtgtccaaatctaaggattgaaataagggggatagacttccccgctaacctagtagtaatgggtactcaagggttagatgtcatcctagggatgaattggttgcacagcaaccaagccaccgtcagttgtgacaagaggacagtaaagttggtgtccccatccagaaaggaagtaataactaaactgtacatgcctgaactagaagaaggagcgtatcaccatttgtcggaagatggcaaggaggccagctagattgaggatattagaattgtgtcgaagttccccgacatgctccttgagtatttaccaggcatgccacccgagcgtaaagttgagtttgccatagagcttatccctgacaccgcccctatttccaagaaagcctatcgagtgtccagaccagatttggtggaac

SEQ ID NO: 79665 - DNA, 298 bp, Zea Mays
gtagaatttatgttcggcgggagagctagcttgaactctctcccattaatggagactctccatcactcccctagcgtgtcgtggtgtcacttaagacactatttggtggtgatgtgacttatcatggctggtgtgggtcagaagtgtctgcctcatttttatactaagcgggtacatgtgtgcgcctacctgacgcgtgacagagggttgtggaactagggtccaaaatgcattggtccctattgtgggtcttcatgtcttcgctttgcagagttgctttgtgggagttgctcggttt

SEQ ID NO: 79666 - DNA, 763 bp, Zea Mays
gcgcaagtgaggagagggggaagggaagggaagggaagggatgagggatgattcaaataaagtagttcatggggaagggagttcagttatccaactatctggaccgttgattttgatagtgtgttaagtttgagtacaatatgtttggtgaatttagtgggataatgagtatggggtgatttggttgtgtgacttttgcaaagtttaaactgatagattatatagtggtaagagcataactctttgcaattatataaatatatgtaactttctatctttaacatatactactttatatctaactttctatctttaacgtacataccattctatatttaacgcaagttttttattattattattttcccggccggtcccccctcccctcatcaccaatgcttccgcgaaacaacgctccgaattcaacagtgccaaaattaagtgacacaaccctaaactttcatatgtctactatatagcatgtgttacacacgatctcgaggagatgatcgatgatggcggtggcacaagtgaggagagggggaagggaagggatgagggatgattcaaataaagtatttcatggggaagggagttcagttatccaactatctagaccgttgattttgatagtgtgttaaatttgagtacaatatgtttggtgaatttagtgggataatgagtatggggtgatttggttgtgtgacttttgcaaagtttaaactgatggattatataatggtaagagcataactcttttcta

SEQ ID NO: 79667 - DNA, 626 bp, Zea Mays
gttcgtattttttatgaggacgaagaagaggaagaagaagttccgctaattcgtaaaaatagccggtgttacagaggtagtaggggggatagtgatattccttctccagctctgtctgctcttgtcagccttcaagaattgtccataacggattttgatcaggtccttgaggatgtcgttcctgaagatatgctgtcaaagccgactgctggcgacatgatggatgtttgctctgaaattctagacgtgggattagaggtatcttgagcagtatctcacgcatcgtcaactttggaaggcagtcttcggtgtcaaaaagttggtaaggattgctcgactcccatggaggtgactgaggatccttcagccttaaaggtggctgttgtagaaaacatagcccccgagggtggtgctggcggttacccagcccccaagggtgtcgccggtagtgatctggctctggtgggtagcgcgagctgcaacccagcccccgagggtgttgccggtaatgatccggttctggtgggtggcgcgagctacaacccagcccccgagggtgtccaagtgagctctccttcccacacctccatggatgtccatgtcgggtcgtctccaccacgatctga

SEQ ID NO: 79668 - DNA, 1325 bp, Zea Mays
cgcgatagaagaaacgcacgcgcactcgtgcccgtgttacagatttgcgtgaaggcccctaggtattcgaataaccagtaaagaacctcaggtactattcacttgtctcactgacatttgcacaaagacccctggacttttgtttcttcatggctctaggtcctcatcagagccgcgtcgaatacacggccggactagcagttccccgcagatggcgacccctccttgaggcaacgagcactcggacaccaagcgtgagcctacctaagcatatgccctcacttaattggactgctccgaccctaattgacgcttgttcatggctacgacgatgctagagctccggtgagcgtgttccggacaaccaaacttggtagcatttaaattggagctagggcgagtttcacttactcaccagagattgggtacacgcgtgaatgtgaacggagcgggtgtgggaaagtgggtcgacgtgagtgcgctctcagacgtgttctgcggcggcaaggtaatgttctcgatgctttatcgtggtagtattcaatcggttggaccgacgagctatgttaaccttcaaggatgctaaaacatgacacagaggggaatgaacggacctaggaatggttgatcacggccgggtgccacacggcggcgtaaatgaccaatttggaggaaaaccggaatttgtgagctttggtggataattggaagtgaggaagggtgcgttgggcgtgtaacaagagggcggagcagggagggccttcaatttatagtaactacgtgaggtaagacccctagtggtaaacgggcatccacagtgacatattgcgatgtggtaatgtccctaagcacgtggcatccttgtggcgagcggtggacgccgatgatgacatctcggccaggcatgaagcaagtgggtatggtggccagctcacaatcttatccgcattcacgatcttttcacatgcccggtaatatccgcgtcgatctgtgcacaaatcttcacgacgagctcgaatcaccgcgctcgatcactagcggcgaggtacactacaccaaggatcttcttcagtgcactgtaccatggcgatgttcattcagcgtgcctgacaaagcgatatgaggagttcctttctcaaatttttatgtgccaacttgtttatccgactacatcaaagttgttgtccatcatgccagcttaaattttgttataaggttcttgctcatacctccattcgatcaagcataattcggttctaaagttgatctaatgccactgtcagtctaactttcagaccaacacacgactgacagcccaacttcca

SEQ ID NO: 79669 - DNA, 549 bp, Zea Mays
cgtcctcctcttcttcatgtaatcctgcctcttcgagagcgataagctcactcaatctagatgtgtcgtcctcctcctcctccatcagctcaaccgtcgccattttatcctgaacatatcttgcatgcgcctcatcggccaaatagtttacgccacatccaatctctgcaaatataatgagcaaaataagttagcaaagtcaagataaataaattgtactaacataattatagtatcatttttctcactcacttcccttgaggcgatcagcaagattatccaacatctgtttctcggcttgagccgcttcccattctcttgcatcctgtgctctcttctcatctgccgccttcaacctcctatactctgcacgcttcgggctatcataaaaggcagattttgctttcctacgcatatcgcgtatgcgatcgttaatgtacgaatcgacgagttgagatccacaacacatcttctgtcccattagtctcttggactctattatgcgcatcacctctcctttgtcgtcgtaactctcccaattgcatttcc

SEQ ID NO: 79670 - DNA, 287 bp, Zea Mays
ttctttggcaacatatgattctccgggagaaccttgcccatcagttggaagatgtcgttgtaagcactgtttgaaatgttgtgcttcgactttatcgccattagtcttgagagtcccaagaactaacatctgagtgtgctcgtgcagtctctcttctcccgtggcgagtagctggaagaattcatgagcatcacgtggaagctgccccggctcctcagcgttcatttcaacctccctaccaagatcatgcaacatgtcgtccatcctatcatgatcgtcatcaagtt

SEQ ID NO: 79671 - DNA, 812 bp, Zea Mays
tggtctctgtcgatgaggtctttggtggttggttcgtctacgtcggggacgactgaagcgcttgtccgtggtgacccatgttcgattttctgtggggtcatggcctctgatccgtatagcaggcgaaagggagtgaacccagtcgcccgacattcggtcatgttcagcgcctagactgcttcaggtagcaggtcggcccatttgcccttcttgtcgtcgagaagcattttcttaatgatagtgaaaatcttgccgttggcgcgctccacaacgccgttagattgtgggtgatatactgaggcgaaggctagctttgtgccgatggagaagcaaaaatccttgaaatcctggctgtcaaactgtttgtcattgtcaactgtgagctcagacgggactccgaatcggaagataatgttttgccagaaaaatttctgtgcagtcttcaacgtgattgtggatactgcccttgcctcgatccacttggtaaaatactcgacgacaacgaaggtgaacttgaggtttccttgggccgtggatagtggcccaacaatgtctagcccctagcgttgaagaggccatgtgtgggtgatcagctttgtgaattgcgaggggttgcccgagcggggagagaacttttggcaggcttcgcacgacctcgtgactcaatttgcggcgtagataatagcgggccagtagaaaccttgacggatcaccttggcagcgagggccctaggcctcgagtgagagccgcaagtgccgctgtggacttcgcgcaggatctggatgccttcggtctcggagacacatttgag

SEQ ID NO: 79672 - DNA, 358 bp, Zea Mays
tgagcagctagccaccctccttctgcatctgcttgttcttcgtcgagctccacggggccatggaagctgggcctgtagcgcgctggcccatcatatgaacgcacctctgcgctcgggagtcgggaggcttccttcaccaagtttaccttcgggacaagatttacatgccttttgcagatccacgtttagtttccaatatggatccaacatcactaacatagcatcttgactgagaagggaagggacattgtgattagaaccgattcatccagataatgaaccctcgactatatacggggctgcgagcgacgacgaccctaaggttaatgccgaattcgacgacgacaccgccaatccg

SEQ ID NO: 79673 - DNA, 485 bp, Zea Mays
atgctatttatagaagccgggggtgaccgtccacttcctaccccattcgccgaacagtcgcaagaattcaataagcaattcaagccgtttgaaaatgagtcagtcaacaggcgccgcttcgcgtaacacggcaccggttggacctaagtcaactgctcaggcaaatgattacacctctccgtcacatcaagttactactccaggacagtgcgataaaacactctgcacaccaagacaccccttgggcacacccattgggtgtgtcacctagaactttcaaagattttttgaagaagtgatatccacaaaatatatgcaatgaatgtaccacggcaaaagaaggagatcgactgagatggaaggaaatccaaatgtggctactgaagcgcaagtctaatcaaaagaagcattggagcacagagcatggtgatgtccagctgagagccatctgcctcaactagccggacgtccaatccatcaccgat

SEQ ID NO: 79674 - DNA, 883 bp, Zea Mays
ctcggtggggcaacaggatcgacgtctcttggacgggccacgctcttggccaacggctgggggctctctggctggtgcccacatcctatggctagggtctccccttcggtccatcacatgtctacgatcggtggcggtggctcgtgcggcttggacccatgggtgatcttggtgacttttttccgctcccgtgtcttcattgctttgctagtgtgatgcttagaaaccttgtgacgtgagtcgtcttagcgtcgatacacagattcgcttactttgtgatgtgatctacctttagatgtgtactatggactagattatcgtatgcctatcggctagttcgagaattagtcctcatagcacccgacatctaaagacgagttgtctgttacagagtttgtggttgttgttatcagctaagattaggtagtataatagcgctggcccggatagtgggtggtggcatcgttgaatcctgatctttgacctcagggagatatccctaggcatgaccttagttggttgtgcttggcaatggccttgctggaggcattgtttgttggtcaaggattgactctctgtagtgaaagcctttggtctggtcttcagtggttggaccatgacaacgatggtgtgtgtattatgttctccttggagatgttgtctttagagagtcttcgttaggacccatgttttgctatgttggtggtttgttatgaagacaacagagtgtgacgtagttcgccatttctagctagttttggttggtcttttatgtgagtgtggttgtgtacaccctagctgtgtagaggccgggagtcttcttagtccaattgtatcccctggataatttgctaagtttaataaagcttcattttttaaaaat

SEQ ID NO: 79675 - DNA, 682 bp, Zea Mays
gcttgccagttcttgtcaaaacaacaacatttaccgacacagcagctacagaccatacctgtaacatggccatttgcatgctgggggctagacatgattggacccttcaagaaagctcagggaggctatactcacgtgctggttgccattgacaagttcaccaaatggatagagtacaagcctattacttctttaacatcagccaaggcagtgggacataatattcaggttcgggataccaaatagcatcataaccgacctaggatccaacttcaccagctctgaattctttgatttctacaaacaacagagtatccagatcaagtatgcatcagtagcacaaccaagagccaatggttaggtggaaagggccaatggaatgatactggaagcactcaggaagaaagtgttcgacaaaaatgaaaagtttgcaggaaagtggatcagagaattgtcgtatgtggtttggagtttgagaactcaacctagtcgagctctacatggaaataccccgttcttcatggtctatggttcagaggcagtactgcccgtcgacctcaggttcggggcaccgaagctggtctttgaaagcatagctgaagcagaagctaccaggctagaggatattgatgtgctggaggaagagcgattgaacatagtaattcagtcagccagataccag

SEQ ID NO: 79676 - DNA, 490 bp, Zea Mays
cttttttattgtgatgagactattcttgagttctctttcaaacatgttgataattagggcacccgatgctcatcttttgttaacctttccgttttgctcgcttcttttgctcgcttcaacgatccttgcctgcttcgtgtcactcgatgctcatcttttgttaacctctctgtcttgctcgcttcaacgactttgtgcgactgcctgctatctcaagaacctttgaggtcgtgctgcatttcttctctattgaatgactcacgcatgggttaatgacctgccgttttctgatggcattcctatcaatgtccaggtcaaggctggaactccaacatattttacagtacgtttcggatatgtgtgcatggatagacatcatcagtcatcgactgccaacggccatccccgcacgacgtggtcttcagcttatgaagcagcggtagttatcctcatccctgagaagcatagcgattggatctgatatggtttt

SEQ ID NO: 79677 - DNA, 584 bp, Zea Mays
tactggtatgactatgagcgcataattgtttattgctatgagctgcactgtttacttatatatattttgcttcaacctgtgtatgttggacagtgacaggatagctagataataagtgtgtctgtgtgcaaccggtgttgcctgtgtgtttgtgcatatccatgtccccctttggcgttggtgatctccctgtctccctgtgtgcaagtgcaacactggaagtctacaatcggtgctggcgtgctacactgctgcctgtgtcgactgtgtctttgtctgtgtgtgcatgagccatatccctgtctctatttggcgttggcgtcttgggctcttggatcttggcgaattgagattggcgatgtccctgtctccctgtgagtgtgtgcaaccggtaatagcagtagcactactgcagagaacctgaatgtatttttctgctgccagcctaccagtctatgaactatgatcaatgtgaatcaaaactttgtattcaaatttgtgagttagaactttgtatggctaagtgagattcttcgtatgtttttcaaaaatgttaatcagaactttatattcttccactttaa

SEQ ID NO: 79678 - DNA, 672 bp, Zea Mays
ttggattcttgatccatcccctcagccacttcagtagatatgctagattccggaacaatgctgttgactgttcgtgcttcggactgttgacttgcatcacgttgtggctgatcctaaaactacccttgatgtttctgattatatgacaaagttggagctgatgcgggtggttgaggcagggcccatctggccagagaatgacttgctgaagcaactaaagctgaaggctgctggtttggctattgattgcatacatactctggaatgtacggagaataatatgaagaagtatgaaggacctgtttcggctaattctgccttgcctgagcttcaacattttccttctgtttttggattgtaacgtgacaagttcttgttgtatggccttatcttctccacaaaatagacaggatagccttcttggctaagtgttgtatctccctctaaagcttcttcctcctcttcctcatcttggggctggcggtctaaaggaactctgttgtgtccctgttgattaggagtaactgtgctgcccttgagtatggctgttttttgtcttcactttggtctgggttgtggattgttctgacgtgtcttggattgaaccttcctcctaagccccttgtcatctaagagtatctgtaggcttattctctcctttgtcaaaaatcg

SEQ ID NO: 79679 - DNA, 419 bp, Zea Mays
gaagaaaaaaaattcacatactatgttcttcttacaacactcaaactcaagcaaacacctaggttaaaggacaacttcatcttcgcaattacatgaaagagggttcacaatccttcattggtcacttttggtttatcctcacttgtcagtgatcgagggttgggggaggttacacctctaccggttgtaaaaaaggaggtaccttgggtaaaacttgttaggaccatcaatccattgtgtaacagtagcaccgtccttgccctaaacaagttgatgccacaatcttataaaaaatttgatcacaaataccaagaaaaatgaaatgaaatatttataaacacttacttagactatgatcaccacatgtgttaaaagagataataccttgctctctaagatctatatatggatcaaataca

SEQ ID NO: 79680 - DNA, 326 bp, Zea Mays
atttttacagacattgaatcatgtccatattaaagtatacatgttgacacatctttaaaattaaaccaaaatttgtacagacatcgaaggcggcaacattgtttgcacacgaggagaacaaacctttccaatacatgcattgctggcaccaactgaagggagaacccaaatgggagagcatttgtagtggacaatcgttccgcggattgaatgcaaatccaattggctctacaggtagtccctatgctgacgcaactgaaactgatactgcatctgcaggattgacaggaaaacgaccacgtggtcgtgatttcagtaaatcagag

SEQ ID NO: 79681 - DNA, 278 bp, Zea Mays
gatttggccatgtgattcgggactgcccaaacaagcgtactttgctcattcgtgatgatgatgagtactcttccgctagtgattctgaagaaattgaacatgtactacttgctggtaccatgctggtcgaaaagttgtcgttacccactcgtaagcatccaaacccatatcacattcaatggcttaagatggtggtaaaataaaaatcacacgttccgtgcgtgttcctttctccatgggtgcttattctgattttgttgattgtgatgttattccca

SEQ ID NO: 79682 - DNA, 683 bp, Zea Mays
cacataaaaattggaaaaaatagagctccaatttgatctgtcagacaagctcttcactgagtcaggcgcactgttcatcggtcttcagaaaaatcgcgccgtggataagggtcagccctcgccggtgataagaatgccacggcggtcgggatgggctggcggccgcggtaaatatcctcggcaatgtggcagcaaatcactgaggtggcaggctccggttaaacggcggccaccgtgccatcacctggttctgtcgcgcggtgagctcgcctgcgcaatctaaagtccgcggtcctcatccaattctggccgttggcctataaattgcgcccgggttccacttctttatcacatcccgcacctccgcgatcgagcactcggctcaatttcaccgaagaacccacaaatccctctctcctctgttcttgctccgccgtgaagaactccttcgtggccagcgctcctcgggtcagtaattatcaaattgctccctgtttcagttagtctttgatctcttattgctcttggatgcggcaaattgaagtttggccgaagcccatcaccggaacgcacccgtgcgatgtaaaacgccgccatgacaccctttccgtcgccccacctttctgctcgtgcctagcccaaaacttagcatgtgcgtcatctctggtgaacccaggaacctt

SEQ ID NO: 79683 - DNA, 738 bp, Zea Mays
ctaaccctgagtggaccgtgggttgttattacgtaaacaaaggggtttatatgcaacttgcacgactgaaggggtatcaaggatttctgaccgtccaattggcaacaaggcgcccagattagattggactaggtcaagtctctcgcttctcccactactgctagatccagaatccacaactaggatctgaccaagccagagttcggtcgcaaccatcggatgaaatacacacggtacggattaacacgatcgttaccaagaccggtatggagcaggccgtacgatccaatatcaacgatcaagattttaaatactacaatctacttgggtgcgcacaatctggatccgatggtcacgatccaaggctcgaactggtatttcacaatatgatctaaggcattaatctgtgatcggacggttcccgatcgacatccagctcaaacaccctctcctacccctcttacgaccaacactggttagccacgcacattcctacggcagggccatggccggcgcgcgacgatctagagataccgtggcaaaagttcctatccgagtcatcctacatctaaaatagccttagacgaactggaaagggcaacttaccaatgttggttgtcaccggcttaggtcaatcacgaggatgggtggatccgcgactccggtgagcaattggtgggtgctcagtcaacgattccgcacgccagcgccacagacggcttccccaatggtccgcac

SEQ ID NO: 79684 - DNA, 731 bp, Zea Mays
ggcttcttgacattgttaggtaatgaactctgttgatttagttttataatgacttgatctcttgcttgaagctgttgttaattctctaaggaataaaacacccctgcatctgcattgcattactctatagccatttcctttgcccttcgtatcaaaggcctcttgacactcccactcatgtattgaggatggcgtcagtaattgcttccaagagcactgtatcatcttgcccaaagttccagttccagcttcagcaccaggtatctgtttattgatatgagcctttatattacatgtcgtctctcaatgatcaacatcgcctcgttagttttatcaaccatcttgagtgccatctagcggactgtaacaaatgcggttgaaaacactatggatgctgcttcaggcagctccctgtctttccatacgctcttttcgtccctcggctcgcgctatacggttgcttcctgtcgacacaaggcttcttggattccatcagcatcccttcaattatgacttcaacctacttctcaccttgaagtacgattgctctctgtgtgcaggggatcaagactggggagttctctcgtgatgcttcctagaacacctcgacaccctctctggatcgcatgataaaatagttaccatgcatgccccaatcatgtactacaattccactgatatcatataaaaagatgtgcaggtaatacttccattttcaatttttgttctag

SEQ ID NO: 79685 - DNA, 413 bp, Zea Mays
cactgaacacaaggcatcccaaagagtgaggaactctactattactccaacagataaactacctcggatatctgaaatccatctcctgtccatgagggtctcctgcacatttctgctaatggcaatgcctttaggaaccacctcaaacaacctaggagccaagtccttcacacataacccatgcaaccatcagtccatccaaaataaggttgaagcaccattttcgatttctgtcatcatagccatagagaagaatgctttgactttatcacaagactatagtggaagagaggaccaaggtctcatagggtcagtcttggccaaccataaccatctcattcgaagggcccagcctagctcctttaaacgaaaaatgcctagccctccaaactccaccggtcgacaaactttcc

SEQ ID NO: 79686 - DNA, 335 bp, Zea Mays
ctgagatagatgaacacacttcaatatgtgcactatgtgcattaaagactcatgtgcatcttatatgtccctgttcctaaacctaggggcgaacacaatatcttgggtcggcccagaaccagaagatcctatgctccaccatctctcgcctggtcgcgaggataaccctaagcttcttcgccaccgctgactagctccgctccaggtgaccacgcctgaagcctgccactacttcgttcggctgctctgagcatcaagccccatcccatccaccgtcgtccatcgaatgtagttagctctgcgacgaaccaacgacctttggtccttgagttaca

SEQ ID NO: 79687 - DNA, 398 bp, Zea Mays
gggtaagggctttcagatttttcctcttcggcgtaggctcgcttggagcagccgaagcagcaacgtttccagaagttgtactctttctcttctgcccccgtggcgggtagcggtagtcagggtacataaatccaatagcatcaaaaactctatttagcctcttctttttccggctcccgaaggccgcaaatagtgcgttatcttcagacttggagtatgctccaagtagttcatcactagtgttttcaacacacttcagccagtcatcgtctggttcaataaactggtctccaaacctgaaggtatatttcaatcgaaccaaaccaccttcgctagggttagtaatggtttcctttggcatttcctagttgtctatcagtggccatatcctgtaggcc

SEQ ID NO: 79688 - DNA, 500 bp, Zea Mays
ttaggggtcagctgatgaagatatatttcaaaattatttaggacttcccctatcatctcgtttagaggaaatcacagtcctgctctgaagaagcttttaaaacccactacttcatcattcttcgatgttggggtagtctcttctccagcaaatcggataagtttactttcagcttccccaaaataacctagtttcatcatcatgggcatgtcgtcttcggacacagtagatttctcaaaatctaaatgattgggctttgttgggatcaaaatattgtaatcttcactttcatcaacattttcttcttcaacaatagtctgttcagcttcggcatcgggagcaccttcgtcaatagctccctctgtcacaactagacctgatcgttccatgacttctgaaattggtgttgtctcagtaacctcggtctcttctccctcacgagacacccttgcagttgatcgcactctagccatttggatggttttcacaatttgacgaag

SEQ ID NO: 79689 - DNA, 703 bp, Zea Mays
gttacatgagatatgaggtcttacatatggaatggtcacatttggagaggttgctatcaatgaagacaatttagttatatggaattcaatgtgtaactgatgttaatttaagtcatggtttgacttgaattgatttttaaagtgaatatagaaagtaaaataatttgaaggatcaagagaaggtgaaggtgtcatcatggaaaacctatggacgatcatctacgctgccgacacacgtggagccaagagatacattattgttgcgatcgtctctcctgaatgctactttgaccatatatgagtgctagagttggttagagttctaggtgtgtcgcttgccttgacctatcaaatagggagggtgtgcgatgatctgtgaatcgctctgcaaatgcacaataacaaataaaacatcaactttcagcctgatcatccaaattggcatgtgttggtctcactgtttgactttgttgagttgattgccatcttttccgagtcgactaaaataggtaaataagtgtgcatcaaaagaaaaaacccatctaaaccatggttttgaaggtcattggtcctagatcgacacatggaatgcgtacgactaaaggcgtaggaatgggctgagagctaccgggactacccacatcgtaaaccaaaactagggctagataattagtatttggtaattcgttcatagaaacatcgt

SEQ ID NO: 79690 - DNA, 557 bp, Zea Mays
ctccaagaatcgttagtccacaaacagttgtcattaattaccaaaacattaccaaaggggcctagatgattcacagggggcttatgggggatagatatctctgggttctcatggacactaaaacatatcatgggttgtctgatgggcttcctgtcgagttgccctatgggatggacaagcaggatgaagccaactcaagtgagcccgatccaagctaatgaaggccgacgtccgagttaagcgccgctgaaggccggatgtgtcggatgatgcaattacaaaaacccaaagggtttggcattcggtgataactcggacagttaggcgatgaagactctggatatgcagggacacgatctgcgacaaagaaggagataaacaagtagataataatcgcaacttgtaacgggataactctacctggtcacatatatatggccaagggagacccctaacatttcatctcatcacccaccactcgagctaattttcatctacaatcctcagcttgtaatcctcgtactccggagatcaatatcaatccccaacaggaagta

SEQ ID NO: 79691 - DNA, 509 bp, Zea Mays
caaatggctcaaagctgttgagaacaagtgcaatgaacttctgggaaacttcagcaagaaggagaatgaagcactgatcgcggccttcagaggctggaaaaagcgtagattgaactgtgcctttgacacaattgggtttgtttaccctgactaccctcatatgacttaggatggggggaagaggaaacaagggtgggtgaaagttgcagccaaacgccataaaatttcctctaccgaaggtgctcgtgctagtatagagaaattataagcctgctcataatgtgcctagaatttacaaggtgcttgtggaatccaaaaaaattgtccctaatgcatggcactgttcccctatttatggtagtaaggtacaactttgtatgaaattagaagcatgtccataacgtttacacacatgaatcttaaatcacatgagggtaatgcggtcatttcttccctaaacgagctcccaggttcttctctcccttttctgcttcatacgccaatgcccg

SEQ ID NO: 79692 - DNA, 655 bp, Zea Mays
ggaaattccttgctagaagatattttcgttccattattttgagaaatatttataaatcctaaagtaaaattttaagatgctacagcttgagactttcccgacgtgttcccgacgacatagtgcagtaacatacaaattgggagcacgataagctttagaaacgtaccagggctcaagaatggtggctaggaaggtgggtggagggacagaacggtgggtcgacggagggggtgtctggagcggggcgaaagactggtttgggggaaattccgaattcgggcgctatggtggcaaatcggggatgctgagctgtgctctgggttcgtaacaagctaacggagcaggtcgggtatcaatttatagggattaacaacggtggctccgaatttggggaagaaagctggtggttggagcaaggtgagtcaccagagttcgcataatgtggcattcactgggcaaaaggttacgactgtctcttggttatcctccacaactcgcgacgacgtggtagcataacttaaggcatgtcgtgaccaaggtaaacgatgacatgacgacggcggtcgcatggccacgtcgccagtgcaagtgggtacggtgaagccggctcaatccactcccctccggtcttttctcgtccgcggtaatatcctgc

SEQ ID NO: 79693 - DNA, 402 bp, Zea Mays
tccctcaaactaccatgttgttactatttcaatcaaaaaatttgagtcgtcgtgcttctcggaaagccatagtcgtgttgtgccatctaaatgtctgcaccgctcgcttgccacctgcgccggctaccctctctctccaagagctgacgttgctagccctggcatcttccctcatgttgcgccctgtcatgtttttaaccgtgtcgccacaggaaccgccaccatccagcctgatgcagtcctctaacatggaggtggaccgctcccctacctaccatgctcataccagcaccgttgtggctaccaccatcatccagcccatgacagtcctgctcgtgacacgccagcctccacgacttcctccatgctgcatcgttggcccgcacggccccacctgctctc

SEQ ID NO: 79694 - DNA, 608 bp, Zea Mays
ctctgtgatgcaataccttgccaaattcaaccatttctctcaatatgctatagagcaagttgacacggacctaaaaaagaagaattgtttcatgagaggtctgaatgattagctacaacagaagatggccacctacctagatctcacttacagcagggccgttaacacaacactttaggtggaggcaaagaattcgtggcagagaaagacaaaaaggtttggacgtgaaggtggtgaggtatcctctcaaggatccaagaagcggtcaatgttggtgatccgtccctttaacccaaaccgctcttttcctcgtccatcttcctatcctttcaagcaaccggtcttcatccatcccactgctacccctactccaaatattcagtcgagtgcccctggtacttgtttcccagccttacccagttcatctaacaactgcttcaactgtgggaattctagacatttcatcaaggattgtccctatccaaagcaaaataaatcaaacttccaaaaggcttctagaagcacatctcaaggcaagggaaatgtgacaagcactcaggcaggcaaaggtgaaaggaaaactggacgggtctactatactcaagtgg

SEQ ID NO: 79695 - DNA, 654 bp, Zea Mays
ctagttttttagaccggatcctacatgacaacaccggcggcacacgtacagtttccaaatgatggtactgtgagagctgctgttgcccggccggcgtgactgactacacatatgctgcagttgcttgcacacacataagtctcgacttctcatattcaagtgtgaacccggccctgatggtacgttgcccgtgcgtctcgatagttcgtctactagagtagtagtcatgcatgtagcgtgcagtgtgggctagcttagctagctaggttgttaaacctaacctactccacctcctcctccaaacccatcgagcggcccgtcctagctacttggattctaccgggccgcaaccaccccacacagttgccgatcgacctggcgctttcgtcgcctcatcttctttgcctagcccgttatatattctgacgagccgtcagtttcatcgtcctcccgtcgtcatgtgcaaaccaaggcgagactgtgtcctgtccctgtgtgtgagaactacgctatatattctctctcaatgcggaaggccggtgggtggccgggcaaagcaacacactgcagccctggcacaccaatggaggttctggtaggagaggcagatctaacgaacctctttttcttttctcgaaagaaagaacgaaacga

SEQ ID NO: 79696 - DNA, 422 bp, Zea Mays
gcccatggtcgccaacgcgacatcctaccagagtctgacatgtgtcctctagtacttgaccttctctaggcctgacatcgccccgtcgctgacgctacatcctaccgaagtctgacatgtgtcctctagtacttgaccttctctaggcctgagtcctgacatcgcctacgtcatctagcaggtgtgtctgcatatgcacaccccgcgggaaccccacctcaccgctctcaagcggattctacactacctctgtggctccctcaactacggactcctactccgcccctccccgacatcgaagctcgtggtctacaccgacgctgactgggctggttgtcccgacacgcgtcggtccacctccggttatgctgtgttcttgggcgctaacctcgtctcctgggccgccaaacggcagtccatcg

SEQ ID NO: 79697 - DNA, 408 bp, Zea Mays
cccacttccatgctcgaattggcaatggttgaagagtgtgagctagtttaagatgttcgaccttcaacttacaatgagtgtcacattctgccataaatcttgataaatcgtgcaatgtcttgctttagggtccctttggtttggcttccaaacctgctttggcttctaaaaaaagtcaatagtaaccaaaggggtaaacttttaataataatctttcacggaagcagcttttatctagttcatttgccacagcaacctatgcggtgcttttttgggctgtgagggcgagcctttgcacaaaattacccaccaatgccattatgaagcgtaccgtttcgatctcctattctcctgggcgcgtctgagagccaacaaacacaaacagccatgacaacggaaaaccatctc

SEQ ID NO: 79698 - DNA, 977 bp, Zea Mays
caggatattaccgtcgttttatcaaaggattctctagcattgcaaaacccttgaccgaactcctcaagaaagacaacaagtttgtgtggaccccaaagtgtaaagaaagttttcaagacataaagaagaaactcacaatcgcaacagtactgacattgccagatatccaccaaagctttgttatcttttgtgatgcttcaagacaaggtttgggatgtgtgctaatgtagaatgagaaagtcatcgcttatgcatattgcctactcaagcctcatgagcagaattatccaacccatgatttggagttggcagccataggcatgctctcaagatatggagacattacttgattgggaacaaaggtcacgtattcacatatcacaagagtctaaagtacatctttacccagccaaatctcaacctccgttagcgaagatggctagagctaattaaggattatgacatcgaaatccactatcactcaggaaaggcaaacgtagtggctgacgccctcagccggaaaccttccgggaaggaagcaacaaacttcctggaagactggaaaagagaatcgactcaactgaatgcttgtttggggaaaagggcagtgtagaacttaaaccgatgctaaaagacctcattcgcaaagctcagtgtttggacgtcgagatgacaggacttgcaggaaatgctaacaaggaacaactcctagatctcagaacagatgaaaagagaactctttggtttaggaaccgtctgtgtgtaaccaaagggagaggcacgagaaatcctgctagatgaagcccacaactcagcctattctatccatccagggtctaccaagatgtacctagacctcaagaccagatactggtgcagagggatgaaaaaggagttagctcaacatgtagcccgatgtgatacttgtcaacgaactaaggcaggacatcaaaggcccacagggttaccgcaacccc

SEQ ID NO: 79699 - DNA, 466 bp, Zea Mays
tggggtgacgatggtcccaagcgcaatcattcgggctacgctgaccccaaactttcgtagcctagggctcgacgcggcccgtcgtgtagtgctctgtgggaggtatgcgcactcaggcctagtccaataggtcataagtgcactgtaggacgaggggcatgcgggccattaatgcatcgtagtctgggggctcataggtcatgagcgctatgcgaccgaggggtctgtaggtcatgagtaagaagtggaccggcacccacgctgtggctcggtgctatgcatggtaaatgcgatcagtcgtttatgacgggtcagtccggggccggtgcgggatctactcgagtggttcccttctgacacgtccatcctccattgtcgggctccaccacgcccgaccccgggctcggtgacgtggggtactggggttcgaccgagggtgaatccttcgagggccggcacactttcc

SEQ ID NO: 79700 - DNA, 1342 bp, Zea Mays
gttgggttcagataagtagacccaagcactcggaggccaaagggaagacagtgcacaacaaaacgtttggtggagaactgtagcgtctcgttatgcgtgtcacgtcaagctataagacgagagtatttatagggccatctggggtaggtggaccaaagtacgttcatacccacggttaccaactacatcctcagaatatttctgtataatggggtaattgcaacactgtagccacccctggcgggcacacccataattacacccagtaatcacactgacaagcgggtccctcagagagtgcctaggtggaccgttggccccggtgggtcacactccgtacagccctcgctgttgactaaagagccttcgcttccctcggaaggattatctgcgtcgagggtccttgaatcgtggctggcaaagtcctttgtcttggcgcttgtcccgtgcatgggccttcgctcgtttgcttgttagcaagcatggtcagtcactggctgctgtcagaggctctaccgaattcgctacatagcgaaggctccgattttcccatggtcttgtgcaagtatggttagttaaaacgaggggtcgggccttcgcgtcgttgatcgaggtcatgttctgccaccgccccaacaataaacatagatgtccatcacgatagcagaaagatgtccaatagtgcatgaaacataaatatgtctaactcaatattacaagagacataaatagagttcgattacataaatagactcactcacatgacctttaagagttaagcttctccccaggctactcccaaagctcaaacttctcccattttttggcaccaagcacaaaaaagagagggaacaactcaccaatcgctctaaaattcgaaagcaggaggtggagtgaagaattgattagcaaggttggcggcgaagtcgtgatcctctggaggagcctgattaggaggaggtggaggagcatgagaagtggagggacgatcctgatgttgttgctgcgatggaggatcatacttatttggcctccaatctactttgtcttcttcttcttcttcttctggagtcatataaggaacttcatagtgcaactggctcaggtcatcggaaataggatggagaggtgtggcatactcgcgagggggcatgtccacaccatacgataaaggaacaacgaggcaaagcatcggtaccacgctttgataaataacaaataaaaaaatggaccacttaaattgttactatttcaacagtaatgtctagtgtttatgaaatggatcacttccttttgcttgctagatgttgaaggcatcgtcatcgtctatgatcatcggagt

SEQ ID NO: 79701 - DNA, 558 bp, Zea Mays
gttaagttggtgtccccatccgaaaaggaagtagtaaccaagctgtacttacctgaactagaagaaggagcatgtcaccatttatcagtagatgacaaggagtccagcccgattgaggcaattaggattgtgttagaattccctaatgtattccctgaagagttaccaggcataccacctgaaaggaaagttgaatttgccatagatcttatcccaggcaccgcccctatttccaagagagcttatcgagtgtccggaccagagttgatggaactcaagaagcaaattgatgaattgttagagaaaggctacatcagaccaagtacctcaccttggatagccccagtgttatttatggagaagaaggatggcacgaagaggatgtgcatcgattaccgagcttgaaacaaagtcactatcaagaacaagtaccctctgccttgaattgaagacctatttgatcagttgagaggagccagtgtgttctcgaagatagatctaaggtcaggttaccatcaacttagaattcgaccctcagacataccgaagacatcattc

SEQ ID NO: 79702 - DNA, 385 bp, Zea Mays
actttgagcttagtcagatatctccacctgtgatgcagctgcaactccatcttccaaacatgcacatggtggcgtttcacgagcgacaaatggtcgagcgagtcgtcaaccgtccaggtgttgataggtcgatgctcacatcatattttgaggcgaataggctacacgaggaggctcgtggcatcctatatcgtgacttccctgagtggtacacttggcagagtggtaagggcaaagtatggcaacggaggaaacgcgatatagatggacaagtcggtaggatagtctctactcatccagccgagggggagcgctactatcttcgtgttctcctaaaccatgtgactggcaccgcctcctatgtggatctaaggacagttgatgg

SEQ ID NO: 79703 - DNA, 731 bp, Zea Mays
tcatgtgtgtaccattttgccttcttgtcgatcgtcgatcgtgttaatgcttactgcagaggctgtttctgaacgtgatgcttgagtagcgcttcagtctgccttcttcgcgatgtccgcgctttagtggtagcggtcgagtcgttttagagtcacgttgctgctttgggaacgtcagccgagtgattattggcaatgtcggcgcttttagaagtggtagccgagtgatagcgagccacgttggtgtttagctaaataacgaccgagcggttactggtgatgtcgacgttttagaggtaaccgccgaatcctttggggccacgtcactgctttaggaataacagccgagttactgctggcgacgtcggcgttttagaagtaacagccgagtgataacgggccacgtcggccgctttggaaatagtggccgagtgaagtctggtaacgccagcgtttttagaaataacagctgagttaaattgggccgcatcggccgttttggaaataacgaccgagtgatgacatggcacgccagcgttttagaaataacagttgggtgatgacatggcacaccagcgttttagaaataacggctgggtgatgactgggcgctttttagaaatgacgtttggcccgggaaaaccccatatgtactgcactgtcgcatgcctctgcattctatgccctagttttgcttttctgcatccaggccttctctgctctcttgcaat

SEQ ID NO: 79704 - DNA, 456 bp, Zea Mays
aaatctagtttggaggagtacattcatgcatttgaagaagctagatatgctactatattgcacaatcctgaaatgggagaaacattctttgtttctcagtttgtgaagggtttgaagggggagttgcagggacatgttttagctcaactgcctcggacagtagatcgagctattctcctggctcagattcagcaagaggttgtggaaatgaatagagcaaaattttagaaaaaatttcagggtagtaaagtgatggtgaatgcaggaaaaggggacaccagagcaggagtgggctctagtgagttggctaaggagaggtagttgagggattttcgaaggttgaatggattgtgttttgggtgtggagaaaagtacgagccaggacaccaggccaagtgtccaaaaagaggtggaactcaattacatagtctgacaatggaggatatggggttgaca

SEQ ID NO: 79705 - DNA, 682 bp, Zea Mays
gcacaaaaaagaagatagaagacaatgactaaaacaccgaaggacgggagaaaacgtggacacaaaccgaaggctatattagagtagaaccccatgattcttgcgcccaagcaggaccaccggaggagggacagacgagcgccattgatgtgcaatgttgggttctctaggagctctttcttattttttaaaggttttggtatttaaagtcattaacagttgtaaccatgtccagtgggccccacaaggttatgttcaatggcctccatggtggtcgttggacataacattattatgcctgatggttgcatccgggccgtcaaatttaatttgatggtatgtccgatggcccactagtagtcgttagacgttgtacacttgtgttcgacaactgcagctaggccgtcagacataagtatttccagggaggtcaaaaatctccctaactttttgttaattcccataatttaaaaaacaatagatttcatacacatcagattcatcgagaataccaatacatacatccacattctcacatacaccttctcaaccatcaaatcacaaccacaaaccacattcacaatcacattctcacatacacattcccatttgcaacatatccacaatcacaaaaccacaaaaaccacattcacatttccattcacacaaacacatatatttt

SEQ ID NO: 79706 - DNA, 560 bp, Zea Mays
ctcgtagctaggtgacagatccccttcgcctcactgctgccggcgtcgtgtatatccgccccgccccggacaagttgcccgagcccctacctgcggcactttgcgaaagagagaaaggagggtacctaccggccaggatgacggaaggaaatccagcgcccaagatctctctcatcatgatgcctctcgtgtcgccagtgcgcagggacactacggtgctgggagtagcgctgtagtaccagtaggtgcttcccttgcttctcctatgggctatggcgtttaggttaaagaaggcctgggctggatctggatgagattttctccaacggttgcctgtgtcgcgtttcattgggaattctgcgtttcaacggtgaacgggtgtctgtctggccaacagctcccgtacgtcggtacgtgcaatacggcgagagtggccgagacgccgagtgcattattaatccgacttcttaatcccgctaaacactattactcatttacagcttacagctaagtgtattacgtaggagtactgcttctttgttaaaaaaatacaattctat

SEQ ID NO: 79707 - DNA, 320 bp, Zea Mays
gatccacaatctcaaagccattccacaataggttgagaagcgtaaagagaagatgttttgggtttcccaactttagaagcaaatttaccaagcttcagagcaaaatgcgtaacataacacaacaaattaagcaaccacaagaacaacactatcagaggaaccttcaactatgacgacttcttatttgatgatgcttcttcattggctgtagaactacatgctatgccatggccaccactgcataggccacctcaactgtcaatgtatgatggattagcagacccgaagcaatttttcatgagctacgaagctacaatatc

SEQ ID NO: 79708 - DNA, 1147 bp, Zea Mays
cgcgcgtgctcgttactctgcagacgggacccagttctcagcttcttcctcaacagaacaccgcgaagaccgccgcgtgctcacccgcgattaccggggatttctgctggtcggattccccttcttcaatctagctcgcgcgcaccccgaacagactccgcatcgcaggcccaggcgattggatcagccgttttcccccctggtcggacttcatctccttctctgtgttcgcgagcatcggctggaatcccaacaaattcctccgacatctccctgaatttagccgccatgctcggaatcgacaacagcagcgcctgcccatatatatccggttgctgcggatcccttgaacccgaagttccagccatgaatacctgcacgcgcgccgctcccctggccatataaactccgttcctcgttggagtcttcgtcgccgtgacccctgcctctccacccctggacatcaacgtcgaaccaagcaccaaagccgtgatggcagtactgccatgggcaccaccaagagagcagcgagagagataaggagaggtctgtcgtaatcgtctcgcaccaatgctgtcaatgggatcaccaagtgcagcctgttgtgttcgcgtttgtacgtggaggagttctgcagcacaatcaaaccatgggggatcggagatgacggaattgctcatcgtagctaaatcgccaccgccaagccgctatccatcgccgccagcaatccatgtcgtctctagacaccggtaagcattccctctggttttgccatgctgcccgcttcatgcagcactgtccggagttttgggtagagcactagagaaactggtatgctctgcgcaggcgatggacctccatgggggagcctcggcgcatgcccctgctagcgtgtcgttcccagcccctgcacctgtagaggcccggccgtcctttcctagatcaatgagactctctacgatgcctccctccccatggatgttttgtgcgttgtggcttagtgcccaggatggaagcaatagataagccacatttgatccaagctctccatcctctacgactgcaatgtgtgtgaccatccatatatcgagtccgcaaccaatcaaacacgccacatatgcagtttaataattatgtgatatatttt

SEQ ID NO: 79709 - DNA, 551 bp, Zea Mays
aaggcggtgtgacatgctcacacttacttaactcagggtgaccactataccctactaacggagcaatcaacttaagtcggcgatgacttaaggcggtgtgacatgctcacgcttacttaactcagagtgaccactataccctactaacggagcaatcgacttaagtcgacgatgacttaaggcggtgtgacatgctcacgcttacttaactcagggtgaccactataccctactaacggagcaatcgacttaagtcggtgatgacttaaggcggtgtgacatgctcacgcttacttaactcagggtgaccactataccctactaacgaagcaatcgacttaagtcggcgatgacttaaggaggtgtgacatgctcacacttacttaactcagggtgaccactataccctactaacggagcaatcgacttaagtcggcgatgacttaaggcggtgtgacatgctcacgctcacttaacccagggtgaccactagaccctactaacagagcagtcggtttaagtcggtagtgacttaaatcggtgcgacatgc

SEQ ID NO: 79710 - DNA, 790 bp, Zea Mays
aaagtggaactaaacatgttataataaaaaaagacatgaatattaatattaatcttaatgattatctaggttaattttaattataaaccctatttcataaagcattaatcaaactactattaaccaataaatttataaaggagtagcatgataaacattaacattaacacctagagcacgatgacacgaatccaatgctagtcgaatcacccataacggacttaaaatgaataaactatgaattaaacaagatttcctattcaaaagtaattagagtttaaacctaattatgaatttcaaattaagcggtggtgaactcaccggaaaaattccgatctcctgctgccgctcactaatcactgccggatctagactaggagcgagaggaaggctagggctctttacctgactagataagcacgacgcggaagacttgttgagacctgaagacagcatacagcgaaaatctggcactgtaaactggaagaggaccaaccagtgcccaaaatttccgattacccgcgggaaaaactccatgagattcttgtgcaactcgcgaaccggctcacaagagtagcaacgctctgatctcggcgagattcggtggcgggtgaaactcacggtagctcgcggattcaatgaacaaagcacggaaacaagagctagcactagatacgagttgcgtaaggtgatgcgggggggcctggtcctcattttatagtctgtcctgacgtgggaagcacgcggggaaaggagtccaacggatgaacgccatcggacagtgatcgat

SEQ ID NO: 79711 - DNA, 509 bp, Zea Mays
gtgataagtagattggaagtgtgggtttgtctgagcactgtgttgtcgaacgtgtatgttgaaatgcgttgtagtagtgattgcgttaagttgaacagaagtgtctcgagtacacgccgcaacatggttgtattcatgacaaggaggtgtaggttttactcaatgagaagtttggttgttgtggctaggaaattgtttcggcttggttagtgaattggtgacgtgaccaagtagtcaccccccggttatgagtcgggtctagatgtgttatgccttcactgtgatacccatcacatatgctaattggatgtatatgaaaaatgaaatagacacatcatatgatttagtggtgctgggattatgaactaagtacattatatatgtgtgatgaatgttgggcttgaggattgtcattcgggcaaagaaggtgtaatatacttgtttgcgtagtatgattaagctagtaatacaaaatactctgtttagttcctctagcacttcatcggtaa

SEQ ID NO: 79712 - DNA, 444 bp, Zea Mays
gggcgccgaaggtgcacttggcgcgcttgacaaagagctgctgtcgccaaagcttggagaagacgacatagagatgtcaaaggtgatccacccgtgtcttgctatatataaagatgtcttcaaaaaataccaggatgaagcgatgaaggaaaggccgaagtacatcgttcgtgagggcctaaaatgtcgctggcatgttgcagagcccgcatgccatcaccagtaactcatagaggccgtcgtgggtgcgaaacgcgtttttgtctacatctttgggccgcatctgcacttggtggtacctggaccggaggtccagcttgcagaagaatcgtgcaccgtggagttcgtcgagaagctcatcgaccaccggtatggggaactgaaagtcgcctagaggggggtgaataggcaaatttgaaatttataaagtttaagcacaattac

SEQ ID NO: 79713 - DNA, 488 bp, Zea Mays
tttcattagctcctatttgctacaggctttgaggttgcagtccttcgtcagatagacttggagcttctcgcacagcgagagctctgcaacatgctggtagattttagagaggtcagagaagcttcatgtcacttctagacgaatgacgggatgatcaacagagggatctatattttgcctccgttttctttttaggctcagataaatacacttgggtcagaaacattgataggggaatagaagataaagatcaaggataaatatagcttgctgttattattcctgttgtacttagctccataggtccacatttgtacctatttttttatccatgttaattggcaggtgtggaccatgcgtgtactattataatattgtatctcacataatcattaatcgatacttaatatggcttgcgtattggctgtttctctctttgtttgctccgcctttttggacacgggtaagtgctctgccatcggtgaaga

SEQ ID NO: 79714 - DNA, 675 bp, Zea Mays
ctctaaacttgattgtcaggctgtctgaataccactctccatggtacagtgctatcaggggggatcagaacgccagctcagtcatctcaccgccgatgaagcctcgtcgtgattcgtgtcaccggcgccaggattcgcgctcggggtggattgataacgtcgcggggataaggatcctcgccgacggtgagctggaggtcactctggtgactcaccgtggctccccttctgctttacggctggaggcagttagctcgccggtgaaccgccattgctcggttgtgcgccacgtatccgagcacttctgtcgcgtcactgtgcctctttacagccgttaaatcaacgccggtgagctcgccacgactgtggacacgcacccacggcaccagagttctttcccctctccggccgccagcacccctcggccgaattcgtcaccgaccctcgatgcgcctataaattgcgtgtgtcactagctccgtagggtagtaagctgtccagccaccacgaatcagcctcggtcattcactagaatccacgaatttggaattctccccaaaactgtttccgccaccgtagaaccaagctcgccgtggccagccacttccaggttcatccatgccctctgctaccttgtttcagcattagtatgcttccctgatgctcatccatcca

SEQ ID NO: 79715 - DNA, 532 bp, Zea Mays
tttatgtgtgcactatatatttgaagcaattgtctgcataaataaaataattagtatctgtaaaaaattatactttgcgaacatgctggatatttttggtgctgttgcatcttgtaaaaaaattcaaagtttgaaaatttggaatttgaaaataaaataggaaaggaaaatagaaaaggaaaagaaacaaaatcttacctgcgcttgggccaacgccttcacagcccgtgtacacaacccacaattcactcacgtacacacgttttcctttttttgtattatttattcctcttgccgcgcatgatgtcagcatgacaccggcgtgacatcaagctagcaagatcacgttcctgcgcaacagaaatttgttacgaactcccttgatcgccgagttgttgggatttgatcccaagactctgattggatccgtctcaccgccatgtggactgggggcttcttccagctctacccgtaacagccacgccgcaacgctcggccatggcgccctggtggccgcgatgtgcccctgatc

SEQ ID NO: 79716 - DNA, 957 bp, Zea Mays
tccaaattgtgttgccttgtttttgatgccatgtagcaatcgaaaacaagtgatcaacattggcgcccacctccggtgactccacgaccacaacaactcacatcatgccatcgaagaaggtaacaacaatcggctctgtccttaggaccttggaccctaatcaatgggaccaagttttcctcagggaggcaagaaactagtagaggaatgccatcagcacaaaccgcaagatgaggagcttgatcaagagatcgataacctctgtattctcttgagaagttgttgcagaagatggatgagtacataagggctgacaactacttttgccaaagaatggaggagttacacaagtacaccgaagccactaggtgctttggcggaagatttcatccaaggcatgttcgaagcatccataacccggtgcagagtgaagaaaagtcagcctagtctcagggtcaatcagcacaacaacaaacaagctctcaacaacaatcttctcatagcacattctgaccgccagctttgagagggagaaggggaggccaaagctttggagacaagtttaatgcacccccatggaatccattttatttattttgtggtgaggacaaagtccacacagcaagaaccttcctccatacaatcaacaagcaaaaagagcttactttgtcaaccactcaaccttcacagtcgaaggaggtgttatgtacatcttcatactgttcaccttatgtttcataatatgtccagcctcagtcataggagccaaggttgcatctaccttcggcctcaaatgcttcaagtaaccttgtgatgagtgtgtggttgtcttcttcttcctttgccccaggaccacctctttatgatcaggccccctggtcatcccaagtttccagtgcaagatttgcaacaaggggatagaagggagggatccgaaactcgtactgttaacagtat

SEQ ID NO: 79717 - DNA, 497 bp, Zea Mays
gtaattttgattttcttgtgcactaatttcttggtccaatttatatctatactactatattaaggctataaaagggtagtctgcctcccttggttctgccttccgtaaatccacaccatctatctatatcccttcgatcctcgcccttgaactagcagaacatcctccgtctcccaccacccgagcgatttcctctccctcgcgtcccacgccatgccctgatgtcgttctacctcctgaccgcgacgctcgccgttgtcccatcctcctagctttcttctgcatatattcttttatattttaatttgtgtttacacttaggtaagtaatgtcgcacaatttttgtttacccctatttttgttgccgattgtccagactatatctttactacttcttaagagcatagcgtaggcgtccacggtgcacggttctgcctgcccctctcccctgcactccggtgtggccacacgagcgttgcccgcgcctccctgcaagg

SEQ ID NO: 79718 - DNA, 725 bp, Zea Mays
catccctaagattcgcatagtagataagttcagccccctactcaggttagctacatacccatcagggaacatcaacatcttaatccaccgaagtacttccttcctttggcccctgcttaggacgaaatcggccttaggccttctccatgtctttccaccacttggtggcttcatctcttggtttggtctatcacataacactgccagatccactcttgcctttacgttatcctttgacttatcaggaatgtccataattgttgcccaaagtgcatcggcaacattcttttcaatgtgcatcacgtcaatgttgtgtggaaggagcaggtcgtcataataggggagccgagtcaagccagacttatgtgtccacatatgttgctcaccatatcccacaaaaccaccttctgtattggccacgagcctatctatctgttgacgaatttcggcaccagtcatcgttgcaggtgggcggtctgtcactacgacaccttttgtaaagttcttgatgtgtaggcggaatggatggtcaggagggagaaattgtcgatgtttatcgaaggacgaatatttgccaccctttttcaaccaaatgaacctaagagcttccttacaaactgagcatgggaacttaccgtgaacacaccaggcgcataatagccgatacgccggtaagtcatgcatggagtactggtaccaaacatgcattctaaagtttgtcttcg

SEQ ID NO: 79719 - DNA, 1072 bp, Zea Mays
ctcacatacatcatatataccattcacaaaactcatgccacatatagatcacatatccaattcacatagctcacaaagctcacatacttcacattacaaattaatcgaacgaacacacagctcatgtatccaattcaattcacaataacttcacaagttaagtcatttgttcacgaaaacgcatgaaattcagtttaactcaaatcaaccatcatacataactaaaataaagcacaagtttaaatagaaaagtagcatacaatagttctcatggccacggatcaccacttagataattagaactttgcccactgccaccagctggaggagagtatgacttcacaaaacccgttgtagctagttcagacccaataccacccacatctgtcgcctatgtaagaagaatgcaaatatttacaagttggatacaaatgtccaaatcagatgaatagaaagagatttacaaaacatacctgatctctaggtgcagatatatgtgcggaggtgtcaaaatgatgtgcgagggttgttaaactagtgtccatgcatcctcgatccgtatttaatagataaaagtcatgttttttatctcctatagctaacaaataacacatgaacatacaataggctaagttttactctaattattagaatgagatggcatacctgagttggtatagctagaaacaggctccattgtagagatggtggcagcgctcgaaattctaggaatgttaccttcatgccctgttgctgcatttatgcctattaagggaatgtgttagtattgcagaggttgtttacaatatacgaatttagagttgcatgagttatacttacttgaaacatcgcttgttgttgtcgcatgcaagccaagaactattccctttgttgtctaatctcttcgcacatcctcgctagatctagctctaaatcctgctcattcagtcaataagagaccaagctaccagatgatgaactcatcgtctaagatctcacctcaactgagtcaatcactccatcgaagagtgtgtacctacaagtgtttctaaaagtgtgcttagtgcatgaa

SEQ ID NO: 79720 - DNA, 338 bp, Zea Mays
caaaacggtgataatcatgttgacaaaaaaacggccttggatgatgaccagtttttggatgacagatcgatggcaataactatgcgcgtgattggttgagtggctaccgtgagccagcctcccgcgcgtctggctcaccagcgaaggccgttcgctccgtctccacgcgtgcaagcgggtggtggaatataggcttagcttgtacgtgcacatgcaggtcggtattctcgtatacaagcaaccaatcatagtctcatatcctgtcaaagcgtgtggggagcctggttgcttctgtacaaccaaccaatcatacagtatatgacgcagttcattttcac

SEQ ID NO: 79721 - DNA, 727 bp, Zea Mays
aagaaagttcaggtggaggccaatctgcaatggaaaaatcactaaaaatgttaaaataaaggtagtttttagtaatatcatgaaagttaagttgtaatatcatgactattacaacagaaagtggtgttgtcgtgtcaatgtaaatcacgtcggagtcaaccaatcggggataagagttgcgacgttgtggcagcttgcactctagtggaagaccatggtgaacgacgagctggtgacggtaggctattgactatgcgatgggctaataatgacagcagcatgggcgactaggcagcaggctagcgacagtgggcttatgactaggtgacgggctggtggcgatgattgggcgacaacaatgatagggcaagcgttgagcaggggttggacgttgtagacctgtggttggtgtcttcttctgtctgcctatgtttcagtcgatgtgggttgtggtctaagatggtgggctataccgtgtgggttagtgatggtatgtcgtggtgatgtttatctattttggcctcatatacattataccttttttatttatagtatatacgaaaggtaggtataaagagtttcaaaaattaaggtggggttatggcccaccttgcccacattgtggatccgcccctggagaggtataatgcccctatgtccagttggggccgtttaaggggctcagttggagccaggttaaggctggttctagacctaagctataccg

SEQ ID NO: 79722 - DNA, 495 bp, Zea Mays
tagctctctcaccaacccaatcttggagctcaactggctcaagggggtgtttctagggttttgagcatttttccaaatttggaggtgcatgaaaaggctaagatactccttctagtatgttcaacactttgattaagatattacttctaaattttggtgcttcattcccaaactaaaccacatgtgataataggtcacaggtgaatgtgttgagctaggccccttgggtaacacctggggtgtaacagtgtgcgacctctgcagaggattagaaacgcgccaaaccaccctaagcaccatttcgaggtgaggaactcgttcccatgcttggtttaccatatttccgcctggtcttagccaagttggcctcaccggagtctggccgcaccccgcatcgtgactggccgatttagactcacgctgtgcccctgcgttggtctatagtgttccccttaccctaccgaaagcaattccaggccttagctcgctcgaaac

SEQ ID NO: 79723 - DNA, 740 bp, Zea Mays
aaattttcaattcttcaatcaggggtctcatcatcacatcgatctttgttccaggatgatctggaccaggtattacaagacacaagaaaataaattcatatttcatgcaaagagctggtggaaggttgtatggaacagcaaagatgggccaacatgagtaggacgttgcagttagattgaaaggcgagaaaccatatattgccaaaccgaagcggacattccgcacttcatcagcaaagctggaatcaaaagcatctagtgccttccatgcatttgtatcaactgggtgcgccatgacatttggattctcacgtaccccttctttgtgccacctcatgtgtctggttgtattcttgggaatgaacaaacgtttcaaccgaggtataagaggcatgtaacgaagctgcttacgtgcaatctttgtcgtcacggtcaaaccatcatcgttttcaacctcaacaaatctacgctcaccacatatagtacacttcttctcactcgcagtctctttccagaaaagcatacagttattgtcacagacatcgattttttcgtagtccataccgagcctagagagcaactttttggactgatacatgtcctttggcatcttgtgattctctagaagtacatcgctgatcaagttcaaaagctccttgtagcagttgtttgagaatgcaaacttagacttaatagccataagtcgagtcacaaatacaaggacggtcactttcgtgtgc

SEQ ID NO: 79724 - DNA, 884 bp, Zea Mays
gacaagtctgaaatagcacacaactgaatagaatcaaacttgtgagcagtgacgtgtcgtacttccaatagtgtgcctgaaggaatcaagggacgaataccatggataatagtggtttgtccatgataattgatatacaaccatttatgtttccaatacacatgcattgggttattctgtccatgccaaggaccatatcacagcaaggcaatggaatcgcgtcgaaggttgactggaaatgaaaatcctgaagagactagtcaacatctaatagctcttgtgaacactggataacactgtcattagcaactcgaaccagtaagggtggatccagtgtagtaagcccgctcaatggaggactatgaacatcattgaggaaatagtgggagctacctgagtccaataacataatgactgaaattccttgaatacacccaattagtctaaacattgttgacgctgttttgggaacacaagcctcctgagataacatgatcatgaattgctccgctgaatctttgtactctccttctaactcaagaacgtctggagccaatatgtcccatggttattgaatggcatgaagttgcatggtgggtgcacacttatgccccttttcccactttttagcgcagtattggcacatgcctcacgcgtgcacgccaataagcatgtagagatgccaccttgctatcatcagaagaattagcattgacactcgcctgcttggagattataggctcccctcacattgatttatcccacctaggaggaattgattggagccgcttcatttgagtacgacctcctcatgatccatccgatccgcgggaatcacaccgcttggaagaatcagcctcttcctgcaacaaagcgagagcgca

SEQ ID NO: 79725 - DNA, 504 bp, Zea Mays
atttgctgctagttggggtgtacgttgatgaccgtattatatgtggccctaacagagaatgcatagctgtttttaaacagcagatgatggcaaccttcattatgagtgatcttggcctactgagttactatctcggcattgaagtaaaacaaaagacaggtgaagtaaccattggccagagtgcctatgcagagaaaataattgaaacctgtggtatgacatgtaaccattggccagagaagtaaacatgtaaatttagatgatcagctagcagatatcctgacgaagcgtctgggaagaatttgattcacagagctgaggagacagcttggaataatccgaattgaagattaacaagattaagggggaaaatgttgcagtagcttcactgtaatcttgcctgcatattgttagtaggtgcattagtttggctttagattgcttatgcatatttgtaattcggcgtagaatcatgggcggactgacgagtgcactcaatcctcg

SEQ ID NO: 79726 - DNA, 508 bp, Zea Mays
ttttttttgtagattttgttaaaccctatataattcgactaaggatagaattacagttacatatctttcatgacagaggcagtagtatagttaatccccagcagcactggaactgccttgataacactatacacatcacaccgagcgagctggcacttgctttgtgcaagaaaatttcgtcatacaaaccctgtttccacaggctgtaattctctctcggttccatttcttttaacccggtaggcagaaaagctggcgacggtaggcgtctggagttggagggtggttggaacgtcacccgagcgggcttgccttgcctaaaagagtcaccagcaccaaattgggtgtgtccggtgggggcagcctgtaacgccgcccgctcgtaccgtgtcgttatccaaattataatttgtgctacgactaggacgagttgttggcgcgagtctactcctaccaccatatagaggataggagaaagcctatccgtaggccatagccacgctgggac

SEQ ID NO: 79727 - DNA, 300 bp, Zea Mays
ctgccggcggcggtgaaggcgatggcggtgcctcaaggcccgcctccgtgtccctcctttcctccccaaacaggaaggcagaatgtctagtaactgtgaggtcccggagtctttactgcctacgaaggacgaaattccggagcaggtcgggccgggaagcacggaggagatagaagtgcactttccaatgcagttagacagagaaggcatggctgtgatgttataatgctgaaggaccccaagaagggattatggcctgtcgtttaccaccaccgcccgttatttgtgggcttcaccgag

SEQ ID NO: 79728 - DNA, 517 bp, Zea Mays
cttatttcctgtagacacaatagagcttgggacgattggacactctatggaagatggatgagctaatagaattagttgcatctatggagcttgagtagtcatttgttgaacggacattacacacaccaaatgctacatcaattctagttgacgattcactagcatttgagacatcatgtctttgaactctttcttagcctcctccttaatataatcggccatcgcttccttgtaacgatcacatttcttgtatatactttcccactgtggtctgaatacttctttacatgttatgcctcgtacatgactaggatgcttggcgttccctagaccagccgtaaggatgtctctctcccttcgtggcttccatgatccttctttctacttagctgccatcacataaatgttctttgttttttcttcgaaaatgggattatcaaaagacaaaccagactcaatttatcttggttttcaagcatggatccaattgacagtcctttcaccaagttgctcggac

SEQ ID NO: 79729 - DNA, 276 bp, Zea Mays
cgtgagtctatttgtagatgggagagtcatggttgtgtagtcggccctaacctctcttgaagggaagaccggaactgtttctattatctaaaaagtgtatttttattagaaaaatccaccaccagatatgcacctgcaattttgcagccaacaagacaagtcaacaagtgagtccccgacgctgcacacacgggagagactggagtccggcaagagagtcaagccctcgccatgagggcaccagaagctgacctcattgttgtccaacttagctcc

SEQ ID NO: 79730 - DNA, 528 bp, Zea Mays
ataaaaggaatcttttgtatcctgaatcacggggaacgaatattaccatgtgcacagcgtttacgactgcataaagatgtgtaacttaatagcataaaccatgcaatatataaatcttgatcggtttgagataaggaaagacatgctgcacaatcgcgaaaataaagggacaattacggtttgaggagcattagtacaaggaaatcaattttaatttacaaccgcagtagatccacgtttgtatctgagtgttattggcggcggttaacggtggcggaagggacagcaccgggcgacggcgtgttttggcggcgattaacggcgagagaatgtccagcaccggtgctggtgatgacatgcaacctgtagcgtctgtgcatagatcaacaggtacgtctacttcaatggacatacatcctgtagcgtgtgcgatcaccggttacaaagagggtgtatctgttactccctcggcgacgttgagggcacctggacatattgatgagaacacaagatcggcaaacgtggtag

SEQ ID NO: 79731 - DNA, 838 bp, Zea Mays
tctgcaccctaaagggttcgtaggtcatgagtgggaggtagatcggcgcctccgctgtggtgtggtgccatgcgcagttaatgcggtcggtcatttatgacggggcggtctcaggccaggcgtgggatccactcgagtggtttctctttggcacgcatgtcccccatgttcggtttcgccatgcatgacctcgggctcggtgccacatggtttgtccgagggaaggtacttctagggtagatgttacctatctcctctgactgaccagcgggctccagttgcaagaggctttttccttagtgtgctcgctgaccgatgggccctacggacaggggatcgtatcctcgatagtatccctcgagccctgagggattgtatccctttggggggctgatgaaatgttagatgtgttttgtcctttcaccttttgagtgatcgtggcatttactcccctaggatttgggctgctttcgacgcggcctgctgccttttggggtggagtcaggcgcccctgcccccctttataagtttcgagcggtcatcgtttgcttgctggtcaccctcgactttcttcttttttcggcctcttccttgagcatacatccaatagggttgttcaatggacctcgggttgctaggatgccttgcttcgtgggccatgagccgaggtaagtttcctcctctgagttcccacaacccccttcttaggctttgatattttactcccttcccttttcgttgcagggtggtcgccactaattaggcggtcgcactaccacccatcaggctgccatagccaggctcctcgtctcgtcactctttcccttaggcatcttta

SEQ ID NO: 79732 - DNA, 426 bp, Zea Mays
gtttggttttggtaatcgagcgaaattctaggtgaactaattagttgtatgttgagatacataggtgtttagttgatagctacattagtgtgagcaacacataaatccatgcttgagaggtggcttggactagttgcaagtgctcaattagtgtgatgaacaagctcattgcatataagacatgacatgggtcatgtggctaggtggagatgaccaagaggtgaggcttggctatgaaggaccaggttgctagtgcgaagagcatattagaggattaggtgtgatggaccatcgtagtggtgaagctagagcaaaagagttggtgtcgatgaactaggaacaaaagtgaagagcaagcgaggctgcgattaatgaaccattgatcctagaggtgaggctcccatcattgtcgattggactgccaag

SEQ ID NO: 79733 - DNA, 950 bp, Zea Mays
cacgagtgcttttactaccctcgcacgagaatttggagaaacccagcacactggtccttggaggatggaacaatgtcccacgctgagttttgtccctgaataacctggctacctctttcctgatttttccacaacatctagcgaccatccactaagcttgggaatgaagacttcaggtggtcatgaactgttatgtcgaccttttgtccaaggatactctaagggtgtgcttgttgacgattggtgtcaccttccattgccctgtacctgtctccttggagactgaagagtatttgaccctaggggcaggagttggtattgtatggctataatgtgttgcaggcggaatgacataatgcagttgggatgaatgtggaaattgtgcatacggtgcatcccctgctctatgtacacagaaccagatggtccgggataaggtgccagacagttcgtctagactctagactgtccgacgtgagtcgacggatggtctgtgactaggccaaggagtccgggttatacctggactatctggtcatataagacaccatctaggtggcatgcacaaagatcagtgtggggtctgatggtctggtgaaggatgtcggacggtccatgaggtggccagacggtttgtgataagacccagatagtctgcccatgcctagagccgatcctttgttaggtgcgagcgacgatggttgtggctgtgaacgtgttcgtcagtataccatataatggctgggtttgtgaggacccctttgtagctaactcttttggcgaggtaggctcaatcgtgacctcgtgtgatgggaaacttgaaacaacaaattttactattgtatacatgagattcttaagtgtgtcttctattccgcctatgttttgttgtagttcattctcttgtagatctatgtattgtttaagcgacaggatgtcattggatttac

SEQ ID NO: 79734 - DNA, 705 bp, Zea Mays
caataatgccacgcgcacacacacgctaaattgtcggcccgtgagcaacgggaggaggactggatggacatcatctctgcttcccagctgagcaagagtctaggagttctccctcctccactactgcccaactgtttgttgtttgttctttattatcactgtcggcaacaagttttcaaaggagggagatgatgagagacaggtggaacctggctagccttgccttgccatgagtgcagagcatctacactaatcgctagcactgggtagggggtgatctgaacatgccagccagtactgctctgcttgcatgtggccattgcatttgggactggaacgtggacaaccctgtcccgtgaacatggacgcagcggcggcgaatcgcccgggtccctgtctgcatgactgcattggaccagagaatacatgccatgtgcatatgctcctatgtaagagtactgtaccaagttctgctcctgtccaagtccaagccaagcaatcagcagcaccaaccaaccaaccaacttgccattcacattcaggcaaaaaagcagcagctttcacgagagggccggagggctcagctcaggtggacagaccggggacccaacaaccacaagctcaaaagccctgtcctcctgccactccaaacctcactgggaacagtgacaagtgctgggtgttcctacaggcagcgtcggcgaa

SEQ ID NO: 79735 - DNA, 416 bp, Zea Mays
gaaaaatatcagatgtgctcatactcagccattctcatctcttctttttctttagagcccgcacgtcatctcccttggatatttctccaagcacatgtccagccttgactctagaaatttctcacgcttatcttgatcctcatcccaagcaatatatggagatagacttctctacggatatttatctccacatcgttgtttttcccagggctccttctcatgtatgtaaaatccctggaaggcttcgtacagctgctggatatttatgtgtcggatctcctgtccaccgtcgttctccctcaaaatatctcttcctttgaatatctcacataactggtcgttatcccctgccgcaattatctcactgccgctcaaggactcagcctcatcttcttcaaaatcgttgtgcccgtctc

SEQ ID NO: 79736 - DNA, 496 bp, Zea Mays
gagctatcgggtaagccatttacaaattgctcgtgcccacagcctcactgacatcccgtgaagctccccgactcactagatcgaactctaccgctgtatacaggtcgagcttatcaccgccgacgagctcactcgcctgcgcgcgtgatccgagctacaccggccatccccgacgacgagccgaccatcgacgtaaccctcgtgacttccccgacctcgctgaccactccccgggaactctatcgccgccggtaagctgctccgccctgttcttcctataggattatggggaggctacgctagcgcaaaacaaaattttcgaccccataaaaccaagaactactgcgattataggtcatggaattaccactagacgcacagggcagcggaagacgtctcgatgtagacgaacacgtcgagcagtgccgtgcagtcgccggcgtccttcacgtcctcgcgtggttcgtcctagtgctccagatgcagcacctccgag

SEQ ID NO: 79737 - DNA, 1061 bp, Zea Mays
gctgaaactggcccgactcggcccacatacaggtgaaagcgcgcctgtgcacacccgcggtgtcaggtttacccagaggaccctgggtatttgaaaaacctttaaagaggccattgcactatttctctgtgtcactgacaattgcagatagaccctctcctttctgttccttcgcaaggtgaggtctccgaccgtggacggcggagcagtggctccggcgagcctgtaccgaccagaaaatgcaaagaccggtgctccggtgtggctgacacctaattctacccttaacgaccataacctctcactcaattgcaaagttctagctcctaatctctctatccacggtgatggcgcgaaatacggatgaattgaggtgttcccggtgctcaagagtgaggagggagtgatcggacctgtggagagctggccacggcgagctcacacactgcggtgttcttgatagattaggggaaaatcccaaattggggagttgtggcggacgattggaggtgagggctggttcactgggtgcacaactacttagcagagctcactggggcggcaatttataggttccatcggcggtggcggctaatttttgagaagacgagcggtggccggagagaggggaggtcactggtgcaagggatgcgtggctttcaccgtggcaagcttaccagcgacgaaccagctatctaaagcggcttactgcgacgtggtaaagcttcaaggcatgtggccatcgcgcggcaggcggccaactccggcgaggctatctggaccggccgtgaggcaagtggatacagtggccagcccttggtctcatccgcggtgaagatctttttaccccaaggagttatccgggcaccagtgggcacgaattgcattgctggcacaaatcgcatcgtgggggtcgccggtggcaaggtgcactgcacctgtgatcttgttcagttcactgtaccatcagaaactctatcaggacgcctgacagagcggtttgcagtgcccagatctccaattttcatgtaataacttgtggaagaaccgcttgaattatt

SEQ ID NO: 79738 - DNA, 862 bp, Zea Mays
gaccgggaagggagctagccgcgttgaggtcggtttcgggtggcggaaactcgaattgggggaaatccggaattagagctcgctggtgatcggctaggggtaatactaggtggcttggtgcgtgaggatgttgcgaagctagccgcgggctcaatttataggaggagcgagcggtgacgggtaatttgagcagattgcgctggcggccggagatgaagaagaaggcactggccgcgtgagtgcgtgtccacagtcgtggcgagctcaccgacgacgatgggactgctattgggagtcacggcgacgcggtggaaagactcggacatgcggcagacacggagatggcacgacggcggtgagcagctttatccacggcggtgagcaaggggaggggtaccgcggctggccgggatggcgtccagctcaccggcggcggggatttttaccgagctatgtttatccgatggccacggcgcacgaatcacggcgagcggcaatcaacggcgacgggccaccggcggtgagggcagccgcgctggcagtctgatctggttcaggctactgtaccatcagagtgaccatcaaacgacctgacagagcaagttcaggttcagttttctccaaattccctatggtaccaagcccaaacatctatagcaaagttgttctactacaaaggatctacaattttgttatatcgacctggggcaaattccttgaagatcatgatctgtagagctccaaagatgacccagtaccactgttagtctgaatttcagactccaatagcctgacagctcgactttgagtgtgtttttctccaatttcttcacaacaaccatgcttactctcttaatcaaag

SEQ ID NO: 79739 - DNA, 380 bp, Zea Mays
gtgcctattgaaatagagcctattggaactgggcagagtattgaacaaggaccttcggacgtcggtctggttctggagaaagaagacgcgcccaagtaggttgaatctcctactcccgaagcgtctactgaagagctagactttattattcgacatgcttcgggtaaaaaattgtcggaagaggagattgtggaagccaaacactatgaccgggaactgaagtacccgaaaggggccctggtgtataatggcaccaatgaagatgactttctgtattgcctcccgaacaacaaggaaatatctatttgccgggagatggcaaaaacataggatttccgaagcttgaagttggcctttctgctatgtcgaaggatgacctc

SEQ ID NO: 79740 - DNA, 582 bp, Zea Mays
cccctacattggaccacattaggggggtctggcactttcgtccatacaatgcttcgaacggtgacatcttgatactggcctgatgactgttgttatatgagaattcagcatacggcaaactggactcccagtttctgtcaaacgtcaacacacaggctcttaataaatcctcgaggaccttgttgaccctttccgtttgaccatctgactaggggtgataggcggtgctgaaatctaacttggtgcccatagcttgctgaaggctcttccaaaattttgaagtgaactgcgttcctctatctgatactatcttccgaggaataccatggagcctgactatctctttaagatatatccgggcaagggtggctcctccaaaagtggttttcactggaatgaagtgggccaccttggtgagacggtctattattacccagatagagtcattccctttttgtgtccggggcagtccgcttacaaaatccatgcctatttcctcccacttccattcgagcgctgggaggggttgcagtaggcctgcaggtttctggtgttcggcttttgttcgttggtaggtgtcac

SEQ ID NO: 79741 - DNA, 912 bp, Zea Mays
aggctcttgcagaagtcaaggttgatcaagttgtggaaggttatggtgcattgaggatcacaacataaggtcatgattctaagccattgagataattcctatggtttatggttcaagtcataaggctcaaaattatagctcgagtaaaatcatggtcataataagtgcataagaatcaaagtcagaacctggaagggcccaaaagagctaattatactttgaattatagtttgggtcattcctatgtttggaaatgtcttgttgaccattgtaaagtgttggagctcaaagacggctaatgggatcaagtgtagtagacttgaagattaggagtccaacctcgagctcaaataggacaaaaagagtaaaatgatgaaaagtgttaagtatgaaaggtttgatcagtcaggtgtgttgcatacacatcttattatgttattgtcactttgtgttgctctttaaccttgtttgttgagaaagtgccatttcggtacctgtttgaggatagagaaatggagaaggagataagaaagaggtgagcttacatgacttagtaaatttattctactctaatcatatttgtctaagtcacagggaagtcctccaagaagtccaagttgaatggagaagaattagcgaagaaaaggtttccctgcagcttgcctgggtgcaccggaccacctatagtaagtgggtcagtgtgtaccgaaccagttctacaagaatttcaacaggaggctcggatagcctggtgcaccagatcgagtccatgtgcaccagatcacatgtatggagaaactatgcaacttcgggaataggagttaaaaataaccagaccatctacaatagaggtctaaggcatcagaccgccatggcccaatgactagtccaagtcgcgctggctagcccaat

SEQ ID NO: 79742 - DNA, 402 bp, Zea Mays
cgagcgctggccggtccaccgttcagccagtatacacgctttggtggttcgccttcttctcctgcagggctatataaacagataggttggtgagaagttaccacaacattcattgctattgcaccgttgtgctgttgaaaattttaaccgaagtcgaagctctatgcattgtgctttcaaacaagcacttcgtcacttaatgtcaacttcgtctaaaagaagctgaacattgaaatggccagagtaagatccactgctagggtgtcccgtgtgggagatgaaattgaagtaactgagacagcacccatatcataaatgatgaggtggtcagggctggttgtgcaagaggaagctattgccgaaggtacctctaacaccgaagctgaacaagctgtgaccgaa

SEQ ID NO: 79743 - DNA, 758 bp, Zea Mays
tcagagctttcaattgtgctagcctctatagcaagtctcaacacttccaaagaaggcacactaatgatatcgctcgttctaccaacccctttttcctaccattctagtgccaacatcgattgtgcctccctctatctccattactggcatcaactacattgctttagttggaattcatctcatagcctctacatggaggaatactaggatgataacaatgatgacgccgtgattaggtaccacaccgtaaacaacatcctcgaagtagcatcaccatgtggcttcacttcacaataggtagcagttaatcttttgtacagatcgaagaggaaccaaccaccttgtgaggctgagaagcaccagtcgtggcaacacatcatgattgaagagatagactctattgagagcaaccaaacatggcgtctaatgccacttttgctcggttaacatatgatcaggtttaaatgggtgtataagatgaagaagaacatcgtcgatgaggtgatcaagaccaaggcatggcttgtcgcaaagggatttgtccagtaggtagtcgtgggcgtcaacgaggtcttcacacttttggcctgcattgagttagtgtggttgctgctagcactaaccatctaggaggggtggtcgatgcaccatatggacatcaagttcgtgttaatcaacaacgagttgatcgaggaggtctatgtttggtagcctcctagcttcatcatcgtgatccatgaggtaaggctatttatgga

SEQ ID NO: 79744 - DNA, 284 bp, Zea Mays
caggaattggtccgaattgaatcagtttccatttctcggcccgtttggctgtccatagaattcaattcatcatttcagcctatttcctatccctgaaattttagcctgtgcacgtttcagaccctcatccgtcggaaaggtctagaaagttagctaggtttcactgctcgtgcctcgagcggcggcggcggcagccggactgttctggccgacgacggcatcgacgacgacgaggttcgtctctccctctactgtcgctcgtagctcgtgatgtaggggtcgtc

SEQ ID NO: 79745 - DNA, 438 bp, Zea Mays
cccattgttgtcactctatcggtgatgaacatgaaagtggggctccaaatgtagaggcaaataatgttgccaagcgctcatgtccctttactctactatgtgggctgatggtgagaacatcttcaaaactatcaacgataagaaggtcagttatgcaactaagtgcaacaattgctacatgaggtactctactctctctaatggtggtattggtcacctaactaagaatagagataaatacattaagagacctgaaaaagcttgcagtcttagtcttagatctcttttaaccctcatggtagtatgcgtgattgggggtatagtcctaaggttgctcatactcaactagttcgattgattgctagacttgacatccctatttatatgggtgaacgtgagaaatttgaagagcgtatttcgtggtatcttgactcatga

SEQ ID NO: 79746 - DNA, 820 bp, Zea Mays
gcgttatgcatgcatgggcagtcgtatctcatgcatgcatgcatgtaggagggcatgctcgacggtcatagagagctctcatgcggtgacgtcaccgaatgagcatcacatatttcacaggtaggaggagtatacacatacttatagaacaaagaggcgtcagattcagactactgaaattggaataggaatgtcaaagtacatgtcggaaatactactgattaaaaaggaactggtggtagtagcagtagtaagaacagttatgatctttcaattattctgcctgatgggggagacagactaactgactgatcaatgcatcacctttccatctgcacttgcacacactttaattacatttgcatgcagtgggcagtgtgccctcgctcctgccctatctatctatctgctcgcacttagtactactaaacatgacaggacaggcatttgcagttttgcactactgccctgccctgccgacacccccctcctactcctaggtagggatggaatagatgcaaaatcacagatggcctactccactacagtactggtcttggaaaagatgcatgcagtgcaggcccataaagaggagggattaaaggcagtgcagtgcagtggaggacatacatgcatggtcctcgatctatcagtgtcctgatgatgcatgcatgcacactaacactactacgactagccagtgttagtgtgtgtgtgtggctactagctagtgccctttgaacggatgggaaataaagccaggtggcctccagacaaacaagaatataatcccatgcatgcatgctttcggtcgaccgat

SEQ ID NO: 79747 - DNA, 500 bp, Zea Mays
caaaaagggagaattaggagggagcactagtcacctaaatagtcatttagcccatttaaacactgtgtagacgctacatggtggtatattgtttatgtttaattgtctatttagcctacttaattggccatgtagccatttaatggtctgtttagtttaaataagagctacatgctaggtgtgcgattgtttaccatttagaatttaggaaaacattgggagggaacatggcacaggttgacggtcatgctaaacctagtcatgggtggagccaacacatagctagttaaagaggttcatgtcataatatgtgtaataccctacatcctctctctactcatcgattgatgaacacaaaggtgaagaagattataagctcaaacaccagtgagcattaagacctaactctcccacacctcttggtcgtggtgggagttctagtgtaatggtcctaatccacctttatgtctaccctatgtgaagagtgaactttgaatccg

SEQ ID NO: 79748 - DNA, 2530 bp, Zea Mays
atgagaatcaggaaaaaaagctatgcaacttcgtagaagttttagattctaatgctcaagactagttggttgaaagatgtgatgatcacgatgaagaaaaatgatgaaatgaagctatgtaacttggtagaagtttaagagttagagaacttcatcaaaatgatttcaagtgtgataacgaatgtggagataatgaaatagaggatgaggatgttaagtttgagtcagaccacggtgaagtgttttccaacaaaagattatgagcaagacagagaatattgataatggctagatgtttttattttataccttaatttcttaaattacgcatttgcattactatttggttgattagtgtctatcgattagctactgattaatttctgatatctgatatcttgaacctactattaagcctaagtgaaaacgaccaaaaaaccctgaccaaacgggaaaatcagaaatggattatgactggtaaatttcggtatatcaaaacagataaatccggacaaaatatctcagaatcaatagaaaaacgataacttaaatcggaaaagctcacaataattaagtcctaaccacacacgattgttcattcacatccacatacaaatctcaatcacataaataaacaatatatatgacgattcgagccacggctcgaccggggccaactccgatgccaaagaagcgccgaaaagggcctgcttcatggcaacaccactacgaaatgacaatggcaggggaaaataactcccccatccaagaagagtagtatcagcgccagcgccagtgctaggcgcatatcctcgctcgcaagaacgctcttcggcagtagtaagaggagctcgtaagctcaattaagtttacgatgacatcgagcaaaaatgccatgaggccgaatggaccgagtgaaaaaggtttacgatcaacttgccaagtgcaacgacggagcgcaatacttcctcaaccccaggcaaaacatggcggtggtagccatgattccttggtccatccccgagcccgatgaaccataggtggggatgatgtacaaaaacctatccaacctagtggagaaagctgcggtacagtaggctgagatagatcggcaggctcccaccggcacggatagctacgacacgcgcatgacatcgtccctgtggagaacattattggggagatccgcgatgcccaacacctccttaacaaccggcactaggagaaggaggaggtggagtagccatgcaagtagaggcacgagcaaagtcccagcccacctgggccagggccacgcgccatcgggcacgccatccacaaggcgcaattccctacgaaggtaagggcactagcaaacatctccaagtacaactgatcctcaaatctaggtgtatggctagaagaatacctccatgcatgctgcatggcggggatcaaggatgaccacctcatcatccagttcttccccatccacctcgcagaaagagcgagggcctggctcaaacatctgccagccagcaccatccacaactgggtcaacctccaaaaggccttcgtcgggaacttctagggcacctacaagggccttgtgagctcctcgaacctcaagaggtgcaccatagaagtggggttagcctctgtgattacatctggaggttttcccaaaaaaggaactaatttcctgacgccaccgtggtaagtgccttcacctatgacacaaccaacgaggcactcgtccaagaacttgggcgagggagaccaagaacaactaccgacctcctcgacatagcgaccaagtttgtcgatagggaggacacaataggggcaattttcggcaagggaaagagctcgtacgacgctgatgaaccaagcggcaagaagagggagcatcgggagcaccctgacaggcgccaggggaaccaccaccctcagagcggtgaagaagaagtcgccaccatggatcggccatccaggccaccgacgaagagcggtggcgaccacttctagaagctgatggactcactgtgctagaaccactgcttcccgtttgccacaagctctgggattgcaagttcccgaagcgcttcatctccaagcccctcgccaagaaagcaaagtcgaagaagctggccaaaccagcgaagcaggaggccccaaccgaggatttcccagaatatggtgcctcatgatcttcagcggggctgaggagtatggtgacaagcgccgcctcaaggtcgcccaccacgaggtgcacgcagctgagcctgttgtcccgcggtatctgtggtagtcgaagttccccatcttattcgaccactacgaccacccggatagaatcctgcacccaggggccttccccgtcattgttgatcccatcatgggctcaaagagcctctccaaagtgctcatggatagagggagcgacctcaatatcatgtatattgagaccttcgacggtcttggaatcgcatgatccgcgttgcgacctagctgatcgacatttcacgtcgtcatccccggccaccaagcc

SEQ ID NO: 79749 - DNA, 380 bp, Zea Mays
tggaagaaacaatgaaaatgccagaaattctgagccctccaacagaggcaaaactgctgaaggtgcaaaaggcttctgccgcaactcccaaaaggaggagaatgaccagcgtgctggatgctgtgctggagactacaaagaccttgagtcccgctccttcaaagaaaatcgctgaagctgccaaatcgcaagctgaagccaaagctaggcaagccgaaactgaagctaggcaagccgaagccaaagctgggcccttagtgcccagcgagacgaaggctatcacgcctgaagacaaagctgatcagcaaacttcggataccattttgacagcagggcaagatatggcagaaaaggcaaaatctcctgcctccgaagctccg

SEQ ID NO: 79750 - DNA, 521 bp, Zea Mays
ggattctggtgatagcgatgacttcgatgtggaaagcgggaatgaagatgccgaagatcggccctggcggccaagtcataccatcttcggaaagtcgtccatcaaacagagtcagattgatgccatgaagggaagatacttttgtgacatgtctattgtgatagttgggggagacagtgccgcccctgcacctgaggaagatgaagttgtagtttatagaagcttcatgaaggcaggtcttcggttcccattgagcaaattttttgttgaagttttgaagacatttgagatctttcttcatcaaattactctcgaagctataattaggataggtattttgtctgggccatgagaagtcaagggctggaaccaagcgcaaagtgcttctgtaacatgcacaaactgctgtacgaaacgaaggccactggcaaagagcaatatcacaacaacttcggttgttatggcttcgttcctcattctgatgtaagctacccagttccaacttttcaaaaaaggtggtc

SEQ ID NO: 79751 - DNA, 476 bp, Zea Mays
gtcgggggcactgtctccacagcgaaggcacgttgtggcggcagtaccgctgcatgggcgtcagtgcgggatggccataaggagtatcgagtgttccttttttacctcctctctcattttcctcttctccgcctgacgtttcgtggcgtccgtctacggtttacctttcttcgtcttcctcggtcctacagatctaattttctcactcatgttgtgtgtcgtccgcaggagatcaaatttggtttactcacgccgggtgccgtccacaggagattgtctaggtttgttctcatgccattcgtgaactagatcgtgtggaggcattcatgggtgcatgtttgtttaccattcagtttgcaggtatggcctctttagagaactctagaatcttcatatttttattttgattagtgcccttcttttcaatattcatggtgtctttttcgtataaaattacattcatgtcgtttctttta

SEQ ID NO: 79752 - DNA, 283 bp, Zea Mays
attaagtaaccttaagaaacaactaaatatatcttggataaactaaaataattgagaagtaaacataaaaaggggtagaggagagacaatatctaaccatcttaagctacctcgtttgaggaaatagaaacaacaacctaactactcttatctctaatgcatggttgtatctctaacacaatatctaactcgttagatgtatctctaacatgatatctaactcctcatccccacccccggccttgattccctccatgatgctgattgtgttggtgttcctctt

SEQ ID NO: 79753 - DNA, 462 bp, Zea Mays
cttgcttggttatgcatcaaatgcgcacggatatcgtgttttcaacaataccaccggtcttgttgaaatagcgatagacgtgacatttgatgaatctaatggctcgcaagggcatgtttctaatgatattttaggaaaatgaaaatccaccatgtgaggccataaagaagcttgcaataggtgaagtgagaccacaagaaaagaatgatgacgaaggaactttttggatgacaaatgaagtcattgatgtgggcactaaggtggtgggtgataaatcctccacccaagcaaacacaccaacctcaagtcatccaatctttgaagaagttcatcaaccacaagagttgccaacaattgtagaagatgaacctgaagtagttgttagtgaagttcctcttgatcaagaggatgataatgaagggcaaattcaaagacaacatcagtgcctcatcctcgggttca

SEQ ID NO: 79754 - DNA, 449 bp, Zea Mays
gtaatccgtcaagggttttactggcccgcaataatctgcaccacgaatcgagtcacgcgatcgtgcgaagcttgccagaagttttctccccgctcgggcaacccttcgcagttcaccaagctgattgtccacacatggccacttaaacgctgggggttggatatcgtcgagccactacctacggctcaagggaacctcaagttcacctttgtcgccgtcgaatattttaccaagtggatcgaagccagggcagtatcccacaataacgtcgaagactgcccagaagttcttctggcaaaacattgtttgccgattcggagtctcgtccgagctcacagtcgacaatggcaaatagtttgacagccaggacttcaggtacttctgcttctcctttggcaccaaccttgccttcgcctcggtataccacccacaatccaacagcgtcgtcg

SEQ ID NO: 79755 - DNA, 540 bp, Zea Mays
attttcatgctccttccagaacaacatgcaattgttctcgcaagcatcaatcttttggtagttcatgccaagaccagctacgagcttcttgcaatggtacaagttcttcggcatgttatgattcggtgggatgatatcaataatcagtttcacaatatcgttgtaacaattgttggagaaggtgtactttgacttcatcgccataagacgtgttaccacctgcagtacgctcacattggttccttcatgcactttagcctctgaggcttcaagaagcttgtagaactctatcacatcctctggaaaagcttgattattctgtagttctgggtactcattcctaatatcatccaacatctcttcaattcggtctacatcctggtccccatccgactcaatagtatggtccacctctccatgctcatgccataccaaatagttcggcataaagccatgtttgaaaatatgatacgagagctccacttttttcaaccgaaccaagttccgacattttatacacgggcacctcgctaaacgagc

SEQ ID NO: 79756 - DNA, 655 bp, Zea Mays
tactgtttctaacacatctagtacatttgccatccttcttcttttgggagttgccgcaagacttttttgtgccttcggcactgttacttttgaagaagggcttaaagtttctaacatttttgttccttcaatttttggctcttcagccttacctttatcagtctttgactcagctagctcggctgagggtgtcttcgacattgtagccagatcttcagccttctgcgtaggagaaatgggctcctttggtttagcagctgaagaagtctctccgccaaactcaggcaccatggccggttcaatataacgcggccggtgggtaaggactttcaactttttgctcttcggcgcaggctcatctggagtggccgaagcagcagtcctggccggagcagtagtcttcctcttctttccccgtccccgcagcgggtagcagtagtcggggtaaacaaaaccaatagcatcaaaaactctgttcaatctcttttttccccgtccaccaaaggatgcggataatgcattatcttttgctttggaatacgacccaagcagttcatcacttgtagcttcgatacatttcagccagtcatcattcggttcatcaaatttatctccatatctgaaggtgtatttcagtcgaaccagctcaccttcg

SEQ ID NO: 79757 - DNA, 405 bp, Zea Mays
tagattataagcatatgcatcttaactctacattgttggcagaggtactttgccatccttagctaactggtaacagcctgaccacagttctagttgtgccttgatcgtctcacatgtgattttccaacatgtgtggtctgacagagtcatgctagcgctagatgaagttggtccatggtgaagtcaacaattgttgatcgccttcactaatgtattcctcgaatctctatcatttttcttggacttggattccctggctaaccacgagttaattgtgatgttattcgacatccatcctcgtcttatgtgctaggaatttctaatgaccacttgttggtaaacctctttctgtgtgttttacccaagaggttgcatctcacatggtttgtgtgattgatatccatt

SEQ ID NO: 79758 - DNA, 594 bp, Zea Mays
ctcgtcgctccccagataaggtggccacgtagtgtagatttcaagagccgttagatgaatatcctaccgtcgaactgttgttttgtttgtctgttctgtccagtactccaggcctactcttcatctgtttttttaatagagttggccgagtctctcgaaagtgctccagtctggtagaagcgccagtaagtttgagaggcgtcatcttccagacagtcaaatgacggcaggtggcctcggcgtcatgatcgctttacctggagcgttgaaggtaacactcattcctccctatctctacattacgctctatccttctctctcttattacttctccggcaccgtcaagccgtcgtctaaggatttcagcacgccatcgagccaccctcttctgctccgtccagacgttattttgaaatatgctccctttggctgccgatattctccgtttccttcaccgtttcgtagcaatccacgaggcgaattcacttgctccgtccgagcgtccctagctgccaaatgcgatgacgctgctgtgttggggtattttctaggcactcactggcagatgcgtggaggcagctgcaccgaaattcc

SEQ ID NO: 79759 - DNA, 1879 bp, Zea Mays
cacggttcagtgaatcaataggtcccactgttgacagcaccttgaagggcccaaagaaacggaaggccagcttctggttaccacgatgggcgagcgaagactgaacataaggttgaagccggacatagaccatatcaccaatttgaaaggaacgctcagacctcttcttatcagcctgcaccttcatgcgaagttgggcacgagccaaatgctgtttgactaaatccatcatgactttcttctcctcgatccattcctgcagtgaggaaatcggacagacagcagaagactctactccaaagtgacgaggagcgtaaccatacaagacctcaaagggagaaaaacccaatgctgagtgccaactgaaattataccaaaactcagctaaatagagccaatccacccatttgctggggcaagcattcacaaagcacctcaaatatgtttccatgcactgattcacacgttcagtttgcccgtctgattgtggatgatacgcagaactcatgttgagagaaacccctgccaatgaaaagagtgtcttccacaactgactcgtgaaaatacgatccctgtcagatataatcgccgtaggcaaaccatgcaacttgtaaatgttctgcatgaagacatgagcaactgatgctgctgtgaatggatgtcgcaagggaataaagtggctaaacttggaaaatttatccaccaccactaagacacaattcttgccatgagacagaggaaggccttccacaaaatcaaggctcactgtccgccaggcgccgtcgggtatagccaaaggctggagcagtcctgggtacctgctcctgtcgggcttggcctgtaaacaaatagagcatgccgaaacaaagtcttgtacactcttcttgagacctgaccaggcaaagagctgcttgatgcgcctgtaagtgactggaataccagaatgaccaccgagaagagaactatgcatagcagccaaaatggaacgctgaagagaatcattccggccaacccagagccgacctttaaagcgaagcaggccatcagaaagggaaaaattgggaacaacagtgttgtcaacagccagcttggtgagaatgtctttggattctggatcactcaaatatccatcctgtaacgcctgacaccattgtggagtggatacggaaacagcatacaaggaaaccagtgggtgagctcttctggacagcgcatcggctacaccattttcaggaccctgcttgtacacaattcggtattgcaaacccatcagttttgtgaatactttttgttgccagggagtgttcaaacgttgttcattgagatgcaccagacttttttgatcagtgaggatagtaaattctccttgcaacagataggatctccactgttccacggctaccaaaatagccaaatattctttttcatatgttgagagaccctgtgtcttgattcccaaaggtttactaataaacgccaatgggtgaccgtcctgaagtaacacaacccctactcctgtctggcaagcgtctgtttcaatacagaagggcttagaaaaatcaggcaagcttaacactggagctgaactaagcagctgtttgagtgttgaaaatgccagctcatgatcagatgtccatacatataatgtcccttttttgagtaagtcagtcaagggcttggcaatgactgcaaaatggcgcacaaatctcctatagtaaccagcaagaccgaggaaactccttaattccttcacattagttggacttggccagtgcagaatggcgtcaaccttggaagggtcagtggccaccccttcttcactaatgacatgccccaagtatgaaatagatcgagcagcaaaggtgcatttggaacgttt

SEQ ID NO: 79760 - DNA, 505 bp, Zea Mays
gtggtttggttctgccggtgttcaaaggcctgtttggtcgccttagcatgtagatctcagcaaaaatcccatgtaaggtctcctctctgcaccatatcctatcttttccatgtgagttccaagcaaagatatggtcggggttgagagatattgtggtgtgaagttggctgtgtctgagttgtccaacctgagacaaaaatcgtgtcacgtcatgtcaaacgacttatggttgggttcaaatttttccagggtgttctaggggtctttaggcgccattttgttaattgggccctatggttttgagttttggaaaaatgtgaacatgtttgatctttgaaagagggctggttttgaaattgagaaaaatctgatttttcttctatgcccttctctttggtgacctttttggggtttttctgaagcctttttgggtcactctcttactattttttgtagggtattaagtgtactacaacttttataattagcccaagtcatgataatg

SEQ ID NO: 79761 - DNA, 467 bp, Zea Mays
acgcaacaaagttcttacaggtcactagctccaagaggcagaggtggaagaagcttaggaggaaggttcagttcccatcccagaaggttgttctgtttattctgtggcgaagataagggacatacaacaaggacgtgtcaagtcacgatccagaagcaaaaagaaatagctgaagccgaagcacgacagaatgagcccaagcaggtcctgcacactgcttcatgctattctccatacattcccgagtatgtgggtaaccagcagcccacagcatcagttgcttcggcaagtcactctcaagctgcatgggccccactaccaccaccaccacctatggcaccaaccttgactcacaatgagtagccagaagggcaccgccaagcgcagcaacaacgtgatacacgtgaaaagttcgaagctcgcataatcaacaatattgtacccaagtcaaggcacatttattgaag

SEQ ID NO: 79762 - DNA, 516 bp, Zea Mays
ttcctcttgggggctatcgcagtctctcaagcgaagtgggcaggctcaagaactcagaaaacagagaagcggtggaggaaaaaagcaagagttagggttcggaactcaaggggatacgtcagcataaatatatgttggctcgataagtcgagcgcaaagaatgccagatcataactcagaaaagcagagatcacaatcatcactcgggcattacctctaaaatgccagagagccgctaatgcgcaaacaaaaagcatgcaacagtggataagcaaagaacaacattttttattcataaggggagttcgtcacaaacttgaaactgactcattatgagttggcctcttccacccctggtcataacattacattacactactctactacttacactatgatgtactaatactactctaatccactactacttactactacatactactactactactactactgttatctatactaatatctaaaccagcattattatgccactggctttgccgtcac

SEQ ID NO: 79763 - DNA, 2383 bp, Zea Mays
acaatactgacaacaaaatgcaaattccttgtaaaccttgagatcaaaaccatgtgaatatacctaacatgataaagttttactgtacatagtaacgcaggtgtagaagcaacaggatagaactccatttgaatgtgaagatggtaatttgtgttagcactaaattacaataattccatcatcagtgaactctttgaatgttattatgttttagcatttctgttttaaaatgtatgaagatgttgaaagcaagacatctcatcaatttgatggaaccagaatacgatatttaacaagatgcaatgagccagatatctatcagtgaaaaataatcatcaacattttttctgttggtaattagaaaagcttgagactgggtttctacatacatgaatttataataaggaaaactttatatcagttatctgaatgaaacatctgagatgcaaagtaggttgttcctctttaagattggcacatgctcagctggtgtcaatggtggccccatcaatcttaaataaaatacagttcattttctattcaaaataaaaatgactggccaacatactgcaactgcaattcatttgatggccccccatttcacattctagatcataattgacaactgaatcagctttcattcacatgtcaagtgcactgcacacaaccaacctggcaagatagtgaataactcaacctatcctagagtatcctctactggccatggatgccattaaatcataattgttgatctaatcacaatcttggctacaaagcccatctgcccttgactgcctattagacaaaaggcctcccacaggaattagtccggaacttattgttcacatagtaaggttgcagctactcaaagaattcttcgttattcaagtggctgcaataacttatccaagggggtgtgatctgtatgtctgatgagggctattaaaccatccaaagttttatatacctctttccttttcttgtgccttgtgtctttagccaaaaactcatgtacctcatttcctacctgaatcaagctactaccaggtgttttctcaactccgcaatcacgcattgttctgcgagcatccatcacactgtcccaccttccctctagggcactacaatttgaaaccaacacttgataactagaattaaaaggttccatttcaactatctttgtgctgacatactctgacaactctgcatcaccatgcgtaatgcaagaactaagcaaagttacccaaatgacaaccccaggcttaagaggcatgctttcaataaatcgaactgcctcttgtaacttaccagctcgaccaagtaggtccactatgcatccatagtgctccattcttggaacaatgcgacagtactcaaccatttgattaaagatgctccaaccttcttgcaacaaacctccatgagcacaagcaccaagtgcagcaacaaagactgtatcatccagtgtgactccttctctgcacatatcattgtagaccaatagggcttctctaaactgtccattataagcaaaaccagatatcattgttgtccatgtaatggtacatcttgttttcattttattaaaaactaaatgtgctcttcctacatctccacattttgcaaacatatctacgagtgcatttcctaatgcaacggttatatgagtgttgcttttactaatgtaagaactgatccagttgcagtattcaacactgcctagctgagcgcaggctgagacaacacttactaatgttgcttcatcaggcatgaatcttccctcaagcatcatctgctgaaatgtgcacagtgcatcatcatacctcaagttgtggttgtaccctgtaatcattgcattccacgaaaccaaattcttatcaggcatctgatcaaatagcactctagctgaatctagttccccaatctttgcataagcagagaccatagcagtccaggaaactacatccttccgatccataatatcaaaaagtgaccatgcagattcaacattgccacttgttgcataccctgagatcatgagattccaagagatggcatctctgatcggcatcctatcaaacacagcacgtgctgacaccatgtcccccgccctcgtgaatgcagcgacaatagtgttccaggagacaacattcctctctggcatcgcctcgaacaactccatggcccctgctgcgtctccattcgacatgtacacaccaactatggagttccacgaaaccacgtctctattagccatttcatcgaacacctggcgagcgattccaacatcacccgggtcgctgcacttgtagtacacgttcaggagagcgttctgcacgaccacatcggacccgaacccacacctcacgatctgtccatggac

SEQ ID NO: 79764 - DNA, 388 bp, Zea Mays
cccaactcttgtcaaaggtcagcacacaagctctcaataaatcctcgaggactttgttgactctttctgtctgtccatctgactaggggtgataggcggtgctgaagtctagcttggtgcccatagcttgctgaagactcatccagaatttcaaggtgaactgtgttccccagtctgacactatctttcatggaataccatggagtctgactatttctttaagatatatctgggcaagggtggctcttctgaaggtagtttttactggaatgaagtgagctaccttggtaagacggtcgattataacctagatagaatcgttccctttttgggtccgaggcagtccgattacgaaatccatgcctatttcttcccatttccatttggg

SEQ ID NO: 79765 - DNA, 723 bp, Zea Mays
gcaatgtcctctgacaggtcaccaacaccgcaaagctcgaagcctgactagaactagacgaaagctagagcatcggcagcaccgcgatgggcaccacgatgaacagcttgaagaacccagttcgaggcatcgagaagacgctcttctcggtcggcaccttgggcatgaacaagggcaacgaccctatctgcaccctcttggagacccgacacctccaactctagctctgggtaaaacatagaaaaggagggacagtcagaataactaagagaaatctcaataagaggaaaagatgtcactaacctgcaccacgacggtctgcctcctccaagtgggcacgaagactgaccacctcaccatcagcagcctcaagacaggtatggctggtggccaaactctcccaaagatctaatggggtctgcgtcaagagaatgggaaccccaccttggcaaaaagacatctcaaaatctttcctttggctcatcgagatcacctggctactcaaggcatgaaaagtgaaaggtagaatcaggatcatgaggaccccgcgacgaaaaaggaagaaccatatttgaaatcaatcatctgttgcataagaggtcttagcaccgagggacggccccccactggatgttttcctagatcccgaggagttgagaggagaccgccttacttttgatagaaaggacagagcaaggtacgacaaggccacccaggaagagc

SEQ ID NO: 79766 - DNA, 337 bp, Zea Mays
aaaactttctgcatgtgggcttcttaaattaatcgattgcaaagatgtgatgcttataaagttagaccttgacgtcgcttcttcaatcctaaccgaagggtttcaaactgacgtcgatagctgtcggggaaaagatccttgggcccctggggggcactagtctgcaaaaggacgaggggaagatctgcccaggaaggatccaccctcagatagccctgaggcaccgagcccggggtcggacgaggcggagccagaagggggcttgggcgaatcgagaggaatccactcgagcagatttcacattaactgcatctggtgccaagccatagtgggagag

SEQ ID NO: 79767 - DNA, 1043 bp, Zea Mays
atcaattgtaaggcctgcagaaaatgaccactgctgatgattgctttgatctcaccttcattgtcgacatgctgattgacaaacagagacgaggaaaaaaatacagtgctggagtggatgagaaaataacaataacaacaatttaagtacggtaactttgtgatcaccaaaaaggggtacatctcttcctagaaaaaggagcgggaaacactagctggatgataagaatctgcagggacattgacaaaaaagggataaagtacaactactataagaattaaatcttcagtaacaactcagagtgaaaaacaaactttagtctagaaagcaaacaagattcacaacttaaaatgagatgttccaacaataaagtgttgcatagtacatgacgccatacagaagaagacgattaattagtagacattagaaaaacaaagtgaacacttccacagaaaccaaccaatcagttactttgcataaatcaatgtgccaaattgaactattatgctatctccaaatgagttcccaaatttctcaggcctcagttcaaacacaccttgtttctggcggtgagatgagctccaacgttcattaacccttaaaaatcactgcaacatgatgggctgccacatgatttactggatggtattacctaatttgtatacctttccaatcaagatcatactgatgctttctattctcctggtgactggttatgcatctcgtgcacttcctatgatctatacttctacagaaatggaaacctcatattctcatgctcttggatttcggaataaacaaacctttaagataaacttgcatggcattgatataaagcagcaaatagaccagacaaatgattgtataaataaaatggctctcttttccaaggaacattgtagtagattatagtgcaaggtagcactatgtaatgccaaacaccaagccaagaaaaaaaaagttacctcatcattttacttaatcatcacattcatgttttatacttttattaaggagtcattcttcatttcttctacaatagt

SEQ ID NO: 79768 - DNA, 880 bp, Zea Mays
ctaagaaacatagttgctctaatccatcatgttgttacacatcaaaatattcatgtttcccattgcttgggcccacttggccacgtgtcagtgagttcctgtttcccattgcttggacccacttgtccacgtgtcaaagagttctaacatttggcgcccactgtttgtgctccaaaaaaccattcccacgatggctcccaagaagtcaacttagaaggataccacctccatcggcgacacagcgaaggtagccattcttgccaagaagaagggcaaagcatcccttgttggtgacgtccctcatgaggccctcgaggatggggcagtcaatagcaagcaacaccgccgagagaacccaccccagagggcaccgttcgcacatgcagctatgagggcctacctcgggcccctctgtcaggcttcacctccctagaggctgaaaatattattgaggacgacgaagtcctaggcatctcagtcgaggaccagctcaagatgcacacacttcgcatcaaaaacaattatctatagaagcaaaaggaaatacttgcagccaagcgccagcgcatcaccatgcaggacaaggtcaggaagataatactagatgaggagtagaaggccaaacaactggaacaacaaatcacagaaatgcaaggcgaagaccccccaccaccaacagaaccctctccacataccaatcccaactactttttagggactaaactaccttgaagaacgaagtcctctcactccacatctccaaggttcaccttggcccaccaactttagggcaggtacttaccccaagtactatggcagtacggacccagcacagtatatcatgagctaccaagttgagatcgcatcatccggaggagat

SEQ ID NO: 79769 - DNA, 497 bp, Zea Mays
gaaggctcgagactaaaaaatttagtgcatctacctaccctgcgataacaacttatatgacttaagcagatctgacactccaccactgtaccgagctctgctgtctggcacacgatgctagtgtgatgcctcagtagctcttgattcatgccaataggtatcagagctgcctacactccatttacatcagagcgaccatgctcagcccacttcagtgataataatggcttgagaatgtcgctccctaacgagggctcgaaacgagccaagccatgccgctcaatcagggctcgaaacgagcctaagtcgaactcggctcggctcggtgtggctcgttgacagatcgagctcggtttatcttggctgtttcattcaataagctgaaaaaatgatccgctcgaagttagctcacgaggctactcgactcgtgagctagaccttgataaataatattgtattatatagtgatttaatagtatataaatatgaaaaatata

SEQ ID NO: 79770 - DNA, 404 bp, Zea Mays
agttgttcaagctgtgacttaagatggtacgacgagtggctgatttcgcgaacctgcagataagacgagtggctaaaaacactatcggatattgctttctatcattctacgcgttttaaaatataagtatgaaaaacatagcttttctagcttttacaacactagcccaccgtacaaggcataacatatattttgatggaaaatggaattccttaatgatatgttgatgaaatggtcttttgctctttgatgtgcttcattttggcttgtaaataaatgaaacaaactatttgcctagatcaactattggtgtctctacatgctctaaattatctttattatttgtattttgcacaggtcacgtactgctggtgctccgcttcaggtgaatttccaattctgac

SEQ ID NO: 79771 - DNA, 412 bp, Zea Mays
gcgcagccagtcgcggggtcggtctcccgtcaagcaccggagatacatgatgatgaccttgttcgccgactcggactggtcgtctgactggggatgaattgtcgtggtcatctgcagcttggtgccgctcaagcgcatcagctcgctccagaagttggaggtgaacaccgagtctcggtcagagacgatcgactggggaatgccgtgtagtcggacgatgtcggtgaagaatgcttgcgccacagactcggccgtgtacgggtgcgccaggggaatgaaatgtgcatatttgctgaagcggtccaccaccgtgaggatgacggtcttgccgcggacgcgaggcagcgcttcgacgaaatccatggcgatgtccgtccatacaccttgcggcaccggcaggggcaacaacaag

SEQ ID NO: 79772 - DNA, 402 bp, Zea Mays
gagaagatgttcagtgaaactagaaagggtcatgatcaagctgtttgtttgtatataagattatgttcaccagagaggctctttatagtttgttagtacacaatcattgcacatatagaattgcacagttcaacttgtagcgcgtacgtacgtgcatacaatagtatttcggaagggtaaacgactgcagagctagcaggagccggagacaatccgtgcacggatcgatgcagcaggcatgagtcgtgacatgaagcgtggccgatcgactcgaagggccagttcatggcgtcatggcaaataatgcagtagatttagggcctgttgcgtgcatgattgcaattagtttggaggtgtcagactccccggccacaagggttgtttaattagcttaattagcaa

SEQ ID NO: 79773 - DNA, 1088 bp, Zea Mays
gtcggattggtagtttgtcacatgaaaattggagaacgaagcccttcaaatcaccctgtcagatggactaaacaagattgccatggtacagtagctgaaaagatcttcagtgtcgtgaaaccaccgtcggtgatcttcgcgcgtggattcgcgctggccgctgcgattcgtactctatggcgcgaggataactgcgagaggtaaaaagatctgaagggaggatgatttgttcccagatgtgagcttattggccgcacttgattgcctggcgacgtgtccacgtggtcgatgtcaacgggggacgtcggcgatcgtattcgcgccacgccataggctgtatcaccacgtcgtcgcgagtcgtggagagtaactagtgactgccgtaagaccttgccccagtacgtgtcgcgatgaactcactttagcaacaatatcccttcaccgttgtgatccaaatctcgttcaaattcagagcaaccatgaccaacttctataaattgagcgcttcccttgctccgcctgtaacacctcaggtgttacttagggttttcacttaagactacacaagtaagcccatcatcacatgtgacttaacttgagtaaaggaattcaaacatggaaatcaagatcctaaataagtgcaacctatcttagatgtcatgccttggcttaccatgcacatagaagggtgagaaattgcccaaaaccctaatgcaccccctgtggacaattggagtactataagtaagtatgacccaaaaagctatgaaaaccacttgataatgtcttgggccaattataaaagatgtagtgcacttaataccctacaaataatagtaagaaagtaaccccaaaaaggtttcagaaaaaccccaaaaggttcaccaaagggttgagcacaaaagaaaaatcaaaatttttctaagtccaaaaccaacccttggccaaagatcaaacatgttcaccctcattcaaacttcaaaaccatttgacccaattgacaaagtggcgccaaaatacctctagaataccctggagaaagttgaaccccaccctaagtcgtttgacatgacttggcatagcttttg

SEQ ID NO: 79774 - DNA, 306 bp, Zea Mays
tagatatgagcggtgtgccaaaacaaaggccaaaactgtaaaaatccttagatcttatgcattgaatagggaacgagatcctctaatgttggggaggagccactgacgcgtgggccccgcatgcgatagggcctatatgtagtgacctaactgcaccatgcagtacgtcagaggatccgcgtaatggatagagccgagtctattagaaatttgggtatttttatgtttaatttaattcacaaaactatagtgaatttatgatgatatgtatgtgcacgtgtatagtattactatttacaatagtag

SEQ ID NO: 79775 - DNA, 1122 bp, Zea Mays
cgtaaagttgctattggcttccaatttgaatagatgatcttgtaatacattctatcgtacgtgaatttggttgatacaatgggcaaggcttgccttgttttgactggattgtgttgaaatgtgtcaagattttgcatgcccccatcccaccatacggcgaaaaaaatgtcttgtaattttttgtgtatgaacaactatattacctgcaattttgacagggtgctaactgtttcatgctgacgtgcattgacttccttattgttcactatttggagttgatcatcgatatttgggtcctgttcaatcctttttatttgttttccatcaccaaaaggtgattgcgacttcttcccttaatgttatcttttttcagataaaggactacagtttgtgggaactgttgactttcaaattcgttaatccagtgatggacattggtatcacaagacaacttgacttcacagatttacttgagttaccaaatgagctcagagctacctcctgttatgacaaacttctgtcttcctggactgctgaatatcaaaaccaccatgataactcatctctacttagagccatgtctaattcttatggatggacatacttgcgtttgggccttcttaaggtatccttttctttccattgaggttgttgaattgagaaaaggatgttgctagatgtcagctctgagattcatggcatacaaaagtcggcgtccttttgttttcacctcttctatggtaaatagcaaatatatccttttttttgcaaggaacaattaatatatcctacaatgagcagattacacaagtgacctgaaacatattatcatagtattacctgaaattccatgaacgacaacatggggttaattatcttagaacaacaaccttttcatgttattactcttatttcaaagccaagcattcttatattgaagttcccactgattgtctttagtttctaacattctattcatgcaggtattaaatgacagcatcggttttgttagccctctgttgcttaacaagtttataagacttcttcagcaaggtattaattcttcaagaatagaatactcattattaaaagttctcccatgcaaatagatgctccgttcat

SEQ ID NO: 79776 - DNA, 1097 bp, Zea Mays
cggcagggagccgagctccggcgagctaatactggccagattacactaagaccgatgctaatctttggtttaaacctatttccagctctgaggagtgtttcccctcaactaatttctggattggagccctacagtgctctgcccacggtgacagcggcaacaatggaccactaagcgtgttcccgatgatctaaggcagctcagttcaattgggcgggtcggtgagcatccagagcatgcaagggtattgaaacaataacacagagggcgagatcgaacctgaatttggctggccacggcgagatcaaaattgtgcggtgttcttgagtaaattggggaaatcctaaattgaagctctctggtgatccattgagcacaatacttggtggctgggggcgtgatgatcctacagagctcatggtggcctcaatttataggaggcaagagcgatggccgggaattcgagcgatgacacgcggcggtcggaggagtggaaggttactagcgcagcggattggtgtcctatcaccatggcagtcattccggcgatcaacggagagttacaacgggtcacggcgatgcggtggaggtgccaaggcacgtggcacaagatcgtgaggaggcagtcaccggtgaggttatccgaagtgaccgtggcaagctcggtacggtggtcagagtagtttaatggccagagtttatccacggcaaggattcttactcgatcccaggcgctatccacacgatccgagcacgaatcacggcggcatgagcgtgaatccgtgcatggctcgtcggcggcgagtttctgaacttgttttccctggtgcactgtaccatggcgaggtgggttcagttggcctgacagatcaaattcagggcaaattttctctaaattttgtatggcaacacatccaaggctctgcagcaaaattgtagcccaacataccatcttcatctttgttatagtattccaaaacaaatttttactggatcatgcttagaatcgagctcaaagtttgctcaaacccacagccagtccaaattcagacttcaaacagcctgaaaggctaactttgggggtatttatctccaaa

SEQ ID NO: 79777 - DNA, 632 bp, Zea Mays
gaatatggtagttgtgggagggaaaatcctccgaccgggtggaggagtgtacccgctctgatcctaagatgaggagggagtctgggggtttgcctgattagctggaagaacacgagaacacaagggttagagtggtttgggccgccagaacgtaataccctacatccactgtgaattgtattgcatagaagtctctgtgtgtccgagggtctccgagggagtctccgtctgtctccgtgtgtcctcccttttttagtccaagggaagcacgtacatagtgaccgaaccccgacaagtagggccggtaaatctaatgctagacatggagtaagtgaagcgtccgtccgtggagaacgaatatcttcacttagttgtcatgtagacctcctggcttgtcgcgcccttgccccatctaatcagagtagggcgtagtataggttgcggcgtaggatgacgtgctagtgcacgtaggggtgcttaggcggcggtgtcctgtcttctccgcatgtcacccttcgccttggtaccgcgtgggctacagtgggagtcatgatgacagcagcccacgcggcgcaaagagtcaatggtttgcctcggtaacgcgcgagttattatgcggcacgtgtactgcg

SEQ ID NO: 79778 - DNA, 441 bp, Zea Mays
aatttactcagctagatctgtccacgtctaattccatcttcattaacaaaaagaaacatatatctgtaatcacaatgaattgatcatcaatcagcgccgtccaaccaacaggccttaccatagttcacttatattgtggttttatttcaaaatcatggatgctttaacaaaagtatgtttacaccaagcttgtttcaccagaaaaccagtatttaatttttcgaactcaaccaccagcaaatcagtattacgttccatataactgaaataattaacacatccctccagcataagcatagagaatgaatcaatgaatagttactacatataatatctttctcctaacatttacacatcgctatgagaaggggcagtattctggaacataaaactgttttgagcggatcatataaaataggggacacgaaactgacattgttt

SEQ ID NO: 79779 - DNA, 1298 bp, Zea Mays
cttttggaaatcttcgagctttggcattagaccgaggagaaggaagtaatattaaatatgtttgctaacgaaatggttgaggatcgtgctaattttaaaaggttatctgaagaaaaatacgataaaatcctaaggttagaggccgaaatgtccgaattgaaagaaaagcttgatgaagtgagtggagatttggaagttgagaaagagaagcgtgatattgtcgaaactgaaaagaacatagttcagaagattgttgaagagctttgggagtcgaaggaagaaagtttttcggctgcctttagatgctgcgagtagctgaagaacaagtttactaatattggagtgttctctagcgaagaggaatttattcacggtgatgccgttggggctataaaatgaatataaggtgaggttgaagcttttgacgaagtgcttactggtcgaggggatttctgcgcttgtgtgggcgcatcaggggtcgtctccttgcttgagaagtaaggatgcgagcatgcaaagctggttattcagtcagattttgatgttgcgacagatgatatgaagactccctgagccgaagctacagaactaggaagaaaattttattctgatgtttggcttaggggcggtaggcagatggtggatgaatatgctagagatgatgctggataaattttttaaatttttgctctttactgctttggttacttatactccctattcaaatacgatatttgcttttttctaggttcaccagacagtcaaggtagctaaagaagctagggaagcgctgcgtttaaaagaacttacaggtatttttctcgcctattttacttgcgcttcggagggctgttcctatgttatgattatacttgtcttttctacagctgctctttcacctccacctgacccatacatacctgagaatgacccggagctcaaggatgttttagccacagttgaagttgcacataaaataatggacgaagctgtgaatgaagctctaaatgatgcagctgaaaaaattctaagggaggagtgataggcatttgtgtaaagatatttgggaacatccatgggtttgttttgtaaacatctgtgtaatgtacatatgctttgtatttacactatttatttgtaaagagtgaaatagttgtatgtaccgttttgagtggaagcgaaaagcaccttcccttcttttcacgttttgcaaagaattcttgtcattaaaaagacttgcacagaatcgtgaaaacatctgaatatacctgtataccatgaggataataacaatttcc

SEQ ID NO: 79780 - DNA, 566 bp, Zea Mays
cttgtacaaaccttcccattgtggtccgaatccttccttccatccttccttagatgagattcctcgtacacgaccaggatgctcagggttaccgtgaccagccattagaatgtctctccctttgcggcttaaatgttccttggctctgcttagctgcaattgcatatatgttttttgccgcttctttgacagtgggatcatcaaaagatacaccagactcagtttcccttggttttctagcacggatccaattagctgtcctttcaccaagttgctcggacagcgtcggcaaccctgcagccttcttctcggcgtcttcttgtctccatttaggaacctgacgcttgtaaccacctgtgccaaggtggtggcggtatttgttcttcttagatagttccgaatttgcctcacttagcgatatgaaatcagggctgctcctttgctctagaaatactgcccactgacctgctgagattttatattttttcgtcgggtctaggtctttctttgcaaactttgtattcatctcagacctccagtttcggaaattgattgcaaactgcttc

SEQ ID NO: 79781 - DNA, 654 bp, Zea Mays
tctttatcaagtatccacgttcctcgatggtgcccgagccttgaactcttccgtggatgccaggcttgattcatagaaaagagcccacgaggtaacctctttgagggcttgtagtattttgtgttgtgtttttgctttgatatttgaagctcttcttgtttgtaggaggagatgcaaaacttcttgattctcgggatattttagacaaattgtaccacgatgccaacgtctctctcaccaccttggagaggagtcaccgttttactatgtcaaagctcgagcgccatagggacgagttgaaaatctcctagaacgaggtatcacaacttggcaggttgttgtcttcgaaagattccgtcatcagagagctgcgtgccttgaaaaaacttgtttcataggagctagaggtttttcatcgtgatgttgaggctgcccgtcgtgaaatcaaggttttagaggatgaccgtgctatcatgaaggcttggtgtgacaaagcaatggacaaggccgtccgtactggccagatcctgatgaagaggcctggcgttgtggtgcctgatgacattggggctgatgtacttgctgcgtcggctacttcaagtaatccttctacttctaggatcctacagataaggttcctcgcgatgatgctcc

SEQ ID NO: 79782 - DNA, 793 bp, Zea Mays
ctctcgtggctacagggtgttagggtcgtctcgagtatcttattgaagtcatggggatagtgtgtcatcaggcttgtaagtcgcacatcacacatttaattgtacgtgagacttacctaataagccaatgttatagacacattagtaggccctagccatgaggtccctgcctagagggggttgtaatgtcctcgatgggtccaaacacatccctatgtcttgtggacatgattacacttagtcgcagctagttccttgttcccatggaaggcctcgagcctcgaggaattcgaggcccaactatttgtataatgtgagaccggataccttagtggtctaggtccagtaaagggttccaagcaactaagtgtggttgggtgtcccgagagacaaagtgctatgggcacttgaatcctttagtagtgccctagggcacgagaggctccaatgacttaggttatgagcgtcttggggaatgatggactctgaagatttagatccttctagctaaaaacatcacaaggcattgaagcactaggacttaatccatcattatggactaacaccattagtgcagaatacctcagaccttagtgtgccttgggcccaaagtgcttcaagacccttggtggttctttactgaaactttctagtgtagatatcattcctttagagtgtcctaataagggtgattgggactgctccagctccacaaaatttagtgcagttggtgaagtagatcattaggtgctccaaaaaatcgtgaagctggagttgtgaacctttaaaagac

SEQ ID NO: 79783 - DNA, 432 bp, Zea Mays
ctttaaacaccttttgatcgacaaaagcagaaaacctatcttttacctttacgtttgcgttgaccatttgattccatctcctcaaatgatgaacagtgttcatccataagtgtagccaaccatcctactttataccatttgttcatatcatgaagttcctcgatcatcttcattaagccacttgatcaatagcccacatcaacacttggcttgatatctctataatgatatgatccactccatttcatcacatggccatattgcttcatcaatctcaacatagcttgctcttcaccattgcattatgtccatcagtgccaagtccttgctcttgcttcatcgccatgcggtccatcacacatgagcctctaacttgcccttcacactagcaattcggtccatcaaagccaagccatgtctcctgatcttctc

SEQ ID NO: 79784 - DNA, 653 bp, Zea Mays
tccggccgccagcacacttccttcaaattggacgccaccgctaatggacactataaatcaatgccccagtgagctccgttaggttgtcacgaagccagagcacccacccttgcctctgattagccaccacagcacccaaatttccttttttccccaattcagttctccgcgccgccgtgaatgagctcaccgtggccaaccttctgcaggtcagttcaagcttccttaattggtgttctagcctccctcgtgtccccggtagctcacagacctattcgattgaactagaccgcactggattgccctgaacaccatagtttcctctcggttttcgccgtcgtcgtgagcagacatgctctgggccggtttagtgcaattgatggagggattagtgtcgccgagggtggaataaggtgttgagcaacggaggggcctagtcgttgcgttttctggcttgtacaagctcaccggagcaactgctccgccgtcccgtggtcggggatctcaccttgcgaagaaacagaaagggaggggcctcggtgtagatgtcagagacacatgtgaatagtgcacggggttctttactacttgttcaaaaagccgaggtattatgtgtaaaaccaccaacgcgggcgcgcgcgacacgtttcgcc

SEQ ID NO: 79785 - DNA, 495 bp, Zea Mays
ttttcagaggtgttttactattgaactatcaagctgtcatagggatgatgtggatcttagtgcgctagatagtcctttcttggaggaggtaagggatactgttggaggcctcccttctgataaagctcctaggcctgatggatttacgggaaggttttacaagacatgttggaacattattaaggaggatctactcgctgccctgaattctttgcatcaaggaaatgctcaaaaacttgggttgctgaattcgacctatcttatccttctcccaaagaggttggatgctatatcggtgagtgattataggcctatcagcctaaattagttttgctaagttggtcacgaagcttcttgccaacaggttgggtcctcgtcttcatgatctacttgcagccaatcagagtgcttttttgagagggagatcgattcatgacaactttatgctggtccaatagtcaactaagtctcttcacaagagaaaggtcgctagtt

SEQ ID NO: 79786 - DNA, 786 bp, Zea Mays
tgattgtggtaggtgtcggccagttaagcatagcttcagtcttggtgggatccgtggccacgcccttttgtgaaataatatggcccaagtaattcagagaggtttgtccaaaagaacacttgctcaatttcataaataacttatgagctcggagttggtagaaaacttgctgcaaatgtgaggtatgttgctcaagtgatggactgtaaatgagaatatcatcaagaaagactaggacaaacttgcgaagaaaaggttccaaaattgtgttcatgaggcactgaaaagttgccggagcattggttaatccaaagggcatcactcgaaactgaaaatggttgtggtgggttttaaaagttgttttgtgttcatcagtcgaatgcattcgaacctggtgatatccagacctcatatccagtttagtaaaatattgggtacccgctaattcatccaatatctcatcgataaccggcatgggaaagcagttcttcactgtgatggcattcagcttcctgtaatccacacagaaacgccaggatccgtcttttttggactaggagcactggggaggcgaaaggactagagctatgaacaattaatccagcctgcaacagctctttgacttgtttctctatttcatccttgtggagtggggaataccgatagggtctggaattcacaggagcggcattgggtaataaagggatgtggtggtcatgtattctagacggtggtaggactttgggatcttcaaagacatcctgaaactcgagcagaacttgctgt

SEQ ID NO: 79787 - DNA, 291 bp, Zea Mays
atgatttggtgtccacatatcagtagttatagcaattcgagattggcactgttggaaggaattcactaaagaaagtctttggaccttatacatattcaatatatctttttaatagtgtttcttgacactactttgaaaaggggttgtagtgctgcacaaaatcttctgaacccaacatgatcaaccatagaaagtgggtactcatgcacacagatcattagtgcaagttcttttctaacaactacttgatcaaaaacatacttgtcagccacaactcctccatgctcattt

SEQ ID NO: 79788 - DNA, 1024 bp, Zea Mays
gtttacgctgtttacgaatttgattgatatcatgcgtatatgtgtgtgaatgtgtttgtgtggacaaaatttcatagggagaacttaattcgacgatgttgctaataattcttatgttgtaaatggttattaagagtatgttggatacacgcaaataatgaggaaaacgcctcaccttaagttgtgttaaaatttggtcataagtgtatagtaagcgcgtcatgtttggtatgatgtaattactagattggaagggtagatttgcattgaggtggtgtattgttttggcttgtgtattgaggtggtgacatgcaaaagtattaatcacttcctctatgttaacgagtcgggtcatgcacactatgcgttcgttgaattacccttcgcatatactgcgtgattggttggttggccggctgcctccagacccgcggcgtcccgttgaccttgcgcagcgcctgtttggttaaccggagatgagggtggcagcatgcacccgcacatgcaacataggcattttttcgcttgattgtttgcatgcgtggaaagacacctatcctgcgtacccagcggtccgggctagctggagaccggcgctcgtcgcccaatcaaccaatcacgcagatagtgtatggttgtgttcataaatgtgaagtagacgaatcgtccttgtttggtgaagttaggtgtcctgtaaggttacatgaggaatgttttagtagatgtatatgcgaagtatgattgaactagtctatgttgcgaaatacggtgtagtggtgatacgagaaataggtttaaacttcaatcgattaattgacgagttcgattagagttgttgtgttaatttggattgtatggtgaagtgatgacatgacgtcgtagccatcacaccatatgttgtgtgactgtgattaagtgttaaaacaacttgagtagcgagtggatgataattgtaatgactatgtgcagggacagacccatgtagaagcaagggtattcaattgaatacccattattttttggc

SEQ ID NO: 79789 - DNA, 511 bp, Zea Mays
ggcgtaggaaggtaagggagagcgattggcattagagacgagagcgaggctttgtcccgtggtggcgtacagacaggaacccgagggggaggccccaacgcggacgggggagattaggattagcaacggcctgacagcgagacggctccgctcgtgtgttgtcagtggcagctcgcccttgttaaaactttacaaaagctatccaaccaaatcagcccatatctataatctccactaaatctaccaaacgaattacacacataatacacctttaaaattaatgattcatatcgctgcataactcttctctttcttatcgattcaaatctaatgactaatgttatttagataatccattcatcctttctcccttcatctctcacacgccattgcctccctcctccttccacgactccgccgtccctcaccttgctcgcgttgccaccggtccctcatgcttctatcgacctccaccctctctctcttacccacgttgtcgtcgtcatcgtca

SEQ ID NO: 79790 - DNA, 432 bp, Zea Mays
gtggaaagacatggagaaggcctaatcccaattttgtcctaagcatggcccagaggaaggaagtattgcaatggatcaagatgttgatgttccctgatgggtatgcaacaacctgagtaggggggtgaacttatctactctacgagtgttagggatgaagagtcatgacttccacatatggattgaacggatttttccggcgatggttcgaggctatgtcccagagcatgtctggctagctcttacagagttgagctatttcttctgccaactttgtgcaaaagagttatctcaatccgtgattgctgacctagaaagattgacacccgtgttactgtgcaagcttgaaaagatatttccaccctgattcttcaatccaatgcagcatttgattcttcatcttgcatatgaggcacgaatggggtgcccgtg

SEQ ID NO: 79791 - DNA, 542 bp, Zea Mays
cccgcgcccctgtcgacacaccaacgcgctcgtgccaggaagctgaccgcaccccgcgcccaggcaaccggccgtttctcctctcccctccccattcatctcccattaatggtgataacgcctccattcctcccaccccgccgtttctcttctcggcgccattaatgtgcttatggccgcccattcttccctcgccggcaccctctcatcttccctcttttcctctataaattggacactggtgcccatgagctctccctcaccaagctcgcctctccttgctgctgctctgtgcctcgccctcaccagtttactgcgccatgattcggagctccctcccctgcgctatcgagatcttcctgcgttgaactctattcatgcagctgccttgctggtctctattctgcgcatcgacctcaccggagttcgccaccgcgaaacaacatcctgctctgctcacgcagcctcctcgccttcgtctccgccgaagctgctactcgcgccttgctgcgtacgtcgtcatcgtcgtgaggagatccgcc

SEQ ID NO: 79792 - DNA, 354 bp, Zea Mays
gaaggagtatcatttgatgtggtcttttcacgcttgtaaattagaaatgtctctagagtctagccttatatgtcgtctccagtcttgcaaattcagatcgagccatctaaaattttgagaatctctagtcattctgtgattcgctccagtcatcgtgaacccgatggaatggccaataggcaatggcatgtgaagttcggtgtcatgcgcccgtgcccccagcaacccagcgggtcccgatattgcagtgctagtgtgctacgcgtagtgagtgaaccaatactgtcacggcgtcactcatccgttcattgccgcgaccgcgccaccaccatcggaccagagtaccagagcacc

SEQ ID NO: 79793 - DNA, 1018 bp, Zea Mays
ttggcaatttgtgccaaatgaaagtatttcttgaaaacaggagaacagaacaatgacatttgaagatggcatggagggagatacgtccaccctgaatgcaggctccattgcaattgaatatatagatatagcttaaccttaagtacgtcatatagatgtattgaattacatgcattctgcatatatttgctgctatgccattgtacagcatgcatacatatataaataatgcctgccaaattgcctcttcatgttttgtgttgatgtatttgtagcatatcttctctcggtggggtattcaatctatcatcgatacatagttaggctacaatttggtaatcaggtaggtacagctagctagcagcttattagagacttaattagctaagctagtaggtcatctggactccgcctaattgcctctcctcctcctgctcttgctccagcttcttctttttcgccgccgccgccgctgcagcctgcagctccttgcctttcccccacaggaacgcgtacagccccacgatgatcagcaacgcccccagcaccctgccccgtgcatcaaggcctgaaatgaaaaaaagatgcgtagaattgaagcaggtcgatcgtcaggccacgtactcaccctccaacgtagaccttggtgccaagcagcagcgagtccatgaccgtggtgatgatcagcgacagcgagttgaacatggaagggtagatgggcccgcgacggctcaccgcccacgagatgaggacgaaggtgacgcccgtgttgagcacgccctgattattaatttgtgatagatgtactagttcgatcgattagttgccaattaatcagtatgtgtatatacacatgtaattaccgagtagaccactgtgagaagctgcaggtcccacttgagcctccagtctgccctgtcatggctgaggaacacgccgacgacgaaagcctgtatgcttgctgacaggcacgtcagcgtcgtcacccagtaccttgacggaaacaccttccccagcc

SEQ ID NO: 79794 - DNA, 620 bp, Zea Mays
tgccggcctagcctaggcagaacgtgcccgtgtgcgcacgcccgcgtgccgactttgcaaagaagaccccaaccttttaaacaactcgaaagagtccgtggcactatttgtttcagtcgctgacgtttgcaaataaaccctcgcgcttttatttcttcacaacccgaggtccacgacgtcgcacggcgaagaaccgagctccgacgaacctgtatcggccaacataagcaatggccagtgccctaacttggctgaaacctaattcaacacctaacgagcgtttctcctcgatcaatttcacagttcgagctctaaatcactctgtccacggaggcagtgcaaacagcggatgagcatgggcgttcccggtgatatagggcagtctagtttaatcgaatgggtcgaggagcatcagtggtatgtaagagtgctgaaacaagagagtagagggcaagaccggacctgaattgcactgaccatggtgagagcttgttcacggtggcagaaaatggatttgggggaactgagcaattcgtgggctctagtgagtaattggaggcacgagcgggtggattggatgctggaatacctaacggagccaagagtttgctcaatttata

SEQ ID NO: 79795 - DNA, 813 bp, Zea Mays
ggagatatggattttccaaaattctagatttatttttctagcaaaaacaatttctagaaatactttataactatcaggggttgttttgtaaattccgaggacctaaccgtaatagttttcaaccagtgagggatggcgggttagttacggggttttgcgagggcccttttgaaagataaccatggagaaggggtaagaacggttcgcgactgttggattagaaaccaatggcacaaattaaaccctttctttaagtgaacaggtatgttctgttgaccgtaggattcgagatctacggtcaagtttttattaaggtgtaatctaaccatatccgtttgtccccaaatcgacggatcagaaacagtatgccgcagcagcccttagatctaatatcaagggcagggatttaaataacagaaatcatcttggatccgttcgattatcaatgcacgaccgagatcctaccagccgaaaggatactaggaatcccaatcatgaccacccatcggtcgatcgatggtcagggttccaccaccctacctacccccacgctgggccacacacacacggcggcgccgcccacagccactgcgcggaacccgtcggagccccacggtccggtgtccagtgccccaatcttgagcctaaattgcgctattcggagatagggaaacaggtaaagccattcaagggtcttaccaggcgcttggagaagttgagaatataggccccggggggaagcggccagcgaaggagttgacatgccgatgagcaattctggcccaagccgaccgagactttgtttggaaatac

SEQ ID NO: 79796 - DNA, 428 bp, Zea Mays
attttttctagcttgcataacaacactggtatttctttctccaacttctccatcatattttacttatttctttggcacagatctgcctgtagaaataacttagctcagctattgcttgccacatggcgtcaggcatatagccacgaaacatgatagggataatcctctccattaatatatggaagtcatggctctttaacccagttagttttcccgttttcaaattcacagctcttttcaagcccacagcataaccatcgggaaatttaatttttttcatccatctcattacctcgatcttatctttagaggtaagacagaacaaggcacgtggcggcttaccgttgtcattgagcacttgggttggtcggtcacaaagcattgctagatctcttcgagctttcagattgtcctttgttttttcaaaa

SEQ ID NO: 79797 - DNA, 486 bp, Zea Mays
tgagatagactgtccacgaggtggcgagttggctgcagaggacatcttgctcgagggtagccatggcgacatcgccatgtggccctccaatcgcggcgaggtggcgccggacgccagtttgggcgacaccgccgtggagtaccttctcggggatgtcgcggcggttctcagcttcggcgcaggatccgaggtgaggcgtggagtgatgtgcgtgatggtcagtttctgctcaaatggcctcgtcgtcactgctcagctcgaagcaaagcaagcgtgcaggacacagggccaaggagcatcagtcgataaacacttgcaaaaattatggagatgcgtgtcttggtcactgatcatactaccttcctgatttacgctgtcggcttcgacggactcgtcggatagagaggatacaggatggctgttcttctctagcccgtcttcagaaagggaaagggccgtatcagatcgtatgaacagagtggtgag

SEQ ID NO: 79798 - DNA, 475 bp, Zea Mays
gaatttgggatcgggaggaggctggcatggaacaaaaaacataaattagatttagcacaggagagattagaggaacaggtgacatgcactgcccaccgctagggacgaggaggtcttcattggtaccgtgggctctgcagcggccggagtaggaggcggggacgcatcggattaggacatcgggaaggtgaggaggcagcggcgtcgacaacggtagctgcgacaggtagggtttgggtttagctatgtataggaagggtggaggaggagaacggggaagcggagagaccctgacgctcgttgtggtgcggtgcttcgggagagacggagctccatgaggaggcagcgcttgcgatggcgacgctcagcggcagcgtccgattgtggtggggtcagattctaggtcggggtggcgaggcaaaggaagcagacctgagaattatgggaaaaattaaaccataataaaaataagtaa

SEQ ID NO: 79799 - DNA, 405 bp, Zea Mays
aaaacgaatcggtatatgacagtggtcgtaggattcaagatctacgcctgagatttctacgttggcttgatttaccctacaccgtcagttaaaggatctgcggctcagatggcatccatgcgaagcgttatcctccccttaatccgagccgcccaactaaacatctacggccaccgataattcccccaatccccaactctggcgacggcggcgcaaggatcattgcggcgagccctcgccggcgcgatgtgcattaggcgcacacgtgcctaaccatcaaatgtgagcgcatcaacacatagcaaagatgagggcgaagacacggagaggggctcaccggcagtggtgctgtgtggaggtcggaccgcggtggggagcttctcggcacgaactcttgctctagtg

SEQ ID NO: 79800 - DNA, 278 bp, Zea Mays
atgtcccagagggggatacgctcaggagatgcgcccacaagtccggactcctttaacgggactaatgacgtcagatccgtacccgcgcaagagtaggtccaggaccgccacatgtccgagagaggagacgctcgagaggtgcgtccatgagcctagagccctatttgtgccattcccgcgcttcttgactctcggacctcctgcgaatagggcctaggtcctcgattccttttgagatttcaatccattgcgtgatgcacccaatgggtgtatccctc

SEQ ID NO: 79801 - DNA, 980 bp, Zea Mays
tttctagggattaaacaagttctagatctaattttatactagaaagtattttttgcatttatttattcagttttcatcgagttctggaccgcgcacagtaatacagattagttcgagggtgaacccgcaaaagttcccagactcagttcatactcgggatggactacggtttagttactgcttttctcggggtttctttagcaaattcgccagagcgaagcgttatcgcgcaaagctatccgtccgatcccaaacggagcaccaggattagaccgtccaggggggaaaagcggtacacagcgcagaccaccggatcagcgatctacggtccgagttcaacataaccgggatcgactcgcactcgtcggattttagatctacgaccctaaatgatcacgtgaagaggtgcgtgattatctaatcttggatgtcgcgtaggggatccatgacccacacgcgttcttcccccggtagtccgccagcacagtggacggtggcgccgtggcggtgaaaccccgccggtgacagtagattatgcaaaccagtactctaatcccctaaccgaacgaggctacatgattataggagttgggcggacacgatcaacgacataccggaggcggatgcaacttcggaagaggtgcccacggcgatgcggatcccaaggcggtgacggcacttcggcgaggaattcgcccgagaattcagtcagaacttcgcctgctaatggtgctcacaccttcctcgattgacggcgatgctccacggccacacgcggactccgtaggtacgaccaaagtcgacatccacaaccttcacacaccgccgacccgctcactcccgaatagctcccacacggtcgtgattgcgcaacgaagattgcggagatgggggaggaggagacctggaaccccgttataccttatagggatagcatggtctgggatggagcaacggactcccgcttcaacggttcacct

SEQ ID NO: 79802 - DNA, 506 bp, Zea Mays
tatcccacaaaaccaccttctgtattggccacgagcccatctatctattgacgaatttcggcaccagtcatcgttgcaggtgggcggtctgtcactacgacacctttcgtaaagttcttgatgtctaggcggaatggatggtcagcaggaagaaattgtcgatgtttatcgaaggacaaatatttgccaccctttttcaaccaaatgaacatgagagcttccttgcaaactgggcatgggaacttaccgtgaacacaccaggcacagaatagcccatacgctggtaagtcatgcatggagtactggtaccaaacatgcattctgaagtttgtcttcgtagctcggtcatacatccataccccttcctcccaggcacataccaattcatcgatcaaaggctccatgtacacgcccattttgttccccgggtgtccgggaattatcaacgacacgaatatattctgcctttgaaagcacacaccagaggggagattgattgggataac

SEQ ID NO: 79803 - DNA, 391 bp, Zea Mays
cagtttaaactttacaaaactcacctaactaaatcattttcacacccataaactccactaaatctacctaacaaattgtacaaagacttaacacaccatcaaaactaacggttcagaccgctatataattctctctttcttactcacttaaattcaaggacaatattattttgatcatccctcatctctcttccccgcaaccaagccatcccttcccctcactcgtgtcatcgccgccaacttctaccatcgtgtcgtcgtcgacctctccccttccttctatgagatcgtagcattagcacatacaatacactaataggagaaaaccatcaggagaaaactgatgctttgtttttttgtcctatatcaagcatcaatttctcactccctc

SEQ ID NO: 79804 - DNA, 616 bp, Zea Mays
gattttagcagcttcagcaattttcttaataggaccagggctcaaggcctttgcggtctccaagacagcgtctagcacattggccatccttctcctcttgggagttgtagcaggagctttctgcacttctgacaattttgcctctgctggaggaattaaaatttctggcattttcactattttttccacctatggctcttcggccttatcattctcagcttcggctggcccgactgtaggcacctttggcactacaatggcctcttcggtgctctgcacatttggagcagcttgttttacttcggcagtagaagaagttccctcgccaaattcaggctccacggccggttcaatgtattgcggccaatgggtcaggaccttcatcttcttgcgcttcggcacagcagtaatggccgaagcaatagtttttcttttcttcccttgcctttgcagcgggtagtgataattagggtatacgaagccaatggcatcaaatactctgtttaatcttttattccctcggccctcaaaggctacggacaagacatcatctccggttttgctatatgctccaagtagctcgtcactgatagccacaatactttttagccaatca

SEQ ID NO: 79805 - DNA, 329 bp, Zea Mays
ggctgttggggtcgatagggggaatcacagcaacggacgaactcgaggccttccgcttgggcgccatctcaactccaccagcgagcagagcgggagccgaattgcaaaagggcagagagggtctggaggcaggaaagcaagaactagggcacagaaagcagaggcagccgaaggcgcagtacatatggggttttcccggggcggataccgtttccaaaaagcgcccagtcatcacccagcggttatttctaaaacgctggcgtgccatgtcatcacccggcggttacttctaaaacaccggcgtgccatgtcatcacctgacagttatt

SEQ ID NO: 79806 - DNA, 479 bp, Zea Mays
gtgcccgaagcatcacaatacacatcaaatgatttggtgttgtcaggctgtgctagcataggtgttgttgtcagatgtcgcctcaaggcgtgaaaggcatcttcacatttctgatcccaattaaacttcactcccttcttcaacaactcagtcattggcttagcaattctagagaagtcgggaatgaatcgtcgatagtatctaaccagtcccagaaaactctgaatcaatcgaacggtggtagggggcttccaatccatcaccacttgcaccttctcaggatcaactgctatcccatcctgagaaatcgtatgacccaagaatttgatctcctatagccaaaaatcacatttggagaatttggcatacaggtgatgatcccgcagtcgctggagtactatgtgcaaatgcatcgtatgctcgtcttcattttttgagtacaccagaacatcatcaatgaagaccaccacgaatttgtc

SEQ ID NO: 79807 - DNA, 736 bp, Zea Mays
gcttagtattagcttcgggttgcgccttggaagcttcgacaactttccttgtagcagcaggactcaaggcttttgttgtttctaacacaacatccatcacatttgccatccttctcctcttaggagttacggcagaacccatttgtaccttcggtactgttgcctctgttggagggctccaaatctctggcatcttcattatttcttcaatttttggcttttaagccttatcaaccttcgtttcaaccagcttgactgtaagcaccttcggcattacagccggctcttcagtgctctgcgcagtcgggacagtttcttttatttcagtagcagaagaggtccctgcgccaaactcaggcaccacggccggttcaatgtaacgcgtccggtgggtaagaaccttcacctttttgcccttcggcacaggttcaactggggtggccgaagcagcatttttcctctttttcccctgtccccgcagcgggtagcggtaatcagggtatacaaagtcgatggtgtcaaaaaccctgttcagtcttttctttcctcgacctccaaaggctgcggacagagcattatcttccaccttgtaatatgctccaagcagttcatcacttgtagcttcgatacacttcagccagtcgtcgtttggctcatcaaacttctccctgaatctgaaggtatacttcagtcggaccagaccaccttcgctagagtcggtggtggtctccttcgg

SEQ ID NO: 79808 - DNA, 532 bp, Zea Mays
cgtctcctagaggggtccggagttgtgtagccgcttagcatggttccgtactctaagcctgcacgctccaccactctgcaacaggcaccctagtatttgaaactgtgatcctgtgggtcgggacatacggcttgacttcccagtctaagtcctgcaggtcttgtggcatgaatcaaaggatggcagatactagacgatgggtactgtgggtgtgctcctaacacttcaaagtcggagctgtgtgcaggtccaggtcttaggggccggaccatcaattttatctttggtatactggtatccagcctcgacacattgagcctacatcccagggggcaagtaccaaggggaagttaatgatgctacacacagcaagaacaaataatatatagataagtttaagatccaatgctacctcattagcggttcttagaatatcttacaaaatcaaaagttgttacagctgcttcgtagcggagcccttgctttgtctctgctactctataggtcatcagcagggtcgcgctggaagcgc

SEQ ID NO: 79809 - DNA, 394 bp, Zea Mays
aatggatgtatgttacagtaattactccaactttttaatcttcctgcatttcctgccattatgtctagctctcatagcacaagtagaatggtactgtcaaggactgagtacccttgactcgccggaccgcggctacgcagctcgtagttgtcggtcgtcttctccggtggggagtatgcctcccaaccgtaggcttaacagaggtagaaaggtgagagacaactgattattgtttgctttcaaaggtccggttacaatcaatttataaggtcagcggctagcacaaatggagaagctctccttgattatagaacctgcccaaaacttagtttccttcctaggcctttccttcctagccgccaatcactcctaggcctttcctttctagcccttt

SEQ ID NO: 79810 - DNA, 690 bp, Zea Mays
acacttccagaaagttggttcctttaatcccgaaaggttttcggctgagggcgtctgctaccacgttggccttcccggggtggtagtggatttcgagatcataatccttgatcaattcaagccatcttctttgacggaggttgaggtccggttgcgtgaagatgtacttcagactcttgtgatcagtgaagatgtggcatttgttcccgatcagataatgcctccatatttttagggcgtgcactatggctgctaattccagatcgtgggtagggtagttctgctcgtgtggcttgagtaagcgggatgcataagcaataactttctcattttgcatcaagacacaccctaagctttgcttggaagcatcacagaagatgacaaaatcctagtgtatatctggcagtgtcaacactggtgcagttgtaagcttctccttgatgatttggaaactttcctcacatctgggagtccatacaaacttattatccttttgagaagttcggtcataggttttgccatgctggagaatcccttgataaagcggcggtagtaccctgccattcccagaaagcttcgtacttcactgacgttggatggttgcttccaatttgaaacaacttctaccttggacaggtccacttctctcccttctgcagtcaatatatgccccaggaaagctatcttctc

SEQ ID NO: 79811 - DNA, 302 bp, Zea Mays
gagtctcccgctgccacgattctaggctcgggggttgggcgtggatccaaaacatacaaaaagagaggaaaaccacaactacgatagggcgaagagcttatcgctccacctccagttctaacacatgatgcaaccacgaagatagaagcccatgctaggaaaccaaaaggtggatgccaaaggaggctctaagacacccatctaatcatatccttcgaggacacaacaccgacgatcccactcgtagcctcgttgtaaccttaaatcaggatcttgaaggctgcggatggggcgctctaggg

SEQ ID NO: 79812 - DNA, 405 bp, Zea Mays
ttataaggtagaatagatcttatcaacaatatagtggttgagcgacacgagagagtccaataagctaatgtggtagaccatctccacaaaaaaatttcataataaataattttaatattaaagtgaatatattgtctatatattaggtattaagttgataagaataaatattacgatttattttagtcaaaagatcgagaaatatataagttaaaaaggaatcgtaccccttttattatacatcgctcgatcgttcgtcatgctttatctagtggaatggtactatcgtcgtagagatatttctcacgatctatggggtaatgactattgatgatttctggtgatttctcgcaacctatctatggggtaatgactattgatgatttctcacgatctatctatgaa

SEQ ID NO: 79813 - DNA, 643 bp, Zea Mays
ccgtgattcgctcgaagatacccgactgagcttcaccttaaatagctcgggcaacccctcttgccttttccccttcatcccacccgcaccgtagccatctatcgccgaagccgccatagccatatacagccaccgtcgtccgtcgtgctcggcaccaattggaaccttgcgtgaggctagagaacttcgcccgtgtccctggttcgcattggtggcgatagcgggacaggtgggtgaccgaagtgcacccaattgatcttcaccgtcacgcatccgtagttcgccgtggactgaccgagccaacgccggagttagtgtaaggacccgctccccatgttcgcctccttcccaatttcatttcgcacctagtatacctagcaatcgtgcaccgtgggttaaagtgagaattccggccatggcgcgccgccgtgcgggtgttctcgtcgccggcgaggactcgggtcgggcagatctgcgtgcgccgtcgatttgggcaggaatgactaggattaggtgtggcgtaccgctttggtacgttaaatcagggccgttagatttgatcggagggttcagtagagatgtgcgcgtgatcgaatctcggccacggatctcggatccaacgatagagagtgaatggcgggtg

SEQ ID NO: 79814 - DNA, 277 bp, Zea Mays
aacaaacctagttaaagaaaaaatatttaaaaattcaccttgctttcttggtgtcctaatgcacacagacgcagtggcgcagcaggcttgtctggccaccactcactaccagcttgtggcagactgtagagtgtaaacatgcactcatactctcctagcatgctactagcctactaggctagcacacgttgagactctggcagacgccgtgactgtcaaccggccatagacgatatggactaacaaaattacgtgagcaacggactgtagctttgaa

SEQ ID NO: 79815 - DNA, 468 bp, Zea Mays
gctgccatgaactcccgatgtgtatagctgacgctatgtcgttgatgcttttgtaggagtattatctgggttcagatcattgtagatggggatggagtgggtggaaccttgccctttggattttgtgtatatctcccccatgctagtatgcatttcatgtagagttgtttctttatggtgttgaaacatcctatgaaaatcgtagtctactattgctggtccttgtggtatgttgccgctgattttggattagcttcagtacgactgaagcctctattctttcaatgctctgaatttgtccatttaatactctgtccatgataaacttactaacaaccaaggccgactctatttttctaggtctgggagggagcaagacactatagaacccttagatttgatattattttttaatggtaacatgacaatcaatgaagaattatctaatggtctaaataattatgatgt

SEQ ID NO: 79816 - DNA, 799 bp, Zea Mays
ttttatgtcagaattcaatactcagcacaagaggcctgtgactggaaacttcaaagtttctcctgataaggttttgcaattaatttccctcctgctttaatctcgcttgaaaaccacaaacaaattcatggaggacttgaagatgcagagacccgaatcgtgagaatgtttctgcgagcacttgttagagtatattaggatagtatctcccagtatcatagattatgatgtaatcttggcttgccttaaaaagaattcttgtacctaagtaatgacaatgaactcctgtataattcggcaacgaaaacttaccaatatgatcggctatctcatcgattttactcaaagtttaacctaatttctttcgatctcatcaaatctatatggaccggaaataaccgaacaaaaatccataagacatgtatgttttacttacgagttacgaccaaaacttgatggtttgggactttgagaagatacaaaacatactgcctaggtgctggtaactgggagcataaagaacgtggccactgcatgccaaagtttactctctttttatacaagcaaatcgccgcaagaaaggtgagcaaccaattaatgaccagctagggaattgcgagcaagctgcgaggcagaggcagtgcagctaatcattgccaacattattccaccttttttattttctttccccacacgcacgatcgaacgaagaaatgtgacgagctcctctctcctccacccgctgggcatcggcatcaagccagccatcggccaccagcggcggacccagaagaatttt

SEQ ID NO: 79817 - DNA, 519 bp, Zea Mays
ctcatggaacattgaacacctcagaaagttctacccttagcgatgcctcaaaaactctcaaaggaaagttgtactatgtaaccagaaggtttcatcatcaataaagctttcattttccaaaggcgttcaaactcttgattgacaactgacttcaattgggcttgactcaaaattggtatgacttgacttagggtgatcactatgccctactaacggagcaatcggcttaagtcagaaacaccttaagtcagtgcgacatgctcacgcttacatgagttagggtgatcactataccctactaacagagcaatcagcttaagtcggaaacaccttaagtcggtgcgacatgttcatgcttacatgacttagggtgatcactataccctactaacggagcaatcgacttaagtcagaaacgccttaagttggtgcaacatgctcacgcttacatgacttagggtgatcactataccctactaacggagcaatcggcttaagtcgggaacgccttaagtcggt

SEQ ID NO: 79818 - DNA, 409 bp, Zea Mays
ggaaagggaggaggggcttaccggcggcaagattgctccggtgaggtggtcaagggcgtaggggaggtcgtgacgatcacgccgatgtgtggatcgtctctggggatggtcggagtaggccggtccacgtgcgcagacgggggagctcgtcggtggcaagggctccggcctatccagggcggtagagttcaattaaattggtcagtgagcttcgctagaggtcagggaagacataggcacgaggaattgaaaaatggctcactagatagctcggttcatgcgtggtggtgggcggccgaagtccggcgagggtgattccgcttctccagtgaggcaatgcctcggctcaagcatggagaagcttcacagcctcccggggaagctgtccaggggctagggcgaggctggg

SEQ ID NO: 79819 - DNA, 1220 bp, Zea Mays
caactgttgagcggcaaataggggcttctgagtctcagtgcagcgaattggcctgaactttggttccatcacccgcacccattcatcagcttctaggggttcttccgccttgacaaagaccagtggacgggtctcagagaactctagataggtggtgtatcgtggtccctgaggttgacctcttcctccgtgttgctgaaattggtttctctccatttcacgcaagaagcgcgtgttgtctgcggtagcgttgaccaaaggagcgattgcctcgaccagtgtaggaggtacaggtggagggttgggagtgtcctccccgccgtgggaagttcctgccccattatgagcacgagttcgcgatggcatctgaggaagaaaaaacatcctgaattattacatgccaaacacacaccatctttattacattgctgaatggtaataattatacatactcagtgtacaactcatgcttccttatttattttacatgagtacattacttaaactatactactctaatcctcttcgtccttagctgctccactgcccgcttcaggagaccgttcatctacaagattcatggaagaaggggctccaaataggtccaacccccaattagatcctccatttgctattctagatggtccagctcccatggctgctacttctggtggcacgctcggatgcagccggtcatacaacacgtgcacctcttcatgcagggtgttgcaatacgcttgcaggttttccagggatgcactaagttctgctactcaaggtagagctttggcttcacaatcccaggcgaaagagcgcgagtttacagcccagtcgagggccatatgcattccgtaatttcctactgcaggcgagtaacttctgctgatagttaagcaatgcgacggctatcgcgcgcacgctccctacacccgtggcgtagttctgacctgagtcactccactctggcctccaaatcccctatagggtcattgcttccactactgcttccttcatgtctagaggccagctgatgccagggtacaccatgaggcccggttgatttgcgctgagtggtcttggttcgcgccatatctccataagaggggaatcttatttagtgtagtttaatcatgatgcatgcataacctaatgatcatgggatcaacttttcattgatcccctatttcctacatatacctttatttagcactctgttaccc

SEQ ID NO: 79820 - DNA, 638 bp, Zea Mays
tgatgtctatatcgtggcccaacaggccacacaagtgtattatctcccatatgcgtgccaaacgaaagaacatcttaagggttgggatgttgtgtataaggtatcaccacatggtgaattacatgttccaaacgatgaagattataacttagacctgaacacatatgatggagagttcttccaataagatgggctagaagggcgatttgggatagacttaattgaagctatcggaatggaagtggatattgaaatggttgttgatgaggaggaggatgaggtgcaaaatgagaatgacttagaaatacttgaaggcaatgattaatgacaaaattgcgccttcagatggtgttgactatggcatggttgatagtgatgatgagacttatgatccgactaacccggacacatatgaagattatttttaatcgatgtaatgctatattttatttatttcgcatttgttctaaatacatcttttttatcggtgcttattttcttacccttagttgtaggttgttggacaaagatggtgggtagtgggatgaggacgaagtggggagaaggaggaggaacacccgtaggacgaaggaggcgtagcaggacaacgacgctcagcagcaggtggagcagcaggc

SEQ ID NO: 79821 - DNA, 590 bp, Zea Mays
ggtgcatctgatggccacaagctcttcttgacttcgttcgcctcaacataagcttcatgatgacaccatgtgtttctcaatctccttcctaaactcaaacatggtttcaaatgccaaacccatatatcatgtgttagtggatttgatgtacaaaccactagaccctctagagaagcgtatctactatacctccttcatgatctctatgtatgtcactatctatcctcgaccgcccgatcaccaagtcctttagtgcatctagttaacttagtcaacaaccatcttgaattagtcaatatggtctacccctccacatgtatcttgcttgtcaatgttcccatatgtactcatgctccatcttttgatcctctcgatccctctatccaagattcagtgtttatcctttgtttctcacagttcattggcacgaacctacttgacattcaccattatcgttgatcatctatatccttcacacctgctcaccaacataaccaagagacatgttgcacaacacacttatgcaatgattagtctctgaacataatcaaagcttgaatatctcttaacagtaacttatcattaatttt

SEQ ID NO: 79822 - DNA, 531 bp, Zea Mays
gcaaatggagccctagaggggattatggcaaaaagtctatgtaaatcacattgtcttgacttggactaattataaaagttgtagtacacttaataccctacgaaaaatagaaagagaatgaccccaaaaagatttcagaaaaacccccaaaaaggtcaccaaagagaagaacataaaagaaaaatcaggtttttctcaagttcaaaaccgaccctctttcaaagatcaaacatgttcaccttgttcccaacctcaaaaccttatggcccaattgacaaaacggcgcccaaagacccctagaacaccttggaaaagtttgaacccaaccctaagccatttgacatgacttggcatggcttttgtctcggtgtggacagctcggacagagccaacttctcacccccatatctctctaccccgaccatatctttgcttggagctcacattgaaaaggtaggatttggtgtagagaagagaccgtacacgggggttttgctaagatatgcacgctaagtcgaccaaatcggtcgt

SEQ ID NO: 79823 - DNA, 551 bp, Zea Mays
ttccaaaagtgtttttacagctactagcaaagggagtttccgaagccccctttaatgcttcagatccagcttcgtcccactagtttttggcatcgtcaacctgaagaatgacaaaggcaggagtattgaggaacatagtaagacaatataaaataaaagcataaaggtaaagagattttttataccttgtaaagtagattttgagcttcatctccaactagttctcggccgccctttgcccagatttgggtaatgaatctattacctatgcttcgggtttcggccggaatgtcagatggagacaggctaaagtttggcctgttgacggcccttgcatgattgcatccggcttttatgaaggtagcagccgtaccacgagaagctaccagcgcagagaaatcactatggccagttatgacttcatcgaggacgtcaacttctttctcaatgcattcaagtgctccagggatatctttggcagaaagattagcttcttcagacatgactctgactgaattgaagatactttttagccgagcggtacattgggc

SEQ ID NO: 79824 - DNA, 1014 bp, Zea Mays
ggaaaagtcgagtgcggccaaacagtctatgcgtcctacgcaaacgatggtcctaaaatcgttataaaaatcttagctgattggttattgattacaccaataaaatcagtataaaagtcttatcaatatagcgtttcaaaacaatttattagtcttaccaataagattactttgaagatcgtgtcagattgatcaaatcaagtcgattttagggcactgtttagaacatctaaaaataaaaattagttgttacgttccaactagcctcagctaatatcataactggttgctagctacctcacaactaacaacttgtttattaactggctcaatctagctaataacttattagcttagctctagtgcttctatacaggacctaagacgttccaaatacttataaaaatatttatggtcaaggaaatcacggaaccaaaccataccagaactgatttgacggcgagacgaattccgcttccgccaaacacgcacgcagttgacactgacagcacctggcgatcggccttttcttcctccagagtccagtcctaactgaatttgccaacctttttttctcgccatccgtcaaaccgcatccttcatatttatggtgaagattaccactatttataactatatatttcaacatgacgtatctaatgatatttatttttgtggcaccgtaatattgatatttactttttatatcagatttaagattgtttgctggtcaaggggaaagctggaatatgacatgctcttttgtgatgtagggactatggagtaacttaaaaaagtcaatcattttatttccctatgcaaccttcgcaaaatgtaaccctatgcatgcaagatgcttctaatttgaagggtaccgtgcaactaactccacgacacccagatgtttagtgccgtgattctaaaactatatttacacatttcgcagccctatctatcatagtcagatctcgtgcatggtggcatgtgcatcgagcaaattagtctggaatcaaa

SEQ ID NO: 79825 - DNA, 409 bp, Zea Mays
tttagtgcccgcatcccccaacgaggcccatttgatttggcctctttgcttccaataggcacgctgattggagagaagaccctgcaggtgttggactagagagtgcttaaagttccattcttggattgttagatctctgctttcctcaataaaatccatcaattgaataatcaattccgtcttaacaatcaacttagctagattgggtaaagatttttgccacccatggatcacttttcttgctcttttaaatttggccataagccgttttgcaggatcaggctgaaagagattttgttcccaggaatcttgaaatctggaatgaaagtcctcaagctgaagccagtagttctcaaatctaaaaatgggcggtttgggaacgttaggttgaatgttgacaacccaggga

SEQ ID NO: 79826 - DNA, 579 bp, Zea Mays
gaatacaggggcacgcccgtggcagcgctgtaggtttagcacaaaggtcctcgccggcgccggaattagtaacaaagtcctcaactgacttctgcgagtcactgacactttacttccagccccccttaaacttcttatcttttaaaatggaatccccgacgtcgccggtggcgcggatgcattctccttgcgatactacggtggagaagagctcgggcagccatgggatagtgatcggatcaaatcttaacctaacccgcacagttttggagcatgaatttggcttatgaacacatggagcggccagaccgtatccacggcggaactctagcaccatggtcctagctcggccgatttgagcagcagacccttcaaattaagatcacagggagcacgagcaagacacgggcgccgcgatgcttacagaaattgacatcgagccaactgggttttggtgggtcgacaccagggcaatccctgtggtgtcgagcttgcgttctgtccaagctaagaccgtaaagatcaaacggacccctaggtgagcttcaccagcctatatggatgctagaacatacattt

SEQ ID NO: 79827 - DNA, 668 bp, Zea Mays
ctcgtacaccaaaactcatccaggaccaaaaaaagagagaggaaaatacttatgtacggactgttctctaatgtttctgtcacagttcaaggttctagaggtgtactactatctgccaagaataaagtgtgtgcagtgatgtagagagtgcaggcatgtggaggatctgttgccaggcaggagtgcatcatgtttcctcctcatgctttctctttggatgctgtgtatcatttgaacacaggtggcatagcgccctttgcaagttcaggaggaaaggaaaaaaaaacacacacacacacagacacagcctagctgccactaggcgtcaggtcaccgtcagtgctcaacacactcatatcaatcaaagggcagtgcgtctgtgagtgtgaagtgtggaggtggatggggggaagtcggtggaacactgcctacctcaccggtgtgtggccaaacctgccaacctcgaggctagtgattttgacctgtaaacattattgtggaaatggaccattactgccacacggaccagatcatgtgctctacttgtacacgcatccaggaagtcaaactgaggccagaatcgggcacaactgttgacagagtcgagcgggttgaacgcatggcagtaatcactttatcagataagagaagaaataaacggttttttt

SEQ ID NO: 79828 - DNA, 513 bp, Zea Mays
gttcatggccaggctcgcctccgcaacacgtgcagcagtgtcatactgtcgtgtcatggagtgcgatgtgaatcaccttggtcgtatgctactgttgggttgccaacctcgacgtcaccccgttcgtttcgactctacctcgacgtgctggtaatcgactaccgcaagtgagacccggtgtatcgccttccaggtgctcgacgaaaagcctggactagagtttgttgccacatgaccgtaaaattggaactgatttcataatggtaagcgatttcgctactccatatagttggctaaatgtttctaacgtctagctgataagtgttagtaatgtttatatatcatgaatttttgtgtaaataattgtgtcgatgccttgtgaagcagttaatattttctagatctaatgattggttaactgtcgtggagggtgtgtggttttgcttaaggttcatttgtccattatttttttgttcatgttgtttaggtgttctctttatcaaataaatagtt

SEQ ID NO: 79829 - DNA, 447 bp, Zea Mays
gcttgatatgtctactattgcaaattttccttcgtacgaggttgaactgagggaatacacgcgtgattcatcggctacaggttgtcacgaccagtcacaacccctttatgggatgccgaggtacacttactctggaaaaccacagcctcctacgcacatcggtgataatctcgccgatcagcgcatgtctggatcgtccgcacatgagcgcggaccgtccgggccagcggctaccggtcccatttttagaagtgaattaccgaggcctgcacccaagctgccacataccttgcaaaccctagataacccatttggaccgtccgcgtatggcgccagacactccgaatataacgtcggacggtccgcgtatttaaccggacggtccggcacaaagttttttgaggaggatggatatccaactccgcatccatcccagctagactcccc

SEQ ID NO: 79830 - DNA, 271 bp, Zea Mays
cacaattaatcaacgcattcaccacaatcatcaaatccggcatatatgtatatcgaagcgcttttcacccactagttcgcattttaacttagacaccacatgagcactactaatttttacccgtgtcatttagtgcactaaaattaccacatacattcaacaaacacattcaccacgtaaatagcatcatcacacatgacctcgacttaaccgcagaggaagcgatgactacttcggcatgtcaccacctctctacagtccaatcaatatt

SEQ ID NO: 79831 - DNA, 493 bp, Zea Mays
cacacatccagacggcctcttacaaccttccctatccctgcaggcacttggcaagatctcaccatggattttgtggagggtttaccatcatccgagggttataacttcatcttggtggtcgtggacagatataccaaatatgctcactttattgcgctcaaacaccctttcacggcacatacagtggctcgagctatgtttgatcaggtcatcaagctccatggttttcctaagacaattgtctcgaatcatgaccgtattttcacaagttcatttcggaaggaactctttgctctctttgtgacaggtttgctgcgtagtacgacttaccatccgcaaactacaaactgacgggcaatcggagtgggttaaccagtgcctagagatgtacctccgttgtgtcgtccatgattctcccaaacgccagaaacaatggctcacactagcagaactatggtacaactcttgctttcatactgcattatggtgctcg

SEQ ID NO: 79832 - DNA, 672 bp, Zea Mays
aggaactatagctcggcaatttggccgccgccgtttatctctccgccagtcgtcgtggtccgcgctgctcggccctcaaagtttgctgtagagcgtatggtcgagtccgctgtaccctaaatgccgtatatctgtagtttagtggggggaaaagccatggaggaaccgagatggccatcaccggccatcccccgccgcgttcgggggagtagcgccatcgcacgtggactcgggtggggaagatgggctactgtcgtccgatccattttgggcggccatgatcacgccaacctatctgtgtggctaggttgattcgggtccgtccgatcgtaatcgggagaactcggggctgatcgcttgtacattaaacctgggccgtagatctcacatcctgcgctcgtcatcgcgtaccggttcggatagacatgatctaatccctaccacccgcgcgaaatctgacggccaggaaccgaccgtaccccttcgcctggcatttatctaaagagaccctagattattaacaaatcaacacgcagtccaccctgtactattctctgtgtctaggaatttttacctaggcgcccctgtcttttctggttattgaggcccagtccagagaattagagaaatcatagaaatgaatttagaaatcgatttttagtacaaatttaa

SEQ ID NO: 79833 - DNA, 405 bp, Zea Mays
gctgcttcggccaagattgttgcttcggccactccagatgagcctgcaccaaagagcaaaaagttgaaagtccttacccaccggccacgttatattgaaccggtcgtggtgcctgagtttggcggggagacttcttcagttgctgaaccaaaagagcccattcttcctacacagaaggctaaagatccggctataatgccgaaggtacccttagccgagctagctgagtcaaagactaataaagataaagccaaagagccaaaaattgaaggaacaaaaatgttagaaattttaagcccttcggcagaagtaacagtgtcgaaggcacaaaaaagttttgcggcaactcccaaaagaagaaggatggcaaatgtactagatgtgttagagacaataaaggcttta

SEQ ID NO: 79834 - DNA, 479 bp, Zea Mays
attacaagcacgacgggagaggggaagttcccaagtccctagaatggattgaggcaagtgccaatatcgaaaactgggtggagaactgagtgttcgtctgtgtgtcctgcttctccgtccccctagaggaactctactgccctatttatacacgaaggggatgttcacagtgaagcctagtgtcattgtattcaaaggagatatgtcttggcaccctgtaagccgacgtgacggcgcactacattgttgacttgtgcccactggtttcctgctgggaaccgatgcagaggtcgaggggttgtccgtacacctgagcccccgggggaggggttgtacatatcgtagttgttgcaacaatgccagggtatgggctaaaggcctacttatggggtgcgtcagcatccttgtgtgggatgacgttgtgattccctgctgcatttatcaaggtcagagccctgcacgggagaggcagaagtctt

SEQ ID NO: 79835 - DNA, 432 bp, Zea Mays
gccatgcagcaggagttggcccttctgaggcaagccattcctgttgcccctgcgggtgctgctcagggtgctggtggtggagaagtgcccgggggcgctgtccctgcgggtgctgttccaggtggcggggccgaggtgtctcttccagtcagtggtctttctctgatgcagtggatgggcatgaagttggattcttttgatggcagtggtactccagtcgaggcgacagattggttgacttacgtggaggataagatgaatgtcttcgagattgtgtatggagatcgtgttcgctttggcacacaactgctgaagggagaggctcaaatttggtggagaggcgtgcaggcagtgcactcctcctcaccaggagtcctgtcttgggatgtcttcatcaggcagtttgaaaggagattctaccctgtcaccttc

SEQ ID NO: 79836 - DNA, 576 bp, Zea Mays
cgagacctcttcggctactaaagctgaagaatctgccttcacatagaggaatgaagaaccggctacaatgccgaaggcatcaccagccaaatcaggtgagccaaaggccattaatattgaagaggcagaggtcaaaaagacaaaaatattagaagttataagcccttcagcagaggtgatagtgctgaaggcgcaaaaggatcttacaacgaccctcaaaaggaaaaggatggtcaacgtactagatgtactggaaaaaataaagacttcaagctctactccagggaaaacagccgaagcttcaaaaacgcgaattgaaacaaaacagactgaagctgaagctgcacaaagtcatgccgagaccgaagctgggccttcagagcccgccaaggagaaatccttggaaatcggagaagaaaaagcggaaaaggaatctgcagaacaaattctgtctgaaaaaactgccattcctattctcgaagcatcttccgaagctcttgattatattgtacgacatgcttcaggaaaaaggttatctgaagaagaaaagcgagaagctcaatattatgcccagag

SEQ ID NO: 79837 - DNA, 1389 bp, Zea Mays
tattcagccactgaaggatagagcgtacccgacttatttgtatagtggtgtcactgattcgacccgtgttaccaacaagaggattcctgctgtggatttggtaagccgactggagatgattcttagaggcaaagtgtcgaatgtaggtgctcccattgcatattctgcttggaatctgccaccttctaaggcttttcccaattttgtgtccaatcctcctgctagtgacagtggcttgggtcttagagtgtgaccctctcccgaagaagttgaggctctggttgcttcacttggtgatctccccaatgatgagaggcaagttcactttgagatgcctatgaacccaagcgatgcagagataagtgctatgctggacatgttggctgaggattcttctgactcggtccctactgaaaccatagctgttgcaactattctagaacctggaaaagccttcaatgctcaaaaatctgatagtgctcgcccaaagcgccttcgcccggccagtcatccaactgctcctgccgaggggaagaggaagaaaaagaggcggcttcagcgagtgtcgtgtttgaaccaggatgctggcccttctgctcctactgctgaagaagtaccagtggaactttttactggagctgaccccaatgggtgtgaccttgatgatgctgaacccaatgggtgtgatccggccagagctaaccccaatgggtgtgttgttcgtattgttgacgaggatgaggaagaagaggaggaaatccccttaattcggaagaacagtcggcgttacctagtcagtggggagagtagtggtattccttctccagctttatctgctctcgttggtctgcaagagttgtccattgcaaattttgatcaggctctcgaggatatggttcctaaagatctgctgtccgagccaacagatggtggtatgatggatgtttgctctgacattccagatgtgggattagagttatctcgagcagcgtctcgtgcctcgtcgaccttggagtgtggtcttcagagtcaagaagctggtctaggttgttccattcccatggaggtaactgagaatctttcagccttagaggtggctgctgcaaagaacccggtccccaaggatggtgcaagcggttacccagcccctgagggtgttgccggtaatgatccggctcgggtgggtagtgcgagctgcaacccagcccccgagggtgttgctgctggtgatccggctccgatgggcagtgcgggcagcgacccagcccccgagggtgtccaagcgggctccccttctcatacctctatggatgtccacgttgggtcttctcctccacattctgatggcatggcaacagcgcatgcttcaaataaggaagtcgccttaga

SEQ ID NO: 79838 - DNA, 271 bp, Zea Mays
gcgagtactgggtataggcggcaaagggcggtggcgaaacagagagtgagtgaattgtcgcgaagtggtaggcgtcatcgtattgggatggagcgtggccgtctttgcgtggaccggactggtaaacgagaattgttgtcctcgccgattgggccgagcataggtgaaggggagctgcgaaatctttttgagggtgaggaattgaggataatgctattcaattacagggagatgggtatcatcccgaaggttgagccaatgtaatatatga

SEQ ID NO: 79839 - DNA, 526 bp, Zea Mays
gcaccgcttaatttttcactgaaataagctacctgttttccttattgtaacaaaacaacacctaacccaataccactagcatcacattcaagttcagatactttctgaaagtcaggcaattgtaagagtggcgcatgggttaacttatctttcaaagtgttgaacgcctcttcttgtgtggggccccaagcaaaagacactcctttctttgtgagttcatgcaaaggggcaacaatggagctaaaatcacgtatgaaccggcggtaaaatcctacaagtccaagaaaactttgaatttgtgagactgtcgttggtgtaggccaaccctgaatggcttcaaccttgctactatccacctcaatgccctacggagtaaccacaaaaccaagaaacgagacacattatgtaacacctcaggtgttactcagggtgtccacccagggctacacctgttaaacctactatcacatgtgggatagtttgagcaaagtatctcaaacttggaattcaaggtcctaagcaagtg

SEQ ID NO: 79840 - DNA, 485 bp, Zea Mays
caagttgaaaagataccttcaaagtatatattgcaaaggtacactgtctcagcaagaaaagatgtatcgtttgaaagaattgataagagcttcaggggaaaggatggagttactaaatcataaagacagaaaatgttgctaacgaaaacaatgaaagttgttcgcgaggcgtgtatgtcataagcagggtacgacaaggcaatggatgtgttggatgagctcgatggcgttttatgccgattagagccagacattggatgtaatgagtcatgtgatgttagtgatgatgaggaaaaccaggtaataagattccagttttttaaatgttatactatttgtaacatatagtatgcatggtaacatattatttgtaccaggaaggagaagtaaataataataatgctggcgatggaatggaagatgacaattcaattacatgccataaaatggtatgtaaaggataaataaataatcttgcatgaagt

SEQ ID NO: 79841 - DNA, 640 bp, Zea Mays
ttggagtagaacctgacttcgatggggaaccctggcgatgtactttggctgctctagtcagtgtgttggtgctggtgcaagatttattcttgtctcctcctatgaatgggtatcctacatgtgtcgcctctacttctcaaaaagcaaacaacaagtctaagtatgaggtgcacattacaagactataagccaccatcacacttgggatctatgagttgttagtcatagttgacactcaattggtcatcaaccaagtatatatgtaggctctatgtgtataccagtgcatagctcacatcctacctcaccaaagtcaattagatggatctccctttgaaatcgtgcacttcaagtatataccctaaggagaaaacacaatggctgaaagatctctacaaccgctttgactcggtgtcagtgcttaaggggatatttgaggtaaagcttctctgacccattgccctccctaagaacttaagtgatgggggattggccaatgtgcaaacacagttgtccccaacatgctatccctaggcattatgccactaaatgacaatggtcgagggcctttcgaggacctaggtctagctagaccaaatgcttaggttgaccctaatgtatatatctttgagatatggag

SEQ ID NO: 79842 - DNA, 416 bp, Zea Mays
gtgaatacccggggactaatttgtaatttctagaattctagggtaaagctgtgtacgtggccgaggacgacgagtttatacaaagaaaagatagcgtctcttatgcataatccctcggtgaagaggtaccttacaatctaagccacacgatcctaaacagtgctcagattttatacgcgaaggggtatgtctcattttaatcctggttgttcaaatccagattaacgtctagacctttatctcctacctcccgatgacgcccggcggcgacgcgccgtgcaccggcggtgatggcacaccagagacgcacgacccggcatctgtaccccaaatgattacccaagtggttcaacgcgtagtagggaacaaggcggatcaaaatagggagggcacactgtgaatcacgcagcatagct

SEQ ID NO: 79843 - DNA, 410 bp, Zea Mays
gttgcataaatgaatcatgaattctcctttaaacttagtgcatatcaagagagatatcgattgaactaatatgaggcactaagaaacataagagtcaatagatgttattctatgatcaaacaaacaatgtatgtgatcaagagaacaacagaaacatttaagcttaaagaaggagaatccagtaaatatgctactttgacaatgaaagcgacaatccttgaaataagagtgacattatattaacaagttggattgaagtgtagtagcgtacttcatgagaacccttattctcatgcaagagactatatgaaaattactaagatgaagtaatagtctcaacataatcaagatatagaaataggctccccctaaacatatgcatcaagcttttgaatgaaatagggagaagc

SEQ ID NO: 79844 - DNA, 328 bp, Zea Mays
gcgccatggatgggtctccttttgcgtgcgaaaagatagggagaacacttcggtaattgctggaccgtagtttttctttatccctaaaatatttatcgagatcagtgtttttaggagctattgtagttggcctaaggtttaggaagattaagattctgcaacccagaatgtattaacgttgtgtagatagtgggagtgtcgcctgcgttgcgtgtggataaaagaggttgtcgttgccgtgtatttatgaacatcaaacttgtaaatggtgaaccaactacttccaacatgtcaacttcgtcctccacttgctctcgatatcccatat

SEQ ID NO: 79845 - DNA, 380 bp, Zea Mays
cttcaattcaaacttctgactttctgatttcctactgtctcttgctaattgagaccgacccgatggttccgaataggaagaagactaccaaccagcatagaaatctagtagatttcattcctccatttgatcctaatggcccgcttccattttgcgcctttttcaaatcttctgttactgaatctgacttgttatgccttgtggatatgagagctcttccccccaaggagatgagtcagtggagaacttaggaaaggattttggttcccactgaagatactcacgggtctgtcgcgttcacatcctttttttatccgcggactaggtttacttgtctactctttcttttggggactccttgatttctattccatcgatct

SEQ ID NO: 79846 - DNA, 596 bp, Zea Mays
acgcgttatgcgttcccttaaattatgcttcacatatagtgtatgatcgtgtttaggactttgaatggatgttttcgagtggacaaatagtttcctaatgcaattatgtgtaaggtgtttatagtgacacattatctcaaaaagtgttatgtctgcgcataaataagaaataggtgtattttgtgtagtgtggattgattttgggtgcatgtgtcgcaagaaatgaattagtgcgcatataggcaatgaatgagtgtgatgaagtgatgagatgctccttttaatttcattcatagctcttgttaggtgttgtagtgagatggtcgtcggttttgtcgttgtgcatgagtttgtaagtaggtatgtgcacgagtattgttttggcatagattaaaagtacatggggaaaagtggtacatatgtgtatggtagtcatgattgcgttaacttgaacaaagagtctcaagtgcatgccgtgctatggttgtatttgagatagtaaattataagggttgcgcaatatgaggttcgatcgatgtagttaatatcgattggactgtagagaagtggtgacatgccgaagtagtcatcgcttc

SEQ ID NO: 79847 - DNA, 680 bp, Zea Mays
ctgataaggttggcgactaaattcaacagatagaggtatggttgctccaggtttgaccaaccaacttttgttgaacttgagttggtcgtcttgtggaactgcatttatattgctgatatttttggatttttccagaaaaacaaatctttgcacccaatgagtgcgtccaatgggtgtctacattgtcttttctgtggaacaatagcttgaggtgatggggcataataatgcgtctgagcaattaatttactggcctctggtgccgtgttacgcaatgtctttgctagaagcgtgctttttctttgaagtttaaacgactcttgaaggcttgcgattgtttgttgtacggacaagatacgaaggggcacccttctgattctttaaatagggcaactgcctgctatagacttcttcactcgtcttcacttccacttccacttccttgctatccctttctacgtagcacatgatttggttgagttcgaaggctccagactacttatggcagctccctggtccattttcctgtaagcttctcgtttttgtcaaagactttcttcttaagtgcttctatgatcattccatttgccctttctacctgtccattggttcttgggtgcgccaccgaggtgtatttaagttggatgcacttctgttcacagaagtcgaagaattctaca

SEQ ID NO: 79848 - DNA, 560 bp, Zea Mays
tatgactccactatattgggatcagactggagaaagacaattctttgggcctgaacttatacaataggaagaagaacaagtgcgaataataagagagaatttgagaattgcaaaatcaagacagaagagctatgctgatacccagagaagactattggagtttaaggagggtgatcacgtgtatctgaaggtgtcaccaatccggggtatcagaagatttaaagttaaaggaaagttgtcccctcacttcattggacctttcttcatcttaaagcgagtgggagaagtggcatatcaactagaactacccgatcatcttgcggatgtacatgatgtcttccacgtgtcacaactgaagaagtgccttagggtacctgaagagcagctaccaatggaggaccttagtgttcaagatgacctgacttatgctgagtaccctatcaagattcttgatactttgactcgagttacaagaaataagatgataaagatgtgcaaagtacaatggagtcaccatggtgaagatgaagctacttgggagagagaagaagagcttcgca

SEQ ID NO: 79849 - DNA, 294 bp, Zea Mays
gctcaaaaaaattcagaccgtcagatcctcgttggacggctcatatcgttcctcagctcactccgtctctagatacttcccttcgtctctggatacttccgtttgatatgcttggcaggtggacactatcctcgctccttcggccatgtctttcttccttctcactccatccgcgtcatcgctttgagtcgtcgtgctctcattctcttcgttttccatcactttcattcatcttctctgtgacatccttttccgagcactttttccttccgtcccttgtcatcggctccgccg

SEQ ID NO: 79850 - DNA, 429 bp, Zea Mays
tttaacatgccatagtcagaagtgggagcacgacgaacatttatagtggacataaattcaaaaggtcaaataccaactatcgattggtgaagatgtcagcatactgtaacaagataggaacatgcaagacacaaacttcatcaagggtgacacgttcacgaacgaggtgtaagttataagttaaactccacatgcttcaagggtgacacattcacgaacaaggtataagtcaatctccacatgcttactttgttggtgctggatgaggttggtcaagaggtaaatgacactgatgttgtcaataaacagggtgacatggtggataggatcatagtgaagctccccaaggagatagcacaacctagcttcagcaacacgtcattgttcatgacacaaatactcggccacgttgttaaagcttcaagtttt

SEQ ID NO: 79851 - DNA, 441 bp, Zea Mays
ccaaaggagactttttctgaataaatccaactttctaataaccgatttaggagccggataaatcgataacatgtacagaggtacattagaaagagaactgttcaaaagggtcaatctacctcccagactcaagaacctccctttccaaccagccagccttttgtccattttttccaacataggacaccaaagagatttactaatcttcttattgtcaattggcacaccaaggtatttcattggaaggctaccaacaggacaagtgaaaatgtcagcatataaatcagtgaattctttagcatcacctaaacaaaaaatttcacttttgtgaaaattaatttttagcccagacatatgttcaaagagacaaagaatgaatttaagatttctcgctccttctaaacaatcttgaatcatgaaaatagtatcatcagcatattg

SEQ ID NO: 79852 - DNA, 642 bp, Zea Mays
ctcgggaaggatatacccctagaagtaactaagacatattccgagtattttagtacaagaggctattgtgaggcccactatgctggaacgacaacacctagggtaccatgccataagactacattcaatggtccccgccaaccttcccctccccttgttgtggcggatacagatccacgcgagcgcgttcattggtcacccctacaactgctacagtacaagcgatgagcacagtacaacgctagaaaaagggtagcgttgtgctgccccttgcctcgatttcggtgcacacatgtatttgatagttgagaaaaaatggtaatgaatgatgaatgggtaggggaaattatattttatggtgtagtggtgttttgggggaacctttatagagggtggagatataagggaagagagattgctggcgtgggggatagtgggatatttggggagaaatatagagggaaccgttgaacacaatctaaggaactcccttggcaccagtcggaagaggagcttgatgtaattagatttgacggggggcaccatgaacggaagaggaacacaaagacttataaagttatagagtgacccaagattcagtagaccctagggtgatctaaggacctagggcacataatggcc

SEQ ID NO: 79853 - DNA, 624 bp, Zea Mays
atcttttatggaaggaggaattaaataatttacggagtaaaatttacttgtagtttagttcgtgtataattaaaaggtatattttcgggtgaataattaaatattatacaaagaaaaatttacttgtcgttctcaaattattatagtcgaagttgttcatagaggaatagtaggagcaggtcggaggaggaagagaggtaagacttgggaatgaagaaagttctaagtatcttcttacatgcctcacctggtagccactccctcatatataagcctcccggctcccactagttaaccaattccggcccatagacgacgacattgtccttcatgggccttgacgaacgacgtagcccaattgctcctattccttatccggtgcacggttgttcatttactgcactgctgacactcttctgcttgggagactgggctgcgaagatgggagaatagaggaacgagaaagaaacgcggcagtgtatttatagcggcagcgtaggtggaagcgcagagctgagcacgcggcttggaagctgcttcacaatttctttttgtttactctctactctttcatgtattttgtattatatacggagtatatcatttatatggcttggttttggg

SEQ ID NO: 79854 - DNA, 582 bp, Zea Mays
catagaattgaagctttggagagtgagcttgctagatatgattggactaagggtgagtcacttcaatcactctttgatcggttaatggtgttggtaaacaaaataagagtgcttggaagtgaagattggagtgactccaaggtcacgagactattcatgagagcatacaaagaaaaggacaagagtctagcaaggatgataagggaccgtgatgactatgaggaaatgacgcctcatcaattatttgcaaagattcaacaacataaatccgaagaagcccagtcaagacaagagactctcatgccttgatctcaaatgaacaagataccccaagaagaacaaagaccacaaggcaaagaaagtggtcgagacatcaagtgatgaagatagctcaagtgatgaagacacaactatgttcatcaaaacattcaagaaatttgtaaggaaaaatgataagtttcaaagggaaggaaagaagagggcatgctatgaatgtggccaaaccggtcatttcatagcggattgtcctaacaaaaaggaacaagaagccaagaaggaatacaagaaggacaagttcaaaaa

SEQ ID NO: 79855 - DNA, 418 bp, Zea Mays
ggtctaggtacatcttggtggttcctgggtggatggagtaggctgagttgtgggcttcattgagcaggacttcccgtgcctctcctttggtacacatagacggttcttgaaccaaagaactccttgttcatccgtcctaaggtctccgtgtccaggcgttgagccttgcatatgaggtcttctagcattggcttgacttccaggctaccgttgtctcccagacatgcatttagctgagctgattccttcttccaatcttctaaaaagttggttccctttatcccgaaaggttttcggctgagggcatctgctaccacgttggcctttccggggtggcaatggatctcaaggtcataatctttgatcagttcaagccatcttctttgacggaggttgagatctggctgagtgaagatat

SEQ ID NO: 79856 - DNA, 419 bp, Zea Mays
ggacttcattgttggtctaccccgcactcctgcagggtatgactctatttgggtgattgtgaacagactaacaaaagtagctcacttcattcctatgaggactaattacatgggagccaagctagcaaaattgtatatggcttggatagtttgtctacacggagtccctaagaagatcatgtcagaccaggtatcacagttcaattcttggttttcgcagaagttgcatgagtgcttggacacctagttgaatttcagctcggcctaccatcctcaaactgatgggcagactaagagaaccaagtactagaagatatgttaagggcttgtggtcttaaacatggtggcagctaggataagagtttgccctatgcgaagttctcttacaataacagttaccaggccagtttgaagatgtt

SEQ ID NO: 79857 - DNA, 661 bp, Zea Mays
cgctgatatgtgatccaacgatccataggtaatttacaaaatagttctcccgcactaccagtttctcctaccacttttttccaagcccccctcccagccttttttctccacgctggacatagacgctctgtcttctctcccacatacgaatacgtagacgccgccgacgaccctacgctcgcctaggtcgtcgcgatcgtcgtcacttgctgcagccgccgtcccctaccaacgccatcatcacctgcacagagttgtccctgtgttcatggaggaggagccacctccatgtctattcatggatgacccaccgtcgccatgcttgttcatggaggtgccgccgatgccatgcccggatggtggcttgatggcgcttcttacagccatggactcgcgatgtctagctggccctaataccgatgagacaaccgctcaagtctctggtaccattcaactttctgatcatgttggttctgttcaaattcctcaccccgtcgagacatgtgcccatgaagctgatcatcctgcacaacccacacctcaagacgattctcctgtcgttgaatctgttgaggacacacatcgtgttaaggctacagatagttttcatacgcccaaaaaaattccattgagttgtagtcttgtgagcaatttaactggc

SEQ ID NO: 79858 - DNA, 427 bp, Zea Mays
tatgaatatcctctaggtggactctgttgtagtttttagtcccatgaatttgtttattgcgattatctatagcctatgtgatgttcagatgatctgactcctggaagacgtcctaattgagattaaggctcgacgtaatttagatatcagcttagttccagttctaggcaacatagtaattcccatttttttcttataatgatatgaatcttgatgctttgacaatttgatattagaacaatcattttagtctaacatttttcatgacatggtgtgtactatgcaggcaagagtaagtctttaatctttttttaagtaggccacatcagtgagacattgcagctcatacgggtcttgaaaggcgtcctgattccgatgaaagcccgaggtgatttggatactagcttagttccaattctgtgcgaca

SEQ ID NO: 79859 - DNA, 489 bp, Zea Mays
cctaggtccactagagggcgaataccctgcttagggccacaagctggtcgcccaacaaggtctccgcattgtgggtcgggcaaagactacacttgaaatgggctgacccaggaaggcgatgggctcacgtccggatcgttcacgggattgggtatgatcccatggaagttgttcgtttttcccgcgcccgacgtcctcaaacgccggggatagctcgaaatggagccaccggattttcctcgggataaccaaagtctgttctctattagctaggagataaggtggaagagtgtgatcagcaagtgcgtggggagtgccctacggtcgtgtatataaggcctaggaggaaccccatcatttttatctcattagcacctctccatacaggagacaccacttgtaaacacaccatacatacaaagccacctaggaagtagggtattaccccctcaaagcggcccaaacctgcagaaaatcgctcgactctct

SEQ ID NO: 79860 - DNA, 616 bp, Zea Mays
gtccccagatcaacggttctgattcactgcaaccacacgacgccccagcttctaatcccaaacgtccagcagggatccaacggcccaggtaccatctcctacctccagcttggctggtgagaactgggcgcgacgctcggtacttgatggcgcggtgcgtcggcatcgcgacacgacggtccccgctcacccacccttattgccactccccatctacttggcgcaacgacgcgaccatctgggcgagccctatcgcacgcccgggcgtcaacatcccacagcgtcaagctccacatgaagggacgggtaaagcatagtatgaggtgttccttacctatagcaatggggtgcagttcccagcccaaggcgctacgcgacctcgcagcggaggagagggtttcttccagaagaggtctgtgggttggggctagtttctacgctaccccgcgaaggcctttgccaacttcccatccgagcacgacggcgctcccatcagtttctctccctcatggtgatgatggtggaacgcttgatgcttgtcgatgaggagccgagaggcatggtgtatggctttatacccgcgccaggtccgaatcccagcaagattttcccaaaa

SEQ ID NO: 79861 - DNA, 489 bp, Zea Mays
attgggtacaattgtggtttctcgtagatagaacagttttgagtgttctgaaattcaagatgagctgtaaatttcgacacaagactactgcagtaatagaggttggaatttcatgcttaggcatcgcatcgttgtgctttcggagtactcacttaggttggtactagtgacttctgttgttgaatgaacacatgcattggctgtttttcttttgctcttgtgtgcttcccagttgctgttgtgctcggcagcttcccctacaatttatttttgattcatgtgtgaactgggaactgataaaacgagggtattaactgaaaacggatcagatgggtgtgggcgtgactaccctgtcttatagttctggtgaagatgccgtcggacgggagataaacagtgtgcttataagattagaaattttgagccaggatttattaaactcgttcagccagcctagcataggcttgcacttattccatgagttgctat

SEQ ID NO: 79862 - DNA, 714 bp, Zea Mays
ttagtgctcccgggatgaatggaatatcgactaagatgagcttcatcaaaaatttgctggcggacttcatcatttttaggcacaactatgtgattattaaaccatactatgccttgatcatcctttctgaaacaattcactttgctggcttctattttctcatgaatatgtttcatatccttatcatttctttgagcatcaataatcctttgcagaagaattgactcaagcttcatttggttcaaggttccatgttgtatcattcataggtttaatttctccatttcctgacataatgtggtgttcggagtccttactgtaagacaatggcaggaagccttgcgacttagtgcatctgccaccatgttggcctttcctgggtgataatggatttctaattcataatccttaatcagctcaagccatcttctctgcctcatgtttagttctgactgggtaaaaatatacctcaaacttttatgatttgtatatatatggcagatatttcctagcagataatgatgccatattttaagggcatgaaccacaacagctaattccaagtcatgagttggataatgttcctcatgtcggcgcagctgtcttgaagcatatgctataactcgaccctcctgcattaagacacatccgagaccactgcccgatgtgtcacagtacacatcaaaaggcttttcaatgtccggttgagccaat

SEQ ID NO: 79863 - DNA, 344 bp, Zea Mays
caaaaaagaggaaccgactagaacaccagaggcttaataaattggtctatgtcagttacaacagaaagatggaaaataggtttcgaacaataagagagctgggatccaaggggaaaagaagcaacccactggtgcttgaagagtttatgtgggaaaatgaatgggttgaagaaaataatgaagctgatggtgatagcagcatatggcatgttgtggatgaggcattaggggcaactcatgctctccaaggcagaaatttgccaagattagctgctgcaggtgctgcttcaagttctcggcctcaacgaacctatgttaggacaaggaagcgttcaagaaatgca

SEQ ID NO: 79864 - DNA, 594 bp, Zea Mays
ttgcttatggctcaaggcagttgaggaagcatgaggggaattatccaactcatgatctagaattggccgcagttgtttttgctcttaagtcgtggaggcattacctttatggcgagacttgtgacattttcaccgatcacaaaagtctcaagtatatttttactcagaaggagctgaatttgaggcagcgtaggtggctggaattgattaaagattatgatttgtccattcattatcacctagggaaggctaatgtggtggctgatgcccttagcaggtctggggttccgaaggtggccttgccgttgatcgctgatctggaccgtgtggggatcgctttgagttatgtcggcaccgctagcaaggagactcagatgcttattcaatcctctctcatggagagagtgcgtgcggctcagcagcaggatcgtctattgcaggaagctcgaaagagggtgggtgatggtaacccgcgggagttcaccattgatgagaatgatttggtttatttcaggggctgcctctgtgtgcctcagaaatcagaggtgaagatggatatcttgagagaagctcataaaacgccttacaccgtcc

SEQ ID NO: 79865 - DNA, 1472 bp, Zea Mays
cttcgttactcagcaacaatttctttggcatctcctttcgcagtttctgtcctcgaaaattctgcttcttgtctcgctctctggtcgcaaatttgctctgaaatcttgttctattttcttggtttagtttttctcgagcactcttcgcgttttgaaagatctgaagcccctggtcgccgttttgcggatcctggcttcggttttctgaagagatgcgatatcatacctctggacctctggacatgcgggttcgttctatacatcctcgcattttctcgaaggtccaacaatctgcttcaaatacaccagtgaatcataagaattgttcttggcagtttgcattttttttgttttttctattttttgctatgtgaatctatttgaatgaatcatatgcatcttgaatccgtgacgacgaatcgatggctcgatgatgattattcttgctttaaccacaccgaactaaaggctattggaagggtgctttcttccttcctccatttgcgccaggctcctctttcttggtgtttcctcatgaaaccttgctttcttgttgaagaatgcagttcctgttttcttccgcgagagtgcgaggtagaaggattcggtaagatttggtagcgtagcaaggggggaaagctggaggcctcgtccgctggttcttggcttgtagaaaaacctggcctttctctgagagcctttgccctgtatttgcaattgatacccctctttgaataagtatttcccccttttcaagccaatatgttccgctgatcaattatttatatgggtgttggacgataatctggaataaaatttgtcgctaacaaaacatattatgaaagtgattcggattattaaaatgattcttaatctgagatatatataaccatctagttacaaaacagttaactattcgcggacaggccggtctgccggtgcacaacctgcgagcgtcattgcatatctggtactttgaactaaattcccagagtgcaggagcccactaatcccttccaaatccgagcttcggtccctgctgctccccagctacccgcaggccgcagcaatggtgccgctttgttacgtagtccttatgtttcagacattctgcacaagaccacaacacaaatttacgaaaattttagtctatctgaacggccaaatttttgtgtcaaatcaattttggatatgtacttggctgtttcagatatccaaatcgtatctgttttctcagattaagataagcttgtacaattttaatgccgatgataatatatgttttggttgtttttaaataatcgtcctgtgcttatttattcgaaaatatactttgcgctgcagcttcggagcattgcactgaaaaataaaaaaaatgtcgtattaatcagaccgtaaaaaatggcactttattttgatttaagtgtgtagccacatatactccctaactttcccccttccatctattagtg

SEQ ID NO: 79866 - DNA, 460 bp, Zea Mays
cccgatcaagcttcatctctgatgcagtagaaccctctgctactccaaaaacaaatagatgacctgaaggcgtcagatattggttagtgaccccacaatttccttattcgctttcattacttagtttattctaagtcatgcgctcttcttctgctgctttatcagatttggctcggcggtgctctgacattgaagagaagtattctcagagccaggccaacttaatctagacttctgctttcctggacggtgctcgcttcctgaactcctctttgaatgcgcagctcgactctaagaagatggcatatgaggtaaacttccttggctgatcatgctttgctctcctcgcttcagtgcttagtgtcgttcttgcttgcaggaggagaaacgagcactcgttgcacctcatgataatttggacaagctgtatcgtgatgctagtaactccttgaccatcttg

SEQ ID NO: 79867 - DNA, 491 bp, Zea Mays
tgttcgtctaacaccagcaccacgcacgtatatggagtgacctttgttctgcaggactgttgggacctcactgtagcgaatgaagataagggctggccggcaaagctccagctgcttccggtttaagcttagccgaatcgaaacagaaggctgcagccgaaaaaagcatatctttatctaactacagtgagtattctacacctttgctttcaagctgcattttcaggtctgtgctcctgtgttcacagtaacaatacctacaagtgaagtcaacacaggtactgggaggagtgcatccttgtctgtgcaagtcaacgtctaacagttctgtgctctcaaagactgtcaagtggtcgcaatctcttatctgacggcgaaagatcatcctgtctctgttaaactgcagcggaaacacaaacactgcgaactcaattaacttgaggagctaggttcacgttcacgcacgcaaaatatcttcggatcagttaacc

SEQ ID NO: 79868 - DNA, 733 bp, Zea Mays
ccgattacgaaatccatgcctatttcttcccacttccatttgggcactgggaggggttgcagtaggcctgcaggcctatgatgctctaccttggttcattgacaagtatcacactgggccacatactgagctatctcctttttcattcgtctccaccagtatctggttttgaggtataggtacatcttggtagtccctaggtggatagaataggctgagttatgggcctcgtccagcaggattcctcgtgcctctcctttcagcacacacagacggttcctgaaccaaagggcccctttttcatctgtcttgagatccggaagttgttccttgctagccttttctgcaagtcttgccatctcggtgtccaaacgctgagctttgcgtatgagatcttccagcatcggtttaacttcgatactgccattttctcccaaacaagcatttagctaagctgattctctcttccagtcttccaagaagttggttgctttctccccgaaaggtttccagctgagggcgtctgctactacattggcctttctagggtggtagtggatctcgatgtcataatccttaatcagctctagccatctttgctgacggagattgagatctggttgggtgaaaatgtactttaggctcttgtgatctgtgagtatatgacatttgtttccaatcagataatgtctccatatctttagagcatgcactatggctgctaattccaaat

SEQ ID NO: 79869 - DNA, 1451 bp, Zea Mays
gttagttatgctattccaggattcttgcgaactgttacagttatcccgggatttcacaaatagcaatggaccaaagaggcattatctgatcgttcgtttattcgtggacaacatcgatcggcaaggcaaccgagccacaaaactacataacccacatccttatactccagaaatttggggctaaccaatagaacacatgtattttagtgtttagaaataaataataattatatttgtagcctaggcgccgcttcacacgcctcccctctctcgcctcgtggcaaagcacgggtacgtacctagtatgcacaataattactggaattttcaacatttcttaacatccataatatggcggacatgattcatcaactcatttcagtacttgagcaacagattgataactgaattaaaaaaccaacatccagcggtggcatattgcagttgcagtactaaaaagaatgacaagatgcggctcatactccaattcactggaaattgttagttatgctcttccgggattcttgcgaactattacagttatctcgggatttcacaaatagcaatggaccaaagaggcatcatctgaccgttcgtttatacgtggacggcatcgatcgacaaggcaatcgagccacaaaactacatagcccacatccttctactccagacatttgtggctaaccactggaacacatgtgttttagtgtttagaaataaacaataattatatttgcagcctaggcaccgctccccacgcccccctctcccgccacgtggcaacgcgcgggcacatacctagtatgcacaataattactagaattatcaatatttcttaacatccataatacggcggacaagattcatcaactcatttcagtacttgagcaacagattgataactgaattaaaaaaccagcatccagcggtggcatattgcatttgcagtactaaaaggaaccttgacaagatgcggctcagactccaattcaccgaaaattgttagttatgctcttccgggattcttgcgaactgttacagttatcccgggatttcacaaatagcaatggaccaaagagtcttcatctgaccgttcgtttatacgtggacgacatcgatcgacaaggcaatcgagccacaaaactacatagcccacatccttctactccagacatttgtggctaaccactggaacacacgtgttttagtgtttagaaataaacaataattatatttgcagcctaggcaccgctccccacgcccccctctcccgcctcgtggcaacgcgcgggcacatacctagtatgcacaataattactagaattatcaatatttctcaacatccataatacggcggacaggattcatcaactcattttagtacttgagcaacagattgataactgaattaaaaaaccagcatccagcggtggcatattgcagttgtag

SEQ ID NO: 79870 - DNA, 572 bp, Zea Mays
atcattgagggatgcaacaatattatataagatatgatgatgtaaaaatgacattactctaacattttcatcattgcatagcataagatatgtgatagaactagctgttacaataatgatcatcacaacataatattgtttatggccctaagccatcatcacaagcatcatcacaagcataggcgaatactagagttattacagaccattgttcattacataaataaaagcgcaaataaaagcgtttagccccaggaggctaccaagccactatcaagccatcaatccttctccccctttttggcaacaagcaccaaaaacaggaggagagaagcaaccacatatcactaggaaggagatggatcgaagaactgcgacgccagatttgctgcaaagttttcttccccagggttagctagggaggatagctgctagaaggatcctggggaggaggataggatgaagatggacccggatccccctggtggggaggcgggacatactgctctctgtcatcaaaaaattcttcatcttcaccttcttcatcttctgctgacatgaatggaactgaa

SEQ ID NO: 79871 - DNA, 666 bp, Zea Mays
tgcgcgcacaatacgcgaaagacaaggggctacctcaaaagattccctagactcatgctacacccggggaagggcggtgggttctatttttgtgaaatcaggggactcatagcaaagttgtctctacgaaggggtatcgaggatatctgaccgtccgatcggcaatagagcgccctgattagatcggccctagccaagtctcccgcttccccctactactgttggatccaggatccatgtccgggatctgaccatgctagagctcgatcacagccgtcggatgagtaacacacggtacaaatttaccatgcaaatgagatgtttcccactccatcatagtcgcaatcaccgaatcctacggtcaccagtcatcttcttcaccgtgtgcatgctcatggcgcgccccgacactccaacgcacccaacagcgacgaggagcgcccccagtcgatgtccccaccacagttcgcccacctcccgtgcaccccagatataatcgctataaatccgacaccgcccattgtttgcccgaccacgcatccgctgcacgcttgcacaccgccagtggttccgcccaacagccgagggtaggcgtgacaaagtccgaacggtggtggtcgacccggtctcggttcacgctggttaggcttttgcttaaacactcgg

SEQ ID NO: 79872 - DNA, 338 bp, Zea Mays
cctagaggcgttgtgggagtgctgagtggctacgtgctcgatcaacccctggagctagaggtaggtggccttagcttggggtcctctggctctaggatcgctcgcaacatcactactgcgacgacgacattttggctagtgcacaaaaagtaccgtgacccgtcgcttcccctagccccgacgtcgctgtaggaggaacaaaagtgagcacccgtgtcattgattaaggtcgaatgtggagcagaggaatctcattaggacaatataacctagacgcactgaccttcgctccaaagtgattaaggtcgtttagatgaattggccagggttacttagca

SEQ ID NO: 79873 - DNA, 658 bp, Zea Mays
cgaaccccagggtcagaccttctatgccagctcaaatgctcccaagtcagaattcttttaagtggggtagtgttcttggcagacttaaccgtattgccatcccaaggaattgatgtgatcttaggaatggattagttaaccaagcacaaaggcatcataagttgcgcaaacaagacagtccttctcacagaccaccaaggaaagtcagtctcttgtcaggctcagccacccgccaatgatccaatggtgtttaatctagcaacagaaagcatatcagtggtagaagaattcatggatgtatttccagaagagttgccaggaatgccaccagaaagagaagtggagttctacatagatctgatccctggtacggcacccatcgcaaagaggccataccgcatggctcctaccgagttagcagaattaaaactccaaatcgcagacctgcaacaaaaagggtacatccgtcctagctcatccccttggggagcaccagtccttttcgtcactaagaaggatggaagtatgaggatgtgtattgattatcgatctttaaatgaagttacaatcaaaaacaagtatccactccctcgaatcgatgacctcttcgaccagcttcaaggggccaaatacttctccaagatagacctgaggtctg

SEQ ID NO: 79874 - DNA, 727 bp, Zea Mays
ggagtacgagaattatgcttgatgcgcagttctctgttctatgtacgcatatctgaacaatccgacatatggtgctagacggtccgtgacttggttggatggtcctatgtagtatatggtctatccggttgcgtatgtgtagttagacagtacgacaggagtggttggacggtcctgtgggactacagacggtccgacgttaggtgttggacagttcgccacttgggcaagcgatccgaggttatattcggactattcggtcatgtggggtactgcctgggtgccatgtgtcaagctgtcggatgactcgcgaggtggctggacggttcgaggctgtactcggattgtccagccatatctagaaccagctgcgtgttgcatactaatggtggtggtggtatactacgactttggtgtaacacaagtgaggaacagtagtgttgttgtggtcggtagaaaaaatgtgtattttgtgaagtaccctgttatatgtagacatatccggacggtctgacctgtgtgtccagacggtccaaaggaggtcggacgatttgagattatacgcggaccgtccgatcttactcagcaccgacctaccgtacagtgcgggcgatggcagtgattgcccctgatatgaattcattagcataccataatatggctaggagtaagaaaccccatttgttgtcgatgcatttggtgtagctattttgatatccaatttatg

SEQ ID NO: 79875 - DNA, 371 bp, Zea Mays
aaaatggagataaaaaaactttgtttatcctttgaatacaaaagttgtaggtcatgaagtttagatgattttacaatatttctttgttatcattgcttttatagtgaaagaggtagagacagaatgagcatttgtgctattgattgtcaattttctatttagggatatttctttgggactttggtttagttatggtgagctctttcgcaatccatgttaattatgttgtatgttgggagcgaatagatgtagtggttgtgatagttatcttgttattgtatatgtggagcgtgggctgaaacagacagatagcgagggatatttgaataggccaggacgtattgttgtgaagccatgttttctggtcttgg

SEQ ID NO: 79876 - DNA, 668 bp, Zea Mays
ggggttctctctgcaagaacccagggacacggctgtaagggctaagaatgatggattttaattccaaaaaactgagggggttttaagcaaactgcccacaacgaaggagtactggggcttctcggctgcccgatcagaaacgaatgactgagattagaagggcgcgtaaaagcgggcatggggactgaccggcggggctcacgagtcaacgacccaggacagatcctgcgcacgacgtgagttcgggcgcgctctgacgggcgggccccacggatcagcggcctagggagggagggagagaggataggcgcaggtaggttgccagatggggtccaccggtcgggctcgccgtcaacctcggccgcacgcacgaagtgagcgccatggccgtagccggtggcttcgcgcagggaagagaaggacatggggcggtggcggttggccggagagccccgacatgatggcacagtgccagtgccggtgatcaccgatggctacacaacagagaagggagggcaggggagagagaaagagaactccggcggggaaatttacctcggttgaagcacggatgctggtggagctccgttcgacagtggcaggtcgttgtcaggaacggaggatgggccttgccatggaggattcaggggcttgaaaattggcgcgtg

SEQ ID NO: 79877 - DNA, 420 bp, Zea Mays
acagattgcctaaaactcttttcttcaactttggaactgctgtggtataatgggcagacagtggacatgttgtccaccttcaattctcagaggacctaccactattgtattgtcaattgttttgttgtttgtagaccacaaggcttgactcagttaacaccactatttgaccgaggcaaatctaggtgaccacaatctatgctcttctattatgttctttattttaactaaacgatgtaaaaaatcattgaatgattgttgaggtgttgattgttatatgtttaaagcattacaaatgttgattatgttagtgagtgtgatatctattgaatgatggtgtgaagcaatggacccggagacatgttcttttagggccgtgagcgtgtatgagttcgtgtactttctgttaatggaattctt

SEQ ID NO: 79878 - DNA, 1603 bp, Zea Mays
ggaggcttatgttgatgatgtggtaatcaagaccacagaccaagaaaacttcattgacgacctccagcaggccattaatagcctaagacgctaccattggaagcttaacctggacaaatccgtgttcggggtaccgatcgggaagctgctcggtttaatcggtagccaccgggggatcgaggccaacctggagaaaatcgaagcaattctgaggatggagccgccatgatcgtaaatgaaggtccagaagcttactggctgcatggcggcactgagtcgcttcatctcatggcttggtgagagaggcgtgtcattttacaaattggtcaagaaggtggatagattcaagtggacctcaaggctcaagaagcatttgaagcactcaagaagttcctgaccaccccgccggtcctcaaaccacacaactgagccaccgatcggccggtcaaagatctactgttgtacatttcatgcacgacgcacgtggtaaacactgcgttagtagtcgagcggatagaagaagggcacgcacatctagtccggcactgtgggagatggatatcccatgggtccttataagcacaaaaatgttgcatgggctatctgatggcccccaatagttcgcctagcaaggcgtaccattgggccttgtgtaaactaaacgagttcgaccaagaagggtgacaaccaaaacaaccgagttgtgcacgactgacgcagaaggagcgttgatgccttgcgtccacaatttgcatgtacctgaagagctagatactcagaggataactcgaaggatagacgaccaaactctaggtgggcaggagcaccaacaacgtcgaagatagacttagatagaattagataggcttcatggcttgtaaagggatatcccctagtcacctatataaggttgagggtgtacccttacaaaatggatcccatatctctcataatccctctcatggcaactacaccaccattagattgacaggagaattcatccatcaccacccataattcatctgtactatgttgaccacccacaaaattcaatactcagcatcaacaggacgtagggtattacacatttcggtggcccaaacctgtataactctcttgtgttctgacgtgcttccgcacataccattgagtcacaatcaacgacgtcgtcctaccaaaagcatcacgtgggataccctgtggtgcgcagtcgggtcacaaacactgatagctggctcaccaggtatgggttgcaatgttgattcatgacgactccatggcatttgtctttagcaccccgatcatcttcaacacctaggaggtttttcgctttggatccctcttctgcatcgcagaccgaaaaggtgtcctataccacatcgtagatccatccatgaagggatcttctctgatggcaccgatcgcggacgcaggctcgccccacctgacctcatcaagaactactccgacgaactccaaagtacgaagacctcagccaaacttcgccccgtgtaggactatgaccgtgtcggctaggcccatggccacagtagcacctatgacccaccgattgaggcaacacccttgacttggcaaaaacctc

SEQ ID NO: 79879 - DNA, 547 bp, Zea Mays
gaaaaggaaagctactgctgtggccgcctcggccgaacctatgccgaaggctacaagcaaaaagatgaaggtccttacccaccggccacgctatattgaaccgaccgtggtgcctgagtttggcggggagacttcttcagctgctgaaccaaaagagcccattcctcctatgcaaaaggctgaagaaccggctataatgccgaaggtaccctcagctgagctagctgagtcgaagactgataaagataaggccggagcaaaaattgaaggaacaaaaatgttagaaattttaagcccttcgtcagaagtaacagtgccgaaggcacaaaaaagttttgcggcaactcctaagagaagaaggatggctaatgtactagatgtgctagaaacagtaaagactttgaactcgactccttcaaagaaaattgccgaagccacgaaggctcgaactgaagttgaaacagagcaggccaaaactgaagctgcagtaacccaagctggtaccaaagctgggccttcggagcccgctgagctaaagcctacggaa

SEQ ID NO: 79880 - DNA, 601 bp, Zea Mays
tgctggtatcccattgaaatattttttttcagctggtacctcatctgtcgttgtccacccttgagcaaatcggcacatgcggctttgattgcattattgttggtgtccatggtgaattgggcctagtaaagagcataaatgttagaatttcaaaaatgcaaaaaagtagaatgatatttgaatggagtaacattgaatgattgaatttcacttacagcaactttgccgatatagtttgtaacaattgacttatccttcttgtactctttccaatgccggaggatcgacatttgctgcctaagtataatcccgccctctgatgcaagtttggcagcttgcataggtgcttctggccgtatctttccttcagcaatgtgtatggggatgttagtgcataaacctctacttatcctatccagttctctgcccatacttctattcctttttccatttggatctatggttgcctcaagtgcacctaatgaaatcatataaatcggttagtgacaatctataagttgttgtttgcaacacacaatcaggttatgtatataatgaagccagaagaattgtaatcatggaattgtaaagatgatattgc

SEQ ID NO: 79881 - DNA, 1079 bp, Zea Mays
aaagaagccaacatctcctagcaaagttgcacctgaagaagagatggataggtgtttcttcaatctggaggatacaattatcgcaggtgtaggagtctaaaggcattgcgcgacgtctgagaatggagcgagtattcaatctatttttgagcagcagccagaagaagactttgtgcttgggctgacatttagacttatataaccaaacaaatagagggagcgtttgacgggtgccagtcaagtgagcataaactgtctgagaggaaaaccgagtggaggaggcactgcatctccaaatatcattgtgatcaagcaactgaatattaccaagggtgtcctgaagtgagagaagttgctcgaacgcttcagcagagagggggatatggaacatttcattcggggaagctaatcgagcttgatggatgttaatttctttgacagaggcaaaagaccagagctccgggaacttttgagataaacattgcccattccatcgatcatgccagagaagcgtagatttaccatttccaatttgcacttgggcaatttccttaaaagaatcatggattttgagaatatctttccaccaaaacgagccaactggtttagttgagggtagagaattgctgtaatgagtgtcccagataatgttaacccatgggatgttgactctattaaagaatttgtggaggcacttcataaggagagctttattctgccacttaaggttgatgactccaagacccccttgaatttttggcctgcaaacagatttccaagcaacttggggaggttttttgcatttatatctgcccctctccagagacaatgccgtcgaagtttatcaatctgtttgatcacagttattgggagcttcagggtgcacatgtaataggttggaagagaagaaaataccgcattgaccatttgtagtctgccagcctgagatagaaaaatagaggttgaagctagtcttctttcaatcttctgaatgagaggaaggaaagcttccaagttgggtttttaagccccaaaggaagacccagatacgtgaagggcaaagccccgaccttgcagtg

SEQ ID NO: 79882 - DNA, 848 bp, Zea Mays
ggcggagtttgtctcgagcgcgagctctgcgtcgggcgagatggagtttgcgcccaagggctggtccgctcccctgttgtattacatgtactgtcaggggctggtagacggcgtgtgtgtatagtggcgcatgcataaccatggttggtgaatctttgacaagactacagtattgttgccactatatgcctgcagccctgcgcgaggtaggtacgtgcattgaatgtggttgtcccccagtggccttcgggaggctttgtcctgagcttgccctactcgcccgtcgcgtgctcgagcgaggtggacatcattgtttaggggtgaggtgacctcggtcgagacggagattctcccgagcatacgccccatccgagatcgggctccggcgaggcggagttttgggaagacccctgagggggacctcaggcgaggcagagttcttgattccttaacctcgggcgacgtactctgatggtgtagtttgggtacccctaattatcatactcgacaataagagtatcttctgttggcgttcacatgatcaacatatgtataccaccacttaatttttctagtggccatgaaacgaccattgttacattcgaggacatgtggttgatgatgaacctccagagactcgacttatagctcgtaatggtgtttgcattgtaagtgtcactcatacttacacatacatgtgttattattagtgagttgtattaattctcaacatttatcatgcacacgcgccttgcagaatgcaacatgatcaacaggagatccgttacagtctgactcctcattctaatgtcggtaaaagggttgggtatctcaacacaatgaaaaat

SEQ ID NO: 79883 - DNA, 703 bp, Zea Mays
gtccaataaagttattgacccacaaatggaagatcaagaagaggatgaaaattggcgtgaagcaggaaaaggtcatgaacaattcatgttccaaaagcaacaagcaccaccaccattacacacattgaaggattatcatgatatcattaatgacttggttgataagaagatgaagcaaatatcaatcgagcaaagccctcaagtttctgaaagtgagcttgaaaagacatatgaagcatggcatgatttagtgcccttcccatcagggtggcacccaccaaagtttcgtctatttgatggcactggtgatgcaagagagcatttggcgtactttgaagccatgtgtggagacacatcccgcactccatctcttctattacgacagttctctggttcgttgactgggccagccttccattggtatagtcgcttgccggttggctccatacctgactggaaaaccatgaaagaattgtttaagtcccattttgtgtccatgaagaaggacttctccatcgtcgagctgcttcaagtcaagcaaaagcgagatgagaaaattgacgactacatacttcgtttccgcaatagctatgttcgccttgcaagagaaatgcaccctcaagaggctgttagtatgtgcatacatggcatgcaacaacattggtcgctcgaggtgtctcgacgcgaacctagagatttcagc

SEQ ID NO: 79884 - DNA, 494 bp, Zea Mays
tccacctcttcaccaagttcttggccagctgtgatagccattggctcggcgtgggtcgagtcagatgattccccagccagcaaactaagcacaacatctatctcctcgtcatcagcgctatctagcatctcaaaatgaggctgcctctcatcctctggaagactccaaagtggtgcaatcagaggctcaatgtcctcaggagagggtcacactctaagacccaggctaccatcacgagcgggagggttggacacaaactcagaaaatggcctaagtggtgacaggttccaggcagaatatgcaacaggagcaccagcatttgaaactctacaactcaggatcatatccagtcgactcatcagatcttcagtaggaattttcctgttcgtaacctgggtagaatcgttgacaccactgtacaaataagcagggtatgcactgccttcaagggttggatgttcttaaaaaatgaaatcagcaaccacagcttcaac

SEQ ID NO: 79885 - DNA, 314 bp, Zea Mays
ccgggaggcagagcactcctacagatgaagccttgtgatcccaggaggcagagcactccttcagatggatcacaacttatgcactaagcaaatagaaattttacagcataacagtagacttacaacaaggacacgtatgattatgcaagggttcctatacttcaacactactttacttctaccttgcccttgaatgtgtgtggatgggagtgggatgttatgtcatggcaagaggggggcacatccttatataggcacctaggagctatggatgagtgacacctcaccatgcatgtgtcatctaccactttaat

SEQ ID NO: 79886 - DNA, 294 bp, Zea Mays
agggaccggaccctaccgtccgtgccaagtgtgcaggccaccgtacgttgtgacctaaccatgcacatcacaaacatacatatgccacttggctgctggcctagcagtttcaagtctgcgtacgtactgggctagctactcattcatgagctgcaaaggttggtggtacgcttgtacagctggggtatttggcccccatgcatggacgcgcgcgggggggaaacgggagcaccagctgtgctgtgtgtacaaccatgcatggcttcctgtcctgggggtcgacaggcggttgta

SEQ ID NO: 79887 - DNA, 414 bp, Zea Mays
ggagaatggtagctgtgaggtgagagcctattcactaaatgacaatgtagctagtgtcttgtgtaaggggtaagaagtgaactataatgaacctgaacctaaacagagtgttcctctaaacacgatgatgagagaagagtgtcgacgagaatcataaggctggtgctaacagttggtatcggagccatactggatccgctgcatgagtacttcacccgactccaagcaaagggtggagctatggcaccgtcgaggattgaagattcaatggcgcaacagatcgccatgattgagcaaggcaactgagaaactcaccgtctaatggatgtgatccaaacctccatggaaactatggagatgaccgtgaagggagtgatgaaggagcacgatgatctgctgaagtggtggttgaag

SEQ ID NO: 79888 - DNA, 651 bp, Zea Mays
gcaagaaaagattgaacagagtatttgatgcaattggcttcgtataccctgattatcactacccattacgaaggcaagggaagaagagaaaaactgcctctttggccaccactgctgtgccgaagggcaagaaaataaaggttctgacccatcagccacgatatattgaaccggtcgtagtgcctaaatttggtgaagggacctcttcaactgccaaagcaaaacaagctgctcccatcatgcaaagcgctgaagtatcgattgtagtgccgaaggtgcctacagtcgggccagccgaagccaaggatgatacggccagagagccagaagtggaaaaaacaatggtgatgccaatgattttgagcccaccagcagaggcagaattaccgaagacgacaaaggctcctgccacaactcccaagagatggaggatggccagcgtgctagacgttgtcaaggagaccacaaaagccttgacccctgctcctattaaggaaattgctgaagctatcaaagtccaagccgaaaccgaagctgggcctttagtgcccattaagacgaaagctaccgcgcctgaagataaagctaagaaacaaacttatgatactggcatagcagcggggcaagataagatagaaaaagcaaaatctc

SEQ ID NO: 79889 - DNA, 483 bp, Zea Mays
tttgtcaatggggtcattaggatttgagctagggatcaaggtgaacacgctcggtctttagctcaagggctaaaattcagaattctgaatttcagaattccctattgaatccccacttgagaagcttggttggagttttatttaaattgttttggccaagcttccataatctttattgttgcttatttagtatacttcaatgtttatatttggcctaagccatgattctatatttttcataatcttttgccccttttattcaattctacttaaagagctcaattagggttggtattagggttttaacattttgctcttttgaaaaactcatttgttttgaacatgatgcttttaagtataaacttagtggatcctttattcttaagtcaatttgatgctcatgcttaatttggctcacatgaaatgttgattcttgggttagcactgatagaaaccctaggtgacactagggtgtcacaagtt

SEQ ID NO: 79890 - DNA, 509 bp, Zea Mays
ggcgggggagcctctggcggagcgccatggaactttttcaggaggcccacatggaacacgtcgtgtaggcgagcctgaggcgggagagcgaggcggacgaccacctcgttgatcatctcagtgatgcggtagggccctaagtagcgtggcttgagcttgtcggaggtggccgggggcagcgacgcaaccgggcgttgatgaagtcgtagcagcacccaatcatcgaccttgtacgcaacaacacgatgggtcttgtcaaagtgaagcttctaaaacgcatgagcttgctcgagacgagcacggatatcggcgagaaattcctggcgttcttccatgttcttggcaacggccgccacccgtgtgtctcccggctcataggactggatggtcggtgggtcgcgcccatagacgacccggaacggggtgtcccgaagcgagctttggtacacaatattgaagatgaactccgcccatgggagccattgcagccaatgacgtggttgatcgcc

SEQ ID NO: 79891 - DNA, 867 bp, Zea Mays
gttaaaatgaattttctaggaattaaaccagttcatgcaatgatttttacactaaaaatcgttttctaaattaatatctctgattttctaaccctttgcactgcgcacactattaacagaaagctcaggggggccgcttataaatttacagggtctgtctgtaattactttacactacgtatggactgcgagttgatttgtgacaagttcagggactctttaacaattttccaggctgaagcagtatggaatgatcacagccatccgatcggatccgaaggtccacgttagatcgcggcctcagtgaagcagtatgtaaggctagccgtcggatcaatcattaacgtgccagattcaaaatatcctaacattgattctcatcctatcgatccagattggacggtgctcgttgcactccccgaaccagtatcttctatctaatctgggccattcatcccgatacgaacgacataggcatcatactccccacgacgcaccgacacggtgccgccgccagccagtgcggcagcgccatggccggagtgtagccaatcaacgtctatgtgcactatcaatcgatctaagcctcgctacgcgacaagaaggacaatcggaacatactaatcaggcactcaccaacggtagcggcggaggtgatgttgcccaccatgtcgcacgttccccgcggtggtcctccaccaccgatgagcaattgccgatggctcagtcgattcaatgctttgttcggtcacagtcaagcttctacaacgtctaacgatacccttggaccccttcctaaagctctggcggcatccacggctctaggtgccgacggcggatctccctcacccgcaatgcttattgttc

SEQ ID NO: 79892 - DNA, 367 bp, Zea Mays
caaatatttctttgcttcagatgccatcccgaactcgtgcacatgacggcatgggaacatcctgtggtcaagaagatacacctaatccaccgccagtaccgcccacgttggccgaggctatcgctgccttggtcaccgcgaccgctgacaacacccgctttctgcgtgaaatggcgggaaatcaatttcagcagcaaggcgggagggcttatccacagggaccccgtgaaacttcgtacttggatttctcggaaaccagtcccccacttttcgtcaaagctgaagaacctctcaaagccgacgaatgggttcgggtcattgaacagaaatttgggctcatccgctgcacagagacccaaaagccgtt

SEQ ID NO: 79893 - DNA, 427 bp, Zea Mays
gcagcaatctgcgtaaaagaactgcacctgtgcaccacgtggcggtgtggcatccaagatgtggcacttgacagctgcatccctgttcatcagggccatgcatgggcagtgcggaaattcgttacttgtcccattttgctcccatgaacaaccaaccaacaagccacacatggctgcaggctagctggagctggacggcatgatctttcaggtcctgtccccgtcaatgtggcttgtgaacaagttcccttctctccaaaaccaaaattctgaactgaacaaaaactctagatgcaagtatatgtctgggaacctaacggggtataaatgcgtgcacacgatggtcagttccaaggtagttaagtgaaacgaatagatccgatagatctcaggaatctagctagctagccggcgcactacttggaac

SEQ ID NO: 79894 - DNA, 510 bp, Zea Mays
gtctggccggcacataatgtttaggcacatttttataatctgccttagttgggatctttatctttgttgccattgccttagccttttctacagactcctcgtgctcggccaaatcaacagtacgtgacatgaggtcccgtccaatccctttcaaaaatcgagctgtgccagcagtagtagctttactcttctttttcttgaatgtggacaccaattttggtagagggaatttagatttctttgattgtcgtgaatcccttgatggttgtggagaaggtgatggtgtcctaaatgttgatgcttgtggcggagatggtggattagaaagaggatgaggagcagcatgggaagattgtggaggtgatgatggatgtaaaggtactaaagttttaggaggcggagatgggtggggatgaaatgacgacggtgttggtggatcaaccaattcgacatccctttgaggccaaaggatgaattttttgatggcttgtccaagtgtctcgattcctt

SEQ ID NO: 79895 - DNA, 417 bp, Zea Mays
tatactaatcattatttattttagtttttgttaattatttgagtaagaggaggaggatcgggaaggagtgaatgaggaaagataatctaaataatatagtctattatatttaagtggagataattttaacaatctaaactgtttggttttaaaagtgttacatgcgtgtgggttgcaattaatttattagattagcgtagtatactagtagatcagagcaaagcccgacccgacagatcatttcagacgtcacgacagtttttgggcaccacccgatgtcacctcgtacgacgaggaacacaacgccgcgttacgacagcgcctagaaggacgtctcgaacagcagcagcacatgtcacatgaattccgtgtctagtaggaaactgaaacagtgccacttctgtctccaaaataaat

SEQ ID NO: 79896 - DNA, 508 bp, Zea Mays
ggttgagcggacgctcgcacaactcgtggactcgtaccgcaaactgggtgcacggactactgaattcgaagtgcccgaccgagaagcgggccttcgcttcctcgagtggttgcaggaggagctgttggtgctcccgaccattgtagagggtttcatgtccttcgcctccctcgtcacctgcgagggggccatgaatgcgttgtcccgcaagggttgtaggcactacgaggtcttcgaccaatcagacgagaactttgaacgtgagatcttcaaggccgaagaccctgttgtgaagcagtcagcgggggcagtttttgataggatgtgggggttgcatggtcgggaggcggtcagggagcgggccgaccgggcgagagaccaggtgaaggtttttttgttgtgtatgtgtgggtatgtgtagtttttttgctgagtgaatgtgttgttgacgtagatggagcatgccgaggacgtcgacgaccttgggggtctggctggcgcggcgccc

SEQ ID NO: 79897 - DNA, 857 bp, Zea Mays
ttcagctgcatgctacaaaaatttacaaagctaagttataaagggtatacctataagtttggcccgctcagcagcttcttcggctctttaagcctcttctaaggcgtcatgagactctttctcattctttctaatggcttcatcagcaatttctcagccacccatcagccatacttcgaaataaaacttcccacccaaggtagtagctttggctaaagggtttctaacatcgtcagctgagaaggcaagatctggctgagctacagccttggcatgatcacaaccaaccttctccaaaatggacacggccccacgggcaccgatgaaagcacaaaaatccataagggtcaccacagatgaatttttgctctgaagagaatgcacaaacttttgaaaagctgctcttcagattcttggcgcattccatagccatatcgtaacatctttctttagttgcacgaagctcatcaacatttcttttgcccttgatcgttcaatttcacaaatttcatgtttcgttagctccacatcaaacttttagttgcttcggcaactttcttgtctagcccttgcactttgactttgtgggcctctgcttgagcagatagcttagcttcattggatttcagtctctcgactaaagatagcagaatcttgtcttttgcgagagcttcgttcctcaaggttataacctccgatcggaggtttccatgtgctatttgacaactctcatcttctacatccttttgagccttcagagccttgcttagaatcaagccctagaaaacaaagagtgaacaaataataacgataggaaatatgacaaaaatagttcaccataacaaaaattacaaaat

SEQ ID NO: 79898 - DNA, 410 bp, Zea Mays
gtgatagatggatggacaagaaaaagatatgagatgatggaagaaaaaaagaaaactaccactgtaaacaaatcatgcaattgtttttaaagcaaatgcataaaatgtagtgataaaccattagtattatacatgaaaggtcacagaatttttaaaacccaaattgccttatgtaagtatccatacaccatgttctgagcaaacatctcaccggggcatgcagattgaatcattggaagattggtttcagcttcttggccactacatgatcgaattttctgataacatcaaataaattcattgcgtacttcaataagagatagatctcgacttgagcttgtatcaaaaatagcctttacaccaatcgacttgaacaaaccattcagttttctgaggacctaaatttaaaa

SEQ ID NO: 79899 - DNA, 771 bp, Zea Mays
tgttgatcgccctccaagtaatccaaaaagattaaccattgagtccagtcaggaggttttttccattgacatttccagacgtacaagatctagcagctcagctcatcaagatgataatccacataatcagaagcagaatgagccacaaccaacaccagtccatcgttttcacagaaaggctttagcttgtcgtgtaaaaagaaaacctcctgctccatccacactgtccgacgatgatttcatggatgctccatcgttgaagcgccaattcagatcaacctcaccttcccctacagaaaaaacagtgcaaagaagataaaggtcccttctccacaagttccgagtgtgaaaagcagtccaaagtttgatatagatgccaagtctaatatcattacaaaaaaagttctcctaaacagaagactcctagaaaatcctaggtactatgtatatatttctgtttattttatgtgttaatttttgtgcccaatcaattttttattcccccccaagttacatttatgtatattattatctcaaagtatgttgtttatttttttagtgttgtagaatagttattcacaaggctctaataaatatcaattgtatgtatatgtagtatccttagttataacaatatatatgccttgtgtattaatgcataatcatttatgctttcagaaattgaatatccgctgcattccttatgatgttattgtctcaacttggataatgagcgatcggcagcgcgatgcagtcgctaggttgggattt

SEQ ID NO: 79900 - DNA, 366 bp, Zea Mays
gattctattaacgcgtgatttggtctccaccccatgattacgaatcagcgacccggatttgttctcacgaatggatacgctccatctaatcgcagttatttatgctagatcggacgacactgggctcatcaccttcccccagccatccagccgtcccgaaacacggcatcgcccgctgtttggccgcgacgccccaccggtaaaacgatgatttggcgccccgctgattcactcttcaaaatggtgttacacaaatcggacaaaggggtaaagtcatggagatgagtcttttcgagagctctgcggcagggtgtcttggcgtcacagtggacagacccatggcagtgcatcaattccggcgagaaa

SEQ ID NO: 79901 - DNA, 988 bp, Zea Mays
gggggatgtggcttatattactcgcacctaagtgtttgcagtagggattacaagctgagcgggagaggggagggccccaagtccctggatgtgatcgaggcaagtgtcaataccgaatgcaggagaagactgtgaagtgttcgcctgcccccttgagaagtcgtagactaccctatttatatgcctaaggggagcacgaccctgtagatgagagctgccttcctgttgtagatagtgtattcgtgtcctgtagacaacatggccttgtactttgttgttgacttgtgcctgcttgtttcctgctgagagttgagacctaggccgagggctcagtcgcttactcgagcacacctggggtggggttgaccataccgtagtggttgacacagtgcttagtatgggaaaaagcttcttaagggatgtgtcagcttcactgtatctgatgacgttggtggcgtcctctatcacggatattgagggcagaactgggcttgggcgaggcggaggtctgcccgaggtcgcgaccgagcccattccaagattcgattatgtgcgccacagtttgaaggagtggcccttcacaggattcgcgggggagcaggtagccgaggctgggctcgggcgaggcagagtttatcctaagggtgagctctacgtcgagcgagacagagtttgtgcttgacggctggtctgctttcctgttgtatagcatgtcccgtcaagggctggcagacaacgtgcgtgtacagtggcacatgcgtaatcaagttggtgaatctttgacaagactgtcatcttgttactactgtacacctgcaaccctgtgctgggtaggtacgcgcattgagtgcggatgtcccctagtggccttggggaggctttgccacaagtcttgtccctctcgcccgagatgggctcgagtgaggtgtacatggcttcccaggggtgggggagtctcgatcgggatggagatttgctcgaattcacg

SEQ ID NO: 79902 - DNA, 380 bp, Zea Mays
cccctataaacttgccggtttgtgcctgttccgctcaactggattacctgggaacccgactgctgggagaaggagctgggcggcgtcgccaccaccgtcggcggggtgaaactgcgctgggaacgttccatctacggtcgtgacgctgggggcatgtagatgctctgggtttcactgaagccttggcaaacttcccccagagctcgaggttcatcgccatgccgctgttgtatgcccagttgttgccgcacgcttccatggctagccacctccgcccttctatccattggtaatttcccctcccttgtgctcgtcctactccgccgtacgtgtagcaccggtccgtgtggggatttgtgcacgggcactgcgctccggca

SEQ ID NO: 79903 - DNA, 460 bp, Zea Mays
ttaatttttgggcatagtgtctggcttcaaggatttcttcttcggataatttcttccccgaagcatgtcgataaatgtaatcaacagcttcggctggggcttcgagggcaggggattttgctttttctgccatgctggtatccgaagtttgcttatcagctttgtctacaggcgtgacagccttcgccttaatgggcgctgaaggcctagcttcggcctcgtcttggactttggcagcttcaacatttttcttagtaggtccagggctcaaggccttcgtgctctccaagacagcgtccagcacgctggccattctcctcctcttgggagttgcgataggagccttttgcaccttcggcaattttgcctcagctggtgggcttagaatttcaagcattttctctattttttccacctgtggctcttcggctttatcattcttagcttcggctggcccgac

SEQ ID NO: 79904 - DNA, 319 bp, Zea Mays
atttaatgcggataaggcaccttcgacgtccacctcgtcatcttaggcccgccgaccagctctgaccgtcttcgtctaattttatccaaccctgtctaccactcgtctgactcagtctccgtcttacactgtcttgcgcaattcgtcgtgcaaccgtctcttttgcttggtcagaatgcgattccgcgatgaatttggcaagcacctcccacgctttcttctttctatatatatagacatcaccccgccgtcgcataaccccttgtctcccttcccagatccagatccaaatcacgcaggaacatgcatcccatccagg

SEQ ID NO: 79905 - DNA, 424 bp, Zea Mays
ctgagcccgagaccaattcctcgaactttgatcaatgtccgactattttatccggatccatactcgcaaacgaaatacttagtgtgtcgatatctaattaattattatccgacttggccaaatatctctgtgtccgaaccaaactcaaaacctgcttcgacagtgctttttaaatatcacgattcgccttctccgactaaaaatccaagccgaccaaaagtttgagagaaacatctgtttctaaaattttgcacaagaaaatttcaaagcggaatctccaatgcgctgtcctcaaataaattcttatccgactcggcttaatacctctgtgttcggtccgaaattcgaaaatccatcggcaacgatttttattaatccaactcgctttatctcgatcacgaatctgaagccgattggtctcaat

SEQ ID NO: 79906 - DNA, 557 bp, Zea Mays
atcggatgctgggtctgccgcgggggggccgctgctggcctccactgcctggcgaccggtaagatctcctctagcgtactcgccatcaactccgtatcgcgtagaagctttcgtacttggaagtagtgacctagggcaccgaattgttgatcaccggcgatgttcctctgctggccggtggtggcaccgccgtccaacggtgaaaggattggggagaatcgcgtgcgccgtcgatcgcgtatcagacggtgtagattagatctggcataccggttagagtagatgagatctatgccgttggatggaaattgagcgggcggaaatcgatctgaagattttaaatcaggagcgttggtattgcatcggagggctctcgattgcgcgtggggtcgcaagggtgcgatctaatctgggcactcagatctaaatccaatggaccagagctctccataccccttcagcctggagatctttctaaagagcctctcggttttgttatatttaacccgccgtccgtgcggctgtaatatgagtcttgagaatgttttggtttagcc

SEQ ID NO: 79907 - DNA, 649 bp, Zea Mays
ctctggtccaggcgtccagctgaaggcagttaaggagaaggagagtgtcaggtgccggacgaggaggactgacggcaatagcttagtgggctgcggcgaggtcatgtgggcttggcgttgggctcatctggcatatgtgccgaggaattggcttgggcctgtaacggaattgaagggtattacgtatagtaagtgcttttgccatctttattctttaggccaggccatgtttttagtttagtttagtttttgttgaggacgacgtcgcttggtgcgcccgtggaccatgcatcatcatacatatgattctgctcgctgctgcctcgtgtccagtccagtccagtccagtccagtcctgcctgctaccagcaaacacaacatgcatgtacaccatgcttggttgcttgctattggctatcgctaggctatagctttgctgcaaacaaaggaccatgcgtgctgctggtgtgtagtgtagtgtagtacgagacgatgagtgtgttgttggcttcattctttcatgctctccctctccaatgataatgatggtccgatctctgattggtccaaaaccgacatctctcctggtagtctgtctcatgcatctctctatgatcgatcaagcatatatggagccagcctgcagagt

SEQ ID NO: 79908 - DNA, 482 bp, Zea Mays
aaaacagtgcgtgcagtccaaaacaacaatcaatgaatttctgcttctatacaattcaagaattgccgcgttctagagacttgaattattataacactttaacatttgttagagttaaaataaccaagtgagaactaacaagtggacttactaattttgatccgtgtcgttatgagcactagaagtaccatatataattaacaacgtattctccatgataatcacccaacgatttgcgttttcaattagacctcacatgagcactactactttttatccgtgtcataaccatacgcatttagacgacaaccagcaattcatcgtgactacgagcttacccaaacccatctattaattcggctaactagcgcaataacataggccgttatacatcctaaacgtcagctagcctcttattatcgcaatccgagacacaacatatatatacaacaatcacttaacgaaatcgactcctacttaac

SEQ ID NO: 79909 - DNA, 865 bp, Zea Mays
aatacgaaaagtaaaaggtcttcacctaccacaaatgttacatctgaataaaactaacttagaggcaatggaaactctcaaagcctgaaacattgaaatgaagtctgaactctgaagttgtctccgcagtccttacctcatctcactggtgccggtgggcattgggtgcctcgactgagccgttgtgcagtgccgcgggcgacgttgtcattttcttgcggaggcgtcgaactcccagatctggcattagagagtgtgcacatactacaaagatgcatactactaaaattaactgttgttgccagacattagagagtgtgcacgtaccaaatgctacaaattgtgagttgtccgtgcatgggcacgtacctcgtcagacatttgagagtgtgcgtgtacctaatgtttgactgcatgggaccattcaaggcagtcactaagtgcgggttgatcctcaggtgcagttgacaaaagagatgaacaggaagtctccataaagccaaaacctccagcattggggaatatccggtgcatgcgcattggggaaatttgaaagtcgaaagaactgcctagcacaagtatattaagcagactacagataaacatttgtattctctattgaccatacattcaagataaacaaacaagagcaacaaagaataaaagttgaaaggacgtctcgagcctgcagtttatgtaaatggcacaattaacttatgagtttgtttcgctcttgataacctaccatatataaaggtcactgaaaattctagaaaataacaaattcttattccagaagtgtgttgaacagaaatgttaccttctataattgttgatcatacatatgatgttaagcagaaaaaac

SEQ ID NO: 79910 - DNA, 820 bp, Zea Mays
gacggtgcaacatgctcgcgcttactcgacttagggtgaccactataccctactaatggagcaatcggcttaagtcggcgacgacttaagactgtgcaacatgctcgcgcttactcgacttagggtgaccactataccctactaacggagcaatcggcttaagtcgacgatgacttaggacggtgcaacatgctcgcgcttactcaacttagggtgaccactataccctactaacggagcaatcggcttaagtcggcgatgacttaagacggtgcaacatgctcgcgcttactcgacttagggtgaccactataccctactaacgaagcaatcagcttaagttggcgacgacttgcacagggtgaccactataccctactaacgaagcagtcggcttaggttgacgaagacctaagacgatgctacatgctcacgttgactcggcttaggggaaccactatgccctactagcagggcaatcgactcaagtcagcacgatacgatcacatctacctatcttaaggcgaccgctatgccttaccagccaagcgattggcctaagtcagaaaaagctccaaaaccagcgcgccacatttactttcacaattgttcaggatgactgttataccctaataactaaaacaatcagtactcccggaaaatagaatattatattggtcaacatcaaggacacgttctagtgccctatccgcaaaatgttcaaacacaaccatcacaagcacgcaagaattcatagtacattcaatgttttgcaggatgtcactgcattgaaacgtctctactggcaatgtttttcgca

SEQ ID NO: 79911 - DNA, 554 bp, Zea Mays
cgtttgtaagggcacggtggcgccatgggcatggttttcgatccggtggcccgaggccctaatccaaacaccgtgacctaaaaaatgaaaatggggaggagtcgattgcaatagcgccgtcttaccagtgaataatcgatgccctggtggacggtggttcgagcagcggtcaggacatcccgacaagaaattccccactaccagctagcagttgtcaacgtcgttgatcttcacacgtcataccgacacgcgtgaacatcctagggcaatccataccccaggggaatggcgctgaggaggtggtcatcgtccacgcacggttcggcggcgggcgcagtgctccaacgagccattgcgatgacacctagccaccacaccacatggggatgctatgagagtggtcgatataccccaagcatcatccctgagctcccggtgaacacacaatggcagcaactgcgaggattggccatggcgccgtttgtcacctctgttccgatctcaacgctctagatggtggggaagagggtcacgacctagtttttatagatgag

SEQ ID NO: 79912 - DNA, 720 bp, Zea Mays
cgctccaggggaactctacaccgagccgccgtccgcgccgtgagtggtgtccggaatcatctacagaccgaggggacaggcctccacaacatagccgtcaggattggcccatatgtcgctgggaattcctcatcgaagtttcggttgacgctcaagccgcacttcaccgttgccaggagactaggtgccataatcgtcggtgagtattcttcctccgtcttcgcgcgaccgtcctcttcatttagcgctagtagaatcggggaatggtgctcggaatcaccgggcagggagagtccgtcggcgcgatttcaactaccagggtggcgccaccgtcggtcacggtcgaatgaggaagatgactctggtgccgttcgatcccttttggatggctcagattagatactgcgtaccacttcagatagaactaataggagtccttagatgttgatcgaacggatccgaatgattgcgcccgtttaaaatctccgtcgttggtttgggatccatcgaccactgtcgtgtaacgctttggtatagttcaggtttaatttgggccgttgaagtctaattgtgcagccgaaaatagcccattccgcttcgaagtggcatatttgcgtaagagccccctgagtttcacggattcaaccagtagtccatcagatgtaggggagaatttaatttgggccccaaaaacttaaaagttagctcccgcacttctcg

SEQ ID NO: 79913 - DNA, 673 bp, Zea Mays
gcagggattgggaaggatattaccaggagtgtgaaaagatcagatggggagtgaatcaagccagcctcaccgtacccacttgctcgacaacatggcctcacgaccaccaccgttgtgaccgctgtttaaccggaatccgccacactactgaccctgttaccacgtcgcagggtgtcgtgtgagttggttagtcaccgttctaggtctctaccccaataaatgccacgttgtgcgactccagtgactcacccctctctccggtcgcctgcctttcctttcaaaatttggagacaccgctcttgaacactataaattgagcatgccacttgctccgttgggttgtcaggaagccagagcacccgcccttgcctccgatcgtccaccatagcgctttaatttggaattccccccaaatccactctctgcgctgccgtgaacacctcttctatcgacccgctatcctggccttccacccgccttcctagcggtcgttcttgggttctggtatgttgcagaaactcaccgtgctcccaatttgtgtgttgttgtactgtgtcgctaggaacacgtcggggttgtctcaagttccgtggtgtgcgtgaaccgagctcttgaatggcgttccgaccaaattggggattcccagtggagcgccaggggtagaattaggtgt

SEQ ID NO: 79914 - DNA, 461 bp, Zea Mays
cgagctagggttttgcccgcgtgcacgcctgagccatatataaacgacgccgcactgcgtctctccaaacccgtccctcatacacatcgtcaaagctgcgggcgtggtaccggtagatctaatctcctgttaataagtatcgatttcgttttatttccttgttttttcggatcccaagttgttttgaggtgatgatcctttccccaaattatcgactatgattatactgtgcgatttttcgagctcttctcttcggagaaggcgctcctaagccagatgttctgatcgaaacaacaacgcccgcctcctcctgaaaacatccttctttgtgcacccttcttattttgttctttttttttgttgttgttgtggttttgacgatggagatgaggatcctttccccagctgatcgactatgattatactgtgcgcaactgcgacgcctcctctgcggaggaggg

SEQ ID NO: 79915 - DNA, 473 bp, Zea Mays
ccggccatagacaaagttaaaagaaagcttggaacattcaccatagacaaagttaaaagaaagctaggaacatagaaagagactccgtccccgaccaacgtaatgtacattatctcgcaacagaatgcgaagacagcagcaaccctcgcacaaacaaaggcaaagatattaatgcacaactacagagtaatgagggaatcaaaacagtccccctcgaccctgtgacccccaagcaaacggttctagtcagcgaagacctcctgccagcagaagaagaaagacttctctcttgtctcaaccgcaacaaggacgtcttcgcatggtctgccctagacctcgtcagtgtcagccgcaccatcattgaacacagcttgggcattgatcccaccgtgcgccccaagaaacaaaagctacggaaaatgtctaatgaaaaaacagaagccgcgaaggcagaagtccaccgcttactagaa

SEQ ID NO: 79916 - DNA, 534 bp, Zea Mays
gaatacgatagggaagtccttaccgggtaactcgcagccgcaatccttggccacggcagggtggtgccccacggtagagcaatgctcccagtaagaaattgggccgaagatcgtggccaatccagcccgacgaccccacgaaaagcttgaatagcatccagcgatcacccccgactacttctctgtcccccaacctggtatactcgcagggtgacgccggcgcaagctcaacacggcaatggcggactgcgaatatctctatctcactggcgagaccctcggttggtgatggcgtccaagcgacaatgagatgggtgcgagcaggtggctgacttctcttttatcgcagcggagaggcggttgggactctagctggcacagataaagctgcgacaatggtggcgattttgttacgcccaagcgctcggatcagaggggatgacccaacacggcggtcccacaaggcagtgaaaccccaccgtcgattacagggaggatggtaatgacgcgcgggcctcggctgacacccgcgac

SEQ ID NO: 79917 - DNA, 406 bp, Zea Mays
aattggctagagaagtcgaaggagacattacttggtgaaataaacacgatgccaattccttgcccttcattgcaaaccgatccatcaaaatacaaagtccagggagaaacagtgaggtatgataagtctagtttatgagtatctttgatccgatgttctacaataaaatctgctacgacctggcctttcatagatttcaatggttcatagaccaagtcatactctataagtgcataagcccatttaccaatcctaccactcataattaggttttgcaacatgtatttaatcacatcggtttgactggcaatggtgcaatgactagacagtaaataacatctacacttggtgcatacataaaataggcataaacataacttttcgataaaagcgtatcttgtttcag

SEQ ID NO: 79918 - DNA, 422 bp, Zea Mays
ccttcttgaattagaacacatccgagtccactgcctgacgcgtcacaatacacatcaaaaggcttctcaatatccggttgggccaacaccagtgcagtggtcaacaacactttcagctgctcaaaggcttcgttgcatttcgaggaccaatcaaactttgtatcattcttcaataatcccataatgggtttaacaatcttggagaaatccggaatgaatctacggtaatatctagccagtccaaggaaactctgaacttgatgcactgtagttggtgaactccattccagaatatccttgactttgctgggatcgaccgcaatccctttagtagacaatacatgtccaagaaactggatttccttcaaccagaacgcgcatttgcggaatttggcatacagctgacgttcccttaagcgcgt

SEQ ID NO: 79919 - DNA, 740 bp, Zea Mays
ggctgatttccccatgtctcggcccaccaaactcccctgcgtagcctagtcaagggtccggcgttgaccagtgggccatggctggcggtctcagcgtgtactcaccctttgcgtgatgccgatgacaagcgggcccgtacgccaagtcgtcactgaaatcacggaccctcagacactaaaatcacggaccctcgagctagccccgcttccctcacggtatcgctgccagtggacccaacctcaccacgccatgcaccgtcactgccacatggggtcccgctccactgttcttcttcatatcaaccaccttgagggatttgtgtgtcgtcgcaacgaccgcacctggaaccctgtcggtgcataaaaacccagaccgcgaccctatagtcatccgcatgccccccatctcgcctcatagacaccagccgccgttgggagagaagagaggagggagtggaggcccagagcaccaccaacaccgtcttctgccaccaccgtcgttcggccctcgctaggaggcccagagggtccatcgtgtcgcgtgggatctaggcggaccttccctcctctgggagtcagttgggctcaccgggaatcgctcgatggagtcaactcgccacaagcatccgcgccctgccatagaccaacccctccacgacaattgctcggcggtaagatcatccccacctggtcaccttaggctcctctctatatagcaccggtttaatttcgagatacta

SEQ ID NO: 79920 - DNA, 936 bp, Zea Mays
tttgttttctgggtgttgtattgcggaccgtccgtgcccaagtcatggacaatacatgttcttaggttgcggaccgtacgtgcctaggtgttagaccatccacaagtataaaagtcaggtgtgctagagcttggggtattcctatttggggttgtcagacagtccggctgggaccgatggaccgttcgcgcctcacttttctgacagctctgacacgttttcaaacgaaaagtagccattaaagtgaatggtggaccgttcatgagtgtgcagaaagggagtagtttgcccataatggttagttttggaggggtgctataaatagatggtattcaggctctcttgttcatttgaaccatatattaagcacaagggagcctccaatcctctctaactcacatgcagttcttgtccatttgaaccatcgatttcttcagcgtcattttcaaaaaatcctcgtagttcgtgtacttaccttacaaagtttatatacattaatatctacaatgcataaattatgacattcacctttaatttttacgatagttttttaaaaccgatctcctatgcgcctcacgtcgattcctaaaattacgcgcatgtagtggaattgatttagcgcatgcaacagatctgatttggtgcatgtagtggaaactaatcccaagatttactaaatattccaaccaagatcgagatatttggagcccaaagctttcaatagttacagaaagccttggtcgcctccctcccaacatgacccacgcctgtactaccccacatcccacgtctagatcacgtggacgcgttattttagagatatttttgtatggtagttatatatgtgatgccaggtttgagcgtaaaatagcctcaaacaaagcataaaattcggtttcccgtcacctcgcatgcagggtcctgtttttatggaag

SEQ ID NO: 79921 - DNA, 783 bp, Zea Mays
ttgagaacaagtccccaacaccctgcttaggacgaaatcggccttaggccttctccacgtctttccgccacttggcggcttcatctctaggtttggtctatcacataatgctgccagatccactcttgcctttatgttatcctttgacttatcaggaatgtccataattgttgcccatagtgcctcggcaacattcttttcagtgtgcatcacgtcaatgttttgtggaaggagcatgtcgtcataataggggagctgagtcaagccagacttatgtgtccacatatgctgctcaccatatcccacaaaaccaccttctgtattggccacgagcccatctatctgttgacgaatttcggtagcagtcatcgttgtaggtgggcggtctgtcactacgacacctttcgtaaagttcttgatgtctaggtggaatggatggtcaggagggagaaattgtcgatgtttatcgaaggacgaatatttgccaccctttttcaaccaaatgaacctgagagcttccttgcaaactgggcatgggaacttaccgtgaacacaccaggcgcagaatagcccatacgccggtaagtcatgcatggagtactggtaccaaacatgcattctgaagtttgtcttcgtacctcgatcatacgtccataccccttccccccaggcatgtaccaattcatcgatcaaagactccatgtacacgcccattttattccccgggtgtccgagaattatcaacgacacgaatatattctgcctttgaaagcacacactaag

SEQ ID NO: 79922 - DNA, 629 bp, Zea Mays
cactgtcacaggcacggtcaacagggcggcggcagcagcagcaaacctgtggatgaggatggatcagcccagtcacgttgcatcacgcaccgccagtccggcaccgctgcagcggagattctggcatggctcggcttcttcagttcttcttcttttttttcctcctccttaaacggtgaagagaagaacgaggttaaccgttttgtattggtcacggcacgggatacagtttttgtacatgtactacagaggagtagttattcaatctaacactagctacacagtacgtctaggagagctagccactcaacgtggtctgcaactatgctcaaggccggagatagtccgtgcaccacatcctctatacccgcctgattggttccatgcatgtatctcagggcccacccgtgcacatcctctaaatcgctagtcgctaccacccacctccggtcgtcagtacgtgtgagcacagcagaggcggagccaaggggggccagcaggggccatagccccgcccaaagctgcggaacacacacaaatatatatactctaaattttgtgtagtctaaatatatataatttagattttgtgcaacataattaatcaaaagatataatatagtggttgc

SEQ ID NO: 79923 - DNA, 682 bp, Zea Mays
caagtgcaaggggttattctacaaccggaagtgccagacacttatagatggaagctgacagaatcaggggaatactctagccagtctgcatatgcagctcttttctttggatccatcagtttttcaccctggaaaaaaattggaagagctgggcaccccttcgttgcaagttctttatatggctagtgttcaagaagcgatattggacagcggacaggctggccaaaagagggttaccccatcccggggcttgccctctttgtgatcaagacgatgagaccattaatcacattctagtaggctgcagtttctctagacagctctggtttcatatgctccaggccctgcatattacaaaccttgatcccagtttgggtgattattccttccctatggtgtggactgtggaccaaggtggttcgattgatgccaaaaggaaaacgtaggggctgaagctccagccatgcatacccgatcttctaaggaaaattgcggagaaattcaaaatgtggtgcatggctagagcttcaaaactccaagagttcctggtcgggtcgctagatggatcttgaggttttagggattttctctggtcgtgttgaggacctccttttagagaaccttgagtgggtgtgtgttgtgttccttttgtaatcggtctggccttgacggactcttgttt

SEQ ID NO: 79924 - DNA, 450 bp, Zea Mays
gtaagacaagacttgcaaagcgacaaagggaaaggaaacgaacaagagcaggatagggaaaataacactctcggattgaaatggaataagtgaggctaagaaataggtaaacatcatggtaaatatggagagaggacaagggtcaaaggtgataataggcaaggatataaaggaagaggtaaatgtgcataaaaaaccaggaatctaggtacaatcaagaatagaaataagataagtcttgcaagaggtaaagtataggatataaccacggatgagataagcttgaactaaggtggcagattggaggttttagataacgaacatagcgtactcaccaaggtaagattgagagatgagaagggtaaaggcaataagaagcaaaagcacaacaaaggatgaggttacaaactcgcgagccaaagaagaggatacgaccaagagaaagaagct

SEQ ID NO: 79925 - DNA, 397 bp, Zea Mays
accacacatgtctatcacctgaatggagcatctcaacaaatatcctaaaacaaactaacttcatcacacatcttgcattacaaacctacttgacttatttgaagtgtcttctcgaaaccgtgagcacaatcatacgctatatgcgaagcataatttaacgagcgcataatacgcattgccacgacttgacctataaatatagagaaagcgatgactactcgggcatgtcaccacctctctatttaagccaagacaatttctaccatcgactaagagttctaagtattaaacacactgttactgtccacgcgcaaataaacctcaacttaacactagtgacaccgatggatttttactaaactcatcatgcgcataaccacgtctcgcatacaaccat

SEQ ID NO: 79926 - DNA, 286 bp, Zea Mays
cgttgacgttctccatcgccttattatccataggatcaatatcgaggatcttagccacccgactattgataatgtcccttgcccggtgcttcaatatgtcgatgatatgcttatttttgctagggcatctgtctcgtctgtttccgctgttaaaaaggccatcgatgactttgctcttgctactagccttaccattaatttccataaaaccaccctcctccctgtttgtgtggacgacactactgctcgaggcctcgctgacatctttggcatggtggtctcttcc

SEQ ID NO: 79927 - DNA, 714 bp, Zea Mays
ccagcatcggttccagcctcaattcctgcagcttcgacttctatctgcttagtatcagctttggtttgcaccctggaagcttcggcaactttccctgtagaagcgggatccaaggtttcggttgtttctagcacatctagtacatttaccattctcctcctcaggaattacaatagagcccatttgtaccttcagtactgttgcttttactggagggctcaaaacctctggcatcttcgttgtttcttcagtttctggcttattagccttatcaatctttgtttcaactaccttgactaaaggcaccttcggcattatagccggctcttcagtcctctgcatgggagcaatagtttcttttgttttggcaaccgaggaggtcccttcgccaaattctggtatcgcggccggtgagttaggaccttcaacttttttccctttggcacaggttcgtttggggtggccgaagtagcagctttcctatttttcccttgcccccacagcgggtaacggtagtcggggtaaacaaagccaatggcatcaaaaactctgttcaatctcttttttccccgacctccgaaggctgcggatagtgcattatcttctgccttggaatttgctccaagcagttcatcacttgtagcttcgatgcatttcagccagtcattgtttggttcatcgaatttatcctcatacctgaatgtatacttcagc

SEQ ID NO: 79928 - DNA, 729 bp, Zea Mays
cggccgacgtggacggggtggtgccggatgcggcacccgtccggctgtatacgctttacctgcgggggccggggggtcgctttcgggacaggaggaggactcgtgatcgatcgatcgatcgaccgatcccttccggctggctacgcggtcaatttaaagcccagaagaagaagcaggcggggcagctcgcctgatgtcagagcgcaggcgagcggtgtcgaattgcctggcacggacgcgcttggcttctcccgcgctggtgatttgtaaaaagccttaatctttaatttgcgaggctgtccggaacctaatccagcttcgtactgctacagaaaagcgcccggccgtctctggattaacaatgcgcgcttttggtcctgcatgcgctagcctgcgcctacagcaggtagcagcagcagttgctgttgctattgttgtttaacttatcggggaaggagggaggcagggttagttagcttctcggtggtgttgtgtgtgtactgctgcatcatctgcttagatcagtcaggcatgcgtccgttgtgcatgttgattgctgcttttgcttcgttctgaagaggaagctggcggagttcgtataagcacgtcactgtagtctataacacagtggtcgtcgtcgggcggatgctttgttcgcttcgggttctgctgcagctacaatccccttctcctagcctgcttccttcgggattaaagccttttgctcgc

SEQ ID NO: 79929 - DNA, 336 bp, Zea Mays
gagtttgggggtgaaaacctcaggttgtcagacattattttgtcagctttcctcatagggatgttcaaaatgcatgttagttgtcctattagtgctactccttccctatatatcttgggctctcagacgaccgaaaaatattcgaccctgtgtgtatgaggtggcgtggcatggttataatatactactgatggggtggcatagtgctactgtgaagtgtgcaaaaatggttcattttgtacagctttgtgttctgcgtacgtgtacccagacggtccagagtaatgggccaaacggtctgagattatatccggatggttcgactgtatatgacgc

SEQ ID NO: 79930 - DNA, 799 bp, Zea Mays
agagagtaaaccaaatacttgaagacatgttacgagcatgcattcttgaatacccacataaatgggatgaatgtttactgttggaagaattctcatacaacaatagttatcaagaaagcatcaagatggaaccttttgaagccttatatggacgatggtgtcgtactccattgaattggtctgaaccaggagaaagatggtttttcaggcctgatatggttaaagaaatggaggaaaaagttcaacaaattataaataatttgcaggaagcccaagctcggtaaaagagttatgcagacatacaacgccaaccctagtactttcaagttgaagattatgtctaccagaaagtctcactaatgaagggtgtatctcgttttggggtaaaaggaaagcttgcaccccggtacattggcccttttcctatccttgaacagtgtggaccggtggcataccgactccaactactcgaaacattgtctgcagtgcacaatgtgttccatgtgtcccaattgaagaagtgtcttcgggttccagatcaaaccgttgaagtgacggatgttgccttagaaccatacttgacatattcagaacatcatatttgagtcctggatcagaaggacagggttacctaaaggagaactctcaaatttgataatatacaatggaaccaacacacggaagatgaagctacatgggaaactcaagactttctagaaaagaatttcccaggctttttagcttcatgtaaattgtgagatatatacaattgttgtaatagaggaataaaccccatacc

SEQ ID NO: 79931 - DNA, 1500 bp, Zea Mays
ccaagatctctcgaagatccgaggaggtctatgacgagaggatcaggatcccaccctgacagaaatacatctcaaagtctttcctttgacccaccgagatcacttggttgtacaaggaggaacatgaggcgagcacaaccttgagaatctagaagtagaaggaaaaagagttgtaccccgagtcaatcatcttttgtcaaagaggacgcaacaccgggggcgctcttccactagacgcttgcctgactccataagggtccacgaagaaattgttcctcaacaaagaaagttagacaagaaacaatgaagtcgttcaaggggcatatcagttatagaaaggcgtgaggcatgataaaaacagaacatatgccaaacgccacgtatggatagaagagacggatcgacgccaaatattctaaactatggaagtatgcgctaggataaaaggcagcctcaataaaagaccaaccctttaagggagataccctcccttggtggcttgggggctactatcagggatacaatcccaagtacttggggcccattggttagcgagcacactagggaaagggccctggcatctgggggcccatcgatcagtttaaggagataggtaatgtcttccttggaagaacccaccccggacaaactccacggcaccgagcctagggtcgtgcatggaaagacctgatagggggcgggtgtaatgaagggaaaccactcgactggatcctgcgcctagctcgagaccgacccgtcataagtaaccgactgtattagctatgactggcgtcgagccataatggaggcgtcggtccgcctcccactcattacctacgagtccctcaagccatagagcactcatgacctacgagccctcggactgtggcgcatttatggcccgcgcatcccctagccaatggcacactcatgacctactaggactaggcctgagtgcacatgccgctagcagggcacaacacgatgaatcgagccgaaccccaggctacgaaggccaagggtcgacatagcccaaatgatggcgcttgggacccacactgcccacgtcatccatcataaagaatacgagacaaccaggtgaccctggtgcccataagcacgcgtggctttaccccaggtagaatgcttggtgttacccttgcctgatggctccttctcaggtaatccaccgttagccaacccctctctcgaccgataaaagggaggggttggcccccaggttagggggatggttctcttcagatggatgcacccacaaggatggaccccggacgagaagacgcctagaaggaccgacgaacaagaggagggcccagaggctagagcctcggcaccaagccaacacttagctaggactccactctataaccacctccaccacgaataacagacttgggagcctctactccctctctcacccacatgtaacccctactatgagctttgatcttcattggcgctggaagtgcaagctgccga

SEQ ID NO: 79932 - DNA, 469 bp, Zea Mays
ccagctatagaaccaagcaagatattattattaattaaagaaaagggatttcatgacgtacctttgtttataaaagcgtctctggccatagctctggctatagctttgtcagcgattttcatatcatccgccgattccatcctgttgcatctcctggtgccttcaacagtgtctataccagttatctcagatttgttttccaaaccaccccgaggggaatcagccctcaggtgatcctctactaccatttttcccttatcattatcttcttgagtgagaatctcattatctttagcatactcttccagatcttgggaatccaacaaatcatcttcactatcatccagacaatgatacatattatcaactttgtcatccatagaagattcatctacaggtaattcagatagttttaaataattttcccctgtgaggaagattcaccaaggataccagaagacatattgtc

SEQ ID NO: 79933 - DNA, 711 bp, Zea Mays
caaacttctttgctttgcagagcctatcaaccattatattcactgtcaacaagttagggaacaaaccaacacgttccatctcatcccgtatcacataggcctcctcaacccttccagccatgcaaagcataccaatgatgatgttatatgtagaggaatttggctctgcatcctttttcattgcctcaaacaagatcagtgcttgatcaacttcacacttcttcccaaggcaagtgagaatcgaattaaatgacacaacagatggaatacaacccctatcctttaactgatcaagaagcttataggcattctcaaactggcctgctgacccataacccatgatcattgtattatacgcatacgcacaaggcacagctctttctgtctccatctgaccaaacagctcctcagcctcacttagcttccctgccttgcacaacacccaaatcatgctcgtgtacgatacatcatctggcttgaacccttgcgacttcaactcatggaagaacttccaggccatgtccacattcccagccttcccgaaacaatcaatacacacattgtacagcacaatgtcaggctcgaggcagttccccttcacctcgtccactagtgccagggctccctcaacgcgcccctcacgggccaaagcccgcaccagcgtcgtgaacagcggcacgcccacctcgtacccgacttcctgcatctgcc

SEQ ID NO: 79934 - DNA, 490 bp, Zea Mays
ggaagagccagcgtagaggccaaattttccatagacagctggcacgttattgttgtgtgacgactgacgagacgggaaataacttggcgttgcatcaatttggtccagctgttctcacccggcgacgtgtggggcagctagcgccctgcgccccgtaggcattggccacagccctgcacccccacatgtgcccaacgacgttgtccttctcgaggactgtgcaaatgtaggagtattgactattgaccgccttgacttctcgtgcacctctttactcttcacggtccgatatcaatccacggactggcacgctgcctcctacaaaccagaaccctaccgcgccgccgaacacactgggcagtaggtagcctagccagacaagacagtcttgctctatgcctcgatcggcatgtggacgtcgtcgccgactgggagtcagggactggcacgctccgagcaaagcgcggccggccgccgtcgataacacgcc

SEQ ID NO: 79935 - DNA, 389 bp, Zea Mays
gtggaagggtttaattgctaaatataacacgcagtttgatctagatctaacgaaccaggatacctgcttgcacgcttgcacctaatggttgcttgcatattagtggttgccctctaataaggtctccgatcatcgcattaaatgtgatggatgtcaattggtcaagaaggtgcaccataaccacgccagtagtcatacctaaggcactgtgtagggcaatgccacggtctttgtagtcacgcctgagtgtgctaatgtacctacaagcattataagttacataagctacattgtaagtgacagtgtggattctagttcttgcttctatgacatgacatatccaccactacaacaagatatgcttactattgtggcatgtccaaaacgca

SEQ ID NO: 79936 - DNA, 365 bp, Zea Mays
gggtgaagtgcctcgtcctagggacggcgaggttgtcgtactgacgttgttttatgagcgtgggttcagtctgtccttgcatcccttcatgcggggatccttcactactatcaattggagattcaaaacctccaccctaacaccgtactcctccacatagtgtgttcatcatgctaggcaaggcgttcatggggatcgacccctactggaagttgtgtcagtacttctttagagcacgagtgactccaggccacgatgaccaattgtacgttggatctgccgacattcaactctgcacgagccaaaaggtggagtacttcaagatcctgcttccctcctccgtgcagtatgaaaatgagttgttt

SEQ ID NO: 79937 - DNA, 1484 bp, Zea Mays
ctgctacgggagccacccttccgcgttggtctcctcgggtgagtttcctgtgttttgcgtatttgacattcagctacatcattgtagacgacgacggcgcatttgagctgcaaatggcttccatgcagtttagtatgtactggccagtacttctgcacttacaacagcccagagtacttccacgtttgtgttacgtactagtaattagcattcttaggaggcggtgtcactatctcttacaggatagggtaggtcagggcaatgcaaattttttttatgtaatcggaaagggcagggcaagcgttgagcaagcatcatgatcagtactgaacaattggttctagcaaaactaaatatgtcagggttcatgggtgtagtgatcttgcaatatttctgctgcctttactatatttctacatcttaacatgctctattcttctcgtgctcattgtggcggtgcaaattgagttgtttaagagaactcaaggttacgaggaaatctggcattttccctgacccaactttctccgacttccagtggctagtaggtttatgttattttcagtttccctttgtcagataggggttgttggggactgcttcacttcacaaaattctagcctaatgtagtaattttggcatgtacttgactaacaactttttggaaagttgttttttatccatgttttttggatgctctttgagttgctctcaattcgaccccaaaaaaaatgcacgaccaaatctttcccaacgccctcctctttgttcgatcacactttcttttcttgctggaatgtttgctccacctatttattaatgggaggttgctcatttctgtggagctgtggtttctagatacgatggccatggcgttcttcttccagctgctcccagatcaccccggggttctaatagccgcagcccaagtaaacgatggatttctggttacgcagcctcgcacatcaattcgattggtgcagctctatgttgtagccatttttttctcttcaataattgtttgctgaaacctggtgacgagtacagtctctgctgctgcgtggctgtgatgacaaaaaggttatttggttgattatgattcttaatgccatttaaggatcaaattgtgatgacctatttgtgcgtgtctgagccgatgcaatgaagagtccatttttgctgaccgttctgctgatctttctgctaaggattttgcactattgtttatctgattttggtcgtgggatggtaatcaattcggggtgcaagtatccttttatctgtagctggcaggatgaatggcaaagggaccaatcttgaatttatgtttgtcgattggatttctggcatctttggaacatctggcatggctgggatgacaaaaacatacgtttctcgatcctgatacttggttttatcaaggaccaaactttgatgacctttgtgcgtatctgagccgttgcaaatgagtatgttttccttat

SEQ ID NO: 79938 - DNA, 509 bp, Zea Mays
ctcgcacgttcttcctctcccacggtgccattctccgcatgtcctgcccacacacctctcagcaaaacggtaaagccgagcgtactcttcgcacagtcaataatattgtacgctcgttactctttcaaagtagcctacctccggtctattgggttgagtcacttaacaccgccacctatcttctcaatcgccatcccactaaaaccctaggtggccttacaccatactttgccctctatgacacccaccccgactacactcatcttcgtgtctttggttgtgcgtgttaccccaacttatctgccactgccactcacaaattatctccccgttcatcgttgtgtgtcttcctcggctattcctctgatcacaagggctatcgatgtcttgacctacactccaaccggattatcatctctcgccatgtaacgttcgatgaatctgtgtttcctttttctaacatgtccacatctgcctcagatcctagcacgttggatttcctaagcaat

SEQ ID NO: 79939 - DNA, 282 bp, Zea Mays
ggagagcctccacaattattataataagttcttgccgctcaagtctcaactaccgttagttgaggacggaatcgccatccactacactatcaacggcctccgcgtaggctagttatatagtcattgcacccaagatcccccaacaacccttcaagaactctaacaactattcgagaaatatgcacggttcgaggacctccattaccgcaagatcgaggcacaatgtaaaccgagggagccctctcatccaggaaactcagaacacatggttaagaggacaac

SEQ ID NO: 79940 - DNA, 409 bp, Zea Mays
ccagtccgcaccagccccaaaaccctagccgccagctccagtttcttctattgcgcagggtccgcatcgtcatccactcaaagccactgacgtgtgggccatatttgacagctctatcttctaccgtgaccgagctcgatcgggtattgcagtaggttgttgcgatcggatcatggtggttaggattcgtgggcctcaatcctatctccttgcgcctttaaataccggctgaggtgctctgcgattcaacaatcccgtatggcatcgaggctgggagatcgtagcgtagagctgagcatcaaaaccaaaggaagaggacggagagagagagatagagaacgaccggtgctgtggatcttcatcgagcgcggtgtaatggttggactccgttcgtcgctctccgagggag

SEQ ID NO: 79941 - DNA, 595 bp, Zea Mays
tattaccgctagtactagagtgtggatcattaccattaacctttacattacatttcgtcacattaatctgttctagaaacctatatggagtccttaatatttgtataatttgttcttcgctaatactgtaattccgcatataataatatacaccgccattcgatgatgacatttggacagaattatacatatcaagtagatgacatctataacgccccattgtgaactatgttagagaagtggtttacttttacaaacaatcaacaacagcccaccgaaaccctagctgctttaatcattttcttttttatcaagcatgatgtgcacccaacagttgtgatcactttaaatccattatcatacacatttatatttttcccccacgaaacaatgcccttatcatacacatttatacatcatgtctcaaaagccttcttccaagttgccatattaagaatcatatctcaaaggtttagaatgcctgaaaggaacgattaagaaaatttaaggtctaaacgacagaataataattatctatctatcttggctttatgtgtgtagcatcaaatatccaatcctaagagcacaagattat

SEQ ID NO: 79942 - DNA, 497 bp, Zea Mays
cgagttaagtaagaatgcaagtcaatcgtaaacgaactgagtatctttgaaacctcttttttattgatgacatatttccactttacagaatacatcgtcgtcccagcagttttgaaatacagctagggataaaactttctgaggtgttctatgttccagagttcccaacttcggtgccatccatctgagtgaggcggtacgatccgggccgagtgatttctgctaccctgaagggtccttcccataagggtgataacttgtgccgtccctcccccgttagaattcggcggaggacgagatctcctactgagaagaatcgttgtcgcacagccttgtcgtgatagcgccttagagtctgctgatatcgtgctgattggattaccgcgtttagccgttcttcttcaagtacatcaatgtcctctagcctggtggcctcagcttctgctatgctttcgaaaatcaaccttggcaccccgaacttgagatcagcgggtagc

SEQ ID NO: 79943 - DNA, 590 bp, Zea Mays
gtaaatttttcatgtcagtattgtggttgtgggaataaagcaagaaagagaccggagacctggatgaagagtcgtggcaggataagctagcatattgataggacaagctaaagcctcttgtctaggcctagcatcctagaaggctagaaccatagaggagacaacaacggcagcaaaagcagcgtaggcgcatgggcacgccagggatgactacagtgcacgtatccgagtacgggtacgctacctcaaaggtacagtattacagtgtgtttctttttctataaatataataatccatttgaacttcaaaggttcccatgtgtttagttatgagatgagatgaatatctatgttattaaggcgtcgcctaaacgttgtctaacgtctagacgccttgtccgcctactaggcgttcagatagtggtccaacgccttaaaccgtattatcactttaaaaccatggtggatataaaattaggtttgattggtagaccaaaggcataatactgacttaagataagaatgatgtaccacgtcctaagacagtaagaccatctaccatccactccatccaacttgtactctatttt

SEQ ID NO: 79944 - DNA, 467 bp, Zea Mays
aaatgagtgacactagttgcatccatcacatgggcaggcatctcaattcacaagatgtggcggcagcataggatggttcacacacgtccaggactacaggggaaaaagtaaagaacgaaatgtatgtagtctctggatatgcatggagtgtatatatccttttgatctagtcatggactttgctatagctccacccaatgtgcagcacatgcatgcatgctctgttgtggctccaagatatctttgaatacctcatgatataccactacgtgtgttccaacagcattttccttgcaaaagagagaaaggacaccacatccatacacttgtttcatggcaataataagacaacaaataaatcccataagatatgttgtgtcctatatgtttagtcgcatggtttggcaagcgatatagtgcgttggtggcaactcaaattgtccacgatatcgagaattattcgacga

SEQ ID NO: 79945 - DNA, 677 bp, Zea Mays
aaatttggaaactaggagttcaaaacatgatttgaatttgaattgaatttgaagtaaggaattagaaatgagaaaaaatagagaaaagaaaatagagaaaagcttgggtgggatgaattcattttggccggcccactcaacctctccttggcccaactgcacgcagcacctggactgcgggtgggggcgcgttgtcagtctcgccgcgacctactcatttgctgcaaggcgctgtttcgcgggcctgctaccttatcccactgcatgcggggctggcttgtcagatccgtcccttcctataacaaacaccccttgcatgccataaccactagggcgatgtgctgggggatttgtcggctcgcgccgcgggtgcatgccatcccctgcggacgctatataaatgtgattgtcgcaacaccctggccatccgagcatggagagaatcctacgagcgctcggggaatcaggagcgaaggaatcacgcactaccgcgagaactccagtccgtgtcgttgtccgttggtgaagtggttgtgctggagcttcgccattacgtaggagggaccgtccatggaataatcaggtgaagaacatcgaccggggccttctctggcatacggaattgctcgtcggatctctcctccaccggccatgccgccattcaccgtggcctcttc

SEQ ID NO: 79946 - DNA, 997 bp, Zea Mays
ctggtgggcccggcttgtcagagcccttctcctagctccggtcggttgtaaaccaccgccgacaatcacctacatcaggcgcgctcatggcggcggctctataacaacttcactgggcggaccctgtgctagctctatccctctccctatctcctctccgcttcgtgcgctggtagttgaaggatcggacgccgcgcagaccctagccaacagaaaacctcccgcgcgcacgcagttgttccgccctcggtctcgtcaggtccatcaccctgctcagttcattgcgagccgctctagatctccgccatggtcctcctcgctaacaaacccttcgcggaatcctcttagcctatgtgctcgcttgctgaaaaatcgcaacaaactccatcgaatcctctagaaaccgacctggcgcggccctatcgtctgtgaccctataaggagcttcgctactcgtccctctcctcaaaatatgtcccgcacccaacttcaggagaatctacatcgatggccgaatagagctatgaggaagagagaagagaaagaaagagagagtgtggtctatgcgccggtacccctgcactgcttaatctccgggtggcgcgggcgctttggctgggcgagttgtggcgtccagatcttgttcacgttcatgcccatcaacaaaagggagctctggcatccgccgccgcgatgaagaagcgcgtgcagtgaatgtcgcggtagcgcagggcgtgttggggaagatgatggaggaccattggatgtgcgatcaaggatcgaggtaagagaatttgcatcggccgttagattctggttgaagggcagagattcgatcgcacattaataaaatcctagccattggatctcgatctcgtggctgatggcgcataccggctcgagatctaatcccaaccgcagatcacgcgatatggggtctgggttgtgcgtgttataacatccatgcttgatttacaaaagaacccctactcttttc

SEQ ID NO: 79947 - DNA, 656 bp, Zea Mays
gtttattttagcataatacgtcagctgttctgccgtttcattcagttagaagcaaaagttcaaaaaaatttacaaaaatactcacagagatactcaattagatggagaggggaaaaacaaaggagacatggagggaaaagggaaaaaaggtggcagcgacaagtttgtacactttgactagtacaaggcacttacgttaagataacacataaatattggatgaaatgttagtgataatatgttggtgccgatttgtaactaaatactaggggtgtaccgtctggtggtgccttttgcaccgtgaatggtctacgcctctaggttggacggttcgtgacctcgctgtagaagtgactcctttcctacatcgccccggacggtccgtgcgctgggccgaacggtccacaacgacacaatgtcatcttcttcctcgcaagaacctagatctcacccctagaggagagatcttagggtgctttaggtcagcaagtcattcgaggagtccctagatgacgtagagtcgctaatgaattaagaaatcaagtcgaggaacagatcatgaatggatatcgtgattcttgccccagtaggggtaacatcctagggtcgtcatgggtcggcagacaatccaacatgactctagacgacgcagagtc

SEQ ID NO: 79948 - DNA, 614 bp, Zea Mays
agggagttgccctacatcgtttggagcctaagaactcaacctagtcgagctctgcatgaaaatactcctttcttcatggtctacgggtcagaggcggtactacctgctgacctcaagtttggggcgccaaggttggtctttgaaagaatagcagaagccaaggctactaggctggaggatgttgatatactcgaagaagaacggctgaacacggtagttcaatcagcacgataccagcaaactttgaggcgttatcacgataagaccatgtgatgtcgatccttcgcagtgggagacctcgtcctccgccgaattctaacgggggagggacagcacaagttgtcacctctatgggaaggaccattcatagtagcagaggtcactcggtcaggatcatatcgtctcactcaaatggacggcacggaaattgggaactcatggaacatagaacacctctggaagttttacccctagctgtatttcaaaagctatcgggacgacaatgtactctgtaaactggaaatatatcatcaataaagagacctcaagaatacccatattgttcatggtcgacctgcattcttacttaactcagggtgaccactatgccctgc

SEQ ID NO: 79949 - DNA, 833 bp, Zea Mays
agacaaggtaatataaggtgcgcttgacacgaatgttcggtcgatataagtagaaattgttttggcttaattagagaggtggtgacatgccaaattagtcgttgctttctctatatttataagtcgagtcgtgtcgatgcgcattttgcgttcgttaaattatgcttcacatatagtgtatgattgtgctcacgattttgagtagacacttcaagtaaatcaagtaggatcgtgatacaagttgtgtaatgaagtttgttgctttagaataatttttgaaatactcggttcatatgataaacatgtatgtgttcatgatttgggaagtaaatgcatggtgattgcgatttggagattagtggtttacgattcgtatgagttggtcggtgtgtgaaaatacttgtgaatatgtgtgtttataaaaatgttgtagtgtatgttgtgtctcggatttcgataataataggctagccgatgagtatgttgtatagcggcctaggttgctgctctggttaaccaacttgttagatgtctttagttaagctcgtagtcgcgatgaattgcttgttgtggtctaaatgtgtatggttatggtcgcgaatgaaaagtagtagtgctcatgtgatgtttaaactaaaatacaaattattgggtgaaaagcgcttcgatatacatgtgtacgggatttgattattatggagaatgcgttgttaattgattatggtaactctagcgcacggaataacttggataaaattagtaagtctacttgttagtcctcatttgattattttaactctaacaaatggtaaagtgttagaataattcaagtc

SEQ ID NO: 79950 - DNA, 878 bp, Zea Mays
ggtctgcagctgttgcgcgggcaagtgctgttgctttgactagaattggcatggttcacacttctggactaactcggcagcatcactcttcgtagttggccagtagaaaccggatctgaaagccttcccaaccagagtccttgatgcaacatgtaccccacactgcccgacatggatttcatctaacaattgtctcctagtggccgagtgaatgcatttcatgaagactcctcctgcgcctctcctgtacaacaagccccctatgatggtgtagtgggacgactgccttgcgatgcattctgccgcggccttgtcatccggctcttcttcattatttatgtacctgatgatagactctctctagtcgttgggatctgcctatagctgactcaaggcgttacattcctccacttgatccatgaggatgctcggctatgatattgcttggatgaagatcccgagcggagcctgggctcgactggatcccagcttcgacaatgtgtctgctgctgcattgcgatccctttccacgtgatggaactccaatcctacgaacttgtcttctagttttcacacagtagcacaatatttgcccattgaatcggtcgattagtcccaattcttgtttatctggcttatgaccaccagcaagtcgccatataccatcaatttcttgatgccgagtgatactacgatgctcagcccgtggaccagtgcttcatactctaccgcattatttgatgctggaaacaacatctggagtgcatacttgagttgttcgcctctaggagcaataaagagaatctctgcacccgctccttgcagccttagcgagccatcgaagtacattctccacacctcagtaacttctgggctat

SEQ ID NO: 79951 - DNA, 467 bp, Zea Mays
gtgaaggtgatcgggtgttcggaccatcgatacggggcaggagcactggtggccgccaccagtatctgacggtcgttgagcttctgctgcctcttgctctcttgcgacccgtatccgccgaagatgacgttgacttctctgtcgacacgtgggaaccctccgcctcctcccccttcttgttgtggaggttgtcgaggttctccgggtcctcctcgtggtgggggaggtggtagaggttggaagggttggccactcccgacggagtgcttgaaatctctgcagttccgaagagtatgacgcatatccttgtggtacaggcactggacgtcgaggatatcgtccaatgttcgttcgcctctgcggggtgcccctcgggcacgagagacgggtgctccagcgacatgaacttcttcgcgaggcctcttctcccagcgcttgtcggtttgttggttcgtgtcgcgtcgtgg

SEQ ID NO: 79952 - DNA, 516 bp, Zea Mays
aactgcagaccataccagtaacttggtcgttcgcatgctggggactggatatgattggacctttcaagaaagctcaaggaggatacactcatatactgatagcaattgacaaattcactacatggatagagtttaaacccattgcttctttaacttcagctaaggccgtggaattcatacaagacataatattcaggttcggaataccgaatagtatcataactgacctaggatccaacttcacaagttcagagttcttcgatttctgtgagcaaaagagcattcgatcaaatatgcttcggtggcacacccaagagccaacgggcaggttgaaagagctaacaggatgatattggaggcactcaggaaaaaagtcttcgataaaaatgaaaagttcgcaggaaaatggataagggagttgccttacgtcgtttggagcctaagaactcaacctagtcgagctctgcatggaaatactcctttcttcatggtctatggttctgaagcagtactacc

SEQ ID NO: 79953 - DNA, 503 bp, Zea Mays
aaaaagatcaggtgctcaaggtggcagataagtggtacctctcgcacttcagggtagattgccaccagaagaccgtacaagagagggagataaacgccgagtatatgttagccgtgctgcaacaactcccccacgataggtgatgccaggtcagccgatgatattccatctattaaaatttcttttgataatcggattaaaagtatcacggaggatatagagaggatggcacatgcattaggaaaaactcacatgcctaattttttatcacataaattaggcgctgaaacaattgcgccaaacacatcgatgacaaatgggtttccccagccatattctggtatgccgatggactcatatccaggacgaccgtcaccaccatcttcgctaaatggtgagtcaaccctgagcacggccggaccgttcgcacacaatcacggaccgtccggccctccgtcagaccgtccggcaccctacgccggacagtccggagttacacagag

SEQ ID NO: 79954 - DNA, 502 bp, Zea Mays
ttcccacagaaatgggatgaatgtttaccattggcagaattttcatataacaatagttatcaagaaattatcaagatggcaccctttgaagctttatatggacgacggtgtcgtactccattaaattggtctgaaccaggagaaagatggtttttcaggcctgaaatggtcaaagaaatggaagaaaaagttcaatgaattatacataatttaaaagaagcacaagctcgataaaagagttatgcagacaaacgacgccaacccttgtactttcaagtcggagatcatgtgtatctgaaagtatcaccaatgaagggtgtaactcgtttcggtataaaaggaaagcttgcacctcgatacagtggtccattcctcattctggaacaatgtggaccagtggcgtaccgactccaactacccgaaacattatctgcagtgcacaatgtattccgtgtatcccaattgaagaaatgtcttcgggttctagatcgaaccattgaag

SEQ ID NO: 79955 - DNA, 407 bp, Zea Mays
cacggtgaaagccactaatcgcttgcgccagtgcatccccttccctccgatcgccaccgcgtaatcacaaattcatgggccactgctcaagggccctataaaatgagcacaccctcgactccactgtgtaattgtgcactcaacacacccactcgtgcctccaattactcaccagaacccccgaatcgctcagttcccccaaatcagttttccgccaccgtgaacaagctctcactgtggtcagtgcacttatggtccaatcttgccctctgctctcttgtttcagcactcttacatgtcattgatgctcctcgacccattcaattaagctagaccatgctagatcaccaggaacacttctgttcatccgtagtttgcactgtctccgtggacaggcgatttagggc

SEQ ID NO: 79956 - DNA, 420 bp, Zea Mays
tcccagagagttgatgggcaaccagttgaacacgctgattttctgggcaaccaatggcttccagcttccttttgatcgttcgcatccaatcgtctgcatcgagggggttgcttgatccggcgaatgtgggaggtttgagtctcaggaaatcccccattctgtcttgcggtcttccatcatttggccgttgattttccagatttcgagtgaggacctcgatgagtcaggtctgattggctagaacttgggctaggtctaagggtaggggtggaggtgcggggaggtgggtttcactttcctctctaacgacttccccttcagctctttgggggaaacctgctccaatccctgaggcggtaggcgtggttttatccgaagccatctgccagggaagagagtcactattatgcacatgcaaat

SEQ ID NO: 79957 - DNA, 468 bp, Zea Mays
ctataaaaaaagaaaaagctccagaatttaggactacatggcctgctcacatttcactccctaaacctgaaatttcttactgattttgatggcgtctagttttacacggagttcaaaaaaaatgaacatgtgataacagcttcattaaaaaatcggtaatctgtttctcagcgtggacgtactcaatatccaccttcctatcttcaacacactcccaaataaaataaaatcgcacatctatatgtttgattcgatcatggaaaacgaaattcttactgagggctattgtcgattaattatccattttcaacaggaacgttgtgcgttgctcgctcttcagccctgcaagcaactgcgctattcatacaccttgatagtttgtcgtcgtccctgaaatacactctgcttcatagaaagatagcatgacaaccttttgcttctaggactgccaattcatagaacacgaac

SEQ ID NO: 79958 - DNA, 427 bp, Zea Mays
ctcatcttaggtttaggttatcaaacctagagatgggtaatgcccatcatgtgatgatctagtattctagtctgcattaaggtcgtgcagattgatgggggcacctcctagacaaactgcattagtgggattttgcgggcaaaataggaactcacgctcatcaccttcgtccagttaaatatcaatgcattcacttgacaaccttctaacatgcctagctccctaggaaggtgattgaacactatttagcagtttgtcccaatgcccaacccatctaacaaaagatgcaaaaaatagtcgatagagcgataagacttcatctgcactaaggttgacaatctcctcctcattggcttcattcgtgaggttaggcacccaaagtggctagccaatcccatattgtccctaaggcggggctcaaactttg

SEQ ID NO: 79959 - DNA, 615 bp, Zea Mays
aaaggcagagctaatgaagcctcccattctccttgccacaactcctcagttccacatcccttccatctcgctaccgcacatcgcaatgacggtgcacaacacccaacgccgcctctttgcggtgtctccctctccaaactagccctgacgcatgcccagaccaaaaaccacctactagaggagatgaatgagggcccctaaaaattctcgacttacgagcacatgagttttaaacccaaagttcaacacggaaccctctaaggactcaaagcagcatattagagttcattgcaaaacaagtgtagtttaattgaacaaaaatacttcaaaacagcgggtccaacttcctatcaaagattagagtaagacacacgaggaagtttgagcggcggtgccggtctgaggtttggtagtgctggcgtccggtagtgccccctgcacatgggcgacagtgctgggcaggaaaaaatgcccagaaaattctcaaactttacagaaagtttgcgcatggtagaagatgtttactggtgaagtatgaaagtgaacaaacctaaaatcgaagcacaaatcataaaaccctgaggatatgtggttttgttggggttttatcaaaac

SEQ ID NO: 79960 - DNA, 384 bp, Zea Mays
aaggaacataccatacaccacgtcggcatcctcaggcactgattctgttgtgacatgattgacccttcctctaccctggttctgtggagtcttgttctgtgcagatccacgagtgggggtgttctggtcattcctctgagtgttgctcttctgaggtgtccgttggttgcgccttgggcaattgttagcatagtggcccagctcaccgcacttgaaacagccattgggttggactggtgcattgttgcttctggcctgcgtgttcatggcaccaccttgacgattctgtgaactcccaccagacctctggttggtctgggagttgttcctctgctggttctggctttgattgctcctctggccttgttgtccagagcgttgcgc

SEQ ID NO: 79961 - DNA, 936 bp, Zea Mays
cggcccttctgctcctgctactaaggaagtgccagtggaacattttactagagctgatcccaatggttgtgaccctgctgacgctgaccctaatgggtgtgaccttgatgatgctgatctcaatgggtgcaatccggccgacgctgaccccaatgggtgtgttgttcgtattgttgacgaggatgagaaagaggaggaggaaatctccttaattcggaaaaacagtcggcgctacctggtcagtgggggagtagtgatattccttctccagccttgtctgcactcgttggtctgcaagagttgtccatagcaaattttgatcaggctctcgaggatatggttcctgaagatctactgtccgagccaacagatggtggtatgatggacgtttgcgctaacattccggatgtggggttagagttatcccgagcagcgtctcgagcctcatcgaccttggagtgcggtcttcagagtcaagaagttggtctaggttgctccattcatatggaggtaactgagaatccttcagccttagaggtggctgttgcagagaacccggtcctcaaggatggtgccagcaattacttagcccccgagggtgttgccggtaatgatccggcccgggtgggtagtgcgagctacaacccagcccccgagggtgctgccggtggtgatccggctccgatgggcaatgcaggctacgacccagcccccgagggtgtccgagcgggctccccttttcatacctccatggatgtccacgtcgggtcttctcctccacattctgattgcatggcagcagcacgtgcttcaaatcaggaagtcgccttagagaccggcacacccaacgctagagttttgatttctgccggtgatgttgagttaatccctaatgatgctcttcagattgcctcggctgatattctctcatcgagt

SEQ ID NO: 79962 - DNA, 621 bp, Zea Mays
gtggaagcgaacccgttggtctttccagaaacagaaacaataatggtctgtatacaagtgtatttactggatataatcaaatgtgctcaaagtgaacactgtctgcactgaaaggaagacaccaaactgaagagagactgtagggcagaataatgtaactggaacaacaccattatcatctccccctccgatttcctcagccattaaactcacggcttacgcctgcagccgtcggcaacgggctgtgactgtgacaaacacacaccttgaacctgcatcacagagtacacgggccatgcagaatgcaactcagttcattgttcataataccatgggtcgatcagagtagcagagaaaatcagtcacaggtttgtcctcctggaccctggtgcggcgcaaatgacagcaggacatttcaatatcaagatgcttacagggaggaacatgggttcgatcgaacagtggggaaccatagcttaggacacagcttataagaagctttaaattgccatggaccacactgagccatgccaccagaagcaagcgtaaactcaaccatccacagcaagaaaccaaataatccttgctattataagaccgtgtgatttaccactgaaaaaa

SEQ ID NO: 79963 - DNA, 303 bp, Zea Mays
tttagaagatgcttcaggagtaggagtggcagttttttaggcagaatttgttctgcagcttctttttccgtttccttttctccggtttccaaggatttctccttggcgggctctgaaggcccagcttcggtctcggcctggctctttgcagcttcggcttcggttagttttgtctcagtctgtgcttttgaagcttcgacagttttccctagagtagagcttgaagtctttatcgtctccagcacatctagtacgttgaccatccttttcctcttgggggtcgttgtaagacctttttgtgcc

SEQ ID NO: 79964 - DNA, 560 bp, Zea Mays
ggcgaaggggtacgtagagattctggccgcacgatccgatatcgctggccaagattagatttcccccatcccgaaccgatacgatgacacaaccgctagatcaagatccgagggcgcatatgtaacggccaaaggggtacgcctgcggccgcatcagagccactggatcgcgatccattgatctagatccaaagcgcaaagggatatgttctaacctaatctcagccatccacacagatccgatggcacgcgagcgtcttcaaccctcagccattaaacacggtggcgacgtcctgaccgcggcagagcgccaccggcgactcctaaaaccgatccctggtgcgccaaattctaccgagtagtactataaacattgctggggactattcgaattacatgggtgtgcccataccttgtattacggcgtcattaccgcggtccacggcggagagcggtaatggcggcacacgaggacgacggcgaggaatcttaaggtgttgtgtcccgattcgccctaggaacgtcgctggcaacctgaaccgcgaccgggcgaatccaat

SEQ ID NO: 79965 - DNA, 812 bp, Zea Mays
tagacaataaatgtgcatttgaattgtacggaatgcgagagtagtcaaatgaataattttgattaactgttttctttttcgtggacgagacttcgtcgtcgtcgtcccttggtgaagaagatgaggtttcactgtcgtattagataatcttcttgatgcgcctctttttctatccatccttccttttgttgtttgagcctgagtcggtgggcttgtcaccttttggcactgtacacggttgggacacgcataacaagacgctacaattccctacctactgttttgttgtgcacctgagctctcctaatcccgagtgatagggctcacctggccacgtgtcagtgatcccaacacccacacagtcgatagggcacccactcattcaaacgagtatgtgtctaacctaaatttagtaggcaagggagagggcagcaaaccaagaggttactaggtgggcatcacattttttagacgttaagcccacaattgatcctctcccttgctatctctcagtgtaatcccaacttgtaattccggtttgtgtccccctagaggtgttcttggctgcctaggcctttatgcattatattaggtgggggaaccttcccattcaaaaaataaaagaaaaattggtaggcagtataaactcattcctccttctagcctttatctcgtcttctcgtagagacaagcgatgctctagtggatattatcgtggtatgcacataggacccccctcaagctgacaagtgccccttggcttcgtgccttatcttgtctagtcttcttcctctactccaatccctaatttc

SEQ ID NO: 79966 - DNA, 836 bp, Zea Mays
cgagaagcattaagggcatacaagagtgctaaaacaagagctaggaaggcgtgatcggacctatgaagggctgaccgcggtgagctcacacacgcggtattcttgaccgatttgggggaaatctcaaattgaagcgctctggtggaggatctgaggcacgggctggtgtattgggtgcgtgactacctagcggagccgatggaacgctcaatttataggaaccgagggcggtggctcttgaatatggcatggcgcggtggcggccggagagagggactgagtcactggagcgatgaccgtggcaaggccttaggtaatagaagggatgtgtattatgatcaattgtgatgtggtaagattgctgatggcgtggcataaccgcgaggaacagcggcacgaaggtgatggtcccgtggccacgtcgccggcaagtggatgagcgacagagcggctactgtgctccaagttcatccacggcgggatcttttcacccggggattgttatctgcgtttaactgggcgtgaatcacggcgccagcgtgaatccgagcgcaagatcactggcggcgagggggctgaaactgagatatttctgcagacattgtaccatcaggatcttattcatctatctgactgatcgttttgtaagacctagatctctgatttctatataacaacttgttaatccacctgtaacaaatttattgtcctataatccagctacaattcgactatagaaaccctggccatttgcttactggattaagcacaaatctattccaaagtcctttagtgctctctgtcagtcacagtttagtcctttatcttgactaaca

SEQ ID NO: 79967 - DNA, 678 bp, Zea Mays
gggcacaacatcacccacgctagaagacttatccttacaaaggcggtgcttttctctcagctgacgcacacactttccgtcctcaacgcccctaagtgtgtgctacaataccttgataagatcaggaagaggttcctttgggcaggaggagaaaacctaatggagggaaatgcgaagtcaactggccaatggtgacacgtccaataaacctcgatagcctaggaatgcttgattcagaaagatttgctagagcgttgtgattacgttggttgtggctagaatgggctaaaccagacgctccgtgggatgggcttaaacctcccctataccaagactgaccgacttctctttgcgacaacaacaagaataatgatcaatgatggagcaaaaacttcttttgggcataatacctgggcacatggccgacgtcgaagagacatagcacccaaagtatttgtggcatcgggcaaacacaatttgaaaatcaaggaagcaatagctcatcatggatgggtgagagtatcaacctgtaggccatctcgtcaatcgaccacttgagccagttcgtcgagctttagacaatcgttcaatatctatgcatcgttcaaaataaagaggatgagataacatgggtcctcactcatgcaggttcctactcaacgtcaacagcatacaaag

SEQ ID NO: 79968 - DNA, 512 bp, Zea Mays
ccttgattcttgggagaaggtctggacgaaatgttctagctttctgcttgaaaggtctgaaaccgaacttaatgggcagtcggtgctctacgatatctcggtttaatcccgacatctcagtgtaattccaagcaaagcaatccgaatattccttcaatagaccgatcatttcatttgtaggatcggtctccagggtcttctttacaaaagtcggccttggagttttaccatctcctatgtcgatctcctctaaagggtcgaccgatgtaaacccctgtcctagtttatcgagatctctaaattcctctatcatgtcccccacaaaggaatcagatgatctttgtgtgatggcggactctccagtctcgggggccggatcatccgtgatactgtctttatgttgtggtagatgttcggtcttaaagaccgaactattttgggaaaaaccggaccatccggcctcagaagccgaacttttcgtgaccaaggactcatgaattttgtgtgtactc

SEQ ID NO: 79969 - DNA, 349 bp, Zea Mays
tgagagtctagtaattgagtgactcgatgatcgccgagaccttcacctcccaaaccctccaatctagaacatgtaacaacttcatcgctctctcgtgatcgtcataggaaagttgtgccttgttggcacgcatcttgtttacaatcgactggaaccgagaaaacatcgtgtcaatggtctctctagtcaactagacaacgttctcgtactctcgcaggtacatctcaaagagtctggtcttgacatgatcattgccctcatggaatctctcaagggtggaccagatctcgtgagtcgtagctagatgtccaactcgctcaaactcagctagcgagaggcacaagaacaa

SEQ ID NO: 79970 - DNA, 618 bp, Zea Mays
tataaccatggcaagcctagagttactgcccttgagccgttgtaccggcgggcgccacaacgaactcgtccagtggaatatcccaccaccgccgtgatcgtcttcgacccaaattagcgaagcaattagccggttcctttaaattgagcactaccatcactctgcctctctattacacactcatcccaccctccgttagcctctttcgtgcaccgtagcccccagtcactggatttccccaaatcgtgtcactcacgccgccgtgaggcacacggctgtgatcagccgttcccaggtccattcattcccctctatgccatgttttagcatccttgaatgttaacatagcacatcggctcaaccgattgaacactaccatgactgggcatcgagaacatcacctcgccgccgcagaacatgtctgagagcgcgctcacgtcgacccactctcccacaccctctccgtccaaattcacgcgtgtaccccacctctggtgaatcagtgaaactcgccatagcttcaatttgaacgctaccacgtttggttgctcagaacgcgctcaccagagtcctatctccgtcgtggccatgaacaagcatcaattagggtcggaccag

SEQ ID NO: 79971 - DNA, 392 bp, Zea Mays
acgtagtgatccaaagagtctatcttctcacaaaccaatccccaatagcacccatgtcacaagaacttgaaggttctccacaaatccacaagagaagggaagggaagaactcgagatcgaaacaactccaaatttcaacaaggatgcaaaactgagatagagaagtgaccaaaacctatgggccgtaccggcgacccttcctcagattaaatttgtagatcacaaacacagtcgatagttacaaaatcgttgtggatccctcggctgaattggtgactacgtagataggaaactaggagttctaaccaagtgcactaaacaaaatgtcagccaagagattgcaaactaaccagccctcaaaatgtcagccaagagatgcagaactaaccagc

SEQ ID NO: 79972 - DNA, 606 bp, Zea Mays
caatccagaaatttttccaaaaactagtacgacgaccattaccaactgccatcttacaatgtttaaagaaactctccctaagctttaagagttttttccaaaaatgagagtcagtctgtctttgattaacagaaataaggggttttcccttaatatattttcagcaattattctctgccataaactattagtattttccaaattccaaagccatttggatagcagcgcatcattcatagaacccaaattcaacacacctaaaccacctaagcttttggaggagcaaactatctgccaattaaccaaatgcatttttttccctgggaaccccttgccaaaggagactttttctgaataaatccaactttctaataaccgatttaggagccggataaatcgataacatgtacagaggtacattagaaagagaactgttcaaaagggtcaatctgcctcccagactcaagaacctcctactaccctatagcaagtgttaataactttgtgtttgttagcccagttttccgcgcattcacagcatcggcgagccgtcgtccgtagccgcctcgtcctggagatcatcgacgacacggcgttctttccgtc

SEQ ID NO: 79973 - DNA, 478 bp, Zea Mays
aaaagagcacctagtgatgctagccccctcacattatcaaactagacaagctaggatcagcaaccactaacatctatccagacgcaaccagagtttttaagcaaaacttattacaacgactgaaaataaaagcgtagctatgaagctaacaagccagttttaactaattcaccaaagcgataacccagagtttgagcgatagtcaaccacaaaaatgagccaaaatcacccttcatctagaaatgcagcgatctctcggacaccacccaaacgaccgacatataacttcacgtgctatctttctgattagccggcttccttggaccaccatctctctttccttctctctctctctctctctgacgaatagcccaagaatccagccaaaagcaacagagaaatattatgttagcaggatcaaggagaattttatcacaaaaaaccaatcatttctggttctccaaatagcccaaaaaac

SEQ ID NO: 79974 - DNA, 283 bp, Zea Mays
gtattgccagaaccagaaaagccgaattacctgaagattagagaagaatgacgaaaatcctaagtcacgagaagctaggtggtggctcgatgaaggaatatcaatcagggcaatttgaagaacatcgccagggatcaactcagcaccaccagcaagcatcagaactctagcatccggtatgccgacctctaaggcgacttcctcatttgaagcatgcgctgttaccatgccatcggaacgtggaggagaagacccaacgtgaacatccatggaggtatgagaa

SEQ ID NO: 79975 - DNA, 276 bp, Zea Mays
tgcattgataaatccttggattgcgtaagaaaattgaaaaccaactttgccatggtgggtgcatattcttccgaagagaatttcattcgaggtgaccccgagggtgttattgattggataagcggagaagccgaagcttttgaagagatccttagtgatcgtggggacatttgtgccttcaccggcgctcgaggggttgcagcaattctggagaagactggttgtgaccatgttaaagctgcagcctagaccgaagccgccttctccacagacgac

SEQ ID NO: 79976 - DNA, 310 bp, Zea Mays
atttctggctataaatctttggaccatcactacgcttccttttatttccagtaatgtcagcctgcttccctggcctgacatctttcaccttctctagctcttgtaggacctcatccacagtaaacatgccaggctcaactttgttttcacggttaccattaaaatccaagctattccgccatgaatgtgtccctttaaggtaacgacgatgtccaatgtagcataacttgttccttatttgccagagacaatggattcttgtcgaaataaatacatgcataatacccttttgttattcgcccagataacg

SEQ ID NO: 79977 - DNA, 579 bp, Zea Mays
tatttcaagatgcctagtagtaacaacaacatcaatgtactccattggtcacctctgttacataggcacattagggaaggcaccatccattcacttcatgctcaatggcaactcatacaatatggggtactatctagagatgggatataccccgattggtcagtgtttgtgaagatcgtatgtcagcctctcacaaaaaaggatcattggtttgcccaggtccatgagcgggctacgaaggacattaagtgtgtgttcggagtacttcaagcttgatgagcaataatctgtggtgcagcatacagatgggatcaatataatctatagaacatcatgaagacctccattattctagacaacttgatcatagaggacaagcgcgaagagaacctctcggccacctacgacaataatggcccactggtgcagccatacagctcgggaactcgagaacaactccaagttattgcgacaaaatcaccttgtttaaagacatcacacttgtttgtactatattcggatcagcatattctagagttatctactataataaagttctagtttctatgctctttttta

SEQ ID NO: 79978 - DNA, 683 bp, Zea Mays
gatcgggagcggcaaaagacgagtgctgagtcttgaccgagggactgaagaagttggatgactagccgtggtggctaacacctaaggacattgacatgcgtgaggacatggagatcacatcgtgctgccgatgtagctgcagaccggtgggacacgtgcacaggacatgggggacatgtatgaagtatgctacctatggatgtttgggtggttgagcctcaaaaccacgcagcactaaagttcgttggtttggccgaggttgggcctcaaaacctagtggtatggttcaagtgggaattatgggcgacacatggcgtcactgcgaaggatgcgtcgaggcaaagcaacttcgtgaagagtgtgtgaccgtcagatcgaaaatctaggagttggtccattatgcccttggctgagagtataggcctaatttatcgaggggtagtttagggaagtagaataactcctataaatagagaagagggctagttgtttagtcatctcttgtggctttatttcctttaagcatttccatttggctatctcttagttctatctagcacttagtttgtaatagctctctagtttcttgcctggatatccttaggtgcttttaaaccatggtgtctaagtttgtgagtttttgaggaagtctgtcgtaaccacgcggagccagcgtgcctttc

SEQ ID NO: 79979 - DNA, 1114 bp, Zea Mays
gtggcccctcctgggtcgctcttctgctgcgtagcggatggatccgaagaatcgtaaccctaactgggaccgatggggtccaaaagatgcccctcaggggtcgcaatcttggggaaagaatcagagtcttagctggcgcttgaagccgggtaccgaaaaacccgagaacaaggatgacatccttacctcttcttctggtgatggtggtcagtcaggtattctcaaaacccccctctccccattctgaaaaaagagaatgaaatggtgtgtcgttttttctgccaaaaatgcggtacagatgggcatcatgctaggtaatgtttcaaatctttatggtgcgagatctgtcgcaaggaaactcacaacaccgcgcggtgcgttctccccaaacaaaacaagccctgcatgcctattgttgggatggcggcggatgggttagggttttactcttcccacttttccaaacctctgtcgaaaaaacctaagcgtagttttattggtttggttaaagttgttgagggcttgatctcggctgaggatcttgagaaggattttggattgcatttcccctagggtcgtacttggaaagccaccaagtgtcactctggtttcctgatgcaatttccttctcaagagaggctggacgaaatgatcaatttccctgaattgaaaatgaaattgtctggtgcaaaaatctatgtttcgtcttggagttcacaggctaagccaaaatccaaactccactctgtttggattgttgctaaaaatgtgcctgaagaacttcagaactaccaggctatctgtgagttgggctccacaaaattggggctgttgaagaagtggacatttttgtctttagattctaaagatattgtgagattcaaagtttatgtcaaaagtgttgccatgattcccccaatcattgaagttggtgtcaaaccttttctgtacgacatctactttaaaattgacaacataactgatgaagggtggaatgatgactccataaatctggacaagagggcttcgattgatagacagggttttggtgacccctcttttgagaaatctgttaaaaaagccaaaagtggtggtgaaaagtctggtatagatg

SEQ ID NO: 79980 - DNA, 1043 bp, Zea Mays
tttaactgtataatggcatgaaaataacaatattttaattttcattcaacaaataattacagtgtgaaacttggttttatcatccacgatgtgcttaagttagtattataattcattgatattcattcaaaaaaggaaacatcaacagaaaccctacaaacagtgagtgcatttactgaaacccaatgtgccccgtgtgatatcaactagagcattcctagtgcaactccaacatccaactggcaagacaatagacataaacaatattccatctggaatgctttatgagctaagacttctattccataaggacttggttattgcgttcaatattccatatggagtggattattgagttcaatcacacccacaagaaaaaaagaaaaatggaaaagtacatgcagaagaaattcagatcaaagttatgagcacttctaacaattctagctcacagaactttcgtggttccatgaacacatccatgtcttgttaaaccataaaatcataaatgatagcattaaattactaaaattactcacgtgaccaacatggacaagatgaactacttcccagggtataacattgcctgtcatatccaggactaatggattactgttataacgaggaaaaaagttgtacatgatggtactataatttaggccatagcaaacgacattttgtactgaaagtataaccaatggctagagtaattataacattcattttctggtcaggatgacacaataaccgaatataaaaagtatcagtacaaatatggtgaaaattgaacgaaagcactcacttatacacattagcacgaggatcaacaatctgcacatgatggtgatcttggaagtctgatggatgtctaaacttgctggctatgtttgatggtgatttggttgaagtttgtgacctcatgttctcggaaggccgcatcctcaattgctctgaagattgcaaacttccattttcaaacaatgggtctgcaaagtgcaccaacctgttaatagaagaaatgtcaggtaccaaatttcttatga

SEQ ID NO: 79981 - DNA, 1122 bp, Zea Mays
tgcgatagcagatcgaggctccgacgacgcgtctccactagatctggaagagtccactacctaacggcattggccgcagggccttggagaacaacgagcttgttagcgtaagcgaggtcactcagctgccgcggcttgttggctgaccagcaggagtgggcaggcacgacatcggcatagatccccttcaacgaccaggcaccttggcggcaaacttcggcgaccacgtcggtaatgtcccaaatcctagattgctatgcacggacctacgatgttgttgtctaaatccatgaagggatgaacgcttggttctatattggttggtcctaatagttaacctattttttgctcatgctaaactagtcagatctcgtgtgttgatgattaaagaaaggtttaggcctactgcagtcataaactagggcttatggcaactagatggcactctcagaaggccatcattactagtttttgaaatgcttgatgttccaacgatcttgttatgctccttttccagagactgaattgttcttttggtttaacatagttttgtttgcagactcaccagtcctatggcgtatcgattagtaaaacatccctgtagtttagcatcattctctgtctccatttcgttaagttagttctgtcatgattgattacatataatatagctatagtttgtgggacaaattttttcacggctatgaaaccttaattcacccacacctctgtctaaactatgctttgtctgtgcctttacttacaaaacgtgcagctacaaacaattttaggtgcaaagtgtgcatacatttttagtccctcatatttaatttctaaataacttgccctgctaattggttcctgcaatgataacatgtgttaggttagttctttattagttcctcgggttgctaggtgttgcactcgttcctcatgatgcattcctacttacaggtacatgaattagatgtcttatggtcctaggatactgcgagaaaatgcttctgttcatatttcacaatgttcttatattttttgctagcatcacattttagctcagtgtgatcaggtcgcttgcactctttgttgcatcttcaattgtcatttgcaacaaagctctca

SEQ ID NO: 79982 - DNA, 423 bp, Zea Mays
tcggcttcgccgctaatccaccggatgaccccgtcaggatcaccacagataaagttcggctctgaggagaatgcgccaaccttagcaaaactattctttaaattcttagcacaatctgtagcaacattgtagcactcctctctatcttgacgaagctcttcaacatttttctgtacccttaatcgttctatatcagatatctcgcgttatgttagctccacattgaaatttttagttacttcgtcaagtttcttttctaattcttgcacttcagatctatgcagttccacttgagtagacatcgcatattccaagtcagcaatgcgctttgcatctttaaattgcctctcttcaaatcccttcatcttttgctgtgctccagaaaggctagaaagcctgacttcactagattttaacctctcc

SEQ ID NO: 79983 - DNA, 620 bp, Zea Mays
gtttttggaggtggtcactatgctcgtatgcaaaaatgattataaaaaacaaaaaatgcctaaggccaccgatgagcccactactaggcgtgccactgagcccatttgcatcccaccatcacagatcttgcttgcatgagtgacactttgagcgacaccaaaagatgcgcccacatgtagctatcgggatctaccctccctccatcgcccagatctacgaccacaacaagcttcatcgggtcctctgcgtgagcgttacatcacgcacacatgtgcgagagagtgtcacgttggcctgactctggtggatggagattagagagagatgtgataatgagaagaaatgctaagacctctttatatatttctagtacgatgctgggtcgagatgggccacacaaattagtaacgagctcgacctattaacggagataggcctcttacgaagtccacatctaaaaatattctcatttttagagatggatctcttaggatacctccttaacgaatttacaaagataatcacttcttcatccaaaaatcgttgcatactttaggagacatatagactttgtgtctatctcctaaaattgtagggggtatgtgacgcaaaatcattc

SEQ ID NO: 79984 - DNA, 938 bp, Zea Mays
gtggattatgttttgggaggtgcatcgataggcgtctatgtgaaaagtgtaattgttttatgcatgtggtcggtgattgggatagtcgaggcgaatggggagtatgattagtcctgttggagtcactatgctgttgatgccttgtgcgtaaagtggggacacatatgtgtgtgtgccatggtgtattagagtagtggtggcgtaagatatttgtttgaggtgtgcgggtatatgccgtatgatggttatactcgcggtgaggaaagatgtatgtattgtgtaacacgacgcttaggtcgctattatataatcgtgtgaaggatgctcaggatggtcgtgtaattgaggagtgatgtaatggcaagcgagaagtaagttaagtttttcaaacggttagtggatagtgtccgttggtgttgtcatgattttagttgtatggcaatgtgatgcttgctttgtcaaatattgcattccattcccattgaataaataaatgccttgatgatcgattagaggtcttatatgagcgttatcgcagcccaataattattggaagcgagtagcgttcataagtcgatccttgttaaaattgaagaacaatccgataacatatgcacataagtgctttaggtccttcagtagcaaatgtaagtattatggagtttatgccatgtgttaattcctctatgttagaacccctaaaatgtactattttaggtgacttatgtgttaactaatttaagttgatcaatggttaagaaacactgattaatctgctccaacccatgtttttgagttgcaatgtctaaaatggttcgctaagtcttatacggtgattagccaacttatgttaagtaggaatcgattgtgtaagtgattgtgatatatatgttgtgtctcggattgcgataataataggcaagccgacgtgtaggtta

SEQ ID NO: 79985 - DNA, 483 bp, Zea Mays
accaccttggctagagccagcagcagcctccttcggcatctcccacccatttgcaagtggccatactctataagcaatgtgctcctggactaagtcccttgtgcctatataagtgcatcctgtattgaaagtcacctggcatgcttgtatatcattcccaagggcagtggatggtctcctaatgccgaagcaagaccatataggatgttgaataatccccttaatatcctccctttcacttaggtcattcttcacgtagaaccattcctgcatccatgcctccgaccatctcttccgaaatgtgggaactgggtagctcacctcagagcgaggcacgaagctataacaactgaagttgttgtgatattgctcttttccggtagctttcatatcataagacagctcatggatgttgcagaaacattttgcatttggctcaagtccaatggctcctcatggcccatataaagatccccaccttga

SEQ ID NO: 79986 - DNA, 649 bp, Zea Mays
cgaacacgtgggggtttacttctgccagggttcaacgaccgatttggttgacttagcatgcagatcatagcaaaacccccatgtacggtatcttctctacaccaaatcctacctttttgatgtgagttccaagcaaagatatggtcggggtagagagatatgggggtgagaagtctgctctgcccgagctgtccacatcgagacaaaagccatgccaagtcgtgtcaaatggcttagggttgggttcaaacttttccagggtgttctaggggtctttgggcgccattttgtcaattgggccctaaggttttgagttagggaacaaggtgaacatgtttgatctttgaaagagggtcggttttgaacttgagagaaacctaatttttcttttatgtctttctctttggtgacctttttggggtttttctgaatcctttttggggtcactctctttctatgttttgtagggtattaagtgtactacaacttttataattagtccaattcatgacaatgtgatttacatagactttttgccataatcccctctagggctccatttgcctaaaaggggttggaattagggtttgggtcttcccttctctttagtgcatgataaggccaaggaatgacttctaagatgggttac

SEQ ID NO: 79987 - DNA, 378 bp, Zea Mays
tagtccagcccctttgtagtttcagtaaatgtgcctggactctggaacaatactgttgactggttgagcttcggactccttccttgcatcgtgctgctactgaacttggcgctatccttcaagttgttgattgtgggacgaagttggagccagtgcaggtggttgtggtaagcgcacgcagctggagagtgacttgccgaagccactgaaattgtaggttgtgaaaatggctgttggttgactacatactctggaatgtatgggaaataacatgaagcagtatgcaggacttgctttggtggattctgtcgtgcttcggcctcagctatttccttctgcttctgtattgtaacttggcatgtgtgccccttatcctct

SEQ ID NO: 79988 - DNA, 426 bp, Zea Mays
aaagatgatgccttctactcgccacactgatcaagaatcgattcgtacgggccggcgggcgagatttgctgtctccattgcgggaatcggatccaataccttttgaacaataagatatataagccactgttgtgcgttttgtctaagcgaaaagctatgtgcatgtactctgttggatagcaaagatcgagatggtttgttggtcgctttgaattaaactcggttgtttagactgctacaactataatttaaagagacgacaaaaatattgtagaagcactaaacccgatacgaattaaaatcatacgaacagactgttttacgacgggccgagcaaaatcaaatgcagtggctggcgatcttaattgtgctacaatggccgaccgtcaatcgtgcagattataagatcaggttccctctgcattg

SEQ ID NO: 79989 - DNA, 339 bp, Zea Mays
gccgaaggaggctgccgctggctccagtcaaaatggcttggtctatctgaagtataccattcgatacagaagtcaactttatgaaccgaacaatgactggctagatgctatagaggcaactagcgatgagctgcttggagcatatttgaaggccgaagacgaagctatgacaactgccttcggtgctcgcggcaagaagagattgaacagggtgtttgatgttatcgggtttgtgtacccagactactgctatcccatgcgaaagcaagggaacaaaaggaaagccgctaccgcgacatcttctagtgtgtcgaggtcgaagaaggttaaagttttgac

SEQ ID NO: 79990 - DNA, 517 bp, Zea Mays
cccccttctagccatatagaatttttgtggtatttcacacgcatcgaatagtggagcctgctcatttgatccaccatctacaacctagggagcatgtttacgaggttggccttgtctatgaatgtttgctctaaggtcataatttggatggcgttgatttacaccgcttgccaccagagatggaggtcttcctcctcctagtccctagtgtgtgccacttggggctccctaaccttctgggccttaatctagtacaccaagtcctccttcgccttcgtgtagtctttctccctcttcacggtagtgtcgagcagtgttgttgcatctatctcgtgttggagggctacctccttaaaggcctcggcctcttagcgatgacactagtagacaacatctcatccttctctttctcatgacctcctccatccactccttgcaagggcgtttgcttttgctgctgagccgagctcttaaacatctatctctagctagtcctagattttctcgagagtctctt

SEQ ID NO: 79991 - DNA, 385 bp, Zea Mays
ctctggcgcaagactccacagactcagtgaatagtgcccccaggacgggcgggtttatattgaaattcgccagggcttctttagcaaaagcacgaggcgaaggggtacggtgagatctcggccgctagatccagaaccgagggcccggattagatctagacatcaagtgaatcgttacgcgccctagccactggatcaagatcgtgcgatcgagattacgctcaaccgaaccggtacagggaagccaatcagagccgtccaataaagatctaacggccagaggacgtctcctacccctatctcccccaccagacacatctacgacggcgcgaaactctgggcgtggaggcgccattactgcgagcttcaagaacccgccccagtg

SEQ ID NO: 79992 - DNA, 451 bp, Zea Mays
tgaatttttctaatggctgtggactgtgcacacaaattccggaatccacagggttcactatgtaaaactctaggcgcggttgtaattattttatacctgcagtggacggtgggttgatttctctaaaacacagggtctcttacgtaaaatgtgcacgatgaaggggtactatcagacctcggccgcccgatctaaagtggaagacacggattatatctggcgtcatccgaactggtatgctacgcaggatcttggatctagatccaatgctccgtgttttatgaaagcagggcccaatcccggccaccgatcgctcacccaacggctccgatttaattagacgtgatgagatcccctccctgcaatcgcagatccacggtcccgtttcggagtacgcgaaaggatacgcgtgctccaacctagaccgtccgatagaggatcgacggccacc

SEQ ID NO: 79993 - DNA, 286 bp, Zea Mays
gacatgtattatttgggctaaagaagggtcgagtgtgtgaggtgagtcaagctgggcccactcccggtcgcttcgttaggacccacatctccgtctgtcaaacgatgtcccgtacagtaagtactcccgtgtaactagacaactgttccttaattacggtgttgtgcagtatatagcggaaatgtagtgtttgggcccgcttgatcaagtcccaacacgcacgtcgctctcggagtgtacatccgtgacacgtggtccttatagcaggaggcgatgtatagctagc

SEQ ID NO: 79994 - DNA, 493 bp, Zea Mays
gggtctactaagcttatttgaatgtattgcctagttaggcataggatttttaccctttggacaaaccttgaatagatgacccttttcacagcaattgtaacaaatgtggtgcttgtccttgcaatgcatttgccttttgctttcatcctttttgatggtcatctttcttgatcgtgcaaggttttggttcttcatgtgggggcatgaatcaatttcatgacccttctccttgcatcaatagcaccttctatcacttctctttgacctttatttgttgaagcacataggtacattgttagagaaaatagtatgatcattaattttcttaccatgaattttgctcatgcccttcttggaaagcttggtattcttttgaaggggttttgtgcatgctatggttgtccccttctcaagctttttcaccatattatcacgattatcttgagaaggttgagcatgacactttcccttcaattgagtcaagctccttctt

SEQ ID NO: 79995 - DNA, 365 bp, Zea Mays
cctcgctcgaatctgtccgtagaacagtgcacgggtgggggagcaccaggggaagcgcggggaagggtgttgccagtaatggcgttgccgctgttcagcgttcgccgcagtggtcgactggtgaaagaagaagccctctgcgccgtccatctcgggattgagggttgtaattagatccatggatggggcgccctcgaccgtcggttttcgatgtgcgtcctcgattaaatgagtcataccccttcgctcattgaatacgggccattagatcccaatccagcggcccatatgtggcgctggttcattaaataccagatccgatctgggctctcaaaatcagatcggacgaccatgggttcttaccg

SEQ ID NO: 79996 - DNA, 924 bp, Zea Mays
attaaaaatgagagtcgattcctacggcaggtcggtacttcgagttcgagggagttaatcgtcaagaaggggagtcgtcgatgcgagtttaacatgtgagcaggattatgattaagcagggggctggttcaggtgatggacgtctgatccatcacactagatgtgtgtatatatagggcagatttattcaatactttggccactatctggaccaacctaatctaatattagacgagttctcctctcttcctccgcgctgcgcgcccccgcacagcaactaggtgtgctacttattacacccgataaaaaccacacacccccaacaacctgccatgtgttactcctcacacacaatctgactgaacgaatgtaaactgtaataataacagaatgactaaaattataataaaatgatcgaaactttaagtacacgactgaaattgtaacgaaatagctcaaactgtaacaaaataactagaactgtaaccggatagctgattgagtgaatgatcgagactgtaatagaatgactaaagttgtaatataaattataatggaatgattcaaaacttataatagaatgattggaatttctatctcatactatatttaagtgagaatcttcctttgtgcgccgtcccatcactcaagcttccgcgcggttctccctactccctatgatgtgcaacgaatattccactaataatttgaaaataaaaatatataattatgctaggcagcgtcagcaccgtgggctgggaaaaccacccaagcacagaaggattcttaggtcagactgtaacactattaattgggacaggccacaacaccgtccctaatctcgcgagcataaaaaaaagcgaaagaaacttcatcttatctcacccgcaccaaataactcatcgctcattgtctccgtcactc

SEQ ID NO: 79997 - DNA, 382 bp, Zea Mays
ggtggcggtgcttgttgttgcgtctccaaaacagcaagtctgtcgatgatctgggacaatcgtcgatccagcctctcataagtcttgccaaggttcatgtctatgaaggcatcatgcactgacctgtggaccatctcctccatttggtccttcaggagcttgttgtttgcctcaagatcttggcggctaacacattcatcgaagtctgtagggatccttgcttcttcttcgtcgcctgccatcgaaacacaaaaaacaggaaacaaacggtgacagttatccgtaataatttcactacacgctcctctcaggtggaacacaggaacacactctaatgtatcttaccaagctcttacaagtgtctgacgaaatacaagcaaag

SEQ ID NO: 79998 - DNA, 382 bp, Zea Mays
cggtataactgttccaatagaagacacgcatgaatctgttgtttacgttccctttctcattcgtgggcttgctcttcccatctccccctttttccgcggcctccttgatttctatgaattgaatctgacgcatttgaaccctaattcaattccgcaagttgccattttcatacatctgtgcgaggcttttcttgggattctcccccactttggactttggaaatatctttatcactatcggcctgggatgaccgggggacagcacctgctagttggcggcacaagtctagagcttcaccggggaaggaaagtggagtatctcgatattccttttaaggacagtatcaaagggtggcgccttgagtggttcatcgtggaaaac

SEQ ID NO: 79999 - DNA, 377 bp, Zea Mays
gcggcgaatggtgctctctatcgtctgccgccgcggccgccttctgagagctgaaggagcatggggaggagatccgcgtcagaggaacaggagatttcaaaatttggatggagaaattcagatcgcgccgaactcgattcgaaccacttgagtggagtggaggagctcaggaacaggagtggcggaacaaagacgctgcagaaggcgcagagcaacaggagctgcccccggcaaggagtgttcacttctagaaggttctagaaccctccctagtccctcctctccgcgccctgtctgctgcttgaagaaggactgagactgggactgggaggaacagtggcgaacggcgcagtgtattgtgccttgcccgttggtcg

SEQ ID NO: 80000 - DNA, 565 bp, Zea Mays
gaaggaggagcctgcagcaatcaagaagcctgctgaaaaaaggcgaaggattattactgttattgatgctattgaagaaatgccactgtcggcttcagcgtcaaaaacaccagctgtcgaagctactcccaccgaagctacaactgccgaagccacacatcttgagagcgcattttctgatattgataagatgattttgaaaatggccacggaagaaactgttgcaactgccgaggaaaccctggccacagtgcttggaaaaggggagaaggtgcttaacaaagagaagaagattaccgaagatatttcggagaaaggggacttcaattttcaaaacatgattggtcaagagttatccaagactgaaaaagaggagctaagagattatgctatatcttgcggctaccagccaggagcgttgctctttggtggtgttgacgaagagagcttaggatgcctccaggaccggactggagcgaaggttgtcagcactctatcgaagagtgttggctttccgaagcttgaggccgaccttagcagataccagcggcaacatatcaccggt

SEQ ID NO: 80001 - DNA, 628 bp, Zea Mays
ggataccatcacaaatcgctcctaggggtctcggatatgtcataaggaaccttgggtcgcaacccgaactagggccatgtacgggcgtacctatagtcatccctgactctgtgctttggggcggttatggagccctttcaaggggccaaccttcaaacccctgatcaatattgagctcggagccctagagtcctatggtgattcttctatacccttccgagggctgaaccttcgaacctctgaacaatatttttccatgccttttttcccaagatgagatgcccgaggcagaagacaccttctttcggttggctgcttccttcccgaggtgagatgcacgaggccgaagacgcttctttttggttaatccgccgagaggatagagggcggagaagttgagggtggagggcatacctttcgaggcggaatgcggaatggtgctcaacgcgtttttccctagaggagacacgaccttttaatatcggtcagccgaccgtttgcgacgtgcgtgcgcgcaggattcgaaacaaccgttgtccgaccatcacggttcgcacctcggtggcttcgtccgttcctatataaagtcgataaagagggaggctttggaccgttacctttgtcgttt

SEQ ID NO: 80002 - DNA, 332 bp, Zea Mays
aaaccaagtccaattattttctgtttcagaagctatgaaaccataagcaagtggatacatccaattatgtccatcgactcctacaactgctgccaaatgaccattccaccttccattaattgttgtagaatctatactcaaataaggcctacaaccttccaagaaaccatcaatgcatggttttagagcatagaaaaaacgattgaaatatacttgaccatccacatcaagtacatcaatctccactacactcccaggacacctcttaagtacctcagccttccataaacaacaactcaaaattgtcttcccatttaccataaacttcagca

SEQ ID NO: 80003 - DNA, 747 bp, Zea Mays
tatgtgttgcttcggtcaaaagccagctttgtctagccttcgctattcacctgaaacacattttaacataccaaaatacaagtgttttgaggacctttggcaagatatgccctcaacagcagcccgttgcggaatgagtttgttgcttcataacgagcagtaatagggtcaatcaagacaggaagcaagctctcagcagtgatctttgcaaatctctttctgaccacctacttcgagaggaagtggaggacgaatctttagtggcatatttggcgcgcctccaaggaagccattatgtttattttgtggtgaggacaaaggccacactacaaggacatgccataacaccattaacaagcaaaaagagcatgcttcgtcagctgctcaacctaaatagatgaaagtggtgttcagtacatattcatacaattcaccctacatcccacagtacgttcaaactcaaccacaagagcaaaggccaagtctaccttctccctcgaattcttcaagcaacccagtgatgagtgcatggtcaccagctgcctccttcatccctggaccacctctctatgatcaagtccccactaatcaacccaaattcgtgaggcaagacctacaataaaggaatagaagggagggatccaaaatctataccgtcaatagcatggtcccgaaaacgaagcatatatactgagtaccccaaggggctaagtaagtgacccaaagttatcagcaagccattattgt

SEQ ID NO: 80004 - DNA, 515 bp, Zea Mays
ctcttattgttcgaaacctattttccatctttctgttgtaactgacatagaccaatttattaagcctctggtgttatagtcggttcctcttttttgtattgacctaaaatgcacaattgcacatagccacataatgatcaatcaacaagcaaaccctttttgctaggttttttagtagagtacttagttacttactgctgcaaagtctgaccaatttctctcacaaccagaagctgcacaacagaggcttataaccctttttgctaggctttgtagttcatatgctagtcctccatatgcaccccaccataggactgttacacaatagtttttaggtcagttttagacttccaaacaggcaaacaaattaacaaatgctataagcctataactggaaaaattagttacttactatgactttttctctctctttctcttattgctcctgcctttaaaaagtattccccttcggatctttcgtagtcatctgcctgtttactaatctttgtttgctc

SEQ ID NO: 80005 - DNA, 698 bp, Zea Mays
cttcggtccaagagaaaggcccggacttccgcaacagcttaaagaagggcagcgctctctcagccaaccttgaaatgaagcggctaagggcggctaatgatcccgtaagcttctggacgtccttgactcgagccgggggcctcatcgcctcaatcgctctgatcttctccgggttcgcttcaatgcctcggtgcgaaaccaggaatcctagcaacttcccggcggaaatgccaaaaatgcatttgtccgggttcagcttcgtgcgggttgcccgtagcttgtcgaagaccagggtcaagtcttccactagggtcgaccctttcttagttttgaccacgatgtcatcgacgtagacttctactttgtccctaatcaggtccccgaaagtcttactcatcgcccgtacaaatgtaggcaaggcgtttttcagaccgtgcggcataacaacatagcagtagagcccatccactgttacaaaagcagtatgcttcctatcttccctagacatctggatttggtggaatccagagtaagcgtctaagaatgataacagatcgcacccggaggtagaatccacaatttggtctatacgtggtagtggatacgggtccttgggacaggcctttattcaggctggtgtagtcgatgcacatccgaagcttcccattcgctttggggacgatgactaggttggccag

SEQ ID NO: 80006 - DNA, 683 bp, Zea Mays
gagattctttctcactctttttaatgacttcatcagccatttcacgaccgcccttcatccaaacattagagtaaaatcttccgcctagtgaagaagctttggccgaggggtccttggtatcgctagctgagaaaatatattctggctgggctacggccttaacatgttcacaatcggccttttctaaaattgtcgtgacccctcgtgcaccggcgaatgcgcagaaatccccgagatcaccgagtatttcatcgaaagcttcggcttcttcgccaatccactggataactccttcaggatcaccatgaataaacttttgttccaaagagtgtgctcccacctttgcaaagctatcttttagtttcttcgcgcattctatggatgtttcgtaacatctctccttggaatcccgaaactcttcaacattcttttgcaccctggatctttccatttcacttatttcttgcttagcctttgcaacttcgaaattttcattcatttttgcaagttttttttcaaattttcacttcagctttatgggcttcgtcttgagcaataagcttggcttcgcaagtcttcagcctgtccaataaggaaaacaatattttgtctttttcaagagcttcgttccttaatgtgatgacctctgatcgaagatttccaagagctatctggcagctctc

SEQ ID NO: 80007 - DNA, 473 bp, Zea Mays
caccatcgtcccgaggtggccagttgccaaggtatgtgtgttagcagatgcgctgtcttcgtcttggtggccagtgttaggcacgcgatgaagcacggtggcccatttagatccgtgcctttttctaagatagagtagtaagtgcttgatccttctattctcatccaacctctattccccacatcgtgcctcattgatgatgcaattaaatggagtaatggattgtatgatttttattgaaaccctaatttggatttagttgaatcagctcccctcgggccctccccaagggcccaggcacccagctgcacaggcaagtgcactatttatctaccccctcttggcctatctcggcactaaccaagccaccggccaccatggggaggaagagggaactattaggaagtcttctgctagtaggaaagatggttgtagcaatcctccccaactcttttccttatagagggagcctc

SEQ ID NO: 80008 - DNA, 418 bp, Zea Mays
aacaacaaatggacatattttatagcagtatttgatatctacacagagatctgcagcatgtataacatgtactccatccgtcccaaaatataattcattttagactatgaacaaggaaatttgattcagatgagggtataaaaaagatatagatctcctgcgtattcttacgttataaagttcaataaaaccacggagtttctttaatgcaggggcccaaattttcttctggcacgatggtaatgatgtaaagttctcttgccgttgaacaaaaatgcattcgcttcgagtgtagctgtagctctctgtagagttgatgcacaagcccaaccatcttgagtaaacataatagaacgataacacaagatgctccaatggaacacacatgactgattagaacttgaaaagggcaaaaaat

SEQ ID NO: 80009 - DNA, 525 bp, Zea Mays
agaatgtgccctcatcaggggcacaactctagcgtatctagttgtggtcttcggtcataggacaccatattaaaggtgcagggcactagcacaaaagccaatgcttcttgactccataaacccaagccgtcatattccctatgtctcgatcacctctagcacccttagtggctagatttggtcttcctatggcatcgattgagccaatgaatcccatgcaccgtccaacaatgtaccaccgacaaaccctaacgcataaggagaacaaggaataaagggaggaccctaggccccgatcacctctagcgcccttagtggccagatttggccttcctatggcatcggttgagccaatgaatcccatgcaccatccaacaacgtaccaccaacaaaccctaacgcataaggagaacaaggaataaagggaggacactaggccccgatcacctctagcgcccttagtggccagatttggccttcatatggcgtcggttgagccaatgaatcccatgcactgtctagcaa

SEQ ID NO: 80010 - DNA, 336 bp, Zea Mays
ttcatgaggggacttaacgtcaggctccaacggaaaatggccacctgcctggatcttacttacaacagagctgttagcacgacattggctgtagaagccaagaacacaagccatggaaaatcaaagggatttggaggtgacaggtctaatcagggacctgaaaagcgaactaggttggtaatccgaccttttaatcagaatcgttcttcgcctcatccaccctcctatccgttcaagcagcctgttttcattcgtcctaccactgcccctgcttctacaaatcagtcgagtgcccctggtactcatttccccgctcttcctagttcttccactgga

SEQ ID NO: 80011 - DNA, 651 bp, Zea Mays
ccgaaatactcaaaactggagaggtccagacatcacaatgaacgagttcaaaaggtgtagatgtattagaaacagaactatcaaaaggcagcctagcgtgtttgcctagctggcaggcatggcaaatgcggcgagctgctttattacactgtatagctgaaagtttatttagggtttgaacggcggctggcgctggatgaccgaggcgagcatgccacaactctggagtaacgacagcaacatggcagcgaggcggcagacgatgtggaatggtgtagagatccccgttgctattgcaccgaaggaggactgttttggtttagagatccttaacagaaaaactagaagcgtcaaactcaatagaacagttattgtcgcgagtaagctgtcgaacagataacaaattacgagcaagctgaggagcgacaagaacattattaagatgaaaatagcgatcagctataggtaagagagatgtgccacggccagatgaagggatggactgcccgttcccgaccgtaacggagcacggtggggaaggtaacgggaaaggagtataccgtcgttggaggacatgtgggatgttgctccgctgtccataacccaagaaggagagtcctgcaccgccatttgattaagagcagcaatcaa

SEQ ID NO: 80012 - DNA, 576 bp, Zea Mays
gaagcagctcgacgaaaaaacaaacatacatcgagcacgtaaaggaaatgtgagtgtagagaatattgtggaagtggaagacaccggataaagccgaatcaagaatccccaagctaggatacgccggatagcgaatatggcggaagtaaataacttggaaaaaaaggaacattggaaaaaaacttgacgaggaagctgagacgacaaagaaactgatagaaacgaagcaggtgtagaaatgggcacatggaaacctcataacatatccaccaaaacagatcggaccagtaaagagagctcgaggggaaaatatgtgtctcactaaacaatcagagcggaggagtaagacggcagtatacaaagcgtttaggctgaagcgaagtagacgagcaaggcgacgaaagacaaagcgactaagaaagaatgatacagagatgaggaaagcgaaggaagacgaagcgactagaagaggaccgagggcggagggagcgagaagcatccaaaggcaaagtgtcagatctcagatggaagtcatggcactctccagaggagatcctcgtctttttttctttgttt

SEQ ID NO: 80013 - DNA, 315 bp, Zea Mays
ttttttttcagagacaacatctcagcacaagctgtgtattgtgatgtaatgttctggaaccgcagacatttttctgtgaagaatactgtttgtgatgcactttgacttacggctggtttgtaaaacccatccatggtttggcaagcacaatatttgattatttttttacctccatgttcagatgtcgagacctaataaagctccatttagtggagtgactgaggatttgaaaggaagagcaggttgctacaaacaagactggaaccatggatttcgttctggtttaaggtttgcacaacaccatgttgtaattgc

SEQ ID NO: 80014 - DNA, 1124 bp, Zea Mays
cgccaagagcgtttcttggaaggattgatcggacctatgaattatcaacttcagagtcataccttccccaatttccagacactgctgaacaaggtaattggccttgaaagtaaaagaaaggaattatctgaccataaaaggaagtttcaaggttagtccagcaggaacacccgaccgaacaacgctcaaggttcgcagttccgctctagaaatcaaggcggaaacaattatcaagtgcaacgctctggacagcaaggctagagaaataatcagagtcagaaccagcaaaggagtaactctcagaccaaccagaggtctggtggaaattcacagaatcgttaaggtggcgccagtaacacgcaggccagaaacaacgcacctgtccaacccaatggttgcttcaagtgtggtgagctaggccactatgccaacaactgcccaaggcgcaaccagcaaacaccccaaaggagcaataatcagaagaatgaccagaacacccccgctcgtggatctgctcagaacaagacaccacaaaaccagagcagaggaagggtcagtcatgtcactgcagaatcagtgcctgaggatgccgacatagtgtatggtatgttccttgttaactccatacctgcatcagttttatttgactctggagcatcgcattcgtttataactgagtcatttgtggaaaaacacaacatacctaagtacccttttaagaagatattacatattagttcaccgggaggtgacatgaaggccacacactcatgcccccatgttaatatcaagattcaaggaatagatttttcagtcaacccagtggtcctaggatccaacggtattgatgtgattcttggatgcaactggttgaaaagttgtgatggagtgatacagtgtgccaatggaacaattatgttgacaagttctcaaggtgaaagaatccaagttaacatagacaagtcaatagatgaaaaagggaaaacagtgatcaatcacttagaagaaaagcccttggaaaatatcaaagtagtgtgcgaatacccagacgtattttcggaggaattaccaggtatgccacctgaccgtgatatagagttttctattgaattattacccggaac

SEQ ID NO: 80015 - DNA, 454 bp, Zea Mays
cgggtaatgcctgaaactttgctttcccgagtagtgacctgacacttttagaaatagtgctcgaccaaggaaaccccatttatacccgcaccgacgtgcttttttgatttctgagccctaacttcactttttgccttcgaaccactcctccgcttccttgagatttcgagcatgttcattccgccagagaaattgcgatggcgccaaaacggaagaggaagagtaccgctgctgcgctcatcccgctcatcgaccccaatagccagcttccctttgctggtaatcacatgtgtgttgtttctgaatctgaccttcttcatctcattgaagttggggttttgctcccaaaagagctctgctcttggtggatttgctgcggtatcaccgttctgacagaggatactcatgaatctgttgtgtacgttcctttccttattcatggacttgctcttcc

SEQ ID NO: 80016 - DNA, 809 bp, Zea Mays
gcaacactgagcgaacaattatcggtgttagaaacgagaaggtcacacgaaccagcagaacccatgggcccggtgcaaggagggcaaaaaactggcggagaactctctgagagggcagccaaaccgtcaccaacattagaatgccaaaagcacttttaccgaaagattttgtgggtctggtaatgaggggcatgcagggagcaacttccaacgtagcgtgtgcaccgtctttgctggccaccaaagaattgatgagaggcaccttaggcctccatacgaacctaggaatagggagagcgctcctcatggagcaaaattttccatagtgaccaaactaaaggcaacggcgacatctgatcaggttcgagcaggatcgacaaagtgggaccttgaatagcactggtagcaaagccttccaatagcaactccaaagcccggactaggtgcatcagcttccatgaaatgcccatgcgacgtgagaacacgccttgcaggcaaagggagggttttgcatggcatcccaggagacacaaccctgtccaaatcacatgaaatccgagagaagatggctacaacaggaaccaaagcaaaagcagggggacattgatcatagccccccatacaccccacaaaagaaaactgtaaactcaaaattgaatttgacaaagtcgaaggattatgatttgaaaatatgcatttgaaaccaccaatttgcacataatcagcttgacaactatcatcagatggatcacctagagacaactttggcttcttaaaggctgatatatagccaacccttccttgatgcg

SEQ ID NO: 80017 - DNA, 522 bp, Zea Mays
cttttatctagattgaagatgttgatcgaacacctaaggcaattttcattgatgcactaaactagacgatgggccaatcacaatataaattttgcttataaggaattaatattatctattttattatataatttaatttgacatgctttggatggttacaaccggcgttgattattacacaacattgaattgtggttagattatggtgccacttaagtaagctaactcacacgaagcatttaagacaagttctattttcgtagggaggctgctatctttaggattgaacatacaatgtattagctatcacaatttgtaggtaatacattgacggttatttgtctcattatgatgtataaagttgattaattttatgggaacaaactccatcgtgtagataatttattttattgtgattagtctaacatgaacgtttttatgggtatgtggaatcgtttattttgtagccaaattttgtacacatcgcggaagacacatataaccatgtatgtattttctttc

SEQ ID NO: 80018 - DNA, 1086 bp, Zea Mays
atatctacaacaatattgaataatattggcgataaagggtccccttgacgaaggcccttgaaagtactgaaaaatggacctcgtccatcgttcactttaactctaacatggcctcctgagactattgtttggatccaagcacaccaggaagggaagaaacccttcatacgcaacgcttgctggagaaactcccatttgactttatcataggccttctcaaagtctaatttaagaataaccccatctaattttttcctctgtaattcatgaattgattcatggagaataataaccccttcaagaatatttcgaccaggcataaaggctgtctgagagggactgactattttgtcagccactagacctattctatttgtgagaactttagttatgattttgaacgaaacattaagcaagcaaataggtctataatcctggattttatttgcgttatccttctttggaattagagtaattactccaaaatttaaactgtgaaccggaagggaattttgatgaaagtccacaaacaacgcaaacagatcatccttaataacttcccggaaaacttgataaaactctgctggaaagccatccggtccaggagctttattatgctccatactaaataccacctttttaacttcctctatagtaaactcagcggttagaatttcattctctacatccgagacttgaggaatgtcttggataatagattcattaagtttggtcgatgatatgtctggcttcccaaagaggtttttgtaataccttgttatatggtttttaagttcttcctcatcagttatacaaccacgattctcatcctccaaagaataaatccgctgtcttcgatgcttgccgttggccactaaatggaaatattttgtattatcatccccttcgagaagatgcttgaccttggccctctggaagagacgaacttcttcctctctcaaaatattggcaagcctatcattggcaaaagatttagaatccaactcgttaggcgataagcaagaaaactccgcctttttatcgtgttcatcaattagttttaaaagttgttgtttctcctttttt

SEQ ID NO: 80019 - DNA, 661 bp, Zea Mays
ctgccgccggctcaacgcgggtggcgcgactttgtgctagtacgccgtgatcccggtcgtattcctcccggcgccttatctcattttcatgccatcggtcgcgcgaagcgctgatggtgctccacgcgtctcgtcaactgttgatggcatgacgcaggtcgttcgcatgatgagcgaggggtagaagatgattatcctcctcagtaagcagccactggtaaccttctgtgtctagggttcgtgggaggtcgtcggctatctgtgccagtactccaacttcactcggtgtgtttagtgctcgagcaaaatcgaggtacaggtttcgagcgaggagagggttctcttgccgaaggctagcatcttatctggctagctctcgctcccgatcttgagcctgtcggcgatcatggcgacgggagttatgcctttctcggtgcactcgttcgtcgggagtttctccaacctccgagtcttcgtctcaggacacgggctacgctggatctcgttccccggcttcatgatgtcactgcacgttccgacgtctatttcttcatcgccgagcatcacattggggggttcctccccttgcatggtaggctcatcgtcgtagatgggcgctgactccaatctcccctggatgaagaggatgtcagggtagaaa

SEQ ID NO: 80020 - DNA, 288 bp, Zea Mays
tggttatcctagtatcgcgcagttatatcctgtttttggaagacagtgttattgcaggcgccatcgggtagggatgtggtattcttgggaagttcccctaagttcatgttatccttgttggcgcaattgcttccggatcgccggtcaaggaagtcgggaatctttttctccatggtggtggagggtgaggctgccttgcgggtgcaggacatccgggtggtgtgtgactttgctgacgtgttttcggcagagcttccaggcatccctccagagcgcgatgcagctttt

SEQ ID NO: 80021 - DNA, 790 bp, Zea Mays
cagggatgatggccgggcactggggtgggctttatagccgcggcgcgggcgtggtcacggggtggccgcgggcacgcggggtttcgcgtgcgggcgtgctctgagcgcgcccccgagtgtcagcccatatcgaacacgtgggggtttacttctgccagggttcaacggtcgatttgatcgccttagcgtgcagatcttggcaaaacccccatgtacggtctcttccctgcaccaaatcctaccttttttatgtgagttccaagcaaggatacggtcagactagagagatatgggggtgagaagtcggctttgtcagagctgtccacaccgagacaaaagccatgccaagtcgtgtcaaatggcttagggttgggttcaaacttttccagggtgttctaggggtctttgggcgccattttgtcaattgagccataaggttttaaggttgggatcaaagtgaacatgtttgatctttgaaagagggtcgattttgaacttgagaaaaacctgaattttcttttatgcctttctctttggtgacccttttggggttcttctgaatcctttttggggtcacactctttctatgttttgtagggtattaagtgtactacaacttttataattagtccaagtcatgacaatgtgatttatatagactttttgccataatcccctctaggctccatttgcctataagggatgtgaattagggtttgggtcattccctcctcttttgtgcatgataaggccaaggcatgacttctaagatgggttacacctacttagg

SEQ ID NO: 80022 - DNA, 2186 bp, Zea Mays
gccgatcttgataggggtcgataccctggcaacatcctcggtggtggcctactgctaggggatgggtacttcagcaggcctctactgctggacgccagacccattgactgggttggcattcgtcgaggcaggggcgacagaagaggtggcggggtgaggagccctgacagacaacaatggagttagaactcatcaacaagatattttgtcatgagaaagccaattaaaaagaaagaaggtgtgcttactcggattcttggaccttttagcgcgcccaggtggcagtgacggaggcggtgagccggcaggcacccgcacgctatgggcctgagagctaccctatgcctccaccatcgttgtcctttcgcccttcgatgtaggctttgttacaaaggacccatcgtcgtggcacaacttgtgtcgcctttcttcctcagttctcttggagtcgctgggggtggagctgctactctcagactgcttgcccatgcccaagggactagaggccacgtcgttaggctgggacacccttctgatacgcctgggatccggatcccatgattggggttgcctcctatctgtcggatcgctagaacacattcgttgagggccagaagggtcgccgtgattgccgtccttaggttctggttgtcgcagagtgcagcgatgttcaggggtaggatcaggtgtttggtaatgacggcctcacgagtcatcccgtgcaccatgaactccagggcctccaaggttagatctgcgtcggccccgcactggatcctacaacagtcgtttaggctagtgaaccagtaggtcatacacaacctctgctgcagaggaacaatctgtctcttcaagaagttgccaagcacgtgcatcgatgtaaggcctcatgcggttagaatcttgatactatccagcatgagggccgaaccctagtagcagtgatggtttggccctccagtgcttgtggttgagggtgggtccaccggtggggaggctgaggcgctcattagcctcggtgctggcgatcacctagtcattgcgccaatcttcccacttcccatcggcgagggcagggatgtagaatgtcgacgggtctaacctcatctggaagtagtaggcgtcgattgcatccttgctcttaccagatccggtcgtcatgaagaagtggcagaaagggaggtgcaggggcgcacgcccacaaacatctcgcacgggtgaacaaaaatcgccacctagaggatggaatggggcgtgaggtgttgaagctgaaccccaaactcctcccacagcagcaagaagaaatcagaaattagcaatgcgagccccgtgaagacatagaaggtgaacaatacaaactcgtcgagacgcatgttgccaatgggaagagagcccgctcaaatcccccaggcaagcctcgatgtggtccgtccaagcaaatggcgccacatctagatctccctaggtctgtaagtggcgaagacggtcaagctaacctttgcggtggttgcagcgtgtgcgaggagcaatattgcacgaagacgaaggggcgcaggagcatgggagagggggcgaatgcgaaaaggtacctactatctgcgatggaaggcctaattaacgttggctcacccacacgccaccgaagcgtcgggcagaacaccaagaggcgcagacactaagtgctaacgacccagaccatgacatggggggccaggcacaccaatcatatgtagtgggtggcaggtaaagatgtgaaaagcgagatctgaaccgtcaaacgcgtgaaacgggggcaaaacgcacctctttgggaaccaccactatggtaaaagcccttttttacccctaccacagtggtgtcgaacgttatgcgcatagccgggcataccacctgcgtgggggccataggccagtaagccacagagacgtgtgtgacagcaggtgaattgatagatgggacgacataggacaaggttcccgaaaaacacaccactgtgcgccagtcgcaaccaggttgcttaggacgacgtcgcagttgtggccccacctacgggtttgtaacctctcccgaggtgggcccaggggccattgtcggtgccccataactagggtacccccttctactgtgtcaaggcccaatactcgtgtggttacctataaccaggtgctaaggaactgagcagttg

SEQ ID NO: 80023 - DNA, 499 bp, Zea Mays
gcgcgagcatgttgcaccgccttaagtcgttgccgacttaagccgattgctccgttagcagggtatagtggtcaccccgagttaagtaagcgcaagcatgttgcaccgccttaaatcattgctgacttaagctgattgctctgttagcagggcatagtggtcaccccgagttaagtaagcgcgagcatgttgcaccgccttaagtcgttgccgacttaagccgattgctccgttagcagggcatagtggtcaccccgagttaagtaagcgcgagcatgttgcaccgccttaagtcgttgctgacttaagccgattgctccgttagcagggcatagtggtcaccccaagttaagtaagcacgagcatgttgcaccgccttaagtcgttgccgacttaagccgattgctccgttagcagggcatagtggtcaccccgagttaagttagcgcgagcatgttgcaccgccttaaatcgttgccgacttaagccgattgctcca

SEQ ID NO: 80024 - DNA, 582 bp, Zea Mays
gacttgttggctgaaacatggataattggatgttgctctatagcatcgccaattgacaggaatcatagattatgtgcggaggcaagtgatctggttgataaggaggtctataaatagctagttggtcatcgcatttacttatgccacacaagacatgacatttcatatgcagcgagtgtggtaagtcactacatgcataatccaagaaaaggacatgcagaagcggtgtatcgaatcctgaaatacttaaagagtagccctaggagaggcctttggttcaaaaagaaccaacacctagacatggaggccttttgtcatgctgattaggcaagtagcattgatagcaagaggtctacttctagttattgtgtttttgtgggaggtaatattgtatcctggagaagtaagaaacaagaggttgtggctcggtcaacaattgaggctgaatacagagcaatggccttgggccttagcaagatgatctagttgaagaatctattggctgaattgaaactaatgaggaacgacaatatggtattaaaccgtgacaacatatctgcaatgaatattgcaaacaatctg

SEQ ID NO: 80025 - DNA, 865 bp, Zea Mays
caatttagaattaattcattcgttcttgggctgtgggtataattttctaggagtataaggtttaatccacaaaaacttgggcctattggtaaggattcctagctacgggtggactgcgggctgattctgtagttcttagggattctttaacaaaatacaataccgaaaggatatctgtgtataccagccattagatgttgatcgatcggttgggattagttcttagatttacgaaccggtatgcaaaactgaccgctgatggatagatcggcggacgagatttaattacacgagattcgatcgtgttccatggatcccgatcggacgtcacatctcgattttggctgagttgatacccgcgaactgatctcggccgcacatagactatcagacggccaggaggttatctctcccatcccatcacaaatcacgacgacgttcgcggcccacgtggagcaccatcgccagagtgaagtcctcctggggctctggtgtcctattccctgccctgattgattttacacgaagaatagatggtggcagacaacatgggaagcttctcacctgctttctagtggcagtgagccctagcgccgtcgtggtgcagatcgactacacccgcgaagtccggcaacgaatcctagccagagtcagtcgggatttggcttgatgatgtcgcacgcatataccccacgtgttgtagaagcttctgcgccatacttctcgaccgtagcgacgacaccgacgaggtgcttacacggcggcgctccggatcttcctctctgtactctcggtgaaggtgactaagtgcagcgaggaaaacagagggcaggggctccgcaacgcacaattttgtagtcggccc

SEQ ID NO: 80026 - DNA, 473 bp, Zea Mays
gattgtaaagatctcaatgctgcttctcgaaatagcgacacaaggctgactaatttgtcggtcgcttagcataaaaaatagaagatgacatgaagaagatggatgaggagatctagtgacaacaagatcaggtgctcaaggtggcgaagaagtggttcctctcgcacttcagggtagattgccactagaagttcgtccgagtgaggaaaataaatgtcgattatatgttagccgtgcagcagcagctccccaaggtatgtgatgccaagtcagccgatgatattattaaaatttcttttgataatcagattaaaagtatcacagaggatatagagagatggtgcatgcattaggaaaaactcacatgaccaattttttatcacataaattgggcacagaaacaaatgctctagatacatcagcaacaaatgagtttccacaaccatattctggtatgtcggtggactcgtatc

SEQ ID NO: 80027 - DNA, 478 bp, Zea Mays
cagatccttctgaatctgaactgactcctctgcgatgtgactctctggtacttttaagcattttcggagctgagatacatgaaatacattatggatatctaacatggactttggtaactaaaggcggtaagctgctggccctattctaccgatgataggataggggccaacgaatcgcggagctagcttcccttttgattggaatcttttgactccacgcattggggagaccttgaggtagacaaaatctccttcctcaaaactaagttctctccttctgttgtctgcgtaactcttttgtcgactctgggcttcgagtagtctcttgcggaatagggcaactttctcttctccctccttgatgaaggtaggtccttctagggtcatttcccctatgttttaccacatcagagaggtttggcacctccttccatacagggcttcaaaaggtgacatcttgatgttggcctggtaaaag

SEQ ID NO: 80028 - DNA, 406 bp, Zea Mays
gctcagtccatgatatgtgggccgtgtagttactcacacgctaccatatcgagggaaatgactcaccattactcatgtgttaccaggaaaagggttactacctatcaatgctgcatggactgcagccatcatgactcccgctgattactcatgcgttactctgtcagcattagttattcacataatgtatttcttccattatgctcctaggcccgcatgtcggggctcagcatccttgtatgtgcctcccttaaactataaaagagaaggcacacagcgttacaagggacacgctcaaacacacactcaatacaacttacaaagtggaggtagtgtattacgctccagcggcctgaaccactataatccctcgtgtccttttgtgttcatcccgaattcactaaac

SEQ ID NO: 80029 - DNA, 565 bp, Zea Mays
ccacacaggtactcggtgctccccatggatgttgaatgacatagaagccatgagtggcaggcaagttgtaatgcagggtattattgccagaactgcagacagaaccttgattggagtgtgatgatactgaaaatcagctgcttgcacattggaaacatgatgacatatctgaattacctgaaactgacaggtttgcacaagtccttgttgttttgtgcactctttctgtcagctgatcagtaactctgacgatcaaaaccagacctcatcctgtccaatgtctcctgcaaaaattaatatcctctacgtcgatctgaagatcgtttggttagcttgataggggagatacgtcgaggtttagcccaatctcaagattggttgcgtagcttgacaggttgatgttctgcgtttacggccatgaattcatgatcctttttgatggtccgcgatgccaaaggaggacactgcttctgaagatcgcttaaacaagatagctatgacaaactgcaatttcggcagttgaattcttttcagctcttcgattcttgcctcaggaaccaacgaa

SEQ ID NO: 80030 - DNA, 575 bp, Zea Mays
gcagcaaactgatatggaggtagatgaggacatcgaagaggaggaggactcggaggagttggggctagcctctaacctggacaccacgagcttgttctgttccggtggaccgccttcacctaagtctagtgtcgccttgatcgccctttgacttagtagtagaagtgtcaggaagtatgtactcctcacatcgcctagcttacgacctatgatgtaattggctagttggtagagtataatccagatgcagcccctttgatgaacatattttgtaagaaatgattatgatggttccaaatattttaagaaatgacccaagtttcactcctacatgagcacgaactcttaagtgtatgctacaatgttggacttgagtttctttggttacctgcttaaccattgaatcaaaattgtgaagtgtgggccatgagaataaccaaaaggattcctaaatttttatatggtaggaactgtatgctatggacaggactagcaagttccaccatcgccaccaccgcctcctactatgcaggagctgatggggcagcaaaacgagattatgtgacatctagctc

SEQ ID NO: 80031 - DNA, 668 bp, Zea Mays
aaaagtccagggggctcgggacaagaaacccgagacacagcgcatagtgactatggacggcgggttcattataaaataccctagggtctcttatgaaaactaagcagccgaagggggtatcctctaatttcagccgtccgatcaaacgcggatggcccagattagatcctctcctgctaaaatcccgctcttgctctccaccgatggatccgacaacaagggttaggatctaaacaccgaaggggggtaagcctcggtctaatctctaccgcacactcaaatccgacggcgcacataagctcttcctcgcccagacacaagggacacccgcggtgcctgctccattcacggcggcggaccgctggagttcgaatccggccatcccgtgcacgtattgccaattaaaccataccacctataattgatgctacccggaactcaatttcccaacaaattttggttgacctcgagtgtaggacccggtacacggtgtaccgcggcgacgccatggtcggctagtgcacccaggaattcggctatgccatactccaattcgctaggccataatgtgggggaaaggaagacgaacacgatgggaactcacttgtgaccagccgaggtgaggtgatgcctaaccacggaagaacgcgagtacggcggaggtcgcg

SEQ ID NO: 80032 - DNA, 726 bp, Zea Mays
ctgttttgcacttcatttgcagtatcgtagatatatagctgtataaactttggaggagaaccatctggaggtaacagagacccaatacgatgatgaacttgaccacatattttgaatagcggcgggccacgcccatcatttactgatttatcaatttgagcacccattgatgtgaaagcaaatagacaattgtattgtctaatgctcttaatgaatttctttgatatatgatcgccgtcaaattttgcaagagtagctagaggttcgggtcttggtttgtacggaggaatactaattttgccacctttgcagcaattgttataaacaatagatccatcacgctgttttgatctaattctctcaccataccagaacacagctttgcagtgttggcactcatagtcaggctttccataatatgatcgatttggataacaagctgcagatgtcataaaaacatcatccacaagaataaagatgaagaagattagaagtgtgatgtttttcgcattgatgggtcgttgaaaagcttttgtcgatgtattttttttaacaatttacctttgagtgcctgtatgtattccttagtaatatgaccacagtgtaaactttctgttgtttgatttggtatgcctattttcagagaaaacaagcactatttgttagcttaattatgtgtggtgtcagatatgcatgcatatacacagatatatcgatgcatacgaa

SEQ ID NO: 80033 - DNA, 334 bp, Zea Mays
ttggattctatctgactctataccagggacactgcttttgcccaaaaccttattcttgtaccctgacaggtggtggaagatcctctttactgatgttaattgatgccatattcttaattatctcaaatcatttctcatgacatatggccataaaccttctatgcattgtgcagtttcccaaacctctgtacttctgtgtattggatgtttcatcgcagtgcagaagtgaaaataaataggactgttttgtatgcatttgttttgctgtggtagagacaatatgattgttggcttgtcgcaagcaagaatccataccttgctctttgcctttgca

SEQ ID NO: 80034 - DNA, 459 bp, Zea Mays
taggacaggggcggcccaaggtgaggtatttggtctgatgtaacctttctctgatagctcatctatttgctacttgggctcaaccaactctggtcctgataccctgtaggctctttttagaaatgggggcggttccaggaagaagctctatggcaaaactcaactttccgctcaggtggcatacctggtaaatcttttgggaacacatccggaaattctgacacaaccttgatagtctcgagtggatgtgcctccttgctaccaatagtcatctggtgacaacctcctttccttggctcgggcgagactagctcagtcaccacttcttctcctagtggggacaccaacttaattgtcctcttatcacagctgataactgcttggtacttatctagccaatttatccctaggataacatctattccctaagtacccattactatgaggttagcagggaac

SEQ ID NO: 80035 - DNA, 285 bp, Zea Mays
acaaaatcagcgcaaaagctgaaatcaaagctagttcctctagaaagaggaaaatggcttaacacaactagcaaaagctccataatccagaggcaaatggctcaacacagctagcaaaagctccataatctagagtctctcccccctgagaatctctccccttactctcccaaagcaaaaatctcccccattgttaggaggccaaaaatctcagtctctcccctttttgataaatggactcatcaagcacaaacaagggtagaaacagaaaccccccctgacacg

SEQ ID NO: 80036 - DNA, 381 bp, Zea Mays
gttcgatcaggagcctgcggttcagattagatgagctctataacgaaccggtacgcatctggggtcactggatatgaaatctacgatcacgatttaacctagcgaagggatatccgcgacccgatcacagccatccatggatcgatcaacggcccaggtccttctcctagctccagctgcccaggcacagacaccgcgccctcccagtgcactctttctctctcccgttgctccaccgacgtgcacaccgatctcggtccgcatctaaactttgctcagggctactgctcctccacagattgcgcaaaagccatagaatggagaaaggaggaaattccgaggtagctacttacctacaatcatgtggcgcgaacacccaac

SEQ ID NO: 80037 - DNA, 417 bp, Zea Mays
gaagagcaaaagaaattgagtgccatccacattcggtgagtgagtgctacaagccaaattcaggagataaaaagaaagaagagggagaacatctagttatgctagccacaaaatctgagctgagagaagtgaggaacaacccttatcaagtgctatttgtacttgtgagcaaagatgttttgatttctcctaacgacataacatctcttcctagtgttgtgggtgatcttttgtatgactttgaagacgtgtttccacaagaaacaccggctggactacctccaattcatgggattgagcatcaaattgatctcattccaggggctacacttcctaaccgtccaccatatcgaaccaatcctaaagaaactaagaagatacgaaggcaagtgcaagaacttcttgataaaggttttg

SEQ ID NO: 80038 - DNA, 1183 bp, Zea Mays
catatcgagttccaggttgaaaagcctcatctattcaccctgctagtagagcagtgcttgttagggctgtgctcacatccattccaatctatttattgctggctaagaaagctagctttttgtggaaaagggtgcaaagaagttaatggtggacattgccttcttggttcttgcttgggttaaggtgcatagacctaaggagttgggagggctgggcatacacaatttagagcttctcatctgcggactaagaatgaaatatctttggatccagaagatcaaacctgattactcctgggctgttttgggcacatcatttccttgtaacgcccgcggcaatgttctctatcttggtcagcaccgaggtgagcgtagttattttttgacttgacatatggttattgggccagaaacttgtgcatcatatttttgctctcatatccaaatgtatatctaggaagataactgttacaatccaggttctggaggaatcattcggattttggagtttctagccaagtggaattacaagacgatgtggaagaaacacatctggccggcttctgcatctggaaccaccaagtttgatttttggcaaagactttgaaaatcatggataccacccggagtgaaatatttcatttggttagcttgtcataaacactgctggacttctggttgccttgagcgcggatgcctccatgaaaccaccaagctatttgtgccgtctttgtgatcaggtggatgagacaattacacatttgctagtcgactgtgccttcactaaatactcccttcgtcccataatacttgaccatttatcattgtacacctgtcccaaattagttggcatcctcacttcccagtgcacctatctcttttcccaatgtgtctctatctctatttctccttgtttcctgtgcactacaacttctccacttcttaattcctgtgcccagagctaaaatgtcatctatcatgggacagagggagtaagtttgaatggagatcttacaatcggttggtctgggccaaaatcatttttccttccaaaattggtttgaggttacgctattagttgataatcatcagcgaaaagtattccactctaggcatggtaatagctttgttcctttggaaacactaacggatgcatttgcgagggcacagatcctagtgtcag

SEQ ID NO: 80039 - DNA, 606 bp, Zea Mays
agcttgtcttgcttcagcagttgaagaggctccttcgacaaatttaggcaccccggccggttcaatgtaacacggccggtgggtcagaatcttcatctttttgcccttcagctcagctacagtggccgaagcggcagtcttcctctttttaccttgcccccacagagggaagcgataatcggggtatatgaagccaatcgcatcaaagaccctattcagtcttttcatcgcccggcctccgaaggctgcggacaaagcattatcttcggccttggagtaagctccaagtagcttatcactagtagcttcaatacacttcagccagtcgttgtttggctcatcaaacttctccctaaatctgaaggtatacttcagtcggaccagaccaccatcactagagtcggtggtggtctccttcggcatttcccagctttccacaagcggccataccctgaaacatatatgctcttgaatcaaatcccttgtgccaatgaaggaacaaacagtgctaaaagcactctgacatgcttcaacagcgtcatcaattttcacctttggccttcaaaggccgaagcgagaccaaatgggtcgctaaatgatttcttt

SEQ ID NO: 80040 - DNA, 545 bp, Zea Mays
gatcatggaactaccttatgtggtctggagtctgcaaacccagcctagtcgatccctacatggaaatactccatttttcatggtatacagatccaaggcagtgttacctacagatctggccttcggagcacccaggctaacatttgaaaacatagcagaggcagaagaaacatagctcaaggaagtcgatgtgctagaggaggaacacctgaatgttgtcatttagtcggtcaggtagcagcaaaccctgagacgctaccacgataaagcagtacgacaccagacattcgcagtaggagacctagtgctttgccgcatacagtcaggggaaagacgacacaaattgtcgccaccatgggaggacccgttcatgattgcagaagtaacctgatcaaggtcttatcggctaactcagatggatggaacttgtagaccccacaaatatatctataaatatatgtatggtgttattgtattcataaattcgttgggaaatataatgagagtttaagatgattaatgttgtaatggtgaggcatgttctc

SEQ ID NO: 80041 - DNA, 448 bp, Zea Mays
ggggatttttgcgcaccacatgggcaccagaagtttctttaacaactttcttgccatagacatcttttgctcttgccttttgttcaacatctaaagagctaatgagattgacgataccaaactcttgtttattatgttgtagggaggtatcaaaatccaagtttgtggaaaccttgcaattatgcaacgcagcacaaacttctcaggcaatgcataaccaaaacccttgagttatttcagcagtacatgtgttgcatgagctttttctactattgaacgaccatcagttattatgtaatcatggaactgctccatgataaatagttcgctagtagcgtcagacactccatatttggtctccaatgcattcctcgtttctttttcagtgggcatcatcacatatgcatctaatatgaagtcccctcgtatgccaattgttgcccccttg

SEQ ID NO: 80042 - DNA, 646 bp, Zea Mays
ggaagatgtatgtacttcgtgttgtgcagctactgccgataagtgtggctgagggaccatagagtttgcctagcagcatcgctgaccgaagcagcgtaggtggatagcggcgttagagactcatgagctaacagagtcctaaaccctctatcccctgcatccatcaccctgacatgaatgtgtgtgacctagaagcaagcccgagggagctcgtacactcgccttgtcccatataggggtcggacgtaggttcccaacgcatgcagaatatcctgcagcaggttagggaagtgccccgtctcgaacattgatgtataatgttcggtgacaggccatatccccatgaagtggtccagctgttcaccgttggcttcctcgttgatgttctcctcctcctcctcttcttcttcttctactttgtcttcatcatcgtcacaagagttgtccgagtcgtcgcctccgggagcaggggcttggactactggtgctggcggtgctgaggatgacgatccagatgcgaaggctagtgattctaccaacggggtgggcgtaggcagaatctcctccgagttgtccgccggaataactctgttctccacacgaatgcgagggagatccacagggatttcctcgactaccactgggt

SEQ ID NO: 80043 - DNA, 720 bp, Zea Mays
gtggtcatggcgtggtcagcctatacttagttgacatgcctttcttgaacggtcaatcaacatgtctttggtgtcagaacccatgcgtcgggttttcatatgtctcatgttgtcatttgggttacccctgtgtcagaaccttataaattcttacgtccctgggagtgtctaccagtacgacctcattgaattcagggtagtcgagtgcacccctgacccttaagtcaggcgaagcaaatttcgcaagacatcacacagtatcccgacccaaggggctggggtcagacaagacagtgtcacagggccggtttcatccttcaagagtttttagtccttgtccgtttatttagggctcatgcttgacccgagtcactcgcccacaacaatagccctcaagcctcagaaggagcgtggtgctcctttggaggttttgttccattttttgctatggacacatgagaggactcgatgagtcgagctccagagcctccaaaggaacaatgggtttgtttgaaggatctttcatacgaactatgtgctcagcattaggctgtttattctacaatctcgttttatctcgttttgtgatgtcggttccttagcccccatttcattacgatgagctaatcaggggactaattcaactttatatcatcatcccttccccgtctcgttcgcttagagatggatgggtttggatcgttcttcctctttgcctcg

SEQ ID NO: 80044 - DNA, 914 bp, Zea Mays
ggattaggggggttagggtttcaaacctgggttgggattttgggatgttacattgtgttcatgtacttaacaaacaagttagcttgaatggttgtgatggttgtaaatcaccaaaacaagtgtagaaatagttttagggcctatttccctttcaggaacgtctagaaggagcacagtagaaggaccttccaactttacttcccttgtgtgtggttgtttcgttgttttttcaatggccaaatagggtgttcttgattcaatttgtatgcgttcaacctaggatgccaattttactcgcgggtttgggtatccctcgggtatccgacccatcgggtttggccacgaaatttgactcatgggtctcacccacacattatttgtaaaaaatgggttgaatatgtgatgtatctctcattgtcccctgttgaatatccgaaaatgttcaatgtgtatttttagcccactaggagccaacccaatggctcatcagtgttaactaaccaattagccctagccccacttggccactcgcacccccagctgccaagagccacccgcgaggccgtgaaccccaagtatagatcgaccgtcgatccccaatctcctccttggctccccagctcccctcaccacacgaccacaaacaactcgctagccctctagcaaggcagcaaaccatcagcctccgattgccagccctaaccaaaagccaccttaatccatcgggactagcagtgggagctcaagtcagagccagaggattagtaggtcatcggggcatgcagacatcatccagaacgcagggagctccgtgaccgacgagtgaggcacaaggtaggagccatgcaagatggtgtcagtcctagctagggagaaggggtgcacgtcatcgctcatgaaagttgcttcatctg

SEQ ID NO: 80045 - DNA, 410 bp, Zea Mays
atacaaagcatcgaacccaaattccaagaagcgtgatcctgtctgaggtatacggtgccagcaaggccaaatgctcctgctgcgctcagtcagactgctcccaatggccggggctggcgaaaataaaggcgtgtgataggaaaatctggagatgtgtgtatatacatttggacggtttgaggtattccattgctgctatagatggcagttgtttctgtactgtgtgcgtgtctgttgcgagaaggcctctagctagatatgctgctgcctgctgacctgggaactgattggtttcgctgacgcttcctgttcttgcaagaatgtgcaagtagaacagaacaacccgaacgctccaggaattatacacgaggtagaagagagagaacacctgcttgggattttctttcaac

SEQ ID NO: 80046 - DNA, 352 bp, Zea Mays
aagcttacagtacctcaggaaaaatctatataaactttagatattggtagtcaaagttaaaaatggtatatttacgattaaaggaattaatagtccattagtattgttttctttattggcagcaccagatttatttcatcatttgattgaccataaaaacacacactctatcacagtttcattaagtggctacagaagttcacatatctatcatggcgtggcacagttgcatcagactgattgatccctagtcataactagtattgagtcaatagctaaaccctggttgctctgttgaaattatgcatttcagtacatgttccttcttctctgcctgtgttgtcagtccttt

SEQ ID NO: 80047 - DNA, 1400 bp, Zea Mays
aaattgcaaaaaggtcccaaaggcacccaaaatgcttaactctgaaaaacagtgctattgtgctgactttagatctctgtatctcttgatatatggagattttgtcatgggtcactacaacaaatttgtagagctattaaagtagtccaagtttgattaagtgattgatccctagagctgtacagaaattggggcaaaatggcctggaagttgggctgtcagtcatgtgttggtctgaaagttagactgacagtggcattagatcaactttggaaccgaattgtgcttgatcaagtggaggtatgagcaagaaccttataacaaaattgaagctggcatgacggacaacaactttgatgtagtcggataaacaagttgtcacataaaaatttgagaaaggaactcctcaaatcgctctgtcaggcacgctgaatgaacatcgccatggtacaatgaactggacaagattgagttctgtgtgcctgccgccgatgtccctccgctgtgattcgagctcgcgccacgattggtgccactaagacgtggatcaatgaagtggtaaaaagatctatggctcggattcggtgatcgagttaccgctctagccacagacacacgtgtactcatcgtgcttcattcaccgctgcagtagcaagccaccgacgctccggtcgtccatgcagctggttggaggccctcgtgttgcaccatcgtaaagggtccccggtaagtccgccacattactggcctgaggaaaccgtaaaagcaaacgtggagctcctcgggctatcgccgccgccgtgattcagcggtcaaattgaccaccgtcgtggtgactccctttaaattgagcttgctctcagtcccgtctctccgttacgcacccaagccaccctttgtttcccctgttcaaccgtcggtagccaagaacaccagttttccccaacggtggtcaccagcaccgccgagtggtgcccccgcgtggtcagcctttcctaaggttggtcgtaattgttcaactcgtgtttcgcagtctataggtcatggtgaagcttatgcgcttgcccgtttgaactctactgcgtagggctcactggaacattgttatgtcattcggtgaacaccgctgagggtagtgtccacgtcgactggccaaaccatagcttctccaggcaaacctaggtgagcatcgtatgttcgatgaattactggtactcatcatgaccttggattgaaccctaccgtgctcgagacctcggtacacctcaccgatgctcgtcgatccgccgtcgacgtggctagtgaggctctaggtggtttgaggtcaattaacttaggggaaatatgaggtaagtctcggggatcacattggtaggctcagttttcatcggaggggtcgc

SEQ ID NO: 80048 - DNA, 493 bp, Zea Mays
ctctgaattcttcaatttctgtgagcaaaggagtatccagatcaagtacgcataagtggcacacccaagatccaatggccaggtggaaagagccaacagaatgataatggaagcactcagaaagaaggtatttgataagagtgaaaagcttgcaggaaaatagatcagagaactaccatacatagtctggagcctacgaactcaacccagtcgagctctgcatggaaataccctattcttcatggtttatgggttagaagcagtgctgcttgccgatctaatcttcggggcaccgaggtttactttcgaaaacatagctgaagcagaagcaaccaggctggaggacattgatgtgctggaggaagaacgattgaacacagtaattcagtcggccaggtaccagcagaccttgaggacaacaaagttgtgcgtcaccgatcctttgcagtaggagacttggtccttcaccgaattctaacgggggagggacgac

SEQ ID NO: 80049 - DNA, 600 bp, Zea Mays
ttgccttcttcaaaatattcccatcctcctttactagcctggcagcttgtctgtttagaatactgacaatccttttccttttcaaacattcggcacccttgccaaatctttcatagtctggatattcaaaattgagtgcgtccatcatgcgattctacctttgttttggtcgggtgtcgaaggcggcagtcattaactggtcctccttcttggtgtagttgccaaggatttcattgcacatagtttcaatcatttctaaccactcttggaatggcttcttgaactctttatcaaacttgaaacggtaggggagccgaacaagttcgtgcttcttgcccccatccttcttcttgggcatcccccagccactagaggtcggaaatactctatttgccaagaattattgcaccagatctctagtgttgacttcggccgctaccactctaaactctacttcgactacttgtcatggggagccaaactgcatatggcacaagggtcttatcattctgaagctcaatatcagtagactcatgaccatagtcatcagcttctccctctttttctcatttgccttcatataaaaccattcacttttcc

SEQ ID NO: 80050 - DNA, 505 bp, Zea Mays
gcctgagcctgctcgagatggaagcggacgtcagccagaaaggcttcccgcgcttccatttcatgtgccaccgccgccacccttgtgtcgtcgggctcgtaggagcggatggagggcagatcacggtcgtagaccacgtggaacggggtgtcgtggagggactactggtaggccgtgttgtagacgtactccgcccgagggagccagcaaagccactggcgagggcgatcgcccatgaggcagcgtaggtacatgacgatgacgcggttggccacctccgtctgcgggtggaacgccgatgacatgaggagcttggtgcccatgaggcacatcagctcgctccagaacaacgaggtgaatagcgggtcgcggttggagacgatggattgcggtatcccgtggagacggacgatgtcggtgaagaaagcatgtgccacggactccaccgtgtacgagtgcgctagggggatgaaatggcagtatttgctgaagtggtcgacgatgg

SEQ ID NO: 80051 - DNA, 664 bp, Zea Mays
gccccgagcccccgagtgatccttatggattgcttggggtgttttattcggtaccaatcagtttaggcgcggatccttcctgcgatggttgcattgttttcagatcatccgactaatcacgattagtcgggctgatcggtactctgtgctcgattagggtgtttgattcgattaggttgcctgatcgtccgattaggcgacgatatggaacgactaattgaccggtaaccgatcagtcgcgattagtcagggttgggtagttcaacattctgtttgactgacccatgattaataaaggtagccggccccagatcacgcctgtctcttcgtgttccccgcctccttagaatccctgcaggcgtggtgcactctagagccaggagcccaggacgattgctcccttccctctcccttcttcacccttctctctctccctccaaggctccaacacccttctatctacatcggccgggaggaaacatagggattggagatgagctcctcatctgaaggtatatgtctggactctgaagtctcccaagtcccaatcttttttttttgttttgttgttccggttcagacttcatttcagtgtttcagacttcagtttggagtttcagacttcagagtttcagacttcagttttggactatttatactgcta

SEQ ID NO: 80052 - DNA, 339 bp, Zea Mays
atcatcaaggtcacacccattgggatcagctcgagcaggatcacatccagtgggttcagcatcatcgaggtcacacccattggggtcagcgtcagcagggtcacacccattgggatcagctccaataaaaagttccaccggcacttcttcagcagcaggagcagaagggccagcatccttatccaaacacgacactcgccgaagcctcctctttttcttcttcttcccctcgacaggagcagttggatgactagtcgggcgaaggcgctttgggcgagcaccatcagacttttgagcattcaaggttttttcaggctctatgatagttgcaacagctat

SEQ ID NO: 80053 - DNA, 626 bp, Zea Mays
cttagccttgttgccatgcatgactatgaaaatgagcagttagatgtgaaaactactttcttacatggtgattgggaggaggacatttatatggactagcctgaagggtttgttgttcctggaaaagaagactatgtgtgatagttaaagaagtccttatatggtctgaaacagtctccgagacagtggtataagaggtttgattcatttatgctttctaatggctttcagagatctcaatatgatagttgtgtttatcttaagtttgttaatggttcacctacatacttgttgttatatgttgatcatatgttgattgcttccaagagcatgaaggaaatcactgttttgaagccacaacttagtagcgaatttgatatgaaggatctgggtgctgcaaataaaatccttggcatggagatagtcagggataaaaaagtctggattaatgtacttgagctagaagaattatattgaggtccttcgtcgtttcaaaatgcaaaatgctaaacctgtgagtactccgctggctcctcattttaaactatctgctaaacagtgtgctgaaactgatgctgatcttgagtatatgtcaagagattcatactctaatgtcgttgggtcac

SEQ ID NO: 80054 - DNA, 544 bp, Zea Mays
ggccactatttcagaagagcccagggtctatctcataaatttcaggaccccgatgcaattattttctaactccagaggatcgcgggttgattcgagtattgcctagggtctcttatgcaaaaggcttcgaccgaaggggtacagggctggctggaccgttagattagatctgatcggcccagttctaatgaacaacgaggttatgtgctacgacgtcagaaccgttcaatctggaatctacggtcacaatcaccttcctcccgatcaaatcttagtcgatggatagaaatccaacggaccgaccactttcttcctcccccagcccacaagatggcgacgccaggcatccccacggcggagcttctgccagagctctagattcggtgctcccgcagtccaaatccgagaactcgcacgcgcaacacgaacagcaggtcaaggcgaatacgatggagtgcaccataccatggattatcgcaatagagaagccagccacggagaggtgcaggttagcagcgtcgtaaaatcttcggtgagaaattcc

SEQ ID NO: 80055 - DNA, 517 bp, Zea Mays
aaatatcgcaccgtggatgaactccggccactattctactccggccgccgtacccgcctgagtcacggccgcttcggatagactcaccggagttagccacctcacgaccttgcgccacgtgcctgggtgctttaacgatgccaccgtgagtcaccttagcccatccagtgatcgccggtgagctttccacggtaaacgccaccaattgcttgcgccagtgcacccccttctctccgaccgccaccgcgcgatctcaaattcacgggccaccgctgaagggccctataaattgagcacaccctcggctccgctatgtaattgtgcactcaacacacccacccgtgcctccaattactcaccagagcccccgaattgctcagttcccccaaatcagttttccgccaccgtgaacaagctctcaccgtggcccgtgcactccaggtccgatcttgtcctctgctctcttgtttcagcacccttacatgcccctgatgcttctcgaaccgaccgattaggc

SEQ ID NO: 80056 - DNA, 298 bp, Zea Mays
atcgacttgaactttccgtatggcgtggttctttttgttgagcttctttgcgatagcatggcccaagagatttccaactccaaataaggtcgccatgggagattgttctactgagattcaatcttggctagattaccacataaaatttagaggtgcagtaggggaactgttgtgttttatattgggtctcggtgtatgtgtgttactcaatggctcgaagagctttgatcgtgacttttacgaaaagcgataactccaaaaactaggccacgacatatttgttatagatacaaaaact

SEQ ID NO: 80057 - DNA, 326 bp, Zea Mays
cccccgtgtcctatgcgcgctaaccccatgtttatattaataagctaggagtctcaatttggaaattggttacgttagttaatttgtataactaatcatctatctcgttcaatgttaatctactaaaagtggtcgcgattacattagtgcatgtagctaatccttttgttaggaccaactggaactagagcgcgtgacgtctagtcattcgtttacctgtagtgcccctcgagcataagccttaacccttgcgagaccttccctcgtttctttctaaccatggtaaattcattatcgtatgtggtattctatgcatatttgcttta

SEQ ID NO: 80058 - DNA, 366 bp, Zea Mays
gccgaaggggtacggtgtgacctggctcgtccgatcgaaaatcgacgcatcggattagatcgtcggtgacccgaaccggtatgcgcacgggaccacacgaaccggatctaacggctggctgccatcccactactggatctaatcacgaccacatgcctatgatccaatggctcagctacaattggacgatgggggtccatcttctaatctcggccgcccaaggaactatcaacggtccatggcctgctcccttatttcgaccaccagggcggcggcgctctagtgccgcacggcggagggcccgccggcgacagccgtgccggtgcgcagatgccccaatccccgctcctaagggtgctacgtgaa

SEQ ID NO: 80059 - DNA, 548 bp, Zea Mays
gtaaaagatccatggcataagcataatttttccaatgtttctatttcgaacgaaactagtctgaacgcccccaacaagagtacgagactggggataaggggctataatctatgagaaagaacttttgtaatagctttgatagggcaattttacaggcaaatagagcgaaagtccgcaggagacctggccgaatctttttttggcaggagaacaacataagatgtgttgatcctctcaaggtcggcattgcaatttgcaatcatagaaggtagagaagaaatcttgaataaccaccgaagtaacatcccaggtagtggagtaaaaactaggaccaaaaccatccagccctgctcgaatcctttttcatgtgcatgataacaacctcaagctcttccctactaaactagccatcgaggctagataaatcgggattgtatgttggatagagatcagacaggacgaagttccaggtggaggttgggtcgtccctaataaatcggcgtagaagtcatgaaggattcaggctttctaagcatgcttataatact

SEQ ID NO: 80060 - DNA, 611 bp, Zea Mays
cctataggacatgtcttgacttagttcactctgcactaagttaagaatgaccaaccaactcggccttatgcaactaccttaaccgatcgatggttgcataacccctctgttttaatctaatagagattctgacctatataaactggttacataactaatcccaactagcatatagctacctactaaaccctctacctaactattacctactgatctatcttaacctcttggtgacaccaaagctcaagagggaaaagctcgacctcgtcaagaaaggagagaagtcaaactggatcttttggtgcactaccatccaacacggagttctcctcaccataaactttcttaccctagctattcttgccctaacttatatcccacataacaagcaactggatacatatgctctcctaatcacccactattaactaaaaaatgagactctagattatagactaaaagccgaattacaaaccaatccttctgtataccttttcttacaaatctcgaggacgagatttctgttaaggggggtaggatttgtaatgctcaaaaatgtaaatattgaagatggagttgaatcacttatatgtttgcctctatataatata

SEQ ID NO: 80061 - DNA, 561 bp, Zea Mays
aaaactcggacctgaaagcttttcctacaagagtctgtgacgctgcatgtacgccacattgctcggcatgaatttcatctaacagttgcttcccagtagccgagtgaatgcacttcatgaggactcctcctgcacctcttctatacagtaggccccctataatggtatagtgggccgactgtcttgcgataagctctgccacagccttgttatctggttcttccttgtttttttatgtatctgatgattggctctctccatacattgggatctgcctctgcctgactcagaacatggcattcctccattttacctgtggtgacactcagtttctgtatttcttcgatgaaaaccctaggtggaacttgggcccgactggatcctagctttgattgtgcgtcagccgctgcattgtgatccctttccacatggtggaattctaatccttcgaatttgtcctccagcttccgcaccgctacacaatatttgttcattgagtcggtcgagcaatcccagtctttgtttacttggcttatgaccactagtgagtcgtcgtacacc

SEQ ID NO: 80062 - DNA, 380 bp, Zea Mays
atgaagagcaacaatagaaactcgctgtgtcctgaactcatcatacataatcgatcgaacgaaaacacaactaaatgaaactcttgagaagtaaatcacagacaaacaaaacgagaaaaataccagacctcgcttgttaactgctcctcgtggcttccagactgctgctgccccctaaacatctctctcctctttgacagaagctagctaataactgcctaacttccctctagctcatccagttctctctcttcagatctctttgttcctgcagcggtctattgcttataaagataggccgctgctgcacagcctcgtgcgtgtctctctctctcctatttggactttggcataaaagaagtcgtatcgtaacccggtgc

SEQ ID NO: 80063 - DNA, 319 bp, Zea Mays
ataagaacatggccctaatcctctaagggccccaaaatactagctcggcaaggaaaacatggtgtttgttgtggcagttgagtgctaatctctcgtgcaactcgttttggttttgggacgaagtgtaacatgtgcatgctggtataacatctgtacactatttgttaccattttagtaagccacttcccacatagtttgaagtaatgacgcaaaagaaaacgtgtttgcatctatttggaagaacttgcacacatgttaatgtctattaatagaggagattaatctatattatcgatccaaaaaatcggtacagggccc

SEQ ID NO: 80064 - DNA, 448 bp, Zea Mays
gttattttgcgcactaaaagcaccatactcaattaacaatgcattctctataacaatcaatatcaaagcgcttttcaccaatagtttgcattttaatttagacatcacctgagcactactacttttcattagcaaccataaccatacatatttagaccacaacaagcaattcatcgcgactacaaacttaaccaaagccgtctaacaagtcggctagccggagtaacaatctaggccgctatacatcctacacgtcggcttgcatattattatcgcaatccgagacaacacatatataacagtcacttaacgaatttgactcctcaacattagttggctaatcacagcataagacttagcaacccatttagacattgcaactcaaaatatgggtgggagcaggttaattaacgtttcttaaccttggctccacttaatttagttaaca

SEQ ID NO: 80065 - DNA, 321 bp, Zea Mays
gtgctactaaagtatctcctttttagtttgtttgtttatatgcaacaagttgttttgcctatgcaagtaagcctaaatgctatcaggttcgctaggcaaaattacctagatgttgatgattattatgatctgatgatggacaatattgataaggtgaccgacaagaagccgatggctctaaaggagatcgagaaatacaagatcatggttgctaaggtctacaacagaaaggtaatgccgggtatcataattaggggtaccttgattacgtccctaaacgtgcttaaccccgaggttgtcgtgaggcactcttgaaaggga

SEQ ID NO: 80066 - DNA, 352 bp, Zea Mays
cacggaatgcctccgtatcgaccaactctccaagttgttctgagaactggcctatatgctcatatgtgcttttaccgcattcacaggaaaatttggagaagtccactatcctagtcacttgcgggtatgggatggggtgtcaaatcgatgatgatatggtttttgatatgacgaccttgagtcggacatactaatatgtagcatgtctcaaaataatctgtctatttcctctcaaatcttatccacgctggctagtggtataggaccggactcgagacatgaagctcagatggtcgagcattgttatgccaactgtcagtatgagaataatctaatgtgtgtggcggtgcaa

SEQ ID NO: 80067 - DNA, 397 bp, Zea Mays
catcactctgacgtgaatgcgagtgatgtagtagcaagctcggggaggctcgctcactcgccttgtctcgtacaagggtcggacgtaggttcccaacgcgtgcagcacgtcttgcagtaggttggggaagtgccccgtctcgaatattgatgtgtaatgttcggtgacaggaccaaaccccatgaagtagtcatggtgggcgtagttggcctccttgttggcttgttcctcttcatcctcattgtcgtcgtcatcctcatcatcgtcattcccagagtcgtctgggtcatcgcctctgggtgtaggagattgaatggctagtgcaggcgatgccgaggttgatgacctagctgcgaaggctagtgactccgccaacggggtgggcgtcggtagaagt

SEQ ID NO: 80068 - DNA, 543 bp, Zea Mays
gcgatctgatttgggattttccttcactggtggtcaccagactggtccgatgcaccaccggaccaagtgcaatgtcagatagtcgttggcgactagcgcgcccacaaagtagccattggaggatggtctggtgcaccaccggaccactactattcatgatccgatgaatcataaaatatagttcctgaaggacgcctgttcacatacagagggagtccggtgcacatagatccagtctggtgcaccaggctgcctgaggccttcgctgaccccactgcccagccggtccgatgcaccaccgagtcgttactgtagatggtctggtgcgcccagacaggctgcaatgagttcatttctactccttttattttccattcgacttgaactctttggaagactttcttatgacttagacagacatgattagagtataatccaattgactaagtcccagaaacttacctctttcttagcctttccttaactgctctgtttctcctcaaacagggccccgaatggcactttctctacaaaccaagttag

SEQ ID NO: 80069 - DNA, 411 bp, Zea Mays
tagatagtcggctcactacacactcattggggagacactatacagaaggggcgcatcgggtgtcctcatgaaatgcattctctcatctacggggaagcaacttctagatgaggtccatgctgggcaatgtggaatacacacagcatccaagacactagtcgggaaggtcttcaggtcgggattctgttggccaatagcgaaaagtgatgcagccgagttagttcagaggtgcgaagcttgccagtacttgtcaaagcaacaacacctaccagcacaacaactacagaccataccagtaacttggtcgttcgcatgctggggactggatatgattggacctttcaagaaagctcaaagaggatacactcatgtactggtagcaatcgacaaattcactaaatggatagagtt

SEQ ID NO: 80070 - DNA, 461 bp, Zea Mays
ttttactcttctcatttcaccaagccgttatcaaacaaaccgaagcgcagttttattggtctagttaaaatcgttgagggtttgatctcggccgaggatcttgagaaggatttcggttttcatttcccctagggccgtacttggaaagctaccaagtgtcactctggttttctaatgcaatttccttctcaagagaggctggatgagatgattaatttcccagaattgaaaatgaagttgtcgggtgcaaaaatctctgtatcttcttggagctctcacgctcagcccaagtccaaactgcatttggtttggattgtggctgagaatgtgcctgaagaactccagaattaccaggctatctgtgaattgggatccactattggagcagtggaagaagtggatattacctctttaaactctaaagaaattgttagattcaaagtgcatgtgaagagtgttgc

SEQ ID NO: 80071 - DNA, 302 bp, Zea Mays
gaactattgattcccactgataacattccattaaatgatgatgctcacaatcctactccctaccaacaccacctcacctcaccatgtggttcgtccctgccttcagaatacatacacaggctgtccccttttttaggatcatcagtgtctcgtatgcacccatcattctgcatccatggaatagagaaatcggaccaggtaactttgttgaataaactatgacccttttcctctcaagtttatcaaaactctgtaaaagtgggtctgccgtagcttctaccggaagcaaaacaggtgtcaca

SEQ ID NO: 80072 - DNA, 338 bp, Zea Mays
attggagttagcgcccatcttcgacgatgagcctaccatgcaaggggaggaacctccctagcgtgatgcccgacgacaaataaacagacatcggaacgtgcggcgaaatcatgaagccagggaacaggatccggtgcagcccgtgtcccgggacgaagcttcggaagtgggagaaactcccaacaaacgagtacactgagaaagacgtaactcccgccgacaggctcaagtttgggagcgagagctagctgaacaagacgttaggctccgacgagataacgctctcctcactcgaaacctgtaccgcgatttcgctcgagcactaaacacgtcgagtg

SEQ ID NO: 80073 - DNA, 432 bp, Zea Mays
aaaaagggtcaccttgtctaacacctttgtgagtcctaaaataagggccaaccacatcatttgtcttgatagccacttttccacctttaacagtcttcaaaacccagtcgcaccatttatcaccaaacccttttttaaccatcatgttatgaagaaagttccagttaaccttgtcataagctttctcaaaatcaactttaaaaatcactccattttgttttttccggtttacttcatgaataatctcatgaagagagagcactccatccatgatatatctgcctttgataaatccatattgaaaatcactaatcacagaggtaatgcagcaggccaatctatttgtcaaaactttggtaataatcttgtaacaaacattgagcaggcaaattggtctgaaggctttgatgtgaatcgcattgggaatttttg

SEQ ID NO: 80074 - DNA, 1371 bp, Zea Mays
aattagagtggcggtccttggcgctacaagaacacccccgtgcttctatcctttctcagttcgaagtccatgatggcgaaccgcgtagggacgaactccggcgagcttgtatcggatgattcacgtgatgactagcgttctactttgacagagatcaaatccaagacctaacgagggtttcccctcaaacaatttcatcaatgggacagtaaatcgatcggtccatggaaacaacgcggacactcgaatgggtatcgcgttcctggtaattaagggggactcactgtaattgggttggttgaggagcatcatggaagcacactaatgctgaaacaaggtagcagagagcatgaacaaacctggaagtggctggccacggcgaggtgcgttttacggtggaggaaaccgtgattgggggaagtgagcaattctcggtccctggtggataatccggggcaaggattggtgcaatagatgtgtgattaccctatggagccacgggtgcactcaatttatagtgatcgtgagcggcggccagggaatttgggttggagatcagctcacgacgacttggatatttcaccgtgctctgcgtatcgtggcgagcgaggagaaaacggtgcaggaggggtaactgactatcctccacgatccctacgacgtggagaatgctttgaggcgtggcacggttgagtgaaacggcgagctccggtgaggataaactcggccggccgcgcggcaagtggacaggatggccggaccagctagcaatcgcaatccatcccgcccagatctttttacccatccccggtgttatccattcctccccgagcacgaatcgagacagcggtggcacgaatcgcagcggagaggtcatcgacgatgaatggctacaggcgatcttctttagtactgtaccatggccattcctcatttagtgcacctgacagccaaagtttagggtgaattttctcttaattttatgtaataacatgatcgacactctttagcaaagttatagctctaggatccagctataatcttggtatagcaaccctaggcaaattcttgctcgatcatgccagaatccgtgcccaaagttcttgcagttgtgctgttagtctgaaattcagacatcaaacagcctgacagcctgactttgggtttaattatctccaaattcttcataacaacaatgtttaatcccttaaacaaagttgttcacctttgatagatctacaaaattgatgtggtgacctagggcaaattctcaataatttggaagataaagagctccaaagttgagccaatgtcactgaatttcagacttaggtttagaactcaaataggttctttttgcaaataggtcca

SEQ ID NO: 80075 - DNA, 507 bp, Zea Mays
tatagccggagtcgtggctggagtgcgtggtggtgaagagctcgtagtagccggagctggagagcatggtgctggagtcggtggagacttgggggctggggtagacctgctcgaagaagagttgcctactcccccagctccctcaaagtggacatactcgatggtcaagtcatcgtacgtcggagtcgtgccgtcgtccaccgccttgtcccacgcccatcctcgcccttcgtcgaacactacgtcgcgcgccgtgcgcatcagtaggccttcgagcccttcacggagccaagagcacaaatatcaaaccacaaatcatgagtatttttatgatttctaactctattggacatatccttgcaaaggcccataaaaagagtgtttttggcctttgcgttccatttctcataattgttctcatcacccaaatggtttgtggcatctctaggttgggggaacccttgggtggcagctttgtagagtccaatgtctatagcctctaggtaa

SEQ ID NO: 80076 - DNA, 363 bp, Zea Mays
gggttaggaagctgacttgggttgccccgctcccatggaagtgactgagggaccttcagccttagaggtggctgctacagagaactcgaccctcaaggatggtgttggtgcttacccagcccccgagggtgttgccggggatgattcagctcatatgggtagcggagctgcaacccagcccccgagggtgttgccggagacgatccagttcgaatgggtagcgcaaactatgacccagcccccgagggtgtccgagcgggttctccctcttgcacttccatggatgttcacgtagggtcttctcctccacactctggttgcatggtgatagcccaagcctttggccaaggagtcgctttagat

SEQ ID NO: 80077 - DNA, 484 bp, Zea Mays
atccactaccacccatatagcatccctgccacgaggggaacgaggtagacccaccacaaaatccatggtgatatgctcccatttccactctggaatttctaatggcttcagcaaacctgcaggccgcttatgctcggccttcacacgctgacatacttcacaggcggccacatacttagaaacgtcaaccttcatccgcttccaccagaagttttggttcaaatctcggtacattttggtttcgccaggatggacggtgtaaggcattttatgagcttctctcaagatatccagcttcacctctgatttctgaggcacacagagacggcctctgaaacgaaccaaatcattctcatcaatggtgaactcccgcggtttaccatcaccaaccctctttcgagcttcctgcaatagatgatcctgctgctgagccgcacgcactctctccatgagagaggattgaataagcatccgagtctcctcg

SEQ ID NO: 80078 - DNA, 470 bp, Zea Mays
actacatccctcttttctccaacattaaaagatatcgccaacctagaggttgagacgtcgtcgccggaggcccaaggaatggacctaactacatccctcttttctcctatagagctaaccttccaagagactctgaaacttacccccggtaaacggtcaccaccactcacatctccgcttccgaagagaatgtcaccatcacggtcgtgccctccgaagtgcaggtcaccgccaggtcctcgacgaagtcctcagacacaacggtcacattgtaggtcttggcgctagaaggcttcgacgggacaagaaattggaccgaggccttcttgaactttgtcaccatggacgaggcattcctttttgccttgcaaaagccacccttctccctgccctccaagggggtatcctccctctctttccccgcaaggacagggtaggagccgtactcaatctacaatttgaacacccgg

SEQ ID NO: 80079 - DNA, 774 bp, Zea Mays
accgcgtcctcgccctacaggccctcaacaaatatcaggctcaaaccaaggcctggcgcgacaacgcggttgtcccaagagagttcaacaaaggagacctcgtactcatccggaccacccggacagaatcacggggcaagctggagccgaaatgagagggtccattcatcgtcaagtagaagggcatcccctagtgcgtacagccttctggtgaagacttagagcactcctggaacattgagaacctctggaaattttttgtttatccctcagggcccacacgcccttgtaattcagcaaacaatgttattccggcccgcactcttttcctctcggggtgaggtttttaacgaggcggagccatgtaatatacccgcaaaagcccccgaaaaaacaaaaggtcagaaaaaaaaaagtcgaaaaagaccgtttcaacagtcttaggcattcgaccaatttgaaatcaccgcgacaggtagcgtagactaccctcgcgtgagacactccgcgcaaaagtcgcataagggtgcagccggaatagcacaacaagtgcacgacacaaagtctcactccgtgcaaaagtcgcctaagggtgcagccggataagcacaacaagtgcatcgatcgaagtctttcattaaaaaagacactccgtgcaaaagtcgcctaagggtgcagccggataagcacaacaagtgtgtcaatcgaagtcttttactaaaaagacactccgtgcaaaagttgcccaagggtgcagccgtataagcgcaataa

SEQ ID NO: 80080 - DNA, 501 bp, Zea Mays
tgtcgatcaagttaatcgataggttctgtaaatatgcttgtgatgcttttatgtgcatggtaagatcgatgccttgtcgtcgtagtctcaagaattttccaaaacatgctaagtgctctactgatggggttgaatgtacttgtgatgtcttgcaatagttgtgtgtcgtgcaagttatccaaaaatggcgaaagatggtgtatgttggtaattggaaaatattcacatcattagccaatagccaagcttatgccaagatttaaactatgggcaatttgatttgaaatcatgcttatataggcgtgcgattaaaataataataataatttttggcttgtgtagtgaggtgatgacatgccgtaagtagtcatcgcttcctctatatctttgagtcgggtcaatgcgcattatgtgttcatcgagatacacttcgcacctagtgtagggttgtgttcacgacgctgagtagacgcttcaagtaatcaagtaggagtcggttgc

SEQ ID NO: 80081 - DNA, 468 bp, Zea Mays
cgccgaagggtagattcatggcggatttcagccaccggtgacgaattggcatctggccgcccgatttcgtgcccgctgtcgcccacgtataccttctacgtgcccttctctccgtctcaaaccggttgccgaggctggaccgacgaccccggcgaggtcccgcggcggcggcagttttcccagcagtaatggcggcggcacatggttggagcgtgggagatgttagagtgggctacgatcccagtgaaggcggcagtagttatgcgccccgcgactccgaaatccccggctcgatcgcgagcttgcgcggtcaaagcggagcaccagtgcgtgcgagatctctggaggggaagcgcctgacagtccgggcccaactggtagtgccagagcgcggtcagtgaagggataaggagagcgttggcgagtgggagctatgcgtagttgcgaggagagaagaactgaggctga

SEQ ID NO: 80082 - DNA, 330 bp, Zea Mays
ccgagtgacttctgctactatgaacggtccttcccatagtggcgacagtttgtgccgtccttcccccgttagaattcgacggaggacgaggtctcccactgcgaaggatcgattccgtatggccttgtcatgatagcgcctcagggtttgctgatatcagactgactgaataaccgtattcaatcgttcttcttctagtacatcgacatcctccagcctagtagcctcagcttctgctatgttttcaaagattaaccttggtgccccatacttgagatcagtaggtagcactgctttcaaaccatagaccataaagaatggtgtgtttcc

SEQ ID NO: 80083 - DNA, 475 bp, Zea Mays
ccaatactcataactcattggttgcggcgtaggcacaatgcctttcaagtaccttgggattcctataactcaccaaagattgagatttagtgagtggcgttgtgtcgttgaccggtttgagttgagacttagtaattggaaagccaaattcctgtcttcagggggcggcttgttttgattaaatttgttttaagtagcctacccattttcaggatgtctttcttcgaaatcccggctggtgtgctacagaagctagatgctattcggtctagattcttttggcaaggaggacatcataaaaagaaatatagactagccaaatgggaaatcatttgtcaacctaaagagctaggtgggcagggagtcgccaatcttgacataaagaacatttgtttactcagcaaatggctttttaaattactcaatgaagatggtgtgtggcaatggctattaagaaacaaatacttgagagaca

SEQ ID NO: 80084 - DNA, 817 bp, Zea Mays
aaagagatagtcaggctccatggcattccgcggaagatagtatcagatagaggaacacagttcacttcaaaattttggaagggcctccagcaagcaatgggcaccaagctagatttcagcaccgcttaccacccccagtcagatggtcaaacggaaagagtcaacaagatcctcgaagatttgctaagagcctgtgtgctaacattcgacagggattgggagtccagtttgccgtacgccgaattcttgtacaacaacagccatcaggccagcatcaaaatgtcaccattcgaagcactgtacggaagaaaatgccaaactcccctaatgtggtccaatgtaggggagaggacactagagggacccgactttgttaaggaagccgaagagaaagtcgccttgatccgcaggagattacttgaagctcagagtcgacagaagagttacgcagacaacagacgaagggaactcagatttgaggaaggagatttcgtttatctcaaggtctccccgatgcgtggtgtcaaaaggttccaaatgaaaggaaaactggcaccacgtttcgtcagtccctaccccgtcatttcccgaataggacccgcaccataccgtcttgagctaccagaattcatgtcagatattcacaatgtgttccatgtgtctcaactccgcaaatgcctaaaggtaccacaaacccacatcgaggcagatgcaattcagattcaaaagaatctccagtaccgggaaaagccagtgaagattctcgactcagcagtcagaaggacccgcaactcagaagtgaaactctgtaaggttc

SEQ ID NO: 80085 - DNA, 616 bp, Zea Mays
cacgtacgggaataggttcctacatcctccagaaggtattagtataatctacttttgtagcatttccaattaatgttgttatgtaccccaacaggaagggatacctcgcatcttataatggtcaaaattaccatatttttgaatggcagcatgcgaggcaaccagttggtgccaaagaagttttcaactacgcacactcatccacgaggaatgttataaagcgatcatttggggtgctgaagataaagtggagaatccttctcaatctgcattcattttgactaaggaagcaatccaagataattaatgtatgcatggcgttgcataacttcattcaggacagtgttatacacgatcgcgactttgactagtatttatcttgtacgaggtatgtttatgatgtagctataggtgatagtagtaccaacacatcatatgagttagacatgagtgtttttagtgatgcaattgctaatgtgttagtgtcttatgtagttatctgaaccgataaataattatattataatggacaaatcatgtgtaattgcaatcagatgttgattattgtgtctgtctttttcttttttttcactcagaatctataatatcagaattt

SEQ ID NO: 80086 - DNA, 466 bp, Zea Mays
agtcttcgcggtagacttcggtcttttcgcacttgttgtgctagtccggctgcacccttaggcgacttctgcgcggatttgtcgcacgcgagggtggctagcgcttagcctcgcggtgacctcgaattggtcgaatgccaaagaccgttgtcgcggtcttttttcgacacatgtttttgcgagggatttttcacacatatattacatggctccgcctcgttaaaaacctcaccccccgggaggaaaagagtgtgggccggtacaagattgtttttggtgaattacaagggcagaatcagccctgatgagtcaaacaaaaaatttgcggaggttgtcgatgttccaggagtgctccaggtcctcgccgtttggcgttgtgagcctgtaagcgctgggggaagcttttgtcttgactataaaggggccctcccacttgggctccagcttgcccttggactccatccga

SEQ ID NO: 80087 - DNA, 295 bp, Zea Mays
cagcagtcgagtctggacaatgcttgttgagatcagtatagtcgatgcacatgccccaatcagctttattcttttttagtacaagaataggattcgctagccactcagggtgcagtacttccctaattaaccctgctgacactaagcaggctaactcggcgtgaatagcttcccttttgtcagacgtgaaacgatgcaacttctgtcgaatcggccttgcttgaggatacaccttcaatttttgctcggccagttctcttgggactctcggcatatccacaggttgccatgcgaa

SEQ ID NO: 80088 - DNA, 826 bp, Zea Mays
tctgttttttgtagccatagccatttggtttgaagggcccaacacatatgttgtaaattaggaatcccaagccctccaagctttaagggtcttgtgactttatcccaggccacaaggcggcttcctccattcacctcctttctccctctccacacaaatccttttctgactctatcaatttttttaatcacccacttagggatgttcatggcaatgaagagataaactgggatggctgaaagcacaaagcgtacaagggttgtccttccagcaaggttgaggagcctagctttccaattaggcagtctatctgcaatcttgtcaacccaattcatcaatatattcctgttaagcttcttatttgaaataggcagccccaaataagtgcaaggaaaggaagaaggggagcattgcagaatgttacacccttcatgtagcaattcatcttcacatcttattgggatggcacaactcttgtgcaaattagttactatgtctgaagcttccccaaaacagtcatgaatgagcttgacacagtttagctcctcctctctaagcttgacaaacaagactacatcatctgtatacagagataatctagtcttcacaatggcaccttccagactagacaacaattccttctcttctaccactctgaaaaggctgctgaggacatccatcaccaggacaaagagcattagggagagggggtccccttgccttaaacctttgcgatgtctgatctggtcacctggaaacccatttaagccaaaccggatagctccatgcatttttaatccagcatatttgtatcttgtacttgcca

SEQ ID NO: 80089 - DNA, 563 bp, Zea Mays
gttttatctactcggtggggtaggaaggctccatggctaggccacacatgcccctcttgtccgaaatatccttctccattctgagatatccattctcgccccaagtcgtgccccatgaattcttcatcagccagtacttagtaccatcactggtctttccataaccaatggctgcaatcccatgatctaagtcagtaccgcatgagccagtcatcacaccactagagtagaattggaacgtcatgtctccaccatccactgccaccgacacaggctggtttgccacggccttcatcaaggcagcctcatcatttgctggcacatcctcgtagccctttatggttgcggcactatttgatccactcttacacttgccatctgcagcagtgtaaggatagctggactccgtggttaggccaccgttattgatgatgaacttgaaagcatcgtccatcaaaccaccctcacaaccttgatcctcgccatggacatcgcaatccactaactcttgttctgcaagagagacgagcttaccggtgctgattttcacgatgccttcggtg

SEQ ID NO: 80090 - DNA, 850 bp, Zea Mays
gtttggtggtgatagagggtgcgatgatcacccacggagtttgtgggtgactagacttagaatttgtacatggttataattggctcaccatgctagagtagtgaagtactagctcgtagagagcatttgatccttgcttggatcaagggatagctacactcttgcatgaatgctccaatgaggattagtgaggaatgctgactctctaaaacctcaataaaatattaaggagtcttctaacccttactttacattgcatatttatttttagcgattcaattgaaatatccatattcttacgaagcccaaccgagataatcctcccgagatgactaaaacaaccaatcctccccactatttatagaaagttattctaccttcctaaactactcatagataaatagagtctatccactcagtcaggggcaaaatggactaactcctggattttcgatctgacaaccacccactctttacgaagttgcttcgcctcgatgtgcattttgtgatgaaaccacgtgtcgcctcgattcccaccggaactgtaccgtcggatttgaggcctgaacctggtgaaaccagcaaactgtaacgctgggtgattttgagactcaaccgctgaaacatccacgtagcgtactccatatgtatccccaaccaagacacgtgtcccgccgatccacaaccacatcggcaacaatggtccgctcctccacgtcctcgtgcccgtcagtgtccccatgtgtcagccaccatagatagtctctcagcttctccagtccctcgatcaagactcgtcgctcgtccttcgccacaatcgatccattggcacgaacccgtgtaaccttca

SEQ ID NO: 80091 - DNA, 517 bp, Zea Mays
actagcgtgtaagaattcctaagactcagagcgcccctggtgaggacgacgagttattttctaaagtctataaggggttttctgcaaagtgatctggcgaagaggtatagtctgaatctggccgttggatggaaaaccgagcgcccagattagttgtacacatccacgaaccggtacgcaaccgcgaccgtcggatcagcaatcagcgggcctgatttaaaatatctcgattgaatcccatgcgccagatctgaatcggacggtcggatcaagatgagcaaaagggtacgacctgatctaatcccaacggttcacaccaaatcggacggatggtgtccatccgccctaaactggaactctgccacggtggtgctgacgctcagtgtggcggcgccatggccggaatgtggtcaattggcgctctgccgacccaaccagagcgaaacctacaccgaaaagaaagggggaagaaggcggacatggatgggcaacacataccgggaattgtcgggcgaag

SEQ ID NO: 80092 - DNA, 426 bp, Zea Mays
acctcatgctctataataggaccaaccaggtcttctgcctctttgtctgtctctgctacaaaaatgtcccatgaacgatcacccagatccacaacaaaagcatgacttaaaatttgtttcaaaaaaccagcaaagtctcttcgcacaattggtccaacaaaccacccacggcccaatggccaaatcccgcaagctaggtactcttcaaccaagtccctgccactacaagtaaccacagcaaaattgaaggcctgatcatcgcgatccctctctgcaactacatagcaccaaaaagcctcaaactaaaatgaagacataatgcttggctgaggccatgacttgccctcctgatagcgcacataaaactagctctccgtccaccctcacttgttctttgtatagggggctaactcaaccaccttcttc

SEQ ID NO: 80093 - DNA, 975 bp, Zea Mays
tacggtcgggatgggtcacgcgaagggctactctgatttcaaatttgagtcgttcagcttcaatccaacgaccgcgatctgatcgcccctgcctaccggactccggcggcggaatgaagccccccacggcggcgccattgctagcacgcatcaaagctcaaacctgtgcatagtgttctaatccgagtagtccactacaatgccctaaggaaggagactgcgataaaagtatacatactctactgcgcgccgcaggggaccttggtcacggcgagcgacggatctgggacgtcgctgcggctccgacgagcgattcgaaccggaatcgcccacaattctgcccaataacgtgtcgcactgaatccccaaatggtgccgaagctcctgtgttgcttcccacgactacgtgacggcgtaaaccagggtgtccacgcgacggcgttcttctcttccccttagcaacaatggcggtggtctacagcgcgacttaaagctgatgcaaacgaaggaagaaaaggggaacgcggtctcttttgtagcccgtacgagctggttctgagtgccgagctggagaggaaagcggggtggtggttgcaaaccccccaacgggtacgcgatcgtgggacgaccgtggcggagaaggagtccgcgtgatgaactggcccaccagtcagccaacacgcatggttcggaggaacgagtagtggaccacatggcagacagatcgctccacgattcctgcgtggaagagctgacacatttggcccacaacgtcagtgaaggatgaagcaagcgtgtgcgggagggtctagccgggcgggtggggaacagtcgctgacggtgcgaccccacatgtcggtgcatgaacatgatgcgagcacgcgctggtgaggatgcaagcgggacccacacgtcggcgatagcaatggactcggcgcgcgcaggagagggtaaacgccgagctgaccgggcggc

SEQ ID NO: 80094 - DNA, 298 bp, Zea Mays
ctcagggacacggagacacttcttaagttgagatacgtgaaacacattatgcacatccgatagactagcaggtaactcaagttggtatgccatctctccaactctcctaaagatcaagaatggtccaatatagcgaggggacaatttgcccttaactttgattctccttattccacaaaatggtgacactttgaggtactcatgatcactttcctcaaactccagtggtcttcttctattatcagcgtagctctttacctggtctgagctaccctcaaattctcccgaattatacgga

SEQ ID NO: 80095 - DNA, 1347 bp, Zea Mays
caagaacattagtcatgcttgcagtaattgcttcttatgcatctccaactttttcactagatgctttggcagaagtaggaactggcgctttcatagattctaaaatagcttctaaaatgctagccattcttctcttcctaggagttgccgttgcagtactcgatggctttgacaaccctgctacggctagagggctcagcacctttggttattttgctgcctttctaattccggctcttttaccgggcttgtactagcttcgatagacatcgcaggagttgtttctgtggctgagggggcaccctctgcactttcaataagcttcggcacctcggccgtcctaataggcctcggcctacatgtcaagaccttggccctcttcgacttcggtgcactagaagaggttgaagcagcaactttccttttccccttaccttcggataggaaaatagtaatcagggtaaacaaacccaataacatcaaaaaccctgttcaacctccttttccctcaagtgccgaaggcaactgtcatggattcgtcttctatccttgagtaggctccaagtagatcatcactcgttgcctctatagcgtctagccaatcatcatttggctcatcaaattgacttctgtaccggaaactgtacttaagataaaccaagctagcctgactggagctagcggcagcttccttcagtatttcccattcattctcaagaggccatactttgaaagcgatgtgttcttgaactaaatctctggtaccgatgtaggtacatatggtgttgaaagccattaggcacgcttgcacctcattcccaattgcaattgatggtcttctaatgccgaaacgtgaccatatgggatgttgaatgatgcccctcacatcctccctctgattcatatcattcttcacgtaaaaccattgcttcatccaagagcccgaccacttcttccaaaatgtaggcacatgataatttgcctcagagcggggtacgaagctgtaaccgccgaagttgttatggtattgttcttttctagttgccttcgtctcgtaagataactcgtgaatattgcagaagcacctagcatccggctctagtccctgactcctcatagcccatataaaaacccccactttgataagagcttcaggggtaagatgatgaagatatatctcaaatgacttcagaacctcaaccaacatcttgtggagtggaaatcgaagcccaactttcatgaagctcttaaagaccaccacctcgtcatcttcgggaaggagaacgatgctttcccctagacccgcactatagaaacatcatgaaaatatttgcccttcatcgcttc

SEQ ID NO: 80096 - DNA, 1489 bp, Zea Mays
cttgtgagtctatgatagtgtataaaacccatgggttccttttcctctcaacccgcagtcactagttaaccagaacagtagccacatggaagaaagggatggagcggcttacaggtggcagtagagctctggggaagatatcggtgatgttggggaggttatggtggtcacgttgaggagcggctcattggcggagatggctggagtcagtcaggccatgtgcgtatgcgatggatgtcaacgacggagaggatcctggctaaacgatgattgtagctcttgaattagtgggtcgggatcttcacaagatgaagtggaggttatgtgcgagaggaaacgagtgaaggtagtcggtagggctctgcccacattcaccagcgggtgttcaagtcctgtgagtggtagtttgccattgcagtggggtagtgagtgtgggaactagctgggaagcttcacagagtgtcgtggagtgtgacgacggtcttggtcggagctaaggaggtgcgggatgcactggctctggtggtcgagctccggtgaagaaaagagttcggtggagcttgttcttcttgtgatgtttggtgagcgacttggcaggggcaagttcgatagcttgggcacatttgctaggattcgttgtctagcttttataaacgcgatgagggcacaaggcgcagcggtggctaactagtgtgtaggatcacgcgcacggctagtggcgcctcgctcttgccagccgaggtcgaacacctggcatccttgtgtgtgcccctattattttgtgtgtagtcactcatccaaacccaatcttgccaagattgttgtacaaggattgttccttgtgccttaagctttcttctctatgtggggtcaagatatttcgagctacgggtgaagacatctggtgagctcaagtggggtttgtctctctgcttcaacccgagacaaaaatatgtcttgtcttatcaaacaatgtggtctcgagttgaacttgtaccaggggttagttaagataattatgcacaactttcataatgagggctaaggaatttgagttttgcaggttagggcacatatgtggtatttgccataggactgatttggctttagtgaaaatcttgatttccttatcccctctctcactcatttgaccctttagaggtttctttcttcattttctatggaccaagtcttaacatattttgttcacgacttaattaagtagaacttttattaagggcttaacccttaagtatgtaattaggtttagtttactaattgatcttgttgggggtcttcttctccgccgaaggtcctcaagacaaagacatcatcgacaaagtgattctgaggactctctttctctctgccgaaggtcctcaagacgaagatcttgtctggaaaagactagctagtccctagtgatttatgttacgattatgaacaaatgttaaggttgtaaatgtacttttactcgggcggcgtctcg

SEQ ID NO: 80097 - DNA, 734 bp, Zea Mays
gcggagctggcgttccggtgcgtggcgcccgacaaggacgaccggcccgacgcccgggaggtggtggccgagctcgcgaggatccagacgatgctccccgagcttcccggccggatcgcacagaattgagctaaccacatcctgacaacttggcttctatgctgctatcttgactaaggattagcatcacatcctgaaggaacactccaaggaaggcagaccaatgtggagctcacatcttcccgtgctggttctgtgacatgaatctgtatgtatgagcattggccagatctgttagttgtgttaccggtcagcactacactcgtcaggttatgtgtagtcttgttctgctggaaactggaatgtacaagctctccccccaaaagtaattttgtccgatccattttcctgggttcctcagccaattctcgcactcagcatttcagttcagcttgccaagcggtgcgcgtcttgttccctactgccaatcgccacggaatgacccgtgggctgcagtctgcagcctatctatctcgacgcttacgcgctgtccatggcttgcgttgcgccgcacgcacgcctgccaaatgccaatccggtcccaggttggttcagaagatcgtgtcggctctcccgtgccatctgatggctgctgcgatcacaggactcgtgaagcgtcgacgcgatcagggtcggaaccgtccaacgcgcctgccgtgcgtgcccgccatgaa

SEQ ID NO: 80098 - DNA, 512 bp, Zea Mays
ctttaatgttacctcatgacataaggcatttggagaagagcatgatgaatatcgattgaggtcttgagattcatctttatttgatgaatcatcccaagtcttgattgaattgagagcttagcctttgcatctctttttcttgtccttgggtgcgggcttatttgggtaattttctccttcttaccacatcgaacacatcttttccttattccacctacctagcacaccaactgtgggtgtttagtatcatacagtccaccacatggtgggttttctcgtagaggacacaaaggatgagttgcattggtgtacatgacaaaggatacaagatttagataggttcgggagccaaaccgttgtatcttgtgtcctatatgggggcggttaatgcttatatcgtgtatatgtgagtctatatgcctaattagagtagactaggaaatatgctctaagctcatatgtgaatcgatcttgtcggtaccctgaaactagggtaccccttactactgtat

SEQ ID NO: 80099 - DNA, 848 bp, Zea Mays
cgttccagcctccaggcgtttgccccatgcttcccccacccactggccactgtccctgtgtgcagctcaccaccatcccctaggccccaacgactgcagcctacaggagaggaattgttctgaagaacagatagagaaagcgtcactagatccagtaattgtatgttgtctaaagactttaggttatatttccaaatatctattcctctcttaagaatcgttattgtcatatccatatcattattgttgctgaacttactcagggcatggttggtttttccaaatatcaattcctctttgaagaattgttttgtttatcagtagtgttagttcagttgctgctgaacctacaaagttctatcgttgaagcgttagttcagttttctgtagaaacatatgtactaattatccttgtttttggaaaatttagaaaactatgttggttccacaatcctcagtgtgcccaatgttggtattctttatatcagaataatcaggttgaagtctagccggagaaccctttactaaaaatgctcccaattcataaccaccgaacaattttttgttgcccacaagagtccaactgtataaacataaaaacaaagtactttatagttgttggcaacactgtaatgcagttacactattattcatgttcaatttaatcgagtaaagatctacaatcacacaatataatgcacctctcaatacaccacagttgcgtcttataaatagaaacatttctctatagatcgatgaagtacttaaaccatgcctgccctgggttgtctggtccttatttaaaaatatttttatgttcggtttgaataggagcaattgcatgagcg

SEQ ID NO: 80100 - DNA, 920 bp, Zea Mays
gttattaaattgggcgcgaaatgtataaagaagaagaacaggaaatgccaaaagtgtggaattgatgatggtcacaacagtcgaatatgtttgtcgttggaggagaatagggttcaattgggtagccttgctagacgtaagagaggatgatcgcctggatctaggaacaaggttggaactaacgctcctcattggaatgagacgacaacttcaaaaaacacacagttgatattgacaacagtgagtcacccagtgactagtatgtggcacaaatggtgtatcatatgttatccgaacatatttttttgaaatggacggtataatggattaatataagcaaaaccagttgcgtgtgaaatcgatgtccaatatctctgattgttgaagtctatgaaatgtgacgtatatcttctactaatgttgcataagtgtgattaataaaacatcgtatatgataggatatgagaactgtataatggataaactatctgactagaaaagtgaggaatgagcaatatgtatagtaaataaaaaatatcatagagtaaaactgtggtcggcataccaataagtaaagagacagcttaaccaaagcatcacattaaatgaattggtcataataataggaaatgtggtatgcagaaatcatgtatgcagattcacaaaataaaaacgtcataacatctaaagttcacatttaagcttaaccaaagtatcagaacattttacgttcacaaaagaaagtgtcataacatcctaaccaaagttttgtgaacatctgatgttcacaaaagaaagcgccataacagcctaaccaaagtatcagaacatctgatgttcacaacagaaagcagcataacggcctaactaaagtatcagaacatatgttgttcacattccatctaaggaagcatcctaac

SEQ ID NO: 80101 - DNA, 559 bp, Zea Mays
cgcaatcttcactattccgccgggtcttgcctacggcgagatgggttcaccgcctaccatcccgcccaatgccacactccagttccatgttgagctcctttcttgggccagcgtcaaagacatatgcaaggacggtgggatttttaagaagatcatcgttgaaggggagaagtgggagaaccccaaggaccttgatgaagtttttggtatatatgatattgtttgatatactctagtgtcttagtgctgatagtttgagatgcggggttttgacacttcttgctcaattgattcctgcagtcaagtacgaggtaaggctcgaggatggaactgttgtgtccaagtctgatggtgttgagtttgctgtcagagatggtttgtatcttggaacttggaccttcctcaatgtattattgtgatatctattctaagttcttcattttgtaactaacaaattggacaatgtaggttatttctgcccggcactttcaaaggctgtgaagacaatgaagaagggcgaaaaggttctcctcaatgtcaagccacaatgtaagtttta

SEQ ID NO: 80102 - DNA, 715 bp, Zea Mays
caaccctaaggaacatcaaggacatcacgtacgtaaagtttatttggtgagtttagggatcaatttagtttatttctcattttcctgttgaactggttcagagcggttgaactgcccctagtagtggctgaaatggccttcaacagttgaactggttattcttagttcgtttcgagtttttggtgaaattttcaggtgtggcctattcatcccctctagccactttcaaaatacaccccaactaagtcattcaatacacaactcttgagcattcattcctataggttagagaaacattcccaacacctccaagtgatctaagtgccccatttgagtagacttcattatgatccatattctagggagaaaagagagtgtgcaattgtgatagagttgaaagagagagagagagagagagagagagtttgatgttattatgtcttggtgcgaggcacccattgagattgtaaaggttagcaagagcttcgacgttgtcaagtaccttatgggagccaaaggtctcttgatcgattgagaaaacaagagagggctcgagtttgatcttcggaatcactcgagagggttgaaagagacctcgtcctttaggacacctcaacggggacatatgttctttggaatcgaacctcggtaaaccaaatcggttgtttttgtgtgtgtccatttgcgatttatgttcttactcttctattccaag

SEQ ID NO: 80103 - DNA, 294 bp, Zea Mays
cacaaggacatgcgccacacccttcggaactgcagagacttcaagcactccgtcggacacggccgacccttccaacctctacctcctcctccgccgcggggaggaccaggagaaccgcgacaaccccagcagcaggaggagggaggaggtggagccttcccgcgcgttgacggagaagtcaacgtcatcttcggcggacgcggatcgcaggagaacagaagacaacaaaagctcaacgatcgccagatattggtggcgaccaccggtcctcccgctccataccgatggtcggag

SEQ ID NO: 80104 - DNA, 554 bp, Zea Mays
gacgaccttaatggtgcgaccaaattgagtggaaacacaagcaaaaaagtggagaagagttgcaaaagtatcatacttcgaaagcaagggaaaatccattaataatgagaggaattatctagaatcaccaaataatatttataaaccgaaacacctgtaagtggagaggtccacaaatcagtttatgagatcaaaattgtgcatagcctgagaggagctgtaaaaatgaagtcgaacatgacgacctagctgacagacatgacaaagatgctcagaggtgcccctattacaagaaatgactgaactactatacaacttggacaatacagtggggtaagatgaccgagtcaacgatgccaagtactagatgtaatggaagtagtcagtgcgtgcggtcgtgatgaggttgaaggcgatgatgtagtggaagcaggatatggagaagtggacataggcaatcacagggtgtataagggcctagagctatcacaaccagcgagaagactctagatggtgagatctttcatgaacaagccaaacgaatcaaactcaat

SEQ ID NO: 80105 - DNA, 405 bp, Zea Mays
tgtttactaaatgttagttttaagatctttaccaaagtacttacaaatcgagtatcgggggtagcaagtaaggtaataggcccttcccagacagcttttatacgaggcagtaatatcatggaaggggtagtggttctacatgaaactattcacgagatgcgtagaaaaaaggattgtggggtgattttgaagcttgactttgagaaagcttatgataagatcaaatggccttttgtacaacaaacattacgtatgaaaggtttttccgaaaagtggtgttcctggattaatttagtcacaacaggtggtcatgttggcattaaagtgaatgaccatgttggcattaaagtggaccctctttctcctattttattcaatatagttgtagacatgtttgctattttg

SEQ ID NO: 80106 - DNA, 506 bp, Zea Mays
agaaaagaaagggtgcgacttctgggaagactgctgcttcggctacttcaagcgagcccgcaccgaagaggaaaaagttgaaggtccttactcactgaccgtgctacattgaaccggtcacaatgcctgaatttggcgatgagacttctttagctattgaatccaaaggacctgctcttacgcagaggactgaagagccgactgcaatgccgaagactgacaaaattgaagaaccgagaatcgaagggacgaaaacattagaagttctaagcccttcggcaggagtggaggtgccgaagacacaaaaaggtctaacagcgaccccaagagaaaaaagatggctagtgtactagatgtgctggagacaataaaagcttcaagctctactccagggaaagttgccaaggcttcggaagcacagattgaaaccgagacaaagccgaccgaagccaaagctacaatgagccgggctgacgccgaagctaggccatcagagcccgccaagg

SEQ ID NO: 80107 - DNA, 484 bp, Zea Mays
caggaatcaaagcccggcacggaataagctcttaaaaaccaccacctcatcatcctttggttctggaactattttgtcactcggtaaccttatcaagtcatcattgttctttccgaaataaccaagcttcttcattaaaactaagtcatcaagtttcatggtggatctgccaaactcaatatggctgggcttgcttggacttaagacaccgacatcatcttcagcatcatccccatcagtgttaccttcggcatcagaagtgttcttctctagagcacccttctcttccctctaagcaaccatcccagaatctttcataatttatgaaataggagccatctcggttgcttctgcttccccaccctcattcgtcaacctagcagcggatctaattctagccattgtagcgttgaatcgaaggtgaactaagagttttttgcgctaaagacgaagcacaatcgaaagctgagaaggatgcaaacac

SEQ ID NO: 80108 - DNA, 1042 bp, Zea Mays
gttgggagaaaactaggctcaaagttgtgctatcagtcagtcctatgtctgaattttcagaaacagtgaagttggatgaacttagagctcgattttgagtaagatcctgtgactatttgatggtgaacactgtaacaaagttaaagctggtttgttaggctataactttgatgcagagagttggttgggtcactacataaaatatggagcaaatcgaccccaaacatgctctatcagaccgactgaaggagctacgcgatggtacagtaaccagatcagatcgctagctcagtaaactcaccgccggcgacccccgtgcgtggattcacgctgccgcagtgattcgtgctcggtgcagttggataaagcagagggagtaagaaatatcaccaatggatgaactccggtcactgttcattccggccgccctgtccgcttagctcacggtcgcttcagatctcccctcgccggagttagacacctcgcagccttgcgtcacgtgcctcggcactttaaccacaccgtcgtgactcgtgttagcccatccagtgatcgccggtgaggttgccacagtaatggccaccaatcgcgtgcgctagtgcacctcctcctctccgaccgccactgtgtgagttcaaattcaccggtcaccactcaagaaccctataaattgagcacaccctcggctccgttaggtattgcagcatccaatccacctgctcgtgcctccaattaatcaatagagcccacgaattgcttagttccccaaatctattttccgccaccgtgaacaagctctcaccgtggtcagtgcaattcaagtccggtcttgccctctactctcttgtttcagcactcttatataccactgatgctcctcgacccattcaattaaactagaacgcgctagatcgttgggaacactcgtgctcacccgtggtttgcactgcctccgtggacagagtgatttagagctcgaactatgaaattgatcgaggggaaacgctcgttaggtgttgaattagggttcagccaagttagg

SEQ ID NO: 80109 - DNA, 476 bp, Zea Mays
agtcgattgctccgtttgtagggcatagtggtcaccctgagttaagtaagaatgtaagtcaatcgtaaatgagccgagtgtctttgaaatctctctttattgatggcgtatttccattttacagaatatatggtcgccccagctgttttgaaatacagctaggggtaaaactttctgaggtgctctatgttccaggagttcccaacttctgtgccatccatctgggtgaggcgatacgatccgggccgggtgacttctgttactatgaaaggcccttcccataagggtgataacttgtgccgtccctcccccgttagaattcggcggaggacgaggtctcctattgaaaagaaccgctgccgcatagctttgtcgtgatagagccttagagtctgctggtaccgtgctgattggattactgcattcagtcgctcttcctcaagtacatcaacgtcttccagcctggtggcctcggc

SEQ ID NO: 80110 - DNA, 284 bp, Zea Mays
ggaaccatcagtgcataggtttggtcgtctagaaagagcatctgccacacggttttccacccccttcttatatataatgcggaattggagacccaacagcttggttaaggctttttgttgccagatagtcgacaacttttggtcttccagatgggttaggctttgctgatcagtcttgatcaaaaattctccatgttggaggtaagggcgccagtgatcaactgcaaataaaatggctagatattccttttcgtaggtggacaatcccaagttcttaggaccta

SEQ ID NO: 80111 - DNA, 448 bp, Zea Mays
ggacggcgtcgggtatggaggatgggatgggggcgccatgtaaggaagggagcgcagatggttgggacctcgccgtgtaaggaacggatggcgcatgggattgccgtccattttcgtctcggtagaggatgggaatggtggacgacgccatcagtgggggagcagctccgatggtatgaagggagggtgccaggtatggaggatgggaagggggcaccatcagtggaggatgggaagggggcgccatgtaaggaagggatggcgtgttctatgaagatgggaatggtggacgacgccatcagtgggggagctgctccgatgggttgtggagcgttgtggggaggatgggcgtgggctgggacagtggggcccagaaggcatagagtaaagcgctggaggtccataaggcagagagagcggagcactagatggtgtgggcagaaccgtg

SEQ ID NO: 80112 - DNA, 582 bp, Zea Mays
aaaatatatcggaagcattcacaattcaatctagcacaaagaaaagtctggccaatctcaagcgcaatagggccagccccaagagttaggaactcagcaaaaatcctcttcaagcaacttccacccaccagctctaagaggggggagaggaggccaacgttctggaggaagattcaatggtcaaccaagaatgttgttttgtcttttctgtgaagataagggccacacaacaaagaattgtcaggtgaccagacaaaacagaaggaacttgtcgaagcatggcaaagccagccgaaggaggtctttcatacatcttcgtactactccccctatattccagaaggtgttcaacatcatcaacttaagccaacatttaggctccaatgtttcgtcaagtccatcaccaagctgttggatggtacctacgtcattcatctaaagatccccaccatatgagtagacaagagctgctcaatcttaatttacggcacaagagatgcttcaccatgatagaagggagttgttcgaagcttgaactgtgaacaacgtggttctagaaaaaacacatctactagggcctga

SEQ ID NO: 80113 - DNA, 703 bp, Zea Mays
taaacgattctagtttagcaactaaggtgtcaagctaggtagatctcacttatacaggtctagttaacatggtcacacaagactatgcaactagtactcaaataaatggagagctcttacagtgagcaaagttcacaaagcctaagcgtacattaggattactcaactagtaaagttacacaagctaaactggagagcgaaacaaaagttagctatgcaagtcaagcaaagttgttaagctatgcaagcttactagcacaagagcaacttctttactacacaagtaaactagttacaagaacaacactaaacatgagcacaagtatgaacaagtgatacaagctagtgttagggatttacaaactaatggaaagacaaatattgtcacgatgatttttgtctcgaggttcggcggtttaccaaccacttactccctattgtgacaagcccaatggtaatcgtcaatcctaatgctagtggtgacccatgaatcatcctctcccatgtggagtgcttgcacaaaagttctagtacttgatctgactagaccacttgttgctcttcacacctcactctactagtgtttttcttcgtgtctcccgtagggtgagcatagtacctctcacaaagccttctctagagacatgcataacttcgtgtgggcctctatacaaccacaacctcttagccaactagaaggtgg

SEQ ID NO: 80114 - DNA, 567 bp, Zea Mays
gaaggatgtttttaattcatggactcacaaagtagtccagtaatctagatattgaacctaaggctcaacaaataatagtggtgctcattgatatgttgtgaactaggacatgggaacaactatagcacatcaaaacagatgaacacgatttcaggaaactatgacaaacattcaaatgcagcatcaaacattcttctatctaccagatccaagaggggaaaggtaatccatggtgtccattgcacgaacatttaccacaaattttgaagatctactaaccgtagggacgaaatcaaggtttatctaactaacaacaaataagcatgacctccttatgccaactttagtggttcttaccccaccgattgtagaatggtgctcgttgaagggatgaaggcgggggaaagcagaactgacaccggtgtggactaccagactcaggaagatgacaacgacgacgaggatttttatggttcttgctcgcagtcgaccgatgggaccgcttcaacaccatgcccgcctcctgctttgtgctattgttcaccggagacgttgactagattcgag

SEQ ID NO: 80115 - DNA, 668 bp, Zea Mays
caacagtggtcgttcgttctgttcactctgtgaagacaatggcacgtgggaccctaatgtcagtacagtcgtcttgctcacgtcctcagatcccatcaccgagcagagagtgggcggcgccgcattggtaactgaatgtgcgccatatccggttgggagttgatcccaacaaaatcctaacaaatcactttccccctcactagcgaaaagtcagggcctcggaggcttgtcctcatgcgctctccttatccatacgggtctgacgcctacgcagttgtgcacgccggaaatctcgcctcgtccttgggttctgttgattcgtataccaagctataaaactagacgctgtgctaagccaaggcttcgtgaaacgcgtagagtcgacaccccctgatggcgcgggatggggccggtgaaaattccttaccggtgtttggagatccgccgttgacgctctgcaccgttgccagaaattttggtgccatacacgccggtgagtctcctcacatattttcacatttacactctaggggcatatcatcattggattggggattggagcactagagcctcctggttggatgacgccgccatgggctgggtgacgctgctcgtgggcaagatggtaccgttgccgtccatatggggttggacatctgggattaaat

SEQ ID NO: 80116 - DNA, 300 bp, Zea Mays
gatgataccgctgaggttgccggtgatgggactggcggtggcaagcgtaggcgtattcgtcgtggctagaggagaagtgctgggagcagtggtggcgttgttgctcaggacgcctgtccggtggcaccgtctttgagcccgcagatggcagctcttgaccaatcagtgagcgcgctccgaccttgctgtgtcatcaaacattccaggaggattatccaagctgaagagaatctgcggagtgctctgttcgtcaacgtagttgggccagaggattcaggtcgcaccgctgaggtcttgaac

SEQ ID NO: 80117 - DNA, 759 bp, Zea Mays
agttagtgcttgaactagatcaacaatatgactgacgtaggcttggagcaggcgaggcagttagggcaaggttgactcggtgttggcaaagaaggcctgacatggcattgccggggtacgacctaccgagggaaggcaaggcaagatggggtgggctactcaacatggtgttggtagggtacaactgaccaggggaggtcgagcaggcctaacacaacattggtggagcgtggtcggtcggtggtggggcgcaatcgatcgggggagggcaaggtgaggctggcgtgggttgggcatgacttttcgatgaggttggtgctagtgaggtgcgaccagagttgaaggagacggaggcgtcgatagaagaggaagcgacagaatcaaagaaagaaaaagagtgaaccagtttttgtgtaactaatgacattagcgggtaattttgagaattctaccaaattggagccggtgaaacacctcttgaggagctccaccaaaatagtgaatctagcccctataggggtttagggtttagcccctatttgtgtagacactcggcaaaggctccgacaccgttacctggcgtcgtgacgacgacttttctttgtcgagtgtctcgtggcatacggcaaagcctttgctgagtggccgacaaaaagtactcggcaaagaagcagctaccgatatacagttcgttgagacttcttttcgcaagtattttctaggctgaagcactcggcaaagtagctatgtctggtaatg

SEQ ID NO: 80118 - DNA, 387 bp, Zea Mays
cgactagcgaggccgcgaggtggaggtggtgagacgaggagagagagagaggaattaatcgattaattaagtccgataatattaatccgccatttatatctatatcaaccgtgatcgctcgtcgaggttccccacgctgtacatcaattcggcaaaatatttttcattccccctttcgactttcgtttagcttattacttgtatttttagctaagtaaagtgtatataatttgtttttcgtagcatgaccatacgtaaataaagttaacttggatatttgagctgcaagatgtatatataggcgctcgtcgctttgcgcgtcgcgtacgtgctcgtgcgatcgtgcccaacaaccaccgagtcgtgggttggcaaagcttgttacta

SEQ ID NO: 80119 - DNA, 551 bp, Zea Mays
atcgatgtctggtatggttgtggtgcttgtttggggtgatctttgcttgagttcttgtggaggcatggcctctgatccatacattagtttgaagggagtaaatccagtgcctcgggattcgatcgtgttgagtgcccaaatgacttcgggtagttgcttggcccacttgccctttttgtcgtctaaaagtctcttctttatggcgctgaaaattttgccactggcgcgctctagtaccccattggattgtgggtcgtagacagacgcgaatactgccttcgcttcgatggagtcgtagaattctatgaaatcctaattgtcgaattgttttctgttgtctactgtcaactcggaggggactctgaagcgacagacgatgttctgctagaagaacttgtgttgtcttcgctgttattgttgaaacagctctggcttcgatgtacttagtgaagtattcgactacgacaaaagcaaatttgaggttgacttgcgtggtgggcaatggtccgacgatatcgaggccccatcgctgcagtggccaagtgtgggcg

SEQ ID NO: 80120 - DNA, 470 bp, Zea Mays
aaaaaacacctccaacagaaccccttttttctaaaagatcaacaagtcaaaaatccaatcctatcggtcttaaatttaggcctcagctggattggctctattccttcttcccacgtcgcccaacttccaccgacatttccgatcaatctcctccccacgccgtcgctagcgcacttgtcccctggccctgcaacccctacggcgccgagccaccggatggacggaggtctgttccacactgccactactgctcttctccctcgcagcccgaaagtattcttgatataattttctatcattctctgctctactacgatcatgaacctgatggccaaaaactgaacctcgatgtcttttacattgtgtattattcctcttcttgtactcacccatcataataagcaaagcatggtctacttcctcatctaactcaatatccttaagatgcctcattgatctcttaatttcag

SEQ ID NO: 80121 - DNA, 334 bp, Zea Mays
gataagcctggaagcttgagcggtagtgaagaaaaatatagattttcttccttgtcttccattgaattaacgtgagtaacagtaggagatcgacgcgagggagctactagaagttggcgtgcacaagataacgagagaaagaaacgaggcttagggagataaggagaattttaatttttcttctccaaaccattaacaaaataaacatgtacatattttgggttctgaaatctgggtctaaaaaaatatgaacaggtcgaatcaaacaaaaccggcgataaaatttgaactaggtttgattcgatttaatttgaaatctgataattcacccgca

SEQ ID NO: 80122 - DNA, 562 bp, Zea Mays
gttggaacgacacacagaagagacccaacctaactggcgcaccaactatcatcgtgtgatagtgagggatagaggaaatgtacctcgtttaggtttggtagggttctaggcgcaccacaatatcacctaccacaaccagttggcccagtccgaaaaacataggagtgaacacgacaaacacaagggaaccacgagggagacaattaaaggacatagataggttccgaccaccagagcataagcgtggaaaggacatagataggttcaagggaaacacatagatacatcctctttgaggcggattgtattgcttggaaatagctaagtgccacaaagatggctaccagacctaagcgtagaaagcatgaaaaatggatccccgtgtagggggtcaccctctcctttttatagaccaagatagagagggttacaactaactactgggctaggaagccagcatgacccgtcctattttaatggagatattgttgacatcagtatgaggtcctatagaggcatgcccctgcacgtcacagatgacagggtcagtgcaaggcgtgca

SEQ ID NO: 80123 - DNA, 358 bp, Zea Mays
ggacttgagacggtttgttgatcgtcgtggactttggtctcctctgagatgagatgtgttgcttagtagccgccgctgaaatttttaggatgaagacaagaagtgacccagcaattttcactcccttgttcaagttcttttgattgtctctgttacttattcatctcccttgtagattcgagttgtgattccatgaatttgttgcttgggttatatgttttaatttgtcgtgtcatgaacaagatttagtctttgatataagtaaagatattgaacagttggttgtttggtcccattccactcacccactacgctttatgtgtgtacaaccgcaacacagttgaggaaacgcttgcgt

SEQ ID NO: 80124 - DNA, 493 bp, Zea Mays
ggccggtcccccttcccctcatcacctgtgcttccgcgaaacaacgcttcgaattcaacagtgcctaaattatgtgacacaaccctaaactttcatatgactactatatagcatgtgttacacacgatcccgaggagatgaatgatgatggtggtggcgcaagtggggagagggggaagggatgagggatgattcaaataaagtagttcatggggaagggagatgagttatccaactatctggaccgttgattttgatagtgtgttaagtttgagtacaatatgtttggtgaatttagtgggataatgagtatgcggtgatttggttgtgtgacttttgcaaagtttaaactgatggattatatagtggtaagagcataactcttttctattatatagatatatgtaactttctatctttaatgtatacaattttatatctaactttctatctttaacgtacataccattctatatttgatgcaagtttttta

SEQ ID NO: 80125 - DNA, 450 bp, Zea Mays
taataaaaaaatatttacacttaagcaatcttagcttatttccgtaaagttcagaccaaacctctaagacaccaaaactgcacaaaggtccgagataaaaaaacaattcaaccaagtgatggttggatgccttgaataagttttccagcaagaatatcaatctaccgaaacaagcaccggaaagactgagaagaggcaaatcaaagactttctctaaatagcccagtagtgtcgctctcctcgctgtcattgccatggcctgacagtgttgctcgttatctgactagtagtgtcgctcacgctgtgtggtagtgtcactcgaccaaaacttcctaaaattagaggaacctttgtagacaacaacaacgagaggattgaagacaattccaaaatttgaacttcaaaagatcaacccttagatagatcaggaattacgaacttgagtttggg

SEQ ID NO: 80126 - DNA, 489 bp, Zea Mays
aaataaacaacctaaaacctaaaacttaacccccctaactctgctcgtgtcagctgctataggtttccctataatgtgccatatattagcctctcaatatcagactcacagaatggttccagaatcttgaattcaatctccaagtactctctcggaacccgcatgttcaaaacctgaaaatatggtgttattagtgtatcaaaaatgagtatatgagtggcattatctagggttgggaggtgaggagaaccagaaatggtttcttcggatgcgcttattttttctgatttaggagaagcacatcctattgaagttaaacagaagagaaatgctaccattattaaaatgccagaagttgaacagaagggcaatgcatacctatatacacacacacacccccttattaagctacgatgcaatatgtttaagcatgaaattagcattgatgagggatgaacaaacctcatgcaaaatagagatacagatgaa

SEQ ID NO: 80127 - DNA, 813 bp, Zea Mays
ggaagttctagccccatcctgagcacgagttctggacgacatctgaagaagaaaaacatacttgattattgcatgccatgattacacaacctctgttacattattccaaacttgttctaattatacatactcaacttatacaactcacttttccttatttagattacataaggaaacaacatactactacactaatctattcatccgcgtccttggctgctcccgctccactgctaacttcaggagaacgatcattcgcgatgttcatggaaggaggggctccaaagagatccaactccccataaggtcctccgccagctgctcatgatgcaccagctcccatcgccgcaacctctggtggcacattccgatgcaactggtcatacaacacgtgcacttcctcgtgcagagtattattatacgctttcagattttctagggctacacttagctcttccacccaggctcgggcagtcgcctcacaatctcaggctatagatcgtgaatttacaacccagtcaatagccatatcccgctccacaatctcccgctgcaaacgatcaacctatgctgacaactcagcgatgcggcgactatcacgtgtgtgctccctgcttccatggcgcagttccatcattaaacgttcaactctgacctctagatcccctatgggatcattactgctactactgctccccttatgccgaggagccaactggtgccgaggtacaccctgaggcccggtcgcctttcgttgggtagtcttggtgcgtgccttgtctctataagaggggaatattacttagtgttgtt

SEQ ID NO: 80128 - DNA, 641 bp, Zea Mays
ggtagtggccgatcagccggacgactcgactagagtatcaagtcgtccaggtcgtccgactagtcgtcaactaagcgcgattagtcgtccgactagatggtaaatcgactaggatttgtccaggcagctaaggttttctagtgggctactgggcttctattttttcagcccatctacagtaaaataaaggcaacgcaccgccagcccttgaaacttttcctctgctctgccgagtctagaacacacgctgcggctctagaacaccaccagcagctccagaacaccggcggtggctccaaaacactagcgacgagatgaactcctcatctcaaggtccccccccatctcccccttcctatctttcctattgtctgaattctgatgaatctattggagaagctgctgctgctttttgcttggatgatgatatgctgttaccgacttccctttggtaagtctgtaacttgtgtttcctggtgtctctcaaaggtgagtggagggggatattggaatgacacagtgcgtaggggagaggacgctaaccacccaggttccctgtgtcggcgctgtgcccagccaggatgacccaagatgatcccgccctaaggaggatctttatttcttcgatgtctaatacaaac

SEQ ID NO: 80129 - DNA, 328 bp, Zea Mays
aacttttgtacaaagtattctctagcacatttctattatttctagccatactcctcggcttcctaattttacactcgtatgtggttccttatggcctccttcttaaatagagcctccttcataaatagagttgatgcgaccgaagccaacttaggacgtggtggtatatgatggttgacccctatgctgagtggtcccacaaagatgcctagaggcagtacttatgaactgttaagctttagtataaatctgctctactacaacgggttgctcttcctggcttggcccgtcctttctttgtgttagtgctgagtcatggactgccaat

SEQ ID NO: 80130 - DNA, 1100 bp, Zea Mays
gaattctctatttatagcaacagtcgtccgacgctaatttggtgttgtggtatagtggtggtttttttgacagcccggctgcagtgtcgtcaaaccccggtgagacctcactgtccctgcatgccttgtgtttgatgtaatgtcaaacctataaatcgatgtcgtttcttgcagccctctgtcgatgacgcgtccgctccttatcctagcacctcgttgtaacatggaatacagggagatccacaccgttttggcaatgccgcgcagatcccgtcacaccaacattaaaaggatgccaacacctctcgtcctccgctcatcctgttcgcatcctctgcaacgtccacttcctgtgtgcgcgccttccatttcatctggtgagtcccgagtacatcccgatcctaattcttttttgctatgtgtctgtgtgaacatcttgtggtttcagttgcaggctggcgatgccaccgcttaattttatagataagtttaacattggattgttctgacttcttgcactgatctgccatgaatcctgaaatgtagtcccatgtgtgccatatttcctccatgcatgattattaagtctgtgttcttgaagtttccaatctcacacgcatgattaatgtgtagttgaggtttaatctgttacaaaattaaattttagttttcaataatggttgctcacgcaagtagtagtttgtagaaatacacttattctattcatagtgtttttgcctggtattctaagagataagcactaccatttgtccttcagctaatgttcaagtaatctgaacactactataaattaatgcgcacatcagcttcttttctgtatttggcaatggacaatgaatgtggtagctgacctattcagtagtaacttattgtgttctcttaatatgctgcatcaatgcttaataaattattaacatatattgttgtttaggggatatccgctggtggttttcttcggttattttgttgggttgcttcaagctcatgcaaactatccttgcgtatcaagagtgaacaaacttgtaaagttagtattttcagtttttgttccatgtatgtattactcactcgtgtaaagt

SEQ ID NO: 80131 - DNA, 526 bp, Zea Mays
gggtttagtcgcgagattgagtttagggtttagagtttagtcgcaagattgagtttaggctttagggtttagccatgatccatcttctttttcttaatgttacctaaataggtgctatcacacaagttgaagtgtggcatctcaatacatgcttgtttgaccaacatgtttgtaaataaatgcatacaatgatctttctattatatggtgggggaacttacaataatgtgtgaacactattgaccaacatgtttggatataaatgtttacaatgatatattgaatatatggtgagacaaacgtacaatgatgtgtgtggacattattgaccaacatgtttggagataaatgcttacaataatctatcaaataaatggatggtaaatgtcaaagattgttcgatagtgaatatacggggtatatcacgagaatgagagttgaaggttagggcatgagagacacaataatttatacagtttcgggctcttaatgtaagataataccctatgtcctacgtgtggtggat

SEQ ID NO: 80132 - DNA, 1395 bp, Zea Mays
ccagtacagtgtgtaatggttcttgtatatgcttgtttttttttctttgtctgtgtatttagcagccacgatcaacgaggttggttggtcgcagcagaaagtctttatctccaaataattaactagaaacaagaaagaaagctaaacatgcatagagagtctatatgtacgcgttcagggtccatggactattctatacgtctcccaatcagtacagttgtggcatggaatttctacctccgttttccacttgctgcagcagtcggcaatatgaagtgcatgtatgcatcacttgagagttgacacctcaaactctgccaagaagaaagaaaaaagaacccaagactactgcattgttgattgtcagagatgaaaaattaaaacccatgttccatgtaaatggctcacatgcattgcgactagctaaacctcttatgaaattagaacagggcagggaatcggcgggggggtcaatccaaaggatgcctctgtaatgttctcttggcattgtattcacgtggtcagctgtctccctgtggatcattgctccaccccaattcaattttaaatattagacacggccacatcatgataggttcaatctaacccacataaattaaagggtcactaaacattgcatagcagaagacgacagagtattagtgtagcaaagatgaaggagaaagttgacacgtatgtactgtaagcagtaggtgaggaggagtggctggctacccatgccatgcatgaggccatgacaacagcaagattagggatttgtcgcatgcattagcatcacaacagtggacagtggagtatatgttgtccaccatattagcaggcattcgtgtattaactaggaactaaagttgtagcaggagacaagacaagtatgctatacctacatacatcgaccatatgcatgcagcatgcagtagtagtggtgacatgtgtacaagatagaggggtgacacatgtaccagcagtcggatgaggactccacaacaatctcactatattttacccacacttgttcccaatctacatgacagaacaaattcatgcacgtacaatatcagcttacagtgacgtctctacccgtgcattaatcttaactaatttcctgctactatgaaaatggaaaatcaaacggaacagaagtacagaacaaggtctctgcgacgattgatctttcggacaagacgccttaattgactccctgtctcttacagagcatcggctttctaattttctcaccgaacgcatgaatccatccatgagacggaatggcgtacgacaccacatgatcaagtgacctccatagtccagaccaggaggcaggaattctaaacagaggttgcagccatgcgtgagtgcacatgcgactgctgtcaa

SEQ ID NO: 80133 - DNA, 495 bp, Zea Mays
cagcatttaagcctaaaatggcttttggactgtcggtctgccacaacgcttatcggctgatcgcccaacacgacgattgatcgctacatatcgcgattaggtggacgataaaggcgatcagctaccctgatcgaaacgctacctcttatcgagcactaacaactgattagaccaactaatcgcgattagtcggacgaaatgtaatcactggtcaagacagtaggcaaaccatagtctaattgtcctctcatgatgagctacctgtttatgttattgtagatgcgattaacacttcatataacatgtgtgaacctaaggttgaaatgtgagtgtcgaacgagggacaggaacttctagtttcacacctactatgaagtgctcgttacatgtaaatgttagcaatagcatcctggttatgcattacatagaaaggtagggagtggacctaaataggttgacagtttctgtctgaaaggtatcccttctttattgtcg

SEQ ID NO: 80134 - DNA, 449 bp, Zea Mays
tcacaagaaaatggagaaaatacaaaatacacaaaaatcaaaaggaccacaaaaagttaggagtgttagatccttgaaccttgcctcaccaagattaactattccaaagcaattagttggataatgcatcactagaaaacatagttgttcctttccttccaaacgttccacgtgccttccaaatgttccacgtggttagatgaccaaaagaggctaggatttcattgaaatcatggaaaccatattgccttttgatatgttacaagcaattgatccattggttccacgatgcgcatatgtggaaagagcaactaaattgacatctttcatattttctttatgagaagacaatcacaaatgataataaaatgtggtcatgtcttttcattagtagtgtagtataatggtagaggaagaaggcctaagatcaatagctcactagaatcact

SEQ ID NO: 80135 - DNA, 869 bp, Zea Mays
cgaagaccggcaagatgggtggagaagtgtatgaacccatgtcgtgtgcaaaggacatgtggggcagttggttcaagtcttggttttatattgatttggagaaaatgtactaggtgtggctcgatcggcggccagctctatggtggcccgtgactttgttgcttgccctgacttcgaagtcagggagaatgattatgatgaatgggtgttgcatcgtgtgagggtgatcagcagcgatagagacttggtcgaaaagtatattgcatattaagtatggccactgagtggaggctggacagttggtaaaatcgtgtgacgaaggatgccgctaaagagtgccttttttgagaaggatgacattgttgtgagtcccgccattgctgtttagcttggtaggtgagacggggtggccttcgttagtgatgttgaagcggaggctgttaaaattgttgggaagtattctgcgaagactgaatttacaagaagcatagaaatccaagatggtaatatttgtctcaatagggttttcgaaatgagggagctagagtatgggccatatcccgaagacgtagaagaaggggaggaggaagattcgagtactattgcaaaggtgaaggaggttatcgaaggcagcgaagacatggttggtttgaagcggagggctttgcctactgaaggtaaaatgagaaaaagcgtgaaggggtcgaggtctccgaacaagatggagaccgtgcctgaagattttgtgggtttgaatgttgaaatgactgagtttgccgaggatctagcggagactatgggtgaagccatgtcacccatgtctcttgtggcagcgcacgcgagggcggccacagtcacttggggtaaat

SEQ ID NO: 80136 - DNA, 376 bp, Zea Mays
tttcatacgaatctggtggtacccactacgcaaatcaactttagaaaagacgatggcaccactcaattcatcaagcatatcatctaaacatggaatagggtgtcgataccgtatcgtgatattattaatagccctacaatcaacacacatacgccatgttccatcttttttaggcactaaaataactggaacaacacacggactaagagactcacgcacgtaacctttgtcgagtagttcttgcacttgtcgctgaatttcttttgtttcctctggatttgtcctatatggcgcacgatttggcaaagatgcaccaggaataagatcaatttggtgctcaatccctcgtataggtggcagcccctctggtatctca

SEQ ID NO: 80137 - DNA, 715 bp, Zea Mays
ggaaaaagagactgaacaaagtttttgacgccatcggcttcgtctaccctgattaccgctattcgctgcggggacaggggagaaagagaaaaattgttgcttcgaccgccccaattaagcttgtgccaaagggcaaaaagatgaaggttcttacccatcggtcgcgttatattgaaccggccgtggtgcctgagtttggcgagggggcctcttcagctgttgaaacaagagtaactgctccgactacgcagagcactgaagagccggttgtaatgtcgaaggtgcttacagttaagctaattgaaacaaaggctgataaggttgaaggaccaaaaattaaagaaatgacgaaaatgccagagattttgagcccttcaacagaggtaacagtgccgaaggcacaaaagggttctgtcgcaactcctaagaggagaaagatggcaaatgtgctagatgttgtgttagagacagcaaaatccttgaatcctgctccttcaaaaaaaattgccgaagtttcaaaagcgcaacccgaagttaaaacgaagcaggcagaagtcggagctacaaaaattcaagctgaaaccgaagctgggccttcagagcccactgagacagagcctgctgaagttgaagaaaaagcggtagagcaaattgtgtctaaaaaggttgaagctgctgctacagaagcttcaaaagaaagcactgattacatcat

SEQ ID NO: 80138 - DNA, 647 bp, Zea Mays
agaagaatggtacagtggtggcggcttacctagagtcatctgtcctagcagtacatacaaaacagacgtgtaggccctttcttgtcttgcacaaaagaaaaacttttttgcttgaccaagctctgcagtatcaaatacctggaacagtgacacctgcaaaatgagtaccagtctgaaagtctatgtattggccaaactaaagttatttctttcttttagtggacaacaataaacctgaatcatatgactatggtcagctgggaatataatactcttaggtctattcgtttgactttaatttgtaccggcgtctactgcttcttctggtgttctccagttcgtacgggcttctactacttccggtgttctctcatgttccacacatggacaggcgaagcaaactgtaagttatccaatcctgaaaggaaataaacaagaatagaaccataaatgctcattccgtgagattgaacaaagaggcaaagatattgcctaaggaaaacatagtgcaagaaatgactagtgtaaacaagaagcatctgaatttaaacagtaagtttatccaaagggaactgtagctttatggaagatcagtataatagaatcctagcagacgactttatttattgctaatagtgtatgataaa

SEQ ID NO: 80139 - DNA, 450 bp, Zea Mays
ctcaggacaaaatcctggaggggtgttgctccagccatataccacaaatgcccttcagtggccacacactgaatcacatttagagtatccggactaactctctcaaagacacagaaattcctatttctccacagctcccaggagactagtatcaccaaggagttaaatccctttaacacctccttaggcaaagatgcagttggctatgttgatgttgactcggcgaagaggcttagtttggaagagtgggtggtgactggtgaagttgttgcttgactcatcacttgaacttgagcttatgccttcacactcaactattgctcaatcgcgaacaaagcctctttcttcctcctttgctcttctagccttctcttgaccaacatgcaacatgagttgagtacctcatcttccaaagcactcgcacatggtatgcaatctccttgacctggc

SEQ ID NO: 80140 - DNA, 1220 bp, Zea Mays
ggcttaaggaccatccacctttgagacaaaggcagcttatcctcgttacaaggtcaagctttaagctcttttgacaattaatttacttcatctagtttcaacaaagatgcattaaagcatgaatgaatttttgagaagttaaactagatatgaagcagggataaatgcaaaggacatgctttctcttaggtacatatgtaaatgatagaaataagttttacccgttttgtacctttacttgtagacgctctcttcattgtgtttttgtccttagtcttgtttgcttaagacttatgctcaatgacaatgtgtgaaaatattttgcacaagagagagttcttacaactagtgatcttttctaagtcatatattaagtggatcacaaattgtataaacgaatcatgaattctcccttttctttagtgcatatcaagatagatgtcaattaaaattaccaattgaaatcaaattaaaattacatgaggcactaagaagtatcagtgataattgaagttgttcaatgatcaaccaatcgatgcgatcaagagaacaacataggcattagatttacaatcaagctcaaaaataggagaatccaataagcatgctactttagaaatgaaagcaacaatccttgatacaagcgacattattttaacaagttggattgatgtgaagtagcatactataagagaaacattatttttatgcaagagactatatgaaattattaagataaagcaatagtctcaacataatcaaaatataagaatggactccccctaaagatatgcatcaagtaattgaaagaactgatttcgatgcattcacctttaagtacataaaggaagactcatttacatcttgatcaaggctcataaatttagcaataagcaacttgagcctggtaatctcataatgaaaaaaaaggatttagaatgcttacaaccacatcattgattgttgtgaagaccttattgtccaggtagatgttgttgtccttgatgttcttcccttttcatttgagtgtcctccctttgtatttgtctctttttccttccaaacttattgaaagatactcaagagacatgttaatagcgcaagggagtatatgggaaaggatgatcactttagataattagcatacataattcatcatccacaagtcacatagacatgaagtaaaatccttaacattagtgcatttcatttgagaaaaa

SEQ ID NO: 80141 - DNA, 309 bp, Zea Mays
tgacgagaggtgttgggcagacccacgatgaaatccatgctgatgtcatcccatttccacgaaggtatagataggggttgcaaagctccagctgatttcaagtggcttgcctttatcctctgacaggtgtcacattccgatacatactgggctatctccctcttcattctggtccaccaatacaaaggcttcagatcatggtacattttggtgcttcccggatgcatagagaatttggagagatgagcctcgtccaagattttcctcttgaggtccttgcttttaggaatcaccaatctgcttttgaac

SEQ ID NO: 80142 - DNA, 692 bp, Zea Mays
caatagtggtgttttgcgatgtttaacaacttgtgtgatccaattattaaccctgctttgtatataagagtttcttcagaatatatcaattcatgtatcatgattatggatattatgtggatattttctatctatgaatggcccctgcactttggatcgcttatgtcattgttagcaatcacataatattttttcttttctcttagatttaatttgtataatcatataatcattcatatattggtacaacaggatttggttcagcttctcactttgttttttaatgagaagaaacagacaacaaattatagtgaaggctcctctcgtccctcgtcgcttggtggatcacccccacgaaaccagcctagccaaagacaggtatgtgcatgatgtcattcttggtagcctatcatcatctttggctcaaagtgcttctatagttaaatggatgtagtgcaagttttatttttattttctgctctagttgttttctatgctacttccttggtattagttcaccgtgcataagtgatctgcagcaaatgttcttcttcctaaccaactgtatatgctcttaattgtcctctaatttcaaggaagtagcatagatatggaatggaactgtcaagggtgtttaaatgggttcaccccttttaccatcttggagatctggaagaaacggaatgcaataa

SEQ ID NO: 80143 - DNA, 1041 bp, Zea Mays
tcctgctctgctagctattggaaggaggttccttggaggtaggtgccgagggaatcttggggccatttaccgagttgtagtaggttggtccgggtgccttcaagtgagggcagttattcttaaagtgactggggtccccgcagtgccaacagacatttgctggcggttggttgcttgcaacggagggtgcctgaagggagctctgactctactgactgtagcgcgacgaagtgggtccagatggtttattgaagcttggacccctgggtgggagtccaaagggtcgagttctctggtgacgttcttgctgttgagctcggaggacttggaatttcctcttgaggtgccctttttcttcctcttttgccctttccacttggatagccttgttggagaggtgagagaagctgaggaagtcttggctggcgaggatggtcttaagctcgggtcttagtcctttcagaaaacgggccatctttctggactcggtgctgacatcctcaggcgtgtaacgggccaactccgtgaacttgtgcacatactcactgactgttctcccgccttgagttaactcccggaattcatcctccttgagttgaactatcccctggggtacatggtgctcacggaaggctgtttcgaattctacccaggtagcatctctgacagcctcactgaaagtgtcccaccatgctaaagccattcctgaaagctgatgagctgccagttggacacgctgattttcggggcatccgatggcttccagcttcctcttgatcgtgcgaagccagtcatctgcatcgaggggattgctggaccccgcgaacgtgggaggcttgagtctcaaaaattctcccatcctgtcctgtggccttccaccacctgggcactggttttccagacttctagtgaggacttcaatgagtcgggtttgattggctagaacttgggctaggtctagtggtaattccggaggtgcggggaggtgggtctcacccccttctctgccagcctctccttcagctctcagaggaaatcctg

SEQ ID NO: 80144 - DNA, 615 bp, Zea Mays
cgccacaccgagccatgccagatcagccggcagaagatctgctattgtacatctcctgcacgactcacgtggtgagcactgcgttagtagtcgagcgggcagaggaagggcacacatatccagtacaacatcccgtctatttcatcagtgaagttctgggaccctctaaaaagaagtatcctcaagttcaaaaactattgtacgcagtacttctaactgctcgtaagctccgtcactactttgacgaccacaaagtcatagtagtcaccgggtttccaataggggatattcttcacaacaaagaagccattgaaagaatagccaagtgggcctgcgaactgggagctcacgacattgagtttcggcctcgcactacaataaagactcaagcactagttgacttcgtatcagaatggaccgagcaacaagtaccagacaacccggaggctgcagaagtatggcgaatgtatttcgatggctcgctgaaactgcagggagcaggcgcagggatcctcttcattgctcctggaggtgaacaactcaaatatgctcttcagttgttattctcagcatcaaataatgcagcagaatatgaagctctgatccggattgaac

SEQ ID NO: 80145 - DNA, 1070 bp, Zea Mays
ggcattgacaaacatagttgcttttgccgccgaagctgggggtgacgtctgctcaatagcttgcatcacattcatcatccgtcgtttcttctgccgctcagccttctcctccgtagatggagcggattcctttgattacaagaggctagtcagatctaaccttagaggacttagcagtgcaaatgggatggattcaattattaccttcagaatttctgaaacttcagcaacagagggtgaaggaggacctatagtcttctctggcacatcttgtaccttcgtatccgcagaagatatcttgacgagtttacgtttcttgggagccaaatccttcgactccgataaagttttctgtttcttcaaagctttctggtcctcctttacatatcgagtagcttgcctactcagaatactgacaaccctttttacccctccagcccctttgtcaagcctttcatagtcaagatactcaaagttaatagcatccataacacggttcaaccttcgtttcggccaggagcagaaggctgcagtcatcagctggtcttccttcttcgtatagttcctaagactctcgttgcacattgtttctatcaattctagccattcagtgcatgactctttaaatgtcttctgaaatttgaagcggtaagggagccgaccaagttcatactttttctcttcttccttcttctttggcattccccaaccgctagaggttgggaaagttctgtttgccaaatattcctgcactaaatccctagtgccaatatgcccagccaccacctcgaattctacttcggccaattgacagggacaccctagttgcatattgcacaaaggtcgagtcatgccgaaactcagcttcaggggactcattaccattgtcggtaccctgaatcaggggtacccattactatagtatgaagacacagtgcccgtgcggctatctctagccgagaggtgaacatcacccgaccccaacacgtgggcagtcccaaggacgccatgtggacaggagaggtgatatactccaggataccatcagtaggtccggacctcctcaagaa

SEQ ID NO: 80146 - DNA, 435 bp, Zea Mays
tgcggttgatcccaagaatgttgcggctgtggtggagtggaagagaccctctagtgtctctgaaatccgaagtttcttggggctcgctgggtattatcggcgcttcgtaccaaatttttccagcattgctaagcctttgactaggctcttggagaagggtgttcccttcgtctggtccggcgattgtgaggtcagttatcagacattgaagagcaagttggtggacgcccctatcctagctttgtctaagagcggtaagcgtttcacagtttatacggatgcttcgcgtattggtcttggctgtgtgttgatgcaggaaggcagagtgattgcttatggctcaaggcagttgaggaagcatgaggggaattatccaactcatgatcttgaattggtcgtggtggtttttgctctaaagtcgtggaggcattacct

SEQ ID NO: 80147 - DNA, 485 bp, Zea Mays
tgcccggttttagctaggagcctaggatgatctcgctgcaagcaagaatatttttcaccgttgtcgttataatgatctcatctggtcgcctgcttactactatgtcgtacccattaatcggagtacgtcgtccgtttcgcaggttgtaaaacgtaggcgtggtgcggttgccagcgcattgtaccgcccttgtttctactctttctgtgtccgctctgcattctgcaactgcaagttctgcagcaatggcgcgacagcaacgatcgggaataaagcggccgccgccgcatgggcgctcaccggaagcaagcataaaggcggccggcaaattttggttgagattaaggcgagattgaagaccactactaggactcgggttgcttagcctcataagcaagctgtgatcgtagccgtaggcgtggcttcagcaaagctgtgaatctacctgtctatgatcccagtagatgttctggtatcagtcaggc

SEQ ID NO: 80148 - DNA, 600 bp, Zea Mays
tagaacaccacgcctgcaagtttacttattggctgacgctaccagaggagccgtgcgatgctgctgcagcagcagcaggtacagctgcttggatcgagcttggacctagtagcagcatggttagttaaacctaaccgcggcgacgaagactaattacaggaactgacccaataaacaagtgcatgcatgtgtcctatgtttggtgggacgtttttgtcgccggtcgatcggccaagagcgccgatcctggaatgtgatacggagagacggacgatctcgtcgtctgaattttctgacgaaatggccggcatgcatcagtcgcaagggtggcgatagaagccattctcaacttgctagtagtaatcagcaccgggcagatgttaaggtagcagcaacgggccaactactgggatagaaaccagcgattggagtggacgaccagtaaatctatgttcagcgcgacatcgtcgtacttgctgctttggaaaagctagctcttgaactttgaggccttgataactgtccttgtgtaacatagagcatagagcagatcgatgatcgtgttgaacctgtaagagttagaatacgagtaattagaga

SEQ ID NO: 80149 - DNA, 302 bp, Zea Mays
aatcattatagccatatatgagctccaacaccttgcaatggtcacatagaacatttccaaacacaagaatgacctaaactaaaagttataatgaacttagctcttttgggtcccttctaggttctgactttgatacttcactactttcttgtgaccatgtcctacttcttgagctaggatcttgagccttatgacttcaaacataaatcctaagaattacctcaatggttccaagtcacgttcttatgttgtgatcctcgatgcacaagacccttctcatcttgaccaaccttgacttccta

SEQ ID NO: 80150 - DNA, 706 bp, Zea Mays
tctattttctaaagtaaaattagtttattttcactttagaaaataggtttttggaggaagggtcttaaacaaaattttccccacgaaaaaggagtcgagattcgaaacacgaaggaaaattagagtggtcaggactcaggagacgaggacgcatcacctggatcacaagattcttcctgaagagtgcgttggtctgcgcgaggcagttggcacccattttgcctgctcggctcctccctctggagagaaaatggggggagctcgagaagagaagagtagaagaccctgctgctacacttgggagcaggcgtgtgaaggactgaagccaccagcagtgcagcactacatgcaaatgacggctttgtaggaagcaaaccatcaactctgcaatctgcatttaggcgtctacagaggggcgttgcatggttgaggtcaagttgcctcctccgaagaagcgtctcccatggcagttgggttcccgaagaagcgtatccgcaagccgctgcacgctttttcggtggcgatcccatcccatggcacgaccgctgtcgctgtacctgtacccaacgctgcttgcgtcgttgcctcctccggcccgcagcaacgaacagatcgagcaacagcaaccgaatgtgtccaggcacagttgggtggccggtgcaagcgctgcatcatcacgtcacgtacttggcgtcccagatcctgc

SEQ ID NO: 80151 - DNA, 574 bp, Zea Mays
aaaaaatatggagttctaaggtcagtccgtgaagggctcacgactgctccagcaaaaatggagcgacagggcagtcaatggcgggcatactagaaggacccttgcgcatgagcgccaaacgcatcactagcttgcattcgagtctcaggaatgtctgacacttggcttatcggtgagaggcagcaagccatcgggtctggtcaaacgaagtcgataactatatgagttggtgcctgggagtatgaggacggtcaccagctgaccccgcgcttgaatcctgcgaaaggaactagggcctcactcggaccactcggttgcaactcactaagcgccattgataacccatcgaggagagcatggtacagctcacctctccccatccccgcaaatgggacatgcaggaaagagtaaaatagaaagacgaaacatgcccctcagatggatctctatatcgaacagagactcaatggctcagcccgcacacacatggcaaatgggtaaaagatgcgagaaaggaccccctatttaagaaacaaaatccttgaaacggataagggtcatggggacccaaaac

SEQ ID NO: 80152 - DNA, 622 bp, Zea Mays
gggagttccactggtcgtcccttgcgaggaaacgtttgtccagttcagacagaagggctcgggtctggttttcgagggccagcgtgaggcttccctcgatgggagtggcagacgacatagcaaggaacgttcctctgataccaattgttagctacagctagagaatacagaaggtagcagaattagggaaggagacaacaggaagaagaagaaggtggaggcggcaggaatacgagagtttctttcagtagggttcacaatgttcaggtttgatgtcttacacgacagccacccaaagaacttaactccgcccacacacagagagcagcatgcaggttacacccattctaggccttggactcgagggttggcgtggagctggcgacgtcgacgctcgtctgccacttgggccacttgctcctgtgcgtcgggctggatttcgacctcctgttgctgggcttccgactgaagaccgtccggtaggctcacactcagcccatcaccatgcatcgccgtgcgtacgggtaggagtaggacagtacagtaggagagtacgttcttcgttttgctgtcgcgttgctcccgctaattcccacgctccgcacccactccaatcaaattg

SEQ ID NO: 80153 - DNA, 511 bp, Zea Mays
cctgcgagctgggagctcacaacattgagtttcgagctcacaccgcaatcaagactcaagcactagttgacttcatatcagaatggaccgagcaacaagtgccagataacccagagactgtagaagtatggcggatgtattcgatggctcgttaaagctgcaggggcaagcgcaggaatcctcttcattgcacctggaggtgaacaactcaaatatgctcttcagttactattctcagcgtccaataatgcagcagaatatgaagctttgattcatggactgaacattgctatgtcactgggcatcaagagtctgatggtatatggagattcactggtggtcataagtcagataaacaaagaatgggattgctcgaatgactcaatgggcaagtactgcatgaccgtctgaaagctagaggacaaattcgaagggctggaatttcatcatgtggagagagatcgcaacgcagcagctgacgcattgtcaaaactaggatctagtcggactc

SEQ ID NO: 80154 - DNA, 308 bp, Zea Mays
cccaaggcttggagtgttctggggaaggtgacgttgatgctaccgacaccatccaacataatcttcttaacctaactttcttgaatcacagggtcgacaagtagagagtacttgccagggtgattgaagttgatccactggtcagctcgtctgaatgtgttgaggtgttctgaccatcgatacgacgtcgaggcactgtgggttgccaccaggacctgccgatcgatgagcttctgctgccttttgctctcatgtgacccatggccctcgaagatgacattgacctccctgtcgatgcatgggaaggc

SEQ ID NO: 80155 - DNA, 640 bp, Zea Mays
agtcaatagtagcactacactgcgggtttataacccagatacccgaggactcttaagcaaaatgtcgcagcgaaggggtattgggtgagatcgaccgctcgatcccggtccgacggaccggattagatccgcgcatgtctatcactctctaaatagcccccaccgtcagatctgataccaacagacgacatacaacaacgccctgcactgacctaaacctttagattggggatctacgactccgcaactccatacgctccgatctcgtccgatcagatcagacggctcgaatccgtcccagcgaatcgttatgcgcccaaaaatcacagccgtccatcgaatcacccacggcctagatctaatcttctacctctcgcgccggagcatggcggcgccaccctcggattgcagcgaaactcgccggagaggcccaaaacctatgaacgaatgccctagcttccaatctgcccgcttctatgcgatacatggatgacaatgaataggatcgagcaatcgtaccagagcaattcgtcgcgcagagtactggtcacagacgagcggcggatggcagtgctacgacaagaaattaccgcagcagtaccgtcctgatcctccaattacttccccaagagctcccgcg

SEQ ID NO: 80156 - DNA, 639 bp, Zea Mays
cggtgtgacaccggacttgaaagggaaattgccttaaaccatttcttatattttggtgcttgataaccatcacaaccattcggactaactagcttgcctagtctttgattcacaggttcataagattcaatagttcagtttcttagtcagaatcagctcagactcaaccaaataggggtaaaacatggaatagatgaactaccaataattctactctttggataagttcaaaataccccgaggaacatattcaacacttctagaaagattgggaagctcaaaatcaacatatctctattttggagctagtttgagcaaaagaagaaatatgagtgaaagaatcaaaatgttcatgatccatgacttagactagatggaaaaccacttgagatatttttctaagtcatacgatctctctctcaagtttagccaaagcaacttggagaagattgttcaaagatcaacgggaagtcagaaactcaaagtcctgaaatcgccaagtgcggaccgttcggccccttctggcggaccgtctacgacgccattttgacttcggctaggaactaaaaatcatggatagtccaactaaaccacggactgttcgtctatatagtgtggaccgtccgactataattcatg

SEQ ID NO: 80157 - DNA, 694 bp, Zea Mays
cacccgtcagatggtgatgcatggaaggctcttgacaactttgatctagattttgccagcgatgcaagaaacgttcgtatcggcttggcaactgatggtttcacgcctttcaatatgaccgctgcgtcgtattcatgttggtctgtcattaccatatagtacaaccttccacctgctctttgcatgaaatatgagtttatgttcctatgttttgttatacctaggcctgagcatcctagcgtacgcctcaatgtgatgcttcaaccactgattgaagagttaaagaacctatggcaaggagtggaagcctatgactacttcaagaaggagaaatccaatctctgtgttgcgtatatgttctcggttcatgattttatggtgtatggtattttatctggatggagcgtgcatggtagattgacgtgtccttattgtgcataagatacagattgttttcatcttagtgctggtggcaagatatgttactttgattgctatagatgttttctacccttcaatcaccccttcagaaggcagagaaaggagtttaggaaggcaccatcgtaacgaagggaccgcccaagagacgtagtgggatagaaattacagaagagcataggaaatttgtcctagacgagagtgggaaaaggtatcaaggttttggtgaggagcataactggactcacatatgtgg

SEQ ID NO: 80158 - DNA, 512 bp, Zea Mays
cgacaatagggaatgaccgctcctgctgtagggtcgtggaccgtccggtctaggccgcagaccgtctgtgccgccgcagagggcaccgctaggcggtacacccctagtgtttggtgactagatcggcgccaacacactttttggcgactctgatgaggtttgaaggttgcaaatcaacaaaaatcggcttctatggccgattctaaagatctcaacgatgtttctccagaccgcgacacaaggctgactaatttatcgaccgctgagcatgaggagttagaacactacatgaagaaatgggaagaggagtttcatcgacaacaagcactaccaaaatctggctctttgtcgagtgctcagaagcatgaatttatggagaagtggtacctctcatactttagtatagatcgtcaccagaaggttgtccgagagagggaaataaactttgattctctgtcagccttgctacaacagctcccactgtaaataatgtcacatcatttgaagatctt

SEQ ID NO: 80159 - DNA, 516 bp, Zea Mays
taacaatcaaagtgtatgcatatgatgagatgacctatgggatggagtttagggagagataaaaaattaggggggttaggagattaggattctaaaccttgggttgaaattttgggatgttacaaacctaccccacttaaaggaatctcgccctcgagatttagactggatttgagaaaagataagggtattccctcctcaaagagtcctcactctcccaggtagcttcctcttctccttctctgctccactaaactttacagagtcttacttctgagttgcgggtcttccggactgctgagtcaagaatctttattggcttctcttagtactgaagatctttctgaatctggattgcctcttcttcgatgtgactttttggtacttgcaggcatttgtagagctgggacacatgaaacacattgtggatatcagacatggattctggtaattcaagacggtatgctgcgggtcccactctgccaatgatgggataggggccgacgaatcgcggtg

SEQ ID NO: 80160 - DNA, 376 bp, Zea Mays
gtcaagagcttcggaaaaagcttcgggtgtgggagtggcagtttgttcatacagaagttgttctgaagcttctcttcccgtttctttatctccaatttctagggattcctttttggcgggctttgagggcccagcttcgggtttggcatgactctttgcagcttcgacttcagtttgctttgtttcaatttgcgtttttgaaacttcagatgttttccctcgagtagagcttgaagtctttatttcttccagtacatctagtacgtggaccatccttttcctcttaggggtaactgtaagatctttttgtgccttcggcactgtcacctctgccgaaggacttataacttctgatatctttgttctctcgacctcc

SEQ ID NO: 80161 - DNA, 703 bp, Zea Mays
ttggcattgtaatattataggcttatgactggtaaaacagcagccccagctgctctaatgaatctagtgcccaagggaataggataccatgcaacacagtacctggatttgaagagagagagagagagagatctgttttcaacacaagtcgccccacaaagttttgcaaatctagatacatgtacatgttaaattataatatcaccaaataaaaggaacatagaacataccaagatgctggatgaagatcatgcagtctggcatccaaattcaaagccaagttatcagccaataatctgatcttgtccttcaaagccaacaaattgatccatagctctaaaaacatatcagcgcgccgtcgcaaagtcaaagctaagcgacatcgctcccccgcggccagcaccctccatagtaagaccaactccatccacccacttgtcccaagatcaatcatgatggatttcacttattgtgggcaaagaacaaagttgagaaactgaacctgcaatgggtgaaaaaaaatattaaagaaaaattgcaaaaaggttcataacttgtgaactgtgtcaaacaagcacaaacttgatgtttgcttcaactttctaatgctaaccagggatgaggtgaattcattttgccaataaaaaacctcaaaacatgacatagtagcagtaaatggtcattacatggatttcgtttcaca

SEQ ID NO: 80162 - DNA, 434 bp, Zea Mays
ctatgcataaatatatttaggggtttacaaaatccatgtcctaacttgtcaagatttctaaattcctctattgcgcttccttcagtctcaagggccggaccgtccgtgacctgggtgagccctgcaaatctccttgcctttccttggatcgtccggcctcgggggccagactgtctgtgacctaggatatattccttttgggtgtactcattatttaaactttacttgggattgagccgattctccatcggctctagcattacacgtagcggtctcataggtccaaagcaccgaggcatcggccacaacaatacaggtcgatgcattagcatgtacttgttctacatcatcacctacccattgtaacaacatttgatgtaaagtagaatgtacacattgattaacatgaatccaatctctgcctaagattagac

SEQ ID NO: 80163 - DNA, 588 bp, Zea Mays
tgagcatggtaatgagtcccttaaggctgaacttcggcatgactcgacccttatgcaatatgcaactagggtccccctgctaactggccgaagtggaatttgggtcatggctgagcacattagcactagggacttggtgcaagaatatttagtaaacagaacatttccaacttctagtgggtggggaatgacgaagaagaaggaaaaagtatgaacttgtacgacttccttatcggtttaaattctaaaaaagattcagcaaaccctgcactgaatggctagagctaatagaaacaatgtgcaatgaaattttcaggaactacacgaagaaagaagatcagttgatgacaactacctttggcacccgtgaaaaacaaaggttgaatcgggtgatggatgctctcaactttgaatacccagattacgacaaacttgacgaaggggtcggggggcgaaaagaaagagggttgtgagtattttgaataggcaggccatctggtccgtcaaagaagatcagaaggctgttaagaagcagaaaactctagcggagccgaaggatttggctcccaaaaaacaaaaacctgtcag

SEQ ID NO: 80164 - DNA, 376 bp, Zea Mays
ctcacacgtccttcacatggctcacatggttgcaccacacggggtcatccctcttctcagcggggaagaattccaatgggtgcatcaccatttctaggggatggtagccacagaaagtcgtcagagtcttcaaagctgtcccctcggtggtgttttccgatctgaatccaacagtcttggagtcaagggaacgccaacccagctgaagggggtgagcctccagagttagccagactcggcaacgtggcacctgatgctcctcgtacagctgcaccgtgtacaaagggggcgtagggtaaccggcggagttgagcacctcccacaagatggaagggaaaccctcgtgagaaaggaaatcggaactgaaacgagtgtc

SEQ ID NO: 80165 - DNA, 515 bp, Zea Mays
atgtttccatgtttgcaaagatcgtatgtgagcatataattctttatcataagtggaataattaagaacagggtcattcaatttctcactaaaatatgcaacgggtttacctccttgcatcaaaacagcaccaatgccaactccacttgcatcacattcgagttcaaaagttttaccaaagtcaggaagttggagtagtggcgcgtgagtaagcttctcttttaaaagagcagaagaatcctcttgtgactgcccccaattaaatgaaacacccttcttggtcaactcatgtaatggggcagcgatggtgctgaaatccttcacgaaacgacgataaaatcctgcaagtccaagaaaactccgcacttgtgtcaccatcgatggcgttggccaactctgaatcgcatgcaccttagcctcatcaacctcaataccctgtggattgacaacatagccaagaaacaatactcgttcggtgcaaaaggtgcatttctcatggttagcaaataagcgca

SEQ ID NO: 80166 - DNA, 491 bp, Zea Mays
aggtctggtcatttcgaagcttaaagccagcgggcacatgaccatcgtcatcagtttctccctcttcttctcatcggccttgatataaaaccattcactcttccagtcggttggccatttggtgcggtagctaagaactggagccttcgtatccttgacatacgcgaaattatagcagccaaaattttcatgcagaccgtctgctctggccttcgtttggtagtgcagctcatgcactcggcaaaatgcttcggcatttgggtccgtcccttggcttcggagggcctagatgaaaatgctgagcctaacgatagcgttaggagttagctaatgaagatagatttcaaaattcttcaaaacttctcctatcatctcgttcagaggaaaccgtaatcctgctctaaaaaaacttttgaaaaccactacttcatcatccttcggtgttggagtggtttcttctccagcaaaacgaacgagcttcctctcagctt

SEQ ID NO: 80167 - DNA, 466 bp, Zea Mays
gacggttgcatatttctcgatgtactcgtttattaggagtttctcccacttctgaggcttcgttccaagatacgggttgcgtcgggtcctgttctccggcttcgtgatgtcgccgcacattccggcgtctgtttctccgtcgccgggcatcacgctagggagattcctcccccctgcatggtaggctcatcgttggcgatgcgtgatgactctaatctcctctgaatgaagaggacgtcagggtagaaaggagcaggtatgatggtgttcttcttcccatcctcctttgagggcggaggtaccgagaggatggctcagtgtgttttccttccctggcatgggatattcacttccttcctccgggtgttccgtgtccatagtgggcgaggtggaaaactgagttctttgggtcggagaggccctgactgactggccctccatcttccgtgggcttttgagccctgga

SEQ ID NO: 80168 - DNA, 512 bp, Zea Mays
aacaaaatcactctcaatcaacaggaactcagcagagtaccttcagaccaccagccgcaagaggtggaagaggaggaaggagttttggagggagattcaacttacaaccaagcaaactattctgcctattttgtggagaggacaaggggcatacaacaagaacctgtcaagtcacaattcaaaaacagaaggaaatcgttgaagctgaagcacgatagaatcagccaaagcaggtcctcaacaccgtctcatacttttctccatacatcccaaagtatgttcgcaatcaacagccaagtccacaaccctcaacttcagttgcttcggcaagtcactattcagatcgatgggtcctgcctcaaccgctcacgcaaacaccacctttgccatatgattagcaacatctaggacaatttcaggtctagccacagttccctatgcaagatgtctataccagagtcgaaacatatttactgaagcgcccaaggggctagatcaaatgtctgaagctg

SEQ ID NO: 80169 - DNA, 595 bp, Zea Mays
ccaactacgaagattctccctcataagctccctttcgctttctcgaagccattttcttcctcttatcctccttcactgatctctccccctaccttttcatgatattgatagttctcttcctttttatgccatcaacttcttcttcagaaaacttcttatttctagataatcttttttattttcatccatgaggcaattcaaccttcacttttcttggttaccaaaagcagctgtcatcagttggtctttcgtcttcatataattaccaactatttcattacacatcgtctcaatcatttctagccactcggtgcaaggaccgctgaaagtatcttgaaatttgaaccgataaggtaacgttacaaagtctgacttattcacatcatctttcaacttcggcatcccccagccgcttagtgtcgggagcaccttgttggcaaggtactcttgcactaagtctcgtgtgccaatatgcttagtgacaaccctaaaagtaacttcagccacttgtgatggagagcctatgctcatgttgtagagtggacttgtaaggccgaagttcaatctcatcgagaacatcacgatgttcttaaac

SEQ ID NO: 80170 - DNA, 496 bp, Zea Mays
gttagcgcgaacgaaggggtatggaaggatctctgttgtccaatcagattcaacggcacatattagaaattacttataccgatccggtatttaatcccacccatcagatcgggaatggacggtaccgatcaacacgcccgagatccccctggaaccaaccgatctagaacgcacggccgtgattttatgaagcgaatgggtatgttcagtataatcgtatccgttcactaaacgatccacggtacaacactcgtcttctccccctggcaaccgaacacggcggtgctgccacctccggccgccgccattaacgtgtgcaatgcaccctgtttaccaatgccccaaaccccgattcgttgggtcgccacgtggaaaaggacaaagggaacacgagaaaggcatcctcatcgtgattagcgcgtcgtagcaccctatccaccgagcgcggcggagcccaaagctcggcgagaaattccagtcgccccggtgatcgatc

SEQ ID NO: 80171 - DNA, 775 bp, Zea Mays
caaaactaccttagtccagattaatcatgaaaagacttagcatggcgttacaagaagctcgaccagattcttgtttaccgaagtttggcaactacaagattgcacttcttcctaactgtccaaccatgctaccaggctccaatgattgtggtttttttgtcactagctgcatacgatgctacgactttgatgatggcgacgtctcagaatttgttgtaccggtacgttacaaaattccttttttgttactgcataaattccttttcatacaatttgttaacattaattcaactactatgacaattacaggatgaaccaatggaccaacatgcgtttgttctatattaactgacctttcatcgcaacaatagggtttaccccttccctgcagaactgctgcctttcaagtatgttccaaggaaacggcgttgtttaaaagccaagacctagatatcatagctgaacaagattctgtatgggatccacaaactatttatgttacttcctaaggcacttatggcaagtgttgcacacttgtatgctacttctcatggcacttatgtctattgtgtctagtgtttatgctacttcatatcagtcttatgtcaagtgtgtaaaactgctgtggtaaccgaatgtttagttatgtcaagtgtgccaagtgtctatgccattcatgtctagtttgtcacattgttaatcgttccaaaacaagtgttggcttatatctagtttcatatattccatacaatgatgttcagttttctgtatcttc

SEQ ID NO: 80172 - DNA, 745 bp, Zea Mays
gaaggtccgaaaaacaccttcccttcgctagaatagtgaatcacattgaattgtgggacccaccgatctgtggggctctgagcatatatatagaagcctatgtcgtgagtatttttcgtgctatctagctggtggcgctgtgtttgccatttttagtttctttgctttcttgagcttgattggcttttgagctttggtagctcgcaaccatcgtctaaatggctgaggataagaagatcgctgaccctgcgccaactggtttttacgaagctatggagaagactaacatagaaaaaatcaccaatgagatgttggctgggttgtctgagaattccagcaacagcgagagtttcgatgtagagagcgggaatgaggaagttgaagatcgtccgtgaaggcctagccatgttgttttcggaaagtcatctattaagcaagggtagatcgaagcaatgaaagtcagatactttcatgatatttctattgtgagggccagaggggagagtaacgttcctcttctcgaagctaatgaggtggtagttttcagaagcttcatgaaagctggacttcgtttcccactgcacaagatgttggtcgaagttctgaaaacttttgaaatataccttcatcaacttatcctcgaggcccttatgaaagtaggggtttaatatgggccatgaggagccaagggttagagccagacgccaggtgcttctgtaatattcatgaattatcctatcagacg

SEQ ID NO: 80173 - DNA, 676 bp, Zea Mays
gcggtggccaaagaggtggaaaaggtgggggcggctgcaacccttggtataaggggaggggtcggttagggttgggaagggggggatcccatccatcggatccagatcgaaggcccaaacacgctctcccatctgagctcccgaccccagcagaaaaaatgccaaaggatctactgtttccctgaggaatgcctcctgaaactccaaaccccaatgccacagaacatgaaagaaaagagaaaaagaaatttaacttctttttcaaaaaattgggatatcccactctaccctccttaaaaagaattcatcctcgaatacgaccactccaagcaaagcatccaaggtaccccatatagcaccaccattcaaaacatgggtccattattggtcttaattaacacaagaacttctacctcggactaattgtctaaggaaactacacaacctgatatccagcatgaatcaacgtgcaatgaagctcaaagcaagtcatagatgcaatcaacactacgatttcacaccatcgaatttggatgcatccatacatcaacatcaatgtcttcaaacaacactcttttatgaaggggtaatatgcactaagcacaacccttaccagcttcaataattcattttaatttattggtgaaacatccacacgagatgaatgtataagaag

SEQ ID NO: 80174 - DNA, 507 bp, Zea Mays
atgaaattgcatagcttcattttccatacctttgcctttatgagagcccttgttatcgccaattcaggactccttttgcttacgcacctcatagctcaaaagggcacgacatggatttgaaattcacacagtaccaaactagggtaatcatgtgaacatggactaaacaaaatgtcatatttgcacatagcattacttacaaaagttacaggtttatccatatacaccaagagaattaatcgttgtggatataacaaatgaaatagctacccatgaatgattcaaaagatatatcctatatagcaccagtcatgattaagtaaacatcattatgattcatttaacacagacaatcataaagcataactactccaaagataggcagcacaacaagccaacttaagagcaatactaaattgcaattatgtacttaaaatacacggggtaccgtcctttggagagcatgttgtagattctcatcaaggtcctttacttgattcaccaata

SEQ ID NO: 80175 - DNA, 664 bp, Zea Mays
cggaagcccaccagcgaacgcgccctacggtgaatccccgtccgattcacgcacccgaatcggtttccatgaacactcgactactacgagtcacgtggatcactcccaatcatgaaccgttgcgcccaggcccctgcccgcgacgaagcaccgattcacggcggaatcactatggcggcgagaaattagcccacccaagcctccgattccgtcgggtgaggaggagcacatcattccttgcgacaatgcgaagctactcggcccaattcccgaccccgaatagttccgccatgcattcagttgtggatctccgagctacgtgacacgattttacgcggcggatccggcctacgtgggcgagctccgcgcattctgtttaaggtgggagattgcaactgacagcatggccccatctgtctgtccccgcgaaatgagaaagggttgaggcgtggtgtgaggcagacggtgtggtcccaccggacagacagagccgacgccgcggagaggaggatcccaaccgcgcgcgtgtgaagacctgactagtggggcccacatggaagcgactgactgaagaaaaaggggagggaaagagaaatgggccgcgcgggaatgaggaatgggccgagcaggtgacgcgtagatgggccacggagataggaattcg

SEQ ID NO: 80176 - DNA, 759 bp, Zea Mays
ctggaaacaaatcgacaatgatcaattgctgataaatggaacgaaggtaccttggtccagattaataatgagaagacttagcattgcgttacatgaagctcgaccagattcaagtataccaaagtttggcaactacaagattggccttcttcccaattgtccaaccatgtctccagggtcaaatgattgtggttttttgtcgcaaacttcctccgatgctacgattttgatgatggcgacttatcagaatttgttgtaccggtatgtttactaaattagtgttttgatcatgcatatattactccttcatacttattcttagcattaattcatctattatgattatttcaggatgaaccattggaccaacgtgcttttgttctgcattacctgacctttcatcgcaacaacagggtttccccctccctgcagaactgatgcctttcaagtatgttccaaggaaacgacgttgtttgaaagccaagacttagatatcacagctgaacttgattccctatgggatccccaaaatgtttatgttacttaagtcacttatgtcaggcgttgctcatgtgtatgatactccccatgacacttatgttcgatgtgtccactgtctatgctacttcgtatcagtttctatttcaagtgtgcaaaacataagtgttcccagactgtatacttatggtatctgttatgaacttatatggttttcatttccagattgtgagatggttaatcgtttttgcccaatgtttg

SEQ ID NO: 80177 - DNA, 603 bp, Zea Mays
tgagtaattggcgcatccaaaaaggcgtcaacaggtaggaacaagttgtgcgagtggtcaagagtgaaaacgaactaatcgtataccctgatggtggttttagccaataggggcaaacaagttgtgtggctatatgaacaactatcttatccatcccaatccgtgctacaaccaaagcaaaattagattctccactaagcatatttcctatatgtaaaccatccggatcaaagctgtgtatgacccagactttgataccactgtagagaaacgtgtacgctatgtaccagcgtatttaccgcgttcaatcaagagagcatacgagtagaggatcatggaccattaccactagacacggcacaaaataattggaagaaatacacgtcgatataaatcagatagcaaacaatctttctactgctctgtcatgcatggttttgcatcgtccatcatgtttatttcccattgttgcagcttacgatatctgtgtgtatctggcacctatgtttatgacagagaaactcaccatgtttattctattgacattcattttcatgcaaattacataacgtatgctagaaccaaatgcaaattactgctaat

SEQ ID NO: 80178 - DNA, 827 bp, Zea Mays
atccatgggacccatcggtcagcaaggacgctgggaagaggcctctggcaaccagggcccattggtcaataggaggaggaaggaaatgtctgccctagaagcactcgcccttagatgaaccccgaggcaccgagcctggtgtcgggtgtggtggagctagaaaatggggggggcaagctgtagggcaaccactcgagtggatcccttgcctggcccgagactgacccaccataagtgaccattcgcattaactatgcctgacgtcaagccacggtagaggcgtcggtctacctcccactcatgacctatgagcccctcaggctacagtgcactcatgacctatgaacccctcagactttggcgcatttatggcatgtgtgcctcccgacctacgtgcgcactcatgccctatcagggctacgcctgagtgtgtaggtcgcctgcagggcacaacgagacaagccacgctaagacctaggctatgaaggccaggggtagacaaagctcgaataatagcgctcaggcaccaagctgtccgcgccgtccgccataaagaatatgagacaaagaggcgacctagacgatcacggatgagcacgacttcactagggtaagatgctctattttaccatcacctagtgactccttctcaaggatcggaagccaccattggacgaccccctttggcctataaaaggaggaggttggccaccggacaaagaacgaaccaacgaaaggagggaggacacatcgacgaggacctgaagaccagagacctatcgccaagccaacacttagttaggactccacctctgtaaccctcattt

SEQ ID NO: 80179 - DNA, 421 bp, Zea Mays
cagaaaaagaaaagaaaaccagactcatgtcttgccaagcgaaactaccactggttttggcccccttccacaaactaccactattctcctcctacattatcctgagcagtgagcatctgagccaactcggcagtgtcacatagtgcaaaacagagtaaaacaaagtagtggtaaaatgtgacaatgacaagtgggcccaggtgctgaggatactgtaggaggcatagctttatgagaagcgcccaaagtagtgtggttctgtgaaatggccttcagaagttatgtgacagttaggacagaaatgtggtagttttgggaaatttactctgatttgtttgatgatgattattgagcacatatctgcctgccatatcccctagattttgccctgcactctataatcatgtgatattgattagca

SEQ ID NO: 80180 - DNA, 430 bp, Zea Mays
ttttggtctgttgttctcgcctggatccgaatcttcagatataaacaagtattaaataattcgattcctactatccaccgtgaaatcgcgtacgggaatcgataattgagcttcgattcactggtaaattatcctgactgtggaaccaggtactctgacgtagataaaaattacttgatttcgaatagaaggaaacacagtctgaaatactgttgttaacatcattttgatttgttctaattatgtctcgtcacgatctaaaaatcttaattttcgaaatatctgcgatttaccttataaagaaagaatagaaattgagaaaaaactgagaaaaatcttctcctacgccgctcacctgccttgtccgttgatttttctgcagccactcttcctctgatttttaccgtccgtcaccagctctcgttcatcc

SEQ ID NO: 80181 - DNA, 554 bp, Zea Mays
gaaattcatagaagccatttggaatctttaggctaatccgtgccatgtgaataattgcatagagatggcacggaatcttcgaaattcactagtcgattttctgtggtcaaaatcttagttccgtgatgccgtcccaccgtgcagtcaattttctgcagactgatctcagtaaaacgatactgcgagttcgtataggacatgatacgggaacatgattattgagaagggaagcatcggaaatcatcctgtccagaaaaaggccagacgccaacaaatttcccattacaaatgccacctagtttcgttgactgcataggagctatcatcgtcataattgggaacccaggaacgtggccagcacacctgcctactctccagtcccggaccccggagcacaagatcgaattgggtcgccagtctcggtagggtaggccacaccacacatgacatcctccctcctgtttgtcccaactttgctcggcatttctctactaaacaaccaacgacatgccccaattataattgagtttacttatataaaaggaagtatatat

SEQ ID NO: 80182 - DNA, 627 bp, Zea Mays
cgttagcagggtgttgagatcaccctcggatatacgagtgtaagcatgcttgaggtgctcccgatttgagctgatcgctttgttagtagggcatagtaatcaccctaaatcatgtaagcatgagcatgccgcaccgacttaaggcgtttccaacataaccgattgctccgatagtagggtataatcaccctaagttgtgtaagcgtgagcatgtcgcaccgacttaaagcgttttcgacttaagccgattgctccgttagtagggtatagtagtcaccctaagttgtgtaagcgtgagcatgtcgcaccgacttaaagaatttctgacttaagccgattgctctgttagtagggtatagtagtcaccctaagttgtctaagcatgagcatgtcgcaccgacttaaggcgtttccgacttaagccgattgctccgttagtagggtatagtgatcaccctgagccatgtaagtgtgaaggtatgttgcgccggttttaagtcgtacctgacttaggccagttgttgatcgagaacttgtacgcagcagaacatggaagcttttattaataatgagacctttttcttacaaagtacaacccgtccaccaaagtttcgaggcactgctatg

SEQ ID NO: 80183 - DNA, 613 bp, Zea Mays
aagagagcagaggacatgaacagacctgtagcatgctggccacggcgaggtgctcacgtggcggtatttaaaccgatttgggggaaatgggcaattgggcagctctggtggacaattggaggcaagtgctggtgcgttggatgcgtaattacctagcggagttccttaaggcttcaatttatacaactcaacagcggtggcgctcaatttggaggagaagcgctggcgaccggggagaggggtgagtcactgtggtgatcaaccgtggcgatcgtagggcaaggagctatggcggtcactgggcagtcactacagctcacgatgacgcgataaatgtcctaaggcatggcgcccccatggtgaatggcgaacacgccggtgatggccgctcggccacgtcgccggtgcgaacagatgaataaccgagcgcatagtaattccaagctcatccgcggcaagatcttttatccagggattgttatccgtgtttatccaagcatgaatcacggcattggcacgaatccacgcgcaagatcgccggcggcgaggtgcactacacctgtgattatatcgagtgcactgtaccatcagtttctcattcagtcatcctgac

SEQ ID NO: 80184 - DNA, 320 bp, Zea Mays
cttcagcagagggccgcactctaaggcccaaactgccatcagtgacaggaggattcgacacaaaaagggtgaaggctttggggggaggcaggttccaggccgagtatgccactggggcaccaacatttgacaccttgcctctaaggatcatctcaagtcggttcaccaagtctgcagagggaattcttctgttggtaacccgagttgagtcggctaggcctcgatacaggtaagccgggtacgccctgtctttcaacggatgaatattcttgaagacaaaatcaacaacaacaacttcagcagtcagacccctctctttc

SEQ ID NO: 80185 - DNA, 801 bp, Zea Mays
gaatgcttgaggactcaatatcttcaaagataagtacatatgcaagattggagatgccagaaggtgagtgtgtgtgtcagagatatgatgttccataggctcagtttcattgtaaatgaagctagctaggaactttaggtcagaaggtggacggcgatgactttttttcattgattcttgagacgtttgcctttcaatattttttttcctctctttcaatccagaggaagaaaaaaaacactctggaagaaggatggcgacaagaactgtggtcgtcaaactcacggagagaaacaggaaaccgtgaggcgtgtggacgcacgcagacgcgaccccagtttcagcctcggatcccgcggggtcacgtcctcgacccgtcttcaccaccatactgctttgctgtgctgtgctgtgctgcaatttggatttgggcgttggctcagcggcagcgctacgctactgcctactgctcggggcgtcgggtgtttggcctcctggttctctggtctctggctctctgctgcgactgctctgctcgcacaagaccagctgacgtgtctgctcgagttttacgtggtctttggatggcaacggctgttccctgtcgcttgctagatcacgccaccctgacactgatacgcggtagctgtgttacttcaggcatcgccgtctatcgcggacggaactgcgtgcagtgcaagctatccgaggcaggcatcaggagccgttatgctccgcgcccgcctctctgtctatcggcggttgtgataacgcggagcagagcagttacgctcatcattg

SEQ ID NO: 80186 - DNA, 817 bp, Zea Mays
gttcctacgagttctaactcaattggatgggtcgaggaatatcaagagcacacagggatgctaaaacagaagctaggagggcatgatcggacctgtgaagagctgaccgcggcgagctcacacaacacaatgttcttgaccaatttgggggaagtctcaaactggggagttgtaggggatgattcgaggtgagagctggttcactggatgcacaactatctagcggagctgatggcacgctcaatttataggattcatgaacggtggcggctaatttggagaagatgcgaggcgaccggagaggggaaagagcactggcgcaaaggatttgtggcgttcaccgtggcaagcttaccagcgacaacccagctatctaaagcgggttagtgcgatgtggtaaatggcctaaggcgtggcgcaaccgcagtgaagggcacaaactctggtgacggccgcttggccacgtcgtcggtgcaagtgggcacggtgtaggatggaacagtgcttcaagctcatccgcggtgaagatcttctgaccccgaggcattatctgggcagcagtgggcaagaatcgcggtgtaaggtcactggtggcgatattctctgcacctgaagatcttttgctactgtaccatgagaaatcgaaatcagagcctctgtccgaccaacttgtaggacccatatctcagatttctgggtgagaacttgttaatctctgtgtaacaaagttgtagccctataatccagctacaatcttgtcacagcaaccatagtcaaatacttactggatcatctccaaaagaactctcaaagttca

SEQ ID NO: 80187 - DNA, 449 bp, Zea Mays
gcacaactttgatatttggatctcctggctttgagtttggaaaaacagagaacgcagatgatcattgggaagggttcatagttcaagggctgatttggggatttatttgagttattttggctaagctttctcaacctttcttgtttctcaataaatatactttaatttttacaattggctcaagtcataattttaaacttttcattccctttttcttattctcttgcattttgcttataaggctcacttagggtttttatagggttgcacattcctatctttttaaaagactcaattgttttgatcatgatactttttaagtatatacttggtgaattctttatttcttaagttaatttgatgctcatgcttactttgattcacatgaaataatggttcttgggttggtatttgagagaaaccctaggtgacactggggtgtcacaacc

SEQ ID NO: 80188 - DNA, 513 bp, Zea Mays
ggcgatcatccgctcacactcactcacccctactacaccttcccctagccctatactctcgagcactcattgcagatctgatgtgtcgaagtacccatcatagtcgtggtcaaagaacaagaatgtctgcctatttaatctttgtttttctcgtttttctcgatcgtcgaaggcgacagccatcaattgatcttcgttcataatgaagttaccaagaatttcattacacattacttcaatgctttctagccaatcttcacataggcgcttggacacgagatggtttttgaaccaataatgcagtctaacaagggtccccttttcaacttcctctttagccttcggcattctccaaccagataacattgggaatacttgattagcaaggaactcttgcaccaaatcacggatgctgatatgctccaccattgtattaaaagcaacatgcactatctgcgatggcgagccaagagccatattgcagatcggccttgttaagccaaagatcaatct

SEQ ID NO: 80189 - DNA, 690 bp, Zea Mays
tggtggagtttccaatagtccagtcccagctgtacaattggataatagtcggtttgcaatggataacagaagacagaatcactcttgtagtttgttttacgttattttgttgttcatttgtgcatggagttcgattgtgagggctgaggaaagaagtggatctgtgcgactgtgccaaaagttgtttgttctatgaatatatgtacactcatcggattagtgaaaccaaaactgatttgttcaagcaaatagatctttaaaatccttataaacatatagttgatactgactgggtgcctaactctcatagtcaattcacgcggggctttaccagttattatccaaaatgccgaaaatctaaagagtatataccttccatatccaaatatgcccaaaggttaaggcgataaacatggaacagacctgttttaagagtcatatcaagttaaatcagtttatccctaagtgctctgcaacggagtgttggactttaattgcgttatgactgctctatgtatcagtgtatgtgttagctatggtgttataggcctaatgcaggccatacatcctagcatgcaagctattaaatcaaataggcctaggagacagatcaagaaatttgaagtatgaatgtaccctactctcagatcagccattacagattacaaatcaagaagcaatacaagcagt

SEQ ID NO: 80190 - DNA, 482 bp, Zea Mays
cgcccacgtttccgccccagtccgcacaccatggcccaccagtcgatcaaccgagtctgcatcctggccagaccccaccgcatgccccaaacctaaccactcgcccgaacatctagcaaccctaattgatttcctcgtcgctctcgccgtcgtgtgctcccacaatcgccgtctccaagcgcccccgcccctgccacaccgccgtcttcgtgcgtggcgtctcggtcccccaacatcgtcgcacggtattgcctcatccatctgtcatttctcgtcttcgtgcactcttctgtcgtcgctccacatcaacagtgtcgtcagatcccactcccgctcgccattgctcggcgatttggtgcggtggctccacggccctcgcctccacctcacacggtcctacgcctctcggcgctgctctctggccccaggcggcacgccattccctccctcgttccttgactgcaagttgccaaaagcgaccg

SEQ ID NO: 80191 - DNA, 359 bp, Zea Mays
tactgtgaagcgcaggggtctcagcgcaagttgtaccaagacacagagaactattgaactagactgcgggttgattacgggaaatactagggtctcttctagaaagagcgcacagcgaaagggtatggacaatcccaagccgtccgattaccctccgagcgcccagattagacctgtgtttactcgaaccggtatgctgcgagggtcgttggatccagaatcgaggatccggattcaatcacccctagatctagtaacaaccgtatgatgcgagatcaacgactcggattgacatgaggtgaaacgctaacgctaatctaatccaagccattcaaaagaggatcaacggctcacaaacc

SEQ ID NO: 80192 - DNA, 532 bp, Zea Mays
aaacaatatcaccgtttggtctaacacatgtcgtcaaaacagtctgacacacctctagatggtctagtcagacaaatcgtcagaccccatgcattggtctgacatgatattattcacaaggtctgatgatcggttgctctcggactatctacgtggaggtgtcgaactagtccactattgtccaacgatcatgaaacgcaaggttcgacgcttcaaaaacccttttcacttgtctaaattcagaactttggaattggattttgatcctttcatgttttaggcctcttctaaaccatctagagctatttgtttgcaccacactaaactcctagacttatctaggtcaatctactaattcatatcccctttatagtacggttaaataaaaaacaaagtctcaagtgtctctcaactccaattgacacttgcaactagtacattcttaaccttgttttccatccttttgaaccacaataaaatccataatatggacatatgaactatatttttcccaaacacttctccattgttg

SEQ ID NO: 80193 - DNA, 754 bp, Zea Mays
attctagggtttggatgctatcaaatcctattagagttgatatctcatgaccatttctaataagttttgagattttaactcatttgggctttattgacccctaagcttagtttagggttaagtaccctacactagggttttacccatgacatgtcacatcaatacaacttgtttgaaatttttgcctagtgaatgcactctaggtgtgacaaacacatgatatgcttatgatgttatgctcaagttttactgacagtaacaccagcggtgttacaggacctcttggtgtgccacgatatcagctagcctccaggcacgaaggaagtagtagtggaagtaatgatccaattggagacctggaagcccaggtggagcaacttcggtcagagttatgccacaggaacagggcacgtgagcaggatagccaccgtattacggagctgtcagccaaagtgagtcgcctgcagtacgaaattttagaacgtgatacgaccattgattgggccgtcaattcacactctttcgcttgggactgtgaagcgaaagctctagctcgtgtggcagagcttagttcatccctcgacagcctgcaagcgtactgtaatactttacatgaagaagtgcatgtattgtatgctcgactgcacccggacgtgcctccagacgttgctgcaatgggagtcggaccatcgggaacaacaactgaaggatctaatggggagctggacctttttaggccccctccttccatgaa

SEQ ID NO: 80194 - DNA, 465 bp, Zea Mays
ccactagcgcacagaaatcatcgtggccggttataactttgtcgaggacgtcaacctctttctcaacacatccaagagccccaggaatatcatcagcagaaagtttaacttcttcagatacggctccaacaaaattgaagatacccttcagccgagtgatgcattgagtagcaaagctgaagcatttattccgaagagtcttgatcgtttcgttctgtttaagattcttatcaacttcgaccttgattgtcacgtttagcgcttcggactcgcgattgaagcgatctgagttcctttccaaaagtgttcgagcttcttccagctctttgctcaatttttcattttgagatcgagcttcagcgagagaaccttcgggcgaatgcagcatgctgtctttttccttcaatgaagttttaagattattaatcctcttttccaagccttcgataacaaactcattttttt

SEQ ID NO: 80195 - DNA, 653 bp, Zea Mays
atcaactcgccctcgcccctagagtataaatgcaggactccgtgacctcctcacccctcgaatcgagtatcaccttggattgacgccaccattccagaatgaagggagttccgccgccgtgtatttggtgccattgtcgccgacagacctcagctggcattcttggttaatggcggtccatgcaggtgtcgtgcgggcagtcattgaatgtgggggatgccctgaactcggggaattgctcatcggtggtgatactccgccttggatctatggcgcaacatgggcagcactgcccgcatcaccctcttcggtaagaaaccatcaattgagtccaccttaatcccgtcttcatgtagcaccatcaggaacaaaggttggaggtcggtactatatgtgggccgcgcgctggccatagcgccgcctcgccggcgcttaagcacgacctgtgcaccaccgcgggtcagactggggaaaggggattatatgagggcaaacaacggacgtttcagattagaagagagagagagagtaacgcttcgtgcaaggaatctgatctgtttgatcatgatcggatagcctcggggcagtcacgataacttaaaatatgggccgtggatcacgaatcctgcggcccggattgaataccagttaac

SEQ ID NO: 80196 - DNA, 477 bp, Zea Mays
gatcattgatcacagacctgaatctacccatcatagccctatttaggtttgaattatttttgtcagagtcccatgcaatgacccatgtcccatcacaagcagccctgatgtcctaaatttcttgaaggaaaagaattttctcagcatcagtctgaggcccatacacacaagttaaccaccagggaattccatcatctttgcaaaactggacagaaacacaatgggcatccatcctttgtactcctgtatgtcctacatttcttttcgaagcaactagaattcctccgctagcaccaacagaaggtagaaaaacaaattcagtaaactcaactcccgatgtcaccctgagtaataagttacatttttgtttcctgacagcacactatatccacctgaaaggaatccaccaggtctctaacagtatccatccgaacagaagaattaagacccctaacattccaaacaagaattttagaa

SEQ ID NO: 80197 - DNA, 857 bp, Zea Mays
caacaaccagcagcagcacgttttgtcggagcgcaagcgccgcgagaagctcaacgacagcttcaaggccctcaggacagtgctccccccttcttccaaggtactactgcgtcagtttgtgcagtatcacaccattattcctaaaagaaataatgtatatatatgctttgtcgtggcagaaagataaggcatccacactgatgagagcaagggactacgtcagcactctccagtctagagtgtctgagttagaggagaagaacaggatgatgctagtacagttgcagcaccgccgcaatgatgtttctcccaacaagattgaggtcgacatcagaagtaatagagaggaaattaggaaacatgacaggaatttcacctgaagatatatagcagttgttatggtttatagtaggaggcctaaacagccctctagtcggcccattatagagggacatatagataaggattaggaggatccttagataaggagaatctgtttagagatcctaatattaaggagtctgtttttaaggagagtctgttagagttcctaagattaaagagtctgtttagagttggactataaagtccagacgtctgtaatcaattggcaagcattgatcaatctaagaagtgattgttccctgcctcacctatgttccgcacctcacctgagttcccagccgagcggcagcacggcgccccttcgctcccgcttgtccagccaactcgatactcactcctataatctgcgcagccgaggtgtttctaccaatttggtatcggagatgccgggatccaacaccgacgacagtgcaacgtccgccacccaggcgtcagagttggcagcgatcacc

SEQ ID NO: 80198 - DNA, 427 bp, Zea Mays
ccagttgttttcccttagttgctgccctgggtctccttggtgctcgctgtgtaggagctacaaaatagaattcgcatttattgaataatgaaattgttttgtttcatgcaaatctgcaaaagagatgccatgtttgactgaaaaaactataacttgctttcagtttcttcatctctagctacattgccttcagcatcacctgtactgtcatgagcagcagatgccatatcttcctctgtagctttgctgaaatgatcagcaagtccaggtgtagtagggttgtttggtatgtcatcactagcatctgttggttcctatacgttgtggccatctgtctctgtagagtgaagcctttttgaagattgctcctctggttgtggacctgccctcactctcttgctgaacctaattcctggagccatgttgg

SEQ ID NO: 80199 - DNA, 290 bp, Zea Mays
gttgtgatgtgttttgattgtcaacgggttgggttgggtgagtttgttttgtactgtgggaataaaatggttgatacccatgagtgtagatgggtttgcataggggtgggctttcatggatcttcacccatccgtagacactaggactgtattcaagtcgactcccaacttagtcccaacatacacaactcaaccctaactcccaagtcttcacccgtgcaccggcaaccgcatcatgcttcttgtcccagcggctggagtctcccctctccccaagtcttcgcctcggc

SEQ ID NO: 80200 - DNA, 315 bp, Zea Mays
tgtcgatgtatcccacaattgtcaaattagatgatatatgtgggaaagagacaatgatgctggcgatgtggttatgctgaatgaagaaggaacagtgcgggagtgaacgctcctacccgaaggggagtagtttgggccgacgtccttggccaaggcaatggtccagacataaggtacagtgtgcccaaaggcagtggtccagaagcaaggtatggcgtcaaaaacagtgttcgctgttggtgatgaagagcacaaaaagtttgatgaagaccaagtgcatcctggtggtgcgcaagaggtgcaacacaattatcg

SEQ ID NO: 80201 - DNA, 840 bp, Zea Mays
attcacatcccaacaactctgtgggcctgcaaggacatggtgggaccactaccttgccatgctatcgagagaccacgtggtgacatgggaagaattcaagatggcctttaaagggcaccgtatttcggcatgtatcatggatcacaagatgaatgagtttctagtcctcactcaatagaatcacatagtgctccagtacacgcaggcattaatgatctataatatgcgagataccatgctgacttcaatgagaagaatagggatagatttcgtaggggcctagcaccgaactctgtgagcgtcttaacactgtcagggctaatagctacaatgagttggacaacctgctatctctcaagaggactgtattgtggctcatagggccaaaaagaagaggaaagtgttttagaattgtttccaatgttcagaggagaggtcctcagcagcaacaaggatattaggtgatcaggccacctcagcagccaaaggctcctaaccattcccaaggccaaactctaaggaaccacactcaaaaccaacagtaacagcagaatcattagaatagatggaaccgatgcttcacttgtcagaacactggccactatgcgaaagactaccctcggaattagcagaaggtacaaagctcaaatcagaataagggcaagaaacaaaaggtgcaagtgaggcaacgcaggctgaacttcactactctagaagaacttctggagggagcacccatcacgattggtacattttcaatctttaaccaacctacagtcattctctttgattctggcacatcacacaattttatttcccaaaagtttacggtcaattgtc

SEQ ID NO: 80202 - DNA, 793 bp, Zea Mays
caaccatatcagaaaaatggctagtgatttcttcattcgagctcgagggtggtctccagttgacaggaggctgacgcagtgattggatgcgtggggatcttttttggcgaagatgcttctttttgatcttgaacctagagactcttatggttcttatatcaggatgccggtctgtaataatgtcttggttaaacctctttttctgtcttagtcgtcttttaatggcaatagtttgtgtgtcaggtctgctgcaagttttagctaggttagatgctgggcttttgttgcgatggcatgctaagactaagacaatatcggcgtgtgtgcttgtggttacagagtatcatgtttcctgtttctcaatgaaataggggagatcccttttcgtcaaaaaaagatgaacggattgcacgctaatccttggatcatgttgatgaagggtgtaaattgttggtttgttcgtggtacatgtccgacgccgaaacacgaccggttgcgctaatggaaagcccaacgctaatccattcgaaggccagcagacgtctgaacggtcaatcgcaaatgagtgtgtacacaaaaacgtcgtgtctgttttgtggtcaacacacacacacacatacgtacgtccatgctacgtacgaaaaagacgcctttgttctgagcatccttttccaccgtccgtcccccgttttttttttaagaatgtggtttcgtgcagtttgatctgatccctaccgttcagaagcttccgtagaccgcagctttgtatttgcatacgaatagacgatggctg

SEQ ID NO: 80203 - DNA, 445 bp, Zea Mays
ctctttccgtcgtcctggtacccggcggaagcgtttttctcatcctcgacttcgtcgccgtcgtccgttcctttcttcggaccctactttctgttgtttcggttccttcattgcgtcatgtgtgttagctcatagtgtatgttgctcttgtagatctgctacgtacccaaagggcagacacaagcacatcctcccgctgtcctctcggtctcttctgcagctattcgaggtgagccactccttcctccattgctctcttttagatgttactttggtgtccatggatagattgtctgcatttttccaaattaggtgcacatcagtttcttatagctctgttttttttggggagaaacagggtgctgtcgtgtcgtggttcattttttcctacacgttttaccgctactttctcttctgcttgcatgcgtagatagttttttcacat

SEQ ID NO: 80204 - DNA, 885 bp, Zea Mays
attatcttgcaatatcttccttgtattttaatacttttggtctaatggtccattgcggatctccgtttgatctactgagtgctcaatttacactacatgaggtccacacatatgcactaattgcctaattctaattttatcatcagatcacaaaggtgatgcctcgtcactttatacagcttcatgctgctttgaactttaaatatgtcagttctaccctactctgaagcattaatttcatatgtataaggtggagtcaaattccatcttgcaaaatccttcaatgccttgcattatggtgttaaatatttcagattgttgaatttgattataacagtactaatgatgctgatgaatcatggtttgaaaatgttgttgtctaaataattagacaattattcttttttctcactctttctacttcgtcggaaattgaaagtttggaaatgttgttatctaaactccatgccctgcaggtagggaacgcagaacaaatgttgagttggagcctattttttcaactcgtcaaagaaaggagcaggccacaatgatcgtcagtggcgtcagtggcgtgcaccagaagagtgtggaaggcgacgattccatgtgcgccagaagagttgtgattccaaattggagaaacagacaaacaagcttctgaaaactttctaggcatcgacagtggacgattaggtttgggtggtggcctgtagcttgttgattattgttgttgtagcatgcatgcctatagatcgatatatgcctatcaaacccagaagcggcagaatgtgcgaaaggctgacaattgagattgtaggtgtttattttgaagcaagctcattatcatgttttaagtgagcatggatctatgtgatcatttgtaac

SEQ ID NO: 80205 - DNA, 433 bp, Zea Mays
gtcggtgtgcatgggtattaaagatccggttgtgtaaggacaggagattatgctttatgaaaacagaactctacttgctctacttttccttgttcttctcctacctcgcttctccctcctatccagtagttaacaattggtatcagattaggcgttcctcggatctccattcatggcttcgcccatcgattcacagctcactctggtgctggagaatcagactcgctccctgctgggcgagctcgacaagcgcatgcaggccattgattccaagtgggaatcgcgcgtcggtgctctagaatcccaagtcgctaaatcgccgattgatttggagtctgtcgctgcagacttccgcgccaactcggtttctcaccagatcgcggtggaggcggctgtcgacagccggatccgtctcctcgaagtggaaacctcc

SEQ ID NO: 80206 - DNA, 633 bp, Zea Mays
tgggggcgggattggggctatacggccgtaagagactgtagtttcaccgtgctcaatcaatttgggaggagggggcagaggcagtgcgaattttggactttgatcaactcactgggtggaggtgtgcataccccgtcgtggattatagtgctatttatagccacgacgacccggctagcgatttccggccacggataacttcgctaacgcatgcttaccatgtagggaagagacacagtgagggagatcgaggcatgggtgacaccgcggcaaaagttaactgagtcacggtggccgccggtgactaactccggccacgctcgactgggttcgcgggattgcgccacgttcgaagttattcattctcggatcgattctcatcactggatcacgcgagcccatccgattcaacagtggccctgatcttattgcgttcatcagatatttgtcaggattcgatcttcagcgttcttctgaatcgaccaccttctaccctctttatctctagatttttgttaagaacagagcaacttcccttaataaaatttgttcactaaccatcagtctacaaacttactataggattcttgggtcaaaaccgaacgaattcaaagttatggcgtgctcaaattg

SEQ ID NO: 80207 - DNA, 492 bp, Zea Mays
cggtgttggttttgtaccgggcgcaactgaaccacgattttttctgcccctcccgtccagtacaccaccaattgaagctcgactaacaggacctgcattctgggcgacaccaatcaacacatttttttctcctgcatcaattcattctctaaccgacactcttgctgtccgttgattactacaacctggttgttcggcccacgtgtgatgctctcccctatagtggccatccatcacaacaccgggaccgactacgcgctgattcgcaatcatttcagtcctgtgtttcctatcccagctagcaacattactcatttgtcgtgtaaccactacatcaagcttcatacgcttgcttctcatcccttgacctccaccattttgcggcctgctctcctgtaatctgtttgacccagcagcagttatgtgtccctgtcctatgtttggcttggctgctacttcttcgctgttctttgtgtaattctttgtgacaac

SEQ ID NO: 80208 - DNA, 574 bp, Zea Mays
ttgttagaccaaaagacataacagtgaactcatacaacccatacttggtaatgaatgccatcttcgtaatgtctgaaggtcgaatcctgagctgatgataacctaacctcagatctaactttgagaacacgctggctcctctccactggtcgaacagatcttctattttgggcaaggggtacttgttcttgattgtgacctcattcagagctcgataatcgatacacatccttctggtgccatctttcttctccacgaataggacaggggcggcccaaggcgaggtgcttggccttatataacctttctctgatagctcatcaatctgcttcttaagttcgaccaactctggtccagatactctgtaggctcttttagaaatgggggcggtgccaggaagaagctctatagcaaactcaactttccgctctggtggcatacctggtaaatcttccgggaacacatctgggagttctgacacaaccttgataaccccgagtgaatctgactccttgctatcaatagccatctgatgacaacttcctttccttggctcaggtgagattaactcggc

SEQ ID NO: 80209 - DNA, 442 bp, Zea Mays
cacggattccctccatcgctggtatatggcatccggaactataatcctgtaggtccggaaacccgaggtccgactctaaagaaagggcacacgtctcagggggaggtccagagctgcgtgactgcttagcccgatcccgtaccgtaagcctacgcactccaccaccatgcgacgagtaccctagtaattagaagtcgtgacccagggggtccagacacacgggtcggctagccagaccaaatcctacaggtcataagtcaaaggatgaaggataccaattaatgggtccgatgggtgcactactgaaactccctagctaaggctgtgtgcaggtccgggtcccagtcgaaataccctcatgggggtcaggtcaccaattcctccttaagtatactggcatccagcctcgacaagtcgagaccgcatcccagaggggccaggt

SEQ ID NO: 80210 - DNA, 352 bp, Zea Mays
tatagatcaaatcgtggattctacctccgggtgcgacctattgtcgttcctagatgcttacactggtttccatcaaatccagatgtctagggaagataggaagcataccgcttttgtaacagtggacgggctttactgctatgttgttatgccttacggtctgaaaacgccttgctgacattcgtgcgggcgatgagtaagactttcggggacctaattagggacaaagtggaagtctacgtcgatgacatcgtggtcaagactaagaaagggtcaaccttagtggaagacttaaccctggtcttcgacaagctgcgggcaacccacacaaagctgaacctggacaaatgcg

SEQ ID NO: 80211 - DNA, 584 bp, Zea Mays
atggtggtgatgaatttgctctgtaccgaatttgaaactcaattgccaaaatcacatctagcggaagttatagacttgatctgaaactcaattgctctgtatcattttacattgcttcatgatatgttaatgaaagaaaaaagcaaaggcgttcacactccattggtgccatccgctcgaactcaaactgtccccctgccaggtgggcaatcctcgttgtgcctatccccttccctccctatcccttttccgcgcctggcgcaaaccgaacaacaaggaatgcgggatccgtgcccgcctagaccttcccctcgtatgaccataaataaaggcgctcactaggatgctatattatatctacatgacctgaggaagatgcgagtacgccgccgtgagccactcaccaacattgccaaatacaaagagggagagaacctgtcggcgtgaatcacaatagcagcatagcaccatctccgaagataaagtgatcgattcacttggcactacattcgacagcaatgacttcattgactcaatgagtttgcacaaactaaacaattactaatatatctcattaacttaac

SEQ ID NO: 80212 - DNA, 593 bp, Zea Mays
tgccacaacaggtcaaggcacacgcatacaataacaacatatactatatgcatacaaatacgtacgtacactgttgctgctcaataccgtcaaacaaacaacacttggcagacatgctagctactagtggagtactagtttacatccactgattattctgtggtttgcgctatatatatggacaagatcggctactaattactgtacttgtttaatcattaatgacataattattcatggtttgctttaacatgggtcctccttgctctccaccttctctcgctcggtctcctcctccataccatacggtgtattgtagaactgattaggacctaattttgtgctagttcaagctgatgtagaactgtgaattgtatgtacgaatccgtagtctattctatgtgtttctataatccctacaaatataatgtaacataccttgttgtaacagttatttcgtggaacgtacgctaacggctgaaaacactatgtcgtgccaatgcaattacagtggaacatagtagtgtatgtgattgtctcgtctaccactatcagaaggaagaggaggggacaaaacttgatacagtgactcg

SEQ ID NO: 80213 - DNA, 635 bp, Zea Mays
caattagcaattatggattcttttcatagccgccaataccacatagaaggtgcaattaagcaggacaaccgaacggagataaaggtaatatagggattcttttcatagcagttgatgcattcattgtccagatactcgatctcctgtcgctacagtatgtgccttgtcagcctgtaatccatcttggctccagaatctcgtggaaggatgtactgcaaatgatcctggtggctcagaaactgttgattgagttagccttaactgctgaaaatgacaagggcctataccttagcttagttgatggagcgagcagatataaaaggtaggattttggtgggatctaatcagctggctcaacaccatgctattcatttcaatcttttggcgtagcagtgccactggaggtcgttctggatttcatgccactcatcatcgtattcaaagcctatttgctatggcgcaagacgaaagagactgtcataacatacgttcaagctcacgtcgaagtgccaggactgttggaaccattgcctgtgcccactcaagcatggacagtacccgactgaaggccttcctgcatccagcaaatttaattctatcatcatggttgttgtggatgaattcacaaagtatgc

SEQ ID NO: 80214 - DNA, 1376 bp, Zea Mays
ataactcctaaactatcaggcctgtggttatgaaattttaacacaagcaagatcagaaaggcatctacaactttcttataatcgacaaggactgattctaacattacattaggcaaacaatgcagtttctgaaatctgtacagaatttggacagattcagtcactgaatttgtaaaaatcataactcctaaacgatcagacttatgcccttcaaattttaacaccagcaagaaaataaggttatctaccacctttctatagcacatatctacagaaaatacaatttagttcatcaaacatacagcacaccgaaaacagtacgtgcagcccaaaacagcagtcaataaatttcagctcatatataattcaagaatcgctgcgttcgagagacttaaattattctaacgctttactatttgttcgagttaagacaataaaattagaaccaataatttgacttgcaaattttatccaagtcatttagtgcactaaaattactacaaccaattaacaatgcattcttcacgataatcactcaacaatttgtgttttaaattagacatcacatgagcactactactttttacccgcaatcataaccatacgcattgagactacaacaagtaattcatcgtaactatgaggttaaccaaatccatctaacaagttgattaaccaaaggaatggcatatcccgccatacgacatacacgtcggcttgcctattattatcgcagtccgagacaccacatatatatatatcacaatcacttacgccatcgactcctacttaacatgagttggctaatgacgtgactatttcccaattatcaacctacaccacctttcgccatttttggataacctgcgagacatacagctcgcgtaatacatcacaagttcattcaacccatcagtagagcactagcgcatttcagaaaatttcctaagactatgacgacaagtcgtcgatcttatcatgcacatcaaagcatcacaagcgtgtttacgaaacctatcggtcgacttgatcgacccactacccacgttccttgcctttcaaattttatcgcacaacaggaaaacatccccatttgccaatgacaccaacaatacctactgatatgttattcacatcacgagcacagttacacgccgcacactagtttctaacatgattctcgcataactcgtaattcaactactcactaacaataattcacgcacgacaactaccacatcgactgatttatttatttggaacaccgcctagcgtaccactagtaccccgcattttgactcgacttataaacatagaggaagtgatgactacttcggcatgtcaccacctctctatttaagcaaagacaatttcca

SEQ ID NO: 80215 - DNA, 651 bp, Zea Mays
gttaaatgaggtttgctcacatcctgagatttactgatggagatatttcaggagacaaaatcaagattcatgactttcgtcctcccaccaaggatgaagccaaggatcttcatatctctgagtctgataaatattgggagtctaccaatctgcacaagtactacagatacataaattctctctgcagaatgactctcatccccaaaggggtaatcatatgaatatcctgagagagagcaaagtcttgctctcattcatgaagccaaacagttctaaaaagcctaaatgtatttgatatgatttggcaagaaatcatacatgctgccttcttccctctcaagggatgtcttcatgcccccttcatcatgaagatgattgaagtggtgactcagtttcgatttgaaaaaaaacaagacatctctcctacaccccttctggattgatccaaacaatccagcagggcgattgaggaaagccccttccagctctcgtggacaagctgctgctagtacctcgcgtccctctcctggtcacggatctcccacaccacgtggtcgtggtcgaggtcgtggtcgcgggatgggagctcgactggctcatggtattgcagctttcttttctatgtgcagaaacatatcttccgatgttcat

SEQ ID NO: 80216 - DNA, 336 bp, Zea Mays
gttttcgttgtggtgatgcgcatcgccgtgctgagtgtcagtggagtggcagttgctctatctgcagtcaagaccacaaggatgtggtgtgtaggaggaattccaatgggaagctcagatgggagccagtgacttcctcctcttctcagggcactgtcaacatgatgtcaagcgctgagcagcaatttgcagttccaccctttccgcagcagttctatgtgcctgggacttcttagttcgtggcgatgcagggttttcctcagtatctggctgcgcctactcctgcactgactactcctatgccgtctcagtttggagctccgcgtctgcctcacc

SEQ ID NO: 80217 - DNA, 425 bp, Zea Mays
gcgaggtattgatggaaaatgaggatggccccattactcaagcagacttacaaaggtggtttgttgatgaatgggataaaagaactcctacaaaagtctcgacggatgggtgcacggacgactttttaatgagtggtctttccacaaaagacatgccagtgactaaagccgatttaatagatgtgctatgtgattacattatggcaatccaagacgataggacattagagtaagtgctcattgttttgtctattttatttataccaattacgtagagtcttgatatagacttccatcatgtcatgctacattacaggatgatatgggtgcgaagtttcaatccttttaagatagaaatatctgtcaaagacctgcagaacatattaagtataaatctagatatgactctaaaatgttttgacatg

SEQ ID NO: 80218 - DNA, 517 bp, Zea Mays
aaaaacacttgttttggaaaatcaagagatctttcaagagtaattttgatcaagagccaaaaactccctctttttctcataatcaaatttctcccccacaagagaacaatttttgcaataagagggttttgatcaaacaccaagaatctaacactaaaattttgaaattcacaagtggttggctgatccagttgctttggccttaatttctccccctttggctttaagcaccaaaaacaggggaactattcggccctttaccccattgcctcacacaaatgtcaaataagatcaaaggcaatgagaaaacacaaataggaaacacaagtgccatttcttcctcattaaggcctgccacctcaacttgtgctaccttattggggagcgcctccttgttggtccttgctttgagtgcaacgggttgcggcttgtattgagaaagaggtccgttggcgatgtcgtcgacgtaccttgattcttttaccatcatgcatccgcttataaactaccaagaatt

SEQ ID NO: 80219 - DNA, 542 bp, Zea Mays
agagggatccgaagtggaagacctctctggtggtgaagtggatggtggtgttgaaggtgatggccatggatttgtcttgaatcgacatcgcagcccttacctggcacgacagctgtcggtgtttggtaccgatgacacactatggggtatcacgcgtagtgtttttgggaggacagcgaggtcaactgtagctcgacggttcatgctaagcatgacgggaggcagaggattatacaggttcagaccgcttgagtgtgtaacaccccacttcgtatgaacttgtggaggtgtactgctttgatttcttggttacaaagagttctcaaggtagaagatggatatgcctactggtgtgtctatcattttcgtagaagctcccctctgccttattaccaatagaagaggagttacacacacgatgcggtgaacgttcttagttcacctatgtctattaaaatcatgtcgacttgctcgaaggccattgagtcttcagggagtttgcatgtcctctacatgcacggaatacgacccagtactcttcg

SEQ ID NO: 80220 - DNA, 967 bp, Zea Mays
tgttatatcttttgtgctctcagtattcgtctattacttgttttaattagctgatccatgtgcagtgtatcaatttgtcttagtatttttattcgtggggatgcctgactcaaatgaactcatgttcaacactgagcaacctacttataattttggagcctataaaaattctaagctaagaaaggtaataaaaaggaatgctattatagtcacatcatctgaacaacagtgaagggaagggagggatagatggtctgaatgcctataaatgtcgttcccttggtctgcttcttaaatttgaaaccaagatactatagtcaaatacttctaaacttgaagcctataaattggaataaccaagttaaataagaacaggggtaactattcatagctcagatggttgtcatccaatacgtgcgctaaggcacagacaggtgaggttgcatattcaatcccctagacagtaaaccattgaggcatattaaaacacattttccatgaggtttcctaagtgatcctttaggtaaacagaaccatacctagctccatatgaaactatttcccggttttaagtacacctaagttaaggttcatacattggagctctggcagtaaaacaatagtccttaccttgagacagcttagattaggatggggtggatggtaatatggcatgagcaacataccgcatttcatgcatggaggaaatcatttttactttctttcctagccatggtagctatgttgctccttaccaaggcactacatggagcatcatatggttcatgatgtaaacatggttttagatctgtctatactcacactcaagaaccagccaaaatgtgatattccacaacctgagagaaatcaaaatgaaatcatgtacaacatagtacatatgatttacatttacattacatatatttctttatacaaaagtaataaaatattataagaaggaatcagg

SEQ ID NO: 80221 - DNA, 324 bp, Zea Mays
ttgttgaactgcacaaaaaaggctgaaagaaaggtaatcacgtgaagaatatacaacatcaaatattgaaatatttaaaacaaacatgtccaataatctacaatgtcgtatgagctacttttgaaataaactatggttgaaaattgaatcatcacattgccttacaaacagtagtatattgctatagatgcctagacttggtgagacttatatgtgtagtactgagtacattgcattgatttgcttgctaaaaatctaccatgctccaagaaaacatgtaacttccagtataataactttcttacctagcactgatattacaaa

SEQ ID NO: 80222 - DNA, 528 bp, Zea Mays
tattagattatgctcgagatcgcgcattggggcacggctcaccgaagacggtcgctgctcaccgcagatggatggttacattgcacgattcctagtaattgctagattagtgagttcgggtggacttgggcatcgtttcggattcgtggggggggattgttgatcgggcaccggatccttatgcgccggcgaactcgctgccgcaagtgtgggcggtgccaccttgtctgggcacgggttggggatgacctgcgtgcgccgttggatcaccgtgaacgaccgcgattagattagggcgagaccgattcaatcggatgatcgtgtccgtcggtgggcagatcaacggccatgggagtttatgactttgttttcatcgtagccgtaggatcttgatctgatggccagttgtgtgtaccagttcgcgagtgtggtgatctaatccgagcccctgatttccaatcggacggtcgcagttagtggttaccctttcggccggtcctttttcgtttaaaccctcggggttctgag

SEQ ID NO: 80223 - DNA, 563 bp, Zea Mays
acgcggttggccgactcggactggccgtcagactgagggtggaacgccgtcgtcatgtgtagctttgtacccatcaggcgcatgagttcgcgccaaaatgcggaggtgaagaccgtgtcccgatcagagacgatggactgagggacaccatgtagacgaacgatgtcggtgaagaaagcctgggcgacggattcagcggagtacgggtgtgccaggggaatgaagtggcagtacttgctgaaccgatccaccacggtaaggattaccgacttgccgcggacgcgagggagggcctccacaaaatccatcgcgatgtccgtccagacaccctgtggcactggtagaggaaggagcaggcccgccggttgaaggtgctcggatttgtattgctgacacactgtgcacacgcgcaccatgtcctgcacccgttgcttcatgttggggaaatggaagtcacgtcggagccggtgaagggtgcgctggacgccctcgtggccatcttcatggaccgcccccatgatctcctggagtagcggggatgtgggcggaatgtacagccggcc

SEQ ID NO: 80224 - DNA, 913 bp, Zea Mays
aatgctcaacatagcttcgtgtactgatagggagaaagtactttatgcatcgggtcgcctcactggccccgctgcggattggtgggatgcatactgccctgcacacactgctgttgacaccatttcatgtgcagaattctccacccgcttcatgaattaatacattcttgctggtctcatgaagattaagaagaatgagttcctgtctctcaaatagggatgcatgtcagtaagtgaatacagagacaaatttatctagctatctcgatatgctcctagggaagttaatgatgatgagaaaaagcaatttctggaaggattgaccgggccacttcaataccaactaatgtcccacacattcctgtccttctagaaactgctagacaaggccatagctatggaacacaagagagttgagctaggagagaaaagaaaggctactaaccatggacaggctggaagtagtacccatccccgttatgctacacctcaaggcacaccagctcgtggtagttccgggcaacagactcaacagacccaagctactcctcaagcaagcaccctagtgggacctgttgctcctaatgcatccacaaacaggtcatgcttcaaatgtggacaggctggtcattatgccaactactgtcctaacatgctgcttacaccactccaactccgctgaagcaaggtcaggtctcaagaggtaagagccagaccttatacgttaatcggggacaagtcaaccatgtggaggcagaagctgaacctggagaactcaaaaacccagaagaggtgctagctgaaggtgaagaagccaatgtagaaggaaatgagcaacgagattagagtatttctttttaggagatagtatttgtaagacctaaataaggccttatgttgtagctagttcttt

SEQ ID NO: 80225 - DNA, 966 bp, Zea Mays
atttttaagctctttgtctaatttctcttctgtgggttccccctcaagaatgtgaataacaacatttaacatattcacctgcacttttttctcaggaatataaaaaccaaagaagccctgctccggaattccaaatccaaacaaccgaagtttcttgttattttggcattccgccgccatatgtccagactctttacatttgtaacatagagggtcattccggcagtcagattgatgatgtccagattgtgagcaacgaaagcatctaatctccttgaccagtccttcctggattttagaatccctaccctgctgcatcccaaatccgaaaacagatctcccctctctgaacatggctgagagccttgttccttatcacgattttcttggtttttgcttcccctaccccctgtctcattcctaccaaaagaacgattacccccaaagccacccctggctggcacaaaattcccacgccctctccagaaaccacccctccgagaaatcttgttacctataaaacttcctagacgatgatgtccaatttcttgctgatcctgctcggtctgttcccctggggccctctagagcttggcccgtaggtcttcctccctgctaaactccgaatccagcaagtcatcatcttccatccaatccttagggggtcgcttctagctattccccctggttctcttctccacgccatccctccttccttaaccacctgagaaaaggatcgctcaaatggtgtcggtggctcaactctcttgatacgcctagcactttgccctagccggcgtacctcttctggtcttgcctggtatcctttacctgagagaatgttggtcctgggcacccatagccattttgagttaatgggcctccaggaatgcctgaacacctaggccagggagaggcccatacaaacgtgcttctcctccccaacttccaaacgaccatccccgg

SEQ ID NO: 80226 - DNA, 441 bp, Zea Mays
tttatctatttgcatgtgtcatttctacttactatcataggtaaacacgccacttacacagttaaataaatacccgaaagacacctaaataaattttgcatcatgctgagttttactcgattgcgcatttgtggttaataaaataaatgagtcattagcaacatatcaagggatccataaaaatttaaactctaaacttggggacaaaaccatgaaaatagagaggaaggaatattgttcaatacaaacaaaattataatttgataacttcatcacagttggtatgatcaaaataaataattagctggtgtacaaagtgccccaaagcttgaatttgaattggagtttgaatttggaaagaagggaaaagacaaaagaaaataaagtaaaaagaaaaaggaataaaaccctaactgggccgactgtctccaatccgggccc

SEQ ID NO: 80227 - DNA, 466 bp, Zea Mays
actttctatctttaatgtacataccattctatatttgacgcaagttttttattattattattttcccgaccggtccccccctcccctcatcacctatgcttccgtgaaacaacgctccgaattcaacagtgcctaaattaagtgacacaaccctaaactttcatatgactactatatagcatgtgttacacacgatcccgaggagatgatcgatgatggcggtggcgcaagtgaggagagggagaatggaagggaagggatgattcaaataaattagttcatggggaagggagatgagatatccaactatctggaccgctgattttgatagtgtgttaagtttgagtacaatatgtttggtgaatttagtggcataatgagtatggggtgatttggttgtgtgacttttgcaaagtttaaactaatggattatatagtggtaagagcataactcttttctattata

SEQ ID NO: 80228 - DNA, 732 bp, Zea Mays
gttattgtgttgtcttcacatgcgatgagggaagaggaggtggaggacctcgccgacctcgagagctcgacggcccacaaggatgttgcggtggaggcgggagcggaagggcaatctttgctccaaggaggcagcgctgagggtcctgcagcggctgacgcttctgagcaggttgcaagaatgaaataggaaatagcctgacagagtgacagtgttcgctttgtgtatgatactgaagatcaattgttgtgcaggttccggcgtctgggcctgcacaagcaaatcgtgatgataacacgaatgatgatattttgatggatggaaatgtggtgtttcttagtagtgacacgtcttgcgaatctgatgttgggttgtggtcttcggaaggtgaaaagttggggagcccatttgcttggatagatgacgaatccgtggaagatgatttagattattttgtgacgctagatttagctgcggcggagtctctgttgagggccgccccccttgaagcgccgacgactttggtcggggtagcccctggtgaactgtgggggtgaaaaatatgggggtatcaaaagaaagtgtcagagagtcttcgcaaggtattagaatacatcgccgaatgggcatggagaggttgcgtcttcggatcggaccgcgattggatcaagttagccatcgtgacttactggcaccgacgactgggtcatgcttcttggagagggatctacg

SEQ ID NO: 80229 - DNA, 305 bp, Zea Mays
gaaagattggcacatgtgttactgtgtaagcttgagaagatatttccacccagcttcttcaatccaatgcagcatttgattcttcatctcccctatgaggcatgaatggggggccgtgcagggacgttggtgctatctagtcgagagatgtctaaagactattcgaaagaaatgtagaaataaatgcaaaatcgaggcttccattgccgaggcatacattctagaggaggtgtcaaacttcacaacaacttattatggtgacaaactgccgagcgtgcataatccaccccctcgttacaatgatg

SEQ ID NO: 80230 - DNA, 327 bp, Zea Mays
gttggccgagttccccttttcgtttgagttcctagaagcctgctgagagttggatttgttttgcttcggatatgggtagtccttgatgaaatgttcgaactttccacaattgaagcaaccattggaggaactgggaaaggcagggaaacgagcactaggggcactcggctgattggttggagagggggcagatgtgggatgaataaatacaggctgtttgaatggatatgaaggtggacgaggtgaagaatggtttagattgaaaggtcaaattaccaacattgttctcttttcaagtccttgagtagatctttcacccgcatatcc

SEQ ID NO: 80231 - DNA, 433 bp, Zea Mays
ctttaagtaagttagctaattcatcataggtaggagaagcatactcgtcatcactatcactatcacaaccatcaacaatatcattttcaggttgtaccttccgttcacctttagccatgaggcatagttgtgaagtggatgaaggtgatggtggtggtgaagagaaatccccagcgatggcggtaaccttttcatcattttcttcttcacttgaagaagacccgcttgaggattcaatgtcagcgagctagtcaccaacaatatatgcttttccatttttctttttatgaaatctcttgtgcttgccttccttcctcttgaagaatttgttttgcttcttctcagcatcattgtcatcatctttcttgcccttgaacttgtttttcttgaccttgttgcattgatgagcaagatgaccaagttctccacaatt

SEQ ID NO: 80232 - DNA, 365 bp, Zea Mays
actttatgaaggtgtcagacgccctacaccggtacaacacattccctatgagagtgtaatgtgcagattgtcgagcaaggcgctctgcagctaccttgtccttcggctcttcttcatttctggtatacttgattatggggatcctttagtcgtttgggtctagtcccgttttgttacactagtctaccgagtctagggatatacttgggtgatgtacctcttgcacaaaaacatttggaggagcttgagctctgctggaaccgagctttgacagcgcatcagttgccatgttgcggtccctttccacatggtggaactcgaggccttccaacttaccttctacttgtctgaagacaaaatagtac

SEQ ID NO: 80233 - DNA, 322 bp, Zea Mays
cccgaaacccccaccagagaacgcgaatttgggacttcccccaaaccggttgaagaacatcgtgaaaccggcttcaccgcggttacccctttttcggtcagtccccgtcccctgctttctcgtttgagcactctcacatcgttgtgatgcctgccaaacccttaatttgcacggagtagcctctggtcgccgggaacgcgtcggtcctgccacgctgctcacggccaccgtggccagagctccttagtcaatcatgagccaaattaagttgggggaaacattcatggggactcggatttggtctcggccgaagcttagcgcc

SEQ ID NO: 80234 - DNA, 517 bp, Zea Mays
gcgaccaaggagtgaaggcagatcacatttattgcctccaattacctgctaccaaaatttactgtgcctcttaagatatttgtttagaagcacttcgagagttaggttcggttgaatcatccttagtgagagatcattgcctctgctctgatagcctacattggcggcaccaaggagttgattagccttacctccttagagtcgcgacatgacaaattgcctaccaaaagttgctgcgaaaatgctgaaggataggctttcgaagtcgggctacattgagatcgggtggtcgactctgaaagagaaagatttgaagtccatgaggagacttgggtacttcagtaacagagtgaatgtgcatctcctggggatgaaacaatgccaaagccggggaaagatgaagttgttgtgtacaagagcttttcaaggcgggacttcggctcctaatgtaaatgatgattgcgaatgtgctacaaagttatgaagtgtttatgcactagctgactctgaatgccat

SEQ ID NO: 80235 - DNA, 526 bp, Zea Mays
catctaatctggcagggtgatgtatgtatggtttctgtaacaacactgcttgtatcaacaggttgtacccttagttttctattacgtagtttttgctggctctttagcaccgacaccaatagtcatagctgagtttttttcacattaatagtggtgactttcgaccttgaatgcctgagaaagaaaagaaacaaacaaacttttaaatcatgtgaacagttaacttgtagaatatgcaagttgtgtaggagctaggactgttgagtacactgatttcttgtgagtagtgtctattactgataataccatcaacaattggtagtgattggttccactataagtgtcttagtctatactcacagtttggtaacagtttttctgtataaaatacagttgttatggtggctaattttggcgcaccaacgtctattttgtaatgtaattttaactcctcgtgcactcaacatattttggtagaactgtaccaacatctaagactgtcttcagtggaccgtgtaaaatagag

SEQ ID NO: 80236 - DNA, 285 bp, Zea Mays
cttactccatacacgtcccccatattctagccagttgtcctatcagtcctcgaccgcgccaataacacgatctgatccaccatgtccttacgcctatcagggccctatatgtcagccactatagctactcatccagtttctccagtccctcagtcaagtcccaagcgttcgcccttcaccactctcagtccatcgacacgaatccacacgaccttcacatttctcgtcaatcaccgtcttcgaactccacacctatgcaacacaagacaaaatacatgttgcata

SEQ ID NO: 80237 - DNA, 585 bp, Zea Mays
gcacgctaggtagatctatcgttgattccacgtcgcccatgggacgggaggagcggagctcgcgtcggagcggaagacgagtgagctaggagacgggctcctggtcccttttggtgacgaggaggttcagagttggctggactcgatccaacttttatcacttagtgagcatccttatccggaggcgagcgccctaatcctcctcgccggtggcagtgtaacggcggaagaagcggtcggaagttgttgcgaaatggatgggatttgttgctagagcaacagctacgagaacgctgctgtacgaacaaaaatgatagagatgggatatgatttggtaccgcgggctgattttgtaaaaaatacaaggagttctttgttaaaagatgacgtgggacgaacattgaaactggtgttttaatatagtagatagatagataacagccggtgtaacattgaacgtatgtatgacagttgagatagtgaaaatatcgataattaatggacgtaacggaacttcttgcctcccggtcgacgtaatggtacgaggcgagcacgcagtggacgctccatgaagttgaacatctc

SEQ ID NO: 80238 - DNA, 317 bp, Zea Mays
actaaaatagcttcgatgcggaatgatggaagggtaacgaaggtagcttcgtcataacaactcgggaagacgatacaaggagaaggtgttatccaagtcattgagggcaaaagacaatgctgtccctgtgctatttgtaaaatttgtgtgtaatctctgagggcataaatgtaatttcgtatgaagctgaacggctccctataaatagatgaacaatgccctacataaagtatgtttctggaggggcctataaactgttgcgtgtaatcttctcttcaccttcgctctaaatcactttctagagccgaaggtatgtt

SEQ ID NO: 80239 - DNA, 574 bp, Zea Mays
agaatattgaggagattcgtcaagctaaagaggaatgctaaaatattgctaaagaatgtgctaataatttgaaaaatagttttactaaggctgttgcattctcctcagagcagaactttatccgcggtgatcctgacggggttatccggtggattaacggcgaagccgaagcttttgaggagatcctcagtgatagtggggacttctgcgcttttgtcggtgcccgtggggccgtgtcggtccttgaaaaggtcggctacgaacatgccaatgctgtggttcagccaggattctccctttcagccagcgatattagaaacccttcggtcgaagccacttcaataagtggaaagttctaatccgaagtatggctgaagggtggccgagagataactgatgaagctatcagaaagaacgagaaagagtctcatgacgccttggaagaggccagaggaactgaaaaagctgttgaacatgccagacttatagatatatctatcatgacttagctttgtaaattattttagcttcggtactaacaaacacttgtattatggtacagatgagctttctc

SEQ ID NO: 80240 - DNA, 735 bp, Zea Mays
gttactgagttgtagtttgtccagctgaatgggttgctcatctggcaggatgggctatggatcctgctgattgggctggacattcacaatccactgatcccaatccccctggccaaagtcatcctactgagccggcagctctccacccgcaggctccggagggaagtttaggtcaagcccagccggaggcatgggctgacccagcccgaagaaaaccagggggagctgttggccattctcgggggccgggggaatggggtcctcatcttgagcttgcccgccaagcatggtttgctaaataatttcacattgaacagtccaagagtcaccagcaaagccctcagcctccgaaaaaacaatgaattgggggacttcttcaagtgaagtgacacgaacacgaagcaaagttctagagacattattccgatcctcctcccagagaatcagccttccaaacgacccaatggcggcctgcaagtgctcagaagaacgataatccagcggaaaccccagaagcataagccaacactcgtggttgaaaaaaagggcccgatgattccaggcgtcattatgacggatcgcggtgaaagtagcatctaaatattgctgggggccaagcagaaccaaattgtcacgctccaaaacactacgaaactgcactatcacctgccccaagtgagagcgctgaatggctctaacaccgaccctacgatgctcaacaaggtactctctgac

SEQ ID NO: 80241 - DNA, 423 bp, Zea Mays
cttggtcatgcatgcatcgtccgagagattcctccgtgcatattttttttgccgttggttggtgcaagagggcttcgtcgttgacaatggcgcgatgagcactgcactgtgctgtgctcatcaggtgcgaagtgctgtacttgcgatgacactgctgctgtgaatcacgtgatcaacttgggcctgtcaactgtcattgtatactattcaggtgaaactgcagtgtgtcaacggtacggtagtgaaccagatcaatttgacgatagccgctttagtatcagatgttttgctttcatcttccaatgacacacttgactctcctccagcttttaagaaccaagccagattcgtgaccagttaaaacatgttcatttcttggacacttctgccgagtcatgtgatcaacttgagcttgcgtctgat

SEQ ID NO: 80242 - DNA, 310 bp, Zea Mays
cgtcgccgttagccacgaccccacctccagccccttcgtctcccacatccaccttctccccttcttcgaccctattttccagcttgcctctgtcccgctctcattcgcgagtgagagggcgactccctcgtatgctccctgtctccgtgccgccgccgcttggcagcaacgtgtctgcggccatcgtggtcaactctatttctgtctccccctacgcgctcgctagaccccctccttctccaccgccgtggtcgggcgccgttcgcctcctccgttaaccttgttcgctggctccctttctcctcgccgt

SEQ ID NO: 80243 - DNA, 725 bp, Zea Mays
ttacggtacagaatcgggttaagcgactacccagctctggaccaccctggagaacgtggactctttcccttaggcgaggtccctagtgatacgttctatatccatcatcaagtgaaggcccataaataggtgcaaagtttggataaataacccgaatatcatgattacaactgggatttagatccgcaaaagggactgaggaaaagcattatgcctaaaaaggaaaagaaatcgatggacgagggtaaaactttcctttatcactagatacatgtgatctacgtggtgaacaccaaagatcgggtttacaagggtggcccctactaggctagaccacatatggtgctagagaccgggtttacataggcgaaccttaccggaccagaccacaaataaatgcatatcttatcacaaaggaagagttcattcatgctactttgtaagtaggagataaagggctaacctaaaccacctgggttccgttgcgcgtcggattccaagggtaagaaacgtctcgttctatcttagcgatgcccaaggacaaagctcgacgaagaccattggctgctaccccgaacaccatggagcttacgaccgatgagtcgggtcttggtgcttgtgttgaaccccttcggagcacgtagaatgtccctctgagggtctcccacaaccgatagactgcttttgctagggcaaggttgatgtaggtgtagccgctgttgccc

SEQ ID NO: 80244 - DNA, 460 bp, Zea Mays
cccgtatccgatacccgttccgggtacccgtcccgttttcatccctacacctgggaaccccctccatccacccgtgagccgccactccataccacaccatcgccgtgaggaagtcagaagctactacaccaccacctctgcgccgtcaccgttcgggctccgtggtgaggtttggggaacatctccaggcgcgtggaaactaactacagcgtcctttggcacagagtcgatccaaatcgtggggattgcttgtcggtgattgacaatgccgcatcatgctgtggaccggtccgtactcggccctaattgaggtatttttctcccccatctgttacgtatggttctcaagagcgttttgcacctcgctgcttgcttagtcgggcttcggggcgccaaaaggacgttcgccggcgaggagtgccatcgcgggcttctgctccgccgtgcctcggcggtagga

SEQ ID NO: 80245 - DNA, 321 bp, Zea Mays
gatgaaggcaataaggaaattcttacgtctgtcagtctgaacccagcaagctacaaggattatactttgcattcgggtattttgagattcataggccgagtatgggtgggaaataataggctggctcaacaaaacattctacaagccttacattccagtggaattggaggtcattcgggtattcatgggacctatcatcatgtcaagcaattgtttgcctagcctgctttaaagaaatcagctcaagaatttgtctaatcttgtgaaacttgtcagagagctaaaactgaacacgtgaagtctccaggattattgcagcca

SEQ ID NO: 80246 - DNA, 524 bp, Zea Mays
ttttggaggagggttcctgagtgccatgtcgtcgggggtactgatacgataggatagattcggggctaaatttgtgggcgccgtctctaaggatgatttggtgatttgggcattgggttccgtctgcgctccttcctcccaattttgggttccctctgaactctgaattctccatacatggccgcatcgatctattacgcagttggtagaatcggcctttccagttctcagtactcatatttgggctcatcccatctggggagcgtcgcgccaccatttcgtgctacatctccgtgtaccatgtacaatgatgagcctgtttggatcccgtggcactaagtactagtttttatttatgctgcgtccaacgggactacgggaggaaataagcttgctagagccgcgtcatttctttctgcgtgcctttccaggagctgtcccggtgtaaattttgctcatggttaatgcttactcgttgtgctattagaagcttatgcaatcatattccgctgtatcttggagct

SEQ ID NO: 80247 - DNA, 465 bp, Zea Mays
gcaggatcccgttcctcggcctcgtggtgacgctggatgttacaccgcctattccgatgttgacgtgcctcacgctttgggggcacctccctccgtacagtgggctcatcatcggagacgggtgcatcctctattcttccctggataaacagtacattcaggaagaaatagcttggtgtggcgttttgtgctctagccatctcccttgagagggagcagtcagaacaatcatcgttcatgttcccacagctacatcagtggcggggttacccgcttctttttgcccagtgatctgagtccatgctcgagtgagtgacgtggacaaaagggtctgtcgcggtagaggtgcagcctcagccgaccgagtcataggtgtcacaatggtcctgggtccacccgacgtaggtgcaattctgcacggggcggaggcttatcgagatcctcatgccttagagttcgtcggcg

SEQ ID NO: 80248 - DNA, 556 bp, Zea Mays
tttgataaatttaggattatgggcattagtaatgtactcctgaaaagcatcagactctccaaaccatagaggtaggtcctctttagctattaaccgacagagcttatttcttgcaacagaaggagaatactccgaatgtttcaaggatccctcagagttgtacttaagcaaggattgaactatacctgcacgttgttgttctttcttagcagagcagttatgacgaagcaagtgaccagttccagaactagatttaccacttaaagtaaccttacattacttgcaaacaacgccataccttaccctcataccattgacgatgtggatcagttcatcaaagtcgttccacactttagatctgggaggacacttactagaactcgtggcagcagtgcttgtgtaggtcggtgttgggctcgtggagccctgtggccatctgaccaccggcacaatgaagaggggggcatcatcgatgttgatggcagcactgtcgggtttgccgccaaacagggccagagcatcctcttcttcgttatggtcttcgagccggtgcttc

SEQ ID NO: 80249 - DNA, 635 bp, Zea Mays
ttatcttcatccaaatgcataagtgacaccagtagggaatatgtgatcttctttagtttactcagcccactctgaatccagttccctagtcctgctgccctattcatcaccctcatgttcagtccctgttaactcataattacatatggcaacagacccatctcccttaatacacattactctccacacatagttctattaacttgttttaatcacccaagacctagaatgcaaggatcaaaagttacagtgccccaaacttattccaaactcactgaattttctgcttgagttatctacaatagcataacaccaaccctgatagccaaattggaacccactcttctcccaattctacacaacaacaagactaacaccttataataaacttgtactactttaaattatctttaactttaatataagattcttagtccaaaaccttatggattgatcacaaaagggctccaaacttggcaccatacaacaatttcatatttcagaactgaaccaaatgcagttaaagcactatctgtcagtccaacctcaagcaagttttactccactttttgtgtggaatcaagtcaaacccacttaaatagatttgttcactaattatagatcttcaaggttgc

SEQ ID NO: 80250 - DNA, 907 bp, Zea Mays
aaacttcaagagtctcatttttttatagtcattagtgggtgattaggagagcataggtatccagctacatattatgtaggatataagctggacaggttgaggtaagaaagattatggcaaggaaaagaatttatccaatatatttaagtcttgattcatctcgagattcactttgaccattatatccttccttgtcgatgccgatctttccttctccggtcttgatctcattgatttgaggttagtgtatatcatcggggttggagaatatggttaagatagatatggatgagttagactacatgatgtaggtcaaaagtttgtttgatgttaggtggggatagatagattatacaattcatcatgcctctattggttgggatagctcttctactcagtttgagttggcttaatgcactaatttaggtttaagtgcataaggggagaacaaggtttataggagtaggatctagtttatttcactagtattaacttgtcaagtgactcacatcagattgattaagctctagattagtattatttgagtgtgttatgtcaaatttcagttgggtgactttgttttaggtatggcttggaaaaatgatgatgtatatcattgaaaatatgtaggtcaagctggtagattagaatctccctttttatatagacaaattaggcaatttatcaagattgtgtaggtcgttggtatatggccaagttggtctgggcactaatttaggatttagttaattaggtgaaaaaggtttttttaggtgtagagttcaaactagctaaccagtctatcttactagtattaatgatctgggttaatcaattctaacctttagatcggagcaagagaatgcattagataagagatcaagattagattagatttaactaggtc

SEQ ID NO: 80251 - DNA, 305 bp, Zea Mays
gcccaattaagtcaaaatcagattcccctgagccacgtcatattgaggtcgaaatcagattctggcagttattgatctcttatggagtaaggaaaatttctatgattcgtttgagttttaccggaactggaagttgtggtaaatcattaggttaagtggatgagttcatttttagtgtcaaatagtcatgtgtggttacagggaattcattatatgaactgattgcggacattagggtgtttgtgccctgccatacactgatacactatcatctatcatattgccttctgatggaaatgctcgat

SEQ ID NO: 80252 - DNA, 682 bp, Zea Mays
gcaggacggtgcgggtacttcccgtggtcgggaagatacccctaatccaccacctgtaccaccaacactggcagagactatcgctgccttggttaatgcgactgccgataatacccgcttcctacgtgaaatggcaggtaaccaattccagcagcaaggcggaagagctcctccataaggaccgcgcgaaacctcatatctagacttctctgaaacacgtcccccactctttgttaaaactgaagatcctcttgaagttgatgagtggatcagggtaatggagcagaagtttggattaatccgctgcaccgaaacacagaagttgttgttcgccgcccaacaactaagaggtcctgccagtacctggtggggaaattttgtggcgattcaacaagccgaacatcaggtcactttggatgaatttaaattggcattccgtgagcactatattccagaaggagtgcttcacatgaaacaagaggaattcattcgactaaaacaaggaggggataccgtgatgcaatatctcaacaagtttaatcatttatcccaatatgcaattgatcaagtaaacactgacctaaaaaagaaaaattgcttcatgagaggactcaacgactggctccaaaggaaaatggccacctgcctagatcttacatacagtagggctgtcagcacggcg

SEQ ID NO: 80253 - DNA, 755 bp, Zea Mays
tctctcagccaacctcgaaatgaagcggctaagggcgctaatgatcccgtaagcttctggacatccttgacttgggtcgggggcctcatcgcctttatcgccctgatcttctctaggtttgcttcactgccttggtacgaaaccaggaatcccaacaacttcccggcggaaatgccaaaaacacatttgtccgggttcagtttcgtgcgggttgcccgcagcttgtcgaagaccagggtcaagtcttccactagggtcgaccctctcttagtcttgaccatgatgtcatcgacgtagacttctactttgtccctaatcaggtccccgaaagtcttactcatcgcccgcacaaatgtaggcaaggcgtttttcaaaacgtacaacataacaacatagtagtaaagcccatccactattacaaaagcagtatgcttcctatcttccctagacatctcgatttgatggaaaccagagtaagcgtctaagaatgataacagatcgcacccagaggtagaatccatgatttggtctatacgtggcagtggatacgggtccttgggacaggccttatttaggctggtgtagtcgatgcacatccgaagcttcccattcgatttggggacgatgactgggttggccagccatattgggtgatgaacctcttcgatgaagccagcgtctagcagtttccggacctcctttaggatgaagtcctgtcgctcaacagactatctgcgaggcttctggctcaccgg

SEQ ID NO: 80254 - DNA, 478 bp, Zea Mays
gtctgttgctttgtcaagctctggtatagcggcaacagccattgttttagtagggcccgagtcagatgattctccagccaacatgtcaagcattgcattcatttctgcatcatctggactcattagcatctcaaaatgaacttgcctctcatcatttggaagatcacaaagataagcaactaagacctcaatatcttcgggagagggtcgcactctaagacccaggacactatcaccagcaggaggattagacacaaaattgaaaaaggacttaggaggtggcagattccaagcagagtaggcaacaggagcaccaacatttgatactttgcctctcaagatcatgtctagccagctcaccaaatccttagcaggaattctcctattggtaacccgagtggagtcagtaacaccactgtacaagtaagccgggtatgctctgtcctttaggggttggatgttcttaaaaacaaaatca

SEQ ID NO: 80255 - DNA, 822 bp, Zea Mays
ttcttcgatgtgcgagtccacaccaaagcttagtttcgaaggaggtgacttattgtgcttgcaaattatgaatcgtaaagtttgtattgtctacatcgatacttattgtgtgcatggatcttgcaggttaaaaaacagcaccatgtctttcttcacattgttgacatcgtctagaaagtcaacccctacttcatgtagagacctaactgcactggtcaacttgggctcagcgcactctagaaggttgtggctgccattcgttttcttgtgtatggtgttcctatagatttcatggatttcctagcatgctcgacatcatcgactgcatgcactaggagtggtttaactaccctgccgcttggaagggtatgttcactagttgggcaagcaccctcccatgatcctcgaggcaatggcctcgtacaatatatggatttggcatgcatactttaggatgcccaagagaaacaatgatatcaatgtgttggatcaatctcctatttttgtcaggcacgttagggggagagtcctaattggtttcatgatgaacagaaacaactatgacatggctactaccttgttgatggtatttatcctgactggctggccttcgttaagatgttacgacatccaacaaagctagcattatttggtgttctgcaatcgaggtgggcagtagtctggtgtctagtatatgactagtcgcgttcatacattagtgatatattgatcgcatgcattgtaatgcacaacatgatagtggaagacgaaagggggatcacaatgaactgaaactttgacaacctagtccttattgctaac

SEQ ID NO: 80256 - DNA, 357 bp, Zea Mays
gactttctgtgagtgcaatcaagctctaattgtgggttttggtgataatgatcaaacaatttgagctctaatatgtttactaagtaatgtgacaggaaaagcatcgaaaaggaagaaaacttatggcaaaagagggacctcaagagtttataaattctgttgtacatatcatttactttactagtgtagaggtgttatactatcaaggttctatgactttaattgttgttcttggttctccaatgctcaaactccacagaacacctctacctaagcctagttagccagtgccaaaatctcatacaaatctaattagtttgggttgcacggcactatcgggcatatgcgcggcactac

SEQ ID NO: 80257 - DNA, 302 bp, Zea Mays
gatgaaagaaagccgttttagtcccacatcggcggcgaaacagaggccatggagcatgccagtgagataaaacagtgagctggtgcaccggagtaagcatgatccttcaggcagttaaagggatatgatgagtggtaaaagctcggttttttattccgagaggggtgcctgccccaaataagcctgttacgacaacatggcgctcacaatttgtaccatctgatcccgaaattaaaacatattgaatttaatggttctatttggtttctagtgattttttagtgcttctattttattattta

SEQ ID NO: 80258 - DNA, 860 bp, Zea Mays
ataggggctggcttggttggccaactcatccaaccatctgacaaaccctagccaccacaaaaacacgtgattcgatctccctaagcgcacatagcgatcggattagcttctaatccatggaggcaatggacactagagctccaacaaggcttgtccctccttctccgactggctttgttcctcctcctcctccacagggacatggcgatggtgatggtgatcgcgaactagggagacgatatacaagggcaccatctatctaggacatcaatcaactggctaaccttgtccttaatcaagggcaagaaggtatgtgcaattccctcctctaattatgtatttactgcatgaatggattagattacctcactatttaatcagtcctcggattactaagtgagacattacaagatcctacaattctatcaatggcatcaagagctaggtctgttgtctccttagatcaattcgagatgagtagaatcaagaagagaaaacaaatagtgggatttaggagggggcaatgttcccctgatgatccaaattcgaagaataagaatcatggaaccgaggggcacatggggtcctaggatctttaatcttctagttattgccccatgatttaatgtgccttggaaacttagaatattccacccctagaggtctcaaggcataagggaggtagggcatgtgtaggagacctagaaggccaccaagtcttctagcaatcgagttatcttatctagatacttcactatagtgttacttagagctatgcccctcccttggttagggctagaagatatacctgggacttgaggccctagaaacggtggtcccattatgatgggtttcgaatt

SEQ ID NO: 80259 - DNA, 428 bp, Zea Mays
tttggcaagtcactcccaagcttcctgggctcagttgccaccactggcactgctagcgcctatcctggttcataatcaacaaacagaagggcatcatcaggcacaacaacaacgtgtcctctgggaagagtccgaagctcgcacagtcaacagcactgtgcctgagtcgagacatatctactgaaggtggcacagcgtttcggccaaagagtgccttgatccaatgtatttttactctgttttgcctttacattttctcttaaaaagacaatacaagaaggtctaaccttcagttgatataataagtctgtggttacaccatcgtgtgtaacaaaaaacggatcaaaaagccccaaagtcattcctaagggaatgcagagtaagttacaaagctctaaagtcattcctaagggaatgcagagtaagtt

SEQ ID NO: 80260 - DNA, 832 bp, Zea Mays
ccaaaggagaccatcactaaccctagcgaaggtggtttagttcgattgaaatataccttcaggtttggagaccaatttatcgaaccagacgatgactgattgaagtgtgttgaaaatactagtgatgaactacttggagcttactccaagtctgaagataatgcactatctgtggccttcaggagccaaaaaaagaaaaggctaaatagagtttttgatgctattgggtttgtgtaccctgactatcggtaaccgcaatgggggcagaaaagaaagggtgaaacttctgagaaggctgttgcttcagctgctccaagcgagcccgcgctgaagaggaaaaaggtgaaggttcttactcaccgaccgcgctacattgaaccagccatagtgcctaaatttggcggtgagacctcttcggctattgaagccaaaggacttgttcctacgcagaggattgaagagccagctgcaatgccgaaggctgacaaaattgaagaaccgagaaccgaagggacgaaaacatcagaagttctaagcccttcggcaggagtggaggtgccgaagaaacaaaaagatctagcagcaacccccaagagaaaaaggatggctagtgtattagatgtgctggagacgataaaaacttcaagctctactccaggaaaaattgccaaggcttcgaaaacacagattgaaaccgagacaaagctgaccgaagccgaagctatactgagccaggctgacgccgaagctgggccttcagtgcccgccaaggagaaatcctcagaaactggagaaaaggcagcggaagaagagggtatagaacaaattttgc

SEQ ID NO: 80261 - DNA, 820 bp, Zea Mays
tagactaattcatgtgaaatttctacatgattttgtcatgtggggtctcccctataaccgtcggagacgcacgagggacgtgaggcgcgctgcagagcgagcagcagccagggccacaccagcactagaaaaggaaagccaggaaatcagtggctagaagaaggaaggaatccacggggcatgcagccgccacctctagagaaggaaggccggctagaagaggaaagagaatagtagaaatcctaaattatagagattagtttccctttagtggagatcctaaatcataggagattagtttccgctttctgttgcaactcaggctataaagccttgtagccggctcctgtgagaaataagcaataacacagttatctcctccctcatccctaccactctcaagccttcggaataggagtaaaacctcaccggagaagacggaccgagggtacgacctacgtagccgagggcccccttccctagactctaaggcccttgacaacctggtatcacggtcacgtcgatccgactcttccagttcatctgctacttccaccgcaaccaaccacctagcagccatcaacactgccaacgcaccgtcatctcccacctctgcctcaccccagcccagtgccatgatcgaacccacgatcgccgacctcgccaaattgatcaagggtctcaccggcaagatcaatacccttcaaaccgacatcgacacgatgaagaaggacaagatgtcgtccttgggcgcccaggtgccgggcggcggtctcgacgagcaacacaacatcaatcggccaccgcgtttccagaagat

SEQ ID NO: 80262 - DNA, 466 bp, Zea Mays
ggaagcataagcatcttttatgtcaagccatcgcgtaggcaagatgagatttggttagagcaaagataggttgtggtaagagagatttgggcaagggaaactttcatcccggatggtggggcctgactcatctcgcgatctggtttgacttctatcctttgttgatgaggttgatcttctcctttacttctccggtcttggtgtctccatctagggtttagaaggtttcagataggttgtgaaacatgagataggtcaaacagggtttattttgcttttaggttgggatagatggattaagcaacccattaggtaggtctggcagttgtgcatggccgagttggtctagggcactaatttaggattaagcgaactaagtgagaaaagagtttctagatatagagtttgatctattaactaatctgggttaatttgctctacccttttgattggtgcaagaaatatg

SEQ ID NO: 80263 - DNA, 674 bp, Zea Mays
ggagaggaccaacaaggacttggaaaaggccaagatgtcaaggaggagaagctaggacgttcgcgacaagagggagccaagtccgactcaacttcgtctccagctcggagtccacgactagtctgcactaaaacggacgcctaggatgcatccaaactccgattaggtcacactttatgtagatggaaagctaaagagataagatttccaaccgagctggaaacaatttaaaattcgtctagagtcaatagaaatcgtcgaaacaattcaacatttagattttgtttcgatgttgcgacaccatgcgttgggctattgggcagtgtatcgtgttggagccaattaggggtacatttaggggtttttcatgcccctaacctcttttatcagcaactgccgccacattaggattttgtcatcgaactgtgtcgtgatttatcgtttttgagaccccaattcgtgatcaatacctgtagaggatagaggtacatcctctttatttagaagacgctttaaaggacgctggtggagcatacaaagagaatcttctctaaatatagagtacagaaccatgtacagtcagcctaatatgaggactgtacgacgtgcttcctttttacatatgatatgatctaaacagatgttttttttgcatatttattaccagcattgag

SEQ ID NO: 80264 - DNA, 846 bp, Zea Mays
taatctatagaacacaagcttaccgtgcggcggattcacggtgctatcctacctccgatgaggaattggaggtgactcagtcgatccacgctcccctagaagctatgccctggttcccagcaatctgaagaacccctccaatcaccaaccgagcagccagcgttagcgtaccgaggttttcccctgtggcaaccccgctttcttttctctttgtgcatggtgacagagcttggtgatttgttgacgcgaggcggtgctaggtttctgggagaggcgagcacgagcggatatatatgcgccataggggagaatctggatagaggtggtgagcaaccgatggtgaaggcgaaggactgcggcggcggcaatcttcttctctctccctctctttctgtctctcaaccgcggtggatctcggtgagctggggagcgcgagggcgcagagttttatacactgacccgaggaggtaacgagcaacaaccggcgacatttatgtagttggatcttcggtcgttccgagctaatgccgcgcaatggggaggaaggagtctgacgtgagatccgtgaggttgaggattgtgctaacaactagggcccacccaacagagacacgaagtgtgaaacgcgggcgcagagtgcggatggatgaccggccgagcggctaagggtgtgggtccacatgtcggcgcagtggggaggattggctgggctggcaacgcaagtgagatgggccgaagagggtagattcggcccacgaggctgataggtttgatcttttctgttttttatttcagagttccttctccaaatttaattcaaattcaaaattcctatttcaaatctcc

SEQ ID NO: 80265 - DNA, 359 bp, Zea Mays
gttatttgcaatttgcgtgagagattttgtgtaactggaatagcccttcctctctatttttataggtagtcagaaggagggaggaatacaacgggtagaaacggtcgcgcattaattaaaactagaaaccgacgacccgtcactcgagtcaaaatgcgcaaatgatggaaataccaaaaaactcatgcacgagggccgtcacctagctagaacgcataacgtcttcctcacacgatgtcgagtggggggaaaagttgatttatggaatttgtccattttgtgtggcagattcttcgctgatggcgcggccggtaaactttagaggtgcaggaaagaccagcagagtccttttagcaaca

SEQ ID NO: 80266 - DNA, 1176 bp, Zea Mays
tggaacgcgatgatttcagggtacgagcagaacgggctcgctggaagggcgatcgaggtgtatagggagatgcaaatggccggggaagctccagattccgcgacgtttgtggccacgctctctgcctgtgcgcaggctggcgctttggacttgggacgtcaggtggacaagctcattgtttctgagaggatggagatgaatgtggttcttggtgctgcacttgtgaacatgtatgccaggtgtgggcttgtgaacaaggctcgtgagtggttcaatatgctccaggaacgcaatgtggttacgtggacctccatgattgcaggatatggcatgcacggacatggcggcgaggcagtcaagctattcaatttgatgagacagcaagggccaccacccaatgatgtcacttttgttgcggtgctgtctgcgtgcgcacatgctggattggtaagcgagggccgggatgcttttgcttcaatgaagagtgtctacggattggtccctcgtgttgagcactattgctctatggttgatatgtatggaagggcaggacttcttgatgatgcgatgcgatttatacatgattcgatacccggagagcctggacctgaagtttggacagctatgcttggtgcatgcaagatgcacaaggatttcaatcttggagtggaggttgctgagcgattgatcgccctcgagcctgagagtccatctcaccgtgtgctgctttctaatctatatgctttgtctggtaaaatgaaccatgttgagaaggtgagggatacaatgattaagagaagattgaagaagccaataggatatagcttgattgagattgctggtgttgctcatttgtttcgcatgggtgagaagtctcaccccaaaacttcagagatttaccaatatttggagaaactgatcgaaaagattactgatgttggttatgtgcctaaaactgactcagtgttgcatgagttggaagaagaggaaagggagtttgcattaagataccatggtgaaaaactggctgtagcctttggactcatgatgacttctgggtgcaccactccaatcaggataattaaaaacctgcggatatgtgaggattgtcatctagctatcaaatatatgtcagccgtggagaatcgagagataattgtcagagatatgcaccgg

SEQ ID NO: 80267 - DNA, 1037 bp, Zea Mays
atgtggctaagtctgagaattagtgaacatggctgactttggagctctgtagttctaaaaatacaaagaatttgcctagggtcaacacatcaaaagtctagagctataataggagaacaactttgcttaagtaactaagctttgatcacatacaaagtttggagaaaaataagctccaagttgtgctgtcagtcactctaatgactgaatttaggtcaccagtgacattggccaaacttttgggtcaaattagagtaagatctattgctcgaatgagggtagttgctatagcagaattgtagctactatgaagggctacaagtttgctacagatgtattggcaagttgttgcacaaaaattcgagatctaggcattgcaattcggcctctcaggcactctgaatcagggcttcgatggtatagtgtaaagatcatatcgccagttcagataactcaccaccagcgaccgtgcacccggattcatgcccgtcacggtgattcgtgctcggcgcagttggataacgcagaggggtaagaaatatcgcgtcgtggatgaactacggccactattctactccggttgcagtacccgcctgagtcacagccgctttggataggctcgccggagttagccacctcacaaccttgcaccacatgcctcagtgctttaaccacgccgccgtgagtcatcttagcccatccggtgatcgccgatgagcttgccacggtaaatgccaccaatcgcttgcgccagtgcacccccttctctccgaccgccactgcgcgagctcaaattcacgggccaccgctcaagggccctataaattgagcacagcctcggctctgctaagtattcaagcatccaatccacccgctcgtgcctccaattactcaccagagagccccaatttgggatttccccccaaatcggtccgaaacaccgcgcatagtgacctcgtcgtggctaactcgttccaggtccgttcatgctctctgctctcccgttttagtgtccttagattctcttgatgctcctc

SEQ ID NO: 80268 - DNA, 668 bp, Zea Mays
gtggaggcacaggggcggcatggcgctaggcgaaagcttggccccacgccctgattcggagctggcgccgacccttggagccaccgcacgaccgccctgagctccgccgccggattcggcattttagagggagggatacaaggctcttggtgatggctcgcagcggagattgaaggggctggatcttgggacttcgcaacatcagtgtgttgggtcgcgtagtcgttgggacagggccggagggggatctgttctcacagttgctttcgtcgaagagggagcagtggagcgacccttccctatggtggacgacggcggagtagcaccgaccttcggattgctctggaatcgccgtgagtaggtgagaggccgaccttatccgttggcatgggacgaagacggccaccaagccatgggtgagagggatctggaatcttcgcagcgccagactgagacttcacggccaaagatgttggaaatgtttttcaactgttggattgcgatcagatggacgaaggaaaaaaggtcgacgtagataccttattcgatatcgtttcgaaccagctttgtatatatagaaatagaaatatgcaccaagcagtaatccaatgactctcatgtgttagctctgcaccattcaaattgagaatccccatgcaactattgtg

SEQ ID NO: 80269 - DNA, 746 bp, Zea Mays
atcttccatgacctgctaggttgattggtggaagtctacatcgatgacatcatggtgaaatctattttcaagcgacacacttagctgatctttgccaagtacactagaactagactccatggtttgaaaatgaaccctaagaattgtgaatgtaggctgattgcatgctagttccttggtttcatggtgcaccagcgcgatattgagatcagagacaagagcacgaatgctataatgatgatggcccctctcaccaacaaggttgagttgcaaagcctggtcgataagaataattacatcagaaggttcatctcaaacctcgtaagaaatattgagttgttcatgcccttggtgaagatcaaaagcaattaggagtttgcgtggggactagagtagtgagtagcattcaacaatatcaagtcgtacctagtttttccattagtattggtgccaccacaaactaacatgatgtctctgatctatcaatcgacacaacctctattggcttagtgcttatccaagagtctaaaggcaaagagactgtggttttctaccttaggaggtgtcttcttgatgctaaaacaaggtatttagacatagagcaaatgtgtttgtgtctccactttacatacaccaaactctaacactacttgatcaacatagaagcccagtcgtgtaagaagacctcacgtaggtcgaaacgagaaatttcctgaaccactgctccatccaaaaacggctttggc

SEQ ID NO: 80270 - DNA, 1070 bp, Zea Mays
cgatgggtagtttggtcggcagtcccacctcactaggttgctcgatgggcaggttgctcggtagccccacctcgctgggttgctcggtgggcaggttgctcagcgggtatttgttcggtgggctggttgtccctagaaagccttttggacctttacgctaagctgtttggcaggtgggcggccagtttgtgggcagtatttgggaggcctttaggtcttctttgggtaccccgttctcagatactcgacagcagccctcgagcctttgtgtaactccttggagttgcatagaggtttttcttatgcgatttctcttttgggtgcgcgcaagtgcatctgttagatgtatcccccgagctcttgagtaatccatgtggatggctcggcggtttatgcagtgtaaggggcggaccctttcatacgatggtttgccatgcaccgggcgtgagtccatcggtctctcgggtgcgcgtgagcgtatatgctagatgtaatccttcagcccctgagtaatccatgtggattgcttggagatttatgcagtgtaaggggtggaccctttcctacgatggttcgccacgtaccaggcgtgagtccatcggcctctcgggtgcgcatgagtgcatctgctagatagtccttcagcccccgagtaatccatgtggattgctcggaggtttatgcagtgtaaggggcggaccctttcctacgatggttcgtcacgcaccaggcgtgagtccatcggcctctctggcgcatgtgatcgcatcggccaggtgtgcacggggagcagatcttcttctggtcttggtgtagatctcctggcctgtcgtgcccttgtctcgtataatcgaggcaaagcacaggaataggttgtggcatcggctgaagtgccactagccgtcgtgcccttgcctcgtctaatcggggcagagcacaggagtaggttgcggcgtagactgaagtgctactgtgtttagggacgctcaggtgacgtcatcctgtcttctccgcctatcacccttcgccttggtgactcgcacgttacagtggggccatgatggcatcag

SEQ ID NO: 80271 - DNA, 490 bp, Zea Mays
acacagtggcaaactaaacattaaattggaagacaccgcatacaaccacatgttagctttacttatctacttgtcgtcgggcatacgtagttattaccactagaaagatgacgacgcttactttacttaaccaatacaaacatgaccacacaagcatgagcacaagtgtttaccacgttcactttaatcatccattagttacctaacattaaattagttaagtacacaagtttgttacgacttatatatagatagacttagttgaaaaggaactagacacttaattgagctttaaaattattcactaggcaaacacttattcgaccctcactaattaggttcacgaacttagcaagacgtatacttgttacttatataattaggcccaattctattagttatattatcattactgcgggtccaaccaatcatcaaacgaggaaaacagtcgactcgagtcaaacacaacagagtagagcatccaccaaac

SEQ ID NO: 80272 - DNA, 869 bp, Zea Mays
cgggcggccatctttgctcacctctaggagatgtccgtgggggcgacgcttcttccgccagcatttggacgaaagggtgttgtgcagcgaccttccgggggtggaaagcaagctgagctgcgactccatctttcgtgtgagcttcaccagcatcccatggtacacctccatgaactggtctagctccaactccatgaggtgggaagcgagttgagctacggctccatctttcgtgcctccatctctttggctttaatggcctcgacgtcgcctccaatggtgaccgttggtccggttgccgatactgaagacgccgcccggtaggtcgtacaagatgccgtggagacggcggccgcgcgcttccagcgcgaccctactgatgccgagtagctcatacatgtagaaatgaggctagggctccgcttgaaggcggatataataacttttgtttttgtaagatactttttgggaactatcaattaaacagctcttatctgtatggtgcttgttcttactgtgtgtggttttatcaactcctctcctggtacttggcccccccctgggatgtaggttcgacgtgtcgaggctagataccagcatacctaagaaagagttggtgtcccggcccccaggaggtagcctcgactgggacctggacttgcacacaacttcggctaggaagtgttagtagcacacccattaggacccatcatctggtaccaaccatcctttgattcgtgcaacaggacctgcaggatttggcctgggaagccaagccgtgtgcccggaccccctgaaccacagttccagatactaggacacccatcgcagagtggtggagcgtgtaggcttatggtacgggaccaggc

SEQ ID NO: 80273 - DNA, 799 bp, Zea Mays
ggactacatgcatatttggcggtgttgctgattttattcagcttagctattcttctattgcttgtcagcgcattatgcacgtgtagcatcgattcggtacgggatttatgtagcaggcacataattggttcagatgccagcagccaagtgcatgcgcgcggctggtttccagacatgcatgcatccatgaactcctgcctccttcttcggcatatcgaattcgggccgggggaggggaaagaaaatttctggaaattcgtgttccaggaagctccccccccaccagctagccaaagagagtactctcgatctgcatgattgcgctggaaattctggcatggattcttgaaacagtgaactaacacttcgtcttgctaactaggattagtagtagcttcctagctaggaagttgcacgaaccgcacgtactccgtactactcggctagctagctacctagtccgcgtggtctaaacgaaattgttggaataatatatagaaatagtgcttctgagtcatgtccttgggcggtgtccattgccaattttgacatgggatcagtgtatgagcgtacttgttatactagagcgtgcatatagttaaggtcatatacagtagtgctcaggtaacacaaaataaaaagacgtaaggcggcacatgcatgctccgtatccaagaggaatactaggaaggtctagtttttcccccaaaggaaaagaactacagaaggctctagccagtgttttaaatagcgggaaaatgaatttatcttccaaaaagtgcaaatatcgagatatatc

SEQ ID NO: 80274 - DNA, 1087 bp, Zea Mays
gggtacaccacatttagggaaccgaaagaggccctcaggcccacctcgggtgaggtggcgaacccacaggtggggccatacctgcgttttgttttagagatgttagtcctatgcagaatgcagcagcaccacgcttgtagttcccacatggagtgtcggtatgttgctattgctggagagacaaaaaaggaccttgcccttgtgtactcctagctcggcctaaagacaaggatctccctttcatggccccctggcgtaagggctccttggaggcagtcctgatgtctgggataccttttagactagagagctattcctgagtgtggttcaggaatagtgcttagcattgtaccctcgagatccttacctcgctgctttcaatctatcgagttatgtagctaagcttttgccaagcagagttttggatctggcccttagatatgaaaaaggtgtagtcctttaggtacctaaactagaaagtactaagtcagctattctagggcagtggaaggtgtaggcttacggtacgggaacaggctaagcggctacccagctccggaccacccctgagaatgtggacatttcctttagactaagcccctaccagtctatactttgtttagcatatgaggggatcacaaaataagcgacattgctagttgcataactcagatttcgtgataacaacaaaaatgataatctcgagcgggggtagaaagagaaacatgcgtaggttaaaaatgatagagccgatacgtaaggatcgtaccaagggaaaaacctttcttcatttctggatgtgtaaggtcttgcacgaaaaccaccagacacagggtttacaagggtggcccctacccggttggaccacagatggtgccagaaatcaggtttatgtagactggccctaggtaccttgatcccctgtgaggtagcttcgattgtctgaggggcctgcaaaactagagtccagtcctgaatacggcttgggaccgaagcttagcagcatacctatggaacttctgctttgtcgcagtcaatcctttgaatcatgcaaccgaactttactgagcctagctctaggatctgc

SEQ ID NO: 80275 - DNA, 578 bp, Zea Mays
gtacccctaattatggtccccgacactactgcactatgttgaccattttgagggcaacaacaaaaagggatcaatattctgggttcaaatagcttctacgtacagctccaccatcgatccttctcgccactgtaccgccaagcagatgaagaatcaatagtccatgaacaaccacaaggtcaccctcttcaatctgcaaccaattgtgtgtggcccgaccaagcgaatgatgatatgccactcaaaatagcaaatgagatcttccacaataggcccgatgcagacgggtttcaagctagagcacatacggtgctcttcgccatcaacttaagtggtgtgcatgatacagtgataacgactccaccaatgggagcaagcaatcccgtctcaatatgatcatatctccacatcgctggacaaatgtcggagcgacacgacaacacaaaggtaataggccaacaatgattagcagcgagtcctctgtcgtggagaagagtttggtgtacaaggtatacaagactagcgagaagttaagtcaatcaaaataatatgagcactttaccaatatggatgatgac

SEQ ID NO: 80276 - DNA, 438 bp, Zea Mays
ttggattaattcttcatttcttggcttcttgcttgaagggagatacaatcccatccttttatgagagtggacttaacccttaagaaactaatccctagaactaagggagcaacctgatgtaatataatctctttcctaatccttatcccttcctcataggtacactaccacgggtactgttcacattagtccagactcgttgtgaggagggtaggtgggctggccctccgtccacccataacacttttgctccttttcggagcagctcgcctatggtacataggatcctaatcaggggaaccttgcctaatacatcaataggatacaatcagataaaccttccctaatacatcaataccatctatgcagcctgggcccttaggactagcgcatgtgttagctactattctgacaaatttaaacatgcctggattaaaa

SEQ ID NO: 80277 - DNA, 497 bp, Zea Mays
aaagaaatacatgattgaattatcattgagggcaatgcagccatacagagaagaggcgatagccaatgagcagttagtatgttactatgattattcctttatggcattatttggaaatttccttaaatgttagtcgtgcgggtctgtagtccatatgccattgacatattaaatgcatatatgatgaattaggaaatagttgcagtgacatataaggaatcaccaataacaacatcgtgatgtttcagagattcccagatgttgcgctaacgtcttggtccagatgtggttagacttttgcaggtctgcctctctaggatgttaatgtcaaatgccatagatcttgtatctatcagttcttcagtactttcaaaggtcagtctgtatgtcctgcatgttcgaatgaagtgtatgaagctaccaaagacttcagctgctttggctttgttatgtgtaaagagatatactgggatgaaaggtcatatgctaaatttctt

SEQ ID NO: 80278 - DNA, 1088 bp, Zea Mays
ggagtctctgtgacagccgcagcagaagatccatcacctggtgcaggcgcagaggtgccatccgcagcagcagagctgtcggtgtcggcttctgttccccccatgtctgcaacagggtggagcatcgagactggcacaacaggacgcatggccccgcttggttggtgcgttgtagcgtccaccgggggtatctctgagacagcggcaggaatggtactggcgcttgcagtattagcaggagaggacgtcggatcctcctcaggttccatgctgagagacaaggaattctccctgttatcacatgttgcatgctcaccattagtagtttggttagtgaaatcaaacacgtgatcatctaactgttccttctcaagaaaaggcacaagaccagatgggagaagtgcaatttcagcacggagacgggcaccgacattggagtgaagcgtagagaaagggaaaacttcttcatcaaagatgacatctcgagaaatgtatactcgcccggattgaatatcaagacacttataacccttgtgaaggttgctataaccaaggaaggcacactgcttagaacgaagttcaagtttgtggcgattgtaaggtcggagattgggccaacatgcacaactaaaggtgcgaagagagaggtagtctggtttttgttggagtaaacgctcaaagggcgtttgattatcgatgactttgctaggcaaatgatttataagaaacgtggccgccataaaagcctcatcccagaatttcaagggcattgaggcatgagcaagaagggataacccaacctcgactatgtgtcgatgtttacgttcaatgaccccattttgttgatgagcatgaggacatgatacatgatgaatgatgccgacttgggaaaagaaactatttaatttttgatattccccgtttgcatggcaataatttttctatcaaattgtcgctcaaccattttttggaattcatggaactttttggaaaacttcagatttatatttaaggaaataaatccatgtaaaacgactgaaatcatcaacaaagctaacatagtagcgttttctgccaacagattcaac

SEQ ID NO: 80279 - DNA, 946 bp, Zea Mays
aaagcgttgccgtagagcctccagatcttcccatgtagcaagtgactggggaagggacgaccattgcaccagtccttgctgcaccgcgcgaactccgtgagataccatgcgacgctgaagaatagccgaaggcacttgaaatgggtcagacgaatctggtatgacaacagatacatgtgtaggaggctgaataatctgtttgagttgtgacacgtgaaagacggggtgaactgtggatgaatttggtaggtccaatttgtatgcagctgaaccaatcttggacataatctggtaaggaccaaagtagcgaaaactgagcttctggttggcacgagagaccagggatgtttggacgtatggttgaagcttgacaaacaccaaatcccccacttggaatgtacgatcggaacgacgcttgtccgcttgatgcttcatacgctgtttggcacggtgtagatgttgctgcaataacagatggatacgctgtttgtcttggatgaatgcagccaaatcagacgaagaattgtccaatgccgaaataccgaaatgtcgtgggacaaccatagagagcttcaaatggcgatctgtcaatagaggaatggtggctagtgttataccaaaactctgctgaagctatccaattagcccacttggaaggacaagagtgtacaaagcatcttaggtacgtctcgaggcattgattcacgcgctcggtctgcccgtccgattgaggatggtatgcactgctcatgtggagactgaccccgactcgcttgaagagttctttccaaaaattacttgtgaaaatcttatctcggtcagagacaatagcaactgggaggccatgcagcttgtagacttgctgaaagaatgcctgagcaatggaaactgctaaaaatgggtgcgacaatggaataaagtgagcatacttagtgaataaatcaac

SEQ ID NO: 80280 - DNA, 743 bp, Zea Mays
acttacatgattgatggttttggtttaaaagtaaaagacaacatcattgcgacaaagccaaataaaccaaaacattgttgcatatgcctataaattccattttcacaatttgataatcattgctgatctttgtcgttgactagcacaaactagaaaattagatgaatagggattgttggcccctgatattttattcctgactccgccactgcactcttcttcaactccttgtctatcatctcctagttatcgaggacaacctcataagagaaaagaaagttggtcatataacactccaccgactccacgctggcctatgccatcgccaccattcaggctgccctggccgcctcgcaggagtgcgagtgcgtcatgtccctcgccctagagcaagagcgtgccatgagcgccactctgactgcctagatgaccaccacatagcgactcatccttggccctcctccggtcgcccttgagggccctttgtccactcctgaggccctctcgcctctggacttgaccagaccacatcgctgccctctacgcacaagccatcggactccacaacatccggtccctcttgtccaacgtgttggacctagcgtcctcccactaccctcgctgacggggtcaggtcctcactcttcggcgctatgtgctcgccgaccactccttgatgacatcatcgccccgctgtctccatcctggtaccttatggacaacatggtgctctcgtggctcca

SEQ ID NO: 80281 - DNA, 510 bp, Zea Mays
ttcttcctcgaaccgacacaggggaggcataggcggcaacaaggagagtgtaccaagtgttccactgacatcatctacctcatcaccaacgactacatcactagtgccatccacctcgatggccactaggccccgcagaaactcacaagcgacgaagaccaccatgtacggaccctgacctgctgagcctcatcgccatccccatggtgaggctcaggaggtaggcgagcgctagcttctgtgtgtgcggtgtgctctgggagaccagctgtaggagatgtcaagcacatggagccatgggaagatgcacatgggaggctaggagcatgttcgctagtcccacaccgtggaagtacaaccactacaatgttggcttggcaaccaaggtgtgcgcgctcgtgagtgagagcgagtgagtgaaagaggggaccagagtagagagcatggggcaagtgaggctgggctgcacgtgatcatgccctggcggacgacgaggacagcgcatggtgc

SEQ ID NO: 80282 - DNA, 418 bp, Zea Mays
agcccaagtatttgacaggaaaaacttccaatttaaaggcaatgtttgcttcgctacaaatgaagcagtcagtccatgacttcatcacatggtgccaggtctgtcaacaagctaaaccaaagcatgtgaagtatccagggtttctgttaccgttgccaatacctgaacattcttggcaagtagttacaatggatcttggtggtagtcaacaaattttctaaagttgccaagtttttatcactgacatctatttatagttatgactcttgctcaaacatgttgaaggtcttaagcttcaagggatgccccaaaccattatctcagacaggggctgtattttcactagtagcccttggcaagcgttcttccattttgcaggcacacaactgagtgtgagcagttccaatcatcctcactc

SEQ ID NO: 80283 - DNA, 413 bp, Zea Mays
aaacctcggccacgttcacggaaccgtgacacggcacaaagttatcacgtcgcggttgctcctatctccacttcatctgatcccatccaaatccacagtatcactgatcttttcgttcttcagatatttcctgtgccactgatcttcatcgtttcactgaaccgacctcctttcaccctctctttttcttaattcttgttaagaacagggtgatcttcattaataaacattgttcaccaaacaacagtcttcaagtttactataggattcatggatcaattctgcataaattctcagatctggtgctctgaattcgactgcatttcactgaagccataacattctgaatccgattttcagtattgccctattcgcataacttgtctctgatagctcaacttcatcgcactatt

SEQ ID NO: 80284 - DNA, 404 bp, Zea Mays
accttcctcctgcgctctttggcagctcgcttctcagcgatagcgtcagcgataagcttctgaatgccaatgtagcactcgtggtgagcttttgccataaggtcgcaggatattgttgaatacttggcagccttctgtgcgtacgactgggcttcactagtgctttcatcaaaagccttcaagatgttcagcgcatttgacttcctactcctaccaactaaatcgataatgctctgaccaaaagaagatctgaagctaggatactggtaaaagactgggggttggatattgaaggaagcatgaccgccgggatcatgggatgtgccaagcacatcagcagatgtgccagtagcagtgggtgctgctgctactggggcagatgctgctgctcctgggttaggtgc

SEQ ID NO: 80285 - DNA, 744 bp, Zea Mays
atttctactagtgctgaaaaatctgccatatttacagaactgccattcccactagatacttgtacctcctttcttgtgctttggtccaactgttctattacattttctaggccagcaactaggacgagtactggaaacacttattcagtattgctatctgttactgacttgtgtgccacatatatatatatttagttagccttcccatagctacaattttctctcgagcagaacagatactcttttgcaatcacacccacgctcgttggacagtcacaccggtcaccgtttgccacctgcagtgctggtaagaacgttgtaagagcggggtaagacgcttcataatttgtattccaccacctccaccaccaccctgagagatagttgtagggttcacattgtttgttgcctttttgtctctattttgtgctaacaatgacaggaccaaagaatcaaatggacaaggacaaggggcctaaacttaatgacgatgagtgtgtctctcaaatggaattgaaggagatgatgtgcgtgatgactgaagcttttaaaaaataccaggactctgcctcgacatcctatgagcagcttgatcgacgagttgctgaacttgttacacgcatggacgtactggaggctcgtcccccaccaccaactccagccccagctcactctcctgtggacgacgacgacgatgatgacgatgtttatgcaccgctgcgacaacgcctcacacgtaatcga

SEQ ID NO: 80286 - DNA, 381 bp, Zea Mays
gactagttcgactggggcgcctcgggcgagtactgacaagtttcgggacatccaaggttgtatcaacctctggaaggggcaccactgccaacgtaccatcaggagcagcatcagatgaatcctcagctagcagatcaagcatgtcatttatgtctgcatcactggggtttagaggcacttcaaaataaacctgtcgttcgtcatcaggaattgccccaagcgaagcaaccaaagtactgacttcctcagcagagggtcgcactctaaggcctaaattgttgtcggtcacaggcggatttgacacaaaaagggtgaaagctttgggaggaggtaggttccaagccgagtatgccactggagcaccaacattcgaaactttac

SEQ ID NO: 80287 - DNA, 319 bp, Zea Mays
taagtaagcatgacgattctgaacactgattggtctgttcgtagtatcattctgaacactgattggtctgttcgtagtatcagtatatcccctatgttgaacttactacgtacggaattaggcaggcatggtgtggtctggttgcaattgtcagggctcttgagacagctcgtcatgatgtcctgaatggtccgttggtcctgcatctagcttgttggagaaggatttcttcaggaaggaagaagagaaaggctcggcgggaagccgggaagcgagaggcgctggtatttgacaagcacgtctcgcctgtctctcgaac

SEQ ID NO: 80288 - DNA, 786 bp, Zea Mays
cgtttggctgaatgtgaaagagcttatgatttttctccaagtgaggatgaatggaagtttgctagtgaagtttgcgataggttgaaattgttctatgaaattaccgaattgttttttggaacacaatatgtaacagctaatgacttctttccaaagatatgtgcaattagaggacacacgagcaagtggctagagtgagatgatgagttaatcaagtccatgtcaagtcgtatgattacaaaatttgataaatattggactgacattcatggtctaatggctattgttgttgttcttgatccaagattcaaatttggaatgttgaaagcatgttatacacgtctatttggtgcacaaagtagagcaatgctagagatagaaaatgtgaggaaattatttgatgaactgattagagagtacaacaacaaatgcattaaacctattactagtggtggacaaaatgcatcatcatcttgtgtttctaatgcttctacatatacggatgagttgttctctgccatggaagaagagctcgatgacatgtgcagtgatgaagaaaaggctaagtctgagcttgatatttatgtggatgaaggtcgtattcccacgtcaaaagaatttgatatattaggctattggaaaatttttgggatacggtaccctactctaaggatgatagcccgtgacatatttgctattcctgttacaactgtcgcttcggagtctgcttttagtactagtggtagagtgctaagtgatcatcgaagtcgacttactcccaaaact

SEQ ID NO: 80289 - DNA, 745 bp, Zea Mays
gctctctgtcgcggtgtataaatgcgagtcattgctcccccttgaacccgtagtcccagtagtgaatacccgcgccacgccatgaacttcgagctgtgcgcgctgttgtagctagtcctcgggccatgggagggagtgacgacacggtcgatccagttgtgcgcgctgtcggagctagtcctcgggccatggggcttcgtgtggttgctagggtgctgttcatggctgccctggatgggattgtgccccgtggctccaccgattcctcgccgtcgtacaacctctgccacggctccgctgcacaccacgaatagggtcaattgccacaccggagaccaatatgaccctctccacatccttgccttgagccccgctttcttttagatgtgttccgtgtagagaatcttgcgccgtgttagcaatgggccggcaccggcgatgctctgccgtgagggggtggcggcaccgctgtttcaaccgagaggtagaggaagacacacgtgcaccgtagatccacggatgtgtggctgggattggctcgcgcgtaccgtttcggccaaaccgatctggttcgttcgatccaaatcatgcgtgcgtgaatccacgtgggcaccttaaactctgggacgtcgaacgttgatccaagggaccagcgggacttgtcaatctgttagaagaccagtctaatctctgccgtgcgtgatagatccaacggccgagatctagtgataccccttcggccgac

SEQ ID NO: 80290 - DNA, 395 bp, Zea Mays
atcgaatgattcagtatcagccaagcggggacagctgcaccgacaagttactgaagagaatgcaacgcgctccctttcagatgttccagcagtaacacaccttgaaggtgaacgtcttagtgcaaatgcgcacacaaataaaagcacaaggactttggaacaaccggttttaaataacttgggaaatcacaaagaaccggatgattcagtagaagaaattgccataaactatgttgaaacgggagagttatataaccgaaagactacaattgtcgacactgatttcgtctctatgatcaccgttgcgattgctgaggatcctgaaccaaagtccatggcagagtgccagaagcactcagatagggtcaaatggaaagaagcaatagagacagaat

SEQ ID NO: 80291 - DNA, 523 bp, Zea Mays
ctcggattggcgtgaaatttggcaagtatgttactggaagtgttgtgaaggtgcctgaaaaatttgggttcaattggagcatttttggctggtttgggcatttcaccgaacacttggcgtgcggtgaattaggttttgggagattgaggctaattaggttgtgaaaccctcccaaagggagctagaaacctgcagggatactcaatggggacaattgaacacatttcacaacttggattcacaggattttgaaaaatggacaaagggtggaaattgagtgcttcactgcctcatagaccgagagcaggagagaaagagatagggggagagaagcgcgaagtgctgctcaccggagagggaaggagaggggcacgaggtcgccggagcacagtcggagacggtggccgccgttgagggtggatcgcctggagagagtgcgcaacacagaaaactgagagcgcagaggaaaagaggcctctggctcggtcttgggctggaggctgttttttaaaacgcgatatgg

SEQ ID NO: 80292 - DNA, 321 bp, Zea Mays
gtaattcttttacattaactagtgctggccattgctgaattactagaattttggagggatcagatgctactccatcggcgctgatcatgtgccccaggtagaaaatactggtctgagcaaatgcacatttagccaaattcaccttccattggtctgtttgtagcaactgaagaactatggatagatgagtgaggtcatcttcaaaggacatactataaatgagaatgtcataaaaaacactagtgcacacttgcgtaatactggagccaatgtctcattcatagctcctaagaaagtattgggtgctcctatcaatccaaa

SEQ ID NO: 80293 - DNA, 997 bp, Zea Mays
ggccgcgctactcatggacttgtgtggcacatacgcgcgggccagaaagaaaaagggaaggagcattagacagtgaataaaatatcggaagtaagaaggtagaagcatcaccatgtttaactgcctcggaaaagacagaagcatgtcgtcggtcaaagtccaagcccgtgaagcttgcagaattttcctatcctagtccctctgtgagaaggctgcctactataagcaagacaacaagaagaaagccatcaaagaaggagatgaaatcaccacgttccatcatgctcatgcctatgcctagcgacactggtgctccatccagagagtccagattgaatttgctatcttcaccagacatgaagagaaaatccaagctatcactatgtactttaactcttctattgggactgttgctgctttgtgcccagcctttcaacattgggggtgttgtacaaccctagccccccttcttgactccttcaatgcctcattcttcgtgaaggaaacccatgatgtcatccttgacatgtctagccatagcacccccagacctgacggctttgatcctagtttctacaaacctgcctagtgcactgtgtccccggtggtgatgcgtgtccttaacgctttccattctagggacatcaaccttgatagcataaatagatcctacctcatccttctccccaaaaaattcggtgcttcagctgtgggcgactaccgctcgatctgcctccaaaattgtagcataaaaatcatttccaagatcctcacaaaccgcctcaaacctacaataggttccctcattcacctcgaccaaatcgggttcttaaggggagatctatcttcgaaaatttcatctacgccctggagctgattcaatgttgccttaaacaaaaaaaatcttaccttactcctcaaacttgacttcgccaaagcctttgataccatggactaggttgccttgcatggaattctcgaagcccgcagtttcagc

SEQ ID NO: 80294 - DNA, 519 bp, Zea Mays
gggggagctccgctccgccgtgcgtgggtgccctgttggggcagaaaacgtgcgccgtcggattcttaaagaacggtcgggattagagttggcgtaccctttcgccacattggttgggtgccgttagatcgtgatcggacgacaccagtgagatcggagagaattaaatccgagccgttgatcgcggagtggacggatcgcgctgcataccggttcggtgtgatccagatctaatctggggcgtccaattttgctcggacggtccgattcttctgataccccttcggcactgcagttttgcaatcgtgcccctgcgtttattataaatagaacccgccgtcctatatcactgcgctgtgtcttaggagttttactccgtagcacctgggtttctctagatttgaggcccagtccagaacctatttaaactgtctaaatgaattagaaattgaatatttaatatgaaaataaatgctaggaattgtataattcatagaaaattcatatgaactccaaatt

SEQ ID NO: 80295 - DNA, 606 bp, Zea Mays
ctcgtcccgagattaaaagtcctagggtaagtagtggaaaagcaaatgcttcacatttttatttcctatgttttggtacatggcaggggtggtttggggctcactcctttattacaacaattttatacactttacaaattacaagaggctaaaaagcctgggaaattcttgtctaagaaatcttgagtttcccaagtagcctcatcttcagaatgttggttccactgtaccttgtaaaacttgagagtttttcttcgggtaaccctgtccttttgatctaagactcgaatagggtgctcagaatatgtcaagtccggctttaggacaacatctgtcactttgatagttcgatctagaacccgaagacatttcttcaactgagacacgtggaacacgttatgtatagcagacaaggtttcgggtagttgaagtcgatatgccactggtccacactgttcaagtatagggaatggaccaatgtaccggggtgccagctttcctttaaccccgaaacgcgataagcccttcattggtgaaatctttaggtagacataatctcccacgagaaagtataagggttgtcgtcgcttgtctgcataacttttc

SEQ ID NO: 80296 - DNA, 815 bp, Zea Mays
gttgtgagataataccctatgtctagtattatagtggctatgtttatgatatgttgtgctacgatctactcttaggggctccttcgtctctccttttatagtccaaggagggggacaataggtgaatacgagtaggttacatgaaagatcttatctggtaacctagtcgtatgagaatacaactatctataattacaagtgtgccttcctcatatgctagggtcttggcctatctgtttaggactctaccttatctctcctatttcaataagattgttggggatatgatccccggtccctagggtccatctgtcagggagcacgctaagggaaagcctctggtcactgggacccattggccagacagaggacatggataacgtctaccctggaggcacccgcctcccatacaaaccccacggcaccgagcctgggtcgggtgtggcagaacctaacaaggggaccgggcgtgtcgaatggaaaccactcgagtggatcctacttccggaccaggactgacctatcatatatgatcggcagcattaactacgctagacaccaagtcgcagtagaggcaccaatccacctcccactcataacttacaaaccccttgggccacaaagtactcatgacctacgaacctctcatgctacgatgcatttaaggcccacacacccctcagcttacggtcactcatgacctatcacgactaggtctgagtgcgccggctaatagctgggtgctacacgaagagccacgttgagccccgagctacaaagaccaggggtcagcatagcctgaatgatggcgcgcc

SEQ ID NO: 80297 - DNA, 379 bp, Zea Mays
tggggcaaccgaagatgtgatgaccgcgtacttgcccatcgtcctcgggcaggatgcgctgcaatggctacgacacctaccccgacactgcatcgacgactagagcaacttcagtcggcgcttcatcgccaacttccaatctctctcagacaagccggcgcagccatgggacctcaaatccattaagcgtcgaggggatgagactctccggtcgtacctcaaaagatttcaaaccatgagaaatcgtatccccgaggttgcggaagcagcagtaatcgaggacttctaccggggatctaatgactcgaccttcgtctgagccatactgcaaaaggcaccgactacctccgagcagctattccgggaagcggacctctac

SEQ ID NO: 80298 - DNA, 1244 bp, Zea Mays
gtggtcaccctaagttgagtaagcgtgagcatgttgcaccgtcttaagtcactgccgacttaagccgattgctccgttagtagggtatagtggtcaccctaagtcgagtaagcatgagcatgttgcaccgtcttaagtcattgccgacttaagccgattgctccgttagtagggtatagtggtcaccctaagtcgagtaagcatgagcatgtcgcatcgtcttaagtcactgccgacctaagtcgattgctccgttagtagggtatagtggtcaccctaagttgagcaagcgtgcagattgataataaatagttcaagtgcccttgagaatgagatctttttattgatgatgtatttttcgattacagaatacaatgctgccccaatagcttttgaaatctagctaggggtaaaacttcctgagatgctctatattccatgaattccctatttttgtgccatccatttgagtaagccgatatgatcctagccgagtgacttctgctaccatgaatggcccttcccatagtggcgacaatttgtgtcatccttctcctgttagaattcggcgaaggaccaagtctgccactgcgaaggatcgatgtcgtctggacttatcatgatagcgcctcagggtttgctggtatctagctgattgaattactgtattcaatcattcttcttccaatatatcaatatcctatagtctggtagcttctgcctcagctatgttttcgaagaccagccttggtgccccaaacctgaggtcggcaggtagcactgcctccgaaccatagaccatgaagaagggagtgtttccatgcaaagctctactaggttgagttcttaggctccaaaccacatacgacaactctctgatccactttcccgcaaacttttcattcttgtcgaagactttcttcctgagtgcttccaatatcattccattagccctttctacttgaccgttggctcttgggtgtgctactgacacatatttgatctggatgcttctttgttcgcagaaatcaaagaattcaaagctagtgaaattggatcccaagtcacttataatgctattcggtattccaaacctgaatattatatcttgtatgaattctactgccttagctgaagttagagaagcaatgagtttgtactctatccatttagtgaatttgtcaatggcaaccaacacgtgagtgtatcctccatgagctttcttgaaaggtccaatcatgtcc

SEQ ID NO: 80299 - DNA, 1020 bp, Zea Mays
tgacctagaaaaatcaaaatggtcgagaactatgacttagaatagttggataatgtctagatatgtttgtctaaattataggaacgctttcaagaacaaccaaaataagttgaagaagaaaaggcaaaaatcaagttaagtcagctatttcgagagcaccaaaccatggttcggtgagcaactagccgttatacctgagaaggtctagagagggagtttgccctggcgcaatgaactatggtccagtgagcaatgaatcatttgcgcagagaagactttagaagcctctcagctgcttgttgcaatgaataataagtccatgtgcaacagacctgttgtgtagagaggcagttttttcgtttgctcagcctagcgcaacggacctttcaagcttcaacggctagtttccgattccaacggtcttgatgacgtggcgggggtccggtggcacatggacccagtccgatgccctaacaatacttgcctccattagaacgatcacttgctgggacagtttaccagtggtctagtggcgcaacagaccgttattgttggaggtctggtgtgaccgtagtctgtgcagtttttgctgcacatatatagggtggtcgggctataaataccccaaccaatacattcaagatattagagctacaccaaatctacatacattcattgcaacaaccccaagtctccaaaaacctcccaagtgccacattcaattgattcgagctagagaagtgattagagaattgtggagaggttgcatttgagtttgttgcttggttcttgtcctcttgagttttatttctcactcacattctcattcttatacttgtaaagctagcaagagactccgaatttatgtgaaagatccttgcagagacttcgtgtctcttgatttgagaaggaacactcaacccgtctaagtgatcgattgagagaggaaaagagttgaaagggacccgtcctaagtggactccgcaatagggacataggttcttcggagccgaaccctag

SEQ ID NO: 80300 - DNA, 470 bp, Zea Mays
ctagggtcaaggcactgcggtcctagaagaagacatcggtagagctcacaccaaagtgcattttgatgaaatcggggtcaaggacggaggagctctagtggaggtggaacatgtccgaggagctcaggaacggtgacgctgtgtgtctgagagtctgaatggtggagagcagagggtgtggcgggggtcattgatgggtcgaagctggctacaacgagggcaacgcggctaaaattcatcattaaatgctgaggtgctctatgcgttcaatgcacgctcatctaggaaagaaacgatgggcgagaagggctggggatcggacgagatgctcgcgatcagctgacgagcatgggaggtccgatcgagccttatgggggcagggttagcggcggtgtgcgtgctgatgaatagtagagatgacaagaaagacatggttgtcagcagtttagattcgatgcgtgaagggaggg

SEQ ID NO: 80301 - DNA, 717 bp, Zea Mays
aacatgttgactttttatatccgaagcatgtgataataggagtctgaatgatttcttttatataagttcattcatttaaatcattcttcatgtaaaaccactcccttgcccattcattcggccacttactttggtatgcaagagctagaaacatcgcaccccttcgataagctagcgaggttataacaaccaaagttgttgtgaaagcctctagtagccttcgtcggaaagtgcaactcatggacttgactgaaggcttcacagtaagcttcagcatcaagttcaacaccctgactccgtacatcccaatgaaaattcctaattgcactaaacatttggggtgagctggtgaaggtatatgttaaaccttttcaaaactgcaactaccgtcttatgcaaaggaaatctaagcccagccttcagaaaacttcgaaacacaacaacttcgtcctctcttgacttcggcactaaatcatcacatcttagccacacccaatcaatattgtcaatatagccaaagcaattaagtacctcaatgtgtcctcctttaatctttgatttatcgaagtccacatggcttggctctgtaagacgaatggtggtgatgtcctctccaatatcaatgttgtcactatcggatagattcacaacgccgactttggcctgagaggcgatagcctctactgttgtaactaacttcacaacctttagctcttg

SEQ ID NO: 80302 - DNA, 353 bp, Zea Mays
gtgacgatgaggaggaatatgaggacgatagcaaggatgagtcttcatcactacaaggtacatgttcttgtattgcttccactgataataatgacagagaaaatgagaccgacgatgtggaagaagaagagattcgccgattctacacccatctcaacaaagaagacaaagtgctcttagttaagctgttgagaaggaacaaggaacaaggcgagacacttctcaagctagagaagactctcattaaaaccaacaacagcctggagaagatgactaaagaacatgaggagctaaagtgctctcatgataatttggtccaatggtatgaatctgttttatttgagcaaagaaat

SEQ ID NO: 80303 - DNA, 732 bp, Zea Mays
atgcaggaaggcagagtgattgcttatggctcaaggcagttgaggaagcatgaggggaattacccaactcatgatcttgaattggctgcggtggtttttgctctaaagtcgtggaggcattatctttatggtgaggcttgtgacatttacaccgatcataaaagtctcaagtatatttttactcagaaggagctgaatttgaggcagcgtcggtggcttgaattgattgaggattatgatttgtccattcactatcacccggggaaggctaatgtagtggctaatgtagtggccttgccgttgattactgatctggaccatttggggatcgctttgtgttatgtcggcaccgctagcgaggagactcggatgcttattcaatcctctctcatggagagagtgcgtgcggctcagcagcaggatcgtctattgcaggaatcaagaaagagggttggtgatggtaaaccgcgggagttcaccattgatgagaatgatttggttcgtttcaggggtcgtctttgtgtgcctcagaaatcagaggtgaagatggatatcttgagagaagctcataaaacgccttacaccgttcaccatggtgaaaccaaaatgtaccgagacttgaagcaaaacttctggtggaagcggatgaaggttgacgtttctaagtatgtggccgcctgtgaagtatgtcagcgcgtgaaggccgagcataagcggcctgcgggttttctg

SEQ ID NO: 80304 - DNA, 303 bp, Zea Mays
tgttgaaatcggtgttctgccgcctatggaactatgttccttgcgaatctagcggggagttattgttccgacggaggatacccacgaggcagttattttcatgcattttctcatccggggaatagccttgccagtttctccctttttcgtggtcttcttgatttttactctctgaatcttacgcatctgaatcccaattatgtgcttcaagttgttgtgtttgtccatctttgcgaagttttccttggaattcttccacactttggactagtttgggaacgataaaacctgaggggaatggag

SEQ ID NO: 80305 - DNA, 391 bp, Zea Mays
gaaaagcttagcatattcatcaatggcttgtgggctaatatcaccagaatcattgatgattagcagggtcttcatggcgtttttgacagctctgctaccccagtcttacatgctgaattccactcctactccagctactctcctgcttcgacgaggagcagccagccctaaggatgtcattttcctccgactgggctttggaattgggagaatttcagatggccttttagtgattttgttgaagaagtccacctttcttgcttcgtcttgtgcctggtcacttagggccatatcaaccgaagcaagggccataggtccaggacccggtttaggcagggccagcattggtggcacatcatctggaactaaattgcaaaccatagcatccatc

SEQ ID NO: 80306 - DNA, 522 bp, Zea Mays
tgttaatccatcttgtatgacatctcgaatgacaccaatttacaagtgacaagtatcggagtcattatgctcaggtcttctatgttgtgaaggatggtgatgatatttgcatatttgccatgtggtagcatagagataatctttctcacaaatatatgcatcacttacctttgtgatccaatggaattgaactcattaataatcagattcaaatgtgagtaagtattcatagcaaattattttctttaacttcacctgattatcaaaagaatttttagtgttcatttttttttcttaacgcaaatgaacatgatgtatctattaggatctcctaggtagtaacgttaacatccatgcattgcccacatctattagaaactcaagccaagcaagacatgccgcagacggttccaacacaatcacaaccaatataatgtgtggtgatgtcatgcaacgcattggattagccagcagttagttggtgaacactctcaccgatcgagtaaacaacttgcgtacgtg

SEQ ID NO: 80307 - DNA, 1206 bp, Zea Mays
atgggttaaggttgctgacgaattcgtggtgcgcacatttgctggggagcctcgtgtcgtaacctaatccgattggacaagtttgacctctcccttcatatttgcaaagatgactttggcgtgagcatggagaggtggatgctcctccggagtcgaacacagacaaggacatagaccaaatggaggacatgttagatgacacccgacatgagtatccaacactggagaccgaccgacccccgccagaggaagtgcaacagttttacaagttgctagaagccgcagatgcaaaagcgcacgagggcatcaacatgactatacttttggtcgtaacatgacttatggtgatgaagttaaagtacaacttctcaaataactgctacaacgatatcgtgaagctaattattgatctcatcccggctaaccataagataccagagaacttgtatcaatataaaaaaattgtcctgggtctcgacatgaactatgcgtgcgaaaataattgcatgttgttctggagggatcacgagaatgacacccattgcatgtactgcaacaaatcaaggtatgaagtggtggtggacgaggaatggattgaggttactacaaaagtcccggtgaagtagttgcagtacatgcctattacttcgtggcttaaaaagttgtttctaaatcaggagacaacgaagcaaatgagatggcacaaggaaggggatcatcaggaccaagatccggatatcttttgcatccatcatatggcgaggcatggcaggcacttgaccgttttgatctagaattagcaagggacccaataagtgttcgtcttggtttgtcgacggacggattcattcctttcagcagaaattccactccgtactcgtgttggccggttttcatgatgccatacgatctctcctaccaaatgcatgaaagaagaggtcatgtttcttgctttggttattctgggccctaaggatctgtgtacgaaaatcaatgtatttatgcaactgttgatagaacagctgaaagtgttgtggaaagggggatggaggcttatgataaccatctgaattgtagatttaatctacgagcggcatatctatggtcaattcatgatctcttggcatatggcatttggtgaaggttgtgtgtccatggtaggttgtgttgtccgatatgtatgagtcgtaagcatataggttcaag

SEQ ID NO: 80308 - DNA, 688 bp, Zea Mays
tccacgtctttccgccacttggcggcttcatctctaggtttggtctatcacataacactgccagatccactcttgcctttacgttatcctttgacttatcaggaatgtccataattgttgcccatagtgcctcagcaacatttttttcattgtgcatcacgtcaatgttgtgtggaaggagcaggtcgtcataataggggagccgagtcaagccagacttatgtgtccacatatgctactcaccatatcccacaaaaccaccttttgtattggccatgagcccatctatctgttgacaaatttcggcaccagtcatcattgcaggtgggcggtctatcactacgacacctttcataaagttcttgatgtctaagcggaatggatggtcaggagggagaaattgtcgatgtttatcgaaggacgaatatttgccatcctttttcaaccaaatgaacctgagagcttccttgcaaactgggcatgggaatttaccgtgaacacaccaggcgtagaatagcccatacgccagtaagtcattcatggagtactagtaccaaacatacattctgaagtttgtcttcatacctcggtcatacgtccataccccttcctcccaggcacgtaccaattcatcgatcaaaggctccatgtacatgcccattttattccccaggtgtccgggaattat

SEQ ID NO: 80309 - DNA, 846 bp, Zea Mays
ccaaaagtgaggtgaccaaaaagaaggtaaaattaatgaaggtctatcgagaaagcaaaagaggttgtaggactaaaacccactgggaacaacactttaactttgtatggatacttcacaaataatagaggcaatgaccaaacacacaccttttgtaaagttaagccctttagggccaaagctaattaactctatagcttcagtgaaggaaaatgacactaaagatgaggtgacatagatgcctatccaagatgagatccctctagctgaaatgaggctcgagccgaagttaggtgccaaggaaaattcgaaagtggcaacgttgaaaacgccgaggaaggctagctgcatgactttggttatggatgccctcttcgacacaccatccaccgagggaggcaacgacaaggccccatgtgccttagcctaggcattatcctctcatcttgaacctcacagtgggcaattctagactgcactgagtccttattgatggcacaatgtcaccatatcttaggttgcaaggtactcgagaccactattcgctacgtgcatcaatcctatggccatgcgcgtgcatgctactgtaccatgaataatcaagtacataaggctacttcaactgtcaactatgtcatacccaatagcacaggcctcaccacccacaaaagagacataacatatccacccctacaacaagtatggaaaccaactagagaaggacatcattgacactgtgccacaaccaaagacatggttgggtatgactatgaacaagataagaacatggtagttgggtcttagatcttgggacacaagatctaactaatgtaacctctctcctcg

SEQ ID NO: 80310 - DNA, 611 bp, Zea Mays
gtccatctcagcctcatcagtgttggtcggcatctggaagtgggtctacctctcggcctcgggaagactatggaacggagcgatgaaagcctcgatgtcatccaatgagggtcgcactctatgactcggactgccaccttgaacaggagggttggaaatgaatttagaaaaaggactcgacggaggtaggttccaggcagaataagataggagcaccagcattggaaaccttgcctctcaacatcaagttaatccggctcagcaagtcctcatcaggaatccgtctattggtaattctggtaggatcattgaccctagtatacagataagccgggtaaactctatccttcaggggctgaatgttcttgaaaacaaagtcagcgaccacagcttcagtagtcaggcccttgtcttttagtgcgcatatcttagcaagcagcaccctggactcggctagctctgaacctgtgggggactctatccagttgggtgtgtggatgtcgggctacctccctgatcgaggagggagggagttcttgtggttctccatagtaaaccactcaaggcgccatcctttaatgatgtccttcaggaggatatcaagatactcc

SEQ ID NO: 80311 - DNA, 567 bp, Zea Mays
tgcatcttctcctccgctggccacacacggcggcgctctggcccaacggcggagccattgccgccaacagtggttgtgcgccaccgtcaccccaaattctgattgaaaagagcaacacgtatggcagatgatgacgaattgtttggtggatcccataccttgagtcgagacggcaggggccccaatcacgtaccgcagcggcacccaacgtgcctaggaaattgcatagaccgcggatggagttgagaggtggcagccagggactcctacactgcggctgcccaaccaacactccccagctggcggcagaggtaggtttaggctatcaatggcagcggatccaagcttgggcgagagctccaggttttctgtgcgcgaggtatttcggatggatagaaaggctagaggacgggcggcgttcgccctgacccgtgcggtggaattggtttctccccgatgaagcactcggctactcgtttaatcgcacaaggccatccgaccacgctttatgggtccagagggctccgtgcatgggggagtctgttgcgcggacgacgcggtcttcac

SEQ ID NO: 80312 - DNA, 546 bp, Zea Mays
ccaagcaccagtggaagagcgctgctcccacaaggccgtgcacctccagcaaaggaaagacaagactggcagcaccaacccgctggggaggacaaaaggcacgaactctccaatggcaagttcaccgaggtggatggcgccggcgcaaatccttccaccgaacaccggcacatcccatccaagaaggcggtataccatgtcgagcactcactcagtctgggcacgctcgggatgaacttacaaggccatggcaaactacggcaatgcaaagcagagaccttgaaggcaaaggggcgcagagagctcggaggcgagaggacgccgcgagtgggagagaagcaaggcatggctgctactcgagggatgaacccctctttaaaggtagactcccccgctcccacctcaaaacgtcgcgagaagtctcccccgatgcacaccggggtatccatcctatgacacgggggcccggttccacaagtcatacagctagcgcgctggtcttcgagtgcgaagaaggcgaaccgccgcacaaggagaatgccaccg

SEQ ID NO: 80313 - DNA, 343 bp, Zea Mays
gatgagcaacaactgagatttggtcgaagagtatactcgtatcaaatgtggccactcaatagaggctagacagttggtgggtcacgcggcggaggatgccgctaaagagtgcttttttcaagatggatgtcattgttatgagtcctgccttagctgttgaacttggcggggcgagacagggcgggcttcgttagtggtgctgaagcgaaggctgttaaaattgttgggaaatactctgcgaagactaagttaacaagaagcctgtaaatctgagatggtaacattcgtctcaatagggttttcaaaatgaatgagctagaatatgggtcatatcccgaagacg

SEQ ID NO: 80314 - DNA, 771 bp, Zea Mays
cgctccgtgcggacgatactgtgaattatagccaagggagtcagcttttcccgagagtggcccattcggccggacagtcaccgaactgtccgccgctacatagaacagccagagttcctcttttttcatgccaactcccttttgctctgtttggcttgtcttcatatagtccctaacacttagacaaatatgattagtacctaaaacaattaactaagtgataggagcataccttttttacttggaaccacattgatttgtaatatacccatttcgagcttaaaagtatttttttctcaatttgctttaactacctgtgctaatgctcatacaagaagatgttagtccaaaataatgtgttgagcatttagtcgccaaaacaaaatagaaatggcctaagggcacatttcccttttaacacatgtatagtcctctcgtgcacacacttagatgttctcaacacaaatatagttaggcatccttgagtagtctggcaaaaccattcgactattttgcaattcattccatagatttaagaagttagcagctttggctagattagtgcatggagatggagcaccaatttaaaaaatagatctagagcatcagattgaactagatgcaccatgaagcagttctactaaggatttaggctcccaccagaatgtttggtagatttccaccatgaatctagattaatatgcaattataaactaatattagggggcataatgaaagaataaaaaagttggcttctttgtctagatgaga

SEQ ID NO: 80315 - DNA, 941 bp, Zea Mays
tttatatctaactttctatctttaacatacataccattctatatttaacgcaagttttttattattattattttcccggccggtcccccccgcccctcatcacctgtgcttccgcgaaacaacgctccgaattcaacagtgcctaaattaagtgacacaaccctaaactttcatatgactactatatagcatgtgttacacacgatcctgaggagatgatcgatgatggtggtggcgcaagtgaggagagggggaagggaagggatgagggatgattcgaataaattagttcatggggaagggagttcagttatccaactatctggactattgattttgatagtgtgttaagtttgagtacaatatgtttggtgaatttagtgggataatgagtatggggtgatttggttgtgtgacttttgcaaagtttaaactgatggattatatagtggtaagagcataactcttttctattatataaatatatgtaactttctatctttaacatatacaactttatatctaactttctatctttaacgtacataccattctatatttaacgcaagttttttattattattattttcccggccggtcccccctcccctcatcacctgtgcttccgtgaaacaacgctccgaattcaacagagcctagattaagtgacacaaccctaaactttcatatgactactatatagcatgtgttacacacgatcccgaggagatgaacgatgatggcggtggcgcaaatgaggagaaggggaagggaagggatgaaggatgattcaaataaagtagtttatggggaagggagatgagttatccaactatctggaccgttgattttgatagtgtgttaagtttgactacaatatgtatggtgaatttagtgggataatgagtatggggtgacttggttgtgtgacttttgcaaag

SEQ ID NO: 80316 - DNA, 899 bp, Zea Mays
gttcagcttcagtaaaaattggcactggcacttccccagcagcaggagcagaagggccggcatcctgattcaagcatgacactcgccgaagacgtctctttttctgtttcttcccctcagcaggagaagttggatgattggttcggcgaggacgctttgggcgaatactatcagatctctgaatgcccaaagtttttctagactctgggatgggtgctacagctagtgtttcagcagggaccgaatcagaggaatcctcagccaacatgtccagcatggcacttatttctgcgtcgctcggattcaaaggcatctcaaaatgaacctgcctctcgtcattggggatttcaccaagcgaaacaaccaaagcctcaacctcttcaggagaaggtcgcactctaaggccgaagccactgtcaccagcaggaggatttgacacaaaactgatgaaaccttggaaggaggcagattccaggctgagtatgcaacaggagcaccgatattcgacaccttgcctctgagtatcatctcaagccggcttaccagatccacagcaggaatccttctgttggtaacccgggtcgaatcagtgaggccacgatacaggtaagctgggtatgctctgtctttcagtggctgaatgttcttaaaaacaaaatcggcgaccacagcctcggcagtcagacccttctccttcaacaatccaacctaggcatgtagagccccggcctcagctacctccaggtctgtggaggattcagtccaacttggagtgcgaacatctggctatctccctgaccgaggggggagagaattcccgtgattctccacgataaaccattccaggcgccatcctttgatgatgtccttgagtgggatgtcgaggtactcggttttcc

SEQ ID NO: 80317 - DNA, 488 bp, Zea Mays
cttcggcacccttgttgtgccgctcataatcagggtattcaaattttagagagtccattccccggtataaccttcgttttggccgggtgccgacgccccgctcccattaattggtcttcttttttagtgtagttccccaaaatttcattgcacatagtttcaatcatttccagccattcttggcagggttccttgaactgtttctccaacttaaaatgataaggtaatcgaacaagttcatatttcttctttgtcccctttaggttcggcatgccccaatcacttgacgtcggagatgtcctgttggccaggtattcttgcaccaggtctctggtgctgatttgttcagccaccaccctgaattctactgtggccagttggcatggtgaccctagctgcatgttgcacaggggccgggtcattccaaagtttagagatagcggccacataaccatcgtcatcaggtttccccttttcttctcatcagc

SEQ ID NO: 80318 - DNA, 777 bp, Zea Mays
ctcttcttgggagttgcggcatgaattttttccatctttgacaaatttgcctctgccggtgggctcacgatttctggcacttttattacttttcccacctatggctcttcggccttatcatctttagcttcggcttgcccgactgtaggcaccttcggcactacaatcggctctttagcgctttgcacaatcggagcagcttgctttgcttcggtagttgaagaggtccccgtgcctaatttaggcaccacagccggttcaatgtaacgcggtcgatgggtcagaaccttcatctttttgctcttcggctcagctgcaatggccgaagcggcagtctttctctttttatcttgacctcatagcgggtaatggtaatcagggtatacgaagccaatagcatcaaataccctgttcaatcttttcttgccccgacccccgaaagctgcgaacaaggcattatcttcggccttggagtatgccccaagtagctcatcgctggcagcttcaatacacttcagccaatcatcgtttggctcatcaaacttctccctaaatctgaaggtatacttcagtcggaccaaaccaccctcactggaatcggcggtggtctcctttggcatatcccagctctccacaagtggccataccctgaaggatatatgctcttgaatcaaatccctcgtgccaatgaaggcacacacacaatgctaaaggccctctggcatgcttcaacattgccgtcaatttccaccttcggccttcaaaggccgaagtgag

SEQ ID NO: 80319 - DNA, 486 bp, Zea Mays
aactgcactatggtctttgacgattgggagctaagactttagcaacaagaatttgtcataatactcatgaaggttctctttcacttgtcaacaatgtcgggtctatagccttgaaagttgagcaagaatttgtcatgaagggtttgccataagtcgatggataggggtgcagtatcgtataccatgttaatactaggcattctatggcgatgatggtggactttgccattgtgttgttgtccttgccatacgaagacactatcacttggtagcttatgatgtattgtgatgggttcgtgctgccaatgtattttggctagttttccaagcgatagctttgtagccaaggggtagcttgtagtctcacatgcaggggacacatctcgtttatgaagttgaatatttagaacgtgttagggtgttgggatgaccagtcaggtcctccacacgtttcctatcaagggcccttgttagagaacttaggga

SEQ ID NO: 80320 - DNA, 573 bp, Zea Mays
ttggggtcagcgtcagccgggtcacacccattgggatcatcaacagtaaaaatctccacctgcacttcctcggcagcaggagcagaagggtcggcatcctgattcaagcatgacactcgccgaagccatctctttttctttttcttccccttagcaggagaagctagatgactggccggtcgaggacgcttcggacgagtgctatcagatctttgaatgtccaaggtctttctaggctctgggataggtgctacagctagtgtttcagcagggaccgaatcagaggaatcctcagccaacatgtccagcatagcacttatttctgcgtcactcgggtttataggcatctcaaaatgaacctgcctctcgtcattggggatttcaccaagcgaaacaatcaaagcttaaacctcttcaagagagggtcgcactctaaggcccaaaccactatcaccagcaggaggatttgacacaaaactgatgaaagtcttggaaggaggcagattccagactgaatacgcaacaggagcaccgacatttgacacattgcctctaagaatcatctcaagccgg

SEQ ID NO: 80321 - DNA, 787 bp, Zea Mays
ccggggtgacgacgaattgctcatcgtgcttcttcctccgccgcggatccgcgcacctccgtggtcaggacgctgcactgcgagattgacggtatgggtcccttccccatgttcgagttcttcccaatttcaattcgcaccttgtacacctagcagtcgtgcaccataggttggatcagggagtccgacaatggcgcgccgccgtgctgagtgccggcccgccgtgattgtgcgtagtgggggggagagagtcgaccactgtcgatctgtcgatggagggcagagattagatgatagcatacctattcgcgcgatcaaatcgtgaccattgatcctctatctgatggcttagggcagatcgggctaacataaaatcagaaccctaggatcttgatctaatggtcagttttccataccgcttcgtagcgaatagcgatctaatctggaccgcaggtgctcgatccaacggccgagggatcacggtaccctttcgtcgtgcccattttgcataagcgcccctctgttttagcgaaattaacccgcagtacatgcgccagtggtctgagtcacagtttcttttacgccagggcccctggacttcccagatattggcgcccagtccagagtagattaaaaatagagaaatgatattagaaattcgtttttaataaaaaacaattctagaaacttgtaaaatgcatagaaaattcattttagccccaaattgaaccattccaaattctaaaattttgtaataatattctctatcatttaatgtctctgtttt

SEQ ID NO: 80322 - DNA, 535 bp, Zea Mays
ctttcacgctatgctccggaagaagtggacacggatgagaagcgccaagtgcgtttcctggaaggactgattggacctctgaattattaacttcagagccatacattccccaacttccagacactgttgaacaaggcaattggccttgagagtaaaagaaaggagctatctgaccacaaaagaaaatttcaaggtcagtctagcaagaatacccgcccgaacaacgctcaaggttcacagttccgctctggaaatcaaggcggaaacaattatcaagtgcaacactctggacaacaaagccagagaaataatcagagtcagaaccagcaaaggagtaactctcagaccaaccagaggtctggtggaaattcacagaatcgtcaaggtggcgccagtaacacgcaggccagaaacaacgcacctgtccaacccaatggatgtttcaagtgcggtgagctaggccactatgccaataactgcccaaggcgcaaccagcagacaccctagaaaggcaataatcagaggaatgaccaga

SEQ ID NO: 80323 - DNA, 645 bp, Zea Mays
ggctttatgagtatttggtgatgtcattcgggctgaccaatgctctggcatatttcatgtatttgatgaatttagtgtttatgtcggaattggacaaattcgtggtggtcttcattgatgatattctggtatattcaaaaaatgaagacgagcatacaaagcacttgcacatagtactctagcgactacgggatcatcacctatatgccaaattctccaaatgtgatttctggctaagggagatcaagttcttgggtcatacaatttctcaggaaggaatagcagttgatcctgagaatgtgcaagaggtgatggattggaagcctcgtaccaccgttcgacagattcagagtttcctgggattggtaggatactatcgacaattcattctgaacttctccagaattgctaagcaatgaccgagttgttgaagaagggagtgaagtttgattggggtcagaaatgtgaagatgcctttcacaccttgaggcagcatctgacaaccacacccatactagcgcagcctaacaatgccaaatcgtttgatgtgtattgtgatgcttcgagcactggactaggttgtgttttgatgaagacaaccaagttattgcctacgcatcaagagcactcagacctcatgagcaa

SEQ ID NO: 80324 - DNA, 1098 bp, Zea Mays
cgtttacctgcctctacatcgtactcatagtgtctagtgcagttattttctagcacattatcatcgtcatgcaacgcgagttcacgataaaagacttgggccatctccaccacttgcttagggtcatcatggagcgttgctcatagggcatcttctttcaccagtgttagtatgcatcgacactctagacgagctggcatgttcgattgcaagccttgctccacgtttgttgacactcaagcaaaggtctctgacgatgaggcaccctggttggcaacgtgacggcctaccggagcctttctagaggtctccagtatctcacttttacatggcccaatatcgcctacacggtccaataggtgtgccttcacatgcacaccttgtgggagccccatctcaccgccgccaagcggattctttgctgcctccatgatacccttaactacgatcttctttggccctctccgacttctatgctaatcgtctacaccaacacatattgggatgactacctcgacacgttctgatccacctttgggtacactgtgttctttggcacaaacctcgtcttctggtcctcgaagcgataacccgtcatctctcgctccaccgttgaggcctagtatcgtgttgtggccaatagcatgggcgaggcttcttgactctgtcggctactccaggagctccatattcccatcatgcatgccacactcatctactgcgacaacgtcagtgtcctctacttcaccaatcccatgcaacactaatgcatgaagcagaagaagatcgacctccacttcatccacgagcatgtcactatcggtgatgtccgcgtactccacgtcctaactacctcacagttcctcgacatcttcaccaagtggttcccatacacagtgttctcagaggtttggtcctgtctcaacatctatgtagtatagagttagtgactgtgggggtgttagtgtattgtttatcgctgtaatgggccttgacccatgtacttggctgctatatgttaatacatcccctacccaactagggctggtttggtgacaagtgaattgagagggaatgaaggagattgaggggggaatg

SEQ ID NO: 80325 - DNA, 597 bp, Zea Mays
actagattgagttctcaagctccaaatcacatatggcagctctctgatccactttcctgcaagtttttcatttttgtcgaacactttcttcctgagtgcttccagtatcattccattggctctttccacctggccattggctcttggatgagctactgatgcatacttgatctggatgctccgttgttcacagaaatcgaagaattcagagctgctgaagttggatcccaggtcagttatgatgttattcggtatcccaaacctgaatattatatcttgtatgaactccactgccttggctgaggttaaagaggcaatgggcttgtactctatccatttggtgaacttgtcaatggcaactagcacgtgagtatagcctccctgagctttcttgaaaggtccaatgatgtccaacccccagcatgcaaatgaccattttatagggatggtctgcagcagctgtgccggtaaatgttgttgctttgataagaattggcaagcttcacaccactggactaactaggcggcatcactcttcgttgttggccaatagaaaccagacctgaaaactttcccaaccagagttctggatgctgc

SEQ ID NO: 80326 - DNA, 1467 bp, Zea Mays
ataccttaaatcaaatagttcacatatttggagatttgcaaaagaaaccatgagttttgggcttatttgcaaaaaggccaccctagtgctccaatggttaagtctgaaaacagtggcatagagctgactttagagctctgtagatccaaaaatattaagaatttgcctagggtcaacacaccaaaacttgtaaagttactataggagtacaattttgctatagggattaagccttggtgccatgaaaatttttgagaaaattggatccaaagtcgggctgtcaggcaaccctaggcctgaattttcagaaacagtgaagttggatgaactttgagctcaattttgagtaaggtcctataacaaattgatgatgggcattataacaaagttaaagctggtttattaggctataactttgaaacagagagttgatccagtcactacataaaatctagagcaaattgaccccaagtatgctctatcagactaactgaattggttgcgcgatggtacagtgtactgatcagatcgccagctcagagacctcaccgccagcgaccacgcacgcggattcgtgctatcaccatgattcacgcccgaattaaacgcgtatagcgatcacggggtgaaagatcttgtcgcggatgagctgggatgtattgtgtgcttgatggttcatcattgcacaccggcgacgtggccgagcggctatcaccggcgtgttcgccattcactgtgacggcgccacgtcttaggaagtttatcgcgtcggtatgagtcgtagtgaccatccagtgaccgtcgtagttcagtcgctctgcgattgccacggtagatcgccgtcgtgactcattcccctctcggtcgctagcacaattcgtccaaatcaaacatcaccgctcaagcacactacaaattgagcacaccgacgggtccgtagggtaatcaagcactgatccaccaagccgtgcctccaattactcaccagcaagccccaatttcggatttcccccaattcggtccaaaatcccgcaccttacaacctcgccgtggtcatcctactccatgtcggcgcatgccctctgctctttcgttccagtgtccttgtgtttccctgatgctccccgacccagtcgattagactaggaccccttagatcgctaggaaaacttcatgctgcccgttgtgtccgctatcatcgtggacagggtgatgtagagctccaatccagcaattaagcgaggggaaatgtttattaagggttcaatttagtgttcgctgcacgggagcaccggtcgttgcgtgaatcggccggtgtaggctcgccggagctcggttctctgccgctgcccgtcgtggactttcccatgtgaagaattagaacttcgagggtcttagtgcaaacgtcagtgaaacaaacaaatagtgctctgggttatttgttgcttagtcaaaaagctagggtcg

SEQ ID NO: 80327 - DNA, 477 bp, Zea Mays
cggagttcctgttttagtaactgacaacttcggcagcgatgtcactagcatctttggcttctctgctaccttttccgattccggatctctggccgggtctgcaatagcttcaatcagcatagcaggagccgtctctgtgggttgggggacagtttctgccctttcaattaaattcggcacatcggccatctcgtgcgcctcggcctatgtgtcaagaccttgattttcttcgtctttggcgcaccagtagatgtcgaagcagcggttttcctttttctcccttgtttttggacgagaaagcagtaatctgggtaaacgaacccaataacatcaaacactctattcagcctccttttcccgtgagcgccataggcagctgtcatagcttcgtcttctgccctcgagtatgctccaagtagttcatcacttgttgcctctataatgtccagccaatcatcatttggctcatcaagctgg

SEQ ID NO: 80328 - DNA, 567 bp, Zea Mays
tgcaaattgcagagagggaagaacatggcaaaaatttatgctgcgtgaagaccttctctatcgtgctaacaagttgtgtgttccagctagctccgttcgtcttctactcttataggaagtgcatggcggtggcttgatgggacattttggtgttaaaaagactgaggatgtgctgtccactcacttctattggcctcaaatgcaccgtgatgttgagcgctacgtcttgtgatgcaccacgtgcaacaaagctatgtctcgacttaacccacatggtctttatatgcctcttcttgttcctagtgcaccttgggaggatatttctatggactttgttttagggttgcctagaacaaatagggggagtgatagcgtttttgtggttgtcgatcgtttctccaagatggaacattttataccctgtcacaaaactgataatgcttcgcatgttgctgatttgttcttcgttgagattgtgcgattgcatggtgtgccaaatactattgtttctgatagggatgctaagtttagggtttagggtacgaagctggccctctctcctttgtt

SEQ ID NO: 80329 - DNA, 321 bp, Zea Mays
gtgtcctcaggggctgggcgatagaaaccaaactgcagtcgagaggcctcgagggtggcctagaactaaggaggctagatcagctgcgcaaatatgtgacagagatagtgaccgtacggcagctgacggcgagcacggagaccatccaaaactgtgtcctcaatctcacagatcagaaaatcaaccacgtcaaactccgagtgagatatcaaggcactaagtagccagagttggatatgtgtggtggcctccctatatcccatcctaggtagcaaagtgcgcctcatgatctcgtataagaactttgctgctggagtgaag

SEQ ID NO: 80330 - DNA, 535 bp, Zea Mays
agtcaaaaccgtctattcacccccctctagccggtgtcctagatcctacaagtggtatcggagccgagcactccattgtttgtggatctaatcatcccggagtgggacaaaatggctagtaacaacaatgtgcacattgggaagccaccacattttgatgggaataactatgactattggaaaataagaatgtcaatgcatcttagagcaatgggtggaaaaatttggccaattgtcaagtatgggtttgttgtgttgaaagaagatgaaccatcggctagtgacaatgaaaacattcttacaaatgatcaagccatgaatgtattctatgatgctcttgacataaatgagttcaatcgtatcaagaatctcacaactgctcatgagatttggattaagctaatgaaaattcatgaaggaactacaattgtgaagagtgcaaagctatatgtgtgcaaagaaaaatttgagcaattcattatgaaagaagatgaaagtgtatccgatatgtttaacctgttaaatgagatagtga

SEQ ID NO: 80331 - DNA, 591 bp, Zea Mays
caattatgaacgagcgagaaatgatatgtaatctaaactcagccccattccacgcaagaccgtatcagtttgatgctttgatgtagttgaacaccaccactccgacgctccactgcacatctccgaatagcgggttgccacagtgcaccacatctttggaagacaaagctatatataaaacgatgagccatcgtcactgcttccattgtcgttgtcaacgatgccccatacccatctagttacagcagttatgcaggttggctatcatagtctactacaagccatgtagccgcacaataccggatccccttgcgctatcgaaggacgttgtccctagctagatatacataggctgtctgacccgactcaatctgatcgaaatttacccaaaccagttggatcgggccatgttaaagagggcgagctcggtccatgctttctaactctgcagaaaaattgggtcgagcgtgagccaccatttagaccacgggccggcacgttgacccgacataaacgaagaatccaacacatcaaccatgatgaagcacccaatcaaacatgcgacatcagcccatcataactcaacagccc

SEQ ID NO: 80332 - DNA, 601 bp, Zea Mays
taagactaagcaaatggtgataactgcttggcaagagcgaaaaaagaccaatatccatctaggactagtcttcaacaacagatagtgatgctctcatatgaaggagtcatccggtctccacaagatcttcatagttctatcacaaattaccaccactaccactctggtggttaagatttatggctctttcggcgtcaaggactaagcacatattaatgtcccaatttagcttcatgctctgtggtgatgtgggatttcatggctatttttctactcttcttacttctggtagatcagatatagattatggtaagcatgccaaggggtgaaatcgtccaatgtagttctgctacataaaccccatttatatgtccctccaggtttgacctttaccgttttggttacagtatatatcatactcgtcaaaggactatcccgagttaattcagcaactagggatatttataattttgagagatgtatgcaacacaagtataaaggtcctagataggacgagcaaagtggttcgacgggaacacacaatggttttcacacgaatatagtgcaaattttatcagaataacctctcggtatactcgca

SEQ ID NO: 80333 - DNA, 1384 bp, Zea Mays
cattttccccaaaagtgtaataatggtagtactcagttactagcacgcgtggcgtgcttcttcaccatgcgtagttccttatttatgttatcatagagaaactgctgagtagtttatactaatacccatacgtttttgtataccagaagagagctatttcacctttacaccttttgatgaaatggtgcctgcacttgcacttcagcggagcaggccttgcaatttccatgcctcgcatgtttaaaacgaggtacatatatgggatatgcatggcgtttagttaggtggggaaaaactgccgcaccgccatattttccatcgaaggtaatggtggccatctgctttccttttctattccaaccgttttcttttttaccaaagcattatggggggtgatcgatcgatcgatcactgatcaattgtgtaatcccgtgagtgcagctccaaacaccttgcgcatccctaccctaccaatgggtttgcgcgttattaccagataaatttctggagcttcagtatccagaaaccagaattaaacacactagtacgcggcaaatgcagtgggcaaattttaatgctccatgggggttagctcatctgcgcctagtttgattcgcgtgctgatgtcagaccaaatcacatcagaataatgcatagaatccaaaatcctaatgccctcgcgcaagacaaagactgacctgaccccccattttgtagaagcactagcaaataagcaaaggatatcccaggcgaggtgagcaggggggggggggggggggcacagatttgattgactcggcattccgaccgtcggctcggctggtcgttatgtcagcgaagcgagggaaggaaggaaagcgcgccgcgaacacaggtcccgccggttaagcttggctcccgacatcgcctcctcagatactgaaaccatccctggttcgcatcgcatctggatggaccgcactgatgtgttcctgttcaccgacggagaagaattcgcccgccgtgctttgctttgcttgtgattgcgatggctttgtttgctcgccgacacttttgtgtacgtacgtggaaaataagatgggtgctatttatgctcctgaatttcacaccgcatgtttctgccgacgacagaaacggctgttactgaatctgagcacgtacgtatagctcgatagctcatacaatacaatgcaatatatatatactcatgacgcaaaataaactaaaggcgaagcaggcgtccatcgaggcatcgatcggtcggcggatgaacaacgtggccgtttactgttgttgatgtgatgacgacgacgacgcggtagaccaaccagagaccaggcctgccttttggttttctcgagcgaaaggctcccgcgcgcgcgcg

SEQ ID NO: 80334 - DNA, 800 bp, Zea Mays
ctcgcaagacatgttcaaataggaagatcatgaacaccatgagaagggaggttcatgttctttatacttaactcagaaactcgcctctcatctctgatcctcctaaagcaaaacgcagctagatgcccatccctctcataatactcacactagaatctcacctctctcttaggtggaatttgtttgtgggagggggctttctttttgggtggctaggcttttggaggggggacattagagatatcaggaatggtattaagtgtgttcctgaggtggttagattttggaacccacacttgtctttgaggaggggctctcataggctcctcaatcataccatctctcctaggggtgataggcttaggtggagtgattttgataagattgggagtggttgatggtttctcttatggtttcaatccactccacttagcaaccttcccaaaacacgcagtactctcattcttagcagcaaagcctaatctcgatccaccatttcctctcttgaactggctgactaccatgcccaactggggctcactgcacgacacctagctcaagaccggcgaatgtttgtaccaaaaatatgtgttttattcctcgatcctagtcttgtcatgcttgcaggactcaagtgcagactacaaacactcacaaagtgaacactgcgcaggtgctggggcactcactgagttagccttctcaagcaaggctatcctaacgtctctctctactagctcagtatgcaagccaggataagcaatacacgctcccaaaaagctagacatagatctcaattt

SEQ ID NO: 80335 - DNA, 645 bp, Zea Mays
atgacattgacctctctgtcaatgcgcaggaattcactgccaccgcctcttttattgtggcggttgttcatctatggcttgctctcttcgtggcggaagcggcgggagaggttggaatggtcgctcgttgcaaaccgagttcttgaagtccctgcaattacccagggtgtgacgcttctccttgtggtataggcactggacgtcaaggatctcatccagtgttcgggcgttgcctcgtggcatgccacggggccggatcgccgaaggctctacatcatgcacttcatctcccgacctcttttcccaggctcctagtgtttatccagctactggttcccttctttcttgtgtgcctggggtgcaggcttcatgtggccgatgaagtcctgggcccactcgtcagcgatgttgtagatgtctgcttctcgaaagagctgttccgaggtgactagagctttctagaggatgggttggacgaaagccaagtcattagatccgcggtagaagtccttgatcatgacatcctccatgacatcagggatacgattcctcatagtttggaaacactttaggaacgagccgagggactcaccactttgacacttgatcaatttgaggtatcagggttgcgctggtttgttagaa

SEQ ID NO: 80336 - DNA, 645 bp, Zea Mays
ctctaacccagatgattaatactaagaggggaggaggtgttgatctacccgcatgaattcgtcgaagaagggttggagctaatccagtgccagaaatgaatcctccactgaatccctcgcatgttgatgacatgactactactcaaatgcgactactacaacaaatggccaacagaatgacagaaatgaaagcatagatccatcaggaacgataggaaatgagacaagaacgtcaagaaatgcgccaagaacggcaggaacgacatcaactgccacctccaccaccaccagctctgcccagggataagcaccgggagtttatgagtcataaccaccgacattctctaactcctccgacccactacaagctgatgactggctaaaatctatggacaagatgctcaatatagctcagtgcactgaaagggagaaagtgctatatgcatcgggtcgccttactggccccgctgcggattggtgggatgcatattgcgctgctcacgctactgccaacaccattacctgtgcagaattctccactcacttcaggaattactatatttctactggccttatgaagattaaaaagaaagagttcctatccctcaaacagggaggcatgtctgtaagcgaatatagggacaa

SEQ ID NO: 80337 - DNA, 373 bp, Zea Mays
gaaattgctcgtatctgtcatgtctagattattgctacatacagatcattccagctgatcgatgttgatagtaagactgcatcaatgtttcaggaaaacgacccctggcagatgtatgggcccttgatactgcggccaagccatatgaatggaggaaacttgaaccggaaggtgaagggccaccaccatgcatgtaagtgccccaatatactgaggaaactttactccttttagattctacttaaatcattgagcttaagagtaactccaagagtttatatatccttactgatagaaatagagattttggtcctccaacagcttctttaactagatgtccaaatattgctatcctctattctagatttctggc

SEQ ID NO: 80338 - DNA, 358 bp, Zea Mays
caaacttctgcccaaggtaaccattgaacccaagtggatggtcgctcagtggctaaacagcgaagatacatctcaatagtacgattcaccacctccgtctggccgtccatctgagggtgatataaggaagaggtgaggagttttgtgccacaatgcttaaaaagattctgccagaaggtgctagtgaacaccaaatcgcgatcggacacaatagactcgggcaccccatggagcctcaccacttggtcaaagaaaatatccgcaactgcagatgctgtagcaggcctcttgatagcaataaaatgaccatatttggataagtgatccaccacgaccaacagagccgacttcccttgag

SEQ ID NO: 80339 - DNA, 499 bp, Zea Mays
aacattatcgtcaacatattaataatagtatttcatcacgtcacaagtctatattatttaatcagctatttattcgataattattaaaatgaccttctaattaaaactgttttatagttttttaactcatgcttttataaataaatgttaatcaacctgattaatatcagcctaaatattgttaattaattgtttgtttgttgttgttcgtatatgacatcttttgcgtgtcatcgtgctgatcacgcgtgtagtcgcgttggctcgcgcgtatcgagcgttgtttcacgtgccgtccgcgcactgttccatgcagtgtcgcatgtcgtcacacgtctttcgcgcgttgtcgcgcgcgttattaaattgttttcgcttatgatcattcatattaattaatcacctatgtagttgttaactattagaatatcaaattaatcaaaactaagcagtgacgttaatttatattttgtaaatgtcctggctattacttgcgtag

SEQ ID NO: 80340 - DNA, 453 bp, Zea Mays
ttggtggctaacacattcatcaaagtctgtagggatccttgcttcctcgtcgtcacctgccatcgaaacacaaaaacaggaaacaaacggtgacgattatccctaataatctcactacacgctcttctcaggtggaacacagaaacacactctaatgtatcttaccaagctcttacaagtgtctgacaaaatacaagcaaaggatggtacaatcggaggctggttcgtgatacttaccaagaggtagtgacaccgcgattgcaagatcacagctgtattgatcagaagaaagtatgtggagcttgggaggccaaaaattaatatcaaggattagcaaaaatcgagtgcagattagcgaagttcaataagtgtccaaagcacaagtcacaattgctggctaagacgtgtcctatcaaagcacaacaagataaaagtaacaaactagcagaatgg

SEQ ID NO: 80341 - DNA, 1248 bp, Zea Mays
tagaggtcgccctaagatgagtaatcgcaaacgtgcttgtgttggattaagtaggcgcgagtgtgtcgtgccgatttatgtcattaccaacttaaaccgaccgctccgttggtagggtatagtgatcaccccgagtcaaataagcgtgagcatgttgcaccgccttaagccgttgccgacttaagacgatagcttcgttagtagggtatagtggtcaccccgagttgagtaagcgtgagcatgtcacaccgtcttaagtcattgccgacttaagtcgattgctccgttagtagggtatagtggtcaccccgagttaagtaagcgtgagcatgtcgcatcgtcttaagccattgccgacttaagccgattgctccgttagtagggtatagtggtcaccccgagttaagtaagtgtgagcatgtcgcatcgtcttaagtcattgccaacttaagtcgattgctccgttagtagggtatagtggtcaccccgagttaagtaggtatgcaggttgacagtgaacaatttgagtgcccttgaagtctttttattgatgatatatttcctagtttacagaatacattgtcgtcccaatagcttttgagatatagctaggggtaaaacttcctgagatgttctatgttccatgagttcccaatttccgtgccatccatttgagtgagacgatatgatctaggccgagtgacttctgctactatgaacggtccttcccatagtggtgacaatttgtgccgtccctcccccgttagaattcggcggaggacgaggtcacccactgcaaaggatcgatgccatatggtcttgtcatgatagcgcctcagagtttgctgatatcgggctgactgaatcaccgtattcaatcgttcttcttctagtacatcgacatcttccagcctagtagcctcagcttctgctatgttttcaaagattaaccttggtgccccgaacttgagatcatcaggtagcactgcttccgaaccatagaccataaagaaaggtgtgtttccatgcagagctcgactaggttgagttatcaggctccaaacaacatacgacagctctctgatccactttcctgcgaacttttcattcttgtcgaagactttctttctgagcgcttccaatatcatctcgttggctctttctacctgcccgttggctcttgggtgtgccaccgaggcatatttgatctgaatgctcttttgctcgcagaaatcaaagaattctgaa

SEQ ID NO: 80342 - DNA, 541 bp, Zea Mays
aaattctactgtgtcacggtttttggaaccacgatagactgtagatgtatgattaagcactcaaaattggggtttcacaaccaataacaataacttgttcagtgaaatattaatctaaaggaaatcacaaatcataacatgggtggtatatgttaattatatcatgtaagggtgttaaagaacccctattcacgcttcctaatgtgtctacaaattacatggtccaatgggcaaaaaaacagtgacaaactatagtgacagattctagacattgaattattttgacgattttggttgactctaattaaattatgatgtgaaaaccaaagacatatgatagcttatgaaattatctttccatctataggtagatcataaaaaatggagtctgaggtgtttgttttgttgcatcatggtcatagatcctcatttacacggattggacctccaacttggttttgacacccttgttgacctctaaagatggtggccaaggcgaagaatgtcaaagatcttgcctgatgtgtattctccatctttt

SEQ ID NO: 80343 - DNA, 432 bp, Zea Mays
gtttattgttgagaaccatggaaattccctccctacacggtcgggaagacagccggatgttcgcacttcgagctggactgagtctcccacagatcaggaggtagctgaagcgagggctttgctagctgaagttggtctgctgaaagaaaagggcctgactgctgaagctgtggttgctgattttgttttcaagaatgttcagctgttgaaggatagagcatacctagcttatctgtacagaggcttggctgatccgacttgggttaccaacaggagaattccctctgtagacttggtgaaccgacttgagacgatccttagaggcaaagtatcaaatattggcgccctagtggcatattcagcatggaacctgccttctcccaagaccttcactctttttgtgtcgaatccacctgttactgatgacggttt

SEQ ID NO: 80344 - DNA, 331 bp, Zea Mays
cgtcttcgtgtggacaggactggcaagcgggaattgttgtcctcgccggctggggcgagtgtaggtgagggggaattgcgaagtctttttgagggtgaggagctgaggataatgttgtttagctatagggagatgggtattatcccgaaggttgaaccaatgtaaggtgtgatgccctcactgtacgtatgtaactataatctgtatgaagaggttgtatgccttcgctgatccggtcgtgcccgtaggggacttgtgcactaggtctagcgcgtttattatgtcggtccggcggcacctgtagtcggtcgttgcacgggtagtcttttga

SEQ ID NO: 80345 - DNA, 305 bp, Zea Mays
ttacttttctatttccattgttctctggactgggcatcaaaaacaaagaaacgcaggggctaactcaaaatatttcccagactcaggcttcccacatatggacggcgggttcatatgctaaaatatcaggggctttttcagaaaagggcgcggcgaagggaaaccgatcagatctggccgtccgatccttggctgatggcgcggattagatcagacacccaccgaaccagtatgggctcgggatccttagatcatgactgaacggcccagattttatgaagcccaatctgttccgagccgtgcga

SEQ ID NO: 80346 - DNA, 413 bp, Zea Mays
cccacccactgcattcacgcagcaactgattcgccctagggtttcgccctcgctcatctcgcgtcgctaggttcccagcgaccagcgccaccacctgacggatccgcaccatccgagatctgcccatccccgtggtatcttgttctccatctcccatggtacttccctaggaactcgctctcgtttgaacactctgttcttctgagttgttcctccatgtatcggctaatccgtggccagtggatcggctaatctcgatgcattcgcagttcaatcgtcgttttagagtttcattttagcccatgattcgattttttgagtattgtactctctctcggttgaacactctcctgactacatcctccatcactatcgatgtagggttaatttttacctatttacttgacggactt

SEQ ID NO: 80347 - DNA, 398 bp, Zea Mays
ggaatttactccttgtccctctattggattcgtcggtctttatggtagaggacttcggcattcttggtgcactttgcccggggaccagattgaggagcactcaatcagtcaaacactaaagttttgggtgcccccaagatgggtgttgtggcatccaatagggatattgtgcttgtaccgtaggtgttccccacatttggttaggttatacggtgggtatacttgtggatacaagggtgcatagctaggtggaggtgcccattatgctggtgtcatcgattgtggatttgggaccagctgaacaacatccctggccgatttaattggccttacctcatgaaacaaaccattttccttcgcctgcctctctaaggctggagaatgagatcactttgcta

SEQ ID NO: 80348 - DNA, 1609 bp, Zea Mays
caccagacttgcaagcatcagtctcaatacagaaggttttgttgaaatccggaagggccaacacaggtgcagtacatagggcctgtttgacagcactgaaggaaatttcatgatcagaagtccaaacatacaagacacccttgcgaagtaactcggttaaaggcttggtcaagatagcaaagtgacgaatgaacttcctataataccctgcaagccccaaaaagctccttaactctttcacattgagaggagatggccaatcccgaacagcagccactttggctgaatcagttgcaacaccttgctcactaatgatatgccccaaataatatgagatagttcgttgggcaaactggcatttagataatttaatgtgccaatgatcctgctgcaatagcaacaacacatctctcaaatgattaagatgctcctcaaatgttctactgtaaaccaatatgtcatcaaaaaataccaacacacatttcctcaacaatgtagccagtgtggtgttcatagctccttggaacgtccctggagcgccagacagcccaaatggcatgaccacaaattcataatgtccactatgagtctgaaaagcagtcttaaattcttcacctgactttagacgaacctgatgatatcccgagaccaaatccaaggtggaaaaccaactagaccctgctagctcatccatcaattgatcaaaaacaggtataggaaatttgcccttcacggttagtgcattcaaatatcgataatccacacaaaaacgataagagccatctttcttcctgaccaataaaacaggggagctgaagggagaggaactgggcctaataaggccttgttgtaacataacagtgacttgtgcttcgatttcatccttaagtgcaggtgggtacctgtaagggcggatgtttactggtttggctcccaccaataatggtatagcatgatcacaacttcttactggaggcaacgaagttggagctgaagtcacagaagaaaactgggacagtaaggactcaatctcagggtaaaacttggagctctcacttgcaggctcgggtacagacacggatgatatctgaattagcaagctctcactagccccatagtctgagccatacaatgtaacaaaagatccatgatatgtaatagaaagccatttgtgacgccaatgcacatgcatagggctgtgaacctccaaccaatccattcccaaaatcatgtcataatgctgcaggggaaggaccttcaaatcttggtgaaaaacgtgaccctgtatcgtccattcagctcgaggtaaaacggaagagcagtgcataatacctccattagccaccttaacctttatctgtgcttccactaacagggcagtaggtaattgttgaattaagcactgattcacaaaagaatgtgtactgcctgaatcaattaagatggaaacctcccgctggtgcagccaacccaacaattggaaagcctttttagctggaccaccactcacagcctcagataacaccactaaaaacagttggtcttcatgtacagattcagactcaggctgctctggcaactcctcaggggtaaacaactcccatacctc

SEQ ID NO: 80349 - DNA, 494 bp, Zea Mays
gtggagtagggtttggcttagcacaaatcgaaccacgagattaaaaaaatctcatgttaagtttgcatcctcataacctactcatttacgtccgcatttcatacttgtaacttgtgtgcctttaccttttatggagcagtatattgataggtttggttttagaattaaaaaaaattgtaggtggatacaaacatcattataatcatagttgcacgttggataaaaatgtttagtttacatttgttcacccttaaaatagggctaatagtttacctgcctaattcacccttagtcctagactatctcgagtagcttacccatctcgatccccatattcgaactccactctgtgaacaataccgtctacagtgcaaaacaatgcaaaacagtattttaagtaaccatatgagtaaactgctggacacagtcttagaccgtcataagagaactgagtccttttactacgaccaccaaaaaacgaagggaaaatcagc

SEQ ID NO: 80350 - DNA, 980 bp, Zea Mays
ggcgctggatgtatggacatcggttttggaggccaggggcgaccggtgtcgcagggagtagatctcgccggacttggaccgctggacgtcgacgccgaggggcatggctgcacgcttgaaggtaagatgggaactgttggattcacataaattccctgtgcgtatagagtgcttaggatttgagctgtgatcacggggcgcggatttgtgaagtccggcgggccaccactgtgttcaccagcgcgcggccgcagtaaagccgccgccgtgctcggttttggcggaggaggaagacgaaccggggccgtcgatctcgagattagcggttaggattagaagtggtggtgtggtggtccggaccgtaggattttaaatgagcggcgtagatcagattttgtgtaccccttcgtctcgaaggattcgggcggtcggatatgaatcatgtggttcaaatctgggtcctgctttcataaaatcgggaccgtcgattctagatccgatgggcgcggtatattaccgattcggtcatgtgtcgttcgatctgggcgctcgctctctgatcggatggccgaccatgcctggtaccccttcagccgacacgtcttacaaaagaaccctgtaattttagcgaatcaacccgccgtccacgccagtagttttctgtgtcttaggcaaacttacctagagacccctgggtttctctggatttgaggcccagtccagaaactcgaaaaaccagagaaaacaaatagaaaatagatttttaatataaaaataattccagaacagtgtttaatctctagaaaattcatattagctcctttttagtccattctagtgcctataatttggtagtaacattgtctattactgagtaacactgttatagcatgaaaatcatattaaaatttatcacacaattatttttgtaccaaacacaaaagaacttcagaaaatcataacttaataaccgtaactcc

SEQ ID NO: 80351 - DNA, 761 bp, Zea Mays
attgataatatttttccaggaagtattgtccgaagaaggatttctttgttaaagagagaccaagagtatgctgcatgaccatctactgccactaacccagtcaagcgcctctttgttctatctcaggaagaaggggttgcatcttcagttgggaaaaaatgatgccgtagtactacatcatcagcatggaatttgtgtgatattttgtgatccatgcagattagtagttcttttgagatgcctcaacaactaacatggttgagatgcagcttacctttccttttgtgaagcatgtcgatgcttctttgatctgaaagaccctttagtttttgttgtaagggctcagctcatctgaatgtttatggctgcagtaacaatatgtgtattgtgcctacctgaacctttggtattctggaacatagatctctatataaatgcagcaagggcaatttggtacatttgtgtgtgaagaaagtactggagttaaacgtagtgttgttttctaaattccctaggcaaaaccagttctattttgtgaatacccggttttttggtgctgttttctgaatggtgcgtgtgatggatgctgttttctgaattgccccgcttggagagagtgaggatgccggactctgggttgacgcgacgactccctgaacctatagcccaactttgtgcgacgactctgcgctctactactactacgcaaaaaatcttcaagaagagatccgcggtgcacgcgaaacctggcagggaagcgt

SEQ ID NO: 80352 - DNA, 485 bp, Zea Mays
cataatcgaaatatgcggcaatagctagaatgatcccaatagatttaagcatcgctaatggtgagaatgtctcgtcatagtcaactccttgaacttgtctaaacccctttgcaacaagtcgagccttatagatgtgaacatttccatccatgtctttcttcttatagatccatttgcactctatgggtctaacaccatcaggtgggtcaaccaagctccaaacttgattttctcccatggaatctatcttggatctcatggcgactagccatttctcggaatctgggtccatcgtcgcttttgcatatgttataggttcgtcgttgtctaacaacaacacttcctcattgcccaccaatagcacttgtcgtgcctcgtgaagccttgctgaccttcgtggttgtgatggtgattatcttgccatagacgtctcaacttttctctcttttgagaaactctttctctaagaaaacactgttcctgga

SEQ ID NO: 80353 - DNA, 529 bp, Zea Mays
gcggtgacttcggtgtggtcgaatgccgaagaccgtcgatgcggtctttttcgacatgttgtgtcttagtttttgcgggggatttttggcgggtatattacatggctccgcctcattaaaaacctcacccccccggaggaaaagagtgtgtgccagaatgatactgtttggtgaattacaagggcgcattagccctgaggattcaaacaaaaaaatttacggagattatcgatattcttggaatgctctaggtcctcgccggatggcgttgttagcctgtacgcgctgggggacgccttcgtcttgacgatgaaggggccctcccactttggctccagcttgccccgtgactctgtccgagttgtccagacgagtacgaggtccccttcgttgaattctcttgggacgactgtgtggtcgcgccatgcctttgtttgagcttggtatttgttgagggcctgtagggcgaagacacggtccttggaagttggttcgtctacgtcggggacggctgaagtgcttgtctgtg

SEQ ID NO: 80354 - DNA, 544 bp, Zea Mays
ccatttgaaaggtacttcttttttggtcaattcattgatgggagcagcaacagtactgaagtctttttcaaaccgctggtagaacccagcgagcccaaggaaacttctcacttggctcacattctgtggaggcatccagtcgcgtacaactttgatattttcttcatctacctccacaccttgtcctgatacaacaaatccaagaaacactaccttgtcggtgcaaaaggtgcacttctcaaggttagcatacaagttttgttctcgaaggacaacaagtacatatcagatatgttcaacatgttcatcaaggcatttactataaattagtatgtcatcaaaatagacaacaacaaatttgccaatgaaagttctaagaacatgattcattatctcataaatgtacttggtgcatgttaactcgaagggcatcaccaaccattcatacaactcaaattttgttttaaaggttgttttccattcatctccctctttcatacgaatatgatgatagccacttcttaagtcaattttagtgaaaatt

SEQ ID NO: 80355 - DNA, 290 bp, Zea Mays
agtcatccacatgatcaccgaagggtccagcgccaaattcaaaaaacaaaggatagaagaaagagcactatagaagggttaatcaaatagccctcaccagccccgtggtccaaatgatgtggtctaacgtaccactcaccttcgacgcaagagacatcaacctccgaagcgtgccccatgcagatgcactggtgaaaaattgtaaagccacagggtgggacctgcacaaagtactcatcgataatggcagccaagctgacatcatattcttgcatgccatagaccacatg

SEQ ID NO: 80356 - DNA, 477 bp, Zea Mays
agaggggcctcagccttgtcagcaagcgacagactcccggcatttggatcactggcctctaaagtgaacagaccagcgagagccatagagagatgtgtcaccgcgggctcctcggattggactagatgcgacccaacatggacgtgcatggaagcagcagaaggggagcctgccccaacaccctcgggggctgggtcctccgtggcagccacctcgaaggttgaggatccctcaaccatgtccataggagccgggtgactcgggtcagcgtcttcatgagccagaccgccctccaaggtcgacgaagcgcgagagattgcccgagttatttcttgcccggtaggatcacgcagtataaaaccatcatctgggacctctgaacagataatgggactgtcagcttcaggaggctctgatggatggccctcggggatgatctcttccaacgcttgatcaaaatcagatattgacaacccc

SEQ ID NO: 80357 - DNA, 643 bp, Zea Mays
tagcaacggctgacgagagaaatccggccagcctactgagtccgcgcccaaggattcggggaaacaacccgagctagaggaacgcccagacgtgggtcccaccggtcatatggcacaacgagggaggttccgtgcggaggaaggtgggctatcaacggcgaggatctcgaccggatctcaacaacccagcgatttctccatcagccggtacacacgcgaggaagatgcattctgttgaagggataactgacgagacggtcccacatgaccgagactgcagggcgcgagacgggagcgaaacacagaggctggcattgcgggctcgaccggcagtgacgcacaaggctactgacatcgcggccccaggtgtcagcgcagtgggggggagtttagctggactggctacgcgagtgagatgggccgagacaggtgaaattggcccaagacgagtggttctctttttctttttttgtttcttatttcattaccctatttcagatttttgttgaatttgtctcaagttttgaacttcaatttctgaaactacttcacgtctaaatttcaacatgtttttgtagaaacatttcatttatttatacaacattcatttaaatattttaaacttcctagttattgaaaggca

SEQ ID NO: 80358 - DNA, 321 bp, Zea Mays
tgccactggtccacattgttcaagaataggaaaaggaccaatgtaccggggtgcaagctttccttttaccccgaaacgtgatacacccttcattggtgagactttcaggtagacataatcttcaacttgaaagtacaagggtttgcgtcgtttgtctgcataactttttggcgagcttgggcttctttcaaattatgtattattcgttgaaccttctcttctgtttcttttaccatatcaggcctaaaaaccatctctctccttgttcagaccagtttaatggagcatgacaccgtcgtccatacaaggcttcaaagggtg

SEQ ID NO: 80359 - DNA, 688 bp, Zea Mays
agcagatttgctccctgctttaatatatagaaattgggtggttcagtgcttcaattcagactggtgactctattaaatggatgaccttctatcattgtctcggggccctttgcaaaacacaacatgttttgcaggctatgacatcaatggattcagatttcgtatagagattcgtgatagaaatcgctgcacacaaaatagtggggtggctgttttttcagaagggaatacaactgatgacaatgctgaatattatggtgtattaacagagataattgagctttagtttcttggtggaagacgtgttccattatttcgttgcaagtgggttgacatattcaataaaaagagaggaataaagaaggatacatatggacttgttagtgtcaattttaagtgcctccttcgaacggatgagccgtttgtattagctagccaagcttctcaagtcttttttcttaaagacaatatgatcaaaggatggcacttggttgtcaaaatgcagccacgtgacacatatgatgtaccctccgatgtttcagatgacgaagacgttcaagatgaggatgccaatgcagaggaagacacatgatgaatatccttcaaccacatccttgagtggaaataggaaatattgttatgaattttgtttccatatcttaggatatgaaatctgtgaccattgcat

SEQ ID NO: 80360 - DNA, 476 bp, Zea Mays
gccggtgggtcagaaccttgatctttttgccctttggctcagctacagtggccgaagcggcagtcttcctctttttctcttgcccttttatcggataatggtaattagggtatacgaagccaatagcatcaaataccctgtttaatcttttcttgcctcgacttccaaaggctgcggatagagcattatcttcggtcttggaatatgctccaagtaactcatcactggtagcttcgatgcacttcagccagtcatcgtttggctcatcaaacttttccctgaatctgaaggtatacttcagtcggaccagaccaccttcattagaatcggcggtggtctccttcggcatatcccagctttccacaagtggccataccctgaaggatttatgctcttgaatcagatcccttgtgccaatgaaggcacacacagtgctaaaagctctctgacatgcttcgatattgctatcaatttcc

SEQ ID NO: 80361 - DNA, 585 bp, Zea Mays
ctttaattatgtttctctgatttggtattctcaggaatctaaacaggtggccaacattggtgcccaccttaggtgaactgacaataaaaggaacaactcttcgtcatgcctctgaagagaagcacaactaccgacgttgtacttgtctcaatggatcaaaaccaatcagaaggaacacatcctctgccaagcaatgattagacgaaaggcaagtgaaagtccatagatccttcgccacatgatgaccttgaccaagaaatctagaatctcaaagtttaccgtcaacaggttaagaagcagaaagagaagatacttctagtttcccaaatgcaatgacaaattgatgaagcatcataagaattgtgccacatgatgcaacaagatgagcaactagaagagccatactaccataacctaagaaatccccaccccaaagcttacaaccatgacacttttttgtatgataacacttctcctttagcaatagatttacaggccacaccatggccactattatacatgccacctcaactcctagtgtatgatggcttatcatacccaaaacaattccttgtgagctacgag

SEQ ID NO: 80362 - DNA, 547 bp, Zea Mays
ctttcagcgcagaacaccgtccaccaaagagaagctaggaaccgatgaaggggcgagcagcaaatgagccttgagacgagcagcgaaatcatcctgatcatagccagactccacctctagcaaccagtgacccagtgtggtgttgctgaagaaattgcagcacaagacgcatcatgagaaggttcgcggaagagtgcgtcggccacccgattgtccgttccacgcttgtacacaatacggtaattgaggcccaacaacatggaaaacaccagttgctgccaagcagtatgaaggcgttgttccgacaattgtaccaaactgcgttggtcggtatggatgatgaattccttgagctgaagatatgcacgccactaagacaaagccataaggattgtaaagatcctctcgcaccaagattgaagtagtagaaatggaggcaccagatgcactattaccctaggcggctcgattattggagccaaatctaaaaattatagccatcgtcttcaaacctttccaaagtagagttcagatggttaatatcttg

SEQ ID NO: 80363 - DNA, 482 bp, Zea Mays
tttacgaacgactacctaatttgcgctggccacggtgacagcggacatcgcagacagtcaaccacgttcccggtgatctaagggatcctagctcaattgagttggtcggggagtatcaggggcacaccagaacgctaaaacgggagggcagaggatatgagtggatctgaggcgcgctggccacggcgaggtcaaaccgagcggagttcttgagtgatttgggggaagtaaggaattggagctctctggtgaacgattggaggcaagacttagtggattggtgcgtgattaccctacggagctcgcattgcgcacaatttatagagccactgagcggtggccgatgaattgaacgacgacgcacgatggccgaagaaaaaaagggcactggcacaagcgcttagtggctttcaccgtggcggtccctccggcgatcaccggatgcgcctaacatgattaaccgcgacgtggtaaggtgcctg

SEQ ID NO: 80364 - DNA, 674 bp, Zea Mays
gtcatattgatgtgtggtgttttacttgagtggacataaacacaatctaggtatcccttgaatagaggggattattggaaaccaggtatcacaaaaggtcattagctagcccaggtatcacaaaaggtcattagctagcccagtggaaaaaggtgccttacaaccttaacatatgtttggatagttctctctctcaatttggctaaattttccatagtctttattttattttgagaaatgatgtggcaaattgatgtgtggtgttttacttgagtggacataaacaccatctaggtatgccttaaatagagggtagtataggaaacctggtatcacaaaaggtcattagctagcccaataacgtcttcatccactagttaaactctaataccctctagtgtgaatacaacgcccacaatatcatagaaacgtcatttgaggtttaaaaggtgatctattgttttgaattctttatattccaactttttatcaactatatggtggaaaaaagttgccttacaaccttaacctatgtttggacagttctctcgtgcaatttggctaaatttcccatggtctttattttattttgagaaacgatgtggcaaattgatgtgtggtgcatccactagttgtactctaataccctctagtgtgaatacaatgcccacaat

SEQ ID NO: 80365 - DNA, 410 bp, Zea Mays
cgcgcaggtacctgggccagcagttctacctccgggtgtacacgccgtcgcacttgttccgcgacgagctgcccatcccggacaacgcaccaccagtagccgccgccaacccctgccgttacaataaaagctgcgtctccaatcaagtgcccagggttgcaatcaagcgtcggctgcaaggtatgtcatcctatccagcgccctaatcttgttgttttttcctgttaaaaacagatcaattgatagatttgttgtctagtatgggtgagaaggccatttgggatgcagccaatgtgaagcttttttgtgacctatgcacaaaagaggttaatgctgggcataggccattagggcatctcaataaagtgggttggaagaatgttgaagttaaatttgcagaagtgacaggg

SEQ ID NO: 80366 - DNA, 625 bp, Zea Mays
caaacttgtagagccataataggagtgcaactttgcttcagtaactaagctttgatcacataaaaagtttggagaaaaatgagctcaaagttgtgctgtcagtcacactcataactgaattaaggtcaccagtgacattggcaagacttttgggtcaaattggagtaggatctagtgctcgattgaggatagttactatagtcaatttgtagctggttggttgagcttcaactttgttagagacggattagtaagtattcacatgaaaatttgagatctaggctctgcaaagtggtctgtcaggatgactaaatgagaaactgatggtacagtatcgaaatatctgaggttcagttcatctcgccgctggcgaccacacgctcggattcgcaccagacgctacgattcgtgctcaacggagtactgatagttgcttggggtagtaaatatcgccgtgtggatgaacttgagccactgtttcactccagccgccgtgtccgcctgacttatggccaattcgaatgaactcaccagagttagccacctatcgaccatgcgccacgtgccttggtgtcttaccacgtcgcagtagctcgtattacacacgtccagtgatcgccggtga

SEQ ID NO: 80367 - DNA, 815 bp, Zea Mays
gccgatcactccttggcaggacatggcaagggctggggatgtactagccacgtcggacctcccacctcatttctttccagccaagcttcgacgctagttctctcactagcttgtatgttggcctacccttcccctccggatgtctcgactccgaggaggaagatggtccgggcattggcctagacttctccggctacgcaaccctgagtccatgctgtagttcctgttcgcgtgcgacaagctacatccgacatctcggatgactacaacactaacgagggaggttacgacccaactcaggagtgcttccacatgggtcacgaggagcacaacggaggaaactagctcggcatgcctcaggaaaaggacgtgccaccccacacgccggtgaagcaagagacccgggtgaggccgagacccctccaaggaatcacatggcccaacttgaacagctccacgagttgcacgccagcgcggagaagagcaacaatgactacaacaacttcggcaggtcctcgcgaaggaagcggacggcaaggtccttgagaaaggccaaggcacgtgacgtacatcgtcgcattatggaggatgccgaagccgaagcacccttggcctttcaccgggccagtcaaaacctcatcgcaacagcgatattgctccgtaccatgctagagccatctaccaccgagggacgccgaatccacagcgaaatctggggactcttggagtgtgttgtggtccaacaggctgagagctcagcctctcgacttcaagagcctgcctcggagccccaagcgggaccctctcgcttcgag

SEQ ID NO: 80368 - DNA, 296 bp, Zea Mays
ggtccaaagaactgtctttcaccagtttgatcccaatacagtggagtcctgcactttctgccatacaaagcctcaaacggggacatcttcaaactggcatggtagctattattgtaggagaactccgcatagggcaaactcttatcccaactgccaccatgcttaagagcacaagcccttaacatatcctctagtacttggttggttctttcggtctgcccatcagtttggggatggtaagccaaactaaaattcaatcttgtatccaaggactcgtgcaacttcttccaatatcg

SEQ ID NO: 80369 - DNA, 497 bp, Zea Mays
aatctaatctagatcccatctaatctattatgatctaatctagagtaagttacttaatgctggtacaaaagataagaccatactcctaattcacttaggcctaaattggggactcagattaactcggctatacctaacaacttgacctgcataatagggtacataacttatccaaccagtctggggcaaacaacccagccaatagagtcttgatggattgcataatctatctatccccacctgatataaaacaagattttggcctacatcatgtagtctattccacccatacctatcttaaccatattcctccaccccgatgatatacactcacctcgaatcaatgagaccaagaccggagaagaaaagatcaacatcgataaggaaggatataacagtcaaagcgaatctcgagataaatcaaaacttaaacatttcgaacgaagtctttttcttgccataatctattcttgccctaacctattcatctcttatcc

SEQ ID NO: 80370 - DNA, 315 bp, Zea Mays
tccatgaataagcatcattgattttgaacaaccctgcatatgtacagccacatctgtttggcatttacatgtccacattggtagataggatcatagcaatcagaataacattgatcagatccaaagtaatgtaatgtgtgattaagacacaaagcagtaatgataatttcgtaagcagtggagccaataaagttctagaccaactataggttgtttataaacatagaggactcttaacggaccaggctcttgaggaccttacaaagtacctgagacggcagagggaaggaggtgacgaggttggcgcagtagtcg

SEQ ID NO: 80371 - DNA, 832 bp, Zea Mays
cccaagagtgccccagcacctgcctccaaggcaccctcctccaacagccagctaagcaagacccagtatcttggcagggcacgagtaaaccacgtcgatgctcaagaggctcagcaagcccgagagtagtgctcagtgagttcctagttgaatttactcccgctgttgtaccttttgattcaggagcatctcattcattcatagtcactggttttgtggaaaagcatggcatttccactgcacatctagaaattcccttgatcacccgaaccccagggtcagaccttctatgccacctcaaatgctcccaagtcaggattcttttaagtggggtagtgttcttggcagacttagccgtcttgccatcccacgaaattgacgtgatcttaggaatggattggttaaccaagcacaatggtgtcataagttgcgcagataagaaagtcagtttcatgtcaagctcagccacccgcccaagattcaatggtgtttaatctagcagcagaaagcatatctgtagtagaagaattcatggatgtgtttccagaagaattgccaggaatgccgccagaaagagaagtagagttctacattgatctaattctcggcaccgcaccaatcgcaaaaagaccataccgcatggctcccaccgaatttgcagaactaaaactccagatcacagaacttcaatagaaagggtacattcgtcccagctcatctccttggggagcaccagtcctgttcgtcaccaaaaaggatggaagtatgaggatgtgcattgactatcgatccttaaatgaagttacaataaaagacaagtacccactacctc

SEQ ID NO: 80372 - DNA, 638 bp, Zea Mays
catgtagaatttgttgaaccccatcttgctcattttgtaaagtgtcagaccgaagagacgggttgttggagaacgaaccaaacagctccagcaaaatcgcagtgaaattaaagatgtgcatccgtctccatcaggtatatatagtagtgcttaccaatgtgacttgagtaccttcctgctctttcgcctgtgtccagtgcccttcttatcagtctccaaacataggtttttacgatttccacgccctttgtaggatttttggttcacctgtgatgagatgccgcgatccttgtgtaagttgtacctcgaactgagagcttagatgtgtgtaaacaaaaaaaaaatgctttgtcatacaatctccctttttgccgatgtccatctcagaatgtcatgctcctgagtctgcaatagcttgaacctgtacagttgcctgaagaccttgctggccaaacacgttagcgatgaaatctagattcccggtatgagagtttaggcagcaagagatcggctatagtactaggcagaggagaggcagatgactgacaggatgaaggtgaggtggtccataaagagatgggcagatgactgacagcaagagatcggctacagttgtccataaagagtttctgggaaat

SEQ ID NO: 80373 - DNA, 285 bp, Zea Mays
taaaagcataagtgttaccatcctttgacagtcctctacgttgtaggtcttgattttccgcacatgatgattcttcaattcctacaacatcaatatcttctccgagatgatatgagttttgaatacaataaattgaagtaaccttgggtcaatcttgaatatgtagatcatttgaagattgatagcttgagttgataagaattgaattaactccctcaagcaccccaaggtttcataccatctccttctcctacaaagcttgtcaagcacattttggtacccatc

SEQ ID NO: 80374 - DNA, 435 bp, Zea Mays
tctagagcccaaaaatgacaaagtagtagttttcaaaagcttctttagagcaggattgcagtttccgcttcacgagatgattggagaagttttggataattatgaaatctatcttcatcagctaacccctaacgctatcattaggctcaacgtcttcatctgggctcttcgaagccaaggaatggacccgaatgctgaagctttctgccgagtgcacaaattgcattaccaaacaaaggccagagaagacgggttacatgaaaatttcggttgttataactttgcgtatcgcaaggatacgaaggctccggtgctcagctatcataccaagtggccaaccggctggaaaagtgagtggttctatatcaaggccgatgagaagaagagggagaagctaaagacgatggtgttgagcccactgagtttaagcttcgg

SEQ ID NO: 80375 - DNA, 600 bp, Zea Mays
gcgaaagggtatcaggttattaccgtcgcccgatctaggatcgagggtccagattagatcatggttttaattgaatctgtacacaattggcaccgcacgatgcccgatcagcggtcaaggacacgccacgccacccaccaaactcagatcgcacgatcgccatccaacgcccacaactgaacccagggaatcggtatttcccccaccgatcctgaccgtccgcctgacgatcaacggcaaccagccctcgtcttccccctaactagctttcccctaaataagcgacggcggcgaggaccaccgccggagatgaaattctccgacccgagcgcatgagaacccaattcgactggtctacacattgcgggtatgaaggcggatttgggtgaagggttcttaccaagatctgtctgcgcaagtaagccgaccacggagaggggcggaactgcaccaatcacacgctctgacgtgaaattcctgccgattcggggtcgaccagcacatctcgagagcacggacggatccaccgggcaccggcgcactcacacggccacacgcagagaagggaacgtcggcgtgggtagatttcaccggcggcgg

SEQ ID NO: 80376 - DNA, 449 bp, Zea Mays
ttgagacccagaagcgcgaaattgaagatcttcggaaacagctggcagaagaaaaattaaaatgtgcggttgccgaagctgaccgagacgcatgtgaatactggaaaaatcactgggagaaaatagttgtggagcttcgttcttcaaaagagagatgctatgaaaaatctatggcatgtgtagaaaagataaaaaccagcttcgccaatattggcgcatactcaaatgaggacaacttcctagtaggcgatcccgaaggtccaatcaaatggaccaagggcgaagccgaagcctttcaggaagttttgagtggccttggagatgtttgcgccttctcaggtgccaggggaattgcggctatcttagagaaggcagaatgcgagcatgtgaagattctggcccaagccgaagctgcattttctattgaagatacaaaagacccttcggtt

SEQ ID NO: 80377 - DNA, 446 bp, Zea Mays
tgcagtttggtactatatattaaaacgcgccgcgcgagcagcaagcttgtactatgtgcatgtgctcaagaagtactctacttagcagggaaacttagcttgaaagaggaaactacgactgcatttgggcggagcggatctcgaggatcttgccctttccggatcgctggcgattgacacttgtgatgagtgccattagattatgcatgggggaaaagtattggatcgaagtcctgttggtcgcttattacttttaagaggtgctgagtcatatcctcctttgctcattggttggggacatcgtcatatgctacctcacatgggctcccaccagttaccaagaactttgttttgctcaagttcccatacatggtacgtgcaaaaggcatggacagaggagtatcatcattctacctgggcatggggaaaagaagccttgcagatcc

SEQ ID NO: 80378 - DNA, 763 bp, Zea Mays
ggaacatggatgtgtccgacttggcttcgacgaagccctgcgaacacaagaaggtggcgaagcgactgtaccaagcccggtgggccttcttgagtccgtagagggacttgttgagcttgcagaccatgtcggggtgagcagggtcgacaaacccaacgagctaagtgcagtagaccctctccatcagggtgtcgttgaggaaggcattcttcacgtcgagctgatggaccggccagtcccaggatagagagagtcaagacagtccagacggtggcaggcttgaccaccggactgaaggtctcgttgtagtcgaccccgggacgctgggtaaagccctagagcacatagcaggccttgtaccgctccagggacccatcggcgtgcagcttcagtttgaagatccatttcccggtgaccacgttggcgccatggggacgaggcaccaggtcctaggtgtggttagcctggagagcctcgtactcctctcccatggcacgccaccactacgggtcggcaagcgcaccacagacagtcgtgggcaccgacggtagggtcggagaagaggtcgcatataggatcaagtgatcaggggctcgaaggacacccgccgcgcgccgggtgaccatcgggtggatgtggcaaggatcccggtggacgatgacggggtgataggccgggggtcgacgcgagggtgaaccagtgcaccgccacgaccacagcgctggtacatctggaaggggttggtgtagcgagacgacgaggc

SEQ ID NO: 80379 - DNA, 603 bp, Zea Mays
ctcttcgtcttcggtcgcgaacgggagtggctgttcatgacctccacttcgtcttcgtcgcaggcgaccgagaccggcgcggagtcccccttccgccggcagatccgccaccgcttcgctggaacaaacctgccttccacaaacgcgtcgagagggagagaagtggagcgcgaagtttcctggctgtggcgcgggcagcgtcttccgcgagaagcaggcgagggggagagaatagtgaccccctgcatctagcgtgagagagaaggggatcgcgatggagaggaggcggtagcacgcggcgctgcggggtgaagggggctactgtttcccctaaacgatgaacagtggtaggggaggggaggggaagggttgagcgctgcggacagtctaatggggatactggttagaggctatgccattggatcaggatcgggggtatggaattccatcgcaacattttaaatctcgagcgttgaattctaatctgaggggcgagagcgcgtatcggttcggcatgatgtgatctaatctcggccgatggatcgacatccaatggtcggcattcaactgtaccccttcggaatggtaaaacttcataaagag

SEQ ID NO: 80380 - DNA, 550 bp, Zea Mays
cggggtcacaacactgttccttgagtcgctgacagtttacagaaatctccttgaacttctaattcttcaccgcgccaagtcctcgatgtcgcacggcggagacttgagcaccgacgagtctagactggtcggatcacacaaagaccggcgctctccgtcgactggcacctaattcgagccttaaccgaagcttcccctaaactaatttcactaatggcgcactaaaacgccctgaccacggtgaccgtatggacaatggccaactgagcgcgttcctggtgatcctagggactctagcccaattgggttggtcggggagtatcaggggcacacaagaatgttgaaacaagatagcagggagcatgaacagacctagaggtcgctgaccacagtgaggttaatccgagcggtgttcttgagtgagttggggggattgagaaattggagctctctggtgaacgattggaggtaagacttggtggcttggtgcgtgattaccctatggagcttgcagtgcgctcaatttatagaacccatgagcggtggccgg

SEQ ID NO: 80381 - DNA, 312 bp, Zea Mays
caaaaactcctctgagttgtcttccagaataactctattctccacacaaatgcgagggagatccacagggatttccttgactaccaccagttagacgggaacttgctgtggcggagggatgtagttggtgttggtccgggtggtttggattgtacgaaccatctacaagagaaaatgtcaacttagttgaattttaaagaggtaaggttaataaaataattttgtaagaacaaaattatgatgttttgaacagactaggttttcaatttctaactagtctaaggatctagagtcagcatagctttgatacca

SEQ ID NO: 80382 - DNA, 414 bp, Zea Mays
ctagtcaattcatacctaggatcacatctatgtcctagccctttagcactatcatattggtggggtaggtatgcccacccaattctactggcacatgaaatgccatttcctttgtgcctaacttacccccatgagcttttacaataactcccatgtttgtttcttgaattggaatatcataatccacagcaaaagttctactaatgaatgtatgagatgcaccagtatcaaaaagtactttggcagggtgatgggcaacaaggaacgtacccataagcacaggatttccttctggagtcacatcaacttgcgtatagaacacttgccctgatttcctattgtccttcccttttgcactgctgctagaagtattcttgttctgattttgagaactgtttcctgctggtctatgga

SEQ ID NO: 80383 - DNA, 445 bp, Zea Mays
cacgaagtaagtgcccataatgaactgatataggagcagagacaaactgactcaagatctgaaccgcatgagcaatatctggcctggtgacagtaaggtaaactaagatgcctacaagatgtctatatcgagatggatcctccaaaggtgtcccatcagtcggacgaagagataagtgaagatccataggcatgacaacagtgcgagtatcactaagaccagaacgatcaagatggtcttgtatgtacttggcctgagaaagataaataccattttgagtttgcaaaacctcaatgcccaaaaaataactgagtgcccccaagtcagacatttgaaattccttactcagatacgcctttacatgagcaatatggtctggatcatcgcctgtaatcaacatgtcatcaacatatagtaatagcaacatgcgtcctcgtgaagaaac

SEQ ID NO: 80384 - DNA, 306 bp, Zea Mays
gcagatgtcattcatcagacatcaccaccgatatcggcgtcaaaaattgtcattgccgaaaccaccggaactgaaaccattggagccgaaaccgccggagccgaagccaccggagccgaagctaccggagcaaccactgaagccgaagccaccggagccgataccgggaccaccgaagatcctaacctggaaaccacgcttgatgatattgacaatatacttctgagaatggctgaagaagaagctgttgtggttgcggtgaatacggcaactgaaaaaggaaaagagcagattgaagacattttg

SEQ ID NO: 80385 - DNA, 934 bp, Zea Mays
agaaattggagtaaaatgccctagaagtcaggctgtcagtcgggtctgatactaaaaacagactgatagtggtttctatccaattttgaaagccaaattgtgcttgatctagtgagtgaatgaccaagatctctgtgacaaatttgaagctggtatataagggaacaactttggtgtagttgacttggtggtttgctgaatgaaaatcaaagaaaaagtgccctcgagttgctctgtcaggcgcactaaagaagatcgccatggtacaatatctgaaaagatcccaggtgcagtgcacccaccgccggtgaacccgcgccacgatccacgccagtgttgtgattcatgcttagtggcgcgcagataactgctagacgtaaaagatcttggcatagagatgagcttgggtcctgttacagctcagttcgtcgtacccacttgcacgacgacgtggccgggagaccatcaccatggtggccgccgtccttcgcggttgcgccacgacgtgaccatttcaccatgtagctataaccgtggcaagcaaggagttaccgcccttgagtcgttgtaccgacgggcgccatgacgaactcgtctagttgaatatctcaccaccaccgtgatcgccttcgtctcaaattggcgaagcacgtagccggctcctttaaattgagcactaccctcgctctgcatctctgttacgcgctcataccaccctcagttagtctctctcgtgcaccgtagcccctagtcaccagatttcccccaaatcgggtcactcacgccgccgtgagacatcctgccatgatcaaccgttcctaggtctgttcatacctctctatgccttgttttagcattcttgaatgttaacgaagctcgtcgtctcaaccgattgaacactaccgcgacagggcatcgagaacatcacctcgcc

SEQ ID NO: 80386 - DNA, 1896 bp, Zea Mays
cattctataagctgctcaagaaagtggacagattctagtggactccaaaggctcaagaagcactagggtcactcaagaaattcttgaccaccccaccggtcctcaagccactacaccgacccacgactagttgggtagctgaagacctgctattgtacatctactgcacgactcacataatgagcactgcattggtagtcgaccgggcagaagaagggcatgcatacccaattcagcaccctatctacttcatcattgaagtcctcggaccctccaagataagataccctcaagtccagaagctactgtatgtggtactcctcactgcgtgaaagttgcgtcaatactttgacgatcacaaaatcatagtagtcacaggtttcccaataggagacatactccacaacaaagaagcagtgggaaggacagccaagttggcatgcaaactcgaagctcacgacatagagtttcgaccccacactgcaatcaagacccaggctctggtggatttcatatcaaaatggactgaacaccaggttcccgagaaccccgagtcgaccgaggcttggaagatgtacttcgacgggtcactgaaattgcaaggagcagggtctgggatcctttcattgcccctggaggggaccaactcaagtacacacttcaaattttattcctagcctccaacaacgtagcagagtatgaagccttgatacatgggctcaacattgttgtgtcgctcggcatcaagagactgatggtatatggagactccctagtcgtcatcagccaggtcaacaaagactaggactgctccaccgattcaatgggcaagtattgcgctgtggtcaggaaaattgaagacaaattcgaaggcttagaattccaccacatagaaagggataacaacacaacagcaaaagcactgtaaaaaatgggatcgagccaggcgcaagttccacccgacatttttgtcctggaaatacaacagctgagcaccaccccagggccaacataggaatgcaaggtactggatcaggcagagccagactcaaaagactagagggaaccaattatcaaatacataaaaatgagcaggagccagacgataaggccgctgtcgagcacattgcaaggcagtcggcccattatgccatcatagggggactactatataggagaggggccaccggagtcctcatgaaatgcattcactcagctatggggaagcatctgctggaagagatccacacaggataatatgaagtacgtgcaacatcaagaactctagtggggaaggctttcggagcaggctttcatcggctaacagcaaagaaagatgcagctgatttagtacaaagatgcaaagcatgccaattcctagctaagcagcagcacctaccaactcagcaactgcaaactattctggtcacctggccctttgcatgctaggggttggacatgattgtaccttttaaaaaggctcaaggagggtacacccacgtgctagtcgacatcgacaaatttacgaagtggatagagtacaagccaattgcaaccttgaccttagccaaggcagtggagtgcatctaggaaattatattcaggtttgggatacccaacaatatcatcacagacctaggatcgaacttcactagtgcagaattcttagacttttgcgagcagagatgcattcaaatcaagtatgcgtcggtagcacaccccaaagctaatgggcaagtggagagagccaacgggatgatactcgaagcacttagaaagaaagtatttgacaagaatgaaaagctcgcggggaagtggatcaaggaactgccttatgtattctggagtctgcgaatccaacccaaccaggctttgcatggaaacactccattcttt

SEQ ID NO: 80387 - DNA, 550 bp, Zea Mays
ctgcagctccaccggacgccgaagacgcggctgcagcttctctccagcacggctgacgccggacccctaccggacgctggacccctgcttctctcccctgcttctctcctctcatgtttgcttctctcccactgcttgcttctctcctacacggttgtatgtctggttgtatgtctactggtccttccctattttttatctataaatgtatatattattatataagttggcaaaacgcctagaaaaacgcctagcattgcctaggctggactagtccctaggctaagggtcatcgcctagattccgcctagcgcctagcaaaactttgactaaaaggtcaactgcttagcacactttcaaattaagtacacctagttgttcacaggataccatccttcgttcactgtacgatccacattattggagcagtttcagtccttttcagcacgtttcgagacgattcattcacggagagatgttgttggctccaatcgattagcctgagagatgttgttggcctcctagggcacatcacatgaatgcaccggcg

SEQ ID NO: 80388 - DNA, 355 bp, Zea Mays
ggggtattctataagaattctgggtcactgcgtaaatactttatacgtcatctgtactgcgggttgtttatcagtaagcctagggactctttagagattttgccaagcgaaggggtacgggctaatctgagccgtccgatcacagaccgaccgcctagattagatcatgaattcgattaaaacggtatggaatcgtggtccttggatccggaatctacggtttagattaggtttccccttgcacgaaacggtacgcttcaacagccataggatcgagatcctaaggcccagagtctacgaaacccgatctaatcatagccgctggatcgagatccaacgaactacaccctttctt

SEQ ID NO: 80389 - DNA, 894 bp, Zea Mays
gaactgtttccgtagctacggctggcatggtagggatagcttcgacgctctcaatagacttcacctcctctatcgtgggcaccacagctgtcttttctaaagattgcagcttcagcctacgggtcaggaccttggctctcttcggcttcggcgcaccagaagaggttgaagtagcaatttttcttttccctccttgctttcgagcaggaaaacaatagtcaggataaacaaacccaatcacatcaaaaactctatttagtctattttttcctcgagcaccgaaggcaacggtcatggcctcgtcctctgccttcgtgtaggcccccagcatctcattactagttgtctcaacaacatctagccaatcgtcatttggttcgtcaaactggtttctataccggaaggtgtatctaagataaaccaaaccaccttgactggagccagcagcagtttccttcggcatctctcactcattcacaagaggccataccttgtaagcaatgtgttcctgtaccaaatccctggtatccatgtaagtacacacagtgttgaaagccattagatacgcttgcacctcatttccaattgcaattgacggccttctaatgccgaagcgtgaccatattggacgctgaataatgcccctcacatcctccctctcgctcagatcattctttacatagaaccattgcttcatccaagaacccgaccatttcttccaaaatattggcacaggataacttgcctcagagcggggcacaaagctgtagcaccggaagttgttatagattgctccttcccagttgcctttgtctagtaagataattcatgtatattacagaagtacctagcatctggctctagcccttggctcctcatagcccaaatgaaaac

SEQ ID NO: 80390 - DNA, 335 bp, Zea Mays
cagcagagagatcataagttcacagtagaaaagggttggcaatctggtgttccctaggtctagggtagatgactatacaaaatgattcattatccactaatcaggtctaagtcagtggtgaggttaaatcattacatggttttaagtccataaacttaggtgctccaacttttattaaagtctactatcttctatttatctcaaatagggttccaataacattaattttaccctaatgatcaacaattaattgggacataaaaacagcagggaaacattgtttaaatagatagataagaatattatgaacattttgcaatttgaagcacctaatt

SEQ ID NO: 80391 - DNA, 708 bp, Zea Mays
tagagcacgtggttggatagatccttggttcaggatgttgtatagaaatggtggttggatccttgtgaaggatgacaatgggcacaaattatccacttgcgtccacgcacaaaccttatagagcaagagtatgtatgtgtgtttgtgctcgtgggtgagtgtgtaggtttaaatctttgctcaacgggttaactttcacgggcataaaaaagtctcacccatgctcttatactcacaaacccactccgataggtggggccttactgagcatatatataatatcttatccatccttctcaagtgatacttgtgtcccacaatatgaattgtttgtgcctcatgtacaataactttttagatgaaacaagaaacacatgagaggttttgtctaggcatactacacaatcaacctttccttttaactagcctggtaatgaaaacagagcagagtaaccattgatggtaacaaaaataattgcttttagtgtaaatggttattttgtgaaacccatcccacaaggccgcatcatattcccattgtattttcatgtcctccattaaaggctctaaaaatacattgaactccatattatgtaggtctagaaataagaattattagcaaaaggtattttcgcttttggggcacccatgtaggaaggctatagatggttaggatcatcgaccatgtgctctgcttgctgctatact

SEQ ID NO: 80392 - DNA, 637 bp, Zea Mays
agccagcgtctagcagcttccggacctcttttcggatgaagtcctggcgttcaacagactgcctgcgaggcttctgactcaccggcctgacgtcggggttgatctttagatggtgctcgatcacctccctgggaatcctaggcatctacgacggctcccatgcgaacacgtcggtatttgcctggaggaaggcgacgagcgcgagttcctatttctcgtccagatcacccgcaatgcgagtggtctgggtggagtccgtagcaagccagatggctttgacagggacaccatccactctgaatggttgtacttttggcgccttggggagcgccttggtaccagaggttgaggggttccccccttcgtcgtctgggtgagcagtctctgccgccagggcgtgcagcttttctacggccgcaagtgcggcagtacagtcaccccgcacggtgaggacgccagttgcggatggcatcttgaggaccaaatacctgtaatgggcaatggccatgaaccggtacagggctggcctgccaatgatggcgttaaaggggaggttgacctccgcgacgtcgaacacgacgttctccgtgtggaagttttccttagtcccgaatgtaactggttgcgcaatgctccc

SEQ ID NO: 80393 - DNA, 494 bp, Zea Mays
attacctttagattcattttattttgtcccattgtccataaaaactccaaaaaattacgattagtttatcttgacaaaaaacattgccttagcgtttgcacattttagttttggagtccacagttttgagttcatatcctaggttgagttggttgctggtttagaattgttttggttcagtttgatccattccaaccactaccatctcacaaactcaatctcaataaaccgatcccatccataaaaccgaccttgtccataaaccgaacccattcacccttcatttgcctcgccaacaaccctaaaaaggttgctagtttagatttgttttgagttagtttggtcattatcatccactgccatcccataaactcaatctcggtaaaccgatcccatccacaaaatcgaccctatccataaactgaacccattcacccatcatttttcatatcatcatctcgtctttatcagattagtttctatctagtttgata

SEQ ID NO: 80394 - DNA, 484 bp, Zea Mays
gcataaatagatttatgagaactgacaaaggcaacctttgcacaaaaataattgttagcaaaagtctatgagttgtgaaatgtcatgtctgacatgggacgccggagaggagagttttatgcctaccaaaaacaattcttttcatctttgcatgcacatcttttgagatgatcacgaaatttagaaaaagaggttaaagcagtaaaagcactattaatgctgagccctttgtggcaaaacatcccaaaatggacactcatctttttccaattcattcccaaaggtggtcatttttcaaccaactgctcagttggaacgaaaagcagagatgagttgtactagtcctacataactggcacagatcagcatcaaacaggaccttactgctgccgagtcttgccaagggggagaataggttagtcctattcatattttactcaaaaacataaaagagcttaaaagaggtttgatcttcataaaaaaa

SEQ ID NO: 80395 - DNA, 620 bp, Zea Mays
ctggccacccaagtttgccctactgattgctgaggagattcggattcggttgaccttcgaccacaaagggtcgggagctcggatatcgccgctaaaaagtttcacctcgcccgaccgtggtggagagaccggaactcggatgtccctcactcggtgttttgcctcgctcaacctctgacttcggagggggatcgacgctctggcattctaatatggagttcctcttctcccgagccccgaccatggaagcggatcggggcctagatgttcccaccttgggattccgcctcgcacaacccccaagaccgagaggttgggtactatgcctgaccactcgtacatggaatttttgggttgtactgcttcggccattacagacatgggaacatgacgtcagattctaacacaacgtaaggttcggatgacaacatggagcaagtatgtcagaatatgcatgtcatcccccatggcatggaggtggacaccggctcaaccactctgtagctggaagtcaaaaaaagacgttggacaaaccgctatagaacgtgacagagcgtaatgacaagctccaaggtggcctatgcgtgattacaatatcctggtggagggaggggcatcat

SEQ ID NO: 80396 - DNA, 741 bp, Zea Mays
ggagcttcaggctcttcgggttcaatgttgagtgcagcggcgacgatgcaccggcaccggcacctgctcccgccgaagtggagtatgtcgacggcgacacctagtagcagcggcggcgtagagtgcgcagagagacgatgaacgatggtgatctactgatcagggaccttattacaccataggtggcgtgcatgccttgttgaatcttaattagtcatgttatttctttgttgattcccatttgcactgatgatttattttaggtcgtaactgcatgaagctagtaactaatggtcccttgttgattatggccaatgcaagagggtaattatttactatggtttagttgagcatctagctgtccctgagattgatgaacaaacgatcataaggttttgaatcacgactgaatcatatgggagtatatatcctaacgagacccacttatatctagtcaaggccttgattttttgctttattttatgcacattatatgtgtagatgtcatttaagcaattgggtacatcggatgaatggttgagcagaggcaaacccacccaccaggtggtctatatgggccacgacacaccccaaaaacatagaacggcagttaccttagtgttgtaagtattgtgtgttgaacttattagtctcaactttgattcttgctagattttgcttttttgtttcttttttatatatttttttgcacaccctaaacataacagataggttcgccac

SEQ ID NO: 80397 - DNA, 333 bp, Zea Mays
ctgggcactaagggcccagcttcggcttcggtttgcccagcttcggtttcggctcgcccagctttggcttcatcttggattttgatagctttagcaattttcttaggagcagggcttaaggcctttgtagtctttgtaacagtgtctagcacgctagccatcctcctcttttgggagttgcaacaggagctctatgcatcttcggaaaatctgtctctactggtgggctcaggatttctggcatttctatcactctttccacctgtggctcttcggcattatcatccttagcttcggctggcccaaatgtaggcaccttcggcactacagttg

SEQ ID NO: 80398 - DNA, 476 bp, Zea Mays
gtgagcacgccttccggcgaacctgtactggccaagacactcaatgaccggcgccctagcttggctgatgcctaattccacccttggagacactaatctctcaactaattgcactaatccgggccgaaatctctctgtccacgacaatgacgaaaaccggagataaaccaacatgttctaggcaattcaaggcggtctagttcaatcgaacgggtctgtagcaataggggacatgaaggaggctagaacagtacacagaagggcatgaactaacccgtagacgtctggccacggcgagatgtctcacagcgacgttctgaccgatttaggggaaatgggaaattgggaggttctggtggacgatcggaggcgagagctggtgctttggatgtgtaataacctagcggtgctcactagggcaacaatttatagcctccatcgacggtggcatttaatttgaagaaagtgtgctggcg

SEQ ID NO: 80399 - DNA, 800 bp, Zea Mays
cacaattcgaatgtatcaaattggagttaaggcgtaacagttatgattttctgaataatttaggtgttaaacataaaacaaaaatgagtcaacggccctgattagagttcttactcaacgaaccggtatgcaatgttagtcgtcggatctgtgatctacgacactggtttaattattgcgcgatcggttcttgactgcacatccgatgatttacggtcgagatgaaccctatgtgaaatagtgcatcgatctaatctgagtcggtccacaccggatcaacgacccagatcaccccatcccgaacgggtacctcacatctaatcgtgatcgcccaaactgaatcggacggcgcaaacaagccttcacccctccaccgacccgacgatgaaacccaacggctagggacaccggcatccagcgcccacggcggagaccatggccaggacataccatcccacgaaccctagccctaagcatggatccgaggtatggtacacgtagagaagacattggtgaactggacgagggatttcttaccgcaaattgctgcgatgactgacccggtcatgacacgatgcgagttgcatggcggcggcgccctccggtgaggaattccgccacaccggctgccccacctgcccgaacgagcagcagacatccatcagtgatcccgcacgaatccccggggtcccaagtgcgtttcgaacgaccacatcgatggggatccatggcggtggtcgactggtccgggccgttgttctaaccggcgctgcgagggggtgagcgagtctgggttagag

SEQ ID NO: 80400 - DNA, 449 bp, Zea Mays
aaaacaaactcctgtaatagtaaaaaaaaaactatatagctggattaacatgaaaatcccaccacaacctactatgaacactcaaccttgataatggaagcagtagcttgaaatgcagctgaaatcatcattactgctggccaaaagaatttgacttcaaagagaatcggaccattactggctccactgtgttcatcaagaaaataggatgactaagagaaactcaaaatctagaatggcatatgcaaattctcttatattgtatgtcgatcctaagatgcaatcagcggtatctagaatgaaccaggagctttgataatgagcatcatctttacatgagcatgccagattttaaaaaaacatggtgtacaatataatagataacaactcattattatttagagattgttacggaagtgcatcagaagagtaagcaaaataagaacaac

SEQ ID NO: 80401 - DNA, 475 bp, Zea Mays
gtctgagcagctaatttactaatcaccggtgtcgtgttacgccaaagggtgacagaagtgtgtggtttcttggaaacccaagcaacacttgaaggctggtgattgttcattgtacgaccagaataccatgaggcaccccttcgcctctttaaataggccaccgtgcgctgccaactccttcactcgcccttgcttctcctttctcacttcctccaaaaccccgatgacgggaaagaaagatggcaagggcaggaggaaggccaagggcaagaagaggaagcgtcctccgactccaccgttggaggactccggcgactcggagccctctgacgataggactcctccacctcctcggctccccgacatctgtttgcatggacgactccatggggctgtcagcgaggagagggcctacctccacgacatggagcacactggcctcaatgactcaaagaagtccgaggaggggatcagg

SEQ ID NO: 80402 - DNA, 509 bp, Zea Mays
agtctaatctagttatatccaatctaatctagaacaccatctaatccaatatgataaaatcaaaagtgagttattaataggttaaagttaatctagtgatatgggttagacactgcttcaacaaacataacctaacctaaattaatgtcacataccaacttgtccataaacaacaatataacctacatcagaggctgcctagtccatttgttccaaaagaaaaatacaactctgttcaaacctacctacctcgtgtaccccggctatcctaactatatgtccttaactcggatggcaactccaagaagaaagaccaaagaagaccaaccacgtcaaagaaggataagcactcaagccttcaaagaccaagctaaatcatcagatgaatcaagatccacaaatcttggatggaatctttccttaccctactctttcttacccaaacctatctatgctttaaagacatcttctatcctacataataaagtagacatacatatatacaccca

SEQ ID NO: 80403 - DNA, 442 bp, Zea Mays
cccaccctcaactggatgcccctgtcaccgtgcaccatgccctcacccctctcctccacatcctattatgtgcgtctccccgctacaaagaaaccatgctgctgcaacggatccggaaaggaaacccacggaaggaaactgatggaatccatagttgccgcgccggacccgggaaggaatcgccgcgatcgtcgcccacgccttccatccttgaatccatgtgtcacccctagaaggaatcgcgactagatgggatccatcctcgccatcagctccttccatatttgttagtagggatgcttgttcatattatctcaatgttgttttgagcccgacgtctcttcctccctcaaatctagttcactccaaaaccctaggcaacgcccacggcccctggatcccgtgtcccagcgcctcctcccatgcctaaatcccgtcatcg

SEQ ID NO: 80404 - DNA, 488 bp, Zea Mays
gttaggtctgtcgtcttcgctagccacttgggaagatatgtccgctctgcagcaagctttcccacatgctcctgcttgggggcaagcaggtcttcatcgcgggggggggggatgtcagtaccttggcgccagaaaataagcttgaagaggcgggccgtgcaggtggagaggatggaatgaatggaccaggaaggagcactcgtgtacgcagaccgaatgtgcgtgttacgggtccagagtgggtgacagcttagcaaggcccaggaaggagcgacggtattcgtgcgctggcagctgtgcagagagtattaagtctctaagcagagagttgatggggtatcgaataatttgtaacagaattctacctactaaaccccagctgcttctgtcctccatcttgttctccacgtcttcccttcctatgtctgtgttattgtgatcgattgttaacagtatttatataatccacctaataatatatgttgttt

SEQ ID NO: 80405 - DNA, 328 bp, Zea Mays
tgggacgacagtggccctggccacgcagagcggcgggaccatggcgaagcccgtcaccggcgacgaattctctgctcccctgctgctaaatccgtatggtgaggtcgtggacaccacccacgtttcgaggcgaagctccctagcctgaatccgaacctcgaacgacggtgcagatgaggatcgacgtcgaacggtggcccatggctccaacgcttggcagcttgacgttctgcgcgacttgctaataggggaaaaagcgcggtccgagtttatatggcctcccagggtaacgaggaacgagtccagcggcggaaagaacggccacggc

SEQ ID NO: 80406 - DNA, 867 bp, Zea Mays
gagcatagtgatgttcatcctcggtgatgatgaactcgacgatgatgctagactaagcactatagggtttgactggtgccatagctcaccgtcgaaccattgtcagccatagcaaattcaatgggtacaaaatcaaggcaaagggtggtccaagagtgctcagacaacaacaagggtgtttgcagtgaccaagcgaactctggtgagcgattcactactacttaggacgtgatctagcgaaaggtgtgtgtgatgggtttggtacctacttgtgtaccatctggtatcgagtagaggaacatggaatggtctaaaacttctaaaactcctatcatctaatgtcttgattggaaaaacttttgaaactcctatcatcaagtatcttgagtggcaaaacatacccacaccccacatcacatcatgttgggttagtacaaccacagatcgatggtgaaggcacgctcccacgtgtggcacatcctcatcctctctcaacttctcatatagatgtatagttgttgacagacgttatttcatgaattcatacatcaactatccatgggatgagaaagactctatgaataaattcataactttgctaccaagtgacttccacaagttgtatttggagtatttggatgtagtttaggaaatcaagcaaaaggagtgaaaatggagaagttttgaggtgaaagtggccaagccatggaagtccatggtcgatcaagcaagtccatggtcacccagtcatctccattgctagccgaccatcctatggtcgctcgaccacccaacaaagccagaaatactcctcctttgtcctgctaatttgccacgatgcactcaacacaacttagaggtgtagcc

SEQ ID NO: 80407 - DNA, 789 bp, Zea Mays
ggcgaaccgagcgaccaacgacaaggagcgaatagcgtaggaaggggcggtcatggggcaagagctcaaggttgcatgacgtagaggtacagtcgatggacggcaaatgcgtgataagtgctaggattgggaacgtgatgagcgctagtgtcgtcatgtcagaggtcaagcttaagctcttgagctattgagcatagtcatgtgctcgggtattgacgtagagaataggagagggggtggcatagccacgtaggaaataggggaggaagttgacggctgggctgtgagcactgggagtctcaagtctgagactgagactgacttaggaactagtgttttctctttatgtgtaatatggaccaggctaggccaaaaaatcaattattggtcaatttcggatatccgacatataacacgcaagtgggaaataatatataaatccatattcgtcccacttcagattggacatggatctgacccatgggtcaaaaatgtatctatgcccaactctgtcttgttggatattcgtcggatatccaaatccatgggtcaagttgccatccctaattctcacccaacctcttttccccctcattgatgatgtagttaaatgaaattattagtggctctttaatggtctataagcttttctcaaaaccttaatttaattttttggcatttagttcaatcagcacctccagggcccgggctatagacaatgctccatttatctacccctctcgaccacaaaccgaaaccaactcaccatggatgccctaagccactggc

SEQ ID NO: 80408 - DNA, 356 bp, Zea Mays
ctgggagtggttaacttttctgtgaatttttgttacgttgtgtaaatgtgtgtgtcgtaaatatctaatacatatggtgtaaatagtacgaacctcatatacacactgggttaggtaacgatataatgcataaaatcaataaacgtttgcgtaaaacgtgaatagaaatatcataaacagacaacagatggaaagcagactcattaactgaaatatatgtcgtaaaaacctataaaatagcataaaacatgttcgtcgtttgcgtctaggggagatgtcgccgccttggatgacgtcacagtcatgcgccctagggggccaccgctgctgtgaaggaaccatcgcctcacctctgg

SEQ ID NO: 80409 - DNA, 539 bp, Zea Mays
cgggagcatataaaccggccccgcgacccccttccttccccgtattccgctccccacgtcatccactgcaccgtcgccgcgccgtgtgtgaacaaatccgccgccagaaatcgttgtcgatgcgccgcgaccgtaacatcgaattcgtccaccctaggcatggggtctcgtcgtggagcaccgctggaggtcgcggaagtcaatccgggagctgagggtgcctgcaatcgtctcgcgtgcgaccaatcactcgtcagagcccatctccgccgcggatcccgctcgtctcgtggaccggccacgccacgggacaagctctggtgagaaaccaattcgctactccctatgttcccttgaatgcgtgggaccgtgaatcgtagctcgtgatttcttttggacggcgtatcgggtggccggagttatggcgccgccgccctgttccgtccatctcggctggaggtgggtgatggcgtgccagccgttagatccatggtggatgcgtgcgattagatccgggtgggtgatgatcttcataccgt

SEQ ID NO: 80410 - DNA, 1124 bp, Zea Mays
gctacacatagtagtccaactttctcttttctatttagaatcttttttgctccttttggcttgacttcgtaaagtccctagcacttagaaaaatatgattagtacccaaaataattgactaagtgtccggagcttacccttttcacttggtaccatatagatttgtattatgccctatttcaagctcaatttgcttttatgtacctatgatcattgctcatgtaagatgatgtcagtataaatataatgtgttgagcatttaatcaccaaaacgaagtagaaatggcccaataatatatttccctttcgttggcggtgtaggtttttggaaagtatagggtcagtttacaaaaaccagggacccgtattaactgatccgtacggaacctagacgacgggttgaataaataaaatcataggggctcttatgcaaaatgccatggctgatctaatgtgtgcacaaccagagcccaaggatctgagatctacggtttgggatcaaactacgaaggggtatgctcccgttctaatcgtggtcgactagaacccgatcgacggcgagtctcattgacggcacacacatcttctcccccaacccaccaggattcacggtggcgcgcgcgtgctcccgatggtgtctcgccggcgttcaaccatctcatgtctcagagcactaatccacacgcaaaccggtggtacctgaagtggacgcataggcaaaaaggcttggtggggtgcttaccgtcgattatgccatagaggtgcttgctctcgtcgtggcgcgggtccacggagggtggttggcaccggagaaaaattccgagcccgccgaacagtaagtgcgcccatagcttcatgcgtacatcttccatgggatctgggttactccctggaccaagtatgaaggccgctttagcgacgcatccatgtatcattgccaacggcgatctctctcctccctctcggctttctacacccggtcgaaggtgacgacgcacgatagccagatgggtgcggcaactggttcttatacccgggggaggtgacgcccaaatcctaacggcctaactaaatcgcaacggattgatgggatttgctcaggattctatttcgcgcttgttatg

SEQ ID NO: 80411 - DNA, 336 bp, Zea Mays
gtttgctgaaacttttttggaatttaaatcgataaggaaggcgtacaagttcatactttttccctcttccttcttcttcggcattccccatccactagaggttgggaaagttctgtttgctaagtattcctgcaccaagtccctagtgctaatgtgctcagccaccaccctgaattccacttcgaccaattggcaggggggaccctagctgcatattgcacaaaggtcgagtcattccgaagctcagcttaaagggactcattaccatggtcatgagcttctcccttttcttctcatcaactttcacgtaaaaccattcattagtccacccagtcg

SEQ ID NO: 80412 - DNA, 641 bp, Zea Mays
gaccgatggagccatgcatgcctgtgcttggctgctggccaacagtgtgagcctcgagcaccgttatctttggctgggggtcaatagaggctacctcagttatggtggagtttagtgggaaggtggaagcagtagcttgctctactatggtcgaggctcccgtcgccatctgtttgatggcggctatgtgcctgttgaggtgccgtctaaggtcgatggtgaacctcttgacgcgtcgcttctctgctgtgcgctaaatttcgatgaattcgccacatctccgctcatcgatgtatgagtgggatatcatattaatcaaggggctaggcttggaactctgacccctacctaactcaccaaatgttggaggcggatttcctccgtccgggtggcagagtgcaccatcccttgatcctccgatgaggaaagggcttagaggtttgcctaaccaagtagattaactaaagaacacaagggtttagagtggttcgggccaccgaagtgtaataccctacatgcactatgagttgtattgcttgattgcttgagtgtgatgggtctggatgtgagtcgactacccctctggaggtagtgccctcccttttatagttcaagggagtatgttacaagggagctaggcc

SEQ ID NO: 80413 - DNA, 383 bp, Zea Mays
agggatacacgcttaggaagatctagcgttgtcagctctatccgacgtttcacgttccatattgtaaatattcctaggcccatctagcggggccttagctcccttgtaacgtgtctcccttgactataaaacggatgacacttgcaccgtagtaaggaggtcgattcacaatcagacctacgactctcaagttctcaagatacaactcgcaatggatgtagatattatgccccggtggcctgaaccagtctaaaaacttgtgttcctgtgtttattcattaggccaggcaaatccctaagccccctcctcatctgacgaccgtgaaccggcagatgatgacgctttgccgagagcccttttttgccgagtacttggctcttgg

SEQ ID NO: 80414 - DNA, 543 bp, Zea Mays
tcttaggctaaactaaggaaaatggaaactagggtttttaaaacaagagccaaatgagatagccaaagagatggttgtcaacaacagtccacccatctatttatagagagttattttactagtataaactacccctagatacctagagctcatccacttaacttgtggtgaaatggaccaactcctaggattttgatctgacagccacgcactccacacgaagttgcttcgcctcgatgcacccttcattatgacgccatgggctacctccaattcccactagaaccgcaccgccgagttttgaatcccaaacacggacgaaacctaccattcgtagcactgggtggttttggggctcaaccaccaaaccgccataagtagcgcaccgcatgcacatcccccacgtcctagacctgtatcccttcggtccacgaccacgccggcaacacgatctgctctaccacgtccttgcatcggtgcgtgtaccaagtgtcaacaccacgtctagtcattctgcttctctggtccctcggtcaagtccca

SEQ ID NO: 80415 - DNA, 548 bp, Zea Mays
aagtggtaccttttgcacttcaggatagatcgccactagacggtcgtctgggcgacggaagtaatgcttgataccatgtcagccttgctggaccagctccacactgtaagtaacgtcgcatcattcgatgatattcaatctattaaaatttcttttgataatcagattaaaagtatgacatgggatatagataaaatggcacatgcattataaaaatctcacacacctatttttttgtcacatgaattgggcaccgaaacaactgcaccaaatacattgcaacaagtgggttttctcagtcccaactaaattatggtatgccaatgaactcatatctggggcaaccactgtcgtcatcttcattacactgtgaatcgactcttagcatggccagatggactacgcacgatcttggaccgtctgtccccttatgccggacagttcggagtcacacagagcccacaacaaggcacacagacgatgcccaacacgaccaaacagtccgagtatagtactgtaccatctggtctcttcgcagaccgtccgac

SEQ ID NO: 80416 - DNA, 472 bp, Zea Mays
gcaaatcattaaggagaacctccatcagaagacagagaagtataagtgtttccgccaagatgggaagggtatattctggtttgtaagcagattggtggttcctaaaaataaggatctcaagaagaaaatcttggatgaggcccatctctccaaattctccatgcatccaggaagcaccaagatgtaccatgatctgaagcccttgtattggtggaccagaatgaagagggaaatagctcgatatgtatcagaatgtgacacctgccagaggataaaggcaagccacttaaaatcagctggtgccttgcagcccctatcaataccttcatggaaatgggatgacatcagcatggattttattgtgggtctacccaacacctctcgacatcatgattcaatttgggtcatcgtggaccgattgacaaaactggcacatttgcttctagtgcacacaaccgataaggctcagaag

SEQ ID NO: 80417 - DNA, 399 bp, Zea Mays
gttggtaggtactattatggattccagagatgctacattctttgaggacgaatttcccatgaaagctacacataaatacgtctagtgatgaaccaacgataccccatgggtattttattccggtagaacacactgaggaatcccatatacataatcctgtggaagatgacaatgtatcaactcaaaagagtaagagaccaaggattgcaaagtcctttggtgatgattacattgtatatcttgtggatgacaccccaagtaccattgaagaggcatattcctctcctgatgctgacttttggaaggaagcaataaggagtgagatggattctattatgtctaatgcaacttgggaggtcgttgagcgtccttatgggtgtaagcccagtgggagtaaat

SEQ ID NO: 80418 - DNA, 874 bp, Zea Mays
ccaccatggatgaccatgcaacagtggagcacaacaagcgtgcatccgagtaaagaaacaatcaaacgatgctgcgagagaaactcaagtcctagaagtaccacctagcaatcttgtatggactcatatgtaccacctccaagcatttaagagttatgtcatggttttgaaatcccaggattatagattagtgttcgctgtggatgcaagcgcagactcattccgaatggttaatcacgtagaatcgagcagggaaccggacactaggtttatactggttcaagttttcgccctagtccaatgtagtgctcactgtagtattactttgaggcgtgtgttacaactggtgtgcttgtgtgcgtacgaggagagagggattctcttttatacttcaagggacggtccttacaagtgtgtgtgagagagagttcttcagctacaatgcgcagtggacccctctagggtcaatcttgggtcatgcctgcgcacggtatggctccttctaacaggtcgtgtgcttccgtattcctcgcatccatctgtcgtgcaagaccctgtaccttgctctatgcccatgccgcaataccagatgggtcccacagaacgtgctctcggtaaggttgaggttcgtgttcagtacggcttcatcttccttgaactcccttgcgtcagcatgtgcgagcatgcactatgtgtgtcgtcatgtcctttctggtatgtgggtggaggcttcgatgccgtgacccccttggtgcagtacacacgacgtggacatggtttggtggtggtgtgtcctgttacggtcgtcgtggacccataacgttgatccaagttccctccttaccaatctgtttggttgtttgcccttcctcgc

SEQ ID NO: 80419 - DNA, 495 bp, Zea Mays
gtcgtccctcacaacccctacagtgaggttgaccaagcgagatgagggatgggagttgcggagtccggcgagagatggaaggagggtgggaacggcagcaaaaagagcggaccttgagactatggtgagaggttgacggagatgcggcatcgagcggcggcggcaatcgtgagagatgcggtggtgactaggaaacacaaagtgaaaccctagccaacacgaggggtcacggggcgacttttactcgacccgggcgtgtggccgcttttcgcgagccgttgccgactcgcttccactagaagcacgatgcggagaaacccctcccgatgctacacatttgggagccaacatcgacttctggcagccagaatccgtccaaaagttgtcccaaacaggggcccaaaagtttgtgggtagagatttcatgtgtaataaatgggttctaggaagaaagcagcctaccatgtcccgtcatgcctccaattcccattccac

SEQ ID NO: 80420 - DNA, 382 bp, Zea Mays
tacgtaatgttgcaatggttcgtttgatatgatctttacgtgcgcataggagttgacatgtcttgctagaggccgctgtcaatttttgggccaagtaagagtactcgggctatgtctatttgtacgtgaacctatagggtcacacacttaaggggatggaagcctaacttggattagatacgaaattagactgggctttagggttactgatgggcctcggtgtcaggagcccaccataacgcctatataatgaggggcaggggagcggttaggcttaccctaattcgccaccagcaaacaagtagctgctcgtcgctcgccctcgccaagccgccgtcgcaaacctagcagttcggtacgcggcgcttcctccttgtacgtg

SEQ ID NO: 80421 - DNA, 431 bp, Zea Mays
tctttataacagcaatgcagaaggcccatagcataagaataattctccgcaatggacctctggtggacaaagccagtttggtccccgccaacaaggtcaggaatatgaggctgaagtgtacgggaaaggactttggaaatgattttgatgggacaattttggaggcagattgggcggaagtcagctgaacgcctagtcatgtcctttttggggaggagaataatataggatctgttgattctttctaggttggcctatcgattgcaaaaagaagtgaagagatcgctaagagcaggagaggtgatgttccaggtggctaagtagaagctaggaccaaatccaaccgagccaagactggaggtcttcttcatttgtcttataaccaattcagcctcggtcatggtgatgtgatgatcaagattacccaagcc

SEQ ID NO: 80422 - DNA, 380 bp, Zea Mays
ttaccaccttctggcgtttcgctgacgactcagaaaaccctgacccagaacctttccatgccggcttcacattttgatgtactcgtcccttttcttccacagctatagcctatagccacacttattgagcaattgaaggtaagatcatagcaagtggccatcttcttttgcaattttgagttgaggcctctcataaatcaatctcttttcttgatatcagtgttcacatgctcaattgcatactgagaaaggtggttaaatttcccaatatactgcatcacagtatctaccccttgcctaagtcacagaaattcctcaagcttcatttgcaaaaccccgtcaggaacatgatgagtacggaaagcttctttaaattcaac

SEQ ID NO: 80423 - DNA, 537 bp, Zea Mays
ttggcgtcaaagggaccgaagctttcgaggccttggtcatctccccttcattgttgacgacgaaatacagacccccgaaacggatggctgttctgggggtctagaccgtgctgctgtcgttgctggccatccaaagattggagaacttcgtcgaggaacgcgcaagtcccctacctagcacgccaattgtcggtgttcgaactcgctccgacaaataaatttattgtgcgcgttttgggcttcggacggtgtgcatggtgggctcaagatttatactggttcgggtagaacgtccctacttccaaaaatcgatggcttacgctactgacactattgatgatcaaagcttgtagtaggggttacaaatgggcaagagagagagaaaaggctctcaagtctcttattcgtggtggaggtggttataaggtggagtcctagctaagttttggcttggcagcggggcttcagcctccttgtcctcctcctcgtctggggttcatccttctgggtgtttccgtctgtccgtttcgggatccc

SEQ ID NO: 80424 - DNA, 768 bp, Zea Mays
agcatgtggtgacctacctaagtcagaggctagtggatgctgaaacaaggtacacttttatcgagaagttatgcttatggctattttatgcatgcaccaagtgtagatggtatttactgtctagtcattgcaccgttgccagtcaaaccgatgtgattatacatgttgcaaaacccgattatgagtggaagtattggtaaatgggcttatgcacttatagagtatgacttggcctatgaaccattgaaatatatgaaaggcaggttgtagcggattttattgtagaacatcggatcactaatactcataaactagacatatcatacctcattgttactccctggactttatattttgatggatcagattgcaatgaagggcaaggaattggcatcgtgcttgtttcaccaagtaatgtctccttcgacttctctagccgactgaaaacttattgcactaacaatcaagccgaatatgaggcccttttgtttggcttggaacttttaaattgtatgggagtaaaacatgtgaaggcatttggtgattctcagctggttgtccaataggtattagaagaatatcaatgttttgatggtactataaatagttatcttgagaagtgttggggcataattcattcttttgacgaattcaacattcggcacatctctagagttgagaatcacaaggctaacaatttggcacaagatgcatcaggttatcggataaagcgagggaaatttcacaacaccgaaaatctgataaccg

SEQ ID NO: 80425 - DNA, 1063 bp, Zea Mays
gaaaaaaccttaaagaggccactgcactattactctgtgtcactgacaattgcagatagaccctcccctttctattccttcgcaaggtgaggtccccgaccgtggacggcggagcagtggctccggcgagcctgtaccagccgaatgacgcaacgactggtgctccggtgtggctgacacctaattctacccctaacgaccatttcccctcaatcaattgcaaagttctagctcctaatctctctgttcatggtgacaacgcgaactacggatgaaccgaggcgttcccggtgatcctacgtgttctagttcaattggccgggtcgagaagcatcaagagcacacaagaggactgaaacaagagcgaggagggcgtgatcggacctgtggagagctggccacggtgagctcacacacggcaaagttcttgactgatttggaggaaatcccaaattggggagttgtgagggacgattggaggtgagggctagttcactgggtgcacaattacttagcggagcaggatggggcatcaatttatagtttccaagggcggtggctccaaattttggcatggcatgctggcggccggagaggaagaaggtcactggtggctaagtcatggcgttcaccggtgcaagggttcttagatggtaagcccaggcgtgccacggttactattgcgtagtaaagagccatggcgtggcataattgaggtcgccggagtttccacgacgacaccggcggtccggccacgtcgcacggctacaggcgcggttgataagcttcaccccgcgaccaaatccgctccccctccgatcttttcacccgcccggtattatcctgcccgagtcctgcacgaatcgccacgatcagcgcgaatccttgcgcagaggtcaccggcagcgagggggggctgaacctaagatctttctgtgtactgtaccatcagaaaccttatcaggacgcctggcagagcaatttgcagtgcctagatctccaattttcataggataacctgctaatccacctttaacaaagttgttgtcctataatcaaattt

SEQ ID NO: 80426 - DNA, 693 bp, Zea Mays
gttcgcgttcgcgaacagagttcacgcaaactccggtcaacagaagtcgcagccattgaaccatctccgcgaaaatcggagggcagttgcaaccaccccaccgcattggcctcctaccctcgcccctatataaccgttgcgcccgtgacccctttgtctcccggctctgtcaccgtcgtttaccgggctgggcggaccatcagggagcaatcgagagaagagagagaacagaggggtgattcatcgtcaggttgtggtgtggagtcgcgacgccgtcgctcctcatgacattccacggttcttctggtggcttccacgaatactgtgtgtttggcggtcggatttcggcaattcctcacaggtgaactcgactcgccttggggccaagccgtatcgaggccgcggaaccactgagcgcaagtgtcggccagtccctcccctccaacgctggtatgaactctcctagtagatttggtgaattccctggtgctttgaggtttcggattggaaaaaaaaagaaaccaggcgccgccgtcttgtgagctggaggtggaagaagggacctgagtcgtccatctggtcaggggcggttcagatcagtttggggaatacctcttcactcggattaattgtgaccatcgcatattagcggtgcggccaggattagattcacatgtggcagcgttaggtctc

SEQ ID NO: 80427 - DNA, 431 bp, Zea Mays
ggttgtaaagagccgatcgccttccccgggctcacatccaaattgtgccttagtggcatgtagagccgatggctctcaagaccctgttccatccgcaccaagcagaactgacccactaccactaaagcttcactgcatgaccgtaacatcctacacgcaactgggcttagcaatcatgacgggcgcctaaactccagttagattcagaggcctaacaaccagcacgagccgactcccagaacaatccctaccccaaaacaatgccagccacccaacacatcaccgaaatgtccaattaccatgcaaggcctagccaggcggatattagcacatatctttgataaaccaaggactagctgtgatggaacagatccgctacgtggggactcaatgggacgccaccctcatgctcgtggattccacacgatggc

SEQ ID NO: 80428 - DNA, 754 bp, Zea Mays
agctggaccacacaacaacgatatgtttagagcttggacgtgtgagaataattgatgttacaaggagctgagcattacaatgaacagaagagaaaccaacataactgcacgcatttgttttggcatgcttgtgttgtggaccataaaacttagtagtgctggctgaacacaatggtgtatcgaggatattttcatgaggtatgctataagaaacttttataaataatttagtataatccataatgatttaatgtacaattcagaatataaagataacaatagcatacgaaactatagatttaacatttaagtccataagtgtgtaaattagaatgcaaatataatatgaaatagtctaaatatcaagcataaaatatactactgctgtcagattttttctaggactcggtgcattggcagttcagtggtcgatctagattagggtatgtcacggcagctcatccattagctatgctactagctgaatagctagaccgttcccatcccctcgtgtagccaagagtcctaacacctcccaatcccacgaacatgatacacactactcatcttgtccataaagcatgaaatatatgttgtggctaatggacacaccactcgggccctttaatatacagcggcttcaatatcatgatgattaatttattggtccgtgcagttgtgtggcattcactgattcctatgtgtgcaatagatgtggttgctaacattttactgcctccaaactttatttctt

SEQ ID NO: 80429 - DNA, 733 bp, Zea Mays
gactcgttctggtttaaaatgggagaaccatggtcccaaactttggactgcagcagaactgaagcagttcggtatggtttgatagatgagaaacaaatatccctcctcaccactctctctagatgtttctgctatattgtggataaaaggagctgagacttggagagctagaaaggggggatcacgttggatatttttactgcccaaagggtggacgatgtagagttgaaacctatctagaagggggtgactcagctgcttgtgaattgctatcaaaaccatgttaaaccaccacatcatgtccctctgttcatggatctagggtggaatgaggcagtgcaaccatgtgcccataaccatgtctcttttggtattccagagccctccttaaccagcttctagtgaacccagccgcacacaccttgccttgttagaagtatttagtttcaaatcatcagtgcttcactcccatttcttcgattcaggtcatcttgaactgaatgacttgtgtttccatgaccatcccatccaaactccccactaaccatcacaggggtgtccaagtcttccctcgacagttgccctgggtgtggtgaccacaacgacctctttcacccattcaccacggtctgccgcttcaagggtaaaactcctttgtgctagttgtgttctatagccatctagtatccgtgaagctctctggcttggttgtttgaagtttcccgtggtccag

SEQ ID NO: 80430 - DNA, 447 bp, Zea Mays
ccagaatgaagataaacatggttagtctcaaggacagcaaaaccaacaacaagagtcaggaacacaacaacaaccttcatagagcaatgtacgcccaccagatccaaggggaggaagaggaggttgaagcttcatcagaaagttcaacaacactcagccaaggaagttatattgtgtattctttggggagaacaaaggtcatactacgaagacttgccaaataactatacaaaagtagaaagagctcactattgtacaaacaaatcaactgaaggaggtcttccacacttcctcataatactccccctgcatcccacaacacatacaacaccaagagccaaagtgaaagggaaatgtgatagatagtcatttctatctattttggtgattaagtgtccaacacaccaacatggactaactagtttaatatgagtatgagcattggtc

SEQ ID NO: 80431 - DNA, 1297 bp, Zea Mays
caccgagcctcgcatcgcatccactggccagctgctgcttggcacccacgactgccaattgtcgcctcgcgccccactggtggtcgctaccaccgctagttgttgtctctgtcgtttgttgcttactgtcgcttgtcgctattgcttgctgctgcttgcttgctaccgctccacacgctaaggaatcaacttatgaacttatttatggttgtaatgtttcaacttatatatatgtatcgttgttcctaattttaattactggttttggccgttatcgatacgtttccgatcgattatcgtttatcgtcatctcgttacttccggtttcgttttcctgaccgacaatcccattatctctactatctattaagtcaatagtgtaaaccacggcactaccatgacttcaccctccccagaccccaccggcagatatgcggcccgtcgcggcctctattggccattccggtctcgaggcccaagcatggcggcattacatcagaggctcaagcccaacacaactagcttcagttcggtacacctggtagctcgatagtccgataataattagcaacaatgacatacatgtagaagcgacagttgagtttaagtgcagaaacaacccagtcccagcagtgtgtagctggcggcaagtctcctgagcagcgcaatggatttttattgcctctcacttaccaatacagttgtagtatctgttcatgtatgcacacactcacaccaaaacgcacaccaactctctcctaccgtacacaagcagaccatgactccaccctcccctaggcccacgcacgctcgccaacactcgtgtcacctcccgcaccctccgcacgacacgccctagccagcctctcgcttatcgcattcgcgtcgattggctctcgcaacgaactgcctccgcccgcaaaccatgaccttcgcgccagtcgtcagttttacgccatccgcaacctctatgccatgtcagtcatcgtgtcccacccgcccactccacaacatactcccgcccgcttctccactcgcaccaaaacgcacaccaactcacctctaccgtacacaagcaaaccatgactccacccccaggcccgtgcacgctcgctaacaaccgtgtcacctcccgcatcctctgcacgacacgccccagccagcctcccgcttctcgcgttcgcgccgattggctctcacaacgaactgcctccaccagcaaaccatgacctccacgccagtcgccagtcttcacgccatctgcaacctacatgccatgtcagtcgtcgcgtcccac

SEQ ID NO: 80432 - DNA, 360 bp, Zea Mays
gcataccaatttcaaatatgacaaaaataaatggatcaacttcaagtaagtgaagcaaggtatcttagtttacatgattaacacacttccaatttaagagaacacactaaatgggcatgtaaataaatcacccttatataagagaacacacttccaatttaagagaacacactgccaatcccttaaaccactcacttcatgccactgctccttagtaggtgttcatcaacctttttttcaaaagcatatttcagtcaatacattgtataatacaggatggtagaacaagactgagatacaatggcattaatatgtgcatagcaaactaatccttgaaagttaaaacaaccaagaattcaa

SEQ ID NO: 80433 - DNA, 398 bp, Zea Mays
ggaatattgctcttagtttaatttacatccttgaaaatcaatcaagtgaagagaactttctttcttctccttcaaacttggtttattattgtgccaacccataacttttagacaaagtctgtgtttttagtgactattttgcaggatcacctattcttccgctctatgtgctctcaaggtcacctagagggggtgaataggcgaaatctgaaatcaacaactttaagcacaacttcaaaccctgggttagtgttacagcgtgaataaagacaatcagagtgtgggagaggtgttctactttcttagagttgcactaatgactgaaattacttgggtggaactcaatttgatatggaataaatcacaagcaagagaacaagaggggggagaaagaagca

SEQ ID NO: 80434 - DNA, 586 bp, Zea Mays
gccgtctacccgtgcggtaaggagattacgaagcagtctcgaagaattgcaaataagtccctagagtttgatttaattataaaaatgaccaaaaactcaattaatccctagattgctcgttctaacttcgatttaacccattcaagttgcgttagcttcgtaacaaaattgtgtttagggtttaggggaggaagacaggtctgtggccgtcgatctctcaacggggtctacaattagatcctagatagcttttcattccatcgtatctgggtcattggatcggcgacaacggttcagattagagctaggataactcttcagcgattccaaatcactgccgttggttgcgcatctggcgatcgcggatgtagtggcgacgtggatggatatgaaccactgatctctgagcatgtggcctacgatgtgtaatggttcataaaatgtgggatttaatcctggccatctgctttagatcgtatgtctcatctctaccggtaccccttcggccgatggactttgtaaaagaaacctagggaattagttaaacaacccgcagttcccagctgtgggaagaatactacaaccg

SEQ ID NO: 80435 - DNA, 530 bp, Zea Mays
gactaagaacagtggtgccaaagcccatggtgacgcccgtgcgccccatggcggaggtttcccaacgtgaacccagccctacccgcccgacacccatacgcgaatccacccggtgctaaacgaagcagagaaaatgatgaatcgatttaggcactccttacctaggttggtgacggtggcggtgctgcacacacgatcctacggcacagcgacagagtagtgagtcaggtgagcaattctgatatcgcaacacgtcaccaagacccaggcgaaactcggacacgatccttggctcccgacaacgctccctggtccagccgcaaagctccacccgttgtaggggccagaatcgacgcgggcggcaaacctccagtcgtactggcacacggtcacttccctttggatttccccaagatggcagcgatctaggtgagttggggagtgcgagggagcggagttttttacaccgcctcgaggaggtaacaactggcgaggtttgcgtggttggatcttcggccgttccgagctcg

SEQ ID NO: 80436 - DNA, 337 bp, Zea Mays
tccatgaatcagtggctcatataacccactacataagccaagtcttgcatgatgttcacaaagtatctaagatttcccaccaagctcttgtattcagtgccattgactgaaggggctatgatgtcctctcttagcttggtcctagtcatcatttgtgttgtacaacgattacatcctaccaaaccagctttctctactatcctttcagcataggctccttggctcaaggtgatcacacctcttgccaattagatttcaatccccaagtaaaaactcaaaggcttgaggtcactcatcttgaattccctcttcatctgcctcttgaattcatccgctt

SEQ ID NO: 80437 - DNA, 601 bp, Zea Mays
gaaatactggtagtgatcatctctgcgacatcttcaattttgctgccagaagcttcgacagaaggaggcagccttttcacagattctaaaacaatttccaaaacactagccatcctcctcttcctcgcggagttcctgtagtagctgacagcttcggcagtgctgtcaccatcatcttaggctgctctggtactttttctgctacattttctggctccagctctctggccgggtctgcaatggcttcaataggcatagcagaagcagtctctctggctagggggttgtttctgccctttcaattagcttcggcacatcggtcgtctcaatgtgcctcggtctacgtgtcaaaaccttgattttctttgtcttcgacacaccaatagatgtcgaagcagtgactttcctttttctcccttgcttttggacgggatagcagtagtctgggtaaacgaacccaataacatcaaacaccctattcaatctctttttactacgagcaccgaaggcagccgtcatagcttcgtcttctgccctcgagtacgctccaagtagttcatcacttgttgcctctatagcgtccagccaatcatcatttggc

SEQ ID NO: 80438 - DNA, 346 bp, Zea Mays
gttatgtttttgttttttgcgagttacatctgcattactcagttatatggatgatcttcttattgatgccagaaacatctccaaagtctgacatgcgaagtatgttcataattcatcaccacaaatcgcccgcaatttgcaatcgaaatggagtaaacattatgagtgaaaaagttaacaaatgaagcacataaagagaaaaacctatcaactgaaggcgagtacttctgcttgggatcagaaggaaaatatggatggctgtcggtcactgaaaatcagaaacacggaccaatcttttcttcatcacatccaatgcggattcagacaacaaaaagaaatcagaaac

SEQ ID NO: 80439 - DNA, 438 bp, Zea Mays
gctgctctaggtggcggggctgaggtgcctcttccagtcagtggtctttctctgatgcagtggatgggcatgaagttggacacttttgatggcagtggtactccggtcaaggcggcagattggctaacttacgtggaggataagatgaatgtctttgagattgcgtatggagatcgtgttcgctttggcacacagctgctgaagggagaggctcagatttggtggaggggcgtgcaggcagctcactcttcttcaccaggagtcttgtcctgggatgttttcatcaggaagtttgagaggaggttctaccctgtcaccttcttggagaaaatgaagactgatctacagtcctataagcaagagaagaagtctgtcacagagtatgaagtgggcttcaacaagatggtccactttgtccctcatgtggcttataatgag

SEQ ID NO: 80440 - DNA, 344 bp, Zea Mays
gttcgaagaaggagacttagtacttacaagaaccatcagaacaaagtctcggggcaagcttgaacccaagtgggaggggccctacatcgtcaagaccaaaacatcgctgaatgcttacaggctcacctcaccatccggtgaagacttagagcattcgtggaacatagagaacctacataaattctttgtctagtcccaaggctagaacgcctttgtaactctcaaacaatttcaatcaggcccgcactcttttcctcccagggggtgaggtttttaacgaggcagagtcatgtaatatactaccacaaaagccccccaaagaaaagcaaagtcaaactggcacc

SEQ ID NO: 80441 - DNA, 578 bp, Zea Mays
aataattcaatagaaaactctatatcacggtcaggtggcatacctggtaattcctctgaaaatacatttgggtattcacacactaccttgatattttccaagggcttttcttccaagtgatttatcactgtcttcccttttgcatttgttgacatgtctgtgctaacttggattcttttgccttgcggacttgtcaacgtaattgttccgttggcacactgtatcactccatcacaacttttcaaccagtcgcatccaagaatcacatcaataccgttggatcctaggaccactaggttgactgaaaagtctattccttgaatcttgagattaacatggaggcatgagtgtgtggccttcatgtcacctcctggtgagcgaatgtgtaacatcttcttaagggggtactttggtatgttatgtttttccatgaatgactcagttataaatgaatgtgatgctccagagtcaaataaaactgatccaggtatggagttaacaaggaacataccatacaccacgtcggcatcctcaggcatagtctctgctgtcacatggttgactcttcctctactctg

SEQ ID NO: 80442 - DNA, 446 bp, Zea Mays
agtatgcctccagatatgtttatcatcttcctcatcgagaaccacattctccatcaaatcccaaagaataagatattgtcgaatgccattgatggacaacactggtttgatatttgcaacctagttccgattagaaagacagtgagccactgttccagagctagccaccttacgcgcaaccgcagtagccacctctggtgctaaaccagtaatggttttgccattgggccatctatctttctaaaaaagagtgttccgtccgttgccaaccaatgacaccacacagattgcaaaaaagtcacggacttgcttctaggccttaaactctaagtcgcaccatggcttaaaagggtcagttttgtggaaccaaagtcatcttagttgcaacgcccaacccatgaaccgaaggtttggtactccaagaccccctagacaccaaggttttg

SEQ ID NO: 80443 - DNA, 501 bp, Zea Mays
gcgctcccgagcgacagacaccaaattggatctaccctaagcctttcccccaactcaattgcattcaagatcaactatggagctctagccacggtggccgagaacatcgcggcttggcgatcgcgttcccggtgatccctggtggcccggttcaattgggtgggtcggtgagcatcacagacgcatgagaatgcttagacaagggagcagaggggaagagctgacctgagttgggctgaccacgacgagatagagttcacggtgttctagaaccggattggggagaatccaaaattcgtgcttgctagcaaaggatttgggaggcagatgggtgcaacagctgcttgagtacatggcggagctgggggcacggttaatttataggccgccggtcgtaaatggatgaggatcggggagcttgggattgcgctggcgaacatgccgtgcggcgaattccggtgacagcgcggttatcgccgtttaaccggagcctgccacctc

SEQ ID NO: 80444 - DNA, 801 bp, Zea Mays
gatgatgaaaatgcagacgtggcagtggcaatgatcgccgtgtacatatatatgcatgtgcagcagcacagcaccgttggtgctatttacaggtccgtgagataggataggataacgccaagggcatgcacgtaccatttaatggaggaagctagggtaagcatgcatgtttcgtttgaccacaccacagtgccattcgtgaccttttgcgcgcggccagagacagacagaatgaacaattaattgccacactgttttattttgcatctggtgaaatacacgctctgcatgctgccgatcttcaccatcatcccctgcaccgatttctactgaaaaacgtgtttctgttgacactgaaattcgaccaggaggtccatatagtattcgtcggctaaatctaaacccgccgtcttgccctgtagtatgtatgggtttgtagctcctggctagctggctgacggcacgagtcgcatactgggatccatgagacgacgagacagcgcgataccgtacgtcctactcggggaggtcaaccattaattatagtgcaaacgtacgtaaccgggccgttctggcttggactgctcggtgctcgatgcacatctttctgataagaagcccagcctgcatcctcctacggaaagcccacttgagccagcccatggaccagtccatgtagcctacctgctcctatctctatctgcaaaccactactacgagcccataaggggccagtccatatggcgctcaacctgaattatatgttacaatacttgcatacaatgcagattttccattgct

SEQ ID NO: 80445 - DNA, 460 bp, Zea Mays
agctgaccccaatgggtgtaatcctgttgcagctgagcccaatgggtgtgatcctgcaccatcctttgtccgcatttttgatgagggcgaagaagaagaagaagttccactaattcgcaagaatagccggcgttacagaggtagcagaggggataatgatattccttctccagctctgttgctcttgttagcctgcaagaattatccataacagattttgatcagacccttgaggatgtcattcctgaggatatgctgtcagagccgactgatggtgatatgatggatgtttgctctgacattccagatgtgggtttagaggtatcccgggcagcatctcgcgcgtcgtcgaccttggaaggcggtcttcggtgtcaagaggttggtctagattgcccgactcccatggaggtgactgaggatccttcagccgtagaggtggctgttgcagaaaacccag

SEQ ID NO: 80446 - DNA, 627 bp, Zea Mays
caattcttgccatagtgtaacacacacgctcgcaacatgtcctcaagaatctgatttactcttttcgtttggccatcagtttgcggatggtattctgagcttcttatcacattagttccaagtgacttctgcagctgatcctagaaacgtgctacaaacagtgctcctctatcagacatgatagtcctcgggattccatgcaaatgcactatttggtcaatatagatctgtacgtacttctctgtcttgtggctggtatgcactggcaagaaatgagctgtcttggttagcctatcaacaatgacccatatagaatcgtggtgctaggaggtgttgggcaatcccacaatgaagtccatgctgaggtcctcccatttccaagatggtatagggagtggctgcaaggtacctgctactttcaaatggcttgctttaatcctttggcacgtgtcgcactcagatacatacttagcaatttctctcttcatcctggtccaccaatatagggatctgaggtcatgatacattttgttgctcctggggtgcatggaaaacttggaaagatgagcttcgtccaaaattttcttcttgagttcggggttcttgggaacgaccagtcggtcttca

SEQ ID NO: 80447 - DNA, 566 bp, Zea Mays
atcggccaagttagtgagtaactggaggctaaagagatactagaacaaagaccaaataggctcaaaccaacctaaggagtttcgaccatggtgaagcacctcacggcggtgacggtgaccatttctagggaaatccgaggttctcgggctacagtagatgaaaaggagtagcggatggtggattgggtttgtaacaaagaggaggagctcacagtgtgctcaatttatagggatcaattgggaatatcacaaatttggacaagatcatgtctaccggagcgattggataactccttggagctcgtgctccgtggcgcgtgggtagcttagtgacttgggcaatatttttacttcctaccacgcttactacgatgtggtgaaacatatcgtcgcgtggcgcagcagcagtgaacggcgacctttggcgatgacagcttggtcggtcatggaacaagtgggtatggtggatccaacgcatggattcatccccctcgtgatcttttcacccctcatgtaatatccactccaagccctgcacgaatctccacaatgagctcgaatcattg

SEQ ID NO: 80448 - DNA, 391 bp, Zea Mays
caaggattttgaatagggttccccaatccacagtgtcagaggctttggtgaagtcaagtttgatgacaagggtgggagttttccttttgtggcagcattggacaagatctagcacgtagatgaagttttcatagatcgatctccctttgaggaatccagtctggtcaaggttgatgagggagccaatgattggtttaaggtggtttgtgaggattttagagatgatttttacactacaattttggaggcagatggggtggtaatctcctgtggttcaggcatcaagttttttgggagaagattgacataagatcggttgatgttgtataagttggcatgtccgacgtggaaggcttgaacaaggttcatgatagtgtactttacagaaggc

SEQ ID NO: 80449 - DNA, 515 bp, Zea Mays
gaagaaaaacacccctgaagatgctttgtcagaacgactgaagaagttcccgatggtacaatagcaaaaagatcttcagattcagtgtatctcgtcgtcggcgaacttacaccatgatttacgccggtcgtcacgattcgtgcgctctggtgtgtggataacaactagcggtaaaagatctcaacgttgggaagagttggagccttatcaccggattattcaccgtgctacttgccgtgcgatcgaccgaggtgtcctcgccggagatcgccgccctttgtagtcgtgccacgtgcttacacttgttatcatgtcgcaacacgtcgcagtggacagcctgtttaccgcgagggtctttaccccgttgagcgccacggtagctgcactccggtgactcaccttgctccggctgccagctttcttccccaaattcagagccacaactgttaatcactataaattgatgccccggcctgctccgttagcttatcacgaacctagagcactcactctcg

SEQ ID NO: 80450 - DNA, 1080 bp, Zea Mays
tgaattatgtgttcgaacatattctttaaaaggattaagttaaaatacctcttgataaaggtttttaataaaagttatttccctttaaataagtgataaaatattgaatttttgaatacactatattcccttcaaatatagattgttgtgtgcgcattgcatagttcaaacatttatttgaatgaataataaaatactttatatacatgccggtactctatatttcttgaatgtgaattgttaagctcacatttaaaatttaatttgaatattcaaaacaggaaataaaataggaagaatgaaaaacagaaaaaaaagaaaagaatggggatctgctaggccgaatccctgtcctggcccaaaaaccccacctaacctgccagccccacaacccactcacctcatggtgccgctggtgggtgaaccacagccgtcagccgctccatgctcacacacacgcggtatgtcacagacatggcgggcccgagacgtcagatccgacctcttcgtcatctccgagccggggcacatgccaacatatcaccgaagccgccaggcgaggttctagggccagcttcctttgcccgtgtatataggtggacaccagtacccctccccatccatcctgtccatcccctccttccaccttgacccatatcgtgcctcggcaccaagtgcggtgagatgcagtgttgacgatgccgccatgggcgtgtcatgcctacgcactccgccattgggcttcgggtgggcgaaggcactcgcgcccatagaactcttaccctgtgtcatcatcttggttccccgagtaggatcccctccagtcgtgtagtggattgaccgttgaagcaaggaactcgcccccaaccgtcctcaccatgggccgagctcttccactcaccgaccgccgaattggtaggccaagagtatcgtttaagcccctgctatgttttacgtgggttgttgatgagtttggttatcggaaagtagcatgactgtgggattctgggcacagtgccgccattgggccgctgatcgcgtgggcagggcactctggcgtcctgattctcgttgtggtgg

SEQ ID NO: 80451 - DNA, 811 bp, Zea Mays
cacccccggtcgaaccccgcgacatcgagcctggggccaagcatggtgcggcatgacaagggaggccgaccgtgtcagaagagaaccactcgagtggatcttgtgcctggcatggtgctgacccgccataaatgcctggccacattaaccacgcttggcaccgagccacagcatgggcgtcagtccgctcctcatgcttggcacccaagacatagctaggactccaccttgcagcttctaagctccactttcaccctagtaatagatctgtgagcctctcctccttctctcaacttcttgtaatcagtactatgagtttgatcatcaatggtgccggtagcgcaagccactaatgacttgaagtagggacattctagctgaaccagtataaatcttgggccctccgcgcatgccctctagagcccagaacatgcataataaatttacttgtaggagtgatgtatgaaacaacgataagatatgaaacagcctgtctactgcatcatgctcaggtggtgtcgtggcttggttaacctcctcgcatgttattggtgtatcttttgtggcgtgcccttatggtgccctgtctcagacgatgaaaacctgcaaggaacatatttctttctagtcgatacccaaggtgcccttggtcgaaagagcggatcctccagcgtcgtttgaggtggccccactgtttaggcaccattctttcctcggtgtttttgcataagtagagggagagtgctcggggttggttccgcttaccgtgttcttgcacttgtgtcacacccagattttagggacccgggcg

SEQ ID NO: 80452 - DNA, 330 bp, Zea Mays
ggaaaatgtgggaggtttgtgactcataaactctctatgcttgtctctgggaggtggctggtgctggtgctggtgattgttgttgagttgagcctgcatattggccattgcagtggccatctgctgcaataactgcgtctgggcagttaggaatgcttccattccggcgggtgggggatttggtggattcatctgcgattctgaattaattactgctcttcttcgacgtatgcgagcaggcagatcaactcctcctcctgtcctggtattgaccatctgggttagagacatagggtaagagagatttatagatacgatagacagcttggt

SEQ ID NO: 80453 - DNA, 407 bp, Zea Mays
atgcaatggcattagtggtgtaagaagactggaatttcgaaaaaatgaatcaatatatgtgttatttttcaccctgtttcaattggtacggtcataatcatgctagtaataccatgaggcctcatctgggaacacggaaacaaccgatttacacgggacaagtagcccataggcaaaacatatctaggaggcttgtgtatgggtttcctgacccgtgttccaccagttttgacgtggtagggttccactcattcgaaggtcagttttgtgttccttgtttctctcttgtcctcaccttcgcgctgcatttgctaccgacgcacatctctgactcgtcgctgctaggtttcatctctcttgtcctcgcctctatgccaccttcatcgtcctcacccacctctctcgcc

SEQ ID NO: 80454 - DNA, 674 bp, Zea Mays
ctgtctataaatgttggtcattctcacttttcgaagagtcaaccatttttaactttgaccacatttttaactatgagctctgccttgagagctttcttgcacttccgcagttattgccaaataaggtcatctccaacagatcctctatcccatcctcaatctcattccatattttaagcttcactttgcaaacagtgtcaaacaatgtcatctacaattttgtgtccctattttacacgatacactgaagacaacctaagagggagcacatgtgccattgtaaagtaaaagagaagcatgtagttcaaaggtgtcggggataagatcactgggctcctggggccatacgtcagcgggaggacgaggaaaaggcctgcctcggaaggatccacctctggatagtccccagacatcgagcccgggatcgagcgaggcggagccagaagggggttgagcgagttgaaatgttaatttgaactgtttattgtcccttcatccacttgaaccagcatacactgcactagttgaactgttaatttgactttatttcgaagtttttggcgaaaatttcaggtgtagcttattcaaccccctctaggctactttcaccttccttgctcttcatgtgcaccttgagccaagaccacctttgtccttgctagatggtacatatt

SEQ ID NO: 80455 - DNA, 302 bp, Zea Mays
cttgataatgcctcatctaacaaaactgctatggaagttctaaaaccagtgttttctggttacattggccatttgattcctatgcctagtagaaatgaatatgatttgagtgctattttcttgcatcagcgttgtggttgccatataattaatttgattgttaagagctatttgaaacatttgcaaccatatcttgaagattttagaactacaataacattcttaaatgcttcaaatcaacatattgcttcttataaacaatattgccttagtgttggtgtccgcttcacccttgatgctgc

SEQ ID NO: 80456 - DNA, 348 bp, Zea Mays
ctgcgctcggacttggactggctcgctataaatgactggtcgcattaaccacgcctgacatcaacccacagcgtgggtgtcgatccacttcccactcatgacctacggacccctccggttgcatagcactcataacctacgaacccccaaactgtggtgcattggcctgcggcgcacttatggtctatcggactaggcccgagtgcgcagacctcccgcagggcactatacgacgggccttaccgagcctcaggctatgaaagccaggggtcggcgtagcctgaatgatggtgcctaggaccatcgatgcccccatgtcatccaccatgataaatatgcgacagctag

SEQ ID NO: 80457 - DNA, 406 bp, Zea Mays
gaggaaatcaatagccgccgcaggaatctaggcctgaatggcgctgctgcaaattgtcatatgcatgcgcgccacatgcgcggccacatggtggtcgtggtgctgctgcatttaagtgctttcccggcgctggatcacaggatctcgtgctcccagtgtccagtgtccccacgctgcaccaagcacgcagatcaaaatacgatacgtacgatcctactgccacgaaatgcgatctagctagagaaagtgcgatctagctacagcgcgtgtgcgtccaatatacgtacatggccaggccagctgcatagcgccgcggcgagcctggcgtcaaggagagaagaagaagatgatgacgacgacgacgacgagagtgttggctggtagcaaccagtaaataaatagtcgc

SEQ ID NO: 80458 - DNA, 508 bp, Zea Mays
cccaattgagatttttctaagtctgaaacttagtgttatgggctcaacttttgagctttgtaactttcaaactataaggtttttgccctaggtcaccacatcaattatgtagatctatcttaggtgaaaaactttacttaagagtgtaagcacagttgttatgaagattttggagataatcacacccaaagtcagactgacaggctggtttattctaaaattcagactttcagtgtagcaaagccatctttggagctgaattcaaccatgatctagttatcaaatgagctcagtcactatagtcgatttgtagctggtatgtagccctataactttggtacagaaagcttgctcggttactatacaaaatcgggagaaaatctagcctcaaatctctttgtcagttcatctgaaaggagctcgccatggtacagtagcttgactggatcagatcaaccgcgcggctgtcctcaccgccgacggatccctccgccgtgattcgggtcac

SEQ ID NO: 80459 - DNA, 622 bp, Zea Mays
aaaaatgttttgaggaattaaaggaaaggctaaccactgcaccagtgttaatcatgcctgatattcataaaggatttgatgtgtattgtgatgcatcacatctaggacttggatgtgtgttaatgcaggaaggaaaagtgattgcctacgctttaaggcagctacgaaagcatgaaaagaattgcccttcacatgacttggaattagcagccgtactgcacgctttgaagatttggaggcactacatgattggaaaacaagtgtaaaatcttcacagatcacaaaagcttgaaatacgtgttcacgcagaaagaactcaacctaagacaaagaagatagcttgagttaatcaaggactatgatttggaaatacaatatcgcccaggaaaagcaaatgtagtggcagatgctttgagccgtaaaagtgaagtgaacaacatcactgatcatttgatgtcacaggaattgtgctgggagatggaacaactcaaccttggcatgctcaataatatggaagcaacagttatggaagttgaatcttctttagaagaagagattcgtaaaggacaagagactgttgagaaaatcaaggaaattaagacacaaattagtttgggtaaag

SEQ ID NO: 80460 - DNA, 794 bp, Zea Mays
attttttaaaatcaggcctaagcttccagcacaattcatacctaaaatctctcttcaaggggggcgagcaatcagttctgagacataaaggaacatgatcagagaaggttctactaagcctagagacactcacattattataatgcagatcccaatctgggctaacaagaaacatgtccaacttctcataagtagggagatctctgttgttggaccaagtataaagcctatcactaagatcaagctcaatcaagttatgaaagtcaattatagagttaaataaagaactccatttattcgtacctccaggtttatttttgtctgtttctttccttaaaatattaaaatcaccacccaccaacattgggtgaatgcacttggaacagaatgaagacaattcactaagaaatttttgtttctgatcattttgagcagcaccataaacattgatgaaattccaaataaagcctttttctctatggaccacaagaattcagatcatgaactctcccaattctttttctctcacatcaaaaatatcagcatcaaaccctataaggaggcccccagatctcccatttggaggagaccaaaaccacgcaaaatttctattgccgccaatagaattcagccaagaatcctcaaagcttttttgttggtttcttggagaccaataaaatcagttctttctttccttatgatatccttacccagaccctgacaattccaaattagaccaatcattctgaaatattgagggtgagctcagagtgcagtcccctccttttgatagg

SEQ ID NO: 80461 - DNA, 752 bp, Zea Mays
cggctaatgagttagtctatgttaaatatagtttttgtattcatcgtggtgtaagatagagtgggtcgaaaatataaattatgtgacatgtgattcgtgttttaaagacgagatgtgcgaatgatcggttagtgtttcacttgtctagtcgataaacgttgtcataaataattgtgctaaaattggtcatgagaatgcagtggggacacgtatgcgtgtgtgtgccgtggtgtattatagtggtggcggcgtaagatatttgattgaggtgtgcgggtatataccgtaatgtggttatattcgcggcgaggaaagatgtatgcattgggtaacacgacacttaggtcgttgttgtataatcaaataaaggatgtattattgggcttgagtcaaaatgtggggtactagtggtacgctaggcaggcggtgtccaaataaattaaccggttgatgtggtagttgtcgtgcgtgatttattgttagtgagtagtgggattacgagttatgtaaggattatgttagaaactagtatgcggcgtgtaactgtgttcgtgtggtgaatagtaggtcagtaggaattgttggtgtcagtagaaaatgtagtcttatggagttttacgccatgtgtaaatgcctccatgatagacccctaaaaatgtgctatttaggtgacttatgtgttaactaattcaagttgagcaatggttgaaaaacactgatcaatctgctccaacccatgtttttgagttgcg

SEQ ID NO: 80462 - DNA, 445 bp, Zea Mays
tgaacattgttgtgtcactggcgttaagaggttgatggtatttggagattcactagtggtcacaagccagataaataaggactgggattgctcgactgattccatgggcaagtactatacggccgtccgaaaattagaagacaagtttgaagggttggaattccatcacatggaaagagaccgcaacgcaacagcagatgcgttgtcgaagctgggatctagtcgagcccaggtctcacccagaatcttcgtccaggaagtattacacccaagtattccctcagatcagacggaagaatgcaacaccttgagccaacctagagtcggaccctgatgactgaagacagcctatcatcaggtacataaagaatgaagaagaaccagatgataaagctgcagcagaatgcatcgtgagacagtcggcccactacaccctcatagaggg

SEQ ID NO: 80463 - DNA, 996 bp, Zea Mays
aaatggagtaaaatttcctagaagtcgggttgtcagtcaagcagtaacctgaaaacagactattagtggtatttgatcaactttggagccaaattgtgcttgatctagtgagtaaatgaccaagatccttatgacaaagttgaagatggtatataggagaataactttgatgcaatcgggttagtagttcaccccatgggaattgaagaaaaatgcccctcaagttgctctatcatgcatagtgaatggagttctgcgtgaacagtaactaaagaagatcctaggttcagagaaccttgccgatggcgacctccgcgcggtgattcgagctggtcgtcgagattcatgctcagttcgagtgggatattactgcggggatgaaaagatcagaggggggtaggattgagccagccctgccatatccacttgcctggcgacgtggtcgagcggccgtcgccatggtggccaccgttaatctggatcgcgccatgccataggccatcttaccacgtcgcagtaagtcgtggagagtagccggtacattaccccattgcgcgccaaagtgaacttgcctcggtagaaatatcccgccgccgtcgtgaacaccctcgtctcaaattcgcgaagcagtgattggctcctttaaattgagcactcccgtcgcttcgcctctctgttatgcgcacatcccaccctcagctagcctctctcgtgcaccatagcctccagtcaccggaattccctgaaaccagtcaccaacaatgtcgtgagacatctcaccgtggccagcccttatcatgttagttcgtgtctctctaggccatgttttagcatcctctagtgctagtgaagctcactaacttgaccgattgaacactactgcagcagggcatcgagaacatcgcttcaccgccatagagcaccgccaagaacgccctcacgtcaactggccctcccgtgctctctccatccaaattcgtgcgcgtaccatacctc

SEQ ID NO: 80464 - DNA, 388 bp, Zea Mays
gaaaaatccaaactatcgaatgcatacatgtcttttgtgatatttgtcttacagatttggctgcttatttcttgtcaccctagccactcctgaaactgtcaaattcaactcataatgtggggtggagtgaaaacactcagttgcttatttcctctcacctcctatgttaactcatggcatccttgcaacacatggaagtgtcaaattcagctgtataaatatagatggtgtagtatccctgtttgtaggtcatttatgctctggtttggtagattactttgtacttagttaaggcatgtcaaatcagtataactgtttcctgcctgctggtctggggcctttcattatcagtaggttgcaacctttatctgtgcttttgactttgctg

SEQ ID NO: 80465 - DNA, 437 bp, Zea Mays
tttagatcatggtacattttggtgcttcctggatgcatggagaatttggagagatgagcttcatccaagattttcttcttgagatccttatttttagaaaccaccaatctgctttcaaaccacaatatacccttcccatcttggcgaaaacacttatacttctctgtcttctgatggaggttctctttaatgatttgcactcccttatcactgagttgggccatgattatctagtctcgcaaagttggctcaatggaaatgtgagacaaagcaccagaaggaatcacttcaatcttcattttgttcaactcatcgcacagggtgttgatgtgagaatccatcataacacagttgcattgcgatttccgactcaaggcatcagctaccacattggctttccctgggtgataatgtacctccaggtcatagtccttgat

SEQ ID NO: 80466 - DNA, 570 bp, Zea Mays
aaatctacagtgtctgaagctgacgtgcccatgatgataaagttgggctactttggagaagctgaaaggaaacttgtccgatttgccggagaagaatccaccccagcgccgaaggatgatgaagtagttgttttcaagagttttttcagagcgggactgcagtttcctctgaacgagatgataggagaagtcttgaaaaaatttgaaatttatctttatcagctgaccctaatgccattgttaggcttagcgtcttcatctgtgccctccgaagccaagggatgagcccagatgccgaagcgttctgccgagtgcatgaactgcactaccagatgaaggccagggcagacggtttacatgaaaattttggttgctacaactttgcgtatcgcaaggatacgaaggctccagttctcagttatcacaccaagtggccaaccgactggaaaggtgaatggttttatatcaaggctgatgagaagaagagggggaaactgatgacgatggttatgtgctcgctatctctaaacttcgaaatgaccagacccctgtgcaacatgcagcccgggt

SEQ ID NO: 80467 - DNA, 855 bp, Zea Mays
gactccttttgaggggaagttgtagcttttgtgcatatgggcggtgcttgttgagtgcatttatcaacaagggggagaattatacacatacacaagcgtcttgttgagagtgcattcatctgtgaagttttgtgcacttcttcagggggagttcaggaggagatgtttttgttaggaggagatggatgcttttgctattcatgttgagcctttgcctcgttctagagggactgtttttgcttttagagtttttggtgcttttcatcttttgctcttatcattgtatagtggtgttgagcctttttctacctcttcttgagggctagccatttttgtttggttgcgttgagtcgttgctaatgtcttaaggaaacaagctttgctcattttcaatgtctttggtttggcttttgtccggcctttggtcatttgagtgagctcttccttcttccttttttgttgatctttgtgtttgtgcagtggtgttgacaatgcacacattaagtgatagattgcaaccacaaggttgagatgcttgagtttgtgatgagtgattgtcaacagagtaacttcttggttgagtcgtgtggactaactaggacatgagtgtgtgtgcaacatgtctcttagcttctgatgcataggtgtggagcccagagctagtgtcaatggtgaaggtgaaaggtcatatgggtttgtgtttatggatcaagatcggtgaaagatgagcactaggtctttactgagaggctgaagaagttgggtgactggtagcaatggataacacctaggtacatcagcatgtgcgaggacatgtcgtgcgaatcatgtttccaatgtgtctgaggactagcg

SEQ ID NO: 80468 - DNA, 546 bp, Zea Mays
gattgttggtacctggtcgagtggaggagtgttatgtcctgagcctcttccagctggccaagcgagtcttcacggttgacctggttgctgctttcgttgtatgctcatactcagggagccatgctctaagtctatgggtaagacgacctctaccccataggctagaaaaaatggcgtgaaccacgtggcccagctcgaggttgtccttaaactctgaatcaccgaggagagctcggtaagccatcttattccaaacttgtttagttcattgaagactcttggcttaaggccttgtaagatcaagtcattggcacgctctacttgcccatttgtcctaggatgagccacggttgaccagtctacgtggatgtggtggtcaatgcagaagcttaggaatatcttccttgtggactgtgtgctgttgtttgtgatgatggagatggggacctcgaagtgatggatgatgtctgtgaagaacgctaccgcctgctcggatttgatgcactccccatgccacgcgcgcaccggaaacctttgccccgcgac

SEQ ID NO: 80469 - DNA, 761 bp, Zea Mays
aacacatgagataataggtcacaggtgtatgtgttgagcaaagaccctgagtaacacctgaggtgttacacttttatattaaaaattaacgtctaggggtgtatctgtaaggtcacagggacttcgatgtaagaatacccaaccatcgagggatggtgagtttattataataaaaccgaggggctcatatgcaaacatttaggccgaagaggtatggatgaacgagagccgttggatttaaaggctacggcctagattagatctagcacaagcccgaatttgtaggagatgatgagcacacgatcaaggatcttcagttccaatttcattagcacaagattgcattgggtccatccacccgaggatccatggtcataatccatcagggtgaagcggtatccagccttcaatcctaccccttcgatcgagaatctatggctatttcttggttcggccgaaacactacgaccactcgttcaccaacgttgatccacgaacacacgaccacaacacatctcccccaaccctggtggtccagaacgacagcacacgcatgcccggcgacgccatcgctgggaaactcgaattgatgcatgggcacaatacttccctaacccaagctagctacacgacgctacgaactccacgaatcttataaaggacttaccagagcgggagatgacccatagacgagtgcccacgacggacagaggattcacagcatgggtcgatgcccgacgaggaattttattggctccaac

SEQ ID NO: 80470 - DNA, 294 bp, Zea Mays
atcaaccaaagcctgcgatcgcagacagatgagcagaaggaagacaattcactaatatgggcaatacaaagcaagaggatgactcacctgaagattggaaagaaatgagggcagacccagggcaggagaagctacgccatggcttgacgggggaagatcagcaggaacgatttgaagggcattatcaggggtgatctcagccccaccagcagatatcaagtttctcgcatctagatcgccgacctctaaggcgacttgttcgttcaaaattgaggaaacatgcaccatcgtcgc

SEQ ID NO: 80471 - DNA, 918 bp, Zea Mays
ctttactatgcagaaaacaagggcgttggattgttctacactaaccgttcaaccaaggtacacttgcctaatgattctagaccttcccatgtgtactagccatttgaaatctatcattgtcgcccccaagagatataataatatctagtccgatggccattagaccaatgttggctagagttcgatgcctagcaaaaagtgactaaagagatctagcccatgttagaatgatctgatgatccttgtcaaaccatagcttagggtccattaaccttgtttgaagttacatatgcgtcagacagtgggattgttttgatgaacaatgcactcctatccaatgtagtcacatttgcaaatgttgaccaaagaactagagtttggcactcttcagacacatactagagagctatagggcatgttagagtggttttgacgcccatcattggactaaaactcagagtccaattatcctattttgtgcgagactatggttagtcacgttggcactatgtatgtctaatgctaccggtgttagggtccaacacctattagaggctccctctgtccctttttcttccatcctttttacatgtggtaactcaaatgtgtccctcacacttatggatatgagttagtattttcaaaaccatatctaaggtggaacttcatgacttcactaagtttaaggctcatgcgtggatttaagcactacaagaaatttgtccttttatgacaaaatacctaatgacaaggtcagttatcgtcatataatgtcacataatatgatggaattttttgagtcgtcataatttcatgaggccatgaagattttatgacgatagtgtttttgttgtcacataagggtacgaagattcgtcatatattgtcaggcgccaggagccggtagacggttttact

SEQ ID NO: 80472 - DNA, 445 bp, Zea Mays
acggagagatctgcgcggtattcaatcgctctgggcgtcacctccatactataaagccttggcacctccctcgacgcctcgtccacctcattcaagttcgttgtgcaccaagcagggagagagaagaagaaattgggtgagataggagtgtagcgcctgggcatgctgctgctcggggattcactgaaacgttgaagaacatcgaagccttggcggattttcctcttggttctgagattcatcgctgggttgtggcgaactgtggtcggcgtcgttgtcggcttgtcatcggtgagtgcttttccgcctgtgttggcactgtctccgtttcctgggtgtacgaccatggttaggctagtgcttgggccgtcacaacaattgggttccgtgcaccagtggtcatcgaggcatcggtggtcaggtgctcggtcaggggccgccgcga

SEQ ID NO: 80473 - DNA, 857 bp, Zea Mays
ataactatgttcatgaatttgagcaggctcggtatggagtggcggtgcataatgctcaatatgatgaaacattctttgttacccactttgttcgtggcctcaaatttgaactacaggatgtggtgcaagttcaggttcccactacggtggatcgtgctatattgctagcacaaattcaacatgtggtgttgccatatctgatacagcaacatgcacttccaaaaggggatgataaagggcaacaaggtgctgatcttactcgagaaagacaacttagggacttcaggcgtctcaatggtttatgttatgcttgtggagaacagtttgagctcgggcatattgctaaatgtgcaaagaggggttcagctcagttgaattgagtagtggatgaggaggtgtctgaaattttgaccgatgagattctacatcagctagaaaaggaggatcaaagtgggaattatgttgtcatctttcttttcaggcagtttctggtactaacaatgactataacatgagagtgcgatctattatgggtaaacatactatgttgatgttggtggattctgtgagttccatcaattttattagtcaacatatggtgcaaaagttggggttagctgtgacatcttgtccatctgtttcagttaaggtggcacaatggggagtccatgatcagccaggctatggcgaagaatttggaatggtgggcacatgggcatttttatcacactgacatgagaattctacctttgggggcttttgatgctattttgggttatcagtggttaaggcaacacagtcctatggagtgtgatgggtcaataaagtgttgcagtttaaggatgaggatcaacaag

SEQ ID NO: 80474 - DNA, 1168 bp, Zea Mays
caaggaaatttacgtaaccagcagcaatcaaaaattatttttggttaaagcagggaaaatgaagacaaagatcttaggacaacacacaaaattagaagcattttgagtaacaccggaacctctaagagaggatgtagaaatcgtgaaggaatagaatcgaatttagattttacaaaggtgaaatagattactatttttgttgtacagtaactaggcgacaaagttgctatgtcccaaaaaagacttcctgcaacaatctatgagcacgaaaaatgttttgtgggtgaactgaaacgcaagcaatacacgcatcctaaaatggaggaaacaaatcatggattagaccgagaagccaaaattagagaaaagcctagacccaaatttttttagggaaaattgaggaccagagacattcggagttcctatgtcctcaaatgagttcatgcagcaatctatgagcacgaaaaatgttttgtgggtgaataaaacacaagcaatacacacaccctaaaatggaggagaaaaatcatggattagatcgagaagccaaaattagataaaagcctaaaccctaaaattatggggggaaattgaggagtccaaaaaagcatgaggttctccggtacaagaaaatcatagcaaaaggatgctgagcatgattgaaagcacgaatttggaaacaaatagatgtccaccgaatcgaaacggacgatgaaagataaaatatcaaatttgagcaaacaatcggagccgaggaggaagctagtcgagaggaaacttcagtacgaaggcggagtcaacgaggaacctaatgccgacaaaaccgaatgaacagagagaagaagggataatcaaaacctatatctcagcaaaacaaacggagccgagtaggaacccgcggcagatgaagcgcatgtgttgatccagaaaggactaaagtgatgtaaagcgccacagttgggagaagaagcgagaagcaaggaaggagaattggagaagtggtcggcggatttctctagaaatcagtcggccccctttttgaccaaaccataagatggtgcaacaggagcaacacgagcccttgctttgtaatccaacggtgtacaatttaacgatgacgtggatagccccacatgcgtcgttttgaaccgactttgttataagagaa

SEQ ID NO: 80475 - DNA, 381 bp, Zea Mays
cactgaagcatttttgatgtcgagatgcactagttatcattgaatctagaaatatgcgtcagtggagctgttacgtatgcatgttgcttgccgattataagcactgtaccaccccttgcacaaggttcccgagcgcgacgacagtgccccattttgatcccacttgatagatccgatccatcatggttagtctttggtatgtcaaagatctattcaacatccatacgacaatgccttgcatggttggtggatgttttggtgacgtgtcgtgcaggtggcatcagtttggagtggggattgtttccggagtcggctcatgtcggcttttaggcctctgttctagatggcgtttgggtgcctgccacgatcatttggcccaac

SEQ ID NO: 80476 - DNA, 893 bp, Zea Mays
cttgaattcgtcaaaggtaccctttagggctggatcagtgtcaggatcgtattgcactgagggaggagagagttcagctgcaccaaaatataagtttctgtaagatacgaagctaaaacatttacgaagctaaaatatgacaaacgcacttatacgcctctcgcgctctgtggcttcttcagcttttcttgtttcctctgaagcaagatgagattcttctttgttttgcctgatagcttcgtctgctatctctctgtcgccattcatccacacttcggaataaaatttcccacaagggcagtagcttcggctgaaggttctttaatgtcatttgctgaaactgagaattctggctgaattacagccttcgcatgttcacagccaactttttagggcagcgacacagcccctcgagcgcctacacaagcacaaaagtcccccctgccagttagaacttcatcaaatgctttgatttcaccctcaatctatttaatcacaacctcgagatctccacggataaaatttcgctcagccgagaatgcgctaacactagtaaaagcatttttttagcttatcagagcattgcatagcaacagtgtaacattcttccttcgcttggcaaagctcttcaacattcttttgtaccctagaccgctcagtggatatctcacgctttgattgctcaacgttaaagttgtcggtaacttcatcaagtttcttctatagcctcatcacttcagatttatgcaattctaattgggcgaatatagcgtattatagatcggctattctttttgcgtcagcctctttttcctattcaagctttgaaatcttctgatctgcttcggagaatttagccaaattagcttcattcgtctttagcctttcgacta

SEQ ID NO: 80477 - DNA, 438 bp, Zea Mays
atcctcatgtcatggctaagcccctaaaccatgagcgctagcttgatcaatcttggccttctaatatatggggcctcctaagaggaggaccattcttaagctaccgagccatcctttttccaccagagtgtacacatgagcatacccgatgggtatagcctccaagccaccatcttattcatagagttaactagtgggtcactcaaagtattgtgtccttatctcgtggacttcacattcccctatgttagactctcgttatgcatgagcccctaagcgcttcatggtcatgatgagaggtcatctttgaccttgattcacaaaccaacttgacagggggttgagaattattgttcttttgtcgaatgtccttcgaagcaggtgagggttgcccatgcaatctttaggttggtcaatgcccttagtaagatacgaatc

SEQ ID NO: 80478 - DNA, 956 bp, Zea Mays
ctaggtcacacccattggggtcagcatcagtcgggttacacccattgagatcagcatcagtcagatcacacccattgggatcagcttcagcaaaaactgacaccggcacttcctcagcagcgggagcagaaggaccggcatcctgatccaagcatgacactcggcgaagacgtctatttttctttttcttcccctcagcaggagaagttggttgagtggctcggtgaggacgcttcgggcgaacactatcagacctctgaatatccaaagctttgccagcctcgatgatgggtgctacagacagtgttttagcaggagctgcatcaaaggaatcttcagccaacatatccagcatggcacttatctctgcatcacttggattcaaaggtacctcgaaatgaacctacctctcgtcgtcagggatttcaccaagtgaggcgaccaaagcactaacctcttcgggagaggatcgcactctaaggcccaaaccgctatcaccagcaggaggatttgacacaaaactggtaaaagccttggaaggaggcagattccaggctgagtatgcaataggagcaccgatgtttgacaccttgcctctgagtatcatctcgagccggctgaccaaacccacagcaggaattcttctgttggtaacccgggtcgaatcagcgaggcctcgatacagataagccgggtacgctctgtcttttagtggctgaatattcttgaaaatgaaattagcgaccacagcttctgtagtcagacccctctctttcaacaatccaacctcagcaagtagagcccctgcctcagccacctccaggtctgtgggggattcggtccagctcggagtgcgaacatctggctatctccctgactgtggggcgagggaattcccatgattatccacgataaaccattccaggcgccatcctttgatgctgtccttgagtggg

SEQ ID NO: 80479 - DNA, 940 bp, Zea Mays
cctctcatgtgtgataatgagagtgcggtaaaattggctacaaatccggtccaacactcaagaactaagcatattgatatacggcatcacttcttgagggatcatgttggaaagggagacatctctatatattcaattggcacggatgatcaattagccgatatttttacaaagccattggatgaaactagattttgctcattgagatgtgaaatgaatgtgattgatctctcaaatgtggcttgaagttgaatgcacatgtgtagtattgcatttcgcttctaaaaatgctctctaggctatttattgggtattttttatgaatttttcattctagtttgatctaagttgtttgatatgaaaaaatgcatttctcaaatatataatgtgtatgtgcatgcatattaacccttgaattggtcgaaatatccatatatgagcatcaaatcagatttgaaattcaaaatcagaaagtggacagagtttgaaaatttgagtatcaggccacagaccgtccgcctatggactacggaccgtccgcagtatcaggatctggacagtccgggtcagaagtgcagacagtctgaataaccagggtgcggaccgtccgccgtccctgcgcggaccgtccacgacaggctgttaagttgggacagaggcagtcaacttgtcactttcacccgttgccttctcctctcacactctccacacgccttaaggagactctcgtcgcttgtgagcggaccgtgaagggaacttcacacggacagtccggaagcttgctggaagttcaacaatcatgtcttcatcccggtatttcataaactcatggatttcaacaaatttcttcaaatttggggattcttcggattttctctctgatctagaattaagcaatgaatttacaaatctgattggtggaatttctagtgctactcat

SEQ ID NO: 80480 - DNA, 423 bp, Zea Mays
aattcgggataatttgagggtaactcagaccagataaaggagctatgctgataatagaaggagaccactggaatttgtggaaggtgatcatgtgtacgtcaaggtgtcaccacttcgtggagtgaggagattcaagattaagggcaaattgtcccctcgttttattggaccattcagagcttttaggcgagttggagagatggcctatcaactcgagctacctgataatctatctgatgtgcataatgtatttcatgtgtctcaacctaagaagtgtctccgtgtccctgaagaacagttaccaatggaagagctcagtgttcagggtgatttgacttacacggagtatcctgtcaagattcttgatacattgactcgagttacaagacataaggtgataaagatgtgcaaagtgcaatagag

SEQ ID NO: 80481 - DNA, 381 bp, Zea Mays
gcggtggcagagtgaggggaaagggaatgaagaaagatgatccaaataatattgacaattggatttgagtaagttagtgagagttatccattgatctgaaccgtttgttttgatggtatgttatgtttgggttaaatttgtttgtggatttagtgaaggttataggtgtgagtgtgatttggtcgggagggtttcgcaaagtttaaactgatgaattatatagtggtatagattcatattttgtaagggttcaactcttattaaataagatgccataaaatagttccatcctatgtttctaaaccgaaacaaaacccaactgtgactaatcaaatcacaacataatatagcaattaaattttatttgctagcatgtaaaac

SEQ ID NO: 80482 - DNA, 527 bp, Zea Mays
cgggcaatcgttgggcgaggggatgcactaggctcgaggaattgctcaccgatgcagaacttcgccatggttctacagctcgttgtggtcagcactgcagtcgtcaccgtttgaggcaagaactcccacaattgattcgcgatgttctctgttctgtttttagcttcttcacgtgttactccattcaccggggcacttgtgcatggttgccggccatgggcgtcgccgttgggggcatgttcaccgtcgtagggcgccgtcgggtggagaagatggcctccggggctatggatttagatggacggtccggattagatgcgaccataccccttctcctcgatgctttgtgaccgtccgatcggggttggatggatgagattatatcctgagaataccgattcagctagttagatctaggccttcggatcttgatcaaacgtctcagatcgggcgtgcgttaagtcacgtcaactttgcaatatagtccctagaagattatagattcaacctgcggtcccacctagttt

SEQ ID NO: 80483 - DNA, 539 bp, Zea Mays
caaggaactgaaacatggggtttatactggtttaggcttgtgccctagtccagtgtagtgttgatcgcagtattgctttgaggtgtgttactgctagtgtgcttgtgcacgtacgaggggcaagggactcccttttatacttcaagggacgttccttacaagtgagagagggggaaaagagagagagttcttcaactagcgccctcagctatagtgcgcagtggactcctctagggccaatcttggggtgtgcctgcgcatggatcgctctttctaacaggttgcgtgcctccatattccttgcatggaactctatcccatccatttatggtgcaataccctgtagcttactctatgcccatgccatcgtaccagatgggtctgacagaatgtgctcctggtatggttgaggttcgtgttcagtacgacttcatcttttgtcaactcccttgtgtcaccctccaacatgttcgagcatgcgctaggtgtgtcgtcatgtcctttctagtacatgggtggagacttcgatgtcgtgaccc

SEQ ID NO: 80484 - DNA, 525 bp, Zea Mays
gaagattcgtgccattgccgccgtgattgtgaccaaagcaactggatagcacttgaggatcgtcgtcgtggataagtccggacgataaacaaatccgaccaccgtacagagcttgtcgcggtggaacttgataggctcgccggtgaatcgccgttttccggccttgcgccgcgtgtcccaacctcgccactgcatcgccgtgactccctctagcttcctgtcgaccaccggagttactgccacgacactgaacacgtattcaccgcacccgtgttcttcttcacttccgaccgccgcgcgtcagcatccaaattcgcgaccaccactcgctcctcctataaattgagcccccaggcagctgcgctaggtcatcgcgaagctaacgcacccactctccccctcaattagccaccgtagccggaggattccctacttcccccaatttggttttcgccaccgtgaaatccacttcaccgtggttagccctccacaggtcagtccctgtcccctgctccctcgtttgag

SEQ ID NO: 80485 - DNA, 348 bp, Zea Mays
aatgacgccaaggtctgttcttgctcccctggacaccaatcaagatgtgatccttctaagggaagcccgaagccagaagaggaaggccactagcctaactccacaagacgaatagctagaccaagaaattagcaacctggaaggtattcatcaataggtgaaaaagagatgggagacgatgcttcagttggctgagctccaaaagaagattgatgaagcagccgagaaaatgcgacatattgcacaggatacaacaaagcattctacaaaatttataagtctagaagagaaatctttttacaaaaaaataaatatacaaaccttcaagctgttgtaggccagccaatc

SEQ ID NO: 80486 - DNA, 288 bp, Zea Mays
tgcggagattgtcaatgttccaagagtgctctaggtcttcgccggatggagttgtgagcctgtacgcgctgggggatgccttcgtcttgacgatgaaagggccctcccactttggctctagcttgccccgggactctgtccgggctgtccggacgagtacgaggtctccttcgctgaattcccttgggatgactgtgtggtcgcgccatgcttttgtttgagcttggtatttgtttagagcctgtagggcgaagacgcggtctccgccgatgaggtccttcgaagtag

SEQ ID NO: 80487 - DNA, 433 bp, Zea Mays
ggtgtcataattgtctttcatgatcttttgagcacacaacaatctgtcacaaatttggagcaaaaaatcatcatggtcggtcaacaacggccaccttgaactacccttagttgtaggagagcagtgctagtggattgcaatcatataccatcttgaatggtgtggaatgaagagcggtttggaaagaggtgctgtagcagtattctaccaatggtagccagcatagccaacttgtaggctgatcattgaccaagcagcgcaagtagacttccaatatcctattggtcacctttgactgactatttgttttggggtggaaagccatactgaggcatagttgcacgccggagagtctacacaatttcgtccagaatgtactagtgaagatgtgatatcaatcgtcgatgatggaacatgagaaaccatgaagcct

SEQ ID NO: 80488 - DNA, 435 bp, Zea Mays
ggtggacaaagatggctgcctggaggatggagtggggcatgaggtgttgaagctgaagcccaaactcctccagcaaaagcaggaagaagggcgagatcagcagcgccaacccgcaagagatgtaggaggtgaacagcacgaactccccggtggcgagatcgccaaggggggcagcaacgacacggattcttcaaacgagccctagcgtgctccacccaagcaggccgcgcaccagattaagcgcttcctcagactaaaagcggtcgggatgaccaagcgaagccatggcatgtgcggcggcgcgggcgtagagcagaagagcacgaaggcaaagaggcacagtcgaatggaagagaatgcgaaagggtaactgctgcacgcggggtgaatcctttttcaaggaaacatgagtccctgttcagggaaacccttccg

SEQ ID NO: 80489 - DNA, 565 bp, Zea Mays
tggagatcgattggttattcccaaggaccctgagctcagaaagaagatattggatgaagctcacctttcaaaattctccatacacccgggcagcaataagatgtatcatgatctcagatccttatactagtggaccagaatgaagagggaaactgccaagtacatatctgaatgtgacacctgccagagaatcaaggccaatcatttgaaggtagcaggccctttgcaaccccttcccataccatctggaaatgggaggacatttgtatggattttatcgtaggattgcccaatacctcccggcaccatgattccatttgggtcattgtggacagattgaccaagacaactcacttcttgccagtgcacaccacccacaggacagagaaatatgcagaaatctacattgaccagatagttcgcttgcatggaataccaaagactatagtatcggacagaggagcaccattcgtggcatgattttgggagcaactacaggaatcacttgggacccatgtaataagaagctcagcataccatcctcaaatagatggccagacagaaa

SEQ ID NO: 80490 - DNA, 865 bp, Zea Mays
ccacgctccctcctctgctgtgcactacacgtagctactgatctagttcaccgtcatttttttgccgcctccttcgttttagggttcctttttttgaccggccgcgcttcgatttaaagtttcttcgctatctctgttttagggtttgagtttttgctaaacaatcagtgacctccctcacaaatcatttacagatttgcgtttatcacatgtacaatttccaaatgttactgtatactcaaaggtttacggtttgttttcttggaatcacagaatttttttcgtacattacaaagcgtctaccagggatcttgtccgtcttctggttttcaagattaaaaaaacctctttcttagggtttattttcttcctctgttacacccattttcattgcaacttccttttcgaaacatgttgagtaatacccctcctccttaaggactgcaacaacgaggtaattatctcttgtattattatgttttctattaaggtatcattagtcgactgcatgttatgctccactaaaattttattttttttcacccgaccttgtttgttccaccgagttggtaatctcatatggcattaaattagaatacacaattttttttatcttactagatgtctaccttatgatttgatcatgagatcatgttaatgtgtggtatgccccttcgaacatacctcatgtcagctttatctacttcgcaatcaatgctttcactttagatatggccatgctgcaatatccaatgcaatatcttttttgtgtgggggatttagattctaatccccttcttatgcagtgcattaagtattgaacgaggtttacatttggatgttgggttgtattgtcagtactttg

SEQ ID NO: 80491 - DNA, 436 bp, Zea Mays
gccacggtggacaataatcagacaaacagcaccacacatgcgcacaagtggagcactggaacacaggagaaacgcattgcacactagcagcaccacctccaccttctttcaatcaccaccagcgaaccaaacacaagaaagctaggaccgaatggatcagtgcgattggaacaaaaaaactagagagaggaaccaggaaccggtgttttgctgcgtgctgctcagaggttgactgtccatcctttaaggagccaagaaacggaggaggcaaatggattagcgagaagggcgggagatcgagccgatttctgctctcatcaaccaccgccagccacctcttctctatctcccgtaagccagcagaagcaccaaggtgccctaactcctccccagccggctgggctgcttggccttttgggccttgaggtggcccagt

SEQ ID NO: 80492 - DNA, 320 bp, Zea Mays
aacttgaaatatgctagaatagtcacaaaagagctagagttatcaactcaaaggaccaaaccatagctaatcttcagattctcaaggacctcggggtggttactataaatttattcacaagtcatgtgagaagggccatttgtctcatgaattttgttcttgcaccagtcgagatgtatgatggatacactaatccagtagaatggattgagatttactgtttatctatcatggaaggaggaggaaactcttttgtcatggcaaattattgtatgcatcggggtttatacgaggaagtggttgtttggactcccagctaa

SEQ ID NO: 80493 - DNA, 573 bp, Zea Mays
ctcgagccctaccgcttctctgtggatacgccaagtcgaagcaagtagcccccgtgccaagtgtgcgtacagagcgaaaccatgggagggagaagagagagaaggagagagaaggcatggatgctaccacgggaatcacaaaacatcgacatcatgccctcatgtggcggtgatgtgtggtcaacgttgcacgccgcacgtccttggcttcttgccgaactagatgggtagtcacacgctaccgtattcctcgtcggagctcaagaagcatcgtggatcagcccgcgacgtaatcagcgctgccgacatctcatatccaaggtgagatgactgaataggttcgccaccatccctgcatcttgtagttgcgttcgagtcacaattcagagcatctgggagctccgacaccggtggttggcggatgcttcgccgtgatggccgagttgcgccgtcgggatccacgcgtgtggggaagaagggcaggggctgtagatctcctaatcgacggctatgattagatcacaccaatttaaaatcattgccgttaatcctatcacgtgcggtcgagatcgg

SEQ ID NO: 80494 - DNA, 742 bp, Zea Mays
atctcaagctagcaccgcttaatttttcactgaaataagcaaccggttttccttcttgtaacaaaacagcacctaacccaataccactagcatcacattcaagttcaaacactttctgaaagtcaggcaattgtaagagtggagcatgggttaacttatctttcaaagtgttgaacgcctcttcttgtggggggtcccaagcaaaagacacacctttctttgtgagttcgtgcaaaggagcagcgatagagctaaaatcacgcacaaaacggcggtaaaatcctactagtccaagaaaacttcgaatttgggtgaccatcgttggtgtaggctagtcctgaatggcttcaaccttgctgctatccacctcaatgccctgcggagtaacaacataaccaagaaacgagacacgttgcgtgcaaaatgtgcacttttccatgttaccaaacaagcgagcagcacgcaaagcatcaaaaacagcacgcaaatgttctaaatgctcctatatagacttgctgtaaataaggatatcatcgaaataaacaacaacaaacaaacctatgaaggcccatagaacttcgttcattaaacgcataaaggtgctgggagcattagtcaatccaaatggcataaccaaccattcatataaaccaaatttcattttaaaagccattttccattcatcaacaagtttcattctaatctgatggtaaccgctatgcaaatcaaccttagtgaaaat

SEQ ID NO: 80495 - DNA, 932 bp, Zea Mays
tatctaaaagggaataatatgggagtatatcatttggctaagtaaataatggatatatacaataaaataaaccttgtataacaagttggagtctttttagcacttaaatatactttaaaatttgaactccgtttgaagttaattcaaaattcgaatttaatctaatttgtgatttgggaaggaaatagaaaagaaaatatagagacaaactgtttacttgggccgaatcccataaataatggcccatttagctttcgtcgccgcataaacagcccccgtgcgcgttctggtgcagcgtctggcgggtgggcgtccgtccactggctgacccgtggggtacccctgtcaggttagtcttcttcatctcgccgcaatgcacggatggaagctttaccaaattccgaatcaaagtccgttgagccacaacaaatttggggttgttgcgatttcgtagcaagattgatgcgaccacgggtgtatatatacgcggactcgtgtcatccctagctgagcgaaccagcagcctttctctcttctttcctttccctcgatgcagtgagttggagagagaaattgggggagcacctcgcgaagaactcagtggcgcttgtgattggttgtcgaggcaggatctgggagctgcgcgtgctcatcctgtgccgatcctaggaccctattgtgcctattgacttggttccgcggtggaccaccatcgctgggtggatgctcatcggtgggtggatcgtgccatggtctgggtctcctacacatgatagctcggtaagaattccgtcgaacacctcgcctcagttcttggaccgtgtaacgcgatttgattagcagtttgggcgtgctgctcgctggaggggcaccgctgtaagggaatgagcgccgctgcctgttcggctaattggagaaaacggtcgggcgtg

SEQ ID NO: 80496 - DNA, 604 bp, Zea Mays
gttttctactaaaaagatggctgttgtcatcaaatgacctgttttcgtttttgaaaatggtaaaattaagtgttcttcatctcatgacatcttcattatcagcatagagagagggtacacaacgacctggcttgagacttacatacaatagcgattgtacaaacaaaatttaacttaatacataaaaattcaggtattgcaataaacacatgcatatttttcatggtttagttttatgttttctactgtttactttatatacccaccatttttaaacaaaaaattaggacaaaatgtgatgcataaaaaaagatcatgtgagaaggaggaaaaaaaatgctagaacgaaacataacgatcaccttcaagaatcgaatgaaatatcgaccacttctaagtgcatatatacttctaggggccactactaatcctcgacggtcactcgcatcttcaagattgatgaatggtctagtgagtagactgtaggcacaaaaatgctaaataccagagataggatgaatagattgtattatatccatgtttatagtctgaacagggttgtatatgaatgcatggcacccaattctgtggttgcaatctagaa

SEQ ID NO: 80497 - DNA, 283 bp, Zea Mays
gggctccggggtaagaatctccagactcagtgaacagtggaggcggatggcgggttattttaacctaaaccgagggactcataagaaaaatggtgtggctgaaggggtatggacctatcgtgaccgtccgattagattcgaagggctgagattaattccatattacatcgaaccggtacgcaatctaatccatcggatcaactaccaacggtgacgattttaaatgggctcgatccaatcatgcccctgcgttgacgatccgacggtcgcagatcacccaacc

SEQ ID NO: 80498 - DNA, 366 bp, Zea Mays
ctgtcgatgacgaaatagaggataatgaatctaactgtaatgaagagtcaccttcgaacaaggatacaccttcgaagaagaaaagagctagatattctaagaaaaagacatcagttgcgcaagagcaaggaaaaggaagtacttccacttcgtctctaggttgtacaggaattctcgaggtaatgactcgaccactgtcgtttactactctaatcctttaggacaagagctgaccagactattgatggctacgaagggcatggacgaaggaggtcaggcttcggcgcccacaaaggcagaaaattccccatcagaagtggagagtccacgaattgaatcccttattgttgggaccatgcttcgtcg

SEQ ID NO: 80499 - DNA, 517 bp, Zea Mays
cttaaaagctccaagccgaacaaaagggcctcatattcgtcttgattgttagtgcaatatgtttttaatcgcctagagaagtcgaaagagacattacttggtgaaacaagcacgatgtcaattccttgtccttcattgcaaatcgatccattaaaatataaaatccagggagtaacagtgaggtatgatatgtctagtttatgagtatcatcaattcgatgttcaacaataaaatctgctacgacctggcctttcatagatttcaatggttcataagccaagtcatattatatgagtgcataagcccatttaccaattctaccactcataatcgtgttttgcaacatgtatttgatcacatcgatttgaccggaaacggtgcaatgactagacaacaaataacatctacacttggtgcatgcataaaacatgcataaacataacttctcgatgaaagtgtaccttgtttcagcatccactagcctccgacttaggtaggttaccatatgctcctttc

SEQ ID NO: 80500 - DNA, 380 bp, Zea Mays
catatagaatggatgtcaaagatttagtagaactgaagaaacaaatagaagaattactagaaaaaggtttcattcgcccaagttcatctccttggggagccccagttctatttgtgaacaagaaagatggttcgaggagaatgtgcgttgattatagaagtttgaatgaagtaaccatcaagaataaatacccattaccttggattgaagatttatttgatcagatgaagggagctaagatattctcgaagatagatctgagatcgggatatcatcagttaaagattcgagtagaagatgtaccgaagacagccttcacgacaagatatggattatatgagtttttggtcatgttgtttggactgactaatgcaccagca

SEQ ID NO: 80501 - DNA, 574 bp, Zea Mays
cacatttgccatccttctcctcttaggagttgtggcagaacttttttgtgccttcggcactgtcacctccgatgaagggctcaaaatttttggcacttttatttcttcaatacttgactcttcagctttacccttaccaaccttcgtttcaactgactcaaccaaaggtgcctttggcattatagctggctctttagtcctctgcacgggaggaacaatttctcttcattcaacagctaaagaggcctccccgtcaaactcaggcaccacagccggttcaatgtaacgcgaccgatgggtaagtaccttcatcattttgcctgcagccttcggcacaggctcggctgtggcggccaaagcagcagcttttctcttcttcccctgtccccgcagcgggtagtggtagtcggggtagatgaagccgatggcgtcaaaaactctgttcattctcttttttcctcgacctctgaaggctgcagacagcgcattatcttctgccttggaataagctccaagcagctcatcacttgtagcttcgatgcatttcagccagtcatcgtttggttcatcgaac

SEQ ID NO: 80502 - DNA, 1383 bp, Zea Mays
gttacaatgagacatgttgatgctagatagcaccgaatgaccaaaaagatctttataataagaagtagcaattttattaataccaacagcatcactcacagggacatcatcctgatttaggaaaggaatttttaccctcctcttccgacctttagccaacaggtgaaagaatttggtattttcatcaccctcattgatgaatttctctctagcagtttgtttttttacaaatttcttcttccatgatctttttcagattccattccatatcaagtttttcgattctctcagaatccgagatacccattatttcacattttttatctaaaatatcaattttttccatcaaatctttttttaatttcaaatatctaccctcaacattgatattccaacctttcaacaattttttcaatcttttgactttttctttccaaatatcaataccaatcttacttctaactggcaaagaccaattattcacaactaacgatttaaaatcaggtctaaatttccaacaaagttcatattgaaattctgttctagccggagaaataaagtcagtttttagacataaagggacatgatcagaaaaggatctactcagaccagtaacattcacattattatagtgcagatcccactcaggactaacaagaaacctgtctaacttctcaaaagtagcaggattacgattattagaccaggtaaaatgacgaccactaagatccaactcaatcaaatcatgaacatcaataatagaattaaaaagagaactccatttgttagtccccccaggtttgttcttatccgattctcttctgagaatattaaaatcaccgccaatcaataaaggttgagaacagttagaacagaaagtggataactcggtcaagaatttctgtttttgatcattttgagcaacaccatagacattaataaaattccaaataaaacctgaatctttttgaatcaccaacaaccgaatcataaattcccccaactctttttctctaacatcaaacatgtcggaatgaaaaccaaccagcattccacctgatctaccattagggggagaccaaacccagacgaaatttctattcccactaatgaaattcaaccaagaatcatcaaaatctttcttattggtttcttgaagaccaatgaagttaaccttctctttcatgataacatcacgaaggaattcacttttcacacttttgccgagcccctgacaattccaaatcacaccaatcattctgaacaagacagggcctggccatctgactgacctttcctcttaatagggattttcctatttttaggggttttaccagccacgttattattgttttttttcctcacagtttttttcatgtgctg

SEQ ID NO: 80503 - DNA, 448 bp, Zea Mays
tatgcttgacaagctttgcaggagaaagagatgatatgaagccttggtgtgcttaagagagtcaagacaattcttgctaactcaagctatcaatcttcaaagatcgatatccatgattgacccaaggttatttttcaaaatactatatcttaaactcatatcatctcgagggaagatgttgatgttgtaggaaataaagaattatcctatgccaaaaagtcaagacctacaacatggaggaaagccaaaagatggtaacatttatgcttttaaatgcaaagtatcttagaatatcatctcttatgtgtcttgtgtagtcacataggaaaaagaaagcacttcaaatgttttaaattatgtcaccattctttgaagaaattcctcccatatggtagattgtacattcatcatttctataccatagcaatctacatgctttaaattgatg

SEQ ID NO: 80504 - DNA, 998 bp, Zea Mays
acggtatcggtgctgccacatgccccagaagagggcatgcttagggattacacctatgtgtccggacccccaagggtaaaggcctagacccccataaatgccattcgggtcaccaaggatgggtcctggacggacacctgtaataatcagatctccttatgtaccatccagaccccggtttgtgtgggtccagagcctacaaccggccaacgtccttggcgtgggccctcaacctagataggggtctggcgctaccacatggcataagccttcagttagaagcaagcccctcgtctgtaggcccactgcccgcatttaatgcaggcaaaccatggcgtgctctgccacacgaacagagcacgacaaatgtctgacatgtcgaataggccgacaagactgctctacacgttaccgagacacacgacgacgtagccacactatgcacatttaatgcttgctcaggataacgtgagttaccaaggtggttatctcgtatgagtggatgacgacatcatgaagcgtcacttagtcgacgatacacccactacagtataagctggagttgacagcatagagatatcgcattaagtcctgcgcacgtcaacctgcctagctccgacgacatcagcataacaggaacatcacgctatggccccaggctgacagacgggatgaaaaacatttctggtcgaaaaatacgcacgacggacgaggaggagatcttagccagcttctgcacttataactccatgttatatatatatatatatatttaatactggaacactagacacacctgtgggggtccaacttccttgtaacatgccacccttggactataaaagagatggcacatacaatacaaagggacagactcactcgaactccctcttaggtatctccgtctagacctaggcattctgaagctctcaacaatacaactcatatgggagtagggtattacgctctggccatccaaaccactataaatccttgtg

SEQ ID NO: 80505 - DNA, 715 bp, Zea Mays
cgagtagcaggggattcaagggaggctagaacatcaagcaaagaagcttgaactgacctgcagaaggctggccacggcgaggcattcacggtggcgcgaaaagcagatttgggggaagaaagaaattagtgcgttatggtggctaatcggaggcaggggcgggtgctctagcatcgtgacgacctggcagagttctctgaggcttcaatttatagagctcaacggtggtggcgcccaatttaaaagaagtgtgctgacggccggagagagggactgagttactatggtgttctaccgtggcattcactagttgaggagctacggcggtcactagtgagctattacggctagcagcgatggggtgaaagggtcacggcgtggcgcgatcacggcgaacgatgtatacctcgatgatggccactcggccacgtcgcgcggtgcaagtggatgggcgacagagcggccacagtgctacgagttcatccacgacgagatcttttcactaggggtcgttatccgtgcgttactgggcacgaatcgcagcaccggcgtgaatccgagcgtgcgggtcaccggcggcgagatacgctgtatttgccgtcttgtttagttagtgtaccatctaaaccgttcatcagagtgcctgacagagcaacttcagagatgtttttcataaatttctatgtggcaacttgttaatccttctataacaaag

SEQ ID NO: 80506 - DNA, 882 bp, Zea Mays
agcttatgctcatctattaaaatcagtattatctttttgctctattctcgtggtaaatatatagcagaactattagaatgcatgtgaaggctatattgtactgcatgtacatactcaaatcgctctaaatatttattttgcgttgaccttcggactcacggcgagcgattaaatggtatagtgggtacacagatgtgtcgagcagattacattattaatcgactgagttaaaacattggctaagtattggctgcgccctggtaacacgacgcaatatttatgtcgtacgatcttggctgcgtcatttgattgctatgtcacactctcgcttaatcggaccaatcctgttgagtcggacgtcattatcgagtcacgtatttttcgtatgccctgtaggcattgtttgtctgtctgccgcgagccacaattgcgcttgttgcgcacgttgcgtggatttatcatgtaccccaattaccgagccataattgtgcatgttgcgcttattacgaaggcttgctatactgtcgtagccctgatggccacacacgcgttgacgccagatacgctagagcttgtacccgcgtggattgtggtgggttgttcaaggtcctgaagtcacattatgtgcaaccttcgtaaacaattttgttttcactttatattttgtttgattgtgttgtgtggcatcgtatatttatatatatcgccaagtggccataacaactatattaaatctgggaaattaaatcgaaatacaatgaaatacagataagttaactctctgctctctcctcgtgcataaagttttacccgaagtaacctgaagaaattcaatattaatgcatgaaagcctttttggcacagaaaacatcacaaattagg

SEQ ID NO: 80507 - DNA, 317 bp, Zea Mays
aaagtagacttcaggagctttccaacaagtactcataggcttcaaacaatattcggagctaagagttatggccttccaaagttgccccctcctggaggtccgaactggtatggtccgatcagatcatccacacttgctttcttttcgtgattgctctccctccaatttggttcatgtcccgagttcctaagaataagaaaagcatcacaagaatttagtagtaccccattattggatgatggtttatggacagcgaggaacgagtttacctaataatttagctctcgtgcacgagctcttgtcattggtccttgcta

SEQ ID NO: 80508 - DNA, 310 bp, Zea Mays
gttgattttgtcttcaagaatattcagccgttgaaagacagggcatacccggcttatctgtatcgaggcctagccgattcaactcgggttactaacagaagaattccctctatggacttggtgagccgacttgagatgatccttagaggcaaagtgtcaaatgttggtgccccagtggcattctcagcctagaacttgcctcctcccaaagccttcactctttttgtgtcgaatcctcctgtcactgatggcagtttgggccttagagtgcggccttctgctgaagaagttagtgccttggttgcctcgc

SEQ ID NO: 80509 - DNA, 282 bp, Zea Mays
gttgtgtgccttcgcacactcggttatgttcgcgaaggcgttacgtacgtggtctggtgtatttgttatgttggtctggtgcgcatgtagtcggtttttgtgcggacagtttggtgtagtcgttttcgcacttgttaagctttgtccggctgtacccttaagcaattgttgcacggatagtctttgcggaagacttcgattcgtcgcacttgttgcgctatccctgttgcacccttagtcgacttctgcgcggatagtctttgcggaagactacgatttttc

SEQ ID NO: 80510 - DNA, 677 bp, Zea Mays
attataggaaaggataggtcctaaacccacctaagggtgaacgacatatcacagatttatgataagtcaatgagtttgaacgaaatttcggcagcataaccttgttgttctccattgcacgcccgtaatggtgcaacggagaacaagagggttatgctgtcgaaatctcgctcaaactcattgactcatcataaatcctatttgatatgtcgttcactctaaggctgtccaaaaagggacaatttcggtacaacacactactttattaagcaatgtgttggaccgaaacgagtgacgcataagtttagacctattttagttaagtatcgcctatagacctattactaatactatgttatacaccaccagcatattatacaagccatattagagcaacttggcgcaatcgtctcaaataggagtctcttgtccaaattcacccttgccagtggtagaggttgtgacatggattttttttctttcttttgatgacctaatggattttagacaataggatatccaattgtctactttttacacttggattacaactctccaagtctaaatataatcattagagacagtacatcagtgttttaatatttacctagtaagattttaattgtccatcagtgttttaatatacgactactttaaactattatatttacctagta

SEQ ID NO: 80511 - DNA, 604 bp, Zea Mays
gtgaaatccgtgggcacaactgttaatgcaatagcacttgatgatcggcagattatttttgggaaacaacagggtcacttttgcaaaatggcttcagcgaaggggtatggagcgattaaagccgcacgatcagaggcgcacggtgcatattaaatctgacttcgaccgaaacagtacgcaacatggagccttggatccaaattcgacgacccacagtcaattcgtgggatggaatagaagatccgatctcccccgtctgccctaagatcgatggtcaccgatcacatccggacgaagcgataacccgactaatcctagcagttggttagaggatcaacggtggacgcattgtcttcttccttacgaccccaagctaccgtcctttctcactcttcatggccgacgtcgatagcccaccccacagcgatgagtacaccagcgaccagtgcccacggcgcgcaggtgaccaaccaccgcggtagtaaaggcacaggctacacgctacaagactcatatgcaggcgacgtatcagagatcgagatggtggccgggatgatggccgccggcgacgtctgatgaggatgaccagccctggcaagcacca

SEQ ID NO: 80512 - DNA, 858 bp, Zea Mays
cggataccgaggcccggcgaacttgttcagagcaagacaacgtgttggagctcaattatctgacttggaaagtatcagtggctcaccagaattgcggtacatgcacgaattcagaaggtggaagcacgggagagccaatcgatgtgaaggatgtcctcggcggcgctctacaatgatgacatgatgttctcaatgcttcgatgcaagagcgttcaatcgaccgacaccgtgagcaactaggggtcccaaaggtactagaacaggaaggagagagacatgaactaaccagaggaggtctagccatggctaggtttaatgccgcggagctggtgactgtgttcggggaaatccagtgaatgggagctatggtggacgttaggaggtggttgagggtgaactgagcacataactgaggggtggagcagggagaactttcaatttaaaggagtcgatcacacatgtcatgaattttggctaagctcgggctcatcggcgtgattagataacttactagagctactctccatggcgcgcaacagtgaaatggctcaaagacagtgacttactgcgtgccacaatcatggcgacatggtgaaacggtccatggcatggcgcaatataggatgatggcaaccactatggcgacaaccgctcaaccacgtcgcatcgcaagtgggcatagtggacaagctgactcagagcctatgttcttcccctgtcgatcttttaccctccctgacttatccacttcacctcgtgcatgaatcttaccgaggcttggctcatggcacgagatatcatcgacgacatggttcatcaaacctgtgatcttgttcagtccactgtgcatgcctgaac

SEQ ID NO: 80513 - DNA, 325 bp, Zea Mays
caaactcttcggcggaaaggtcgccgaaaggagagaccccaacacaagtcctcccggcaaatactggcgcattccatccaagcaggcggtataccatttcgagccttactcagtctgggcgcgctcgggatgaagccacaaggccatggtaaactatggtgacacaaagcaggaaccttgaaggcaaaggggcacagagagctcgaaggtggaagggcaccgtgagggggagagaagtaagacatggcagctactcgaagggtgaacccctttttaaaggcagatttcctcgctcgcgccccaaagcatcacgggcaaggtctcc

SEQ ID NO: 80514 - DNA, 300 bp, Zea Mays
aagaatttcgtgttgagtggtaatgcatttgaagattgagtttgacttctctccttccttgacgaggttgatcttgtccttcttcgatcttggtctcattgattcgaggttagcgtatatcatctgagttggggaataaggttaagatagaatctgtcaaggtgagatagatattgactatatgacgtaggtcaaaagttagtttgatgttaggtggggatggacagattatgcaacccatcatgactctattggttgggttggtctctcattctttatttagtgtagggtgaactaagt

SEQ ID NO: 80515 - DNA, 343 bp, Zea Mays
agggtgtttgttgtaggataagacattgtgggagggaggatgccctaagactagttgcagtgctcgccgtgtccgctccccgacggtgttgcagcggctacaaaacatcactacaccctgtaatgacgtacactattttctcctctgcacacaacagtacaaacagtgcacgtagtagtccgccagatgtgggggagcactatgcagtccccttgcctcactatccatgcaatgcaagtgtttgttagttgagaaaaaattgataatagatgatgaatagggttggaaaatgatattttatgattttagtggggtatagaaggaaaatttagggagaaccgat

SEQ ID NO: 80516 - DNA, 339 bp, Zea Mays
cttggttcttctatacctttacctcttctcttacacccttttctattatcgccttcagcccttgtaatacctatatttttaccatgacgcttactttgaacctagcctttggagccttctcctttccatcctagttcaagagcggtgttttacttatctcacccttgacaacatcctcttctttactgtgtgtaagcttggacgtgacaccattatttgttgtactcataccactggctcttcaatgccttcatcttttctctcatacccttgtccgttgtcgcctttgacccttgcgatattgaggccttctacctaaatgcttactttgaacttatc

SEQ ID NO: 80517 - DNA, 527 bp, Zea Mays
actcattaacctttgttggaggccttcagatcttctatctgcctttgaagcagtagagggttccactgcatcagggacgaaacttggtcggggacaggagcgccacaggattttagttgggcagatacaaaatcgaaaacattctgtaattacaaaaaatcagcaagagagccagtttgctaacaggaacaataagaagcaaaagtcaacaggaagcattgatgcattgctttttgagggtgcgtcaacaggaacgatgttgaaagcacgacccgaagagacctcagctccatcagtaggcagcggactcctaacatctggatcactggcctctaaggtgaccggaccgacaagagtagcagataagtgtgtcaccatgagttccttagattgaaccagtggtgatccgacgtgaacatccatagaagcagccgaagaggagcctagcccaacaccctcgggggctgggttaccctcagcaccaccctcgggggctggttcctccttagcaacaacctccaaaactg

SEQ ID NO: 80518 - DNA, 544 bp, Zea Mays
ggccaaacaagcctatgtgcgtaagtaagagagtgaaggtcttctcccaatccactcatcatagggagttttcttcttattcttcctgggaactctatttaggacatgacatgcagtcaatactacctcccccaccatgccttggataattcagcaatgtcaaataacatgatgttaaccaagtaagccaacgtgccattcttcctttacgtgactccgtttgattaagtgaatagagaggcgccagtgaatagagaggcgccctctcatgtataataccttgttatgcacaaaataagtcaaaatcactagagaaatattcatctcctcgatcaggcctaattatttttaacctttttctcaagttgggtttctacttctaccttatagatttaaaatagtttagagcctcttcattcattttcatcaagtacacataacaaatctagaagtgtcgtcaaccaaggtcataaaatatttttttcaccctctgtcaacacaccattcatctcgcagatatctaaacgtccaatgatgccaaatg

SEQ ID NO: 80519 - DNA, 938 bp, Zea Mays
ctggttggcgattattttgttggttaacggttggagttggtgcgcacgtggcgctctttgcatttgctgaaactaactctggtggaatcaaggtttatttcctgtttgatataattaactctgatggagtcgatgactctttgttgcttgaaatggttaattttgatgtctggagcttctgttattgtttatgtgggccctctttgcaaatttcttgttgggctcctttgaagtcttattcccctcacgtcatgctgattttgtggccctttgaaatctcctgtttatgggcttatactggaggaaggatctattggtgtatgttatgcataccggaatttcttaatttgaagactgatagtttaccatgacttccggccctcagaacttacaccgctccttgaaaattttgtctcataacattagaggaattaactcagagaccaaatggaattccttacgcaataacatctcggactctaaatgtgatatcatatgtattcaagagacaaaaaaaagagtcctttgaggactcctacattcgtcgcttctgcagcagatcctttgataagtttgaattcggaccttctattggcgcttctgggggcttcttaacaatttggaaaggttctctttttgatgtggagattattgatcaaaactctttcggtcacacgatccgcttccatacaaagctaaccaatcaaacctggtggctcaccaacatttatgctccttgtactcctcaaaggagagaagaatttctctcttggttttccagcattgagattgatgataacaaattatggatcttccttggtgactttaatatgatcagatctcctgataaccgcaacaagccgggtggggatcacctcagaatgatgaattttaatttggcaatcagtcagctggggcttcaggaaattcccctcaaa

SEQ ID NO: 80520 - DNA, 517 bp, Zea Mays
gttgattaggataacataggtatccggctacttattatgtgatataagctggacaggttgtggtaaaaaaaattatggcaaggagaagacttcatccaaggtgataaatcttgaatcatcccgagatctgatttgactcatgttcttccatgttgaggttgatctcctccttcttgctctttggtgtctctacccgggtttgggacaagaggctaagatagatctgttatgtaggtcaagttgttgggtatggccgagttgatctaggtcaccaacttaggcttaagtgaatttggagtatggccttatcttttgtacccacattaagtaacttactctagattagctcaacttaaggtttgccttcattaggttagattattctatcacactggatcagatctaggttagattgttatgactagatagactagataggaccttcttaattagatcatgattgttactttaggatgagataagtaaagtggttaggataagatgaacctattaggat

SEQ ID NO: 80521 - DNA, 1347 bp, Zea Mays
attggaatgaataaatttggactccatatgaattttctaggaattttgcaagttctagttaatatcttcatattaaaaatccatttcctatgtatttttctgaattttctaatcttttggactgggcgcacaattaccaaaatcgtcaggggtctcagcgcaagttttctaagactcagaacgaccctggtgcagacggcgggttcattactaagaagttcagggactcttttgagatattgccaagcgaaggggtattatggcacgtgaaccgcacgattacgatccggtggtccagattagtttgatccgcatccgaggacccgcggatgatccagaccgtaggcacacagatctacggctaggatatattaacatgaaggggtatctcgtctctaatctgagcccacaattcggtgatcgacgactcgcattcagttaccatcagatgtaatcctatccatctgttcgccgatcaacgactcacacacgtcgtcttccccacgaccacacatgggatgatgcatgagcgtcccacggcgtgacctcgtcggcgatcacccacatctacaccgattgccccaattacaaaatagagtggtgctacgtgaagcgaaaaacaaggcgaaataagggagaagtagctcactgtaggaggaggcagaaacagagctacccacgaggcgaggtggaccgacagccgtaccccaacatcggcgacgaggaattgtgcagcgtgtggccacaaccctggcccggctagacatcgatgacgagtggtgtgcgtcgaagatggcacaacgagcagtaaggaaggagctttggcggggggaaaaaggccgcttcggaaatctggagaggagagagaacgcgccgggtcttcacggcgatggtgcccatggttcttatacccggaactgagtccgattttgggggggggattggtcaacggagcgcgccatgcgcgcgagcatccagcggagaggataagtccgtcgcatgctccagctccgattgttatggcggatcccaactgaccggcattatttcagcggatggaacatcgaacgcactggctgggaaaggggatgagtccgacaggctaaccccaccagccatcgactgattctgtcaatgtccggcaactagtctagtgaggcccacacgtcagtggagaaatgaggagagcaagcgcatgaatcgtcccccagcgtgcatggcacaggatcaggtccccccatgcggcccacatgtcattgagggtagctgatgtcatcgctgacctcaggatgacacaaggtgatttttttattactttctcttcggcagctggattgaagaataaac

SEQ ID NO: 80522 - DNA, 396 bp, Zea Mays
taccaccccccatttcggcccagtggaaccgttgtcgcggcctgcttttgcgctgcactctgtgccctgccgtgtgggacccacttgtcggtggcgttgtcgttccttcccccattcttctctcgctgtcaacctgggccagtccctggctctctccagtgcgcatgcgtaagtcttcgtggtcgctgccatgtaggccccacgtgtctgtcgcactgaccccgctactgtggatcttcctaggccgaacaactcggtacaagtcgttgcgccgccgacttctccgcagctgcccttggccagttcaactgagtaccctggatactcgcctaccatcccctgctcgcgctcggactccatggacataaaaacctcaactgccgcacttccttcttc

SEQ ID NO: 80523 - DNA, 1199 bp, Zea Mays
caatgccttcttgcatggcgtccttgaagacactgcctacatgcagcaaccacctggatttcaggacatctctcggcctcatcatgtctgcaaactgcacaaagctatttatggcctcaaacaatcacctcgtgcttggtattctcggctaagcgaccggttgtgtcagctaggattccatccctcagttacagatacttcactctttgttttttcagagggatctctcactatgtttatgttggtgtatgttgacgacattgtcatagtcagttcgtgttccccggccatcaagcagctcctgactcagctcactagctcctttcctgtcaaggatcttggtcctctgaatttttttctcggtattgaagcggtttccaattccggggggatggttcttactcaacaaaagtatgctatggacattctcagacgagtacgtatggagaattgtaagcctgttcaaacccctctttgtgcatcagaaaaattgtcaagcttcagtggcactcctcttggcgaccaagacacctttctttatcgcagcacagtaggggccttacagtaccttacccttactcgaccagacttgtcatttgcagtaaataaggcgtgtcaatttctttccaagccaactgatgttcactgggaagcagtgaaacgaattcttcgatttgttaaaggaactgctcatacaggactgaaaatcagaaaatctccatctaccctgctgagcattttcaccgatgctgattgggcggggtgtgttgatgatcgaagatcgactggtggattcgctgtctactttggaccaaatcttatatcgtggagtgcacgcaaacaaccaactgtgtctcgatcatcaactgaagctgaatacaaggccatagctaatggaactgcagaaggagtgtggattcagtcattactgaaagaactaaatgttattcagaaccggcctccagtcctatggtgtgacaacctcggtgcaacatatttgagctcgaatcctgtgttccatgcacgcactaagcacatcgaggttgatttccactttgttcgagagaaggtggctttacgcgcacttgaggttagacccattgcgtcaggagatcagattgcagacattttcaccaagccagctaccaaacaaatgctagaccgattcaaacccaatctcaatcttgtggcgacaggtt

SEQ ID NO: 80524 - DNA, 421 bp, Zea Mays
cttttctcgctcgagctcgaccacgatcacgtttagcttgtcatgttaaaacccgcgcccttaatttcggtagtgcatgcacacgcgcctttattcgtcatgcatgctttgggcattattggttaaataatcgtattaattattgggctggctagctacaccatttgtaattgtgcgtgtcctcttccctgctcttttctcctagctccgtccatccaagagcagtgggtgtttggtcctgtagggtagggccaacaaccggtttggtgtgtgtcgttacgttgggaccagatttctcagggaaggaacaacgacaaagcacgggaactaaaccaccagtttctggaaaaaaaaacttgggccagtcgtgtgtgtgtgtgtgtatatttagtactacgtatatagagaaaaaggggaaacg

SEQ ID NO: 80525 - DNA, 394 bp, Zea Mays
ttttatgttatcaatccatgaactaaaacactcggctagattattgttcacataatcacattttgtttcggtggaaaacatggacctgctccataagtggttgtgatgttcgttcaagtaatctacaatatctggagtggctttcataacttgactaaaatggaaatcaaacttgtcacgtatgtatgccctagcaaccgaccacatgttcttgtcaaaaacttcaccacgatacttcctaaaatttgtctagagatgcatcatgcactccctgtactcaatgccaggaaataccatcttgactgcaccatctaggcccttgcatgcatctgaagatattgctatcttttcactcctcacttattattattttttaactagaattaattaagag

SEQ ID NO: 80526 - DNA, 761 bp, Zea Mays
gcacggtagtaggtatgtttccagtcgaatcccatcttgtagaagtgttatttgatactggagcaacacattcatttatcattgcatcatgggtagaagcgcataatcttccaataaccaccatgtcaacaccaattcaaattgagtcagccggtggaaaagttcgatccgatagtgtatgcttgaatgtaattgtggaaataagggggggggggtagaatttcctgctaacctcatagtgatgggtactcagggaatagatgttatcctagggataaattgactagataagtaccaagcagttattagctgtgataagaggacagtgaagttggtgtccccaataggagaagaagtggtgaccgagctagtctcacctgagccaaggaaaggaagttgtcaccagatggctattgatagcaaagatatcaatccacttgaagctatcaaggttgtgtcagatattcctgatgtgttccctaaagatctaccaggtatgccacctgagcagaaagttgagtttgccatatagcttattcctggaatcacccctatttataaaagagcctatagagtatttggactagaattggttgagctcaagaagaaaatagatgagctgtcagagaaaggttacatcagaccaagtacctcaccttgggccgcccctgtcctgttcgaggagaagaaagatggcactaggagaatgtgcatcgattaccgagctctgaatgaagtcacaatcaagaacaagtacaccc

SEQ ID NO: 80527 - DNA, 414 bp, Zea Mays
gtttgtttggatgttggtatgttgttttcttccccattggtttgggttttgcggcgtgttaatacatgccctatgaggctcataggactggccattcctttctatccttctgggggccggaaagtactcactctcacggttttggtagattatattatggtgctggtgtatcgtatggtgatatggggagtctagctgggacggatacggagttggatatccatcctcctcaaaaaactctttgccggaccgtccggttaaatacgcggatcatccggctccgtgcgcggactgtccggccatgtggctggaccatccgacattatattcggactgtctggcgccatatgtagacggtccgaatgggttatctagggtttgcacggcatgtggcggcttgggtgcaggtctcgg

SEQ ID NO: 80528 - DNA, 599 bp, Zea Mays
tgatctcatcaagaatgtactttacttctttagaatcctaaactaatgtgccaatgggggctgagagcaagtccatgatgcactggagctgaacaaagatgtcagtcagcccggatgattgattagtggtttccacgatggtcgagcccgccgaggcagggtcaaatgatagcaggtctaaaaaggttgtaccccttataaggaagacattagttaatgtcagaaaaggggggagacacatatgacttgaggaacatgatgtaccttttttgggattggattaacggtcggctcggggacaaccgattcatgcaagtcctgaaggacgattagggtgtcgatgatctcagctaagatatcaatagcttctaggggagagtgccattggaatgcatgttcctccccactggatgcttcaaggatgatggtctgggaagcatgtgaactgcagttaccaggaatgtgcgagcatcgaatatgggatacagaaagggtgcatacttgatgtgcattcagggcttcttggttaggggacgatgatcgtgcctctttgagaaccttcttggcaaccactttcctcaccttggtttggacccgag

SEQ ID NO: 80529 - DNA, 1369 bp, Zea Mays
gttgagatgtctaaaattgacacaaaaacgccatgattgatcctttttccgcactaacaagaccggactggagaacagactgttactatgctgaattgtgccagacgcaagcatatcattgacttgtcgttcgatttcatctttgacagccagggcataacagtatggcctaatgagcactggctggtaaccttgaattagaggaattgagtgatcacaagaacgtgaaggaggtagaccttgcagaatatcaaacactggttggaaactctgcaatactttagaaattctaggatcaagatcccccattgccgagtcgctgtccatagcatgcaataaatagaccacatggaacaagtctagactgtatgtatattgacatttgccttgaagtaccacagtatggcccttgtagggaattgacaaccatttttctatccaattaattttcatgggactaaattgttcaagccagtccatgcccaacactgcatcataagtctgtaggggaaacacccggaaatcaataaataatgtatagccctaaactgaccatggaatggagctaaaaaattgggaacaagaaacattgcctccatcggccacttggactgtcacaggatgaggtagaggagatataccagagagcttcccagctaatgttgaactaacaaatgaatgtgagatgcctgaatctactaacagaacaataggatgcccttggcatttgcccgagaattgtatagtctggcgcgaaggaatccctaaaactgcagacagtgagagagacaatagcccgcctggtggtgagagcccagtatccacttcgttagtgcttggcttttcttcaattaattcccacaattcttccagggcatgaagttggactattggtgcacaacgatgtcccagcacccatttgtcagcacaccggtcacataacccacgagctctgcgataagccttcaatgatgcaagtttatcatccatctgacgagagcgaggcagggaattcagcttgccagaattagccaccaacacttcagtttgtgggggtcggggcaggggcagcggagaataagttggtcttgtggaaagatgtggatataaacttgcgatgatctgctcgccctggctccaagacttcctcctgcaattgggcaagagcacaagcagtatcgagagtcgaaggtcactgtaacaagacaacagacttgatatgatcttttaagccatcaataaatcgcatagtgtagaagcgagggtcggtgtgagactcataagccaatagctgatccactattcctgagaattgttcaatataagctgctatggtggtggattgtttgatgtggaaaagttgtctaat

SEQ ID NO: 80530 - DNA, 566 bp, Zea Mays
ctgacctaagaactcgggaagcttgggctcatggttaccatagtaaaaccagcgtgtgctagtactaatgggagaattttaaggtgcaatgaaggtattatcgattagcatggagctgaacaccaatgccccaaccattacaggacagtccttgtttgggcaagagcacaaaataagaaatatagaaacagagggaaaaagggagaaattccaagataaggttcacagggatgggcaaagatttcaatataaggaacatatttgggattcaaatgaacaagctcaatttggtagtaatggagaagatctcagaagaatttcaacgtaggaagcctaaatcaatgtatcaagaaggtggcaaagacaacaatttcatcggcattagacatcagatagtattacttacccaacacctgccattgaatgatcttcttgtcctacaaaaaacgtgctatgtgaagagcccacaaatcataggtctcgattgaggaagctttgaattcttgtgggtgtgcatcgactattagagcagattaggaaattggcggtggcagaagagagtttag

SEQ ID NO: 80531 - DNA, 478 bp, Zea Mays
caagattcaatgtcaaaactttgatgctctgtgctatactgaactccctgactccctgtgaactttctgaggccatctgtcttacaagttacaacttccacccaatgcttaacaaatcctaggtggcatgcatacttgaatcgtacttgcgttattgcatgcatttggaatttaaattggcctcttctttcaatataggaccataaatgagctagtgtgctatgtatgttcactgtaccaaagtgtgaccaggctggtttttaggtggaaaagagtggcataacccaaaatgtggtggcctctgtagtatgcttttgcttacgtatgtgctacttgttgggagagctcagcacatgatgctgtggtttcttctggtgccaggatatggcctaatggtgttatctcattaggtagtctctagtaagtaattactccaacctaattaagatggactttctgcttaccagtcaaatttttg

SEQ ID NO: 80532 - DNA, 878 bp, Zea Mays
cggagaatcaaaggaacatcgcgttcccgacgattggtggcggtctagttcaatcggatgagtcgacgagcatcatgggtatgtgagatcactcaaacgagggagcagaaggtttgaactgacctcaattgcactggccacggcgagggtgttcatgcggtgggatgaaccgatttggggaaaactcgaaattcgtgagctctagcgaacgattgagggtgggagcgggtgctttggtttcgtgatgacatagcgcagctaacccagccttcaatttatagagggcttaagtggtggtgctcaatttggccgagcagtgctggcggccggaggggagaaagagtactggcgcaacgaaacaggtggctttcaccgtggcggctcctccggcgatcaccggacgtgcatagcacggttagccgcgacgtggtaaagcgtttggacacgcggcggatggcagggatgactcaacggcggtgagatcttatctgatcgacgatgagcaaaggggaaaagtgtgtcggctagccggattggtgtccagctccacggcggcaatgatttttctaccccacgacgttatccatttaccctgggcacgaatcgagacgccggcggcacgaattgcggtgaagagatcatcggcggcgaggttctgaaccttatcctcccggggcactgtaccatggcgaggatcattcagtgcacctgatagccaaagtttagggcgaattttctctcaattttatgtagtaacatgatcatcaccctgtagcaaagttatagctctaagatccagctacaatattgttatagcaatcctaagcaaattcttgctcgatcatgtttgaattcatgcccaaagtcactgcagttgc

SEQ ID NO: 80533 - DNA, 843 bp, Zea Mays
cacggcgcgatatttctgaagacggtgaacagtgcgccagattcagtaaaaagcttgtttgacagaccaagttggagcttgattttctcccagattcctgtggtaacacaagtcaatctttgcagcaaacttgtagagcattataccaactacatctttgctatatggtgttgtcacaaaagccagcagatcaggcataaacttgggcttgaagttgatgtcagtctactgtcagcctgattttcagacttaatcagcctgacagcccatctttggttgaaattttctccaatttcttctcaataactatgcttacactcttaagcaaagttgttctcctttgttagatctacaaatttggtgtggtgaactagggcaaattattattaatttgaaagatacaagggctcaaagttgaagcaatcacactgaaattcagacttcatcacatgagtcaagtgtggctcttttgcacttaagtccaaatctcagggtttggcttgtaaatcttcccaaatgtgaaccatgtgactttatatattttaatattgtagtttttacactttagtccaaatgtgcacaatttttgcacataggcccctagggttttgatttagggttttccagggttctaattgaggtttttggtatcccaggggtataaatgtgattcaagttcattcttgggaacattttatgactattcccctaaagcctttaggttttctccacttgggttatgttttacccctttaatccctatttagggttaagttccctatccagggttctatttgcaaaacactaaaacaatacaacttgtttgaaatttttgcctagtga

SEQ ID NO: 80534 - DNA, 458 bp, Zea Mays
cagcacagcagtaggcttgacgacgaacaagatgaggaaacacgagactggaactgaaactgctttgattctctgccgcggttttccaaatctgctcctcgtctgtttccaaccgcaaaaatatgcacctacatcaatgcatccgtccaattgtctttattccatttcatttcaagcccatcatccactttctcagatgcatacgactcccgcggccccggcctccggtgcataaattgtgttaggcccgccaatggcccaccatcctccctcgtttcctggctgcccgcctgcctgtttcagaagaaaaaaatatcggcaccgcgtcctgtagggattgaaacgggacaggtatattaaatatgggtaacaaaataacctgaattttttgacacagacatagatatttttgttatcgagacagattactacccgaataatatacatctagatatgaa

SEQ ID NO: 80535 - DNA, 600 bp, Zea Mays
ctcagttattcatgagaataactaagtcattgtacttatcggtgtcagtcattgtcattaaataaaaatttaaaaaatatataataaatgtggtctagttttgctcaaaaaagttcttagaaacacaaatatgaaatcgatccagtgattaatttttttaattagaagatattacgagaaataggctacaaaaagttcgcgtgcctgcctgcctgcatcagcttgcatgcaggagcttcacgagtgctgtgctggatgcatgcgtgagctgcaagcggcacctggtgccaaataactattttgcatttagggtaccaaatagtactaccgtgtgtgtctatatgggagccaagggaatggagaggattggatgggaacgtaaccaagtcgaactgcatctttacaagtgttttttcttatctatctagtttttgtcatatcttttaggacctagattatatctcctgacttgttaagatctttgccgtcatatctcctaacttgtaagatctttgccatgtttatcgtttaggagaggctctcggtagtaagacttcattctagtcctcgggcccttagccgagccaatggatctatctt

SEQ ID NO: 80536 - DNA, 369 bp, Zea Mays
ctccgatagtggtgatgattttttgattcatagtcttcggttgatgacgatgacttaggtattttcacaaaaatggacgagtcatctaacaaagacttaaacttttttatcgcgatggacatcatgatatcgtacgctttcggggcagctaggggcccttccatttttgaagcggacaaggtgtgtcgaactcgtgttggcgcctctgacagtacgtccctttcgtgggtagatgtttctggtccgtcgacccgaaggcgtggtggtgttcgacgcacggagtttttggtctagttgatcctgtgtcggggagggagttgcgccttagtgctagcgaactcggtgatgtagattttgggccccgtcagg

SEQ ID NO: 80537 - DNA, 679 bp, Zea Mays
aacggtttaaggagcaccataaaaactgcaagcgcatttctctagggaatttcgacaaatagctcgcctacgtgtgttgcttcggactcagtagatgacaaacttgggtgctctgtttcgcacagaagggaaggaatggaaccataccgtgctcgctgtcggcgaagggaccatgaatagcttggtaattggcggtttggtgtagggtggccgtagcccagtcgacgccgacagcgagcgagtgtgcgcgaggtgaaggcatgaagagggagtgagattgggagaaggcaagaggggatactaactcgatccggctattcaccgtgagcgatagggatggcaatttaatccgtcgatttggatatccgtcggatatccgacccgacggatcaggatatggatatgttttttgacccgcgggttagacccgtatccgatccgagataaagtggacatggatttgaatattaaatctcatccgcggataatccgttggatatccgaaattaaccattagtccattattgtcggcccacacatggacaccaatgaacaaatcgctaacccacctttgtccattgagcccagccgccaggcaccagcccaccaaagcaccattcagcggttcagccaaatgccaaacgcccaaaccagcaaagggcaaaccctaatctccatc

SEQ ID NO: 80538 - DNA, 348 bp, Zea Mays
cagtagttgcttacggtattttagtaattagagtttagtttgctaccatgtggctttgaagtgtcttatgttgctttctgtcatgctcatacatatctatcatgctaccatctcatttaatgatcgtgcaaaatgaaggacgtggagtggagctgagcactagaagaagtcggtggacatccgaagggcaggtaaaacaagcgccatgataggagatgttcaccaagcgagtaccctctagcaaacattgacatagtgtggattccaagcaagccccagttctgtgcataacctattatatgttgttttattgcaatattatttgtaggcttcttttgtgcatttaag

SEQ ID NO: 80539 - DNA, 328 bp, Zea Mays
gttcagttggtggaaggacccaaacggatagattttgccctagtgcaaaggttcaaataatgggggatagagttccccgctgatttaatagttatgggtaaccaggatacaactatagatgtcatcctagggatgaattggctaaccaagtatcaagccagtcttagttgtgataagagaatggtgaagttagtgtccttattaggagaagaagtgttagtgcagttgatcttgtcaggaccaaggaaagggagttgtcaccaagtcaccgcccatattgaggagattaacccatcagaggttatcaatgtagtatcagaaattccag

SEQ ID NO: 80540 - DNA, 461 bp, Zea Mays
caggaactatcatggagcaatggacacgaatggcttggaatgcctattagcaaagctacctggtggccagttaatttcttctcggactgccaggtatgtaagagctttacttgttatccccatctgggatctaagcaggagggaagtggaacgaattccagttctgatggttgatacttgagggcaacaaatagttgaactggataattgttgtgccaataggttattcgtttttgcaacaataaggtctggaggtgctaggtaccatttctgttagttcagacttcagactgcaatttcatgtattcgttatatctgagcttttatcaggtggatccttggcttttcagtctacttatgctaagcaggagtaatgtttattctaagcatgttttcattgtgcgtggtggtccaccggcgcaacaagtattaactgcagccttacgcctgtttggaactgc

SEQ ID NO: 80541 - DNA, 1013 bp, Zea Mays
taaagccctcgcaaaacgattcaggtctagaatgctcaatccccctttgcactttggtaaacaagtagtagaccagttgatcagacagtgacccccgttgcatgattctggattacttcctttccagaggaaacttcttcttatcttatcaatttttttcaatagccatttttgagccgggaagaccgtcagatgataaataggttgcgcggataacacagatttaactaatgtctctctacctgcctttgagagaagccttcctttccatcctgcgagccttttattgattttatcaactaaaggttgtagctcaattcttttagcggttctgaagtgaagggggagacccaggtacttcccgggtaacttagcgattttactggggaagacttctacaagatttggccacagctcctccgggtaacgaattggaaaaatttctgttttatcgaagtttatcttcagccctgaacacccttcgaaagtctctagaatcgattttagaactttgagatcttctttatccgctctaaaaaacacccctgcatcgtctgcgtatagggaacatcgaagctttgcccctcttggcaggacccgccccagtaacccagcctcaactgccctctcaatcatcctctgaagaggatccattgctaatatgaatagaaaaggggaaaggggtccccctgcctcacaccacgcctgtggtaaatcttgtctgattgttgaccattgatggtgactctggaggtagaagaaccaagaattgcggcgatccaattacgccacctttgggggaatccccgggcttttagcacatcgagaaggtaagcccaatttagggaatcgttggatacatcaagcttaacaaacagagccgactggctgtttttatgaagtttcctgatcaccctttgaatatataggaagttatcgtgaattgatcgtttctgaatgaaggcgttctgagcagtagatacgatctcgttcattcgcggtgcaagcctgtt

SEQ ID NO: 80542 - DNA, 619 bp, Zea Mays
gtagaacagagaagctttattgataaggaaaccttttgtttacaaagtatggcttgccaaccggagttttgatgtactgctaggagtagaatttcctaaggtgttcaatattccatgagtttcccactttggttccgtccatctgggtaagttggtaggatcatgggtgggtgacctctacaatgatgaatggtccttcccatggaggtgacaatttgtgtcacccttctcctgtcagcactcgacggagcactaggtcccctactgcgaaggatcaatgccgcactgctttgtcgtggtagcgcctcagagtttgctggtacctagccgattgaatgacatcgttcatacgttcttcttctaatatatcaacatcctctagtctggttgcttcttctttagctatactttcaaatgttagcctgggtgctccaaatatcaaatccgctggcaacactgcttctgatcaatataccatgaagaacgaagtgtttccatgtagttctcaggcttggttgggttcgcaggctccaaactacatatggtagttctctgatccattttcctgcaaacttttcgctcttatcgaacacctttttcctgagtgcatcaagtatca

SEQ ID NO: 80543 - DNA, 668 bp, Zea Mays
tgaaaatcttaatcaaggatagagttaaggcaagactcgcaaagtgacaaagtggagaaaacaatcaaggaatagataagtgaggttccgacagaggagttgaagtaaaaatttattaccgaaagaagttacaaggaattaacgagatcaccaaggatgtgcgaaataaaatgaatgctcatggatcatcgagacacaagggtggtcaagggcatgttaactgaaatgtctcaaacagatattgggatataaagataagcatatataaaaataagagtatgcaagattccaatggtacgagcatacgaagaccaagagagtacaaattgccaaaaagataacgacttaacaatagaatatgaaagggtctcaaaagacagtaagatcatggacatataaactgaaatgtttaaataggcagtaaaaatttagaggcaagtatttgaaacaagagaattgaagaattcagagatatgagtatgtcaataccgaaggactagagtttgccaaatgatacaatttaatgacgaaagaggaaataatcccaaaagacaagaaggttatggtctgggggcatctacaaagatgtcgcaagcacaagagtgagatcagttctaatagattgagagaagtatagaccatactagaataaaatacttttggcaagg

SEQ ID NO: 80544 - DNA, 455 bp, Zea Mays
cccagatgaagacattgagcctaacaatagcgttaggagtcagatgatgaagatatatttcaaagttctttaggacttcccctatcatctcgttcagaggaaatcgcagtcctgctctgaagaagctcttaaaaaccacaacttcatccttcttcggctctggggtagtttcttcttcgacaaatcgaacaagtttgctttcagcttctccaaaatagtccagtctcatcatcattggcatgtcgtcttcggacacagtagatttctcaaaatctagatgactgggctttgttgggatcaaaatactgtaatcttcttcactctcatcaacattttcttcttcaacaacagtttgctcagcttcggcattaggagcaccttcgtcaacaactcgctctatcacaactagacctaatcgttccattacttctgaaattggtgctgtttcagtggcc

SEQ ID NO: 80545 - DNA, 342 bp, Zea Mays
cctttctagttttattagtgcccaataaaacattttaccttgaatttattctggactagggttccttttatttttcctaggttctttattacttaagtggactaggaaaaatatttgcatccactgttcattatattccagtgcctttcccattttcctaagttttgggcaaatgtggcctttaataagtaacattgtctaactctttaatactggggtgcttactatttttaaacagtgcctaagtgaggtttacacttctacaaattttcttaagttcagcacaaaagcataactaattttctttattttaataaggtttggtcaatttccttaattaat

SEQ ID NO: 80546 - DNA, 395 bp, Zea Mays
aaaaaaattagggggggggttaggagattagggttctaaaccttggttgaaaatttgggatgttacaacacgtgcttcataactcttgtgaggcatggctaccccaacaccatatgctctagcaccatatgtttcactttcagcaccatatgttttagcaccatatgttccagcatcacctcccctatcatactatgcaccaactcttcttttcctttgtcttgtctagttcaccagcaaataatttctttacttcaggagaaatggatggacaattcttgacatccttccctgaatgtggtaaatgcttattgaaacgagtagcaccgccaccaatcttttcttcatgacaatacttacacctgaaaccagaatcaatcttctctccatgctcc

SEQ ID NO: 80547 - DNA, 762 bp, Zea Mays
gtaatgttagaatcaaagtcaatgaccatataagagaaaattttcagacttacaaaggcttgagacaaaggatcctctttctccgattctgtttaacagtagtggatatgctgtctattctggttaatatggcaaaaaatgatggacaatttgaaggtcttatcccgcacctggttgacggtggtttatccattctgcaatatgcagatgacaccttgttgtttctagatcatgacttggccaaggcatataacttaaagcttttcttgttagcctttgaactagtgtcgggtttaaagattaattatcataagagagagttgttttgttttggccgggcggagaatgaggaagacagttatatttgcctatttggatgcaaaaagggggtataccctctcaagtatcttgtaatcccaatgcattttaggaaattaagtaatattgactggaaagtagtggaagacaaaattgaaaggaaattaagtagctggaaagggaaactgatgtcggttggaggtcgtctagttgtgctaaattctgttgtaacaagtttggtaatgttcatgttgtcttttttcgaggtcccaaagggagtcctagaaaaaatagactactttagatcacggttcttctggcaaggtagtgatcacaaaaagaaatatagacttgctaaatgggaaattctttgccagccaaaagaagtagggggtttgggtattcagaatatagacgtccaaaacaagtgtctgctaagtaaat

SEQ ID NO: 80548 - DNA, 498 bp, Zea Mays
tttgacatagagagtgggaatgaaggtgccgaagatcgaccctggcgaccgagtcatactatcttcgggagatcaaccatcaaacaaagtcaaattgatgcaatgaagggaaggtacttccgtgatatttctattgtgagggctagggagatagcaatgcccctttgcccgaagctgacgaagtagtcatttacagaagcttcatgaaagcgggacttcggttccctttagataaattgttagttgaagttttgaagacttttgaaatattccttcatcaactcacccgaggctattgtcagaatggagatttttatttgggccatgacgagctaggggttagaaccaaatgcaagatgttttgcaatattcacaaactgtcatacgagacgaaggccactggcaaagaacaatatcacaataattttggttgctacagcttcgtgtctcgctctgatgtgagctatccagttccaacatttcgaaagaggtggccag

SEQ ID NO: 80549 - DNA, 612 bp, Zea Mays
gggcggagaacctattgtggcctagtatagcttgggccatacctaagtttgagaaatacacatcaattctaaggtagtatatatctgtacacctgttttaggattatattagtccctttctataagtgtgtagaaactactcaatgttgaagtgttctggtggttgtctctgaacaatagtgttctcacttacggaaacttaggaatggcaaaaaagatacttttttaggaaatagtatagatcattatttttttaattgtcccactacttagatctgtgtatagtgtagttaattgtgtttttgcgcataaattacacgtacgaatgtgcatcaacgatttagtatatgttgtgcgtttttgttcaacaatttgattgattgtatgctaaatactacacagcgtagagccatacctaaacttttttcgtccttcgccactgcctgcatcatggcagactatgagtctgttagtgagctgctcgcgcgggcatctggttttgagatgcatcactcggaagccttttaggattggtacaaaaagttgatcgcctacacatagactcaagaagaagaagatggagactcagttgatgaggacgaggttgtggca

SEQ ID NO: 80550 - DNA, 573 bp, Zea Mays
ccgagccgttcgcgttcagatctacggccatcactttgccatatgaagcgatatcctccctttaattccggccggccagttgccatcctacggttgacggcacacggccatcgtcgagcagtagcggcggtgccgcgcctctcctacacggtggcaccattgccggaaaatgcaatccagcaatcctagccgccaagcttaaatctaatgcatcctatcgcatgtacgagtggtttcgaaacaacgtatgaacacgtaccggcccacggcgatccgagtaatcccgaccacggcgttgtggggaagatgcgcgacgttgagcaattccgcggtctccgtcaaccaatcacgcacaccgaggccgccgataccttccctgtgatccgaggaaacccccagacacgatgttgaggcagtggcagcgaggaacgctaggtctactctgccgactctctcacctcacccgcggcggcgaaattttccaacggcggcggcgcacggggtaagggtttgcttgctggctcacacgtgagtcaacaggagaagccgcaagcgcccgtggctttatttccc

SEQ ID NO: 80551 - DNA, 483 bp, Zea Mays
ggggctgaatctaggtgtgcacagatgtgtgatcaactcatagtattagatacatgtcttcagttgaatatatttctctgtacctgtatcctgtgggataaccattcaaaaacgagcagagtatttaatatagtatcaatatgtggatgttttccatgcatgctgctaaaccagctgtacatttaactcttctttcatatacaaactgtagattgaaaaaatgtgaaaattaatgtttccttgatatataattgcaatggatggaatgtaacatgaattaaatgaggtagcatggcaaactgtggttttgagaagttgtcctaatgggccatacatccagttcccatgaccatgattaaactgagatattcatatcataataactagtaactcctggttaaaccttttctatcaagttgtggcaaaagcacaagtgtattattgcactggcatggtctatcaagagggggggttagacctgag

SEQ ID NO: 80552 - DNA, 1338 bp, Zea Mays
aatagattgaacaactaaatttttcctagatagctctaaagatttaatcaggtttaaattttccacagcatcattaaaagaagaacctaaatcaactccaattttgtgagccacatccatgagcacagcattatcagtattcaaaatagagaaaggattgtaggacgtacctttgttgatgaaagcatctttggcaatagctcttgcagcagctttatcagcaattttcatttcctcagaagattccagtctgctgctccttctaacaccttctgccacctcaccttccataggtcctccttttttagcaccagcaatcttgctaggctcctcagcagtactaagatgcaatttctttttctcttgggcaggggaaggaataaattcatcatccttgatgaattcatccaactcctgagaatccaacaaatcatcttcactatcattgaattcctcatcctcattaccctgactatcaaggtaacctttagttccttcggaacctttccccattttcatactttcagattgttcagacaaggatcctgcaacattggcatgactggaggataattttaagggagattttcccttaacatccttaccagaatcctcatccccacttttggcctttttagcatatttgccaagagagatgtcaccaaacccttgtctatcaaccgaagccctcttatccagattaacagaatcatcattccacccttcatcagtaatgttgtcaattttaaagaaaatgtcatacagaaaaggtttgaccccaacttcaatgatgggggggatcatagcaacactcttcacatgaactttgaacctcacaatttctttagagtttaaagagttaatatccacttcttccactgccccaatagtggaacccaattcacaaatggcctggtaattttgaagctcttccggcacattctcagccacaatccacactgaatgcagttttgacttaggcttagcccgagaactccaagaagaaacagaaattttggcactagacaacttcattttcaattcagggaaattaatcatctcatccaacctctcttgagaggggaattgcatgaggaagccagaatggcacttagtaactttccaagtgcggcccgaaggaaagtgaaaaccgaaatccttctcaagatcctcggccgtgatcaaaccctcaacgattttaaccaagccaataaaactgcgtttaggtttgttggataatggcttggcgaaatgagaagagtaaaaccctagcccatctgccgccataccaacactaggcatactgggtttattctgtttgggaagaacacactaagc

SEQ ID NO: 80553 - DNA, 546 bp, Zea Mays
gtccgtggaggagcagtagccctgagcgaagtttaggtgcggaccatgattggtgcgccgccagataacggcggtgtcgtgtactggtccgggctgtgtgcacgtcggtggatcaacgggagagagagagaacactggcgagggcacgacgtctgtgcatgggcggccggaggttgaagaagaatggcagatcattgatctcatctccaacggtcatgattagatggatggttgagagtgtgggaaccgtagatcttagatggacgacctagattgaaccttggcgtaccccttcgagtcattaaaccagggtcgtgaattccggatccgacggctagggttgagcgcacatgaataactagcgtgaagtctaatctggcgcgcagatgttgaatccgacggtccatgatccacgataccccttcgctggccctttttgcgcataagcccctagagatactggatatcaacctgtcgtccggggttgcagtgctctaagtctcaacttcttttacgcccgagtccctgtgttttctagaaattggc

SEQ ID NO: 80554 - DNA, 443 bp, Zea Mays
tcagaatgctttgagacacttgctctggcttcgcaactcggtgctaccttcgtctgcgcgaaattttcaatttgatcggggcaatgtcaggagaagcgaattattctgccgatgatattccaaaggcgcttgagtttgtggaaaaagaaatcaatgaatttgacgaagtgatggtggggcatggagatttttcagctctagtggccgccgaggaactgctactatatttgcaaaagctgggtgtaagcatttgaaaaatgttaacaaccccaccttcactatttccacggttgaccttgagactattccaagcaaggctcgaagcatgggtaacagatttattacacaaatctagacaaagggtgtatgagagctagttggaaacgaagctcgggctctccttgacgaagtatgaaaacgtccttagtccccctctgttttct

SEQ ID NO: 80555 - DNA, 630 bp, Zea Mays
cttgactaaaagaggtcgccacaatgtggagtaggcattgaccgaaccacagtaaaaatcgttgtgtcttttgtccattttatttattgtgattactgtcttcttgagttctctactcacttgcaatattgctcctaagtttaatactcatcctaaaggagcaatgaagtgaagagttctccttttcctttctcttctcatcctaaattggttttagttctcactaacatatattataaaccaagtttgtgttgtttagagttatgttcgtaggatcacctattcaaccccccgtctagctctaggtgttctcagaagccaaaaggcctgcccagaagaagctcttatacaccatgactttcagcttaggaaaacttccttccctgacaaaacaaattaaattttcatcatcaatatatccaagccttttcaaaaccttttacatgttgggatttatgagatattgcaccatgtcagtataactaggcttggatggatgaaggtcatactcttcttccccggcaacatcatccccagtagcagagacattatcctataaatcctccccttcttcgactgctttatcagtctcccccttcttcgtcaagtttctatctttttcaaatcctc

SEQ ID NO: 80556 - DNA, 1143 bp, Zea Mays
tttatccgcataatataccataccagccattcagatgcgccaagaaaacaaggtgttgaattgcatatgtttgagccatgtaaacactcagattagacttgcttcttttcgaacacataccgcatcatattgcctaaatagcatataagcatgcaaaaaggaatctttttctaggcacaatcggattaaaaaaggtgaaaacagaaaagagatgacgactggatgaaattggaactaacaaagttagagaatccatgcgcacaagtaaataggacaaacaagaaagagacgatcatatgttgattgtgatgtgcacttgtagttcagaccaatagcaatagggatatgcatgttcatgtaccatgctgtgcctatgtctgtgtgcggtgcacagcaggatcaagaaagaccatcctgcaaaagcatttacaatagtcagtggccgcccatccatcatgataccatgaccggaatatttgacttgcaattttcttccctcctttacttgtctagtataaactgcaaacattttagttttccgacatacataacttttgatgcgatatacacgagggccaaagcaaacattacatcatcttgcatattgtggtgattcatcatattccatagtgcagaaactcaccactaaaaaggtaaacagttctcccaacagatgcactcagctgacattgtagactataaaatatatacaatctctggtcagctactcacctggattctgtttgttgactgttggttgcacaagtgctcttgcaagaatgaacccaaaaaaaatcaggggtcaaatatctctctgccctggatacacttgtacagaaagagaagggaagaaaaagataagagcaatcctggattccatattctgttttataggttcccaaaaggccactgttgtttcataaagaagggcactttctcatcttcttaaccagaaatgaaatgaccgaggagaaggttattccttttgggtacactcaagagataccaacatcatccatgctggagctccaatgtgattctcacaagtcacaacaagggccaaagtaagtatatagcagcattcattatgccacggtgcaaaaacacaccattcaaaaggtaaacaattttctccaacacaag

SEQ ID NO: 80557 - DNA, 611 bp, Zea Mays
gagacttcggtgctgaggtccccgtgactggatttgaccggccccgtgagttagtaagggcgagggcatatctaagggtgcacgtggggtgtaccatcagtttgtcagaaaccttttggtatcgtacgtacggtctagtcgtggtttggtgatgatgtgtcttgtggcagccgccgtgggctagcaacgtcggcctaggttccttccttatgggtccgttggcggaaacttggtcattcttcccatctcaaaacttgctcggcggagacatggtcgctcgccctgcctcacagacttgctcggctgggacttggtcgttcagcctgcctcgagactcgcttggcggggactttggtcgttcgcccctcctcgcagacttgctcggcaaatgggctggagagaggttatgggcctcactttggtcactccgttcctaggtacccgacagtgcatatgccacaaatgcaaaaatatcttatgccataacaagaatcaggtcacacaagacctatacacccacaattttgtgccagtctatgaggtctagtatctccatggagagtctcacataaaagagtgacacaactagaagttgatgacaatgaatatgt

SEQ ID NO: 80558 - DNA, 364 bp, Zea Mays
tactgagtaccatccatctaggttagccaatatgatctgggtcgagttacttctgtaatcatgaaaggtccttcccatggtggtgattacttgtgtcgtccctctcgtgactgtatgcggtggagcaccaggtctcctactgtgaatgtacagtgtcgtacaactttttcatggtagcgcctcaaggtttactgatatctaaccgactgtgtgacaactttcaagcattcctcttctagtctatcaatctcctcaagtcgagttgcttctgcctatgtgatgcttttgaaggttaatctgggtgccccgaaggccaagtctgctggcaacactgtctccgatctgtacaccataaagaaatgag

SEQ ID NO: 80559 - DNA, 365 bp, Zea Mays
cacggcgtagttggtggccgaggaagagctcgagcgaggcagagaactcgctcgagggctaggcttgatgtcgggcgaggcgaagaaattgcctgaaggctggacacggggttgggcgaggcggagaagttatgcccgcaggctagattcttcttcaggcgaggcgaagagattgcgcccgaaggacccgtccgctcggcttgtcgtattaggcatcccatcggaaggtgttagtgcgcgtactattttgtgtaggtgtaatcatactgcagcgccaaacatgatcgctgtcgtgttcgccactgtgctctgctgccacagcgcgggttgacacacacattaaatgcgtctgttccctgcctatt

SEQ ID NO: 80560 - DNA, 433 bp, Zea Mays
gttgtatcctagcaatgataagtgggtcgagtcacctggttgtgtggtacggattggtgttactggaggggcatcaactttggcccatagaataggcaagcttgagtgtagcgagaaggagctagttcgtcgattgttgtaatcaagcaaactctcgaaaaatcctatgactttggtgggccaccttttgaaatctgaacctttggagccatgatttctgggtgcccgtcaaatgactgcgacgtgttcgacgcatttttgcccgtcaaatgattgtgacgtgttcgacgcaattttttgtgtttctgttgagcacgttgcagtcaccatggtagcaagctccgaccatggctcctgatgcccaatgttgctcaattgaatttaaaccgggctttgtgactcctcaccgattgatgttgcaggtaggatctgc

SEQ ID NO: 80561 - DNA, 433 bp, Zea Mays
ggggtccaccagccgaagcggagccttccacttcttctacatggcctcttggcggtccttatccatcactgctgacacaacaacaccaatgcttctttcgtaaggaaagatttttaactcacgagccatatgagacgtaaaatagtcatcgtcggcggccaagggaataggatccttcctatgccaccgacccccggtcacctttaacatttgtgaagatgtttcccggagttcgagcaaagtcataacctccccaggcccagcgcatgtccccgtcaattcctcaacgaaaaatctagaggcctttggccccgttgtttccctcttcgtacctttcacctctatcttccgagtcaccgcaatcacaacctttcccttctaggtgccctctacagaccgggttttcaccttttcccctcggtcgtccccagca

SEQ ID NO: 80562 - DNA, 1129 bp, Zea Mays
agcgcaagggcgatgccttgctttgtttccacttggtggatccgatctatcatggttagtctttggtttgtcaaagatctatttaatatccgcatgactaggccttgcatgagagttggatgttctggtaatgtgccagacacttttcgttggtttgagcagggattgttctgggagtcggctcatgccggttcttaggcctctaatctaattggcgctcagatgcctgtcacgattgttagtcctaactacgtgtaggatgtttcagttgtgtggtgagactttaaccgtagtgggttgaatccgcctggcgcggacaaagtaggctctcgacagccatcggcttcgtgcgccactgaggcatggatttggtgcgagtacggggagagcgattggcttcttacagtcgatatgacccgatgagccgaacacggatcggaataatgcttgcatgtgtttgtgtatgtagggaacctactcggagcacgtcaacaccttcgtgatcaggtataggtcaggtggcatgtcgggcgaaccttgaagcccggtcgtacgctaggatctgggctgttgaccaaggtactggggcccactagccgtctcaggagcctcctagctcctcgtgttgcttgtcatctctcgccagtgggtttcgggtggcaacacattttggcacacccggtgggacttctatgtcagcatcttcaacatcaattggccaaatggcaaaccctcagacaaacactcctggactggtgcaagactggcccatcatgtatgcagagctgcctccataacaccaagcgaactatggctcttttcgaagccgacctcatcagctcatttgagaggacccgcaaccatggcatccgatggaaggggttcttgcctaagggcactgtcaacgaggtgggtctctcggtgccctcaaaagagcgcaccaaggctctgcgtcaggaagtcaactatatggtgtctcattcgctccattgccactcttagagtttgatgaatgcattcgaacgtgtggcaatagtactcttaaacacgctcggttctaggaagtcacaaaggggaaatccctttctgaaccaggcggcccctgccatattcagtcgcctccctagag

SEQ ID NO: 80563 - DNA, 719 bp, Zea Mays
gcgctaggctggcatccttgcccgtgaggccacccccgtcagcagcaagaagagcttgacgcccttgttgtaagctcgatcgagtttacaacgacatcgagcagaaacaccttgaggtcgaatggccctgggcgaagaggattcatgaccaacttgccaagacaatgacaaggcacaatacttcctcaaccccagacaaaacatggtagcaatagccatgatgcttcggtccatccccaagcctaacgaaccagaggcgaaggcgatgtatcgaaacctccgcaacctagcgaagagagctgttgtgcagcaagccaaaattgatcagcagatgcccctcggcacagaaagttatgacccacaaacggccttatcctggagcaggggggcacaagcctcccaatccatgagggcgcacattcctttgaaggatcaccttgggggcatacgcaacacccgacacatcatcgacaatcagtgtcaggagcaggaggaagttgagcagtcgcatgaaaggaggcacaagagaatccctagcccactcaggccgaggccacgcgccttcgaatgcgcgatccgcaaggcactattccctgtgaaggtaaggacaccgaccaacatttccaagtacgatgggtcttcaaaccccgatgtatggttggaatattaccacctcgctcgctgcatggcagaaatcagggatgaccacttcatcatca

SEQ ID NO: 80564 - DNA, 973 bp, Zea Mays
caagctaacaggccagctaatagtcagcaagccatagcttcggtttggtctcccctgagtattggtgatagtagtcggcgcttggaaccgagccaggaacggtgccctacagatggctcagctaaagacttgcgaactcagtggctcgggagaggggcttcaatcttccccactatcgtagcgaccaccccaccgagggtggtagcggtgtgtggtgtgttttctgtcgttgtggtgtagccgtccaccgagacggtcgtgaacaccgtgattctgacggttgtcgaggaggcggtcttgtactgcgggggctctctccctagtgggcttggggtggatcaaggcctccctctctaggagagagggtcctgtccagtgctttaaggagggctcccgaagccaagaggcagatctctcggtctgctagaccgcagcacactctagaagtccccggatctcaccgtggagattggcgtccctcggtggtggatggctccggcatggtgcggagcaagattgctgctgcgacgaggttctaactggccctgtgaaaagccggagggcctttggccttggcatcttccatgatgcgacgatggacgtcacgtaccttgacgtgtgccccctcatcaagagccttgcccggtgcttcccgctcgagaacttgccgaagctattgcagatgttgttgttcctctctgatcttggcgtgcagttcgcggagctgctcgaggtgggccaagtgactccccgaggggtctgagcctcaccctatttccttggttccccagcatgtgggggtggtgcgctgttttcccgaggcatgtcaatttggtccccttcgtcatgctcctcgtgccatccgtggaagcactcctgagttgggtcgtaatcctcctcgccggtgctatagtcatcggagccatcggagagtagttcatcacatgcaaataggaactgcaacatggcctca

SEQ ID NO: 80565 - DNA, 436 bp, Zea Mays
cccccgcagagaagtatctatatcaggtgatgagacggacattgctacccaggatgggatacagagaagccaccacacatattaagttatggctacttggtgccttgatctcacactctgagtttaacgtggttgactttcttatctgtgagatcgaggacacagttttggatggtctccgtgctcgccgtatgcgcattacctctgtcacatcttcgcgcagctaatcaggtcacctcagttccatggcacccttgaggcctcatgcctccagtttggtttatatcgtccagcccctgaggacctgatcccagtgctagatccagtgccagatattcaggctgaggatgaggcgttccgccagttcgagacctagggtacaactactgctgctgctgatgatgatgatgttgatgatgacgactttgggatcctg

SEQ ID NO: 80566 - DNA, 317 bp, Zea Mays
tgtgaaaaaatagaacaaaacgaaatgttacattgtgtaattagttacatggtgaataattttataccaaccccacgaaatcatagtcctgaatagagatggcaatggagacccgatcccccgtggcgaattcttctattagggccagtttaggagccataaatccaaaggagattggacgggctaaaattcccttcttattcaattttgaatgaggagattttagcccctccaatcccctctagtttttagactcccaaactagcccttataggatgaggatggagaggttacttccccgcaggaatgtaaacggg

SEQ ID NO: 80567 - DNA, 467 bp, Zea Mays
tgacatccttgcctagatgaggtccctctcagccgagaacttttacagttcctttgctagtttgcccaagaatgtaatcgttttttatcacaaaagcttgattagttatctcttggtggtttactcgtaaaccttactgcttgtcacatctttgtgttaacatgcttttagtgtctctactagaaagggttgcttcatctttgctttgtggctaaatctaatctgccctagtcatattcttcactgatatatcttcttgtgcttgtcatcaccattgcatctaccgtaaaagaccgatcatatatggttttaaccacttgggatcttgtttgctcaacatgatgctataaaaactaggaagctggttaagtttattgctcatggggtatcaaggtataacactcataatcagtcaaaaaacggttactcttgtctgttttttgtactagtctcgattccaattattc

SEQ ID NO: 80568 - DNA, 863 bp, Zea Mays
cccagattagatttggcttacgctgaataggtacgtgttagtggtcgtcggattcacgatatacggcccagatattatgaagaacgacctaatcctactccttcaccccaaatcagacggcccagatggccccaggatgaaatagtgtcgcgtcatgatcttgcccgtcggttaccaatcaggggcccatgcaccgtcaccttcctccgcatgcctgggcacggcggcgccatcatcggcgacatgccaacccgagttctaattctccaattcacacacagctcgacgctaaacatagagggaagtaaggcaaaatgaatggagcaatcctcaccaatgttgggttgatgacatgtcccacccgcggcgcacgaccatccgtgacaaaggacaaacccctggtgcacaatcccgaccaacgacagccgagacataccttgatgatgccgccagactgagcggaggagcgtgaccgataacgacgcgcccacggtggcgaagcaggagcgtcaggcttccccgtcgaggttgacgatgagcgcccggaagcagagagggcaccatgggaggagatgacaggagtgcacgacgttgtgtggggaggagaccagggcatcgagaggggatgaggcgaccgttttatagggctaggggctagctggccagatcctagtggctgcgggagatctcaaccgaccgacaacagcggtcgcgaacggaggagagggggaagaagatgtcgacccagagtgccccacctgtccatcaccccagcctgagagcttgggccggtcgtatgaccaatggggcccacacgttggtgtcacgccccgggcccgcacgcgaatgtgaggctctgaaac

SEQ ID NO: 80569 - DNA, 415 bp, Zea Mays
gtccttttgaatgaggtcaacaacaaggattgctttttaagcttatttttaagccacaattcagcaggagtaaggaagatcctgggcaatctcaaacctgtgcaaaagctcctttgccaaagccaactaggaagtcacatggccaacctgcctatcactccaactctgtagtctcctctcctagaattttctttaagcttcctttgcaaggtcagataaggacaaggagaaggtccaacagaagtccaagcagcctgtacagtatcaaggaatccctccatgtttggccaaaatgcttgaaagtgaaatcctttctttccatggaaattatcctttagaccgagaagcaggggtcaatgatcagaatcttgggaggcagagctttgaagcagaacattagggaaatatgatgtca

SEQ ID NO: 80570 - DNA, 440 bp, Zea Mays
gtcgaggccacatgaagtatatacatgaacactactactcctttagactatgaaacggttggtagaacaacattcaattcagggtcataagaccaaactcaaaccaagagacttgaaaacaatccatccaagctagtacaaggagttagtttagttttctttagcctacctttctcctaagtagtagttctagttcccctgacttagaacttctaatcttatgtacacccttcatgcaattatccaccatcactaagagacataggatatatattacgcactctatagcctgaacctctataaaatctttatgtattgggcttgtagtatcatgacctagtaggcatactctatggtgccatcactcattccctactcccctagcaatccttccttgtatatatttggtccctggtgtttttgcaaccacacactttgtt

SEQ ID NO: 80571 - DNA, 415 bp, Zea Mays
cgagcggcggagacaaagtcagaacgtggggcatcactgtcaagtggcgacctaggctggctgagctaaaatggaaacctaggtacaaggtagtttggtggactgaggtatggtgcacgtcataataggacataccggaccatccacccttgctgcacgatttgcagcccgatgacgttgtacatggcgacagggcaccgtggtcggacgggggtgaaggccttgtggtggaggagccctagcttgggcttcgagtcgggttcgagcgggtctagcagttgggctcaaaccatcctaattgtttatttgagtggtcaccttatgccctgtttgacacatcttatttcacatcttcacatacttaagtagaagttgtaccaaacaggacgcatctgaagtaacttatcaattcagt

SEQ ID NO: 80572 - DNA, 379 bp, Zea Mays
gatgaaagtacctgacatatctagtggaacaccagatgtacattaaaccaacggtcaactaataggaagttccaacgtctacctaacatggtgtatccggtggcgcatcaaacatatttggtgcattgtgtcatactagcgatttgacaactttatccaatggtcactaattgcatagtgcatcggacctgtttggtgcaccattagacctatccagtgtaccatcggacatatccggtgaaaacacagaatgtcgagtggggttcaaacaactagtttcaagtgtggaacctatatataccccctcaattgccttcaactccatccaagagccaagaaacataagtcacaagttagaggatcatcttctagccatcca

SEQ ID NO: 80573 - DNA, 498 bp, Zea Mays
gttcatgatcaccaatagtacgcatagtattaaggtgctgtcctccttgatttactgtcatcctcgatgcctcaaatatggtctgttcatcaacccacggggccctcaaagctgctggtggagtaattgcatctacagcagtagctgattctgtatgcgtaattccatctgacgctaactggtaccctccttgttgttcttcctgcaccattgttacgatatccaagcattgatttggtcgatgaacagacgtcggcgtcgtatactcacttatggacttgtttccccatggtgccgccatcttccagagcaaatacgcccttcacccagccgcgaactatcaaatgatgcgtactctccactttttttggaagattatgattttttccctgtaccatgcgtatatccaatatcatggacgcgaaattcacggcgcatatccattacccgctgaattttaggatcgtggccgcgctgatcgtgggcgctctgatcggg

SEQ ID NO: 80574 - DNA, 295 bp, Zea Mays
gttaagactgtcacatgttgttgttgtaaaaccgaggcacgacatgttagtatgttcatgttcatctcgctaagttcacatgcatactttttgttgtcaacaaattctaagtatcatttttcaaaatgtctaattttataactgtgtctctccgtcgaactcaccattttcacttctttttgttcggatctttaacttctaattaactaaactttagtcacttttgctttatccgtgggaaacaaataagtagaagaacccgactaatataatcggcggcctagggtttaccaac

SEQ ID NO: 80575 - DNA, 448 bp, Zea Mays
atgctagaagtaaatggttagttgtgttttttgaggacctttggaagaggaaggcccccaatagcggagcacaaactcaaagtgtatcctcaagcgaggccgatccggcaaaagctacgtcgtttcacgcctgataaaagagaggctatacaggtggaattagctcgcctggtgtgtacaggttttattatggaggtactgcacccttactggctagtgatcatgttcttgtactaaaaaagaataaagttgattggcgcatgtgtgtcgactataccgatctcaacaaacactgcccaaaggatcccttcggactccctagaatagatcaggtagtcgattcaatcgctggctgctctatgctcttcttcctagattgctactctggatattaccatatcagtttggcaaaggaagacgaggaaaagactgcattcatcacgccctt

SEQ ID NO: 80576 - DNA, 378 bp, Zea Mays
ggagaatgttagggacatcgaccaattatgtctaacggtccatgccggcccaagtagctaaggaaaaatactacaaaggcgcagtggaggtcagcacgaaggaaacatcagagaaaatatgagaaccttttattattcatcttcctactccgtctagcattgttcttcttccccaactctctcttgtacccggatcttctagaactttatagcatcttcctcctagctgtgatttccctacttgctgcttccttcccaaactccatctattcagcatttgttgcttgagttatgctttggctggttcagcgattcatgctctatcgatgagggttgctaacaaccaagctcgcaagctctgcccaagccgatcgagct

SEQ ID NO: 80577 - DNA, 697 bp, Zea Mays
aatgaatcagatgagtctgcttctaagttttctgattttggtgactctgggagttcggttgagtggacgaaatagtcgtcggatgaggatttggattactttgcggccttggatgtggcagcggtggaggcttcgccgcgtgctgtggatgctgaagttgtgcctggtccgagtgctgggcgtaggcggtgaagggcggttgcgaagcgtagagtgagtgaggtggatggcggtcggcttcgtgtgggcagggctggcaagcaggaattgttgtcctcgccggccgttgcgagtgtaggtgagggggagttgcgaagtctttttgagggtgaggagctgaggataatgctatttaactatagggagatgggaatcatttcgaaggttgaaccgatgtaagttgtgatgccctcgctgtacatatgtaactatagtttgtatgatgaggttgtgcaccttcgctcatccggctatgttcataaatacgttgagcacttggtctagtacgtttgttatgtcggtccggcgcgcctgtagtcggtctttgcgcggacagtttggtgtagggtttagcacgggtagtcttttgaggaagacttcgattttccgcacttgttgtgctagtccggctgcacccttaggcgacttttgcacggatagtctttttgagggagacttcgatttttcgcacttgttg

SEQ ID NO: 80578 - DNA, 335 bp, Zea Mays
gtagaatccacgatttgatctattcgtagaagtggatatgggtccttgggacaggccttattgaggctggtgtagtcgatgcacatccgaagcttcccgtttgccttgggaacgatgactggattggccagccatactaggtgatggacctcttcgatgaagccagcgtgtagcagcttccggacctcctcacggatgaaatcctgccgctcaacggactgtctccgaggcttctgactcaccggtttggcgttagggtggatcttcagatggtgctcaatcacctccctagggatcccaggcatctgcgacggttcccatgcgaatacgtcgac

SEQ ID NO: 80579 - DNA, 408 bp, Zea Mays
ctctttacccctgctttgacttcttgggccaagtttggttaatctgggtaatcatactttagtgcatccatcactctattcagccttcattttccacgagtgacaaagtatgttgtcattaagcgatcttctttaattgtgtaactcccgagaatctcgttacatactatttcaatagattccagccactcaaggcatggactcttgaacttagaatgtcgtttgaatcaatacaacgaaattttgagaacacctattttcacttcttcgtctcctttcatgggcttcggcatgacctagctagattgtacagggaacatcctatttacaatgaattcttgaactaagtcctaggtgctaatgtgatccaccatggtattgaacacaatataagctatctaagcatca

SEQ ID NO: 80580 - DNA, 665 bp, Zea Mays
cagacacagctggtcatattgtaggtttctggtaaacaagagagacagtagacacgcgtaggtaaaacggtttctagtaaacagcagagtcagctgtcatgccaggttcgaccaagtgacggaaacaaaaccatattcacgaacaactgaagcagacatataagtcatattacttcgacaacgaagcagactgtcacacacaactgaagcaaactccataagtcttattacttcgacaacgccgctgaatgtcctcaggtggtggcaacctagacaaaatggccttctgcatgtacaagtagtaatttcttgcgtatggagcgaccttgtccaaatccatattcataatccgatcatcgcgctcctgctgctgaagcttgaacatgtcctcagagagcttcatcttcctttgtctatattcttttaggtcttccctctcggcatttgcagatgtagcagcttgttcttcaaacttagctctgtccagttggaatttttcgatcatctcgatgcatgctgtcgaattcatggaagcgttaccgctacgagcttttttggttcggcccctcccgggtggacggcgaaagggatcactcggtgaactgacattgtccgtctcatttgggaaccactttggcatgaatgacttcagcattggaaagcca

SEQ ID NO: 80581 - DNA, 393 bp, Zea Mays
agcctggatggaagaatggttttatgtgaagaataacttagttgagagggaagatataaaagggattattcagcgccccatttggtctcgcttcggcatcaggaggccagccactgctcttgggaatgatacagaagcatgccagagaagcttcaacactgtgtgtactgttattggcataagagacttggttcaagagcacatcgcctacagagtatggccgctcgtgaatgagtgggagatgccgaagaaagctgctgccgggtctagtcagggtggtctggtctatctaaagtataccttcagatatagaggcgagtttgatgagccaaatgatgagtggttgagcaatattgaggcaacaagtgacgaattgcttggggcttatacaag

SEQ ID NO: 80582 - DNA, 453 bp, Zea Mays
acgttttaccgtgtcggttgcaagtggcgaaccccagaaagtccgcgcgcgagcaaattgcgcaactgacgcggcgatgattcggagtcctgccggcacggtcaccgtgacagagaaaaggaaaaccaccaaattaattgccacgctcctaattaactctttcgggcatcagcggaccttcatggctacatcactacgtgctgcccatgttggcaactattcatacagcgaagggtgcatctggccatgacacacatcagtgaacagtctactacacattgcgacagcactaaatatgacagtgatggacaacaatgaatacttttcagacttgtgccgaacctttcaaggatgatacagaaacactctagtgcatgcttttgtgtacatatataaatctaggaccttgcaatggagatgctagacatgtgcagcacgttgtggatgaacggc

SEQ ID NO: 80583 - DNA, 803 bp, Zea Mays
ggaacacatacatgtttgagaagcattacaaagctatggctgaagctaaacctgaggcagtgggatacttgcaggaatgtcacagtaagctttggactaggagtcaattttctaccttgtcaaaggtagactatgtgacaaacaatcttgctgaagtcacaaacaaatggctcaaagctgagaaggccaaacatctggatgatttgttggacagtattaggcaaaagattttgatcaaatggaaccagaggagaaagatagcaaggcagatggatggaaagattcttgaccacatcactaagaagctgagagaacataccaggaaccttgacattgatgttataactagcaatgataatgttgcagaagtggttgctaggggtggaagtagtttcagatttgtagtgaacttagatgagaggacatgttcatgcagggcatggcaggtgtctggcataccatgcaagcatgcaatagcattcatcacatccatcagaaatgagaagcttgaagaccatgtggatcattacttctctgtagaaaagttcagagcagcatatgagggcacaattcctgctataccagataaatctatgtggcctaagtctgatcatgggtttttcatgcatcctcccctactgaaatcaacagctggaaggagaaaggaaacaaggtataagggatacagtgagggtggtaggggcaacaagggcaggcaccaatgcccaatttgtcatgaatatggtcatcactggtatacttgcaaggatggagacccatctgacatagcagctatgcttgct

SEQ ID NO: 80584 - DNA, 842 bp, Zea Mays
gacgacgaagcctttgtagatctcagcaggcacggcttgcctccgcgtgggcaagctctgaggcggcgtcccttcccttctcgtcggcttccattctccaccgcgctcactccatttttcgtcgtgatcccttcctctccatgggcttccatgaaccctagagctcgcccgtccatggagtacgtgctcaccatcagcggatccccaggtcgtacctactaaaccctagctcgtctggtcctgatcccccaggttctaccctaatccgcagcagccttcgccttcggctcacctcccgctccatctcctctgtttcctcctcgcgctctgcagcggcgtctcaatccccgaggccgtcgccttcttcaaccacattgccccttctgttgccaatagctccccgatttctactactcttgaccggcattaatttggcgctactatctaccttgatttactagcaagacattaacctttgtaatagttttggaactgggtaacgtgaatttgggtgtcaaaattcagattctgaagttgctcatttcctggaaacaatatttgttcgtttttatttttttaattatcacaaccactatgatctgctccctctgttacagagtttaagatgttttttccttaagtcaaactatgtattaccagaaaactaagcaaattggcaatcaaactaactaattagtgaggggtaagttagtctaattgccagactccttatttggttctaaaattgcttagatgccttgtatttcaggatggatggagtgttttttttgttgtagttatctattctatctgatgagcgtttctttctataatagagacca

SEQ ID NO: 80585 - DNA, 570 bp, Zea Mays
ccaagcggccgccggtgtcatgtctccagccagcctttgtcatcattgtgagaatttcagaggtgcttggaaggtggaaacgccggagacaggcgtgttgcgtgttgattttctgagtggctggaaaagccccagccgtggcttacatagaggatgccaggagatgattgaggagataaaatagaaacaaactatttctttcttttacaattcctaactaccatatctcctggccttttctatctttggtttacatattctaacactccccctcaattgaaacttcctaagttgagattgtttttgaacatctccaagttccgtacagctagtggcttggtaaagccatctgcaatttgatctctcgtagaaatgtattcaatatcaagtagcctttttgctactcgttcacgaacaaaatgatagtctacctctatgtgttttgttctagcatgaaaaacggggtttgctgaaagatacttagctccaatattgtcacaccacaattttgcctttcttggtgcctgaatgcctaactcatatagcaaggtttgtatccacattacctct

SEQ ID NO: 80586 - DNA, 326 bp, Zea Mays
gatcgactatgtgttcaagagcatttagcctttgaaagacatttcaccctgaccggagtcagagatccttcctaactaacaaacatgcagatttctagggaggatgtcttgaaccaagtcgagatgatgttgaggggtgccattgacaatgacggtgctcctcgatcttattctgcctagaatcttcctcctcctataagttttgatcacttgatttctcaaggacactcaatgagttattgtatgattcatgatgaccgtactacttcattgttgcagagttgctttactaaatttgtgtccaaccctcccattcgtgattaaag

SEQ ID NO: 80587 - DNA, 706 bp, Zea Mays
ctcgcatttgtgtgtgtttgttccgtcgaataaggctagacagctctcataaataatgtacgcttagaagaaaatggtttaaccatattgcataggttgaactttgtaacatgtgtagcatacacttccatgcggaaatgacacaaatcactggggctaaactaaatcttctaattttatagtagtttgggtggaaaatgtaaaagtggcggatacatgctagtagctcattaaataaagacgttccaaaacattgtatccaaaagataggaggtatcggtggggcggggcagacttctgagcctaccaagttccgctgaaggcctactaaaatttaaaacgtacacaatataatgcagaagaagctcatatattatagtggtttagttcagttcctactaaattttttctggcttagtcccgcctttataagttctatcatatttcgtctgaaagatttggcatcgatggaaaaggcctagttttgtagctgcaataatctataggttctgtccatttcttcaggctctttgcgtgccagtttctgatttgtggcttatttaatataagtgttagcaatatatcatatttgaattatcttttatctattaataagggctcaaagatatatgtatatgcatttttaggttatagtattaaactattaatgactggagaagaagattgaggagagactacgtccttt

SEQ ID NO: 80588 - DNA, 821 bp, Zea Mays
ctggcccaacgcggggctaaggcccaccatgaagagtcatggcgagaccaggctcgtctcctaggcaggatcaccatctccatcaagccccataaagggaggaatcaacaactataactataggtctgggatcctgcaaataggacccggacctccttgtgggcccgtcgaatcctcggacaaagggatctggagggaacacaaagccctagagaagaaggcaccctctggctgcagcatcgagccttcagaatggctcccaggcatggaaaatagcacccgaacctcgggccaagtaaggtctggtatcaccacgtatcctggtcagggaggccgaagcctggaccccctcaggtgcgctccggggccatggtcagagaaggcttgggaatgccatttcatcgcttatcctctgtcctgcctcttatccaggcaggggtctggtgccgacgcgtggccagacgcccccaaatgtaagccactggacgatgcttgaagaaagcctctgacatagggcccaccaacattgagtacaggtgggctacatacttacccacgccaacagcgggtagcgtatcccctacattacatgcacgcagtgcgctaggtctgtaacatgcgacttttactattactcgcacgttactgaggcaagggcattgactcaatgcgccacttgggcgcccttcattatgacttcattgttcttcatgtgttaccgaggcatgaagggataggcgaggatacgagacgacaccacccacacctacgcagagcagcgtatctataacaccctgaatttggggtataaaatttcttct

SEQ ID NO: 80589 - DNA, 499 bp, Zea Mays
ccgtagaaccatccaatcggctcactgctgggcaccacttccagttggaaccacaacagagggaacagaaatagagaaacaaactgtatcatagagtgcctgaatcagtagcccttgttttctctgctacacagcagcacaggcaagaagcatcacggccgtgcttttccccacatatatagcccagagtccagagctatttgacacacccacacttcctagatgaagatcacatcactctggtcggctgttctcttccacaattgtaaccaaacataagcctgacaacccgacggggaaccgtccatccagcactcaccggaggacgtgtcgacgttgctatggtccacagaccagcttgcacagggagtgttctgttggatttaacttggcataaacatgtgttttaagtgaccatatggatgaacttttagacacgatctaaaccttgaagtggaaaattattgtcttcatagggtctgtttgttttggcttatag

SEQ ID NO: 80590 - DNA, 783 bp, Zea Mays
ctttcttgtttggagcctttcgagtatccaatccttgtgatggattcatcgtgaggatcaccaatgataatgttcttgcgttttcctttatctgtcgtatctgatcaaataaggacattctttacattcatctcaagtgtattgatggggaacaattgtctgtccatttgcattccttagaaaaccaaccaaccttcatttatactcgattttatctgcctacgaagacattacaatcattggtggcattagatatcttgtcagattaagcaaccatacgaatgcaagaagtggtgaagacgatgcaaatcaagttgggcaaggctgaaaccaaactaccaattggatcggttcatggcggcattctgatcgctgatggtgtgtcgatttccgctcatcagcagatcccttccgtcgaagcggtgcacgggcaatttcgccaccgatttgtccattcttaccggaggctgggtgccaggaccgacctggtctagacacctacgtcgatcggaggtatgaatcaattacaaaacactggtgaatttcagtggggttcgagaggatttatttccatgggtaattggtcacagtactcaggttcgtgagtttcaaatgtgatgtatcctatgtttgatggcaccaacccaaaactgtggcgacagaggtttgagacctactttgagttttatgtggttgtaagatagatgtggattaggatggctattatgcactttgaggggccagctacattttggctacaatcagtcgaaaacaggatgttga

SEQ ID NO: 80591 - DNA, 526 bp, Zea Mays
cgtggttgctgaaaatgaatcggatgattccgtgtctaagttttttgagtctgatgattctgggagttcggttgtgtggacataagagtcttcggatgaggatttggattattttgtggccttggatgtggctgcggcggaggcttctccgcgtgtgatggatgctgaagttcttcctggtctgagtgctgggcgtagacggcgaagggcggtggcgaagcggagagttagtgaggtgtcgcggagtgatgggcgtcattgtggtgaggtggagggtggtcgtcttcgtgtggacggggctggtaaacgggaattgttgtcctcgccggctggggcgagtgtaggagagggggagctgcggaatctttttgagggtgaagagctaaggataatgctgtttaactacagggagatgggcatcatcccgaaggttgaaccattgtaaggtgtgatgccctcgctgcatgtatgtaactataatttgtatgatgaggctgtgtgccttcgctgacccggccgtgcccgt

SEQ ID NO: 80592 - DNA, 487 bp, Zea Mays
cgacaggttggtcagagattttcagcttgtgttgccacggctagccgagtggtgagcgttcatgacttcatctcactcctcaccctcgtcgaccaggatcactactctgccgacgtttgctcccgtcggtaccagcgccgctgctagctctgcctctgcatcaacgtggcatcaaaggcacgtgaaaatgggctccattatccgacccgactaactcataattctggaaggcaggaagtccttacctgcaggaagtttctgtgctcctacatcaagacagccagacaggagaaagaggcgagtatcacccattaagatgtcccttttgatcatcgcccattaaattgatgcaacagaatcaagtggtgaagaaccaaaccagcagctacaaaagcaatcatgaatgatgcacaggaatgcaggaacgcgtggacggatgcttaagaattcagagatgattgtgaatttgtgatactgaagtgggttc

SEQ ID NO: 80593 - DNA, 1255 bp, Zea Mays
attatgtgcacctacttgtttgtctgaggtccttaggacaaggacatcggtaggtgggcctaataccttgggaggttctgtgacaggaagactcgtcaacactagctcctcagactgagctggtggtgatccgacatgaacatccatagaagcagccgaagaggagccgagctcagcaccctcgggggctgggtcatcctcaaaagcaccctcgagggctgggttatcctcagcggcaccctcaggagctgaagcacccccaatcgtacccacaagagctgggtaaccctggcatgcaaagttaggagccgatgtgttcccatgaactaggccgccctcaaaggtcgaagaagcatgggaaactatccgggttatttcttgcccgactagattactagctgagggggtgtcatccgggacctctgtacggatgacagcaccctcagtttcaggaagctccgataaaagatcttcagggataatctcctccaatgcatgatcaattacagacatcttcaacctctagaactaaccattcctgacagagcctggattgggacattatcgatgtttctgctacagtagttattgcgaataaaggagaaacttcttcttcatcctcttcgccctcatcaaacacacgtccactgactctggtgccaccacgactctcaatgtcatcctcgaggttggcgcttgtcgggccaccaatggggactggggccatagagttagcccccagctccaagccagatgaacgatgaagtcttcttttttttcttttcttcccctcggcagacacggctgagtggcccgttcggcacaatcgtttgcgacgagcaactccaggactgcaagctccttcatcctcgctgaaaacacgaccagttgcagcgctcaccgattcagtacaagcagattcagacgactcgcccgctagcatattaagaacaacgttcacttcagcctcatcggcagtcgtttacatctggagatgggtctgtctttcctctttagggagattccggtatggagcaatgaaggcctcaatatcttctgaagaaggtcgcacttcatggcctagactgtcgtcttgaacaggtggattgtatatgaactctgaaaagggcctctacgggggaagattccaggcggaatatgaaaagggagcaccgacattcgaaaccttgcctctcagcatcgaatcaacctgactcaacatgtcctcctcagatattcgcttattggtaattcg

SEQ ID NO: 80594 - DNA, 644 bp, Zea Mays
ctaagtgtgaggactccggacactacagattttgtggtggctgaaagcctgaaacccaaaccaacaaacatgccccagccccaggtctatgtaagcaatccctaaatgcaccaatggttaataaaccaccttgaaatgtttgatgcacatctaaataaatttccaatttttatggcaacaacttctatgtaagcaatccctaaatgcaagcgtgtatgactcttgatatgttaaatcatgatctaaccatgtcacgtttaacacttaaactcttccaccaccggctcaagtagctttaaaaaatctctaacaaaccacaatacaactatggttggatcatgttataaagaatcaaaggatcgcttgcacctttgtacctaagtactactagcatagcagtcgatagtgttaagtaggttaagttacctccgtagtatgttaggttatctgtccgagtactggtagtctcggcaagaagaaacacaagcaacatgcaaaaagagttgcgcttatgttttttgcggggccgtggtcgacagttcatttcagtagagcacaaactaggatgcgtaaaatgagcattcagccttttaaactcacgaatttctctccttcgtaggtcaatatgtgcatcgccatatgct

SEQ ID NO: 80595 - DNA, 453 bp, Zea Mays
aaataaatgaatttaactaccatgacttcattcattcattcattaatcatcatgtagacctaaggcacaatggcattgtcaatcaccattaagtgaacacgtagatagtaattaaactgacgcgatgctaccaaaagaagttgcatgttgccgttgtcccggacaaacacccttccatttcataattggatggattgctgaaataggtgtgaaagcggtgcagaaaattctatgcggaccgacaccgttttcgtttcaccaaacataaaatttgtcatttttcggtttcagcaggaggcgccttcggattttgttcccaatcagatcaggccacaagctcaactgctgaagctgtgcctatgccttcacttctgcttcaaagctgcgctaccaccatctaaacatgataaaggttcgttttcctgtgaaatcctccctgctggaagtgcaaaa

SEQ ID NO: 80596 - DNA, 289 bp, Zea Mays
cgcagctggaccaccagttccagagcctgggcaggctcatggaccagctgcacggtaacgtcgccaaggccaggaaggtgttgggcagcaagggcaaagggaaggggtttgctaggttggtgtggagctccgtggtgggtgactcgctcatcaagtacgccaggctgatcagggacgacctcaaccagtggctggagctgcaggagctgacccagagcatcggcaatgtcatagcgtcgactgccagaagcacgccgtcgttggtgagggttaagtcggagcatggata

SEQ ID NO: 80597 - DNA, 392 bp, Zea Mays
cgcgggtgtaacaatttgacctttgtccaggccatcctctagaaagctcccaccacctcggaacagctgtttcgggaggtggacatctacacaaccaccgatgaacgggcccaggacctcatcggccacccgaagcctacgccctaggcaccaaaaaaggaggggaaccagcagcttgacaagcgttgggacaataggccaagagacgaagtgcatgccgcagggcccccagcgactctgccttgcggcgcgccacgaggcaatgtacgaacactagacaaaatcctcgatgcctagtgcccgtaccacaaggagatgtgccacaccctatggaactgtagggatttcaagaactcaatcggccacgatcggccgttccaaccactgacgcc

SEQ ID NO: 80598 - DNA, 1081 bp, Zea Mays
ttacaatcttgctacaaaaatagcttacgaagtactaccaatgaaagtgcatgtacaagcgaggaatttttttgtatttctttttccaatagaaaagtagctgatggaagttagctaattttcgtcggcctcaggtatgaccgatggaaattaactaactttcgtcggctactgatgacaagacagatgaaaattctaggtaaagatctcttctatctacaaacactgcaagcttgtctactagatcttgctctagtaacgaacacttgctctagcaccaagaatattgtaattctaagatcgaacttgatcaagcgggcattgttcagtcaatacttaagtacaaacccaatggttctatgcaacaatgggattattctgcttcaattgtacgaattgagctatgtcacttgatagctgggaggatctgcctctatgctttggtgagtctgatgcttttcaagagtatatcactcatttgcataatcctagatttattaagtcccctatgcaaacaatgactagagacttaactaaacattacagtggccaaatggaaagtctaattgaaactttgaaattctttgtttcatctatgacacttacttatgatatttggtctggtagggacaaagaggattgcattagtattgttgctcattatgtgaattatgattgaggtttggaaaaaaaggctacttggtttaaggcctattgaagacgcacatactggtttcaatattgctaaacatgttgcatggtagtagatgattatgacataacaaataattttttgctatcaccctggacaatgcttcgtcaaacataattactctctccttaaacctattttctctaattaccttgactttgcatctattgatcatgttaatatagatgatgaagaataaaatttaactagtatttttcatcaacgatgtgcttgccacactattaattttgagttaaatttggtttgaagcacttgaagacttatcttaatgagtttagaactactattacattcgtcaatgcttcaaaccaacatacaagatggtttgtttgagtcaaggtgttcgcc

SEQ ID NO: 80599 - DNA, 733 bp, Zea Mays
cgcggtcaatcgcgctggcatcaccggagttcgccgttatctggccaggctacatgcctcaaagccttaccacatcacagtagaccgccttaggtagcttgttcatcgcctgagataatgccccggtaaaagccacgatagcgcttgcgccagtgacttcccctctctccggccgccagcacacttccttcaaattggacgccaccgccgtaggactctataaattgttgcccccgtgagttctgctaggtaattgcacatccaacgcagcagccctagcctcggatcatccactagagactctcaatttcgtgttttccccaaatacgtttttcgtgccaccgtgaacacttagccgtggccagccctctgcaggttagttcaagcttctttgattggtgttctagcctccctcaagccccctgttgctcgtagacccattcgattaagctagaccgcaccaaatcgtgaacacctcggattgtctcggattttcgccgtcgtcgtgggcagagatattttggccgggattcatgcaattagtcgagggattagggtcgccaggggtagaatttagtgtcgaccgagtaaggagcttagcctttgcgtattccggccggtacaggctcaccggagagtgttcaccgccgttggtggtcggggacctgaccttgcgaagaaacaaaaagggaggggcctcggtgcgaatgtcagagacaaatgtgaatagtgc

SEQ ID NO: 80600 - DNA, 1573 bp, Zea Mays
tttttgcgcattcaaggtcttttcaggctctgggatagttgcaacagctatggtttcagcagggacgaagtcagaagaatcctcagccaacatgtccagcatagcacttatctctgcatcgcttgggtttataggcatctcaaagtgaacttgcctctcatcattagggagatcaccaagtgaagcaaccagagcctcaacttcttcaggagagggtcgcactcaaagacccaagccactatcactaccaggaggattggacacaaaattgaaaaaagtcttggaaggtggcagattccaggcacaatatgcaacaggagcatcaatattcgatactttgcctctaagaatcatctccagtcagcttaccaaatccacaacaggaatcctcttgttggtaacccgggttgaatcagtgagaccactatacaaataagccgggtacgctctatccttcagtggctgaatattcttaaaaacaaagtctacaactacagcttcagcagtcagacctctctccttcaacaaaccaatttcggcaagcagaaccctggcctcggctatctccaagtctgtgggggattcagtccagcttagagcacgaacatccggttgtctccctgatcgagggggggtgggacttgccatgtttttatacaataaaccactccaagcgccatcctttgatgttgtccttgagtgggatgtcgagatactctgtcttcctcccatggcgcatcttcaaactcgcaccacccacgagctggtgctgccccccggccattctaggccgacaatgatataagtacttccacaagccaaaatgaggcagaattccaaggtaggctttgcacaagtgaacaaaaacagaaacttgcagaatagagttgggattcagatgagtcagattcagatggtagaaatcaaggagaccgcgaaagaaaggagaaataggaagagcaaggccgcgaatgagaaaaggaatgtaaataacggactcatgggtatcctccgttaggacagtaaccccacgatagatccgccaggagcaaagctccttcggaggaagaactccgatagaaacaagatggagaaggtccgactcggaaacaacagacatatgaatacctgcgaaaggtaattggctattgggatcgatgggaggaataatcgcagcggcagaattctgacttttccgcttgggcgccatctcaatctcgtcggtgaactgggcggaagcgagatcaaagggaaacagagaaggtctggaagcagaaagtaaggctagggctcataatacagaggcgtgtgacggagcagtacaaatgaggttttcccgggtcagacaccgattctaaaagtgcccagtcatcactcggttgttacttctaaaacgccgatgtggctcgatgtaactcagctgttatttctaaaacgctgacgtcactggtcttcactcggctgttacttctaaaacgccaacgtggctcgatgtaactcggctcttatttctaaaacgcttacgtcaccggtcttcactcgcccgttatttctaaaacgacgacatggctcg

SEQ ID NO: 80601 - DNA, 803 bp, Zea Mays
aaaacggctgcaccgcgtggtcaaccaaagccatcgacaggagtggtgcttggtgccgctgccatcattcatgacctgcacaatcgatcgggcgttaggaattgtgcatgcggtgatcactgggtggccatcgtagagttctctgtctcggcgagtgattactgcgggtcgctggtgctcgctgcgatcaccggattctagccgagctggtggtctagggtagccactgggaaacgatcagtggagcttgcgcctcgccgtggacccacactacatcgccagccagctcctcctacatctatggtaagacctcatcttctatgcccgccggtgtcaagtcaccgtaccttaggcatcgttgctacggctggggtttggcaagtagagagaataggaggcagcagcgtaaggttgaggacgcacgggttcggtagatcccagaaccaagggttgggattagaccttcgtggcgattcggcgggagtaacccagagctatcggatgaggaaagcaagcactatccagattagatcctagggatatcctttcgatggtaagaccggagccgtagatcggtgatccgatggccaagattttgtactggttcataacatcatgggatctaatctgcgccgtagaactagatcgaacggtggatataagtcgatacccccttcgaccaggctttcttgcataagagcccatgcccttttcacaaatcatcccgccatcctggtgaagtgaagaaacatttaactgaagcccttagaacttgcggtttggcccctggatttccaggaagt

SEQ ID NO: 80602 - DNA, 276 bp, Zea Mays
tggatcccaagtcagtgatgacgttgtttggtatcccaaacctgaatattatgtcttgtataaattccactgctttagctgaggtcaaagaagcgattgacttgtactctatccattttttaaatttatcaatggaaactagtatatgagtatagcctccctgagatttcttgaagggttcgatcatgtctagcccccagcatgcgaacgaccatgttacaggaatggtctgcagctgctgtgcgggtaagtgttgttgctttgataggaattggc

SEQ ID NO: 80603 - DNA, 332 bp, Zea Mays
tagtgaagcaaaaaaggagctggttcattttggcggagaggaaactattccgaagccggaaaagaatgaggttgtagtgttcaaaagcttctttaaagcaggattaagatttcctttgaatgggatgattgctggtgttttgaaggagtttggggtttaccttcattagctgacccctaatgctatcgttagattaagcgtttatatttgggcccttcgtagccagggagtggaaccgttcgttgagggtttctgtcgagttcatgaattacattaccagactaaagctagaggagatggtctacatgagaattttggctgcaacaactttg

SEQ ID NO: 80604 - DNA, 425 bp, Zea Mays
acgaattgcaaggcagtcagctcattatactctcattggggaaacactatacagaaggggcgcatcgggagtcctcatgaaatgcattctcttagctacaggaaagcaactgctagaagaggttcatgctgggcaatgcaggatacacacagcatccaaaaccctggttgcgaaggtcttctggtcgggtttctactggccaacagcaaagaatgatgcagccgagttagtccagaggtgcgaagcctgccagtacttgtcaaaacagcagcatctactagcacagcaactgcaaaccatacctgtaacttggccgttcacgtgctggggactgaacatgattggacctttcaagaaagctcaaggaggatacactcatgtactggtcgctatcgagaaatttactaaatggatagagttcaaac

SEQ ID NO: 80605 - DNA, 289 bp, Zea Mays
tgatcgtgtatgatgtactgattagttgctagcttcccactcgtgtatccacatgattcaactccatttagatattcattatgacgtgtgtggctgagatatatatctatgtcctattttttgttcttgaaagtagtatccacgtgttctagtttcttgttggtatcgatgtcatttaacaatatgagttcattgtagtactaacattctttgggagctttacatagattgcgtctgaacaccatgttatatgtgatgtattggatcgttaaacaatacagtaaaaacc

SEQ ID NO: 80606 - DNA, 548 bp, Zea Mays
ttttcgaacggccgcgcagatccaccacgttgatggcgatcaaagataagctcgatggagccgacgtcattcggccaccctatcccggccgtcatatcaaataatgtgcgcgccgttccattgcaattgcaattgcaatgtgatcggcgtgcttctgccgtaggtaggtaggtaggttggggacgcttgttgctatctggttggacgtcggatgcaggctgatactatcgcttaattagtagactacttgctcagctacggagaattggcgattgcttctcgctcgggaaatcaagtccgtctgcaaattaaggtttcccggttgttttgtgcgacgaaagaagtttgccaaagtggctcttcaacatgaggtgtctgtgtctcttcaacaaccggcagcgtgggcaagctaaggtggcgataatgcgcggccaggcagaggatggagacggagatgagatgaaatcgtgagactcattactgctactacgcatcacgtgctaggccgctagtggtacccatccatcacctcgaatgttctctgccac

SEQ ID NO: 80607 - DNA, 459 bp, Zea Mays
ctgagtgtaagcctaattccctttcactcttgcctgatttacaactgaatgagagcttttaagtccaatcacaaagatcacaccaactcctctctttcagcccaaacacaagtgctctgtcactatcactcaattggatgaacatctttaagcacactacataatttgaggcacttggatcacttggaggacttggaggtgttgctctaacttgtatgctttgtttatcagctcatggatgttgtatcaactagttggagatgtatttataggctcctagaccacatataccatttgaactccactcacaaaactacatagtctgttgtgacactagagacatcgcagtggtgcacccgatatgacattgttcacctgctaggtcagtagtcgttctgaaaagctgtcaaagtcaggttgctacatgaggcaacggacaccaccaaacctgccacatta

SEQ ID NO: 80608 - DNA, 362 bp, Zea Mays
gtcaagtcatcactcgagaaagcaaaatttccgacataactcggctgttacctctaaaacgccgacaacattaagcaccactcggccgttacctctaaaacaccgacatcgtctatcatagctcggccgttacctctaaaacaccgacggggtcaagcataactcggctgttacctctaaaacaccggcaacatcaagcaccgctcgactgttatctctaaaacaccgacagtgtctgtcataactcgactgttatctctaaaacaccggcagagccaagcatgactcggcagttaccaattatctcttggtaattatttctaataacgtcggtaacgttaggcgtgaagacaaactatcaa

SEQ ID NO: 80609 - DNA, 426 bp, Zea Mays
gggctcgttaaaagtctataaagatatgtttgattagtgagcggatgagatcatagtcgttctattatattttctatgtgtttggttacccacggaaagggtggagtggcttctggaatctctcggttcgagtattctatgaaagttattaaaacctcaaccccgtgggttcactcccacatttcacgacccaaaacgtcagcacgttctgacgtgtgtactccgtagcctcataaaagccctccaattttttgcaaaccaacctgcggttctcgctatgaccccaagtagattcatttgggcgtccctcgcggtcctcgagccccatctcgtccgaactccgaaccctagctcctccttgctgtcgcctcatcagacctcctgctcagccgctgctaccgtcgctgctcctctgggcaaactcac

SEQ ID NO: 80610 - DNA, 307 bp, Zea Mays
ctgacactaaaattcacaaatattggaacgtgcaatatttgattgttacaattagctaagtgatctaatctacactaacaaaatcttatagaagccaaattgatgcagaaaaaaatgtattcaatccatggcggagtaaaatatcccaagtcatcaacgagtacaacatcaaacatctccaagtgatcaagcctgccacttacaatgccaaatttatgtactacaaccatcaactagtatgtcgtgtcctctaatcaggcaaaatggtatgtttatatttcttaaatctcttcatacttaattaaac

SEQ ID NO: 80611 - DNA, 638 bp, Zea Mays
ggaaggttgggccttaaataggctgctactggaccgaaccaaagtggggaacaaccggagctaaggaagaaggtggtgggggaaggtgtggcaaccgcccctaaccgatcgaaagcatgagcatcaagataattgcacgataacgatctcatatcgtgattcattcattaggctagtactagtagctatgctatctcgtcctagctcgttcacgtgtgtgagcaggtctatcgatgtatatgtcactgttggtgggcccaccatgccagtccatttcatgatgtcatatggcccacggacacttgcctactcggtcgccggagaccagctgggcgtgtatgcacatgcagttgctgtcggctcgcctatatgaatatcgggcggcgggttggcatatgtgggctcaacttcagagtctatcagagaaccaagtctagggcccagcaatcattgaacccacgtaatgattaagtcgacgtgggtgtatgatttcactgtctaggtagacgtggtggataaagggcccagcacaatagggttttttaccccgttttggaagcatgtgtgcacacgaggtgccaaatacatacatcagaaaaaatatataatggattcggtatcatacatacatacgtgag

SEQ ID NO: 80612 - DNA, 855 bp, Zea Mays
caaggtttggatcgttcgctccgactgaccatcagtctaagggtgaaacgcgacactaagcgaaagcttggtacccaacgcactgtgaaggctctcccaaaatttggatacaaatttggagtctcgatcagaaacaatggacttaggcaccccgtggagcctaattacttccttcatatacaagggaaccaattctgaagctgaattggtggtcttcatgggaataaagtgcgcagacttagtcaagtgatccactaccacccaaatagcattcctgccccgaggagaacgaggtaagcccaccacaaaatccatggtgatatgctcccacttccactctggaatttccaatggcttcagcaaacctgcgggcctcttatgctcggccttcacgcgctgacatacttcacaggcgaccacatacttagaaacatcaaccttcatccgcttccaccagaagttttgcttcagatctcggtacattttggtttcgccagggtgaacagtgtaaggtgttttatgagcttatctcaagatctccatcttcacctctgatttctgaggcacacaaaggcgacccctgaaacgaaccaaatcattctcatcaatggagaactctcggggtttaccatcgccaaccctctttcgagcttcctgcaataaacgatcctgctgctgagccgcacgcactctctccatgagggaggattgaataagcatccgagtctcctcactagtggtgccagcatagcacaaagcgatccccaaatggtctagatcagcgatcaaaggcaaggccacttttggaaccccggacctgctaagggcatcaaccaccacatttgccttccccgg

SEQ ID NO: 80613 - DNA, 427 bp, Zea Mays
caagaatggtgttggtcacaaggtgaccaaggttgatcccataacacctaaggatggcccaggaaaaacaagaaagagggaagtggaccgtaacaataaggtgggcctagaagatcatgtacccgattttatcttcccttgggagttgcacctggtaaactgtgcgccaaacatggcctaacaaaggtggaaaagcccacccaaggatttctcaaaccttgttgaggccctcttcatttagcacttgggccttcagatggtgtttgacgatcgatgctttctccatcgtcgagcatggggtcgacaaggacaaatcagactagaggagggaggaggaagaggagcagtgatggactaagggacaagagggcaatgaactcacataaaagataaagccccatctggttcattatttaaatgccttacc

SEQ ID NO: 80614 - DNA, 513 bp, Zea Mays
gcttgcaggccggctcaagctccatacgactcgctcggtttatagtgactcacaaactctgaccgagtctatcatgtttctcaagtttgatccatgacttagccgagtcagctggctgtggctcgtgaactaagtccaaactggcataacagagaacaagagcctaagatgttgtctaactagacaaagcccaagacagacccaaactagcctaacaaagcccaagactgaccaaactagaatttgtatgcaaagtaggatgtatcgtgagccagagtcgagtctctatctcgagctcgtacaccaaaccgagtcaagcatgtctcttctcgacttgtttccaccactaggtgtgtggtgacaacctccatcagtgctgacctcctcgcattctttgcgacccatttaggcatagatcggcacaggtggagggtgtgctcacagctctagccttaagacttcttgcgctctttaaaactgtgtccaacagatcgtgtatatggtcgtgcaaaa

SEQ ID NO: 80615 - DNA, 448 bp, Zea Mays
agaaaatgtacctattaatacgagttctccttctggtgtaatgtccacctgggtataataggcacgtccagtgctcttctcgcctttacttgcctggttgcttgctatattacccttaccctaagaagcattcccagaattcttttgaaagttatgcttatttttcataggataggggcattccttaatgaaatggctaggctttccgcaattgaaacatgtattagactggccaggtaatgtgggaaaacaagtgccagtggtactcggttgagtggtttgagtaggggcagcagctagacgaatgaaaacaggctgcttaaacgggtaggagggtgggtgaggaaaacacaatttgggctgaaggaatggataactagccttgatcacttctcggatccttgggaggatccctcaccgccttcacagccggtcctttttatcttcc

SEQ ID NO: 80616 - DNA, 631 bp, Zea Mays
agattctcctaattctcttcccatctgttccagccttaactaggacacctcccgaccagtctcttccaatttgcggtacaaatcattcctctcggttgcagcttgttcagcaaccacagccaccaactcagactgcatcaacaattgttgttgcacccgctcaacttccttcagtcttccagtcatcgcctccattgactcgaacatgtggtcccaatttccctgcaccaatcgatctctctcatccatcgcctcaagcaggaaacgagtttgtaccgacggttttgctggtggagccgtcacacctcctcttcccaacgccgactctgaaggctttgataccaattgtgatgacctatggccgagggtagcagatctactccgacgtgagctctccttgctacggacgaggccaccacggtgacaaccaaggaagaactctccaggtaagcaagactcaggaatgattcgaatcactggatttctgttattcaattcgtatatgtcttctcaaccaccagatctagtatttatagaagtctatcttcctattacaagcctattaacaggccattaagcagattaacaggccgcacacaggcccatctcacaaatataagaataccaatac

SEQ ID NO: 80617 - DNA, 897 bp, Zea Mays
tctaagtctaatatgaaatacatatgctgagatccaatacatattagagtcgacctttgtatttatctatcatcgctagacgtgactcgtgagtggtttaaagtcatatgaatatactagtgtagtatctgtgcattgcaacgacacaaaatggtgcgcagtcaaaactttagtgaaaaaaaagaggaagacgcacatagacatgcagtagatccagaccattttttcacaaagcaagtggacaagtagatccacactctgcacaatgcatcatctgttttcattcttgatatagactggtaatatagttgatggatcctatttgtgcacatatacactcaattaacacaaattttaaaactaatgtcaacctatgtctaacattgttgtgcacttgcctttccttcaggccaacacctgcttccgatatatggatggaatatgagtgttcaaagtcaatatggcaacagagacaacgtacgacacaacaagaaagctaaaaaatacggtcttgacccctgcggtgagccattagtttgtcatggtaccatttcatcgaaactggttcatagttcagtggattggatgatttttgagtccgacctagacgtgtgccatgatgccgagcgctaccacccacgtgaagcgcggagggagcaccaaacctcaacgtgttttgcattgcatcagcacaccatcagctataagagttttgagtgaagtggttacaagatgttgaaagtttgactgaaaaaacaacaatctctaaccctcaaaagtcaaattaacaaatcctgactcacagatctggtggttaatacaaattatagcggtaagattttaaaagttgattgtgatgtagtttatagtctctattggttagctgctaggttggtc

SEQ ID NO: 80618 - DNA, 538 bp, Zea Mays
ctggattgttgggatcaatccagaaaggggtataagattgatgtctagtacctttatcatatcgaaactgcgtcacaacttcaatcatcttcatgatgaaaggtgcatgtagacatcccttaagtggaaagcaggcagcatggataatctcctgccagatcatatcaaagacgttgatgctctctgagctgttgggcttcatgaatgagagcaaaaccttgctctctccaagaatattcatctggttactccctttaggaatgagggtcattctgctgagggagttgatatatctgtagtatttgtgcatgttggtggactcccaatattttccagactcagagagatgaagatctctggcttcatctttggtaggttggcagaaatcatggattttgatcttatcaccagaaatgtcattgtcagtgaatccaagaatgtgagcgaaccgacggtagcttaccttgtaccagctgccttcgatgtagaaattaagataaggaaagttgtagggactttcctcatcggccagcttgat

SEQ ID NO: 80619 - DNA, 549 bp, Zea Mays
caaatatgccacctttgttaagatagtccttccttttggtgtcgctggtctttgatttgccccattcggtatccaagggtccaactagatgttaatattttcttcatttcccactcgccaaatgagccccttctgtaacgcttgaacaccatgaagaatacttcgccatgcataagaaatccctgatttctcttttgccttgagtagattaccgtgtgggaaataccgtgccttcaacacttgagcacataaggaatcatggtgatgaattaaacgccagccctgtcgagctaacatggccaagttaaaacaatgtaaatccctaaaacccatgcctccctttgattttcgtttgctcaacatctcccaggacaaccagtgaattttcttctcattatcctggtttgcccaccagaaccttccaatcatggagctgatcccatcacacaacatttcggtcaggtcaaaaacagacatcgcataggtaagcatagactgaatgactgccttaatgagtacttccttccctgccttggacagaagttttat

SEQ ID NO: 80620 - DNA, 405 bp, Zea Mays
catggggattggtcaaaggagtggttctacactgaagaagactctaagcatcgcgaggagttcaagagcatgctgatgagtcctctgaagattagcttcggtctgaagaggccgaagtgcgacatgagcaaagctgctgagaaatggtacaaaattttcaatactgccgctgagaaaattggctctctagacctgattcagggagcacttgcttacaatatctttcccacctacactgagtggaaactgccgaaggaagtgaaatctaatgaaggtgcacttgtcacattagcatttaaatttaaggagcaagcctcgtacaaagctccttatacttggtggttaaagctaatagaaacaaaaagcaataaaattgttgggaactatcttgctaaggaacacgaa

SEQ ID NO: 80621 - DNA, 365 bp, Zea Mays
agaaggcggaggaaacgagggaggccggtgagtgggagagggctgcaaagtaaacagagaggtcaatggagggagaagagcgcggacttatccaacggctgtcgcgcgtgaatcgaaagacgagcgtgtggacgacgcacgaaatgctttaatatagtagagataaaagactttatataaaattcttcattacatatatgctcgtttcctcatgcttatcgaatcttctttcttcaaacattaatctgagttttgaattgaatatctataccgatcaatttgccacacacgaataaacagaaatcttcagaatttttcgttctcattctagagtcacgttgtccgcagaacgcgggggaaaaaaa

SEQ ID NO: 80622 - DNA, 945 bp, Zea Mays
ctctccagcccatgttttcgctgccaaaaatcgagtttttaggccgggggccagcccacttcttgcgcaagtttgtagctgggaaccaatggaatccggctgttcctttcttcttcttcttcttcttctctatggatggtcgtgtcggtttggtcgagtggggaatttcagtggccgtgttggcatgcggttcagtgctgggggatctgggaacttctatggttgtcattttgagattagggccttggccctgggcactctcgtcagaaatatctcattttcagattttgctcttgtgaatgtgctgacgtgcacgtgctagatttatcgttcctctgggacattccgtttttttgggaatctggatgtagtatgttggataaggccatgagcacatttcaggagctgtttctgttagttggtccaacaacattgcacggaccacagagaagaatgtctgtgtttttatggacgccttttcaggttttttgagtgcctgattcatgtgagaatatcggggcattacacttgtgatgtaaacaatccgtgacttttgttaggtttccaggtaatcagccacttacagtatgtagcaacggtctggagttcatagttctgctacttttccttttaggatctcgatgtaagaaattaagggcctacttagacctagtttcatcctgtgggcttgtgagctgaagccatggtcaaacgggtgggagcttcttgagatcatcatataaggttaggccaacgtcacagtagaaaccctaaatgttgtgaatccagcacaagcaagctcttatcaatcctgaaatgtagctccagtctgcttttcccaagaagctattttgggtctgttgcaaaaataacagtttattgtagaagcttaagctgggccttgtccctaaaatctttggaggcttcagctttttcttgttctat

SEQ ID NO: 80623 - DNA, 421 bp, Zea Mays
gatcaatgtgcaagacagcttaataagttgtcaacattagccatgatcattgggagagaatgcaaacagaacatatattagttaataaattatagcccatagactttatacacagacaaaaaaggatatgcaaggtcagatcaataatgtgcaagatgcatatatatacggcatgtccgatcagaaaacctctctctctccattattcgactagccaagtcaatgcgatcaaatcaaacggcctaaaacttggtcggtcttggtgtgcatgggagctagcggcctgccagttgttagatttcaatatttcatgtttgtttgtaactttgtacggttcgccatgcatatcttgactaggccaataataagcaaattcctttcgaccatatatacgcaagtcaaataattaagtaaaccctgc

SEQ ID NO: 80624 - DNA, 518 bp, Zea Mays
ccattgcaggctttctcggatggtgtgtctactactcctggttttgtagtccatcggccaaagcgcgaggtagcatccagcaggtccacccctcaatttctgaattaattaattattattacaaccgcgcgcatactaattaaatcagaacatgtgaaatggagatgccacatatcctctcgtctcggcgctccacctcagctctcttgtgatgcgattccccctccctacagctacaacttgctcaagcatgtaggaatgcagcagcagcatagccggcagacaatgctgctgctaggctggtagtggtacgataatgatgagagtctgctgctgctgggctggttgtacgaaagtactactagtgatgagagtgacactagctagctgctctgctctgcgttgctctgctctgctctgctctgtgtccccgatcaaatgagagagggatggcccacgccgacgcagcagcgcccggctgtttgcatgggctataaaatggaccaccacctcaatcg

SEQ ID NO: 80625 - DNA, 408 bp, Zea Mays
gtcaccaccctgtttgatgagttgtgcaagctgaacctagaagttgtttcttcaggtgctttaaattatatctcggtggagcccacattacaagagcaaatagtcagggcacaaattgaagacatgggtgttcaggtcattaaggaaatgatcaagcagaaagcagaaaaatacaaatgcttccggcaggacagcaaaggaatcctatggtttggagatcgattggttgttcccaaggaccctgatctcagaaagaagatattggatgaagcccacctttcaaaattctccatgcaccccggcagtaacaagatgtatcatgatctcagatccttatactggtggaccacaatgaagagggaaattgccaagtacatatccgaatgtgacacctgccagagaatcaag

SEQ ID NO: 80626 - DNA, 591 bp, Zea Mays
gttttctataacctaatccacaccgttgccacagagatcaacggccaactcctatcttcctcttggtagcgcgtagcggccaggaaccggcggcgcaaagtcaccgcggtgcaactccggtgacccccgattcccgatttctgacgcacgaacttctacggtaacgggctctaagcactgtgggaacaagagtaaactttgaagggggttcccttaccggagtgatgaagtgtagccgctcgaccgcggctggagttgaatccgcggcgcctcccaaaaccggcgagaaattcggttgacgccggtggtgctcacacctaattgcgcactcccacactatccgcacgcgccagtgaactccaatttcgccttccccaaagaaagaacgacaacgctcagaggaatcgttgcaacagcaatctccggctccaccctgctcccaatttctctctctgcggcggaacaaagtcggtagcgtggattccggcgagggttagaagattgtgcggcctgggagcaccccgtcatttatagacgcgaggcctagtcaaccagctgatccgcacatgccacggttggtttccacccgcc

SEQ ID NO: 80627 - DNA, 305 bp, Zea Mays
ctgacatgtttaactctcgctagctcagccatcaactcttctattgaaaatttacttggtggctcattgctttcatgaagaccaacaaattcattatttctccgcagacgatgtcccataggaaggaaacgaaaatgtccaaagtacccaattttactccttaagcggtatgaaagagggttcttgtcacaatgaatacatgcaaaatagcctttggtggtacgccctgaaagagtactcaaagctgggtaatcatggatgcaccataaaactacagcacgaaggtcaaagtttttcccacttag

SEQ ID NO: 80628 - DNA, 365 bp, Zea Mays
actttatcatcagcacttcagtagtgtgttgtagtcttgcatctgcagccttccattccttaagcaatgaaagcatctccaccatgtcagatcctagacgacgatgtcgttcttcaattaccctgtccacaaagctaaatgttggttctgaactcatagttgaggtaggaagaggtaaaatatctctagctaagattgaaagaactggatatgtgaatttatggtcatgccaccagtccaggatgttgaaatcatcatcaaatttctaggtggtatcactatacaagtatgatgagagtttagaaccaacaacactaggaggagtgcttgttgcatgaagcaaaacactaccagatgataatcta

SEQ ID NO: 80629 - DNA, 493 bp, Zea Mays
cagcagatgtccgagcggatgttgtccatgttccagactattcaggacaaccaggacactcttcagcagcacctcttggtagacaggacagagcaccgggcgttcatgacttacatccttcagcacaccggtgttcatattccctagtgcagtctgctctaccttcttctcttcaggctgtagttgtgccagctatacagtcagtgccttcagctgttcaacacaccgcttaggccggtgaccctagatttctctacccaggtcgttggaccaggtagtgctcagccaccaatgcctctagcgtttgctgtcaccactcttgccatggttgtttctgtgactactccagctccagcagatcctacatcgcagccagcatccgagtcagcaccagctctagcctctaccacagatagtggatctgagactgattccgacaccttgctcgcgtttgcactgcttccttagcctcgacctgatgcgcctgatcctc

SEQ ID NO: 80630 - DNA, 455 bp, Zea Mays
cggccgtagagcatgaaaacttaaaagatgacatgaagaagatggatgaggagatccaacgacaacaagatcagatgctcaaggtggcaaaaaagtggtacctctcgcacttcaaggtagatcgccaccagaaggtcgtaaaggagagggaaatagacgccgattacatgtcgtccgtgctgcaacagctccccacgataggtgatgccaggtcagtcgatgatattccatctattaaaatttcttttgataatcggattaaaagtatcacagaggatatagaaaggatggcgcatgcattaggaaaaactcgcctgcctagttttttatcacataaattaggcgtcaaaacaattgcgccaaacacatcggcaacaaatgggtttccccagccatattctggtatgccgatggactcatatccaggacgaccgtcaccaccatcttcgctaaat

SEQ ID NO: 80631 - DNA, 693 bp, Zea Mays
tcttagataagtctagtgtaaaagtggtgatgcacatttctaaaaactagtgttgagtaaccctataagagcctataagaagtttaacaataaagtaaactcaatgtgtcatgtgtgcgacagacatgtgcaccgaatgcgtgattgccttgtttagaacgaccgcttatacatggcctgaccaagtagagcaaatgatgtcatgctgcttgaaacatataaccaaggtgagttttcgcaacaatcatagagaaaccaagttcaagctagcgcatatatgctggtgcgctcttcaccattagcccaagtgtcgcacgaagcacaatgacgatgacttaagtgataggagcaaaagattttgtctaaacttagatgatgattatagctccacgtcacagaaaaagtgtggacgcactgccccattggtcgcgatagggcaagagcacaccagaaggaaaaggacccgagaactagtagcgagtctccgtctacatagaaataaatattaaagaagctctagaggattcttgaaactaaattatttaagcaatttaataacttgctagatcgttccatggtcaacatggatgaagacacgaaaagggggtctatagattggccttaaaaattgataaaacaacttaaattagacaagagacggcggaaaagaccaaataagaatatgaaaaagag

SEQ ID NO: 80632 - DNA, 803 bp, Zea Mays
aaaattatgtaaatccaaacaccttcttttactgtccttcacatttagtcccacaaaaacagattaaaatttgcaagttaaccatttagtaatttgtttttcttctatttacgaaccaccaggtggtgaatgtgaggagctgcaaaaaagattatttgcatctcggatgtaaagattttttttcctctggcagtggttcttgttcttcgccggcggcgagggctgcaacttcccatcgttcccaatctttggccttactgcgacccggcgtaggtgcgtcaaggtttatggattgcatactgacgagtcgtaaatcgtaatcttgatgcgacattagttttaggttctacttcgacttctcgatgaccaacatcggcgtcaggctattcagcctgtgcaccacaccatctccatgctcgtgggaaccatgatatcatacgggatcctaatgtcgtacatgaagacgatgcagggcatctgataccctcgcgacaaccacaacgcctacaggatgctcatcgggatatccatgggactttaagctatggtccaatagtggggcgtcatgccagtctcaccaccaaagttgctctttagtcacttggtggtaaccatcgaactcgagcttattggtcagacgaatgagaaaatcataatattcgatgggacaaacatactgtttactaagaagatcccactattaggtaaatgctgtgactgagaatagcggtgttggaccagtctcacgaccttagttgctctctagtaactctttgatgactattaaactcaagcttattggt

SEQ ID NO: 80633 - DNA, 475 bp, Zea Mays
cgagtaaaaagaaagcttcggaggtagagaaagcagcggcgacatgacaacaaaagcaacgaatgttgtacttagcggcctcgagcagacctatttttatacaaaaaaagatgcaggattcagaaattcatatgcaaatcatcgctacaagtgggtcctacatgacggacacttacgaaggcgtatttctaagaatttgttttcactaacgagctcaaggaaggtgttttcagacaatcagtatgaggcctccattttccagggtctcgacttgttatgaaaacaaactaagactatgaggggctactgtttgggggctcccttagccgaaggtcctcataacattaattcaacaactgtttctaagtttgttttagacatagcagggtgattgactacaaatacctttgtaggtacaattaataatcgtaaaagcacgaaggcaaaggatcaagctttagcactgcaatgtgaa

SEQ ID NO: 80634 - DNA, 1534 bp, Zea Mays
cgggcatgttacatcgtcttaagtcgttgtcgacttaagccaattgctccgtttgcagggtatagtggtcaccctgagtcaagtaagcatgcaaattggcaataaacaattcgagtgcctttgagaatgaagtcattttattgatggtgtatctcccaattacagaatacaatgccgtcccaatagcttttcaaatctagctaggggtaaaacttcctgagatgctctatattccatgagttccctatttccgtgccatccatttgagtaagacgatatgatccaggccgggtgacttccgctactatgaatggtccttcccatagtgacgacaatttgtgtcgtccctcccccgctagaattcggcggaggacaagatctcccactgcaaaggatcgatgccgtgtggacttatcatggtagcgccttagagtctgttggtatctggctgactgaatcactatattcaaccgttcttcttctagtatatcaacatcctccagcctagtagctttagcttcagatatgttttcgaagatcaatcttggtgccccaaacttgagatcagcaggtagcactgcctccgaaccataaaccatgaagaagggagtgtttccatgcaaagctcggctgggttgagttcttaggctccagaccacatatggaaactctctgatccactttcctgcgaacttttcattcttgtcgaagactttctttctgagtgcttccagtatcattctgttggctctttctacctgcccgctggctcttgggtgtgccactgatgcatatttgatctagatgcatttttgttcacagaaatcaaagaactccgagctagtaaaattggaccccaggtcggttatgatgctgttcggtatcccgaacctgaatattatgtcttgtatgaattctactgccttaactgaagtcagagaagcaatgggcttgaactctatccacttagtgaatttgtcgatagcgaccagtacatgagtgcatcctccttgagccttcttgaagggtccaatcatatccagtccccagcacgcgaacgaccaagttacaggtatggtttgcagttgctgtgctggtaaatgctgctgttttgataagtattgacaagcttcgcacctctggactaactcggctgcatcactctttgccgttggccagtagaaaccagacctgaagaccctcccaactagagtcctggatgctacgtgtatcccatattgcccagcatggacctcatctagcagttgcttcccagtagctgaaagaatgcatttcatgaggactcctgtcgtgccccttctgtatagtgtttccccaatgagggtgtagtgagttgactgtcttgcgatgcgctctgctgcatttttgtcatctggctcctcctcattctttatgtatctgatgattggctccctccagtcatcagaatctgactctggttggctcagaatattgcattcttctacccgatctagtgaaatgctcgggcgcagtacttcttggacgaaaactc

SEQ ID NO: 80635 - DNA, 354 bp, Zea Mays
ccccgtcaagtttctgaccatggtgagcttcgcctcggtactagcagctcgaagctcacccccaatttccctttctccctctggtttgctctgcccgtgctcatccgtcgttacccatgcagccccagagccgccactgtggttctaggcccaccgccacaccgttgtcgccaccaaggatacctcggtactcgccttgaggtaaggaaccaccccttccacctctagttccctccctcactctccgatgcgtgtaattactcgtcggagccgtcagtgccgctgccttgccgtggatctccacccttcggtgctcccatcgcggtttagcactcgccattgagttccccaaac

SEQ ID NO: 80636 - DNA, 905 bp, Zea Mays
atggcttgggttaatcgaggattatgacttagaccttcagtatcatcctggaaaagcaaatgttgtggatgatgctttaagccgtaaaggtcaggtaaacatggttatagatcacttaatgccctaagagttatgttgggagatggaacgacttaaccttagtatggtcgcccacacagaagcaacaattatggaggtagaatcgagcttggagcaagagatccacaaaggtcaagagttggacgaaaatattaagaaatcaaaaccctgatcaatttaggagaagccctagagtttatagaggatgatcaaggtactatgtgattcagaagtagaatcttgtgtctgaaagtgatcaccttcgacaggtgatcttgagggaaacacatgactccgcttattctatacatcccagaagtactaagatgtataaagacttaatgaaaaagtattggtggtatgatccaaaagatatgtggtcattcacttagctcactatgacgtatgccacacaatgaaagccaagcatcaaagacaagcaggtttacttcaacctctaacctttaattgatgagcttagggtgttataggaaagagccttcggtcgttgtggtccattagttagtgggaagaggtggatgtgtcagccctaaaagaacccacccccagtcaaatctcgcggcaccgagcctagggttgggtgtggcagaatatgacaggggatgccacgtgtgtcggaagggaaccactcgagtggattctgcgcccgaccctggattgacccgccataaatggtcgaccacatttaaccatgtctggcatcgagccatggcgcgagcgcctgtctgcttcccactcatgacctaggaacccctttggtcgcataacactcatgacctacagac

SEQ ID NO: 80637 - DNA, 548 bp, Zea Mays
ggaaacgtgacccaggtcgttgatcggataatagacggtctggattaggcgatggcataccgtttcgcgtgattgaatccaaggcatccatttgttgatgaacggtgtagattggatgatggggtgagtagctccaggccgtcgatcctgtaacgagtggatacggttagatcttggtcccctaaaatcgtgcgtcaatctgtgatcgtgcggcagccgttgtgtatcggttcgttgtttgcgcgatttaatctgagccgtgcgtgcttgatccagcggcccatagttgctgatacccctttgccctagcagtcttttaacagagccctccgctttagttgtattcaacctgccgtcctccctagggttagactgagtcttggaattacttatgatttcgcccccgtgtttctacaaaattagtgttcggtcctgtgaccatttaaattggataaataaatgtggaaatgaattttttagtgtaaaaacaatccctagaacttgtttaattcacataaaattcatacttagtccaaatgagtccattc

SEQ ID NO: 80638 - DNA, 471 bp, Zea Mays
atcagattttagcgtaaaacataaaccaaaacagcgtaaatgattacgaattttagcgtaaatcgtagatttgtttcgaaacggtgaatgtgtcccgaaaattagggcgtaaaaatctcgcgcgtcccattgtgagcgggttctgacttggacagattttagcgtaaaacatgaaccaaaacatcgtaaatgattacagattttagcgtaaatcgtagatctgtttcgaaacggcgattgcggtccgaaaattacgacgtaaaaatctcgcgcgtcccatcatgatcgggttctgactcggacagattttagcgtaaaacatgaaccaaaatagcgtaaatgagtacagaatttatcgtaaatcctatatctgttttgtaacagcaaacggggcccataaaacatgaaccaaaacagcgtaatagaggcatgcatgcaatgcaagttgtgcgtaaaacatgtataataaat

SEQ ID NO: 80639 - DNA, 590 bp, Zea Mays
gggcctccgtcgcgtgcggtgaactacgtgggcacgggattctataccccgacctcgggcgggtgcactacccagcgattcgcggtgctctgcgcatagtgtagcaattgttagatggcaaaataatgccttccatcgctggtatgcatggctccggtgagctgttgccacagtggcgctatcctttgttgtgcgggtacctagggtagaagaaagggtaggggaaagatgcctggccgttcgatggtagacatgtgcatgtgattgggtcgcgcagtattgtgcttggggccgttagatctggatcgtggggtctaagccacgcgtagactgatgctaacttagggggattgcgggtcgtcgatcacggatcctgtggcccgtattgaatacatttcacatacgatcagatctaatctgtgccctcggttgtggatccaatggtccaacgccacccgtaccccttcggccagtccattttgcataagagaccctggaccttttggaaatagaacccaccgtccaccttgggattactctgagtctggggaataagtgtggtttagcccctaggtttatctggatttgtg

SEQ ID NO: 80640 - DNA, 414 bp, Zea Mays
aaggaccgcgtggttgtcgaacttatgaccattgtcgcactggacgcttttgctggtgcaaccaaactaggtacgaactaaagaaataaaattagctaaggtggagaaggtgtcaaacttaaatcattgaggaaaagtctagagaaagtgtgagcaatcatctcaaacaaggagataatagttgtaaccatacacactagcaattggagaggtccacagagcgcaatgttctaagtcgaatttttggagagcacgagaggatagattagggaaaggaaaatgagtatagcgatccagttggcaaatatgacataaagaagcaccgatgcttttattgcaaagaatagtggatgacctagcaagggatgagagggtctcagagccagtatgaccgaggcggcgatgctagatgga

SEQ ID NO: 80641 - DNA, 352 bp, Zea Mays
aatatctactcttcaacttttctataaagatcccattccaaaactatccataataaacaccatatagttccaaagttaagccaaacactagaattcagatatgttcactattccttatctgaaaaattctaagcgtctgacagcccatctttaggtgtcattaactccaccctttatgtattactcaaccaatcacctttaaacaaacttgagccctgatatataatctacaattcttctataacaagtatggcccaatactccactgatcatccacaaaagggccccaaagttagaccaatcatacaaattttttaaaatctgaactgtactaagtctgagatttcagatt

SEQ ID NO: 80642 - DNA, 658 bp, Zea Mays
cgggttagtagctgctggtggttgtatttgctggtgtccagcagctattcagctctgcggagccgcgtgccggctgatctcgggcctgtttggaatagattctgtgcagcttctggtgggaaaagctggatctcggtgccaaacggctggattctccaccagattctcctggaagcgcttcttcccaccacaccgtttcaacgtagatggagaatcggctctatggccgcgtcgcgaggaagcgggtgattcctgcagtacctcttcatattctgcacactagtgtgtgatgttgttcgtatgttttaggcttgagtctagcatggcaaaaggcaaggaacgtgttcgtttctaacaaaggtttaactcacgtaaattcaacacagtctatccatgcgctgctgccattgcagttgttaagtgtacctttaatcctcatgttcagatgttaacaatacgataatttggacatttaagcatatagactttagacactgatatttaataattcggtcagtcccgtaatgcactagttggttatctgtatttatcagttttctttttttaatcggaatctacaaactcataatctgtgtatccaaacactcatattctacccaccagcttctctccacagcagccgaaccaaacacccaga

SEQ ID NO: 80643 - DNA, 531 bp, Zea Mays
acaccaacatgactattttcttgtcacaactgatagtggcttggttcctgtgtagccaattcatccctaggatgacatctaacccttgagttcccattactactaggttagtggggaagtctatcccccttatttcaatccttagattcggacaaatcctatcggactgaactttccccccaactaaattaactcttaaaggtggaatcattggttctatggggatgttatgtgattttgcccaagatgtagaaacaaaagaatgtgtggcaccagtgtcaaataatacttttgctggataggattcgactagaaacatacctactgccacgtcctgagcatcctggattgctttggcctctaggttcacctttccacggttgtaggcctgaccacggcctcctggtgcttgctgtggtgctccttgtcttgctggggtattgactgctggtgactgctgagctgctttctttagacagttcttcgcccagtggttttgttctccacaacagaagcatgcatggcctccta

SEQ ID NO: 80644 - DNA, 616 bp, Zea Mays
ctcccccttttgtagaacaaggaggggctcatataatggctttgctcgtaaggaagagtggagaggtaaaaagtcaatactcctcggtaactcttgtcgggcatcagtatccttccccgtgtggactctcgatcatgtccaaagattttatggagatggtgtgatctgtgtttgtggtgtgcgcgtcgactggtcataattattggggtttgtctgtgtcatcctcctgtgtcgacctacctattccttagatagtagggtttatttcccaatcgggggtcgcatatctcctcggtagacttagacctaggggtgtaagccatgagtggggagaggtgggcagactgtgacgtaccctatcgactagagtggtagtggggagcccgcgaggttggcggcttagtcggacggaacgcgccaaatctactcgagtggatcttgacttgcttgatggatccctgttggttctctgcatcgcccgatcctcacgactcgacctgtgtgatgttttatgagtagggcggatgttagtagcttatagacggttcatacatgatatctctcatcgttgactcatgggccccaaaaggatgaggtttcacaaccctggcaacaa

SEQ ID NO: 80645 - DNA, 368 bp, Zea Mays
gccgggacttcacaatcattgagggccagctttacaagaagggggtcagtcaacccatgcttaaatgcatcaccgaaaccgaaggcgtccagatcatgcgcgaagtccacagcggaacttgtggctctcacttgaggcctggggccctcgctgccaagatgatccgtcaagggttctactggcccgctataatctacgcgcgaatcaggtcacgaggtcgtgcgaagcctgccagaagttctcaccccgttcaagcaacccttcgcaatacacaaagctgattgcccacacatggccacttcaacgctgggggctggatattgtcgggcctctacccacggcccaagggaacctcaagttcacctccg

SEQ ID NO: 80646 - DNA, 565 bp, Zea Mays
actccttcaactgtgtcgcgcacgtctacgaatcccgaagcaggctcgatcacggcatcaggaagacttctgcctcgctcgagcacggcttcggcctcaatattatcaatgaaagggcgcccaatgtcaccggaaacagaggagctgacgtattatctaggggctttttgccatactcagcactgcaccaaccactacggcatgggcaacttccccatcaggtaggctcaggtacgtgaccgagccctcggccttggcctcagctctctgcatagtcaaatatgcaaatacaggaaccgaacatctccatcgggcacaagtaaacaacaggtttaaaatccataccaaaggctataccagctacaggggctcggctacacctcctcaccgtacgctgcaaacccctgcgctcctggtagccctcctagaggctataaatagaggagtctatgactttagtgagacaggcgaacacttcatggttttcacctccactgcgatattgacacttgtctcaatcaaccctaagaacttaggatcctcccctctcccaacctgcttgtac

SEQ ID NO: 80647 - DNA, 464 bp, Zea Mays
gggccctagaggcatctcccgttttccccgttgattcacgtgcgctgggttttgattcactgactcatggggtcgccaagcagacccgtctccccccaactcccgagttcatcgttgattcttgtaatcgccaggatctgagatcctcgctatcgcttgctgagcgtcctagctccagggtataaataccatcgtgtctcgccacctctccatcgggtcttagccatggacgacggagctgaggccctaagtactgagaacgaaatagaggaggagcagtggctgccgccgttgttgaatcatgttttcttcttcgctccggcctcggcgtagggtcgttggggccgtcagggctcgtggatcccgtatcatcctctggggagcacgaggatcatcggtgggttccgaatttgtcgccgggcttcgtcaaacgccgcggatccgccgagccgcgtgggtggggg

SEQ ID NO: 80648 - DNA, 437 bp, Zea Mays
ggattacataggatgaagatgattgtggagtgtgagtctacacttttcgtaggagcatgattccggcggttagttggccttcgtgaggcctgtgcgtacgctgcatgcgcagggcatgatcttgggaaccttcgtgcccatgtgtacatctccttcggttgccttcggttgcacccggctaaggcccattgggcgccttacggtcggtccacgaagcataacagtgccatgtgacccggggaataccttccccctcgcagttgctacctaatatcgttatttaaaatatgcttagaaacaacaatgataatcatggagtatggacatggaatgaacaagacttatcttatagtacaaatccatgaaaattaagcatttggttcgtcgatagctcgacaccactttattcatatgttcataagtacaagacagaaatg

SEQ ID NO: 80649 - DNA, 697 bp, Zea Mays
atggctagatttatgttgaagttgtatgtatctgcatgctatgagccaaaagcatctggttatcgtgctagatggcatgggctttggtggtggtcctccatggctagatggtcatgttcgaggcatggctacctgtctagttcttgtaggtagtaaatggtgtctggtggtttggtatcggtggattagtgccatccgagtgctcatcagactcggtgtggcatgtagtgctggacaagtggcatgctacttggctgtcatggtgttttattggtgaaagccttgttcagcttgctatcaatgccagcggtaatggcgtccttcgagtcttcgacatcttgctccttgttatagggatcgctgaagaaccactcctcgttaattatgacttatggatcaagggctatgggtggtttgggcaaggccctttgcaatggtagttcttggggaaagcccttcttgatcgctagccatttgtagcggtgatggtgatctaggcatcatgttccttcttggaggcatcactacaggaccactactctactttggcctctacgtctttgtctttgtggccttttgttgttcccaaagagatcactgttgtcaatggttcttgccacacaatcgatacacgttataggtccctgttgtgcctatgcatttgattatcgttcgtctttgcaatggttggtccaac

SEQ ID NO: 80650 - DNA, 344 bp, Zea Mays
aattatctgtttgattccaggatagcgatgtctcaacggagctgtccttgtagctagctccagcatcaatcgatgggaatatctgacaaagtcgcgtagcagctattatctctttgagacattaatcagagacgatgtatgtatctgaatttcatgcagctgtaggcatgaatacgcgccggaaaaacgttgggattattatgagccttaatttgtcccgtggcgtttgttaggcctaatcgcccaataaatctccaccgggctgtccagtttcagtttggtacacctaatcgatacaaggcccacagcgatagagatttccgatctgatccacgcagcagccg

SEQ ID NO: 80651 - DNA, 947 bp, Zea Mays
gcaaaacccccatgtacggtctcttccctgcaccaaatcctacctttttgatgtgagttccaagcaaagatatggtcggggtagagagatataggggtgagaagtcggctctgtcagagctgtccacaccgagacaaaagccatgcctagtcttgtcaaatggcttagggttgggttcaaacttttccagggtgtgctagggatctttgggcgccattttgtcaattgggccatagggttttgagtttgggatcaaggtgaacatgtttgatctttgaaagagggtcggttttgaacttgagcaaatcctgatttccctattatgctctactctttggtgacttttgtgaggtttttctgaaatctttttggggtcactctctttctagtttttgtaggctattaagtgtactacaacttttataattagcccaagtcaagacaatgtgatttacatagactttttgccataatcccttcaagggctccttttgtctataagggatttggattagggtttgagtcatcctcttctctttagtgcatgataaggccaaggcatgacttctaagttgggttacacctacttaggatcttgattcccatgtttgatgtcttctactcaaaccaattcacatgtgatgatgggtttactagtgtagtcttaagtgaaaaccctaagtaacacctggggtgttacatgcagcctcggccgtactccctctgcgcctcacctgactcaccaaacccagcacttagctccggcgagctctacgccgcctgccgagccacccaagcactcgaccaccacggccagaccactcccatccatctccactcgatctcgtgcctcggctagcttctctagagccatgtagagctccccgaaccaagaaatcgggcgttatctcaccgtagaagtcgttccacccttgccagagttgttt

SEQ ID NO: 80652 - DNA, 318 bp, Zea Mays
agcgatgaaggacaagcactaggacttgactaagggactaaagaagttattaactagctatgatggctgacacctagggacatcaatagacacaaggatatgacaaagtagatcatgttactgatgcagttgaggactaacgggacatgtgtctaggacatgggggacacatatagattatggtacatgtgacaatttggtggttgggcttaaaaccacacaacaatggttttgtggggtttaaaccctcaaaacccagtaacgtggttttagagagaatcagatgtggaggttgtgtcaaggagaagaaaattcatg

SEQ ID NO: 80653 - DNA, 677 bp, Zea Mays
cttgatcataacgaggcggtcctaggatgaaggaggcagcgggtgaccatgtactcatcactgggttgcttcaggcatttgaggccgaaggcagacttggccttggttattgtgactgagtttggacatattgcgggatgtagggtgaagagtatgaagatgtactaaacacctcttttaactgtgaaggttgtgtagctaacgaagcaagctctttccacttgtcgatggtatggtgacatgttcttatagtgttgcccttgtcctcaccacaaaacaagaataatggtttccttgggggcacacagaatctgccactaaagcgtcggcctccccttcctcttggagcaggtggacagaatgtgctagtgagggttgctattgagagcttgcatgtttttgtcctgattgaccctgagactaggccatcctttcctcaccctgtggtgggttacagatgcttcagacatgtcttggatggaacattccctggcgacttcggtgtaattatggaactcttcccttctttggcggaaatcattatcagcccttatgtactcgtccattttctgcaataaattttcaagggaataaggattcttcattgcaaaatactaggcagttggtcctggtttgagccacttgaccatagcttcgatgaagatgtcatcttgaac

SEQ ID NO: 80654 - DNA, 937 bp, Zea Mays
ggctcaggccctaaagtcctgaggtagttcgtcttattcctattgagggtcgagcctttgaacctctaaacagtatcgcttttgccttttttcctcccgaagcgacacatcgaggtagaatacgactccgattcgctgctccttttctgaaggggtcacccgaggcagatgacgcttctttctagtttggttgccgaggcgagtaggaggtggtatagtcgaggggagagggcgtaccttttgaggcggagtgcggaacaacgctcagcgtgttttttcctcagaggggacatggtcatttaatgcgatgagacgttctgcctgccaaccaaccgttcgtggcacatgtgctcacgggattcgaaatggccgtcgtccagccgcttttcgaatcacaccttggtggctctgtccatcctataaagctgaccgagagggagggcttcagaccgttacctttgcagtctcaatcctttgccttcaaatgtcgttttcaccttctgcctagagagctctttgtcttcttctcacccttctgtttatttcaatggcagaaaagatcatcgtccttcctccccgcgacccgtggcctatgtcttccatcaccaatgcagatctggaagcgctggttgatgccgacctgctccgacattgaactatcggcccgtagcccgagtagatcgcgccgcacaatgagaaggtgccgaatccgttcactcgctaaatcgttagcttcacctcgttccatgaaaggggctttggggttccagcgagccgcttcatgcgagccttgccgcactactacgaggtggagctgcacaacttcaaccccaattccatcatgcaggcagccatcttctctgccatctgtgagggattcctggggattgagccccactgggacctgtggctccatctcttccgtgcagagcccttc

SEQ ID NO: 80655 - DNA, 626 bp, Zea Mays
catagctgcatcatatatatgtaagtctgaatccctggctgatgaacccaagagagaatccaggcagcaacctagatttcctttatttataaaaagaaccacatcactgttcgcacagacatctcacactcattcatctccgtcaaggcacagacatcacacatacatttcaatgctaaattacaacttcaaaattgcatgcattaactatatataaatttcaacaatacctatgctatcctcaaatatactgggacaaattttaactagaattgcataatttgttcctttgctaatagaaacagaagaacacacactgcatattgaacatccccaaaaacagtagaactaggaaaatatactcaagcacaggaaagatgaagtaaaacgaagagcaccctcaccggatcgacagtgccaccagatgtcgggacacaaccttcgcgcagtggaactccagacctgcctgcttcaccacaggttgctgtcgccggacaacgaaaatggatcccgtcgggacaccctcgccctccgtcgtagataccgtcgcagccagctccaccacccccggccatggatcccgtcggaccttcccctcctccaccatggatcctgcaacagccaac

SEQ ID NO: 80656 - DNA, 275 bp, Zea Mays
gtccaaccgaacaaggtccccaaattctaaggtcccctaaattaagtgtatcaccccactaatactatatagagcactatgcttgtttacatttcagcttgccttttgctcatatatttgatttcttacctatgtacagttggagaaaagtgttgttcttttcaagccaaaatttctcacggctggagaaggtaatgcttctagcagacatggcacatttgtcgcggctggtgtagtgactaccactactcagaaatcactatgtgggccacctg

SEQ ID NO: 80657 - DNA, 992 bp, Zea Mays
tagccaaatctcttatggtctcattatcaaaaaacttaatgcggggagtaccatatttgttatcaggagatgcagggtgatgtaagtgatcaagatagtaaatctaaaaaaagaatgcaaaaaatatataattagtacaaaataaatatttgcatatcatatatatgcacagtaaacaaaagaattacttattagaacaatgagtgaacatccatatattgttgctgtaatgtttgttttgtttcttttgtgccaacgtgtggcagcatcacacaaatctgtgtaaactagttgacaccagtcaatatcagccattcgggccatgtttgaagtcattagtacctcattgtttgtaatgccccatgaagcagatggaaaaagaagtcgattgaatagaatcagaaaaaagcatctgattcataactcatcatcattgccaagcactatcttatcctgaagctttgacaacatcaaattcttctttacaaattttgagatcacgtctcagttttgcagcagcatccacttcaccataccaatcagtaaactccctgccccctccagcatatggcaaacccaaaataagacgaatcgtctcttttgttatcttcagttccttgccagcccctgggcgcatggtcatgtcatgtggatccaatttatccatcaaccacctgatgagagatctgctctctaaggcatcagttcgcaaatcaaatatactagaaaatcccaacctagcgactgcatcgcgctgccgatcgctcattatccaagttgagacaataacatcataaggaatgcagcgaatattcaatttatgaaagcataaatgaatatgcattaatacacaatgtatatatattgttataactaaggatactatatatacatacaagtgatatttattagaagcttgtaaataactagtctacaacactaacaaaaataaacagcataccaaaaataataatatacataaatgtaacgtg

SEQ ID NO: 80658 - DNA, 728 bp, Zea Mays
ctaagacttatcggtcatgagtgggaggtgggccagctctttcccacgtcgtggctcagtgttaggtgcattcaatgtggcatgtgtggtactgatggtgagaacatgcctttggccagatgtagagttcactcgagtggctccctaacggttcgtccgaccccaggcacggtgcataagggtcatccgggttggatttacctgtgcaggcttctccctatcttctctctaacttgtggccctctcggggcctggggtttgatcctcaatagtagcccctatggggagtgtgtctccccttgatggattctttttatggtgggtcgtgcagctcttgttcctcatattgcctctggattcttgagtgggatacatgggagtctccctttgattttaccaaatccacccatccgaggcccattttcttaggtcaggactagtcctagtttggctagcacaagctttcacagattatgcaatagggcatgaatcgttacgttgtatttatttttagaagcgttggttaggcgacacactgcttcgacttcttggttctctccttataaacaggttttttcacggccaccttattttacgtcgctcttttagctagaggaggagagatctcccccttgtcctggtccccttatggattaaaacaagcacccagatggggaccgcttgctagcgataaggcccttgaagcagcatctgattgaatttgggta

SEQ ID NO: 80659 - DNA, 579 bp, Zea Mays
ttaaagtatcgtcatttggtaggaagtatctttcctgctctactgcgtctttatcccacggtccgtcacggtccctgaagtcagttgtacattcccactgccatcaccgccatgaacgccacgaggaatgcttgttttgttcactgatggtaccagttatttcgtgcacgccaggtctacccatctctggtgccaacatggatctaattattgctcgagaacgcacgtcatgtccatacaggcatgcatgcaccgaatgcgcgcggcactgacggggtctgctagagagaccatgtaggtggtcaccgagaaggtggtgggcggccatgcatgtgaagccaacaaccgagtgcgtcgagaggtatgtgagctagcgatccagcaacagcaacttgtacgcgttgcgctcagtagactaccggcctctacgtagcagcagatcgattgcagtggagaaaacgtttgcctggatcccactgcgggctttgcactggctgatctggtctggtttggtctgaaaagcgaataccgcatttaatttcagcggtataatcagtagacactcagcgctctgctgcg

SEQ ID NO: 80660 - DNA, 490 bp, Zea Mays
ttctgacaggtgatgtgccatctcggcatttaatgtgccccgtccactccgctggcaggcgacgactaggccaccctacaggcggcgtgcctgtccaatcagacagcgtgcgtatgcctataccaccgcgcgcgccatggtcatcatgacttgtacgttgctagggaaacttctgctgcaagccaattctatggagatcgcagatatcagggcacgaggagattgcactggattaatggctccaagtactacacccgttatgttcctgggcccaaatgtcggggctaaacattcttgtatgtgcccccttgagctataaaaggggaggcatgcaacgttacaacacagacccaagtcatccaagacacaacacaagctcacgagcaatacaacacacagtggagtagggtattacactctgcggcctaaaccactctaaactcttgcgtgttcttgtgttcatccccaagtctcacaacaagcagaacgc

SEQ ID NO: 80661 - DNA, 661 bp, Zea Mays
tccgaaagagtcttttgtttcttcgaagctttctggtcttccttgacagaccgggttgcttgcctacccagaatactaacaaccctttttcttttgccccctctggccccttcgtcaagcctttcatagtcaggatactcaaagttgagagcatccataacacggttcaaccttcgttttggtcgggagccgaaggcaatagtcatcagctggtctttcttctttgtatagttcccaagaatctcgttgcacattgtctctatcaattctagccactctgcgcatggctctttaaatgtcttctgaaatttgaagcgataagggagtcggacaagttcatacttcccccccttccttattctttggcattccccattcgctagaggttgggaaggttatgtttgccaagtattcttgcaccagatccctagtgctaatatgcccagccaccaccctaaattccatctcgggtagttggcagggtgaccctagctgcatattgcatagaggttgcgtcatgccaaagctcagtttcaggggactcattaccatagtcatgatcttctcccttttcttctcatcatccttcatgtagaaccattcactagtccacccggttggccatttagtgcggtagccaatcaccagggccttggtatcc

SEQ ID NO: 80662 - DNA, 325 bp, Zea Mays
cttgtctccatttaggaacctgacgcttgtaaccacctgtgccaaggtggtggtatttgttcttcttagatagttccgaatttgcctcacttagcgatatgaaatcagggctgctcctctgctctagaaatactgcccactgacctgctgagattttatatttttcgtcgggtctaggtctttctttgcaaactttgtattcatctcagacctccagtttcggaaattgattgcaaactgcttcatcgtgtattttttcacgagttcttctgaaccccgaggcaaaacgaacctcgttattagcttattccacatttgattcttg

SEQ ID NO: 80663 - DNA, 521 bp, Zea Mays
ggcgaggtattcacatctccaccagtgagctcagttgaagcccaaattcacggaatcctctccacctctcccaaaattggtagtgcacggtgaaaccatagtactttacggccgtgtagccccaatctcacctcccaattccacccggaaccgtcgcggcgccgttttcccccttttctatcaccggcaagcaaaaatcctctgtgtcccgtggccagctacttccatgtctgctcctgctcgttttaatcgtgtttcagcaccaatatacactcgtgatactcatcggctccgcccttcttgctcggccacgctcaatcacccggaacacatgaacttgtgttcggtattccccgctaccgtggtcacactaagtcagagccataaccacgcgattgaagcttgttcctgggttgtctcatgtccgtaatacttacccagtaattaaattaggcagccaccaccagtaggatcatcgacggtgagcgcgccgtggatttggacctattcgaagaagaaat

SEQ ID NO: 80664 - DNA, 827 bp, Zea Mays
cgccgacacattcttcgtgcgcggcatcctgacctgatgactgcaaatgagagatagagactaagcacagatcgataatatccgatagaatatatcaaaggatgagatggctacctggaaagctcacacgagaggtgacgatccaagcaggacaggagatggcacacaggcaatcaaggtcactgaaatgacagaagaggtgagcacgtattagtcacatagtcataagtatatgaaatgtgaataaatacatacacagagaaatgtggcacagaaaacaagagatgagacgatcgagaggttaaacgacgtgaaaacgacgtttgaacgataaacagtgtcataggaggtttggaatttgaattgaggcacgaaacgacatggaattgagtcgatacttcacgaataagtttatataggtgaatatgagtgaagtgtgtgcttggtttgaatttaggcgaagaaaaagagatttgggcactcggctcggaaacgatcgctcgaaacggggaatttggtgaaattaaagcctggaatctcggattggcgtgaaatttggcaaatatgttactggaagtgttgtgaaggtgcctgaaaaatttgggttcaatcggggcatttttggctggtttgggcatttcaccaaacacgtgacgtgcagtgaattaggttttcggggaaatggccatttgaggtatgaaaaccctcccgaaggagctaagaacctgcagaggattcaatgtagcacataggaacacttccaaccaaaaggattcacaggaattcgcaagaattttgaatttggatcaaagggtggaaatggagtg

SEQ ID NO: 80665 - DNA, 1367 bp, Zea Mays
ggcgaccgggcacggtggcgtcgcctacctaggtgcgcgattaatctgagcaaaggtgtgggaggagggactagaggcacgcacgggcagtggccaatgctgaaggcgtgggaagaggaagagcaggcagaagtgagagatcggcgttggcgtggctccattaatttatagccggtggatttccaccttccatcaattgagaatttttgaaggaaagagaatggcacatttgaggaaacatggtagaggaaaatcgaggaagggatcgcacaattgaggagaagggaacccaatgatacctcttcctcttctggaattgctggatccgttgataatcaatctaatgagagaatgcatatacgaaagaaagtatgcatacgattgatggaaggtatactccacctcgcctctaaaataacgcacatgaagattgcatgcaacagaacgtcaatcgtgcatacaacagaccctgaatatattacatggcatcaagtaaacaaacctattgcatcaattaaacagaatattcctaattaaggaatataatcaattaatcatgcatgaaacagaccctaccgaaaggaaacacataatacaaaaaaggaaacacattaagtcaggcaagggaatcagttaggcacgattttctgaatatattacacggcatcaagtattttacacgacatcaagtatattacacgacaagggaatcagtcatgtaaggggaaaaaagaaacaaaatatattacacacgatgtgcgttattgtgtccgccaagcaggtgttctcttctcctctcttctttgggccgcacaccagaataaatcctgccttctttccatccctggaaaacacgcccgctattcacgttccagctgtttaaaacaagcaatttttcaaacataaaattggatgcagtgtaacagagcagtagcaaaaggctggaactggaagcacgcccacatcaagtatattcctttttcctagaaggatggaagcatccacacacacacccgttcagccatccatccccaggaagaaagatttggttttgacggaagattgcatgatcacataaggtaataatggcgaaaaaataaataaaaaaccaatcagcgaaagatcgagccaccttgtgatcagtggaaaacaagaattaaacagcatgaaggctttactaactattttcaattgtttttagaggcgcaaattactgaccactgccaacacaaggttaacttgtcccttatggttcggattaatgatgattaattgtcaatgggtaacactttgggatcctattgtatgtgtttgaggagacaacatgttatatgttgtttgtattttgtgaaaccggtttatatggc

SEQ ID NO: 80666 - DNA, 475 bp, Zea Mays
tgcagcacaatttccatcacaggccggatgaaaacagagctgtaaagtgtaaagataccccttcgcaacgtttttattcaccagaacagcactgaactgaaaggcaacattttctcttttttttcatctgaacaactaacaggcaacactgtacttggaattcagaggcactacctctgcatggaaaaaggctttgtgagggttttgtataagcttgctccatggcagctggtgcctgaaacaatttatacgcaataaagattttcttctctccatatttcatttgaaaaatttatacgcaataaagtttggcgtccttgtaccctgataagaaaagagcaaaaaatcaggtcaggcacgggccttagttttagtcaatgggccggcacaagtaaaaaagaaatgtagttttcacatgaaatgagttggaagcaaacaaaaaggcaaaaacgatggcaaagatgtacagggtcct

SEQ ID NO: 80667 - DNA, 658 bp, Zea Mays
cagagatttaacttatctgtgttttattgtatttcgatttaatttcccagatttaatattgttgttatggccacttggcgacatatatataaatatacgatgccataacacaatcaaataaaaaatagagccatgctgtgacttcagaggtttgaacaacccaccacaatccacgcgagtacaagctctagcgtatctggtgtcaacgcatgtgcggccatcagggccatgacaacacaacaagcctccgtaacaagcgtgagaggcgcaattatgtctcggtagtcggtgtacacgataaatccacacagtgcgcaacaggcacaattgtggctcaatgattgcgacacatggatagtgcctacagggcctgcgaaaaatgtgtgactcggctatggcggtccgactcaacgggagtggtccgattaagcaagagcgtgacatagcaatcacatgacgcagccaagttcgaacgacacaaatgatgcgtcgtgttgccagggcgcagccaatggttagccaatgctaaaactcagccgattaataacgcaacatcgcgcgtgtccgattacccactatacaatttaatcgttctgcgtgagcctgaaagctcaacataatataaatatttataacgatttgagtatgcatagtatag

SEQ ID NO: 80668 - DNA, 380 bp, Zea Mays
ttctagaatacactataacaagatggagggagtaaatcttaatgaggtgtctacgtataaatggttatggtaagaaattgaaggtgtaaatctgaaaaagacggcacaagaaaatgcagcaactgttggatttcagatttttaattgaaggtggtaccatatagcaagaaacatcactaagtatcagcttgtcagaagtaaaagaaataacaatcttgacttttagaccacagtgatgatatcaaaattgtttgtccatatagattatgcggtaactcagtaactgccgaaaacaggaacatcgtctgttaaagaaacatttttttaattgaacacgcaggagggttgtgtatcattccattaatagaagaagaaaaaac

SEQ ID NO: 80669 - DNA, 634 bp, Zea Mays
aagaaccaacatcgcatagagacttggaatccttcattctctcgctcacttgtaaccctagtacgagtaatcaacaatcagatgccggtagtgcaagccaccgaaaaaatgaaagtagccacgttccgcttgaaccaatataaatcttgtgccacactattaagatccaaaacttgcatacaaaaatttaattattggtgttgattcaaaacaccgaccgattctccatcccgtcgttgggtttgcagctctgcattggcattgccggccgcgggtacgcatgcttctttcatctcgtaacctagctagactagaggtagaggtagctgtcagcctaccccaatcaggtcgtccagccctataattagactccgcgtcgtccgacgcatcctaacaaccgcagccatcaaatccccctggcccctgctagtatatccctaccgctccctgcaccagctgatccacatcgtcgggccgagaacgtatggccaccgcctactgcatgccctagtaggcccctgtaccgccgccgccacagttcagtcataataaaggcggacgccgcggagctgagccattcacagttcacatcacacacgtatatcgttcgccacgcaaaaccaccgccgccccc

SEQ ID NO: 80670 - DNA, 354 bp, Zea Mays
ccaagtagccaaagctggatatgagtagcagcctccatgtaacccatctgtggcagaagcgtccgtctcatgagctgatatagaaacttggtcggtgtggtgaagtctgccggagaacgtcgcgacccatctgagaagggcggtcggaacagagccgcgacatgagctgtaccaggagcaactccgccgtgagggcgacgaggaggatcagaagtgccatagcacaagtgtgaagacgagtcgatgactcgttgaatccaaacaactggcgaatctggctggcatgaatggtaacatcctctcgctcaaagcggaatctcatccagtggtgatcagggtcgatccatacagtag

SEQ ID NO: 80671 - DNA, 519 bp, Zea Mays
aaatgatattttgccataaaccatttgaattttccaagttccacagccattttgttaacagagcatcgttcatatatcccagattcaaaacacctaaacctcctagacttttaggagaacagaccgtattccagttgaccaaatgcattttcttcgtttgagagccgccttgccacaagagtcttttcctgaacaggtccaacttcctaataacagatttaggaagttgaccaaatgcattgttgttattacatggctatcatgctctggctgaccacaggcaggcaactacttccacttggggtttgcctgagaaccatggttttcaaggtgtcacctaggcgcctaggcgctcaaaaatcatgggcgtccctgttccctaactgaaaataaaaaaaatcagaaagagaccgggaggggggcaaccaacaagccccagcagctgccaatccccgatagctcttgcttgtagaactcacgcttgtcaattgaggcgtgatagatctcgacctggacaga

SEQ ID NO: 80672 - DNA, 418 bp, Zea Mays
cggcaggctgccaacgtcggtgagcttatctacgctggccgcaagacaaaggggtacgacgaccagccaccggagttatccccaagcgaagaactttttacctaggagcattatccggtcaccagtgagcacgaatcacaatgtcggcgtggatctaggcgcacggtcgccggcggtcaggtgcgctgcaccagcgatcttgttcaggtcactgtaccattggaacccctattcagtcacctgacagatcaactttgagttcaattttctcctaaatttacatggcaacttgctgatcggctagtagcaaagttgttgtccaatgatccgtctacaaccttgctatagcaaccacaaccaaactctcactagatcatggttgaattccagttcaaagatggctcaatcacactgtcag

SEQ ID NO: 80673 - DNA, 663 bp, Zea Mays
gttttttcgcatttttgcgaggcttagaggtcgccctaggatgagtgattgcaaacgtgtttgcgttggatcgagtaggcgcgagtgtactgtgccgatttaagtcattgccaacttaaaccgactgcgctgttagtagggtatagtggtcaccccgagttaagtaagcgtgagcatgtcgcaccgccttaagtcatcgtcgacttaagccgattgctccgttagtagggtatagtggtcaccccgagttaagtaagtgtgagcatgtcgcaccgccttaagtcattgccgacttaagccgattgctccgttagtagggtatagtggtcaccctaagttaagtaagcgtgagcatgtcgcaccgccttaagtcattgccgacttaagccgattgctcggttagtagggtatagtggtcaccccgagttaagtaagcgtgaacatgtcgcaccgccttaagtcattgccgacttaagccgattgctccgttagtagggtatagtggtcaccctgagttaagtgagcgtgcaggttgacagtgaacaatttgagtgcctttgaagtctttttattgatgatatatttcccagtttatagaatacattgtcgtcccaatagcttttgagatatagctaggggtaaaacttcctgagatgttctatg

SEQ ID NO: 80674 - DNA, 341 bp, Zea Mays
tgggaagaaggggcacccaaagctttagaaccatggcttaattaagtaatgatcatgatagaaggaataccctagcttttcatgtgtctccaccttggagagagatgctcaaaccctagttccccctcttgagccattagacccccaagcattggattaaggggagaactatgcaaaggaccaattcatgatttaaacccttgaccaaagttgaagtacatttatatatctacaagatataggaagggaagtattacaaaaaggtcctacaaaaacccccaaatcaagcccccaagtggagagcaccctagagcaatcaaattcttctctaagtcaaaaat

SEQ ID NO: 80675 - DNA, 504 bp, Zea Mays
tgcggggaggtgggtttcactttcttctctaacgacttccccttcagctcttcgggggaaacctgctccaatccctgaggcggtaggcgtggttttatccgaagccatctgctagggaagagagtcactatcatgcacatgcaaattgttttcaaccaagttattttattcattacaccatcacattacaagcataagaatactacaggggaagactacacgagagcgttcttcgaggtactagcgagttccttgtctaaggtgtccccaaatgccttgagaagatcatcgaggctggctagggatacatctttcttcgtcggactagtcatctattctggggggaggtagggctagaggggccttcttcttcttctctgtctggcatccttggttagcggtcttcttctagatcttctttttgggggcgagtgctttcagcttcttgtcaaagtctatcttcaaggtccagtaggcctcacgggtgttggcttcctcaccttc

SEQ ID NO: 80676 - DNA, 754 bp, Zea Mays
tgactcttgagaattttgtaagagggtatggagtgtatagaccataatttgtagtggatgcccatctaagtgctcatgctcttagtcaccatgaactcgatatctcttagagacaactaaggcgagaccaagagtatgacaaggccatcaaggggtagtccatttagagcttcagaattgttcgtgtagagatatgttatagatgatagctctaatgtggattgtagtgttgccactatcacctctagcaccttcaccaagaccccataaagtttgttggttctagcacaatcctccacctccaatgctagcacagtccctccacccccaaagctgcttgccacaaaacagcatagactaggcatcaagcaatagcaagtaatggccaaggagctcagataagaggccgagcaagcaccattgatagtcaaatgcccaataaaggcagactaacactctttaagaccattcagacccattaagactagttctagcagttgttgctgatggataatgctcaaaactttgcatacttttatcatgttctctagtagactggagtagcaccactagtttagatagttccttcaactgctcttcaaactccagttgccccaactatatagtctagaagattataaggttggagtctatattagtatgatttgctagtctaccaaatgacgcttgacttttctacagcaattcaaggtcagactacatgcttcaatggggtgccttaggctctaccatt

SEQ ID NO: 80677 - DNA, 578 bp, Zea Mays
gtttagtgtacgagcttcagatggatcccttctgttatgttggggcatgttttgtgctgagaattgtggttggcccacagatagttgttcatatggtggctgtccttgaatgaatggtaaggggactgcctagtgacttggtgatggacttgttgaagcaatagagcctaaaggttgtggctttggctgccggtgttggacatgttctatgatatagggagattatacgaagatgtatggaaaacctactttggctggttctactgtgcttcgacaagctccttcagcttttgtatagtcacctggcaacttttcgtactatggcctttgttcttaccatagaaaagataaaccaatttttttggttgtgcgttaaatattcctccaaagcttgagcctcctcttggggctagtaggcggaaattgctttaggaagattgttgttgagttcctagctcatggggctgactttgttgcccttgagattgaccatgtatatcttcgttttggcttggattgtgaatgcttcagatatgctttggatgaaaccttcctccgaagccacaggtcacctctaa

SEQ ID NO: 80678 - DNA, 700 bp, Zea Mays
tctagggtttcatgtttcacagttaaaaactttcacaccaaatgttgttcccgtgttttcggacctgtcccgattggtggatttatctcaagtggaggtcaatcatttgtacattgtggatcgacgtatggtgagaaaaggaagtcatgatgtgattcaaattcgtgtggtgtggtctcatttaccagaagatgcagctacatgggaagactatgaagtgacgaagaagtgcttcccagatgcacttgattgggagggggtgatgtaaggaatgtgactacttgactatgatgtaatcaaatgtaatcagagttgtaatctgttgggtgatgggcctattatggccatattcctggtgggctatattagcctagttttgtactataaatactggacaaatacttgagaacgacaatgagaaaataatagcaaaagttacctaccagttcctcttacctgttgatgtgtgtctggaagcttgcttcctttcttgcgatgattgcacgccaccgtctgaggttgttacaaacaacctaccccgtacaccaaacaccccgtcgaacggcagcacccgattgaaagaagcaagcttcgtaccttttctagtcggccgacatcctcgcaactacggctctgtgcccgacgatagtgtgaactccgttgagagcttgggccgacgacgctccaagcgagtgacgcg

SEQ ID NO: 80679 - DNA, 521 bp, Zea Mays
cttaccactgtttcaacaactacgactcggacaacacctccatcaggtaggctcgggtacgcatccgagaccccgatccaggcctcggctctctgcttggtcaagatgcgaaatacatgggtcggacgtcctcccgtagtccaagtcaaccgccagtacaaaggccattctgtcggcgatgccggctaaagggcttgggttcgtctccccacctcagtacgataagcctaggcgctccagggtccctccttaaggctataaaaggagtctggggcttcaaacggcaggaggagaacacttcatgggttttcacttgcacaccgatattagcactcgtctcaattgtcactagggacttgggatccactccctctcccgatcagcttgtaccccctactacaaacacttaggtgcaagctaatataagtctcatccccctctgctgaaagtatggccttcttttgcccgaaccagaataaaacttgtgtcttcttgcatcactcatctggatgagggcacgc

SEQ ID NO: 80680 - DNA, 449 bp, Zea Mays
ccggtgcataacataatacagaagctagtgtactggataattgcatccttaccagtgttcggacgatagtgggctcggcccacgaagcggtgcggttccacggcggcgccaggaccacggcgacgaattccccatgctccgactaatcttcgcactcgccaaagcttcctacagactccacatccctcagtgaacctctacaacatctcaccaaggactgggctgggcacaacacgagttcgacagcggcggcccgcggctgggttcttctctcacccctctcgtctctctggtgctatgcgtttgggtggccagggagtcgcaggggctttatatcctggagtcgaagggaatcctctcggtagtttgttacagcatgcatggatcaaactaggacgaataactggcgattggatcctatagattagtgaaagaaacgtgtgatcgcg

SEQ ID NO: 80681 - DNA, 498 bp, Zea Mays
gaggaggatcctagataatgatatctatgaagtctgttctatagctcctgaatgtacctcccatattctcttccaatgcggcggaaccttcggggcttctactatcatcgccatcccctatgatatgcactgctctcgtctccacgagctcgcctgtcccccaacactgcaaggttggggcttcaatggattaattttgctttgctaccgacatatgtggaaacgttggaactctaaattattcaaggacgaactcaactccctgcaccaggtaatatgcgcgtgcaagtcagactcccgtctgtgggcgcaatgcccccgcccgcacaaacatcattagatggaggcatggtgcagtactttatgtgtataatctccctgtaattcctgctcaaaatgtattccccctccccttttttcttgcttcttgctaaaacgagctttaacacgtttgtgattcctctccgcccatgatgtcggtgattaaatggaattttc

SEQ ID NO: 80682 - DNA, 713 bp, Zea Mays
tgacaccctgtgcatacagtagagtggtggaaatgtttgagagaaattatatactgtagtgccatcagaaccagttacacaacgcctgtctacgaggccccccctccttattcctcagagagctttctctttgtgatcaagaaagccacgaccaagcttaggcactgctggtctgctagacaattaaaagccatacgttcagagttgtgactttagagagctgcctcctcctctttccagtcaccagtatgaattaaacacgcggtacatgacagtaagaaaccatcacctctttgaatatatggccttatatgttcatgtactgcagtactggagaattaccaatatttgtagaaccagagctagatgctagtataatacagttttgttacttccttcttaccgccgctgaaagagcgtgtgtgcttcaggtttaggcccagcgcacccagtcaccttcatcgccagcttgttctgcaaaagaattaaaatgctctcagaaatctcatgtgtcaagtatgaacatttctctagaatgtaggctaatgctgcaaattcatatagttcccctaggctggtatgagatcaaaagaactatgtatctagagtcacaatatcaccctgataactgccagagcgactgtcaatgcttcctccaagcctgctatctcagccatgctcagcccattcagattttcttccatagacctgaa

SEQ ID NO: 80683 - DNA, 550 bp, Zea Mays
agaaatgagagatttaggtagatcaacatcagatacttgaggacgggttatagcagataaccggataatagggcagaattattaaaggatccggagatttggatgataaggccacaacatgattcacaaggaaaagattaccagatctaggtgaaaggagaggtggtcacatgagatcgattaggatgagcatcagaaatgctatgaagattcgggacaagatctatggaaagaaacatggccttgatagggtttgtgcaactagacaccaaacaacaattttttttgacgtaacaagtgcacaaggagacttgggatggtctagcggtcaagctatggggatccacaaaccgtgcaggtgtaacttcaagggtagaacacacaaggggtagagaataccaacataagcatgattttttaagaggtttcacttgctaaactcaaggttgtttgggggggggtcttttcatgaacagaacaaacaacaaacttttttttgctagttatgggcaaaaagggttgaataattacaataccacctagatagcaa

SEQ ID NO: 80684 - DNA, 559 bp, Zea Mays
agtgaaggttcttgttggcccatctatgagttccaacacaatccaaggttctatttatcaattcctttactttcttgccctaggagtagcagtagcttagcatagattacttttcccactccaatcttcacccttttcagctcgacgtcgtgtctaggcatcttgggtggcctacgacgccatgacaaccctaagatctatcctcattgacggggtccctctcagagggcgagatctaggttcctgtgaggaagaagaagactttatgccatcatggactgtccgggcccaaaacacgaccgtccagaagcacgcaaagaaggagcacttcgtgcagtgaggtcgaggaccgtccgaccctacattgcgaaccgtctgtgctcccgcaaagagcatcattagatggtttattctagtgtttggtaccaaatcaaccccaacgccgggtcatgagtggggctcaggcatagggctcgtagatcatgagtgggaggagaaccggcttcttctcatgttgtggctcgttgtcaggcgcagttaatgcgatgtgcacggtatt

SEQ ID NO: 80685 - DNA, 398 bp, Zea Mays
tatttataacctttcgaaggaatgtgaaacatcacgtgaaactggagatagaaacaaagggcgaaagccaaagcggtatgttggagttgacgtgatacacagattctaaagcgctagttcgataatttttggctgagttgtatgtgggagctgaaccggcacacagattctaaaccgcaagttcggtattttttggctgagttgtgaacagtaaaaggctgagtcctaggactcaggggcttcaccttggtgtagatgacttagctactagaaggaacaactgagaaacaatagcaggagtattagtaggcaagtttccatcgatagagtccaaattacccgagttgacaactctgctaagttagactcaggggctacttttaaggatatataccaag

SEQ ID NO: 80686 - DNA, 344 bp, Zea Mays
gtcatcacggaccttctagaaagacgggaaagggacagagcgggtgatgatcgtgcgaaggttctcataccgcgggtttaggccacgaagaagtgtgagaacgaggatccgatcgttgtacggagtgttgagatcagccagggcatcagcaaagcctttcatcttgcgacattattctccgacggtgagatcgccttggacgaagttttggaattgggcgtcgaggtgaagagcccgcgtctcctggtttccgaggaactgattttccagggcaatctaggcttgacgggcagtaccgccacgctcacggatgatgtcttgaagttcgacggagatggttccag

SEQ ID NO: 80687 - DNA, 464 bp, Zea Mays
aaagaaaataggaaactaaaagaaaagagaaaagggaagacacatccgatttgggctctctaattgcttggctcatttcttgatcatgtcagcccacttcaccaacgcaggtgcacagcccatgtgccccttcgtctttttttttcttttctttattagtccagccacagatgagatcgctacgacatcacgcttacatcagctaatgtgtcactaacatgtgggcctcctcgtccggtcttcatccttctccttcgaaacggactacggctgtcgcaaaacagactcgcgcctaggactctcaccaccccgttggccatctcagctagtcagctctcatccactcacacgctcgaccgcccgctaagacagtcgggtgggtcctaccagtcaggatcctctcctctaccaccggccgatctgatcagaggaactgcagttcagtttctcctgcgatctccgta

SEQ ID NO: 80688 - DNA, 476 bp, Zea Mays
ggcaaatgtcatgacaacttgacaaacatcgttccaaagcaaaagaggacaagaagtcgacaggatggtctctaaacagttaacactggacctaatgaccttccttggattttgttggaccaatagaccacccaaaaaatagacatgcatcgtcggtagtactcacttttccatagccatagatggtaatggtatacatcgatctggattgtttccaagtcgaagtcgaacaccatggcaacatgcattatcaccaaatcaccacatggcctggtgccctcgtcaaagtgtagccttcaaccaaaatgcaggattaaggagcttctccgtcatggatcgcgatctcttggagattcttgccgtgatacaaatgcagctgccaagagaaagagatcggtatgccatatcaaaacggtggccttataccaccgctccaggtgccgaagttctctccgggcaactcgtagccagccgcg

SEQ ID NO: 80689 - DNA, 407 bp, Zea Mays
ggtgtattgatatacctagataatgaaggagatgtaacaattttataacaaaataattgtgggtattggatctcataatgcttagcttgcccgaagcagaagaaccaaggaatttctaattaagcacttttctgttgtctcggatggagtatttttggttcagttgctgtataattcatttggattctatttctcagaacgggactgtaacgccggaaatgtccagtagtgtagtgtaactttgttggatggtatgcctttttttgctttaccatcagcaaatattagatgacatccataacaaaggatgcaaaatcggtggtccgaagtacaaacatccacatcgtctctcgatctcaagatgttccatccagataaatgtaggcatcacttttactacatttgaa

SEQ ID NO: 80690 - DNA, 802 bp, Zea Mays
gtttcctactgagtcccgaggctgaggccgagggctcggtcacgtacccgagcccccctggcgaggggttgcccatactgtagtggttgacacatgcttagaatggaaaaaagcttcttaagggatgtgtcagctctactgtattcgatgacgttggggacacccttcatcgtagatatcgagggcacaaccgggctcagacgaggtggaggttcgcccgaggtcgtgatcgaacccattttgagattcggtgacgcgtgccacatttgaaggagtgaccttccatgagattcgtgggagagtaggtagataaggtcgagctcgggcaaggcagagtttttcccgagggtgagttctatgtcgggcgagatggactttgcgcccaagggctagtccacgcccttgtcgcattacatgtcccatcaggggctggtcagacgacgtgcgtgtacagtgaccacttgcgtaatcatggtgggtgaatctttgacaagaccacggtgttgtaattcctgtacgcccgcaggcctaaatgggtaggtacgcgcattgaatgcgactgtcccgcagcggccttcggtcaagccttgccacatgccttgtcttcctcgcccgagatgggctcgggtgaggtggtcatggatgtcctagggcgatggggcctcgggcgaggcagagattctcctgagctttgccccgtccaagatcgggtttgagagaggcagagttttgggaagacccctgagggggacgtcgggcgaggcggagttttgggaggacccctaagggggacctcgggcga

SEQ ID NO: 80691 - DNA, 457 bp, Zea Mays
ctggtctttgcctcatggaagactttgttgacgtagtagaccggcttctggatggttcggacccctgtagccggtctcgaggcctctggctcttggccttcttgtgtcgtcatttcgacgaccagcaccatgctcaccgcttctgcagccgccgtgatgtatagatacaacggctccctaggttctggagctaccagtattggtagggacaccaggtgctgcttcaactcttggaaggcttgctccacctcttcggtccaagagaacgggctggacttccccaacagcttgaagaagggtagcgccctctcagccaaccttgaaatgaagcggctaagggcggctaatgaccccgtaagcttctggacatccttgatacgggccggagacctcattgcctcaatcgctttgatcttctccaggttttcttcaatgcctcggtacgaaagcaggaacc

SEQ ID NO: 80692 - DNA, 462 bp, Zea Mays
ccagcggataccagacttctcgcatctagctcgccgacctccaaggcgacttgcttgtttgaagccgtagaagcatgcatcatcgtcgcctcatcgaatcgaggtggagacgacccaacatggacatccatggaggtgtgggaaggagagctcacctggacaccctcgagggctgggttgcagcttgcgctacccaccagagccggatcactaccggcgacaccctcgggggctaggttgcagcttacgctactcactagagctgaatcactaccgacgacaccctcgagggctgggatgcagcttgcgctacccaccagagccggatcactactggtgacaccctcgagggctgggtaactgccaacaccaccctggggggtcaggttttctacatcagccgcctctaaggctgaaggctcccctgtcacctccatgggagtcgggcaactcggaccaacg

SEQ ID NO: 80693 - DNA, 702 bp, Zea Mays
cacgacagtcagaaggagtgtcaggcttagggcaaaggccaagggcttcaaaaattgcactgggattgacaagaaaaattgctcatgctgcactcaatatacccctccttctatgcatcttgacgtcatcaagaaattgggtgctgagttctgtaaaatgaccccttccaagctaagtcgggaggacttgaacagatccaaggccactggtactgccattcagaggccggttgcttccaccgacagcaaggatgaggaatccgacttctctgatgaacaggtgggggaccctcacttcaataatgacaatgatgatgaagccaatacctcggcggggttgtaaggctttggcctcccccttttgggccgtttggtgtttttggtacactggttggcaactattttgttggttaacggttggtgctggcgcgcatgtggcgctctttgatttttctgaaacttactctgatggaatcgaggtttatttcctgtttgatacaattaactctgatggagtcaatgactctttgctgcctgaaatggttaattttgatggctggaggttcggttattttttatgtgggctctctttgcatttttcttgttgggcccattggatgccttattcccctcatgtcatgttgattatgtggccctttcaattctactgcttatggatttatactggaagaaggatctatt

SEQ ID NO: 80694 - DNA, 799 bp, Zea Mays
tcctaccgctcttgttggtccgatcactttagaggtcagtgacccgggcactgggaattcgctgcatgatgtcggagctgaggtttcactgagtactgccttgggcgcgagctctaatcctcctttagggctcgagtctcctctcaatgttgttcctgctagtaccccaccatttgacggcgcgtcgatgcctccggctttgggatttcctttgttcctttctaaccttcaggtgagctaacctttgccctgctttacttgtgttgataaatagattcctttgctaattcttcgtgtttgcatgatgttctgagctctatgtcggctcagttgaggtttgcggtgtccctgttcccgatcaggttttgtctttgctgtagtggaaacctttcctgctccagaaccatgtagatgatagctttcttcgctactcgttgattccctcattttaccctctgtgctcttttcccttttcgcctttccagccttgactcgatggtgctccgatgctgaagagaggtatgctcagagtcaagtcgacttgaaccaggtttctgcattcttggacggtgcctgaaccctgaattcttccttgaacgctcaacttgattcagagaagagatcccatgaggtagatttttctaactattcctgatgcctttgtttcgtgcctttatttcgatgttcagtacccctcttgcctgtaggagaagatgcgaagacttcttgattctcgtggtagtatgggtaaactgtaccgtgacactagtagttcccttactactttggagaggagcca

SEQ ID NO: 80695 - DNA, 639 bp, Zea Mays
caggtttggagaccaatttatcgaaccagacgatgactggctgaagtgtatcgaagctacaagtgatgaactgctcgggccgtactccaaagcggaagataatgcgttatctgcggccttcggaagccagaaaaagaaacgactaaatagggtttttgatgctatcggatttatgtaccctgactaccgctacccgccacgggggcagaaaagaaagagtgcaacttccgggaaggatgatgcttcagctgctccaagcgggcccgcgccgaagaggaaaagggtgaaggttcttactcaccgaccgcgctatattgaaccggccacagtgcctgaatttggcggtgagacctcttcggctattgaagccaaagaacctgcacttacgcagaagattgaagagccggctgcaatgccgaaggcatcctcatccaaattagctgagccgaaggccggtaatattgaaaagataggggtcgcaggaacaaagatattagaagttataagcccttcggtagaagtgacagtgccgaaggcacaaaaaggtcttacagcgacccccaagaggaaaagaatggtcaacgtactagatgcgatggagacgataaagacttcaagccctactccaaagaaaactgc

SEQ ID NO: 80696 - DNA, 455 bp, Zea Mays
gaagctcgtgtactcacatgattgctctctggatggctgaagggggagaggttgagctcatcagagtggaggggggaagtggtgccggcttaaattgtgctcgggggaggggaggaggaggaggagcggtgagtggtgcggcttggagaggagcttcgggcactgcttttatagatagtccgggagggaattcggtggctagctggcctccggtgggtggtgaacagcggtggtgcacaacggcggcgaggtgacactatgacgatgaaggacggcgatggcgtgcgggtacacgtgcatagcaggaggaggacgagtggtgccaaactttgttgtgcccatcaatggggtggtaggagaggatgactggtagtgaggctgtgcatcactgttagctcgtgaagtgggggaagctgacaggtggggctaggcgagcagtgaaaggggaagggagg

SEQ ID NO: 80697 - DNA, 595 bp, Zea Mays
atacaggttactactactatattattagtttagtgtagtagcagccagtacagtactttacgatgattaacatcagctaaatgtcttttgcaatggcaagcaagcatgcacgcatgcatgtgcgacaactgacaaataattgtttcctttggattcaaatcgtgatgtacggataagcaacgggtagcattttagctgctgcctgttggtagtgaagtgggtggaacaccacatgcatgcatgatccatgggtgtcatgctggggtatgggctcgggtcggatcatgcacgcatgcaagttggcgcagcagtgacagactcgagtgagagcgagtgcgctggcgacatggggtacctatgatatgcatggtgatataggcgacatggtggtgataggagtaatcaggaccgagaacgagtgcagctacgcgcgtttggcgccgagtgcacgcatgaggccaagaatattgaacgcttgaatctggacatttggatttgattgaacaaaagatacaatgttggatcttgcagctcgctgatgagtattccggcccgttgaggtgctgtttggaattaagcgcatgtttgaaaccac

SEQ ID NO: 80698 - DNA, 499 bp, Zea Mays
agcatgtatgaagggacattagaaagactgttgttgattgatgtgactcccacccatactaaggaacctagctttccacatctccatttttccccaatttttcttctttggtcagccgatgggaactccccaacttcttacagtcaatggggatcccaagatatttcttagggagactcttgaaagggcagatgaaaatgtcagaataaagatcttagaaggcatcaacctcccaaaaaagtgctagcaagtccttcataataacatccgagaaagtttggaaaaacacagtgtggagaccatcaggacccagggcactattgtgcttaagattatcaaccacatttttaacctcttcaatagaaaaaagagccagtgagaaatgatctgtcattatcatcaagcctggtcatattaaagtttctcatgtttatatgagatatatcagaaggaccaaataactctctatagaaatttgtggcaactttgttaatcccat

SEQ ID NO: 80699 - DNA, 777 bp, Zea Mays
aatttttatccgagttattttgtacgctagaatcaccacacacaattaacaaacacctccaccacaataatcggacccggtacatatacgtgtatcggtgcgcccttcacacactaatttgcattttaacttagacatcacatgaacactactacttttcatccgcgaccataaccatacgcatttagaatacaacaagcaaatcatcatgactatgagcttaaccaaaccatttgacaggtcggctaactggagcaacgacatagcccgctaaataacatacacgtcggcttgccgattattatcgcaatccgagacacaacatacactacaacatttttataaacattcatattcacaagtgttgtacacacaccgaccaatcatacaaatcataaaccactgatttctaactcgaaaccatcacgcgcttacttcccaatttatgaacacataacgcgtattgacccgactcaagatatagaggaagcgatgactactttggcatgtcaccacctgtctatataagccaaaacaatttctactatcgactaagagttctaagtattaaacacattattaatttccacgcgcaaataatcctcaacttaacactagtgacaccgatggatttttactaaactcatcatgcgcataaccttgtctcccatacaacgatatggtggcgtgcactcgagacacttcgatcatcgtagcataaccactaatatatgaactccgatactcatgttttaacaatacatcctccacgcaaac

SEQ ID NO: 80700 - DNA, 866 bp, Zea Mays
cgcaccgtgatcgtggagggttatgccaccgagcggagtgaggaggaactggacgctgtcgggttatgggtccaccctcatgcccagtcgctcgcaagctgagtcgatgtgaagctcctcctgaccagttccttgagtccggaagcttccgccggtaatctggatgccccctcttagactgtgctttcccttttagatgtaatgaacttttgggtgacttgcaagactccccacctccccttctgatttgtcgaaggggctgtctgtgcgcccatatcacgataagcatcaccaaaaagtgtgtgcgcccggtccatgccaacccgcgtggcggcctccaccatctcgcggtaggcacacatattcttcacctcgagctccagctcggcagttcgctcttgggtgacttaagcatccgcacgggcagcttgggcctctgtctttacctgagcggcaacatcattctcctcattcagccaacgacctagatcttcattatctttttcaagcaagccaaccttctctagaaggttttggttcttgttcttggccacatacttatccctgacgacatcggtatgctgcatccgaaggcactctatcttgtcctccatccatatccttagcgcaactatcgtgcgacggttgccgccacacgtttggccgcagatgcgccggcgacctctctgcccctgtctcctgcggtgtagaattgcgcccatgggtctagcgaagtcaccatcagagccctctctaaagccagcttcaccgatgctaccactagctgcccagactcagtccctgcaaccgagaaacagattaacacaagaactcatatcattatacaaaatccagacagcaataac

SEQ ID NO: 80701 - DNA, 519 bp, Zea Mays
tgtctaacggcccatgtcggtccaagtagctaagggaaaatactataaaggcgcagtggaggtcaggacgaagggacatgagagaaaatatcagaaccttttattattcatcttcctactttgtctagcgctgatcttcttccccaactctctcttgtacccggatcttttagaacattatagcatcttccttttagctgtgatttccctacttgctgtttccttcccaaactccatctatccagcacttgttgcttgagttatgctttgtctggttcagtgattgatcatgttctatcggtgagggttgctaacaagtggtatcagattcatcggtcctcggatcctcgttccatggcgtcttctccatccatcggcaccaacatcaccgtcacccaggcgctggatcatcaaacacgcgccctcctctcggcgttggacaagcgttttcaggctcgcgacagcaaatgggatttccgcgtcgccgccccggagtcccgcgtagcggattcgaagcgc

SEQ ID NO: 80702 - DNA, 661 bp, Zea Mays
cctggtcccataccgtaagcctgcatgctccaccactctgcgacgggtgtcctagtatctgacaccgtggtctagggggtccggatacacaacttggcttcccaggctaagtcctgcatgtcctgtgcatgtatcaaaggatgactactatcgaacggagggtcctatgggtgtgctactaatgcttcctggctgaagctatgtacaggtctaggtcccagccgaggctacctcctggaggtcgttaccaactattttaagtatgctggtatccagcctcgacacgtcgagcctacatccaaggggggccaggtaccgggaaggagtcggtaacaccactcacaatagggacaaatagcatacagataagtgctaatactgctcaataaatagtactccaaagtatcttacaaaaacaaagttattacatccgctttcaagcgaagccctaactccattcctacaggtacaaactactcggcaccagcagggtcgtgccgaaagcgcgcatccaccgacttcatggcgtcctgtacgaccttccgagcggctcgccggcggcggtggcctcctcgacgcgtgcgccgagactgaaagtcgcctagagggggggtgaataggcggaacctgaaaattaaaactttatcccccaactagatcc

SEQ ID NO: 80703 - DNA, 607 bp, Zea Mays
ggaggtcgagttcgtgactaataggaacgagagggacaacgctagttcgacatcgcgtgatggtagagattgttgtcgttgattacggcgaaaggagcacatgttcgggagagaacgagagtgagagcgtgtgggcggttgtgaaatggaaactaaatttgggcctcgatttttatgtttatatatattttcgggttcacagattgacccgtcaatgagtgtttggctccacaaaccgcgtcgtcatggtgtgctccctcctcagtctcgatcaatttagaccgggatcaatcgtggctggatcgttgggtccaggtgtatacacacaatgctatatgtcatctagggtgaagcttcaccaaaatccaacgaactagccaacggcccaccaagcgaactagccagcccacgcacgcccacccataactcccgcaagtgcccacccatgactcgcaagtgcccactcatgactccatcgcgttcacccacgcgtcacgtcatctttcattaatctgtgctctttcagtcatttacgctcaatttcagtaattattagcaagcacaataattgttagtgcaaaaagaacaattactgacgaaaccttca

SEQ ID NO: 80704 - DNA, 494 bp, Zea Mays
gttgttagcgtagcaacgggagagtgcatcggtcaccgtgttgaggaggccgagacgacattcaacgattaagttgaaaccaaacaacttactaacctagtggtgcagcaagatggttgacagacattggtcgagggtgaactttaagttgtagtggttggtgcaaacgaggaagtggtggccccataggtacaccctctagtgtcggactgcctacaccgggctgattagctctcgctctttggctgccaacttcatatgtggtggcgcgaagggctagttgaagcaagacatgggtctcgtgtcttggtggaggacggcactagaccttgtatcggaagcgtcacagtcgttaatgaaggggcaacaaaggccgacaactggaggataggagtcatcgagagagcatgtttgagtgcctagaatgccgcctccgcctcataaccccactgaaaggccgccttcttgaggaggctggtgagtggtgcatcgat

SEQ ID NO: 80705 - DNA, 789 bp, Zea Mays
agaaacattactttaatgtgagggttgtagaaaacattgaaggatacaaaaaaacaagcaatgtactccatggaagcagaaaaataatgtacataataaagaactgtgtgctcataccataagttgctgaagaaaacaaaatgttcatggacagatattgtgaaaaaggtgagggttgtacacattactacaacaaaacataaagtagttgttgtaacaatatacaaaccaactatatgaaggtccacaatatttatgtatcctccagtcgtatacaagggtgacaaaaaatttgggatgaagtagaggaatacaataagggacgacatacacctaacaattataatgaacatcattcatactaactaaggaagtaatggaccctctgatatgttcatgacagttttaagaagtttaataaacaatgaacattacccttggttggctaaggtaacacattttgcctgaccctacgatgaatctttctggtactttagtaaaatgagttgttgttctggacagtggggatcacaaattaattcgcagaagacttgacagttttaggcactatcgaagtgaagccgtagtgtagggattacaaattaatgcaatctgcagaccattaggccgtaatactttgcactaccattccttgcagttaatatggaggatattcagcgggtgagtaccatataaatgtgtaaccataaaaggcacaccagatccgtggagttctttgaactggggattaatcgggtgttgtcggatgaaatcaattacggttgaaag

SEQ ID NO: 80706 - DNA, 705 bp, Zea Mays
gcgagaactctgggcctccatccccacgtccaatatgcggtacagggcgccattctggtgtgcgatgcaggagagggatccgaagtggaaaacctccctggctgcgaagttgatgatggtgttgaaaacgatggtcatggagctgtcttggatcaacgtcgtagcccctacctggcatgctagctgttggagtttggtactgacgtcgcactctaggacataccacgtagtccttttgtgtggacggcgaagtcgattgcaactcgatggtttatgcagggcacaatagaacacaaagaattgtacaaatttggagcgctgaagtgcataacaccctacgtcttgtgtgcttgtgagattgtattgctcggtagttacaactgtagagagttctgtagctagaagacagctatgcctactgagatgcattgtgttttcgtagatgtagcccttctgccttatgctgacagaagaaccgagttacatgtgccatgtcccatgtccgttgctggtctaaaaccgactccgacctatattgaagtcagcgcctcaagagcacgtcgcgtcctcttcatgcacaagatccagtccatgcgccttagcacccacgtaaccacaatcccacttgtgtttggtcgcgcccaaatgatagcttgtgacacttagtcatctggcccaccgaggccccttcaacggccaacggat

SEQ ID NO: 80707 - DNA, 1262 bp, Zea Mays
caagtactaaaagcagcatgccttctcacatgaacaatatatgtcttgagttgctctcttaacattgcacgatcaacaactgtgaaatcttgatcatataacttaacaagcttaacaagcttctccaaattgaacatagaaaatgacttctttggatcaaggcaagcaaaaccaactagcaactcacttgaaacttcactgaactgatggcacaactctgtattgattttatcaagaacaacaaaaaatatctcggtgcggtagtagtgaagatttgtgactgtgaatccatctcgccttgatcgacctctaataggtacttctgcatccatgtctaccacaggaatacccttattagcacaaaattctttcacatcttcaaagaatgactcccaaccattatctgtcctcatcatagccattcgggctttaacaacatcaagtaactccatggcaagaacaatatcaacactcttcctttgcaacatttgagagagctcatttgtgattgcaagcactttcaacatcaattttagaatgaaagcaaatttgaaactctccattttttctatcaaccctgctgcttgtgttggtacacgaccatcttcatggacaatagcaagaacatgcaatactgactcccacattgtttctaaacgaagcaaggttaaataatgtgaaccccatctcgtgtcaccgggtctagcaagattggttgcttgatgaagaccctttccagtaataaattcacctctttcaagtttttctacaatactctcatgttctttttcccttatggcaccccttctcttgcaagatgagcttatggtgcttacaattaattgaatgtactcaaaaaagtcatgaacggattgacaacaagcactactagcaacagaaactaccacaagttgtagttgatgtgcaaaacagtgaacataataagcatgtggactaagatccataatctttttttgcaagccattaaattcacctctcatatttgatgcaccatcatatccttgtcctctaatcttggatatagataagtcatgatgatccagaagggcgaaaagagcttccttcaaaacatctgatttactatccttgacatgcttgatggcaaggaactgttccaccacatggccttcattgttcacatatctacattacaaaaagttaaaagttagttactcatgcaacaaaatatagatagctaataagcctaatatcacttatattgcaaacgaatttacctcaat

SEQ ID NO: 80708 - DNA, 914 bp, Zea Mays
tgacagtctaatttgtagggcctaaatctcaaatctttacataataactgactaatctgcctatatcaaagttgttacccaatgattcagctacaatcttgctatagcaactatagccaaattcctactagatcaaggttgaatcctagtccaaagatggctcggttacactgtcagtctgatttcagactgagggcagcctgacagcccatctttgagcacatttttcttcaattttttcataacaacaatgtttaatcccttaaacaaagttgttctctaaacatagctctatagatttgatgtggtgacccaaggcaaattcacaatagctgtaaatctacagagccctaaagtcagcccttcaacactgttttcagacttaacaatatggtcacacaagtggtgtttttgcaaataggcccaaaacctagggtttaagttgcaaacccacatatttgtgaaccaaatgacctaagatgctttaacttcatagtttttgcactttaattcaaaagtgcactaattttgcacttagccccctagggtttaggtttaggactttccagggttccaattagggtttcttgcactcttagggtttggatcccacttgagttcatccatggtgacactttatgattatttctaacaagttttgaagttttcttttgtttaagcgttgtttgttctattatacccaatccagggttgaataccctactctagggtttgattcacaaaatgccataacaatacaacttgtttgaaatttttgcctagtgaatgcactctaggtgtaacaaacatatgagatgccaatgcttatgatgttatgctcaagttttagtaatagtaacaccaggggtgttacatccttccccccataaaagaatctcgtcccgagattaaaa

SEQ ID NO: 80709 - DNA, 447 bp, Zea Mays
acagggggtgagggttgattgggtgtctgtatcttatatagctgagtctgacttaattcttctgtttgggtatccatgtgtttcgtggcttttgcttgtggttgaggtggactaatcatgtatccaaacatttttctattccttttgttgttttcattccattcatcgaatatctctgtgactcatttttctcgttcatagttgttaaggtaggaatattgtcgttggcatcatttacttgatttccattggggttcatcatctagtcagagggtaaaagagtttagtgagacagactgcataagaggcttgtatgacattaagataaagtgttaacacaatattttgatttccaatataagattagttaaggatgatttccgattctgcatagcttcatcatactacaagagtgtacaagtgttataatccttaacagagatcttt

SEQ ID NO: 80710 - DNA, 382 bp, Zea Mays
tgggggtcttttttctttcgaatgccctcaaaacatcaagataataattgttttgtggtgcatttctaagtattacaggtacttctatcaaaagcatctcatggacgaaggaacaagattcaggatattatcacaaagggacaaatggcgaagccgaagcaagtcttctcaggttcgttagtcaagaatgtaaaaggaaaagatgccctcaccctcatcatactaaatagttcaaatgtataggtttaaggatgtaaatgtaattctatcaatgttgtactctgcgcgtataaataaatgaacaatgacattcatttggacatttttgggatcaacagaaaggacgactgattctcgcttacgaagctattattcttccttg

SEQ ID NO: 80711 - DNA, 942 bp, Zea Mays
gcttttcaaagttctactgaaaaagaaaaaggaaaagcttcaacagtactgggctgattctagcccagacggcccaaggccacacagaaacgcgtgcgcgcccgcgcctgcgctggcagccttgcgaaaaggccctcgacgttctggtttaactcgaagcaggttctttcactattttcctaagtcgctgacagtttgcagaaaagcccttgaggttctattcctttaccgcccgaggtccacgacgatgggcagcgcgggggatgaactccgatgaggttgtgccggtggattcacgcaacgaccggtgctcccgagcggctatcaccgaattgaaccttccccgagtgtttctcgcaacttaatttgaagattggtaacctaatttgccctggccacggcgaccgaagaccatgcggacaaaggaacgtgttcccggcgataggtgatggtccagttcaattgaaggggtcgaagagcttaaggaggacctagggatgctagaacaagccacggagagacttgaactgacctgagctgagctggccacggcgaggtcgttttcatggtggctgaaaactaaattgggggaaatccagaattggtgctctgcagtgaacgattgctagtgattcttggtggctggatgcttaactatcctacggagctcgtcgtggcttcaatttataggagggaagagcggtggcactcaatttggccgagcaatgctggcggccggagaatgagaagagcactggcgcagtggattggtgtcctccgtcgtggcgaactcaccgtcgacgattagacggttatagggagtcacggtgctgcgacggaggtgttcagatacttggcgcaaggccgtgcgacggcagtcaccggcgttcttatcggttttcaccatggtgaacatggtacgacggccggaattgtttatcg

SEQ ID NO: 80712 - DNA, 533 bp, Zea Mays
gcgggtcaacatcgcgacgacaacgagcaggacatgggtgttgggaatggaatggggtgggaccggtggcatcatgcgccgggaagggggcaacaacgggcaatgtcgggaatgggacattcgagcggactggttcgagtgtcgtgaggaataatgggattgatcagatatatgcaagaactatattaaggatgaggatgggactcgggaggactaggtcgttccgactaggaggtctaggactggactggtttggtctatccaaaacttttatctctactacgtaaaacaccagttttcatcgttctacggttttcatcgacgtcatgcacactcacatttaaatggtacaaagctaaaattatatacagatagggatccaaacaatggttgttgatttcaatcccgaattcacgaccacctagccaacagaacacacatgttttttgtgttttatactctatacttaagcataaatgtaaactataacaacatacgacactttgctaatttttctatacttaacaataaat

SEQ ID NO: 80713 - DNA, 563 bp, Zea Mays
gggcttcctcttttcggtcagtctggcatccttggctcttggtccgcttccggatcttcttggtgggggcaagcttctttaacttcttagcatagtccatcttcaaagtctggtatgcctcatgagtgttggcttcttcgccttccgccatctcgagactttcttggaggaacgccttttcttccttcaattccttgatttgttgctctaggctttccacccgggaatttaggtgggtatagtgggagaaaaggtcgtcatagtggttgtcaagggtatggagatatccggccatgtagactatggtagggtcatcttcattaggatctctccctgacaagacctgaagtcttttcctctaggtaggagtatttttgttgctgggttgaaagtagcgaaggggtgtctaagagacctccctgctgtagttttggcatagctggcgaagggctctttgggcagcattctggcaagtgtctgggaagcagagtccagtggcggtgacttggaagggagggtgatttgggtagtttcagctttctcccacgtagactgccatagag

SEQ ID NO: 80714 - DNA, 287 bp, Zea Mays
ctgagatgttctatgttccatgagttcccaatttctgttctgtccatctgagtgaggcgatatgatctcggtcgagtgacttctgctactatgaatggtccttcccatggaggtgacaatttatgccgtccctcccccgttagaattcggcggaggacgagatctcccactgcgaaggatcgatgtcgtatggccttatcatgatagcgcctcagagtttgctggtatcgcgctgattgaattaccgtattcagtcgctcttcttcgagtacgtcaacgtcttccag

SEQ ID NO: 80715 - DNA, 463 bp, Zea Mays
gaaatacatacgtacggatgcatttttaatgtttgcttgtatggtctgcattgtaagactaccaatggcacatgcactttgtgttatattataggtgaagcagggcagaacaagaagaggcaggtttcaatctcgaagtgggtagctcttcgctgtgtcactttttgattcgtgatggtctcggatgaaaatctcgggctgagaaaaatgaacgatatatgcaaaagctcacaaggagcaggctgagagatatgtaagtacatatgcttttcatatccatatcaacttgattatgcttgctttagtccatgtcaacactcaaaacagtctacactctggtgttcatttcagagatgaaatagaccaagtaacagctcacctttgattatagcatatctcaccaacatttgttattatctaaaattgttttcaactttcatatctcaccacattttcagtccgt

SEQ ID NO: 80716 - DNA, 758 bp, Zea Mays
ccccctatatacatttccaacccaaccgtatccgcaccggtagctttcggacgatatcgcgcgcgagcgtggaggagaagtgactggccgccgtgggatagcgttcctctgcatctagagggagagagaagaatgctaccgggtaggggggctcgtagagagaaccgctgtggcatttagcgttcaactgtagccgctgaagtagcgagggggaagcagtacaaggaagcgttgaagacagtctaatgcgctatgccacccccaaataattttggggatttctttacaagatgactttggagggggctgcctacgaaatcgtcatctccgtgcgtagcgtagtagagtggcgcctaagctattacgggacgatgatacgtactggtccaccgtacgcacgcgtgtttgaaccagcaaaaatgcagagaatcgaaacctccaaggagagcacatccgctcaagcccacatccgaaaagaaaagaaaaaaaaaacctttcttccaaggtgagcactgtctgttggaaatttcagaacacgaccgtgtcagtttctttcggttagttgcgcagtgcccagaaggccagaactaatactactataaacggctgcaacaagcaacaacgtacctcctgttctacgccaacagtttcagcaacgtgtaaacgtacgcgcgtttgatcgaagcttgtgtgaaccagatgcatgggcgaacgcgcatgcctcctgttctacgcgtacgtctaacagtgttgaaccc

SEQ ID NO: 80717 - DNA, 658 bp, Zea Mays
gaaatcaagaaataaataattaaagttttaatctctctactgtaattaattattaattgattttcttgtcaaacagctcgcgatcacatagacatcaacaggaccaatttggtagacatttgagtcgatgttgtctgaaaatctctcatgttataattctcttgttttttattaaaagagttgactcaagttcgactgtgctcctaagttagaacctcgaagttcgaattaaaatttattaatgtgagttgttccactttagaattattgctgcttttgttcgtgccgaaggtacaatttttgatcctgtacaagtctacgctcgtggctgggattataaaaatcaaggtctttctaaacgtgacattatattttagttattaaatcaggaaccaatttagcagggaagtaatcagatggaatatggataatactagtttgggtcggataagaattcattagaagccgacacattagagatcccgcttgagagtatagattcagataaaatatttggatatatagatcgaacatcgagaaattagattcggacacagtttgaagaacagacattgagagtccgagtaaatgagctttagacgagatttataaatcgagaatgattttcgagtttgcgttcgcgtcgagaataaagttt

SEQ ID NO: 80718 - DNA, 678 bp, Zea Mays
attaaagtttattataaactcactgattgtttgacttttaaaattacctcggaacatttaaaataatgcccaataactcagagcacgtcaatacaaaatgtacaaatttgatgaaaagcataatcaagttcttctatattttgatttgaaagtacctcaacagggttctttttaaaactcagaaaccttccctaattcatgttagaaaaactatgaaataaagatattagaaacatctcaggtgttagattgggctgatcaggcctatcatatgtgctaatcagacctctcatatgtgttagattgggctgatcagacctgcctcatatgtgttgatcaggcctaccatatgtacctaggcgtttatggtagttgatcatagattaggcaaggatctccattgcttggctgctttctataaaccttagatgaccttgcctatatattgtacaccccttgtacctctatagtcaatctaccattccctaagccatatctcctttcatggtatcacgagtctaggtttcaccttggcttccccctcttccgctgcctagcgtgtcggctctcagtcctactacgtctgcatggcggcttcctctgccacgtggcacctactctcctccccctcccctcgacaccatcccccacgccaccacagtcgcccaaggatcatgt

SEQ ID NO: 80719 - DNA, 572 bp, Zea Mays
gcattatccagtgtcccatacgatcacacttcggcatcagaaggccatctattgcaattgggaacgaagtgcaagcgtgtttgatggcttttaacactttgtgcacctacattggtaccagggatttggtacaagagcatattgcttacaaagtgtggccattggtgaatgactgggaaatgccgaaggaaactactgctggctccaacgaaggtggtctggtttacttaagatacacctatcgctatagaagtaaatttgatgagccaaatgatgattggcttaaggctgttgatgccaccagcgacgagctgttgggagcttattcgaaggcagaagacgaagccatgacaactgtctttagcgctcgcagcaagaggaggctaaatagagtttttgatatgatcggattttttcctaactactgcttttctgcccaaaaacaagggttaaagagaaaagtggcagcttcatcctcttccgccgcacctaagctgaaaagagcaaaggttctgaattgcaggctgaagccacgtcctttagagaatatagatgcagtgcttgataaagaa

SEQ ID NO: 80720 - DNA, 481 bp, Zea Mays
taagtccaaaccctaggggcctatatgcaaaaattgtgcacatttggactaaagtgtaaaaactactatgttaaagcatataaagtcacatggttcacatttgggaagatttgcaagccaaaccctaagttttggattaatttgcaaaaaggaccccaattgagaattcactctaagtctgaaattcggagttttgggctcaactttggagccttgtaactttcaaatattagggtttttgccctagggcaccacatcaaagttgtagaccaatcataggagaacaactttgcttaagaatgtgagctcagttgttaagaataaattgaagataattaagcctaaagtctggctgtcaggctggttccactctgaaattcagattttcagtgtaacagagccatctttgggtgtgaattcaaccttgatctagtgctcaaatgagttcaatccctatagtcgaattattgctggtttatag

SEQ ID NO: 80721 - DNA, 416 bp, Zea Mays
tccaaaaattgttcaccattgagattggcacctaacatgtatggatgggttgagatcctttttgctgtcactagtatgctatgtggctatgtctcatgccttgagtcattcattatcttgattcattaattctatgctaaaatctaaaacaagataagtgaaattcagaaagatcttgatgggtttccatttgtcaccatatcattgtaccaagattgcttcatctgcacttctggatgaacttgagtagcgtagtggatgatcgaaatagcgtctttagcttgttatttcttttctgcataggctacaccctatggaaaagttagacaatcacaatattaacaacctcttgtactcacaagctttccgatgaaattggtaatctgctgcgaaatctaataaacctgaaaattttc

SEQ ID NO: 80722 - DNA, 455 bp, Zea Mays
ttcaacccaagacatatcaggaccatacacaatccaaatcagaacaaagacaagaacaatcacaatcagtgatagcaaagtcatcctcagtcctcaggaacctagcaaaataccttcagaccactggccccaatagggggaagaggaagaagttttggaggaagattcaactctcaaccaaggaaattgttctgcctttcctatggagaggacaatgggcatacaacaagaacatgtcaagtcacaatcaagaaatagaaagaaatagttgaagctgaagcacagcagaatcaatcaaagcaggtcctccacactacctcatactactccccatacatcctagaatatgtttgcaaccaacagcgaagtccacaaccattgggctcggttgcttcggcaagtcactcttcggctcgatggatcctgccctagccatttacacaagcaccttcgtc

SEQ ID NO: 80723 - DNA, 456 bp, Zea Mays
ctttggacctgagattattcaagaggcagaagaacaagtctgtatgatctaggagaacttgagggtagcacagactcggcagaaagagttatgctgataattggagaagaccactagaatttgaggagggtgaccacgtgtacctaaaggtgtcaccaattcatggaatgagaagattcaaggtcaaaggcaagctatcccctcgctttattggacccttcagaatctttaggcaagttggggagatggcctaccaacttgagctaccagatcatctctctgatgtgcatgatgtgttgcacgtgtctcaactcaagaagtgtctccatgtccccgaggaacactaccaatggaagaactcagtgtgcagggtgatctaacttatacagagtatcctatcaagattattgacacattgacttgggttacaaggaataaagtaatcaagatgtgcaa

SEQ ID NO: 80724 - DNA, 636 bp, Zea Mays
gttttcatgctgatcagcttctcaaaagagggcgggatcgggccgtggaacgaattgagtgatatattcaggtaggtcatcatctgaagctgtccaagtgaatccggtaggctgccaactaagaggttggcggacagatccattatgttcatttgcttcaaaattatatcaactggcagtgtgccactcagcaagttctgagacagatctattccgatgagcctatcatgatggaacaggctcgctggtatggtagacgtgaactggttttcacgtagtcctaggagctctaggttggagagattaccgatgccgctaggtatggagccggagaactcgttgctgtcaaggaacatgatctcaacgttcttcaagttcgtagctgcattccagggaatggtgccagagagcctatttccgctgaggtcaagaaattggatgctctccatcatcatgattggctctgggactgggttctgaagctggtttcctgcgagatctagaatctcaagatcagtcaagttcgagatagtagctggaagactaccggctatcatgttgtcagatgcagcgaatactcgcatattgcttgagaggttcccaacgtggtccgggacgagggtccctgcgaaatga

SEQ ID NO: 80725 - DNA, 609 bp, Zea Mays
aagggtgtaagaaaagaggtaaaagtgcatcaaggtaaggttatagatattacaaaggttaatggtaacaatagacaagggtgtaagaaaagggatgaaggtgcataagaaccaagggcatgagtacaacaaataatagagttaagacaagacttgcatagttgcacgtgaaaaaaaataagaggatatgagcaaggatgggataagtaaaacaccactcctgaattgagatgagagaggggaaattttaaaaagcaggtataccataaacatcaaggtaagaacaagggatgagaaaagttaaggtgataataagcaaaagcacaacaaagggtggagtcaagatgagactcgcaaagtggcgaagtaaagggaacaataaaagggtaatatatgtaaggtcctaacaaaatagttgaagtgaaaattcattaccaagggaagttataaggaaacaacaagatcacaaagtatgtgtgaaataaaatgatcgctcatggatcatcaagaaacaaggatggtcaagggcatgtaaactgaaatgtcttaaacagacattgggggtataaagataagcatatataaaaatatgagtatgtaagattccaa

SEQ ID NO: 80726 - DNA, 695 bp, Zea Mays
cctttctcaaatgaacccacactaagtcatcatgttccaattttacttccttactaccttttctagcagcaatgcgatacttttcattcatattttcaatttgcaacttagttgtttcatataacttaagaatgaattcagaacgttgtgtagcatccaagttcactattttagaagtcagtaatggtagcaaatcaattggaccacgaggattaaaaccataaactatcataaatggactaagcttggttgtgaaatgaatggaacggttataataaaactcaatatgtggcaaacactcctcacacaacctcaaattatctttcaaaacagcccgcaacatggtaaataaaatgcgattaacgacctcgttttgcccatcagtttgaggatgacaagtagtagaaaacatcaactttgttccgaatttaaaccacaaggttctccaaaatggctcaaaaacttagcatccctatcagaaacaatagtatttggcacaccatgcaaagacacaatctcagtgaagaacaaatcagcaatatgccaagcattatcagttttgtgacagggtataaagtgtgccatattggagaaacgatcgacaaccacaaaaaggctattgctccccctctttgttctagacaagcccaaaatgaagtccatagaaatatcctcccgaggtgcactaggaacaa

SEQ ID NO: 80727 - DNA, 603 bp, Zea Mays
gcagtggttgggtcattacctcaaggattcatgtacaacccaatgacgaagtggtagcagtgctcccttttccttgctcttgtgcggctggaactttcttcacagaaattttagccttattcttttttgggcccctgaaggtgactcttcatcattatcagactcatcattctttgttccatcgtcagcaaccttctttaacgctttgcaagtagcctttgcaactctcttcctcttttctccagcttcgatgttggctacatgatttttgtagtcagggtactcaaaccctataacatccataactttattcatccaaagcttcccctagctttcgaaggtggatggcatatcttcatgttccctcatgagataattgccaatgatctcattacatttttattctatcaatttcagccagccagtagagggatatttgtacgaagcatgttccttaaatttaaacgctaatgtgacgagttctccctcttttgacttcacttccttcgacagcttccacccagttcgggtaagaaagatattgtaggcaagtgcctcttgaatcaggtctcgagagccaattttctcgacgaccgtgttgaa

SEQ ID NO: 80728 - DNA, 545 bp, Zea Mays
tgttttaagtttctcttctcttgtatgtccacgtgcatcgactcaggtatccatttcacttgattgtgctcctgcctgctctttttggcgaagataggtgccttggaatgcctttacaaaatgcatttccatggtctttccatgttctcatttgtttcatgcctacaagtgccttgtctgtatactgtttcacgctgatttgttgagcaacctgtctttgtatagccagccatctttcaatgagttgcgagtggatgctcatgtcattctcccaattttccttgttgaattttaccatgcctctgtattacagttatttatacattcctatgtcttctgacctataagtaaagtctacatatgacaatttcagtacattatttcatactaaaaagaaacgtttggactatagaaagctttctgttagccacatgttaccttttggtagatctactacgttctggtactctgatttgtcaaactaacaacatagaatttaacagattttaaagatcatgtgattgagcatttaagttattgccttt

SEQ ID NO: 80729 - DNA, 983 bp, Zea Mays
gtgagttttaaacgcagtcttaaactcttcggaggagcccatgcgcacctgatgataccccgaagtcaagtccagactagaaaagaattgagtgccagcaagctcatccaaaatctcctcgaccaccggcatcggaaatcgattcttgatggtcatatcatttaacttacggtaatccacacagaaccgccatgtaccatccttcttttgcactaaaaggaccagagaagcaaatgggctcacactgggggtgatcagtcctgacttcaataacgcagcaacttgcttctcaatctccgtcttatgatgaggagaatatttgtagggtcgagcgttgaccgggatagatctagggagcaaaggaatatgatggtcaaatggtcaagatggaggcaatcagttggtgtaacaaaaatgtcactgaattcccccaacagcacctgcaattctggatggacctctttgctgttctcctcacgcacctcctccaacaatgcaaacacccatatatcattccctcgcagccatttctccacctgtagagtagaaacttcctccacaacctgctattgtacagtattgcccaccaactgaacttccacacctttgtccacaaagctaataaccttatcatcccaatcacaatgcataggactgtgtcgacgcaaccaatcatagcccaaaatagcatcatatgcgcctagccccaacaccctcatatcactctgatatgtatgcccattagcccaccattccaatgatcataccatcgtgtcactatacataatctccccatttgccaccctcactttagctaaagaacaaggatgcactggcagccccattctatcgaccaactgcttgttaatgaaacttgtggagctccccgaatcaaccaacaccaacagcaactgattttgcaataaggctctcacagccatacattcctcatttgtggtaccactcggagcattaagtgacaa

SEQ ID NO: 80730 - DNA, 345 bp, Zea Mays
aatcacgcaagggttgtcaataggccgaactttagcctttcatcattggaactggttgatgttccagccgaagcccgaagcatagggaacgggttcatcactcaaatttgggctaagggcggatgcgagttggctggaaacgaagcccggaacctgcttgacaaagtatagctctttacctttattattttacctggctccttactagatttctgattaccctgttcctcgtcattctccagggtgatggcgccgaagttcaatgaatcgaagctagatctgaagctttaaagtagtctttgtatgattctccttgatttctgtagaaacactttggaaattctt

SEQ ID NO: 80731 - DNA, 733 bp, Zea Mays
gatgaatatgtgacccaactagagttggatgttgaaggatgtggatggttttgggacgcaacaacaggaggagatccctccaacaaccttgcatatcccaatagcattctcccccaagacggcacatgttgctccacacaactgctcattgcaattgttagatgtggagcattgttcccctcctaagagggcacgaccaccttggcttgctggcatggtcgaagcaagaagagctaataatattggaacaacgagaacaacaagagtcttcttagagaacgccatgaagctctagggatggcttttttcaagtagaggatacttagttccttgatgacgcttgtatgctttctgtttttttgcacgtatagaattgagtctccctattgttgtggggctatgattatatagacttgagcaataacaaattaaccatgagcaatcaatttctgctattttacttagagatatcatatcttttgtttttacttgtagtagcaatatcatctaatatatattacccactcaatttttatgttaatgacaatgctatttagatcaaatctatacaattaaaggtttttattggcatttacaaaaaaattacctaaaaatgccatacctattttgatctttgtctatcatgttttaatgatatagattcattacatattaatctggcactcaaatgcacttattatctaccaaagcaccatatcaattttgattatcg

SEQ ID NO: 80732 - DNA, 329 bp, Zea Mays
gctcatctactttcatctgctttatcctctcatttgatttcatctacttcgcaaggatcgctctcctacgacctcgatcgggtctcaactgcgagtgaaccctagctgtgtggtctccctctcctcaggttagatcgctctcctacgacctcgatcggttctcagctgcgagtgaaccctagctgtgtcgtgtccctcttctcaggttagtacccctctagtcttctcttctcgtttgtcctcctaggtcccccgattactgatctgctgtctagaatttggaggattcctcgtaaaattcttgtctttgtttatatatctgattagta

SEQ ID NO: 80733 - DNA, 505 bp, Zea Mays
ggaggcggcaggacaaaggagcagcagcagcagcagaagctgaaagctgaccacctctctagagaccttgcagagcggctcacatatcatcagaaggaacatggcttgcaagggcattttgaagatgatagggcagtgttgcccattgctgacaacggcagggcagttgataaccgcatagttgcactggatacgttgcacaagagattggatcatgaacaaagatctcggcacgaggaaactgtgagacagacccgataatccacaaagttttattaccagtttggtcttcattctttgtgtttatcatttctcattctccgtgcgtgcataggtttgctgcagcttggatatgattccagcagtatgtcgaaggcatgggagttactggctcgcgtggaccatgctgagaaagtgaccgcgtcgtgccggtaagagaaaagtgaaaaagcgctctcgaaacgacacttcattcgaggttgcatgacccacagacccagcactc

SEQ ID NO: 80734 - DNA, 1120 bp, Zea Mays
ggagctcctgctcgcctcctccaagtatgatctatagcagcgcatggcaatccaaagcagcggccctactagagagactcaggaaggctaaccgaaaaaatgatcaaggaccacaccacacgccgttctgttcattgctattacttcaagaaccaagactgctcgctcccatccacagagtaccatcagtacagactacagagtacagcactgatacagcatcttcattctatatatgggccgtgattcatttgattttattaacttaaagttgatgtttttttcttctccatttcaagagggaaacaaaaatgcagtcttgtgcatgtttatgcaatgcccatacacgtctgactggcaaatgaaatagttgcataaatatatggagtatggtattgtgctttctctgaaacactcagatccggcggttccttcgggcttggtcgaccctcatccctttctctcggcattcatcgctgcagaaagcgctctctcccctgcaccggcatcaattgatcaaacaaaaggaaggagcaaaaaaataaaataaataaaataaaatctccaacttactccagggctgagggaaaataatacacatgcttacaacatcaaactggttctgttggatgcgtcatcattaaatatacttctgtttgaaactgtagatgcttcatatatctttctatatactaggtcaaagttacgaagactggtaggagtagaagactgaacagcatatatataaaacgaataggatccttacttatgaagagtgacctgaacaaacctccttgcatgaacagagaacatgacaaaaaatctcaagaaccaacacacgttctgacgaaaagcaacccgattaaacctagctcattgcatgaacacacttacggtcgcagatcaaaagctaacgtgactacaagttccaaactcgagtataacagccagatgatcgaagttagggggaggagctaggaagctgtaactttttatgtcgtcgacacagtatctagctaggcaccaaggcaacaaggccaagaaaacgtacttgtagatgtagatgtcaagctctgggccaagcgcacggttgcacaaggcacagtgctgaagaaagcgc

SEQ ID NO: 80735 - DNA, 1080 bp, Zea Mays
ctcttttgcacaaagatggcagaagaaataggtcaactctgcaagcactagccagacatgcttagggacataacctcaaaccatcgctggaagaattcattcaatccatatgtggaagtcatgactcttcatccctaagactcacaaagtagataagttcacccccactcaggttagttgcatacccatcaaggaacattaatatcttgatccattgtagtacttccttcctctaggtgctgctcaagatgaaatcagccttaggccttctccatgtctttccaccactagccggcttcatctcttggtttggtctatcacataacgttgccagatccatgttggagtgaaggtcgtccgccccctcgaccagttttctttaacaacaattgcacaggttttatcgcagacataggaggcgaagggtacttcgattgttatcaaagtcgaggtctttgtccaaaaaccgccgaaggcattgaagcgaagggatctactgtttaaggcgggggctcctcataactttgcgaaggcgaccccattagcttggacggttttgagctatagccttggcaaggatcgaagacccgacgcctcagggcgaagggtgccacgcacgggcgaagaccgcgcggcccaatggcggggcccatgtggttttcattcgggctgatttgtaagcccctccctagggtagggtttattgtgtatttgattaggctgtacttaacatcgctgtaatgaccctgtagggggaatattctgggtctgtagcaggtaaccgggggcataattgtacttataagggcgcacccacccacctggttacctataaatactcctgcactgtacattgatgggacacacttaacaagacgttagagttccctgcctattattttgttgagcacctgaataccctctttccctagtgtttgggcccgcttgaccacgtgtcgatcggtgccaacatttggcgcccactgttcgtgcttcgacaaagcaatcgcacaatgactcccaagaaagtgacttccaaggccaccacctctctggctgtcgccgcaaaggcagccctcg

SEQ ID NO: 80736 - DNA, 1043 bp, Zea Mays
tgaaggccggccgatttcgggaccctctgcagtggagaagcccaaggcgacgtgcggcttggtcaatgcgtaggggacgctgaagttgacggcgggtcggactcagcgttggagacggtgctcgcgacggcgggtggattgcctagggttcggcgccgcggtggatcaaatgcggctcgttctctgcggtggagaagaacaagggggcagcgccaccttctctgcgattctgggtccctcaccggtgaagaagaacaaggcgacatcgtctccctctatgcggtggagaaggtgaatgcgacgacgttcgggcgacggggggagaatctctagggttcggcaaccgcagtggagaagaagcagatggcggcgataaagctagggttcggccgccgcgagcgttacgggtgaggagagctggaaaaactgcgtgcttggttgctggattcgtgggcccgatacacgtaatctgctgggcgaaatcaacgcgaaggcccatggaccgacacgtggattactgtttcgtaaacggaaacataagacatcgtaagatcgtctaaggaaagggtttgacgatgatctaagcattagatccttcttcctgatactgtgcaataggttgttgttccctactgccagctggggaataactaaccatgaggttcttttaactgaggaaatgtatcgtttccacgagatagactggtaccaactaatattcaatgatttatgccaaactgccaagaagtgacatactaggagcgttacaaatgtttctacaacaatttacggatgttccatcatcattcttgtaagcatatcacttttttgtcttttatatgtagccatattttttatgcaaaattcatatacatttagattatgttttgttatgtctcacaacgattcatgttatgcttttgcaactgtattatttgaatcatcttcatgattcagctgcacctcagaataaacgtggaacaccacgcatcaaatattttgataagaatattattcaagcattgacaagagctgacaagggc

SEQ ID NO: 80737 - DNA, 1008 bp, Zea Mays
accccctcatgcaccgaacgtctcatatatagatagggtcgcctcaacatctcagatttgatctgctaaattccaggaattgcccgctggaacctctctacgttcaaccgcatggagatctcgcacgtaacgtgcgcgccattactccgggttgacgaggtagtctaagtgtggtattcgataactaaataaacaaaaggcaaaaaaaattgttgtttagaacacgtcatgataaataacgcaaaaacccgaaacgtgagcaaacgggcgtggcaaccttcatatccattttttgtctcatgaaaagagtagttaacattccatatataagttagttatcttctacctagataatcaatatgggactaaagccacatgtcatctctacataatgcattggcttccttatttgaattgggccccacacaagtaggctagattccaacaaaactttgggttgtaaatgcccctaggaccatgcaaatcttgaatggctgctgttacgctgttgtcggtggcggtcccggtgctggcaccggcaaggacggcatatgcagcattttgaggcgtgctcttgagggaaaggacatgatgagtggaggtggtggaagaaacaacgattcgtggctccagcatccaagtttcactgataaagccggcaccttattagttatacgtcaagaggtattctgctttcatgtttagttatacgtcaagaggtattctgctttcatgtatcgttgcttgctgtctgaacacgacatggtacctactctgctcgtggatcgcacactaagctcaaaagttgtgtggatgcccgacggaaaatgggctaaagcaagctcatcatgaccatatttgcggctgtctggtcagatgccgctaagccgcattctgatttttagtccgttcatgcatttgctggtcctcgatagtttgtgcgggataacctcatttacaaattacatgtgtaagcatggtggtcggtgatcaagtggagagaaatgc

SEQ ID NO: 80738 - DNA, 1005 bp, Zea Mays
gagaattcctctccgacagatacacatagaaggttctcatgtttcctaagcccaagtcctagaagcttgtgataagcaagaaaaaagtctcagacacagacggtacggtcgagttcctagagtcgactttggatgacatgtacatctttagaagtactgattcttatgagtcaaagagaaagttcctacaatgatcaaaagtgtgcaagtttctttctagtcctcgtcggagccattcgcacggatgtccactcacgggccaagctcatggtcgggtaactaactctatggatatcttcagaccgtctctatgcgcaagtggtgctccaacatggcctctcgtggatatcctcggtcatgtttgttatcgaatttctgaccaaaacactgtgggactcatttcctccgttacataatggtggtcataccacaaacatagttggtgtgatctaacagaactacaagcccctctggtacaaccagtataatggtgcatgcatgcaacaagggataagagttgtacacacctcacttctaatgctaggactaaacctagagcaagtgttaaatgcagtgatctaactaacttaagcgcttcataaaagcacctaactaatcaccgaatgattatttgagcacttgtgtgtctagatacactaggggtaagtctcaactcacttgtaatgttttttatcccccacaaccctcaaatgactagttggatggtttatatagcctcaagtccaaaactaatcattggaagctacacaagaattctgcacactcaccggacactccgatgctacttgtcctacttgtccacttgagctagctgttgaaactagttgttgtcaaccgtttgagtaagggcatctattgttttgatcgatgttacattgaacacgtttgatgcatcgtagctttttctggtcattttgcaaccttctctgattaccacatccagtagggtatctggtagtacaccgaacacgtccagtgcttaat

SEQ ID NO: 80739 - DNA, 619 bp, Zea Mays
tggctgctggagcaatcttcctgcgctctgacactcgtggtccgcgtagtgttggtgtgctggggaagcttccctagtaatgcacaagtgctggtggacatagcgtatctacagcatgggcatactattcggattagatgggcacgccgcctgctatatggcctgggcgccgtctgccagcggagtggacaggacgcattaaatgttgaaggggcacatcacctgacagcagggtggataggcggcgcatcctctctgcaataaatgcggaggccacgcggcctagagtccctacgtcatgctccgcccactggcctacatcatgggcaataagccatgtggcagcattgggccctcggccgagcagggagcggaggcgcaccggatagagcccagacacgcatcaacaccagacccatgcctaggtcacaacactttctcctccgggaccttgttatgggtggtccggagcttacttggtggggtccgaactccatccaatggcttcgggctgctttactttgggggtctaggttgtgcgcacaggggtcctgcgccttcttgaggaggtctgggcccgatgacgttgtctccgagaacgccacctcaactgctcacg

SEQ ID NO: 80740 - DNA, 605 bp, Zea Mays
ctggtggtgcatctctaggtggtcgttggcttcctcaagttcctcctgcacatcgtggagctggatttccaagatatcgatagtgttatcctggatttccacctactgctctaaggtcgcgatgcgctggcttcactgttccacctataggtccttctccaccaattttgaagacaagtcgaccacgaagtcctctcgattgtcgagggtgagcttagtggtctgagcaaggttagtgaggtgtgccacggcgtcgctctgcagggcctgtaggtggtacagtgcgctcatacactgaacggtgatcctcccaacttggtcggggtgcatagcccatatgtcttttacgtggctcactctgttgcaccacatggggtcatccctattctcagcggggaagagtccaagtgggtgcattaccatctccaagggatggtatccgcagaaggtcgtcagggtcttcatagctgcgacctcggtggtgtcatccgccctgaacccaatagtctcggattcaagggaatgccaacccggctgcagagggtgagcctccagagtcaaccaaaccctgcaacgtggcacccgatgctccttgtatagctgca

SEQ ID NO: 80741 - DNA, 513 bp, Zea Mays
gctaaattgaagctagggaaaggtttctgggttcaccagagatgacacacacgctaagttttgggctaggcacgagcagaaaggtggggcgacggaaagggtgtcatggcggcattttacagcgcacgggtgcgttccggtgatgggcttcggccaaatttcaatttgccacatccaagagcaataagagatcaaatactaactgaaacatggagcgatttgataattactgacccgaggagcgctggccatgaaggagttcttcacggcagagcaagaacagaggagagagggatttgtgggttctttggtgaaattgagccgagtgctcgatcacggaggtgcgggatgtgataaagaagtggaacccgggcgcaatttataggccaacggccggaattggatgaggaccgcggactttaggttgtgcaggcgagctcaccgcgcggcggaactcggtgatggcacggtggccgccgtttaaccggagcctgccacctcagtgatttgctg

SEQ ID NO: 80742 - DNA, 275 bp, Zea Mays
ctcgaatgggatgttctgaatatgttaagtctggttccaaggcaacatccaccacatcgatggttcgatcaggaatccgaaggcacttcttcaattgagatacatggaacatgttgtgtactgcagataatgtttcgggcagttgaagtcggtatgccactggtccgtatcggtcaagaataagaaacaggccaacataccggggtgctagtttcccttttaccctgaaacggttcacacccttcattggtgatactttcaggtatacatgatca

SEQ ID NO: 80743 - DNA, 623 bp, Zea Mays
agaaagtgcaggggctcggcataaattttcccaagactcagcgcacagcaatacgggacggcaggtttattccttaaaactacggggtctcttttgcgaaagtgcaacgacgaagggttacggtggatcccccgccgcaggattagaaatcaagggcctcgatcaacttcgtcgattcaatgaaacagtgctcatccagaaccgtcgatcgagtgatccacgaccgagattctatgtggacgaaggggtatacataatctaatctaaatcgttgcttctcggatctgcggtcaatatcctaccgccatcccgatctaatcctagacgcccctaaccgatccaacggccaggaggccttctcctaaccccgcaccgggtcaaggcggcgcacacaggcagcacggcggcgcacgccggtgagatgtgcaaacgacttagttcacgatctcctaaaatggaagtcccaacccacagcggagacaaaggcgaaccctatgaacagatgcttacccgagatggaggcacataatctctcaacgatggaggcggccgcacccaaatcaatggcagaacctcgacttttggtaaggaattgtgcccaccgtgggccaaatccgcgcgag

SEQ ID NO: 80744 - DNA, 381 bp, Zea Mays
gcagggagaggttgcttccagcatgatctcgtaagataactgaagaagttgtgttttgcaagctagcatcagatatttgacatgatgctcttgttctccgtccgtgttgaacacaagatgcggacgaggcgccattctttattgacccggagtcatagctcctcctcccgctctgatgaccggtggaccaattcaatcctaggcatgcatacggcagacttcccagcaatgggattttgacgtactaccaggttattaaacctcaggtgcataccgaccaggcaaccatcgcaattcgcaaaataacctttgaccagaataccagatatcccatgcagtgtagcatcacaaagaaatgacagtttgggctagctataaaac

SEQ ID NO: 80745 - DNA, 408 bp, Zea Mays
tcagcctgccaaaagagttggtcgaaggtcgctgaggatttttgaggatagcccagacaaacgccctatcgtggaacccccaatagaagtcctcaatatccactgtctcagagatgttaggggtgtggtttctcatggactagaaatgtttgaggaacgagcagagagactcgtcgttgttgcgcctaatcgacttgaggtcccatggctgggtgagcttgtcggagagtgattggtagttggagacaaagcggtcgcaaaagttggcctgatggttgatgcagtgccaggggagatgacgaagccactaggttgtgtcttgccccagtacgatagggaggtacgctatcatcacatcctccgatgcctcgtcggcgtaggccaccgtcgagtagaattatagccaac

SEQ ID NO: 80746 - DNA, 821 bp, Zea Mays
cttaggaccggctgtgacttataggaggtcgtcagtcctcccttgcctttaccggacaaggtctgaaggagatgctggagtactacgacaatgcggtgagtccgtgatggggattaccatttgcgtctccttgacatcccagctcgtgcgtgtgaaatcgtggagctttgggacttcaccgggccgcggtagtacctcttgtcacgttgcagctaaacatcggtggtaacttttggaatgccattggtccatttgagagtttgtctgttgtggttcagggcccattgttaggtggtttcaatgctatgcgaacgtcaccctggaggtggtgttttgtgatgggagtaattgtgcatttgtagtcccatgattcattgtcctccataactttgtgtgtgacttggttgttttgatgacgtgtatgggtcctaggcccccctgaccctgccttgtttcgatcccgctttgggtctgggggtgctatccgtgcaagttttgtctgtccgccattctcatgcggggtgagcccccgagcccctgctcgatgcagaggtatgtctaggggactcatcttgtatttttagtttcactctcccccgcgcatccccttcatgggaatgaggggaggtgagttgtaccatgttttcctcgatgggctagcaatggctcttggtgagctacaagcaggtaatttgagtgaggccgtggttcctttcgcaagatctaagcgtggggtccgctggggaccgttctcatactctcgggccccgactcatatagttgttggttccattcaaccgaaactggcatctcactacctc

SEQ ID NO: 80747 - DNA, 324 bp, Zea Mays
cgtcgacgagcttcccgctgaggaggttcttccccaggcaccgttggttcatcgtcggagatgggggacgattccactctccccccgataaagaggacgtcggggtagaacggagttgtcgtgaccacaagcttctttctgttctcctttgagggcggaggcaccagaagggcagcttgacgggtccttgtttctttttttcctcgtaattctcgtccactcttctatggatgaggtggacaatggggttctttgggtgaatgaattttccgctcttggcttgcaggtggtagacttcgctcggagcgctggaggttgcgctat

SEQ ID NO: 80748 - DNA, 500 bp, Zea Mays
caaaaaacaaagcataaattagtcatcgaaggatgccaaagcaacacaaaagaatgtgtgtctaccttcaagtgtgtgtaggcgaggcagtccaaaaaatcttcgaagggcattactgataacctagcttcaagcttcaaaaacgcgatgttgtcgatcatatagcgacatacattagcctccaggatattcgggcagtagtaaagatagtcatttggacttcctccaaaagtagttgccctagaaggataccctagcttctcagcaaaagtgtgtgttttggcaaactactctgtagtcatcgccttgccagcagagtggtggatcacaaaccgcttagtcctagtatttccttatttcaaagggccctcttccctagaggccttctcccctattgtacctttggctctttggcccctatgacatttttacatttattatcttttgggaaagtctctagagcatcagccttggattcgaccacttctggcggcgcaagc

SEQ ID NO: 80749 - DNA, 689 bp, Zea Mays
gtggcgcgcagcttcttggtgttcttcgaactttggtgacagattctggtggcttcaatcaaatcacacgcccaacaaaggtggttgtcccttccccaaggttgggcagagctcccacaaccaaccccgagggaaaagcaacaaccaaccctagatgtcgacagcggcgaccgaccgcactcccctttctcatcctctgctcaccatgtgacctcgcgaaattggtgacgttcccatgtggatcgggcgattggatatcaggtacagagggagagggatcgcggagctcgacttttatacaccccggacgaagtccgtgtgagggggatttcgaccagcgaacccagcggcgaggatcacgcatgaactgctcccggttgttacaacggagaagaacggaatccccaaccacatttatgtagcgctagacggtcgatttcggatcatagggaggctcccgagttccctaggattcggttccgaggccggcgggaatctgtttagtccacagagcgcggatggcgaaaagttgttgggggaagaagaagacccgaccgagcagctgaccatagggccccacgggtcggtgagtgaaggagagcacgtgtgcattagttgagtggctggcaagcaggtcatagctgtcagcgggcagggacagccaaatagggtgggccgcgaccagaaaa

SEQ ID NO: 80750 - DNA, 543 bp, Zea Mays
ttctctttcccaagtagcttcatcttctccatggtgactccattgcactttgcacatctttatcaccttatttcttgtaactcgagtcaatgtatcaagaatcttgataggatactccgtgtaagtcaaatcaccctgaacactaagctcttccattggtaattgttcctctgggacgcagagacacttcttaagttgagacacatggaacacattatgcacatcagatagattagcaggtagctcgagttggtatgccatctccccaacttgcctaaagatcatgaatggtccaataaagcgaggggacaatttgcccttaactttaaatctcctcattccacgaagtggtgacacattgagatacacatgatctccttcctcaacatctctcgaattatacggacttgttcttctgcctcttgaataagctcaggaccaaagaactgcctttctccagtctaatcccagtataaaggagtcctacacttccttccatataaagccttgaatggtgacatcttcagactagcctgataacta

SEQ ID NO: 80751 - DNA, 366 bp, Zea Mays
ccaaaatttagccccaagtggagagcaccctagagcaagcctatttttctgtaagtccaaaatcagccctagtctaaagatctgaagtgttcacccttttgctgtcgccaaaaccacatggtccaaataacaaaaagtagccaaactacccaaggcacatccctaaaaaatttgaaaccaaaccagggtcgtttgtcatggtttggcatccattttgttgcgttgtaaacagtgcagacacacaagacttggtgccaccatatcttccaagctaggccagatctccccttggaactcacatgaactagatagctctaggtgcagggaagaaatcttacacaagtcatatggcaagtttcgcacatt

SEQ ID NO: 80752 - DNA, 1016 bp, Zea Mays
atagctatggcaaaggggtacgcagagattctagctatcggatcaaaaatctgggatctagattagatcacatctcaccgaaccgacacgcgatcaaaaccgtctgatcgacgacaacaaattggattttaaattgctgggatctaatccctatcggtcaaacccagatcgttggtcgagatgaccccatgtcaaaattgatacgcagatcaaatctcaggcgtacaccttcgatcgaacggtccctgatcgtcgacccatccatcccctacacccgacggccgccgcccaacccacggtggagccatcaccggaaggtctgaactaaggctccggtgctccaaactccaacccaatcggccctaaatgacgcggtgacaaaagcgagttcgggcaagcgaccattaccgagaatagagtggaggcgagactcacccacgcgcgatacggcccgagcgaactcctcaaactccggtgaggaatcagtggtgtatccgtcaatctccctacaccaccgtgccgccgacacaagcacctggctcagagaaaccctccttggctaaatatttcctcacgagacacttggtgcgtgggatccacagtgacggcgcggactccactccgccctgccctgatgttgtgcttctagcggcgatttaggcataaaagtcaggtggctgagctcgagggatgtagcggagaagcaagtgcttaaatacccgagcgaggaggggaggagggatcggaccataccggccatccgcaatcctccgaggaaaactcggcgagttcgttacaggggaggagacgaagctggcaagccgagcccacacatcagcgacattgagtacacgcgggcgagtccagaggcggggcccaccggccagtggcgccttcccccgctgggctggcgtacgtgcaagaatgggccggcgcacgaaggataaagggaaaagggatgggccgtgtggtgcatatcatcccaacaaccaacttttctctttttcttttttttt

SEQ ID NO: 80753 - DNA, 868 bp, Zea Mays
gagattatcaatgttccaggagtgctttaagtcttcgccggagggcgttgatagcctgtacgcgctgggtgatgccttcgtcttgatgatgaatggaccctcccatttcggctccagcttgcctcgtgactttgtccgggtggtccggacgagtatgaggtctcttttgttgaactctcttgggacgaccgcgttgtcgtgccaggccatggtttgagcttggtatttgttgaaggcctgcagggcgagggcgcggtctccgtcgatgaggtctttagacgttggtttgtcgatgtcggggactactgatgtgcttgttcgaggcgacccatgctttatctcctgcggcgtcatggccttcgatccatataatagatgaaaaggtgtgaatccggttgcccagcattcgatcgtgtttagggcccagactacttcaggtagttggtcggcccatttacccttcttgtcgtcgagaagtattttcttgatggcagtgaaaatcttgccgttggcgagctcgacgacgccgttggattgcgggtggtataccgaggcaaaggcaggcttggtgccgatggagaggcagaagtccctgaagtcctggctgtcaaactgtttgtctttgtcgaatgtgagcttggacgggactccgaatcggcaaacaatgttttgctagaagaacttctaggtagtcttcgacgttattgtgcatactaccctggcctcgatccacttggtgaagtatttgacggcgacgaaggtgaacctaaggttcccttgagccgtgggtagtggcccgacaatatccagcccccagcgttgaagtggccatgtgtgggcgatcagcttggtgaactgcgaagggttg

SEQ ID NO: 80754 - DNA, 572 bp, Zea Mays
agttatcatacgaaggaacgaagctttggaaaaagataaaatattactctccttagtggatagattgaaatctaacgaagctaagcttgttgcccaagccgaagctcataaagctgaagtacatgaattaaagggaaagattgccgaaccaaccgaaaaatttgaagttgaggtggtgaaacatgagatacgcgagatcgaaaagttaagagcacaaatgaggaaacctccgccgtaatggccatcaatggcgctaatggctggccgtttcttctccctccccggtgccctctccccttccctctcctccctctataaaagttgtgacctccctctctctctcttcctccctgaactcgccatctctctctcgctcaccttgctcttgccatagacggcgcccgcaccgtcgtacaccgtcgccggagctccgccgtccgagctcaccattatatgcaaagttctcgaagtgtgatttttggctaaaggaagttgctttcctaggacatattgttactgatggtggaattaaagtagatccaggaaagataagtgaaatactaaattggaag

SEQ ID NO: 80755 - DNA, 545 bp, Zea Mays
aaacaattaaaacatggatttggcccatgttctaactaaattataaggaagcctaaaatagtgcaacagtacgcaaataaatttgtacccaactattgataaagtagaccaccagagaaaaatatgaaacctatttaaaaaggtaaggtaaaacacattaccccctacctcatgaaaaagaccaaatgatccaaaaatttgtaccaccctctcctctaagcaaaaagttgccaaatttcagaatgattgctcttgcagaaagaagaagataagaaaaattgtaaatctattgtttgacatttttcaagtatagtgatagtagaaaccacccctatggccaagaactttagaaaatcacaaaaaaatgaccaataggtattaatggctaaagcttggtacaaagtcatattattacacctaaatgctagcaaaaataatctttatggattaattcattgttagaagagagttgtagttcaaagcaccccctctgccctacaacttgataattttgtacagagtaaacccttaactttttaagcccc

SEQ ID NO: 80756 - DNA, 552 bp, Zea Mays
atgcagatgtaaatatttacgatattcattgtatacttttttcagtagaggcttaacgtgagatgcaacccccaagatgtattagtaagcatccagatattaaatgacagacagcgccaagcaattgcacggaggggattttccagtattcttgatatgagacttgacgcactcggcagcagatcacatttagcttggctgatggaaaagctcgaccataatgacatgacaattcgagccagcccagggaaggagctgaaaattacaaaggatacggtgcaccttattttggggttaccaaatgctggtggaggaacagcattgggcatcgatgaagttgttgctgccaacaatttaagggctgaacttgggttatcgaaagaagattttggggttgcagctcttcaagatcgtctgaagaaagggtctgacgatgatttaagcatcagatcctttttccttatactattcaataggttgttgttccctactgtcagctggggaataaccaaccatgaggttcttttaactaaggagatggatcgtttccac

SEQ ID NO: 80757 - DNA, 687 bp, Zea Mays
agagttatatatggcttggattgtgtctctacacggtgtaccaaggaagatcattttggatagaggatcacagtttacctccagattttggaaaagttttcaagagaatgtggatgcgaagttgaattttagttcggcctacctcagactgatggacggactgaaatgactaatcaaatattggaagatatgttgagagcttgtgccattcaacgtggtagtagttgggacaagagtctaccttgtgctgagttctcacatgataatagttatcaggccagtctgaaaatgtcactgttcgagattctatatggcgggaagtgcaggactcctctatttttagaccagactagaggaaggtgatcatgcgtacctcaagatgtcaccacttcgtggaatgaggagattcaaagtcaagggcaaattgtcccctcactttattggaccattcagagtttttaggcaagttggagagatggcctatcaactcgagctacctgataatctatctgatgtgcataatgttttccatatgtctcaacttaagaagtgcctctgtgtccctgaggaacagttaccaatggaagagcacaatgttcagggtgatttgacttacatggagtatccgatcaagattcttgacagtttgactagagttacaagaaataaggtaataaagatgtgcaa

SEQ ID NO: 80758 - DNA, 296 bp, Zea Mays
cctaataagaagtctgctggtacagtgtctgcagaaagatcttcatattcacccccctcaccaccggtgatcttgcgcccggattcgcgtcggtcgccatgattcgtgctaggcgcgcagtggatatcaacggggaagtaaaaagaactcacgggggagtggatttggtcgcggggtgaagcttatcacctgcgcctgtagccgtgcgacgtggccggaccgccggtgtcgccgtggtactccagcgacctcaattatgtcacgtcgtagctctttaccgcgtagtagtaaacgtg

SEQ ID NO: 80759 - DNA, 564 bp, Zea Mays
tgctcgcagaaatcgaagaactctgaacttgtgaagttggatcctaggtcagttatgatgctgtttggtaccccgaatctgaatattatgtcttgtatgaattccacggccttggctgaggttaaagaagcaatgggtttgaactctatccatttagtgaatttgtcgattgctactagtacatgagtgtatcctccttgagctttcttgaaaggtccaatcatatcgagtccccagcatgcaaagggccaagtcaccggtatggtctgcagttgctgtgctggtagatgttgttgcttcgacaagtactggcaggcttcgcacctctgaactaactcggctgcgtcattcttcgctgttggccaatagaatcctgacctgaagaccttcccgactagtgtcttggatgctgcgtgtattccacattgcccagcatggacctcatccagaagtcgcttcccgatagatgagagaatgcatttcatgaggatgcctaatgcaccccttctgtataatgtctccccaatgagtgtgtagtgagccgactgtctggcgatacgctcg

SEQ ID NO: 80760 - DNA, 321 bp, Zea Mays
attgcgcactccctcagaaatcatgtgtgttatttccgtgacatcagtcccatatttgctagctacggcggtatcaatcatgtgagctagttcttcacaagtgacagatgaacttaccttcttgctggacgtgcttgccccaccaatctgtttgatcacaccattcttggtttttcgaaagcaagccaatctctcgttccgtttctcctccatctctcgtgcgatttcttcttcaatctccatccggtctgcctctgtaaggtcctccatcgtgaccttgatcacgttcaagggatgaacttcagatttgtccggtgtcgc

SEQ ID NO: 80761 - DNA, 342 bp, Zea Mays
catgtcctggtttttttttgtttagttactcaaccattgctatacacctaaacgtgtactgattactgtgttcttggatggctatatataatataataggcaacctttctttggtagcgctgttgttttcttggttgcatctttgccttattctttaatgctaaatcacgtggcatccatttgcgtttttctttggcctatgctatcactttggaactgtaattaaccagtgcttactgctttgatcgcacttaatgaaactaagcattgaaagtctggttaaaaagatttgatattgttaaatattgttatgagaaggtctacaacaacgcttaactgctg

SEQ ID NO: 80762 - DNA, 329 bp, Zea Mays
cacccaattattccttgctcaagatttttggttgtgcctgctggcctcacttacgtccctacaatcgccacaaattatcctttcgttctaaaccatgtgtcttcattgggtatagttcacttcataagggctataaatgtttagatatggattcaggtcgagtctatatttctcgggacgtagtttttgacgaggctctatttcctttttctactccttcataccccgttgcagaatcatcccagggcagtacccgtgatatttggaacaataatcatttgcataatttgtttcctgctaacactgtggctgcagaccggtgtgctgtc

SEQ ID NO: 80763 - DNA, 965 bp, Zea Mays
gagcgggtgcattggatgcttgaataccaaacggagctaagggcatgctcaattgataggatttgagggtggtggcttgtgaattggacaaagtgcgctagcggccggagaggaagaagaacactggtggctttaatcatggcgttcatcggtgcaacggctcaacgattgtgatcctaagggtgccacggttaccaccacacagaaacaagccacagcgtggcatacacgaggagaacggcgatagccacgacaatgtccatgcggccacgttgccggcgcaggtgggcaagtgacagagcggccacagtgtcttatgttcatccacgacgagatcttcttaccgtcgagcgtaatccactcgcacgaggcacgaatcgcgacgatcggcaagaatccgggcgcaaaggccaccggcggcgaggggggctgaacagaagatctttgtttactgtaccatcggattcttattcagtcagcctgacagagcaacttgcagggagatttgctcccaaattcatgtagtgactcgaccatatcactatatcaaagttgtagccctatgatccagctacaatcttgatatagcaaccatagtcaaataattactggatcatggtcgaatccaatctcaaaacttgcccaacttcactgttaccccttattcagttcattggctaactgtcagcttgactttagacctaattatctccaaatattacatgacactaaggcttaatcacttaagcaaagttgtactcctacagtagctctacaagtttgatgtgttgaccctaggcaaattcctcatgaactgaaagatacagggttccaaagttggctctatgcactagttttcagacttaggcatagggatgtatggggtgtcctttttgcaaataagtccaaacttcatcatttggcttgcaaatcctcaaatgtgagaaacacatagtttgtgatgt

SEQ ID NO: 80764 - DNA, 409 bp, Zea Mays
acttctagaaattcataatcaaatggctagagtgcgttccactgccagggttgatcatgagggggatgagaccaaagccattgaaattgtcccaatttccgaagcaatgaggcggtctgggctggcaacatcagaggatacatctgccgccgaagcaaaacaagttgacgttgaagaagatgaatttgaagatgagtacggtgcaatgccatctaaacccagccacttagagtttgggaagtctactattaccgaaggtgatatggctaagttactgaagctaggctattttagtgaagagaaaagggagttgattcgcttcgagggagaggaagttaccccaaagccagaaaaagatgaggtggtggtttttaaaagcttcttcaaagcagggttaagatttcccctg

SEQ ID NO: 80765 - DNA, 608 bp, Zea Mays
cttatgagttgagcagatcttcggcaaatggaatgacagggaagatgcgttgagagtgggggtgggttgagaaaaactggtccatccttttaataggagtcacaacgatacccatggggaagatgttgggtggaaggttgggccgaattaggaatgcgcgcatggatgggggtgcggataggggcatggtgcatgcgcaagttacctactatggaagggggccgcctactatggaagctccacctgtggcacactaacgatgtgtaaggattgaaggtcgcctccatctatggaaggagacgctgaggttggaaggaggcgtgcttcggaggctgggtccatatgatgttgagggagtgagatataagcgagggcatggcaggggttgggtgcatgcacaggtgagatttgtgggcgtgggcggtggggctgggtccatgcgcgggcatgggcggtggggctgagtccatgtgcagttgagggagtgagacaaatgagggggcacggtggaggctgggtacctacgcgggcgtgggaagatccgtgggcaggggctaggagcctagttccatgcgtgggcatggagggggacagaggcatgggcacga

SEQ ID NO: 80766 - DNA, 1358 bp, Zea Mays
gaaatgtcctatgaggtggagtctagggaataatcaagggggggctaggagattagggtttctaaccttgggattaaattttgggatgttacaaacctaccccgcttaaaggaatctcgccctcgagatttaaactgggcttgacaaaaggtaagggtattccctcctcaaagagtcctcactctcccaggtagcttcctcttctccttcactgctccactgaactttacagagtcttacttctgagtttcgggtcttttggacagctgagtcaagaatcttcactggcttttctcggtactgtagatccttctgaatcggaattgactcctcttcgatgtgactttctggcacttgcaggcatttgtggagctgggatacatgaaacacattgtggatattttacatggattctggtaattcaaggcggtaggctgcgggtcctactttgccaatgataggatagaggccaacgaatcacggagctagcttccctttcacttgaaatcttttgactccgcgcattggggagaccttgaggtaaacaaagtctccttcctcgaacctgagttctctccgcctgttgtctgcataacttttctgccgactctgagcttcaagtaatcttttgcggatcaaggcaactttctcttctgcctctttaacaaagataggcccttctagtgtcttttcccctatgttggaccacattagaggggtctggcactttcgtccatacaatgcttcaaacggtgacatcttgatgctgtcctggttgctgttgttatatgagaactctacgtatggcaaactggactctcaatttctgtcaaacgtcaacacacaggctcttagcaaatcctcgaggaccttgttgaccctttctatctgaccatctgactgggggtgataggcggtgctgaagtctagcttggtgcccatagcttgctgaaggctcatccagaatattgaggtgaacgatgttcccctgtttgacactatcttccgtggaataccatgaagtctaactatttcgttaagatatatccgggcaagggtggctcctccaaaggtagtttttacggggatgaaatgtgctaccttggtgagatggtcgattatgacctagatagaatcgttccctttttgggtccgaggtagtccggttacaaaatccatgcctatttcttcccacttccatttgggtactcgaaggggatgcagtatacctgcaggcttctgatgctctgccttagttcgttggcaagtgtcgcactgggccacatactgtgctatctccttcttcattcctctccaccagtatctggtcttgaggtctaggtacatcttggtggtcc

SEQ ID NO: 80767 - DNA, 353 bp, Zea Mays
gtcggggccgctccaacccgaagaactccgttgtccatctcgcccactaaggagtggacacagatcactcggaggaaggaagtgaatatcctataccagggaaggaaagcacaacgggccatcctcccggtacctccgccctcaaaggaggatgggaagaagaacaccaccatacctgctcctttctaccctaatgtcctcttcattcaggggagattggagtcattgcccatcttcaacgatgagcctaccatacaggggaggaactaccccaacatgatgcccggcgatggagaaacagacgccggaatgtgcggcgatatcacgaagccggagaacgggacctgacgcaa

SEQ ID NO: 80768 - DNA, 401 bp, Zea Mays
tattagtagatagagtgaatgctctaacccatgatctagagaaggcatatggtggaaaggctaaattggatttcatattgagaagtcaacggtgctcacttaatcgtgagggtcttggatatgttcccaagaaaggaaagaatgcttttataaagcaaaagacattgtttgtgaaagaatgtgacaaagtgtgtcacaagtgtcacaagaagggacatatcaagaagaattgtcctaagctaaagaatgtatcctccacttgttttgagcattgttatgttctcataatgcaaaaggtgttcatgctaaatttgttggtacttcaattgttggcaataagaagaaagctatttgggtaccaaagaccttggccactaacatctaaggacccaagcaagttt

SEQ ID NO: 80769 - DNA, 633 bp, Zea Mays
gaccgcctacgagcttgtcaccggtaacaaacataaggttgattactttagagtctttggttgtgaatgcttcattcttaataagaaagtcaagagctcgaagtttgctcctagagtggacgagggtttcttccttggttatgcctcaaatgcacatggatatcgtgttttcaacaataccaccggtcttgttgaaatagagatagatgtgacatttgatgaatctaatggctcgcaagggcatgtttctattgatattgcaggaaatgaagaaccaccatgtgaggccataaagaagcttgctacaggtgaagtgagaccacaagaaaagaatgatgatgaaggaaccttttagatgacaaatgaggtcattgatgtaggcgcaaaggtggcgggtgataaatcctccacccaagcaaacacatcaacctcaagtcatccaatccttgaagaagttcatcaaccacaagagtttccaacaattgtggaagatgaacctgaagtagttgttagtgaagttcctcttgatcaagaggatgatgatgaagggcaaattcaaagacaaccatcagtgcctcatcctcgggttcaccataccatccagagagatcatccagtggacaacattcttgg

SEQ ID NO: 80770 - DNA, 471 bp, Zea Mays
aatttttagcgagggcagagcagcccgacgtccaccaatgcctgtaggtcatcgtcagtgatggaggagatcggccatgggtcgcggggaggaaggacacatagcttctcagccatcggtgctgaggaagaagacgagaagggagtgcaagagttttctgtggctaaggttggaggcaactagggcagggaagcgagagcagaagttaaaagaaccaaagagccctcctcggacgtatttatacgggcggacagagtcaccgaggcatgggccgagccacccaaattcagggtcgagagtgggctgagtcacttcgaattccccatgcacgcgtgctgcaacggtcggcctccaggccgacgggtctcgtcgcatttatatcccacccttcctgtcgggctgacgtcagacagcgagcgtcgcttcgcattacgcatcaaaaggtgtgaccctctcttcctcctcttttcc

SEQ ID NO: 80771 - DNA, 327 bp, Zea Mays
attgtgcctctttctcactataagtctatagcactaaccctaatcccttcccctctcgactgtctcgagcaagatttccattctcctctagtcctccctcaagttagatctcctctggtggccccttgccggtgactccggtgctttggttggtcaggtgaactctcgattgttagccttttttacttaatgtgttttgaatgtcattgaggagccagagacgtcgtggaggggccagtcacaaatttcagacggatctttatctagttgccgagtatgcaaggcatgagattgaggcacacaatgaggctctggatgccatggccc

SEQ ID NO: 80772 - DNA, 597 bp, Zea Mays
gaatttttgaagcaaaacttaatttcaccattcatcggttgtgtggcatctctattttcaagactactaaaatatcatcatgagaccaacatccatggaacgttgttgctttaagttgaattggctaaccttttgatttaatttttgtaacatgtgccattatttcctaagtgtgcatccatatcagttcaaaagagtatgaaaagtcatgcccaggttgtattccactaaattttattttgaaaagcaccaaattataaagtatggcttatgttatgatagcaatggcactaagttgttgtgactgacacaatttctatggcatgactttgtctgttagaaacatataaaacatcaatcatgtaccaactgtaccgataaggctgccaatttaaaatcaaagttagcttcatgaactatgatagcacgaagaaacaacacgcaggtgcaaaacttgaccacctaagaaattgcaaaattaaataggtattatttagcacaacaacacacaagaagcaaatccacaaggaactggatggaggaaggcagcagacgcaggagaaacattttgattccagggctcataacagagaaaat

SEQ ID NO: 80773 - DNA, 547 bp, Zea Mays
cttttattttcaactcttcttgtctgattctttgtctatcagaaggttctaatgagaagcattgcaagatgatcaagctaggattacggaacttgaagcaaagtttgccagaagaaaccctttcgaagctatcgacgatgccctattctctgtcttatccccactccgcaagaagttttgttatggatcccctggatctattatttgacttcttggttaggttgataggattgttctttagtattaagattttcgactagatcggtaatggcgatattatatcatagtggttttctaatccctaatattgctatataacccttgacttcttatacttttgtttcttgccattgtattgccatccttgcgcaatatctaccttgatatattaaacctttgcctctctacttttctccttgataatgctttctccttaactcactttatatccttggttgtatcatttatcctcactttaatagttcatggttatcttatttcactattggccaccgacaaatatgtcttgtctaatccttgataattc

SEQ ID NO: 80774 - DNA, 496 bp, Zea Mays
ctattctggagttctataggggttattctgcaaaattcagggcctcgtcgtaaggatcttataaaagaccaggattgcaggtttatttatgagaactccaggggctcttatgctaatctgccatagtgaaggggtactggggagtcctagccatcaaatctaagtcccacgtccagattagatcctgtcgcggatgaatcagtatgcgacaagaaccgttggatcagaattccacgacagggatattatcaccctagatctaattctatccatctgatctagatcaatggccctaaccgaacgtggcgaaggggtatgaaatgttatgatctcgatcgtgccccgatagatcgatgacctaaagtgcttctacccgaaccaacgccagatcaaatctcgaccattcgtcgagatccgatagccacagggtgccccccatcatcccggcccgagacggcgacgccacgtccaccacggcgatattttgccggtgaac

SEQ ID NO: 80775 - DNA, 640 bp, Zea Mays
ctagaatgtgctcctggtgctgacaactataacatttgtctctgttgtcaggatgtaatagtcatcttgaacgattgtagaagtaaatgtggtgtgctagttttggagttttttttcctaacttatgtcaatcgcttggttggtaaggcatagtggttgctctaagatgagtagacatgagcatgttgcaccgtcttaagtcattgccgacttaagccgattgctccgttagtagggtatagtggtcacactaagtcgagtaagcgcgagcatgtcgcactgtcttaagtcgtcgccgacttaagccgattgctccgttagtagggtatagtggtcaccctaagtcgagtaagcgcgagcatgtcgcaccgtcttaagttgtcgccgacttaagctgattgcttcgttagtagggtatagtggtcaccctaagtcgagtaagcgcgagcatgttgcaccatcttaagttattgctgacttaaggcgattgctccgttagtagggtatagtggtcaccctaagtcgagtaagcgtgagcatgtcgcaccatcttaagtcgtcgccgacttaagccgattgctccattagtagggtatagtggtcaccctaagtcgagtaagcgcgagcatgttgcaccgtc

SEQ ID NO: 80776 - DNA, 536 bp, Zea Mays
atttaatttgatgggtggacctggacgttcatatgagatggctttacaagccactgatgcgatgtgcgccacgcgcgcgcgcgtacgtggcccggggtctggggccggccagtcaaaagagaaaagacgacggagctcccccgcatcggcagagaaattgaagtgaccgatcgacgatccatccggccggatcgatcttcttttccgacatgagatgtgaagcgtcagcacacggtgggtgccggcgctggctttgcgactcgatcgagcagtcaagctaagccagcgctagctagctacgacctctcatctatcgtcgtagtctacctacctcatgtatctctcttgtcactagaccgtacgtgtgtgttctacctatccctcgtctagctagtgctgagtgctctgcctgctggtaaacatcgtctctgtggcagctagcttagtgatcgatcgagatctcgcgttcaaagtttcttacgtgcaagctaaattagtaggcgaactaatagtgataagctaagatgcatgcatgc

SEQ ID NO: 80777 - DNA, 466 bp, Zea Mays
aaacatgttgatcagtctctggagacaaaaaaacctcacgaagagagtcccaaaggagaaggtattgttgcattccaaccagagtgagaggcaacttgatatctctgatccactgaccattaataagggcttgggccatagttctagaggaggttaacttcttgtctacctttgagaataccaatggagctaaatctttgatggaattcccaatcaaccacgtatcaatccaaaagagagtatcattaccgtttcccacatgggagatcactgaaatggcaaccaacgccttgacttgtggctgaggagggatatcaagaccaatccaggacctgttagggtcggttttctatagccacaaccacctggcttgcagcgcccagcttctgtaaagcagatttgggaggccaagaccaccaagatgcagcggcctagtaaccttctcccaagccacaaggcagcaacc

SEQ ID NO: 80778 - DNA, 287 bp, Zea Mays
aactcggcggagcgcattgccagacagtcggctcactatacactcattggggagacattatatagaagaggtgcatcaggcgtcctcatgaagtgcattctcccgtccactggaaagcaacttctggaggaggtccatgctgggcaatgtggaatacatgcagcttacagaacgctagtcgggaaggtcttcaggtcaggattctattggccaacagtgaagaacgatgcagtcgagttagttcagaggtgcgaagcttgccaatacttgtcaaagcaacagcacct

SEQ ID NO: 80779 - DNA, 650 bp, Zea Mays
aatcaatttccctaattatttctttatttttatttcactctgtaccgcgcacagaatttaatcaaaatacagggggctcgacgcaattaatcctaagacacagactactactacgcggattgcgggttgttttcggggaaacgtaagggctcttacgcaaaatggacggcccgaatggtatcggcgaatgctggtcgtttgatcaatcatctagggctcggatcataaggctgaaggggtaagctaagcctaatcgtagccgaccacgtagatccaacggtcaggacgaaccctggccgaggcgatacattctccctattcaacaccgtccatcttgaatcagacggtctgaaaccaccccctactccgacggcggagcgcggccgcgtactccgagcacggcggcgccattactggccaggcgttcctcggattacgcgtgttaaacatcactccaaccagctctaaacattacggcaatgaagacgaactcactcgaggaaaccgtaccgaaagtcatgcgtggtggcgggctgtcaacggcggtcgcggactccgatcgacgcacgaacggcgacgagcaatttctgcccactggcaatagaatccgacctgtgatcggctcctacacttgcggcggggccttccgg

SEQ ID NO: 80780 - DNA, 524 bp, Zea Mays
tctctctctcctctcactccatcaaatctctatcgatctatctttctcgaggtccaatgttgagatgaccgagaacgagatactcgatgtgctgcatcaaactatgatggatgtcgcgataaaatttgcctccagatcttcaacgaaagagaggtgaaggacgcagtagtggagctatatcgatcgagatcgtgaagccacccacaaccgacagatacaagactacttcaatgacatgtgtgtttaccctcagctctacttttgtcgaaggtaccatacgcagaggagtctctttcttcaaatcttggagaggttgagtaagcatcccctatttcattcttaaaaccgatgcactcaactataacagtttcttcctcacaaaaaatgcactattatcctccgtatgctcgtctacggtagcgttgttgactccactaatgagtatatcaaaatacgaaaaatgttgaccttagagtgcctcaaacgtttctatagaggtgccatttcatattttggtgaggggt

SEQ ID NO: 80781 - DNA, 413 bp, Zea Mays
ggccgatttggggggggaacgggaattcacgagctatggtggatgatcggcagggatgagtggtgcgctgggtttgtaacgagatagcggagcaaggagaacgctcaatttatagaagtcgactttggttgctccaaattttggacgaaggggagcttacggtggcgttgagatgagtcaccggagttcgccaaatgtggcgctcgatgagggtaaagtctggggggtaattggctgtctaacatgacctacggtgatgtgatacatggtctatggcgtggcgcaaccaagctcaccgggagtcacgacggcgtcgttcgcttggccacgtcgcggagccagtgaatcacgatggatgaactagtgccagagaccatgttcacagcccttccctgatcttttcaccccagcgc

SEQ ID NO: 80782 - DNA, 485 bp, Zea Mays
gtctatgtcatcgagactctatccccatgatcatacaacccattcaagtcttatactcatttaaccaccaacttaaactatcttctagtagcattgttgattaacctacaaaagttaccttcccttgtcccaaaagagctagtatatatctaagcatggctaagaaattagcaagataattaagcattaacccatactacacaagcgataaggtataagataattgaagcaaggaaataaaatacaatcaaaagtgtagatgctaccaaatatacatgaacatagcccaaatacaacatataatataacatagtagcaagttcactttgcaaaaataggatacagatcatgattatctgcatgccttgcaatttcttgggctcaacaaaagtcaacctcgacctagactccacggactcactctatagaacttcacttactaacatgatgaatgaatgactgcattataatgatgctaatagtgc

SEQ ID NO: 80783 - DNA, 498 bp, Zea Mays
atcaacctgagtttgaacttcacacaaaagtatattcaaatttgaaatctaaatttgaaaagggagaaaagagaaagaaaagaaaaagaaaataaactaaacccctacctgggcctcggtccctcattttggcccacctgaagaagtcacccacgcagcccacctaacaaatctctccccacgcagaccatccgcatctgtgtgccgacaggtgggatccacctggtcagccactcttttcttgcgcgtactcattccctgtcaatgtcccgtgggcccaatccatcagcctcatcatcaccattttctttgtcgtaacaaaaacttcacgcgagctcgggcgaccttatcgcaaccgactcggtgtccaccacaacgaactccacgagctccgcgcgatttccccgatcccatcctcctttggactcgcgacttcggggcacaaaaccatggcaccgccctcctctctcctctcatcttcttgcgccaccgtcgcac

SEQ ID NO: 80784 - DNA, 399 bp, Zea Mays
gaaatgtcgaaggagatcgctgatgtctccagcgaaggtggcctggtttatctgagatacacctgtcgccacataagtcagtttgacgagtcgaatgatgattggcttgaggctgttgaggcgaccagtgatgagctactgggggcttatacgaaggcagaggatgaagccatgaacactgccttcggcgctcgaggcaaaaggagattgaacagagtttttgacgtgattggatttatttatcccgactactgttttcccgctcaaaaacaagggtcgaaaaggaaaatggaaactatatccttttccaccgcatcgaagccgaagagagctaaggttttgacttgttggccgaagctacactctttagagaaaaccgctgcagcgcctaccgcagag

SEQ ID NO: 80785 - DNA, 363 bp, Zea Mays
cgatgagctggggtgaagtgcggcggtcttagccgtagctcaatcctgcctcggatttttacccggtcaagtttatctgttgtacccgaagcacgaatcgcagcacgagatcgaccaccggcggcgactcaccggcgacgagcgagccagctggcggtctgatccccaatggtctactgtaccatggcgcatctgcttcagtcgcctgaaccggccatgttccaacccaattatctctagattcttgttaggaacagagcgatcccgcttaataaaatttgttcactaatcatcagtctccaaacttactataggattcttggatcaaaatcgaacgtatttaaagttatggcgtgctcaaat

SEQ ID NO: 80786 - DNA, 1107 bp, Zea Mays
ggaaatgggagaaaaatggacttgaagttgggctgtcagtcacccttggtactaaaattcgactgtcagtgaactaggatgaactttgagatcgattttacataggatccagtggatgtttgatcgaggttgctataacaaaattaaagctagtttatagaagaacaactttgctacagacggattagtgggttgttacataaaaatttgagaaaagggctcctgaacttgctctgtcagaatgactgaatgggatcatgatggtacagtggactgaacaagaatccaggttcagtgaactcgccgccggtgaactcgcgcaacgattcgtgcacgacgcggcgtggatattactggactagtgaaaagatcttgaccgtggatgagattgtgagctggctgccgtacccacttgccccgcaatcggtcgagatgaccatcgccggatttcgccgcttgctgcaaggatgccacgtatttggaggcgttaccacgtcgcagtatatcgcagtagatagcccatctgtcgcatgagactttgccccggtgagcgccacagtagttttgctccggtcactcacctcctctccggccgccagcttatcttccccgaattcgaagccaccacttgcagacgctataaattgagtgtgtggcctgctccgttagcttgttatgaagccagaacaccaactctcgcccccaattagccaccgtagcccgcaaattcggtacttcccccaaatcggtctaattcgtcgtcgttggcatcttgccgtggccagccatccaaaggttgatttgctcttctctgattcgtgttatagcatccttagggtctcctgtttctcgaagactcatttaattgaactataccgcactagatcatcgggaacacctcggcctgcccttggtgtttgacgtcatcgtgggcagaggggattctgggtcagactagctcaattagggcatggactaggttctcttgggctcggggatggcgatccgatgctcggtttcggcagtcgtcgtcgtttggagcgagttccagcgaggggatggccggcgggcgagcacgccgtcgctagggactaggttagtgaagaa

SEQ ID NO: 80787 - DNA, 342 bp, Zea Mays
gtgcgtcatcggccgttccgtcgtccgaggataccctgagtgatttggtggcgacggagttgcagccgggccacacggtggagtttggcacctcaaggatttcctcagtttgcgtgcaggagatgcagcagctggggtactttggtgacggtgtcgagcgcgttccgggcgctgaggagattcctgagcctgagggcgaaatcattgtgttcgaggcatttttcatcgccggtctttgcctaccggcgcatggtttcatggcggaggttatgcagaggttcgatgtctaggtccaccagttgacacctaacgccgtggttgccctggcgaagtatgtctggg

SEQ ID NO: 80788 - DNA, 524 bp, Zea Mays
cacgaacagatagagacaagatatcgcttgtgttcgtgtaggcaccctgcacaacgctgacggcaacggacgctactccaaacttcccctacatactctagacttgtattagagagacaaccagcattagatccagtgccctttctttctacatacatggagagcacaccatcactcaacctcaactcgtgttggggattagccagatggataagctcatacggagctgctgaaaccaaaggcatggaagacactcgacaacctaccggaaaatggccgaacagagagtgaccggcacacatattcgaccagcgcgcaaacacgccctgccctgcacacatacagatttgaccatatccacctcaacgacagcagacagcacccacatgccagtgggccatgcgggcctgcacgttgagactcatgcgcacgcaacatggcgtgtccatgggcctccctcccgtcgtccgtgcacgtaatccagagcagctcgcagtactggacgcgacatgggccgccactgg

SEQ ID NO: 80789 - DNA, 579 bp, Zea Mays
taaacgggccggcccggcccagtaagcaccgaaaaagcgagcctaaaagcgtgctaagcgggcttggtggacctagaggtaaacgaaccggaccgggctagcccatcgggcttaaatttatgtctggttcgacccggttattcgtgctgggccaccttgggcccatataaaagcggaccggactgagctcatatcgggtcaccttcctaccttcgcgcttccatcaaatcgatttggcgcatgggttgtggtggcgagctgacgacctgtgcttccatcgggtgctgctaagccatcctccaccgcgacaatcatgaatctcagaagcaacgcatcaccaacggagtgatcgaggtcgaccacgatggaacatcaatttgcggtagaagaagatgtcgatgtccgtgaatccagttatttgcgacctccagtttgaaagcagactacagttgctactgtttcgctgagattgggtctcttgcggatcagttcatcgtattcattctacatggtatcagccttcttcgttcctacagcaatcctgtgtctcaccttccacatcaatggctcactccccac

SEQ ID NO: 80790 - DNA, 701 bp, Zea Mays
ctgatgagttccgtgttgaacctctgggagggttgttggtttctgcttagacagacacaccccccttttcttggtcggttgttgattatcccgatgaataattctcctattcttgtatggaacgtcagaggtttgaatgatcctcatcaaaaggatactctaaggtccttggtgagctgtgtaaacccctccattgtgtgtgttcaggaaaccaaaccctccttttaatcactgggatttggctttctgccttggctctgagtttggtgactttgcttttcttccatctaaagacacaagagggggcatccttgttgcttggcaaagaagcctttttactgcagtggacaggaaaattttgaatcattcagtcttggtttgctttcgtagtgcctctaatgtctgctggtggttctcagggctatacagcccttgtagggatgaggagaagcaattctttcttgatgaactctccctggtcagaaataattgtcctggtccctaggtggttgcaggcgatttcaacatgatcttgactgctagtaacaaaaataatgctaacctcaatagtgatcatgggaatgttcagaagatgggttaattatcactctcttatagagctgcctttgactggacggaaatatacttggtcaaatcaacgagatgatccgaccctagtgaagcttgatagggtgttctgt

SEQ ID NO: 80791 - DNA, 398 bp, Zea Mays
gagaccacagagtccgtctagcagcatcgctgaccgaagcagcgtaggtggatagcggtgttagggactcattagccgatacagtcctggaccccctatcccctgcatccatcaccctgacgtgaatgcgagtgatgtagtagcaagcctggggaggctcgcacactcgccttgtctcgtacaagggtcagacataggttcccaacacgtgcagcacgtcttgcagcaggttgggaagtgccctgtctcaaacattgatgtgtaatgttctgtgacaggcccaaatcccatgaagtagtcctgctgaacgtcattggcctcttcgttgacgttctcctcgtcatcttctttgtcgtcgtcatcttcatcatcatccctagagtcgtccgggtcgtcgc

SEQ ID NO: 80792 - DNA, 375 bp, Zea Mays
cagctctcctgctcggttagtttcaaaaaaaagctttgtgtgctacttatttacgtgtgtgcagagcctagctaatttatatactcgtgacttttgctaggtgctacacgtatgtggatttatatgcaatctgtgaaggtagtcgatgcatatacggatgaggcagcaagtagtactgggcctccgagtgagccatgggcctataaggccagagattcccctggcgatggaaggaaaaaagctacggttataggatggacttgcagcagttgggttcggcacagaggacagcagaggacgagggctgattcccagtcccagagcagcatctggttggcgccgcggcacgcgcgattggctcttgtcattgtccac

SEQ ID NO: 80793 - DNA, 413 bp, Zea Mays
gtccaacatggacccggatacaagagcttcccttagggaggcccagagcaaagaaataagaaaaataaccagaacaaaaacacaaacaccactacatcaagtagctaagagacaaaggatggtgactgcatgaaagaggagaggcccacaactccaggcttttcccacaactgttgcttctcccatgcctgacagatagttaaggccataaacttctaagggctctggcccctgccaatccccacagtattgcatcttcttggatgtgttggaggatggtgttagtgcttggggatgctccatcaaagacgggcgtttctatgtttccagagcccccaagccacaagaatcaccattgaattaaaacctttcctctggacttttggcacctgatgctcagctgtcacactcgg

SEQ ID NO: 80794 - DNA, 304 bp, Zea Mays
atttggagaaaaccccaatcaaagatggactgtcagactgcctgaagcccgaaattcagattaacagtgtgatgggatgaactttgagctcgattttgatttggatccagtgactttttgtaggagcacattgtagcaaaatgatagatggattatagctctataactttgctgcagaaaatttgcataggtttcacacagaatcgggagtaaattgagttccaattggctctgtcagtcaaactctttattgaattcagagcactgttcaccatcatcagaaacatcgcgccgtggattaaga

SEQ ID NO: 80795 - DNA, 1175 bp, Zea Mays
ccgaaggtagttttcactaggatgaagtgggccaccttggtaagacggtctattatcacctagatagagtcgttccatttttgggtccggggcagtctggttacaaaatccatgcctatttcctcccacttccattcgggcactggaaggggttgcaataggcctgcaggcttctgatgctcgaccttagttcgttggcaagtgtcgcaccgggccacatactatgctatctctttcttctttcctctccaccagtatctggttctgaggtctaggtacatcttggtggtccctgggtggataaagtaggctgagttgtgagcttcgtcaagtagaacttctcgtgcctctccttttggtacacacagacggttcttgaaccaaaggactccttcctcatctgtccagaagtccagaagtggttccttgcgagctttttccataagacctgttgtctcagtgtccaggcgttgagccttgcatatgaggtcttctagcattggcttgacttctaggctgccattgtctcctagacatgcgttcagctgagctgattctttcttccaatcttctaagaagttagttcctttcttcccaaaaagttttcggctgagggcatctgctaccacgttggccttcctagggtggtagtggatctcaaggtcataatctttgatcaattccagccatcttcgctgatggaggttgaggtctggctgagtgaagatatactttagactcttgtgatcggtgaagatgtgacatttgttcccaattaggtagtgcctccatatttttagggcatgcactatggctgctaactccaaatcgtgtgtgggataattctgctcgtgcggcttcagtaagcgcgatgcatatgcaatgactttctcattttgcataattacaaaccctaagccttgccttgaagcatcacagaagacgacaaaatcctgatggatgtctagcaacgtcaaaacggatgcggttgtgagcttcttctttatgatttggaagctttcttcacacttcggggtccatacaaacttattgtctttcttggggagctcggtcattggtcttgctatgctggagaatcctttgataaaacgtcggtaataccctgccattcccagaaagcttcgaactccactaacgttggatggttgcttcca

SEQ ID NO: 80796 - DNA, 793 bp, Zea Mays
aaaaagagagagagtcgccaatccaaagatcaccagttgggaggaggctgatgaggagcaaagaagtggtgcgccaggtgagaggcaaagtgttcttccccagactgatccgggggaggagcactgccagaaagatcctggggcggagggtgagaggatgattgacccagatccctatggtagggaggcggggcaaactgctcgcgatcatcaaaataggcttcttcttcttcgtcgtctgctgacataaatggcaccacgtaggcctgctggtgccactcattgatctccaggggggaggatatagaggcacgtcaggcgagcaaggggcgaagggcatacccatagtggaagcttgacgacgaaggttgtcgtcagtctcccgctgacgccttgccagctcatgtacatcagcagaaatattccggcacatagagaaaaatgccgcaatcctgtgggccaagcgggcacccatcccttggccatgacctcgaccacgaccacgaccacatggcgtgagagatccgcggccaggggagggacgcgaggcaccggcagcagcagcaggaccagcagacggaccagcagaggtatgagcacgggagctggaaggggctttccttaagcgccctactggattgttgggatcaatccagaaaggggtataggattgatgtcttgtacctttatcatatcgaaattgtgtcacaacttcaatcatcttcatgataaaaggtgcatgaagacatcccttcagtggaaagcaggcagcatggatgatttcctgccagat

SEQ ID NO: 80797 - DNA, 1033 bp, Zea Mays
aaaaaaactcagccagaaagaccctggacagagattgatataagaatacaccccaatgctgaagcccttttctatgcttcagtgctttccattatgggtgatggtgctaaaacccttttttggtctaatagatggttgcaggagcagtcaattgaggctattgcccctccttggtaagccgaattccaaggaaaatcaaaaaatgtagaacagtacaggaagccctaatggaaaatagatgagttcaggacatctctggaagtctgccgacagtggttattagggatttcttgctgatttgggatttaattcaaggtgtacagcttcagcctggagtttctgatgttcaccgctggttcccatgtgtttccggcttatactcttcaaagtcagcatataatagatttctagttggcacaacaccttttgaaccggctgatagaatctggaagagttgggcccccgagatgcaagttcttcatctggcttgcatctctaaatccgtgttggacggctgacagattagctcgtagagggttggaacaccatgacaaatgcctcctttgtgatcagcaagaagagacaactcaacatattctggtttcctgtgtgttctccagggacatatggtggcgggtattgtgtaaagtgggtctgcaacagttggcacctaggcatgaggatatgatattccaagactggtgtagtagaacagaaagtcttgtgccaaaaattcaaagaaaaggttttaatacgatagtaatcttagtggcatggtggctttggaaacatcggaacgcttgtgtctttgatggaatagccccaagcactggcaccattcttcagcacattcatgaggatgcaactttgtgaagaatggctggagctagggctcttagaagcctatggccttagcttatggcatgtgcctcctctcttaaggctaggtcgttgttgtcgtgtttagggccatagatgagtctctttatgtttttgtgttttcgtcctccatgatgagtgtccttgtattttg

SEQ ID NO: 80798 - DNA, 521 bp, Zea Mays
atcatcggcagaatagggcaagtagcttaccgccttcagttgcaagaatccatgtcagacatccacaatgtatttcatgtatcccagctccggaaatgcttgaaagtaccataaagccacatcgcagaagagtcagtccagattcagaaagatctacagtatcgagaaaaaccagtaaagattcttgatctagccgttcgaaggactcgaaacttggaggtaaggctctgtaaggtccaatggagcagagaaggagaagaggaggctacctgggagagtgaggactcattgaggaaggagtacccttaccttttctcaagaccagcctgaatctcgagggcaagattcttttaagtgggggtaggtctgtaacatcccagtttttggtttcaaggttagaagccttaaactcctaacccccttattctttctcttaaagcctaatctcataagcatttcatttctcatatgcataaaccatgattgctagtagcacttcacacatagcatttcattttggc

SEQ ID NO: 80799 - DNA, 980 bp, Zea Mays
ctgatcttgatgatgttatggttctcagaaaaggtcgtaaaattcgtcacaggaaaaaaactgtgaggaagaaaaaaggatagtaaatctcccaataataggaacattcctattaagtggagaggtcagaatgaggggcatacccaaaattgttcagaattataggtttaatttgaaactgtcagggtctgggtaaagaagtgaaaagtgagttccttcgagatattattaggagagagagaattgattttattggtttgcaagaaaccaacaagaaaaactttgatgactcttggttggacttcattggtggtaacagaaattttgtttgggtctggtctccccctaatggttggtctggaggcttactggtagggtttgatgctgacatctttgatgttagagagaaagaattgggagaatttatgattcgtattctggtgattcaaaatgaatcaggatttatttggaattttattaatgtttatggggctgctcaaaatgatcaaaaacagaaattcctgagtgagttatccactatttgctctaaatgctctcatccaatgttgattggtggcgactttaacattcttagaaaagaatcagataaaaacaaacatggtggcaccaataagtggagttccttatttaactctattattgatgtacatgatctgattgaattggagcttagtggtaggctttttacctggtctaataatagaaatccccccacttatgaaaagttggacatatttcttgttagcccggagtgggatctacattttaataatgtgaatgtttctggtcttagtagatctttttctgatcatgtgcctttatgtctcaaaactgattttactccctctactgtgagagattttagatatgagttgtgttggaggcttagacctgattttaggaatatagttgaaagaaattgggctctgcctgttagaggtaaaaagagtattgagatt

SEQ ID NO: 80800 - DNA, 449 bp, Zea Mays
gtcgcactctaaggcccaaattgctgtcagtcacaggcggatttgacacgaaaagagtgaaagctttgggaggaggtaggttccaggccgagtacgccattggagcaccaacatttgaaactttacccctgaggatcatttcaagtcggcttaccaagtcaacagaaggaattctcctattggtaacccgagttgagtcggccagtcctcgatacagatatgccggataggccctatctttcagtggctgaatgttcttaaaaacaaagtcagtgaccaccgcttcagcagttagacctctctctttcagcagtccaacttcagctagcaacacacctgcctcagccacttcctgatccgtgggagattcagtccaacttggagtgcgaacgtctggctgtcttcccgaccgggaagggagagaatttccataattatcaactataaac

SEQ ID NO: 80801 - DNA, 567 bp, Zea Mays
gccttttcagttagtagctggaaattaattttcacaaacaaatagagtatagctctatttccatctataattttgctttaatgttattcaataaaattgaagaacaacattggcacattgatcttggaaagttgtaagtatgttggcactcatacatatcgcttagatatattatagctatctagatctaaccatgagccacctcaccaaactaacccgacccgactcgtagagaaaacccccgcccaaccaatacaatgggcagtgcgaacattagtttttgaccccaacaatctacaggtcgaaccggatataatttttgatccaaaacccaatcggtcccaaaaaaattctaacccaaagtcaaaaatcccgacccaactcgaaaaaatcccaacccaactctgacatagaagcacggacgaacccaacccaacccaacactaacacaggtcgggtacggaccgtaccgacaatccacgactcgaccttgatccgactcatacctgacgtttgattagatctatagctacctcactgtacatcctggaacctgtaacatatata

SEQ ID NO: 80802 - DNA, 878 bp, Zea Mays
caacactggaaccacctacctcatgatcatatgagcgaggtggcacaagaggtggtggtggtggaatcccgaggtcatcatcattagagtcagaagaagtatcagcactaaggggatccataccctgatcctcaatctgtcaaattgcctcgtcctcaaattgactctaggaggacaaaggatcctagggtcatgtatccgaggcacgagcactggtgtgagccttatcctcaggtgtcgggcgatagaaaccaaacataagtcgggtagagtcaagagcggccaggaaccgaggaggtcagctcagttgcgccaagatgtgacagaggtagtgagcatatgacagctgatgacgagcacgaagttcatccaacacagtgtcctctatctcatagataaggaagtcgacaatgtcaaatagtgagtgagagacgagggcacctaggagctagagctggatatgagtggtggcctctcggtatcccatccgtggtaacaaggtttgtctcattagctcatataggaacttggcagctgaggtgaagtttgcaagagagcaccacaagttgtctgtgaatggtggcctgaagagagcgaagatgtgatctatgcctggagcaactccactgtgagggtgacgaggtgggtctgaggaatcatagcagagactgtgaaacctcatcgtcaactcagggaaaccaaacatctctctgatctgagcattgtgcagagtgatatccttacgctcaaagcgaaacctcatccactgatggttggggtctatccacactgtagcatagaacactcatacccactcctcaacgtagtgacgacaaaagtcaatagagagtataggcctagtaggtaggtaatgtgcc

SEQ ID NO: 80803 - DNA, 275 bp, Zea Mays
acacctttgtccaatgcgcggcaagtgtcatagtgaatagtccggtgataaggctctactcctttcctgagttgagatctttcattgcccacagttatccgcaagccacagcgcacgactcatgacgatcgacgttaatcacggtgtagggtcgccggtggtgagattcactgaatccgcagatcttttgccactgtaccttcagaagcttcgtcagttgctctgaccgagcatcttcaaaggtgtttttcttaatcttttgcgtgacaacttgc

SEQ ID NO: 80804 - DNA, 794 bp, Zea Mays
cccgagctcacatcctctcgcgagctcgggccttttccgcgtccttcttctccttttccttctctgcagcgagcctatgcacggctcggtccaccgcgtcctccgggaccagtagctggatgagtttaaaactcctcaacccctgaggacgaacaaaaatcccaacagtaagaatcaaaggcgtagaaaactctgcgcaaaacagaaggaggatcagacacttaccagggacacatacccacggtcgggatgcatcgcgggctggctaagggcgccagcatccagcttccctatggtacccgctacccgcttgaggaggtcgtcgacggagagggaggtcgaggacatccacgagccttccaagtcgacccccggcttcatctctgagagccgcaaccgccgctctgccaaagggagcaccctccgatgatggatagcggcgacgacccccgcagtggtaaggccctcatctcgtaacttctgcatggcatgcagaataggctagagcttctcctagttctcgcgcgtggccccccagcgccagttattgccagcggcggtcaccactcgttgagaaaacggcggaagcatcccgtcgtcgttccagagataaaaccaccggttctgccacctcttgttcgaagacacaagggaggcagggatgtactgctacgtgcgccccgacctcagctggagggtgcagccaccggcccgcaccgccatacggaccttcttcacgtccgtcgacacggcgaagaactccacggagaagagatgggtccacaggtcccagt

SEQ ID NO: 80805 - DNA, 295 bp, Zea Mays
ccaaaataaagataagtccagttagggacaacgaagtcaacatcaagaatcaggaacacaacaacaatcctcgaaaagcaacttttcccaccagctccaagaggagggagaggaggccaaagttttgaaggaaagttcaatgcacaactatgaaagttatattgtgctttctatggagagaacaaggaccacccttcaaagacccgccaaataataatacaaaagaaaaaagaacttgctgatgctacccagacaactcaaccaaaggaagtgtttgacacatcttcatattatt

SEQ ID NO: 80806 - DNA, 549 bp, Zea Mays
gtatctcgtacgcatagaatttttcagatagagggggtggaaaaaggcatcctagaatgtctataaagtcaaagcttttaacaggaaataaaatcaggttgttccaaaaaaatcattatcagtgtaaacataaagatcacttccaatgatcttccgaaccaaggaaattcaagcatacagagccaagcctttgtttttttaaggaaatttattgtcaataatcaactagctacaccatgaatttggatcatttcgtaataccaaattgagggagcataatgtttgtagcttttcttggcaatgaggagtgtgatatgtcaaacctaagacagagtgggcagttccatcggttggcatttaaagacgaacattacctataattcacacttcactaggctgggcaatcctaacatctgaaaaggtgcaagacccgaggagaggccagtcgtctgtgcaatctttgtgattgttttttttttttttgctgtaatacaatattaacctagcacaaataattaaatatgatgaaacttcttgtgcatggttcca

SEQ ID NO: 80807 - DNA, 557 bp, Zea Mays
ctactgtgattatagatcatggaatcaccactagacgcgtagggcagcagaaagacgtctcgatgtagatgaacgcgtcgagcagcgttgtgctgttgacggcgaccttcacatccttgcacggtttgtccaagttctccaaatgtagcacctcttaggtatccacatgtatagggaggaagtatcgcgttccgaactgctaggttcgtgatagtggctaggcgagggcgaggggcgggcggctgctcatttactggtggcgaattaggtttaccttaaccgtgcccctgcccctcattatataggcattctagtgggcttctaacttcgaggcccatcagtaaccctaaagccctgtctaatttcggatctgatctgagttaggcttccctccccttacttgtgtgaccctataggttcacgtacatatagacatggcccgagtactcttacttggcccaataattgacagcggcctctagcaagacatgtcaactcctatgcgcgcgtaaagatcatatcaaacaaaccattgcaacattacgtacatgttgttc

SEQ ID NO: 80808 - DNA, 625 bp, Zea Mays
cagcggcggaatgaccccgagcgatcgcgttccgaactactaacgacatggatgttgaaattggcactcggagaagcttcacgggttcaccaagggttatgtacatgcttgaatttggactaggcaagaatagaaaagcgggtcgacagagagggcgtcacggcggcgttctacgggacgatttggtgttccggagtgtaggcttcggtaaagtttaattggccggctccgagagcaatagaaggttgaagacaagctagaacaggaagcaatttggtaggtactaacccgatgagtgctggccatggaggagtccttcacggcggtgcgaagaacagggcggaatggatttgtggactgtgtgagttctccgatggaattgagtcaattgctcaagtgcttgtgtgcgtgatgtggtgaagaagcaggatccaggctcaatttataggccgatggccggagttggatgaggctcgcgcagctgtaaacgcgctggcgagctcacccgcgcgggcagagccacgacgatggtccgacgactgccgattaaccgggcagtgccactgcaacgttttaacgccacatcgcggatgatctttaccgtggccgcagacccatccccaac

SEQ ID NO: 80809 - DNA, 702 bp, Zea Mays
ggcgtgggaattcagcagacttcggccgaggacggttcgaatccgatctgtattatgctatcacacaaatatcacgggaggccgtagaggtgttgtgatgtgtttctttggagcactcactgcccatttgatctttgtagttgatttggggatcggaggcttcttgatttatgttgtagggactattctcttaattagtatgtgatttggtcaagaggtgtggaaacccatattctcatattcccgttgttggtaggttaattgcgatgattcattgataaaaaagaactcagtttttaaagtcattgtggtcgaaagacctagttcttatatagttcactgctggatgctttcttgtatcattccataggcctgtttggatacacgaactatttactagctagctaaaaattagccttagtgcatccaagtaagaaaactaatagcttagtaataggtgagcttattctttagctaagttttcaactagttgttagccaactagctattcaaactcagctaatttgagctaatttttagcccgaccagtaactacccctagctcatccaaacagaccgtaagtgggtatcaaagaggttctatcttccacctctaaaaacagaagcagctatcaattcttgttccctgggtaactctgcaaaacaaagttgcttataattgtggccatcgttttataatca

SEQ ID NO: 80810 - DNA, 431 bp, Zea Mays
ggttgactgctgaagctctggttgctgattttgttttcaagaatgttcagccgttgaaggacagagcatacccagcttatctgtacagaggcttggctgatccgactcgggttaccaacaggagaattccctctgtagacttagtgaatcgacttgagacgatccttagaggcaaagtatcaaatattggcgccccagtggcatattcagcatggaacctgccttctcccaagaccttcacttttttcgtgtcgaatccacctgttactgatgacggtttgggccttagagtgcgaccctctgccgaagaggttaacacattggttgcttcgctcggggaaattcctgacgacgaatgacaagtctactttgaggtgcccttggatcctagtgatgcagaaataagtgctatgcttgattttctggctgag

SEQ ID NO: 80811 - DNA, 466 bp, Zea Mays
gcgaaagaaaacgcttgcccgggttgccatcctcgagaaccttctcgccgcgccgccgacgacgctgctgccaccatcgttggtggttggtcttcctgcaaaggtgtccgacgttgtcagtgaggccgcgatggtagagcaacaacaagcagctcagagcttgatgaagaaggcctcgttggcggccaggaggaggccggcgcggctcgtcataccggtgggggacgacgctggcgaggtggccgccggctggggcgcggctgccgctccggcgaaggaggccgacgtggaggtggagggggaggggttttcgctggcgagtagggcaggaccgaggcatgcgatggaggatgcatatgctgtggtgactgacgcagattctcagctggtaattcaattaatctttgccatctcgcgtgaaaaaaatatttggttcattaatatctgcgggcaaaatttcaccact

SEQ ID NO: 80812 - DNA, 356 bp, Zea Mays
ggattcgcatgaatgccgtcatctgcacttggcttcttggcactctttccgatgccctcgctgacatcatctctcagcgcggcgcctctgcccgcaccctctggctctctatagagtcccagttccttggaaatcttaccacacgtgctctttatgccgaccaagaatttcggtccttctcccaaggcgatctcccggtcgccgaatactgtcgccgctacaagaaactcgccgaagatctgcgtgatctcggcgaacctgtctctgaccggactttagtccttaacattgtcagaggccttaacgagcgcttccaggctcttggtctccatctgcgccgcaccaaccctcttccc

SEQ ID NO: 80813 - DNA, 681 bp, Zea Mays
atcgaagtcttttatctaaaagacactccatgcaaaagtcgcctaagggtgcagtcggaatagcacaacaagtgcgttaatcgaagtctctcattaaaaagacactccgtgcaaatttgcccacgggcgcagccagaccaacacaggcgtacgaatacggcaaacaggccacattaccatacaaattacaattacatacacacgacgagggcatcacatattacatcggctcaacctttgggatgatacccatctccctgtaattaaacagcattatcctcaattgctcacccttaaaaagcttccgaagatcccctcgcctatgctcgccccagtcggcgaggacaacaattctcgtttaccaacccggtctactcggagatggtcacgctccatccccatacgacggcgcctgccactccgcgaaaattcacccacactatgttttcccattacacttcgccgcctacacctagtactcgcactaggaagatccctggcaccctccacacgcggcgaagtctccgccgcagccacatccaacgcaacaaaataatccaagccttcatccaaggactcctctgtccaaggaaacgaactcccagattcaccatcggactcaaaacactcagacacagaaccaaacaaactatcatcggcaggcactacggttgaggccgc

SEQ ID NO: 80814 - DNA, 1356 bp, Zea Mays
ctgatacatcagaaaactaatcaaaaataagatgtaggaaactaatccaaaataagatgaagatgtaggaaactaatccaaaataagatgacaagatccaagcctacattaggtgatgtgcgtagggacagacaccacagcgggaggtatatacatgatattatattggggctaatgcaatccacataattatatacataaaccttagaaaactacaagcgcaacttcactttatctacaaaagtcaagcgaacagcctagtccattcacaaaaggcaagcacgatcaattgtcatgtgttcaaactttagttttctcgaggctgcaaacaacaaatacaagaatgtgactccataaatattccatatgtcatgttccatccaccaaaaaggaattggcatatgagttcattgtatttcacaaccatttaactgtaaagtgattgattgtcatcaaggccaaattgtatacggggatgtatacgacacatgcaaagttaaccaaaataaatctttcactcgcagccattgttgagcggtgttttttcttaacatacaaatatttgatatggtacagattaaactgtggtcagaggacattcttttcgcatagttttacttttacttatgctgcatcggtaggtacttaagcaatgatgagaaaaataattctgaaagtaggtttttactatgtaggccatctcatttacataacatagttcaagtgaatctatcaccatttcctagccctgtttagatatctacatattctttgcagttgaaacaagcacatatggatatggaggcattatgcgaaaataaagccaagccagtggaacccaacatagtcggcaaatgagatatttcctatgtcattttagagaaaaagaaaaaagagacagcaacaccttaacttaggggcagatccacactgcactcagtggtgtcctttcaggctgtgacatcagtgatttgaggaattacctctgtaaccctactgctatgcaaataataatcctataggctaatgttttagcaagataatttactggtggcacaagtgaattaatttcttagaccagcctctgccttaactcattatactatggaatagtcatcgtcctgtatttcaatggtagtgttgggctatgctccatccatttccatgtaggttacaatataatagtgtagacgattataactgtgagatcatacacaatctcacaatccgatcgaattaacgagcttcacaaaattaaactggtggcatgaaggcaaagaaaacaatggcatgaaggcaaagaaacattggacgatatattgtcctatctaagtgaaaacaggggctaactattag

SEQ ID NO: 80815 - DNA, 522 bp, Zea Mays
tctacgaagctgaagcacgccttcctccggaggcccttccggacctcccacgggtctaagcttcagacaggtacatgcagaagtgatcacagccagagacaagggttcccgtgtcaagtgcggataggaaccctgggtcggcgcttagccccgcgacaagtgccacaccaagaggtgctccgcaactctcccccagctgggaaggaccctccaaggtaacgggagtgcaccgacccaggggcaaccatctagctacgactggaggagtaccttaccctgatgccaaatatctctgtaagttctatccatagagcaagacaaaggggtcgagtctgtttccttttttataactaaatgacgcatacgtgtatgataacccggtggggtctgcccccataaacccggactattggtctgcacacgtgcatgacaagttatgaagaagaaactaccccctcagccatgctcttgtgatagttccatcttgctgctccatggtcccaccttgcagtctttcagata

SEQ ID NO: 80816 - DNA, 828 bp, Zea Mays
ggaggctagaacatcccacagaagagcacgaaaaaacctgtagacgtctggccacggcgaggtgttcacgggtgcggaaaaccgatttggggagaaagatgaattagagagctatggtggctaatcggaggcaggagcgggtgctttagctttgtgattacctaacggagctagcagtgtgcttgatttatagtgttcatgagcggtggctcccaattttggaatggcgcgctgacggccagagagaaggaaggtcactggtggctcagtcgtggcgctcgctagtgcaacggtttgaatgtggtgagtttaggcgtgccacagttactaccatgtggtaaagagctacggcgtggcataagtgaggtcgctggagtagcacggcgacaccagcggtccggccacgttgcacggctacaggcgtagttgataagcttcacccctcgaccaaatccactcccccgcgagatcttttcacttccccgttgatatccactgcgtgtctagcacgaatcacagcgactagcgtgaatccgggtgcaaggtcaccggtggcgagggggatgaatctgaagatcttttgcgcactataccatggccaacatcttcagtggttctgacagcgtgatctgtggagctctgttctccattttctatgtaacaacttagtaatctctctgtagcaaagttattgatctataatccatcttcaattttgctatagcaaccttgatcattcactttctcaatcgagcttgaatcaggtctaaagttcatcaaaactgactgtcagatccatttcaggttttactagtgactgacagcccg

SEQ ID NO: 80817 - DNA, 656 bp, Zea Mays
caactctcattatgatgatataagaccattcttccttcatgaagttgcttcaccatggtgtatccttcgtgatggctccgcatgtcgccttcaattctctctagaactacattgtaaggttttgaggtgaaatctgccaaacattgttgggtggttttgaggctcaaccataaaaactccacatgtagcatactccatatgttcccccacgtcctagacaataagacacatatcccgttgaccctcaactttgttggcaacacaatatgctctacaatgtcctcatgcctactgatgcccctaggtgttagccaccgcaattagttgcccaacttctccagtcacttagtcaagatcaagtgcttatccttcatcactactagtctatcgacataaacatgcaagatcttcacatttgtcgttgaccactaccttaagactccacacctgcacatcacgagccaagaaacatgttgcacatactcacaccccggttagtccacatgactcaacccaagatgctactccatgacaatcacttttcacaaatccaaaccataagggcatgtaccaaccttgtgttcacaaatattaattaactaaattctaacaaatatactaactataaatacctaactaacaatctacctaactat

SEQ ID NO: 80818 - DNA, 754 bp, Zea Mays
tgctcaatagggacaggtgggatgagtatcatgtcatactcgatgtcgagagacattaactcaagactcccgaacctgatcaccgtcccaagcctgagtgggtggtggaaacctgccatctagagtattggcgagaactggaagtgtttcatgcgacaagcccctacctaacgcaccaactgtcggtgtttggaccatgggtccttgaccaactagtaaattatgtcgcgtggcgggactctagatggtgtgtgagaatacacaagcaattatcctggttcgggcagcacaaggccctacttccagcagagggggatgatgcttatattactcgcaccaatgtgcctatagtaggggttacaagcactgcgtgagagggaaagtcccaaagtccctagagatgattgagacaagtgccaatatttaagaccgaggtggccgagtgaagagttgagtgttcagtggtcggatcgtctatcgtctcctgtcccttgggagggaccctactgccctatttatactcgcaggggagcgtccacagtgaagtcgagtgttgtatctgaaggagagatgtcctggcatctacaagccgacgtgatagtgaactgtgttgttgacttacgtgtgttgattcttcgtagagagccaaggcagatgtcgaggggttgtccgtacgcccgagcccccgagggagaggttgcccatgccgtagttgttgtaacagcgccggggtatgggctaacgactgcttaca

SEQ ID NO: 80819 - DNA, 572 bp, Zea Mays
aagtaagtaaagcttacagttgggggaagattccatgcataataggtctaaggagcaccctcgttgacaatgacacctctcagcatcatctcaactcggtttagaatgtcttcctctgtaattgctctttctgtcacccaggaaggatccttgacaccggtgaacagataaataggatgcactcgatatttcaacgactaaatattcttgaacacaaaatcaattacaacaacttcaatagtcaagccccctatccttctggtttgcaatctcagctaacaggatttttgcctcggactttagaatctgtcgggccttctacccagttaaggacccgcacatcaggctgccttccggaacgagggggaagggattgttgtgattatccatagtaaaccattcatatctctagcacttgatactctgtttcagtgggatgtctaagtattatgtcttgctagcctgacaaagtttcaaactggtgcccccgaccacctgatgctgaccaatagccatgcctggcttacagtggtagagatatcgccacagaccaaaatgaggagcaatgccaa

SEQ ID NO: 80820 - DNA, 547 bp, Zea Mays
gatcaccggggctgctcgggctcctggccggcggacaccgtcgcgggctgggaacagccacaacgctgttgcctgatgcctcgcgtgaagaagaagggtgagggccatcggatcctcgatgaagggttgaggtaagtcgatgtgaacagccgtgggatcggagataagcggtggagatttgatcttgcgtaccccttcgtcaaatgaatatgagccgtaggatggtagtttgatgaccgagattagatcccatcctcataaaaccctagccgcaggattttaatcggaagccccacgttatgtatcagttcgtagtgaatcgggatctaatccgcaccgtccatttgcgatctggcggcccagatttgagaataccccttcggccatacacttttcctaaagagcccctgttgagttacgaaatgaacccgtggtccataagcagtatagggagacttaatctatgcccctggaacttacattttagcccctgtaaaaccacagaattgtgcgcgccatccagaaaaatagaagaaaggggaaatta

SEQ ID NO: 80821 - DNA, 700 bp, Zea Mays
agaaatgccaacaagcctttatgacgtcgttgctggggaagtggtagctaaattgatacaaaatcctaatcgtccccatttctcgccacccaccaccattcctaaccaccatatatcataccaaaccattccacagacctatcatggattccacacccatctaccaattttcggctctaaagggcgattttttggaaccaccaccaccacacccaactattagctacatttcggtttgatagttatggttcggtaccaaccctttgagggattggaatcagaaagttcctacttacaccttcgagaatttgaacagttatgcacctggttgacgatctcaggaatgcctgtaaatacactttgttggttgtttttccattttcattgatgggagaagcaaaagtatggtacaacctggctatcgataaagtagaagggagttggaaaaaattgaagagcggtctatgtctccatttctttctgcggcccaaagttgtcaatctccaatgtgaggtactgatgttctaacaaaggagaagagaatcattaggagtagcttggttctactttatttgtttattcttgttaaaaccaaacttagctattctagatgttatgttgatgcaacactttgtttgaggtatttctcctggtgctcctctctgcttggatttagccacgggaagatcgttttcccacc

SEQ ID NO: 80822 - DNA, 273 bp, Zea Mays
aattttccccagactcagtgcaaacccgagctggacggcgggttgaatcagaacaagtcgaggggctcttttagaaaataaccgcggtgaaggggtacatgccatcctggaccattggatcctaatcctacggttacgattttatgaaatgagtccaacaggatccgtctattaacatatcagtggcctagatcgttcacgcgaaagggtactctcccttctaatctggagcgtccactccacgatcaacgattgacgccattcttttttccc

SEQ ID NO: 80823 - DNA, 344 bp, Zea Mays
tcttaaattaacgactagtgcttgtagttttgtggttgatatccaattgctgtttttggtagaatcataatcctacattaccccaaaatgaaaacaaagaatataattataatctaatatttggtagcatacatagttaagcgtacacaaactaaaacattcacaacctatgtaagcacttgaatggtagctaatgtgctaatttgtgctcgtcaccaatagggcgtgagttatgatttcgtggaatgttctttaggaaaagttggaagcaattcttaaatgggagtggtcaatcaccttatcctatgccctgaaaatgtagtagcatttcaaaagcacatagg

SEQ ID NO: 80824 - DNA, 859 bp, Zea Mays
agctggttggggggtgctagtttggagatgcgtcgtggaaggaagacttaatatcttgagatccctctcaaagacagtatcaagggatggcgcttggagtggtttattgttgaaaaccacggaaattctctccccccacggtcgggaagacagccggatgttcgcactccgagttggaccgagtcacccacggatcaggaggtagctgaggcaggggctttgctagctgaagttggactgctgaaagagaggggtctgactactgaggctgtggttgctgattttgttttcaagaacattcagccgttgaaggacagggcatacccggcttatctgtaccgaggcctagctgactcaacccgggttaccagcagaagaattccctctgtagacttggtgaaccgtcttgagatgattattataggtaaggtatcaaatgttggtgccccagtggcatactcggcctagaacctgcctccttccaaagccttcactcattttgcttcgaatccacctgttgctgatggcggtttgggccttagagttcgaccctctgctgaagaagttaacgccttagttgcctcgctcgagggaattcctgatgatgaacgacaggttcactttgaggtgcctttggatcctagtgacgcggagataagtgctatgcttgatttgctggctgaggattcttctgacgctgctcctgctgggacattggtggtggcgcctctcccagaaactcatacagccttggatattcagagacctgtcagtgttcacccaaaacgcccttgccgagccaatcaacttgatccttctgctgatgagcagaagaagaaaaagagacgccttcggcgag

SEQ ID NO: 80825 - DNA, 392 bp, Zea Mays
ttgaggatatgttgagagcttgtgcacttcagcatggaggaagttgggataaaagtctaccatatgctgagttctcatataataatagttatcagtccggtctgaagatgtcagcattcgaggctttgtatggcaggaagtgcaggactcctttatattgggatcataatggagaaagacagttcttcgggcctgaacttattcaagaggcagaagaacaagtccgtataatcagggagaacttgagggtagctcagaccaggcaaaagagctatgctgataatagaagaccactggaatttgaggaaggagatcatgtgtacctcaaggtgtcaccacttcgtggaatgaggagatttaaagttaagggcaaattatcccctcactttact

SEQ ID NO: 80826 - DNA, 361 bp, Zea Mays
cgggatcgtggggagaacaggagtgctgcagatcgccgtcgaacgctggttcctccgctgggtcagctgcgccgtcgtgaggcgagatttcttcgttggtggggtggcacgttcggtcgtatatctagcctgattggtcggcggtcgggttttgttagttgtgggaggatgggaggcgggcgtatagctttcagaacttctggggttgcaatgaatttgggccgggggcgtgggataagacgactgatgcgtggatcgaatggctgagattgcaaaacgacataacagacgtctgagattgtataacggcagaaaggcagactaccccttacagccttaagtagtagagattttgagtatt

SEQ ID NO: 80827 - DNA, 878 bp, Zea Mays
agcagatgtatcatgtcccgtccatcggcgtccagcacacccgatggatcagcagcgacgagcagatgcatcctctcatggtctcatggaaggttaggtaccagaccgtcctcatctggcagcccttggtgacgagcattcagatccccttttgacagtcccgttcccttgcagtgacgacctgtcaacaacctttgaacacgcgaacaccagcaactcatttgtcaatggtatgaattttggattctttgttttgatgaaatgatatggataatttactaccttgcccgtctagcttgcacatcaggtctttttttcaataaccttgcagggtctataagtttgtacttaagttttgtccatttagaaattctcagtttgttaaaaattctcagatttaaatttctggtgtgctcagaatggctcataaatggtgtttgttttgtgtagaaaacatacatatctgcagtgttgcaaacgcagaagtgaggttgtctctgcaggtgcgaaggtcatgttgtcctcttgtcagccacatattgtgctagtgattttatattgtacaccgtcattgaaaaatgacccaccatttatttgccatggtcacacttatagctagctggtttgcttccggaagtaatgtggcttcttcatcgataaatgaacagaactgcaattattacattattttggctgaattaaagttaacaagtagcctagtacgtgatgaaacatatgctatctgttagctagtatcgatagatcatgcctgttcaactattctagcgcacaacataacatgaaaatcacgtacgtgaatatgggccaagcccttccttcaagtggactacttcatactctggaaatttattagttgg

SEQ ID NO: 80828 - DNA, 422 bp, Zea Mays
atgtctgttgagcaagtggctgttcagactaattaacgaggatgggacatggtagcgcttattgaggaggaaatatgttaaaaatcgggctactcacattttaggtcaggtcttatgaaagtgaggagaaattcctaaagttagggaccttcggtgtcaaaaatggggagagtgtcaggttttgggaggataggtggctaggaaacttcactctacagaacatatttctatctctgtattgcatagcccatcgtaagagcgattccgtagcttcagttatgagtttagtactgctcaacgtgtccttcaggaggggactggagggtcgcaaccttactgcttggcacaatttggtagctctattgacaaatgtttatttggatgaagctagagacatatttacttgggatatccaccagaac

SEQ ID NO: 80829 - DNA, 832 bp, Zea Mays
acgcccgaccaactgccatgtgggacccttctgtcggtcgcggtgacgcacggcgcggtttctagctcgctgccatgtgggccctggacgcaatgtagatcttctccctagctgccgcaacgctcggccgattcctccgccgctgcaagctccaactgactgctatccgatccctctccgtgctagcatgtgggggggggggtataaaaccctaccatcaagcctcctccctcctcctaatttgccgccgccagtaaagccactgcgaggaagaagactcgagggagtgttggttgtgtgactgtcgccgtggccgccctctcgtaccgtgaatcctcaacctgagggtgttgggtgatactagcggtggccgcgcggggtgattcttggaccacgacacataggttctacaccagcgacgtctaaattgctcaccggacttcatcctgcgccactgtgccacgcgtctacgtggccaaccctctccatcgcttgtcgcccggtgagtagtatcccctcatatccgcagtcctctccttcacatgttgcgctgttctgggggtcgaatggggcgcaggtgtcccaggtcgtcgtatgccggcggctttgccgccgtgagggacttgcggcgccgccctctggtgtcaccaggatagttctgagctcgaccgtgcgatctcaaatcgagggcaggatctgattctggaatcccggctagcttgggttcagatgtgctgcacgatgggaatcggagggctagcagttaatcacttgcacatagaatccgggccgtaggattcggatcctatggcctcgatcccgtatcggctca

SEQ ID NO: 80830 - DNA, 432 bp, Zea Mays
ctcgacactgacttggttgaccctggcaatgctgaatcctttgacagaggttggagtctgttgcttgttctgagcgggtgtgctggaattccccatcggacaagcatttgcatagtgcccaacttgactgcacttgaagcatgtggggcctgtcctctgtcatgtgggccttactggggtgccagtgggggcagcctgacgagtgtggggtgtctgtggagtcccctgtggagcgtactgagttggtcgcggtcctcctccaggacgagctggtgtaccctagggtggaacataacgaggacgaacactgctgctaccctgtccctgggtaatgaccttccacttcatctgtcctagttgaacacgcttgtgttcaatagctagagctttgtccaagagtctctaaaatgacgggaaggtgtgagcgaccag

SEQ ID NO: 80831 - DNA, 373 bp, Zea Mays
ttaacacgtggcgtacaactccataagactacattggctactgaaggacctaaagcacttatgtgtatatcttatcggattgttcttcaattttaacaaggaccgacttatggacgctactcgcctccaataattatttggctgcgataacgctcatataagacctctaatcaatcaacatgatatttatttatccaatgggaatggaatgcaatatttgacaaagcaaggcatcgatccaccatacaacagaaatcatgacgacaccgatagatgctatcaactaatcgttaaaaatattaaacttacttctcgctttgccactacaccaccctttagtcacatgaccatcgtgagcatccttcacacaatt

SEQ ID NO: 80832 - DNA, 489 bp, Zea Mays
tcttgagattcccctcaaagatagcattaaggggtggcgtctagagtggtttatagttgataattatggaaattctctcccctcccggtcgggaagacagccagacgttcgcactccgagttggactgagtctcccacagatcaggaagtggccgaggcaggtgtgttgctaactgaagtcggattgctgaaagagagaggtctgactgctgaagctgtggtcactgactttgtttttaagaacattcagccactgaaagacagggcctatctggcatatctgtatagagggctagccgactcgactcgggttaccaataggagaattccttctgtagatttggtaagccgacttgagatgatcctcagaggtaaggtttcaaatgttggtgctccagtggcatactcggcctggaacctacctcctcccaaagctttcaccctttttgtgtcaaatccgcctgtgactgatggcaatttgggccttag

SEQ ID NO: 80833 - DNA, 666 bp, Zea Mays
cccatctagaccactctagctaacaaaaagataaacaaagtagatctaattcacgtgtgtgcatgagtttttccttttattttgtcacaacacatatataagtcttaagacgggatacgtgtgacgtataacaccttgtacagatctacctaacccttattgtgtatagaaaagataagacaatgatttgatgggcaacgtcatattacatatgagtatataaaaagttgatgcaacataggtagcacataatgaattataacttggctaggaagaaaggaaaaatggatagaatttgcatgggtatatagttgtcctttgtttatgacattgcatggatcccgttgacgtagaaaggatatgttacatgcccatctaggccactctacttgacaaaaagataaacaaagtagctctaattgtgataacatacataaaataaattgacacaacatagcatttgaattgttcatgatacaagcaacacgaaaccatcgtcataaagtactatatatttacagtacttacactctcgtttttttaagaattgtcgcctcttcttctagaattaatgttagcaaatattaagtcaatcatgacatataacatctcgcacggttacatataattcttattgtggctagaaatgataaggcaccggttcaa

SEQ ID NO: 80834 - DNA, 531 bp, Zea Mays
cttttgaagttttcacaggcttgggcttcccttatatccataagcccaaatctaggattaagcacctcaccctagggttaaccacacatcaagctatatcaatacaacgtatttgaaatttttacctagtgaatgcactctaggtgtaacaaacacatggtatgccaatgctcatgatgtgatgctcaagttttagtgatagtaacaccaggggtgttacatccttcccccaaaaaaagaatctcgtctcgagatttaaagtcctagggcaagtagtggaaaaggaaacatgtcatttttttatttccttatttcttgtacaaggcagggggtggtatgggtctattccattcttacaaacaactgtacatatctcatagatgagatgaaggtaaaaagccagggaaattcttttctaaaaagtcttgggtctcccatgtagcttcatcttccgtatgttggttccattgtatcttataaaattgagaactcttcttcgggtgactctgtccttttgatccaggactcgaa

SEQ ID NO: 80835 - DNA, 575 bp, Zea Mays
ccattacctcccataacttgtcgattacgtgcgaagcgttgtggcagcggtgcataaacatcatcgtcatcgtcgtcatcgtccacaggagagtgagatggggctggagttggtggtgggggacgagcctccagtacatccatacgtgtaacaagttcatcaactcgtcgatcaagctgctcataggatgtcgaggcagagtcctggtattttttaaaagcttcagtcatcgcgcacatcatctccttcaattccatctgagagacacactcatcgtcgttaagtttaggccccttgtccttgtccatttgattctttggtcctgtcattgttagcacaaaacagagacaaaaaggcaacaaacaatgtgaaccctataactatctctcagggtggtggtggaggtagtggaatacaaattatgaagcgtcttaccccgctcttacaatgttcttaccagcactgcaggtggcaaacggtgaccggtgtgactgtccaacgagcgtgggtgtgattgcaaaggagtacctgttctgctcgagagaaaattggagctatgggaaggctgactaatt

SEQ ID NO: 80836 - DNA, 397 bp, Zea Mays
atttcatatgccaagtcagaaaccataattccaattcccgcattgtctcctatgaggtggcttgtgtggcaccaaaccataactattattgtctccccttcctcctagggatgaaaatgagatggatacagccggatacagggtcatcccgtatcctatcctaatgtatttctctcggatacatgaccggacacaggtagttaagattcgggacagatacaggacgggaccgggtaataatccgggcgggtaagaaatggataacatgtactactcgggtaggtaccggatacttgtcgggtagttcgtcccgatgatattaattgcccaaccatccaacaaacacataaattaagcaatacataatcatgtatatgatagatcaaatgtaggaaag

SEQ ID NO: 80837 - DNA, 411 bp, Zea Mays
aagccattggttgaatatccaagtgggcctgcgaactgggatctcatgacatcaaatttcgacctcgcactgccattaaaacccaagcattggttgacttcgtatcagaatggactgaacaacaagtaccagaaaacccggaaactgcaaaagtatggcagatgtattttgatggctcgctgaagctgcaggggcaggcgcgggaattctcttcatcgcacctggaggcgagcacctcaagtatgccctccagttgttatttccagcctccaacaatgcagtcgagtatgaagctctgatccatggactaaacatcgtcatatcattaggcatcaagagactaatggtatacggagatcctttggtagtcataagccagataaacaaagaatgggactgttcgaatgattc

SEQ ID NO: 80838 - DNA, 559 bp, Zea Mays
caaacctacatagaaaccacgcgcgtccgtgcccgcgcatgactttgcacaaaggccctagtgttttgaacatccagtaaagtatccttgggcactattcatatttctcactgacaaatgcacatacgccctccccttctctggtctttacaactccatgcccccgacgacagcgctctctcgctgaccactcctcaccgggacacgctacaaacggcgacgaccatcgaactcaagcacctagtcatcatccctgagccaaggtgactctaatccatacattcattgaactaatcaggctcggattccttctgcccatgactgcgaagaaacaccgaggattggcgaagccgttcccgtcaacccagtgcgatagcgttcaattaccaagcatggcaagcctcagtggctcataagactattgtaacaaccaacgacatgaccggaaagaagatataattagccgaccactctaaggaaggccatggcggcgcataaggacagcgaggtagtgttctcatcaatatactatggtagcattcaatcgaatgggtttaca

SEQ ID NO: 80839 - DNA, 527 bp, Zea Mays
cgccgaatgggtatggaacggtctcgtttttgattggatcggggtggtcagcgtgaactactttcctcgacatcggggacgtgcattggagaaggggatttgtgggacctgtttgagggggaagagttgaggatgatgttgttcaatactcgggatgtaggtcttataccgaaggaggagcctatgtgacattgttgtcgccctcgctgctttgttgtgatattgagtgaaaacactgccctccccctcttcacaaaggagttgtgagggtaaaagccgtgttttgtattatttcgcgatggtgccgttgagcccttcgtttgttgtttatttgtgattgtgcgttgtatgttgtgcctaatgcgagttggcttcgatttgtaatcatgttcttgccgtaggggactcctctttcgacaggtgacaatgcaacatttcacttatccggttgcgcccttaggcgatatctgtttagtaggttgtttgtgtagtgaggatcgcgtaccgtgagtgttgttggttttttg

SEQ ID NO: 80840 - DNA, 658 bp, Zea Mays
gtgacctaaagagtatttcccctaacttaattgcactaatgaccaactaaggagctctggccacggtgaccgagagcatggcggctagatcgtcgtgttcccggcgattggtggtctcttagtttgaattgatggctcggcaagcatcacagagcaaccagagtgctcaaacaagggagagagagagatgaactaaccggattggggctgaccgcgatgaggttggtttcacagtgttcttgaactggattggggagaacgtgaaattggagcttggtggtgatcggctgggagtaatactaggtgagggggtgcgcaatgatgttgcgaggctagtcacagactcaatttataggcagcttcgtcggtggcgctcaatttggtcgagcaacgcggcggccggagataagagagaaccgtggcgcagtgaattcgtggctaacaccgtggcaacttcaccggtgttgataagacagtggtagggagttacagtgacgcggtgtaaagatagagccacgcggcgcacgaccgggaggcggcggtcaccggcgaagccatcggatttcaccgcggtgaacgcttgtacggtggccggaatattttatcggccggagttatccacggcgatgatctccaagcgttgtccacttaccccaag

SEQ ID NO: 80841 - DNA, 612 bp, Zea Mays
gtggttcccgtggatcatgcatgtggagacaaacctgctgaacaacataagcaatgtctggatgggtgaatgtaaggtactgaagagctcctgcaagactacggtaatcagtgggatccgaaactggagtgccatcagaggggagcttggggtcacatcaactattgtagtacatggcttgcaatcactcataccaactcgttcaagaatctcaatcatgttctgatgctgggaaagatagatggctgaggtagagtgctgaacatgcatgccgaggaaatggtgaagtctgccaagatccttcataggaaattcttgctggagggcactgatgattcgccgtagtgttggcagggaggagtcagtgatagacaaacatggacgtatttgttttggcctcaatgaaaccgagctgcagaagatgagaagcgaatctgctgtaccatgcacggggggcttgtttgagtccataaagagagcggttgagacgacatacataatctggatgagtggagtcttcgaaaccaatgggctgagcacagatgacagtttcagacgtgccgtgaagaaaagctttattgacatccaactgatgcataggccatcctcgtg

SEQ ID NO: 80842 - DNA, 366 bp, Zea Mays
cccggctgcagagggtgagcctccagagtcaaccaaaccctgcaacgtggcacctgatgctcctcgtatagctgcaccgtatacagagggggtttaaggtaatcgccagagcagagcacctcccacaagatggagagaaagccctcgtgggaaaggtagtcagaactgaaacgagtgtctcctccattgatgggggtgggtgaagtcatttgtgaaagagggttagacgtaaatgttatggtagtggaaaggaaaaacatgtgcctgggttgattaaaaggaggtgggttgaattagattcatctactcatttcgttattcattattaacactatttgttaccttcatacttagatgcatatttcc

SEQ ID NO: 80843 - DNA, 543 bp, Zea Mays
cttcatccaaaaggaggtccggaagctgctagacgccggcttcatcaaagaggttcatcacccagtgtggctggccaacccagtcatcgtccccaaggcaaatgggaagcttcggatgtgcatcgactacactagccttaataaggcttgtcccaaggacccgtatccacttccacgtatagatcaaatcgtggactttacctccgggtgcgacctcttgtccttcttagatgcttactctggtttccatcaaatccagatgtctagggaagataggaagcatacctcttttgtaatagtggatgggctttactgctatgtcgtaataccttacggtctgaaaaacgccttgccaacatttgtgtaggcaatgagtaagactttcggggacctgattagggacaaggtggaagtatacgttgatgacatcgtggtcaagactaagagagggttgaccctagtggaagacttaaccctggtcttcgacaagctgcgggcaacacgcacgaagctgaacccggacaagtgcgtctttggtgtctc

SEQ ID NO: 80844 - DNA, 747 bp, Zea Mays
atttccatagaggatgctctataggctctcttagcaatgagaatcgtccttggtaatagttcgattgagaatttgatctctcatttcggcggcatacaatgttgctcctccaaaaatacatccaggaattttaacaccacttgaatatcttccatctccttaggcttcaatgtgtccagagcaaagcactgactagattagggggtgtcgactcttatcccaatctcctctcttttgggtgcaaccaacttcacccttctatgccccacaatttatatgggccttgaattccttgagccactccataccaactatcatgtctatcccgctagactccaggactataagggtggaatgaaaggctacccccttaaaaagagaattagtaggggacagaaatatcttgactccattctaactctaggcaaatctataaccatggaggtaggcatgggggttgtctctaatcctagttttcccacaacatgtgtagacataaatccatgtgaagctccagtataaaaaagcacagtgactggatgagagtctatttcaaacttattttggggcactatggcgtcctcctatgcaacttcagcagttatgtggttcacgttgccgaaggggactcggggttgcctctgttgcggcgcctagtggccaccttcaaccttctattgaggagcttgttgtcgtggggtcctctatggatagaagttggtatagtgtccagctcccccgcacttg

SEQ ID NO: 80845 - DNA, 600 bp, Zea Mays
gaccaatagattgaaacatttaccacaatatttgttctcctacctagggctacatacacctacaaccatgtatttcgcacaattacgatctatgtcattcctcctccctatactaatcatgggatgacctagggagctacatcgatatggttgaaacatacctaaggcccaacccaacaaatcaagcaatagttgtaagaagaaaagaaaactcctttcacatacaatgtttgtattcgtctagctccatttgtgaataatgatgctcacgacacattcgacctgtccaagtgcgaaggtgccatggattgatgaggatagtcaccgacgagtcaaaaagattcttgaagtgaacaatgtgtattccccatctcgccccctagtcctctttctccccagattccaaattcgtaacctctatatctctaattagatgtttaggccgttgtagagggcaccaacgcccctatttgttttcttatcattgcaacattgacttgccccttgctcaatagttgtggaccatagagggcatgacaacaactgagcatgtaatctccacacaagaactcaacccaactcttttgaactccctaaggc

SEQ ID NO: 80846 - DNA, 461 bp, Zea Mays
ttccacacatcagatgtggaagctctatttcttactagagcgctagtcggtgtgtctgtcaactgtgttgtcccctcagccttggtctcatcgacgtcagggtcaaggttgataggttcggatgatggaacctcactgccactggtgtgcctggccccgaccatagtatcatcgttggccatcaatatccaccggtccctcacaacttcaaacatagagacgacagacaaatcaagattcagaagcacgagcacaagcatgggatgaaccaatattcagaagtgtgataataagcacaagatgcacaagcaccattttaccgaagctggcgcaccagagtcaatcttaacagctcgatagacatggttagggccttaggggaatgggaaagcatggttaggcaccgatgtaggtagaggatcagaggaagaataatagaggttggagaatcagacatgacg

SEQ ID NO: 80847 - DNA, 789 bp, Zea Mays
actgccatacactcctcatttgtggtaccactaatagcattcaatgacaacaaatgactctcctcctcccctttttcctcctactcaatctgtgtcaacacttgttctaacagtgtcattcctaggtcgtctgtaattaaggcatttaactgcatttgcactttcttagggcatcgagcttggtggcctagttcaaacttatcaccacatgtgtaacacaacccattttatcaactatattccttcaccaatatctccttggagatatcaggcatagaggaagatcccctattgtcaggtttggacacaacattaccaaaccgaccctagcttattgtctttaatgtattatgtctctgtttgtccaagataccctactgaattcatgccaacaacgcaacacgctctactgatgcaggtaaatgagaccgcactggtccctgcaactcttgcttcagcccttaatgaagtgagccacatagagtgtttcatccagatcatggttgtgtaatgatgtagcaaaccttgcttcctcaaatgccttcttatactcctcaacagatcccgactgcctcacttccatcaaggtttgcatagcctgagagtactcctcggccccgaacttcaacatcactgcctcacaaaactcctcccacgatctgaggtcatattaaatcttaaaaatctgaaaccactatgatgcattccctccatattcaatgaggccgacacaacccacactgactctggaacttggtagagtgtgaaataatcaacacacttgtcaat

SEQ ID NO: 80848 - DNA, 399 bp, Zea Mays
gtgaattttaggttgagattaaaaaaatcgctcgatagttcccttaaacggcatgggtgagccaacctatggtaggcgggccctcatgtaaggggctaatcgtgtaagttgggcctcaaagcatggatcaaggctcgaatcatagagggtggcatctccatgtatgaggggtagcttttcttagtgaaatattataggggtggtctttactccaccgattgagtttttttgagttattggtgacgtttgggtttgatataaacatgcaaagacctccaaagaaaactcagcaccaaatggtttgggtagattcgacttgagaataaaaatctaacttcttggacgaatttgagaaaatcttggtttagagcgtatttttcgatctatggttgcagtttt

SEQ ID NO: 80849 - DNA, 709 bp, Zea Mays
tagagagggagagatggagagtcgtatagaacgtataggaggagtcgtataggacgtagagagagagagatggagagtcgtaggcagtcgcttgatgtgcggcccacatgctgtgtgaagggaaggggtgccaagtaggctcgcccgctactctccgtgtgtccttctcacccgtctgcatctctttacttagtcttttttccgcgtctcactaaaaaaccatatcagagatcatgtgctaattctaatcacaattcaagaaataaatgctaaacgtacaccgtgaaggcgattatgaccacggtaacacggtaactatggcagaggaaatggcgttgtatgcatgcttctcatttgtgcgagtggcaactaagtaaacaaattgaggaaatgtcgttcggtgtacagtaatactttctatacactccctctccctcctctctcttctctctctccctccctccactctctttcctctctcttccctttcctctctcctctcctctctcttccatctccctcctctctcttccctctccctctctcctctctctctccctccctccactctctttcctctctcttccctttccctctctcctctcctctctcttccctctccctcctcgctcttccctctccctcctctctcttccctctccctctctcctctcctctccctctctctcactctctgcagagacgcgcg

SEQ ID NO: 80850 - DNA, 469 bp, Zea Mays
atgcgcctagcactttcatgagattgatgaacgaggttttacgtgctttcattggtaaatttgtggtggtatattttgatgatattcttatctatagtaagtctcatgatgatcatattgaacatttacgtgctgtttttgatgttttgcgtgatgcacgtttatttggtaaccttgagaagtgcaccttcagcaccgatcgtgtgtcttttcttggatatgttgtgacatcgcggggcattgagatggacgaggcaaaaattgttgccatcacgagctggccacttccaaccatggtcacgcaggttcaaagttttcttggtcttgcaggattctacagacgatttgtgcgggatttcagcaccattgcaacacctctccatgagttgacaaagaatggagtgccgtttcgttgggtaccatcacaacaacaagcttttgatgccctcaagtcgaagctcacacaagc

SEQ ID NO: 80851 - DNA, 677 bp, Zea Mays
tgcataaaccatgcataagcataatttctcaacgaaggtgtaccttattgcagcatccaccagcctccggcttaagtatgtcacaatgtgctcctttccttcggtcttttgtgtcagagcagctctgataactttatctccgtctgcaatgtatagcctaaatggcactcctgcttgcagtgctttcaatattggagccaaagacaaataatttttaataagatcaaatgcttcctgttgttctgcccccaagagaaatcaacatcattttaagccgaagaatataagtgaaagcacgagtcttcctagctaagttagaaataaaccttcacaaataatttactttgccgaggaacttttgcacctcaagcttgcaggttggagctcccacattccaaatggacttaattcggccaggatctatctctatgccatgttcatgaatgataaatcctaagaacttaccagccgacactctaaaagcacattcacgcgggttcattttttgacgtgccaacgcattttatcaaaggctttgcgcaaataagctatatgaaaaccatactgagccaatttgactacaatatcatcaatgtaaacttctatagtgtttcccaacaacttgtgaaagattaaattcataaccctctgaaaagtagcactggcattttttaaac

SEQ ID NO: 80852 - DNA, 544 bp, Zea Mays
ccggcggaaggcccaccaccagtcggcagtcgcgttaaaaagggtttccttggaccttttctcgcgcgaaaacaaagcaataaacgagaggcacgcggcgccgccgtcgactttgaccgccgacaagctatcctctgccgctgctatgctagagacccatcatccctgcaggcactgccctagctctcacgtacatgggtcaaacctactcctcccggcatgtccacacgccgccgatccgatcgatatatgcagccaccagcccagcagccgaacgagtgctgctgcctctaagtacgtactgtacacacccaggaaactaaagacctccaggagtagtcgtcgtcctccgatccgatcctattcctttcatcgatcgatcttctagctacgagtgtaccaacctaccatgggcaataatggctgcctcctgctcgcgccgcgctgcttcctgctgtcgtgtcggcggcggaaggcgcggctggtgctgtggggcggggagacccgggcggcccggcacggcaagctggcggggcaggtgatg

SEQ ID NO: 80853 - DNA, 955 bp, Zea Mays
cggctggaacattatccgctaatgtacactcaatttcgtcgccaaaataacgtgcttcgccaaaataacgtgctgaagaaacaatccaataaaaaatccttaaatacgatgtcccggttgacgagagaggactaaattattttacaccccaaaaacttagtcgtcgacttctgataattttttaccagtcatttatacccgtcatttgtatctgggtgagacgcaattggagcgaaccacgacactggcttcgttattttaatttgcattcgtttcggttaaatttaggcaaattttgcccgccatctgaacatttgactagagagcaattcgattaataattctatgccttatatcttggatataaacgcggtcaaaattataaactcgaactatttccgaaatcgcattcacgctctcgaccaatctgaacagcaccggactcggcccttttgaaggttactaaagtccgaactttgtgaaatatttttagactgtgcttaatttggtggatactttcatggctcagaatgagtgttcgagtttgacactatataaatgggttggattaacatgttatctgaggtacacatattaagttttctgcagttacaaacagggaaatagattaactataaatactcggtttcggctctaatcatctcggtccgatttaactttgcattaaaccttttgtcgttgagttctaattaatttgctcgggacaaaaatcacacggctgatttgagctttccaaattcctatttgtttcgttgataaatttcaaaccagcataaggctcgacatttcaggcgattatttaactacgagtttcacaaaatattttagacggttcagacaagtggagatagataagatatttaaaatcgtaataggcgaagacgattagaatttagtgatggttatattcatcgatatcccgttcttaagttcg

SEQ ID NO: 80854 - DNA, 970 bp, Zea Mays
gtaacacacgcgacagactaatgcatctacgtgcaactaatgcaagtactgctgacgcactacaagattacagcaacatttggcttcgtcagtatatctgctaactgattttcagagctgacatgcttcacatccagaacaccatttcccacacattctctgatgtaatgatacctggtatctatgtgcttgcttctttcgtgatagactggattcttgcttagttcttgagccgatttattgtcaatgaggagacaaaaacgcttcacatcagtgcacataaggtcccccaatagcctgctcaaccacaccccctgacaggctgctgaagctgctgctatatattcagattcgcaagatgacagtgacaccactctttgcttctgtgaacaccacgtgatgacattgttgcccaagaaaaatacaatcccacttgtgctctttcttctctcaagatcacctgcatggtcactgtctgagtagccaactaatgctgcatctgctccctttgaatatttgcagccatattggatggttcctgcaacaaacctgataattcgcttgatggctgtccagtgctcagcatttggtgtttccataaatctactcaccattcctactgagaaggcaagatcaggtcttgtgttaaccaagtacctcaaactaccaacaagacttctgtattttgttgcatctagaatcagctcaggcttcccaggtaacaattttaggtgctgctccattggtgtatccacaggattacaaccctgcataccacaattctccagtatcttttcagcatatgcactctgacagatagtgatctcccctggtttctgctttacttgtaagcctaggtagtaactcaataggcctagatcacacatattgaaccttttcatcatctgttgcttgaagacagctatctcattgctgtttggcccacaaatgatgagatcatcaacatata

SEQ ID NO: 80855 - DNA, 606 bp, Zea Mays
tcctgtgccgcttagaccactgtttagcagcagcgcgtacgtgcttgagcttacctgcgagccgggcagccgcgtcgggacaggggagctccaggtgccatgcagggaggacctcagggaggaagagggggtgatatagccaggcattttcaaacttgaaaatttgggatttggggatggaggtagacatggaaaccagcagtggtttatggtcggatgttttcctgggtagagtggtgtgggaggtggaggggaaggaagaggtgtgggagttgttcacaaaagctcgatccaggcgagctaatgtgggaaccgagcacatgttagaccaggtgaaaaggcagtcctgtaactggagttcggcaacgccaaggtagtcaattgtgctattgaacagggagcaaaggtggttgtccaggtggccccggtttttgtcagcggtgcctctcaacatgttgaagtcaccgaccaacatccaaggacctgagatactggggaggaggtctgcaagttcagcaaggaaggttggagagtcttggtggttggatgggacatagacgttggtgatggtgaggggcgtgtctgttaggtgcgagctgaaggtgg

SEQ ID NO: 80856 - DNA, 927 bp, Zea Mays
tggtcactctaggggtagttgcaatgctcaaatagtttgcgactattccttaactctaatattttgagtatttgagtgcttcttttccatggtatgatgttgtttttgcacttgtaacgttttgtgcttgtacatgtgccagttggagtttgcgctgaaaagagagttcgaaaaaactataaatatcttgcagaatgaggtacctctgatttaatgtgctttctgaggtaaatattaatttagtatacttgtcatggttcaagatccttcggttggtgtgcagaatgtgcatcagagtatcaaagcaacttcttatttggactcatgagcatgcatattgggttgctttttagtttctcacgtcttttattaaaccccgctgggtttgggcacactagagaattccggacgaagtgctcctcaacgtggaggccacatcgcctggaaccagctagccgcaagaagtttgtatttagtattttacattaactcatagctgacagtcacagaatcattgtatagtactatagtatccacttaaacaagaaacacaaccaagacaagcaaacaatggataaagccaagaaaaatagagtattttacattaactccagctgcaagaatgtggtcagggctaggtcagtagcactctcatccaatttagcctgatttatttttgtagattttgttaatggtactttatacatccattagttcgcctaaaatgtgtgggcatcatgttgagatgtgccaatacataaaataaacttttaaggtcaaacaacctatttgattgatgtgccactgctgatgcagtagcgttattgtgccaaatggatacatgaggattaggatgctaatccaaagcaggtgcaccccatgattaagctcctatgtccagatatgtatattacctgtcaacaaatc

SEQ ID NO: 80857 - DNA, 345 bp, Zea Mays
tgacgacgacaaagaagatgacgaggataatgtcaacgaggaggccaacgacacccagcaggactacttcatggggtttggtcctgtcaccgaatatacacatcaatgttcgagacagggcacttccccaacctgctgcaagaagtgctgcatgtgttgggaacctacgtccgacccttgtacaagacaaggcgagtgtgcgagcttccccgggcttgctactacatcactcgcatccacgtcagggtgatggatgcaggggatagggggttcaggactctatcagctcgtgagtccctgacaccgctatccacctatgctgcttctgtcagcgatgctgccaga

SEQ ID NO: 80858 - DNA, 338 bp, Zea Mays
ctttggctttctgctaatactactaagtaaccaacgtcattaaagtagtataacatgtaatgacgattaaactatctcctcctatgtgttttcttggggtgtgcttgcatgagaatattgtgaataattgtaaaactccgattgaatgactatccctttctatctaagtctgtctaaatatataagtcatagagaacttgtgtgtactaagtagtttaataataagtagccaatgaacgattaaagtgaacatggtaaatgcttgtactcgtgatgtcgtggttgtgttggttaaatataggaaatgttcgtcgtctttccagtaatgttgacttgtt

SEQ ID NO: 80859 - DNA, 329 bp, Zea Mays
tcttggtaatgtaaaatgatggtgtatatcggcatgttatatttttcccaaatgtttctttgcctcagatgccatccaggactcgtgcacatgacagtgcgagtacttctcgtggtcgggaagacacgcccaacccaccgcctgtaccgccaacattggccgaggctatcgctgccttggtcaacgcgaccgccgacaatacccgctttttatgtgaaatggcgggagatcaattccagcaacatggcagaagggcttatccgcagggaccacgtgagacttcatacctggacttctctaaaactcgtcccccactctttgttaaagcc

SEQ ID NO: 80860 - DNA, 559 bp, Zea Mays
ggaaacccgatttgggggagatgagcaatttgtggtctctggtgaacaattggaggcaagtgctggtgctttggatgggtaattaccctacagagctcatggagtgctcaatttatagatcctctgagcggtggccagtgaatttgaaggagacacgcggcgaccggagagaaggagggacactggtgcagtgattcgtggcaattgcgggacaagaagccacgacgatcactgggtaacgatcacaaatcacggtgacgtagttaatggcctaaggcatggcacaatcgtggtgaagggcgcaaactccggtgacggccacaaggccacgtcgccggtgcaagtggtcgaggaacagcgagtccacagtagcccgaactcatccgcgacgtgatctttttacgtccgagcgcaatctacttccctgcggcacgaatcacggcgaccggcgtgaatccgagcgcacggttcaccggcggcgaagttatctgatcctgggatattttcagtactgtaccatcaggaatcctatttagagcttctgtctgattaatttgca

SEQ ID NO: 80861 - DNA, 496 bp, Zea Mays
cgccaacactgtgaccccactcgccagcgtcgtcgtgcgctccctcgtcctcactgtgactgatgtacgtgaccagtggtcagggcgccttaacacacttgagtcgctgctttggggaccccacgtgtcagccgtcccctctgcctcacccttgatccctctgtccggtgggcctttataattagtcgtctccctcccaacgactttgccgaatgtggcgggggcatgccgtgaatcccagtgtccgttgagggaccctacctgacttcccccttccacataagttgcgccctctcctcttctctcgtatacctcacgggctcaactcggtcgcaaggttctagctaccaccaccgcttgactagaaggtccgcatcgccccgtgggtaccacatcaaggggacctcgttgacagtctgacgctggtcgttgcaccccctgggtgactccaacacccccgctcagggcgagttgtcgcctagaagccatcaattgc

SEQ ID NO: 80862 - DNA, 483 bp, Zea Mays
aggttatctacaactcttctatatgatttttctacagaaaacaagttttagttcatcaaacatacagcacgacaaaaacagcgcgtgcagcccaaaacatcatttaataaatttcagctcctatacaattcaagaattgccgcgttatagagacttgaattattctaacgctttctcatttgttagagttaaattaatcaaattaggaccaacaagtagacttactactttttatccaagtcatttcgtgcctagaatttccatactcaattaacaacgcattctccacgaaaatcaatatcgaagcgcttttcacccaataatttgcattttaacttagacatcacatgagcactaatacttttcatccgtgtcataaccatacacatttggatgacaacaagcaattcgttgtgactactagaattcgcgagcacaaccatataatatacgcaaagcataatttacgaacacataatgcgc

SEQ ID NO: 80863 - DNA, 511 bp, Zea Mays
tagtcgagcattgtcgatgtttcgaactaacaccaacgagtaaatttgtatatgcgtgttttaggttcggatggtgtgctcattgggcgtaagacttctacttgttccggccgaacgtccctacttctagtctttggcggctcgcggtaccagcacctgattgctcatagtagtggttacaagtgggcgagagagggaaggattccaagactctatgtattgtttggctagatgatctacgtatctcgtgtccgctctcctctcgttgggtcgaccctccttttatagaccaaggaggggatcagttataggtatcttctcttggaagggatcatcgtgctgggtaaaatggaatggttcacctctggtaaaaaccttgtagtgtgttgatattcggcctcgtgtaaatcataggtcatgctcctttaagattgctgggaaacatgcctgtgataggagcccgagcatcatcattactcctcatgcctgtctcttcccacatagacccttg

SEQ ID NO: 80864 - DNA, 810 bp, Zea Mays
agccgctgttcatttaattgcaccaggctttgatggtcagtataaatatgaaactcagccagctataaatatgatcgccactgcgtcactgcaattagaatggccaaatactctttttcatatgttgagagtccttgatttttgggtcccaaagatttgctgagaaaggcaagtggatggcctcgctgcatgagaactgcgccaacaccagtgttgcaggcatccgtataaatgcagaagggaactgcgaagtccggcaaagcaaggacaggtgctgaacgtaacgcctgcttgagtaactcaaaggctttttggtgttccacagtccaaataaacagcacattcttctttaacagatcagtcagaggacgggatatcatgccaaaatgccttacaaacttacgatagaaacccgcgagtcctagaaaactgcgcaactctttgctatttgctggtgtaggccattgttgcaccacagttatcttgtcgggatctgttgagacaccttgtgcactgattatatggccgaggtaggaaatactggtttgagcaaattcacatttggacaactttactttccactgatctttccaaagcaattgaaataccgatgacaaatgagtcaaatgagaatcaaaagtggggctatatataagaatgtcatcgaagaataccagggcacatttacgtaagactggtgctaaagtggtattcatggcttccagaaaagtgttgggagctctagtgagtccgaaagccatcacccgaaactcaaattgtcccaaatgcgtttgaaaggctgtttttggt

SEQ ID NO: 80865 - DNA, 841 bp, Zea Mays
aaattcggctttcacctcttccgaggttaaggccaaagcatacacaactagcagcccctacgactgctcaaaaaggagggacaaacctccaaacctccaagccaagaaggacggtaacactcccaaacggcacacgttccacacacaataaaaaaagagagattcaatacaatgcaatcctattaaaaaaacctctaaccatgagaaccataaatttgcatggccaccgactcaagacgtcggcaagcattccttattagctccgctgcatcctcacttctttgaagctgcgccgagagtctgagtcagtgagtgtctctgaatagaacctatagataagtcatccatggggatttatcaaaaactaaatcattcctacttataatctaaataacccaacacattgctgagacatgtaataacaagatgctcaatttttaagtccacccgcaacaaccaactcctaaagatatgtctaacagatctaggagtcaccaaaccaaaacaaatagatagcaaacgccatatattatgagcaaagtggcattcgataaataaatgttgaatgatttcgtcagcatcacagaaaacacatgttttattaccctgtcagttatgttttgctaaattgtcttttgtcagcaccactactttcagcaaaaaccacttaaaatttttattcttaagcggcaattttagtttccaaaggtgcttatgatgagatatattcccattatttattagagacctatacatggattgaactgtaaactttctagaagagttcaaactccatataaaaatatccttttctgcattcaactggacatgaataagccgc

SEQ ID NO: 80866 - DNA, 331 bp, Zea Mays
tttcatggctaaacagtgttactggttggtagaatatattaatacaaaattaatgccacaagaatggaccaaaaagaatttaaaatgaattttctctgaatttattgagtttctaggtttatttatgtactaaaaagtatttactatattatttttactattttcttggttcactggaccgggcgtcaaattccagaaaggttaggggctaagatataaattttcccagacacagctttaacccgcggtggacggcgggtttatttttcaaaaaccagagggctctttagcaattaggccacgacgaaggggtatcttcgatcgccagcca

SEQ ID NO: 80867 - DNA, 367 bp, Zea Mays
gtgtatcttaagtgcactatttccaatcagtattgcttttaagttggattgtcgtgctatacctatccttggagtagttacgcttttgagattgcttgtgttgaatatctttcaattaatgattcatgacttccaagatcataatcatgcttgctcaatcatgactgtgtgttttataagttatatctcttgaatcattcatgggtagcttttcatttgatatatctaccatgattaactctcttggtgtatgtggctaaacctgtatctttttgtaaatcatgttgtgtggtttttaatgattatgtattaacctatgtgcaagcatgatagttttgtttagtccatgttcacatgattactttgt

SEQ ID NO: 80868 - DNA, 802 bp, Zea Mays
ggagtaggagtgccaactttttcaggcagaacttgttctacagcttctttttctgttgccttttctccggtttccaaggatttctctttggcaggctctgaaggcccagcttcggtttcgacctggctctttgtagcttcggcttcagtcagctttggctcagtctgtgcttttgaagcctcggcagttttccctggagtagagcttgaagtttttatcatctccagcacatctagtacactggccatccttttcctcttaggggtcactgtaagacccttttgtgccttcggcactgtcacttctgccgaagggcttagaacttctaatatcttcattccctcgattcttatctcttcagtattatcggccttcggctcagctaatttggctgaggacgccttcggcattgcagccggctcttcaatcatttgcgtaagcgtaggttccttggcttcagtagccgaagaggtctcaccaccaaattcaggcactgtggtcggttcaatatagcacggtcggtgagtaagaaccttcacctttttcctcttcggcgcgggctcgcttggagcagctgaagcaacatccttcccagaagttgcactctttctcttctacccccgtggcgggtagcggtagtcagggtacaaaaatccaatagcatcaaaaactctatttagcctcttctttttttggctcccgaaggccgcagatagtgcgttttttcagacttggagtaggctccaagtagctcatcactggtattttcaacacatttcagccagtcatcgtctggttcgat

SEQ ID NO: 80869 - DNA, 617 bp, Zea Mays
ctggggatcccaagcatctgcgacggttcccatgcgaataagtcggcatttgcctggaggaaggcgatgagcgtgatttcctatttctcctccagatcgctcgcgatgcgagtggtctaggaggaatcccagccaagccggatggtcttgacagggacgccgtctgctctagatggttgcaccttaggcaccttagcaagcgccttagtacaggaagtcgaggggtccctcccctcatcatccaggcgagcggcttctgccgccagggcgtgcaacttctcgacagctgcaagcgcagtggggcggtcgccccgcacggtgaggaccccagcaggggacgacatcttgaggaccaagtacccataatgggcaatggccatgaaccggtacagggctggccttccaatgatggcattgaaagggaggttaatctccgcaacgtcgaactggacattctcagtgcagaaattttcctcagtcccgaatgtaaccggaagtgcgatgctcccaaggggatacaccggttgagggcccactctggagaatgggcaagagggtcccagtcgggatcctgggatctggagctgcttgaacgcaacatggctgatgacgttgag

SEQ ID NO: 80870 - DNA, 517 bp, Zea Mays
tctctctggaatgacttggtggtgttgcacaagtgctttagaaagatgcttagctctagggatgcttgatggctcgagaaagctgattacgaggtatttatagccataaacctccaaaagagccgttgagagaactaccaaaaatctgctctcggccggtgcatgggaccgatctggtgcactactggaccttcaatagtcggataccatcaatgtgatttgttccagtcttccctccccgcagggcatcgacctggtctggtgcagcaccgaaccgaccacatgtcagctagccgatgagatgacagttgagggatgaagtagctattggacccgaggcctagtgcaccatcggactcggcagatgtgcgaaacagtcgaagtcgattatgtaggacactctggaactttggtctagtgcgctaccagaccgatctattgcactaggccgccgaagttcccttcgagaccgctctgaaatttaggtctgatgcgccaccagactggtccattgtac

SEQ ID NO: 80871 - DNA, 516 bp, Zea Mays
accctttagattagatcatattagattaggtagggtctcgattagattggatataactagattagactagttttagttagatagatctactagggtagagtaaatattattagggtatgttataatcttttgagataggatggactatatggtgtaggtaggtcagaagctctgttatgttaacacggagggattatgcaactatcggatgggtaaggtagttgcatatgatcaggtagttgtatatggtcaagttaatctatggaaccaatttagcttaaaacatttttataggagtgaggtctaatctatttcactagtactaactaatctgctaaataactcactttagattggatcatattagattagatgggatctagattagatcggtatcaccagattagactagccaatatctaattactttggattagatcatggtggttacactagtgtgggataaatatgcttattgggggcaagatgaatccatatggataaggtagaatcttt

SEQ ID NO: 80872 - DNA, 441 bp, Zea Mays
gggagggcatacaagatactgtggaggtggtggctgagcgcttccagcgggatcctgtcgatgattagtagctagatttgcagaaacagggcaagggttccgctggggtgcggcatgtaacactttctggttttgtaagatacttttgggaagtattaatctgacagtgacagaacttatctgtatgctatttgtctttgttgtttgtgtcattaccaccttctccctgatacttggccccccctgagatgtaggctcgacgtgtcgaggctggatgccagtatacttaagaaagaattgatgacctggcccccaggaggtagtctcgactgggacctagacctgcacacagccttggcttggaagctttagtagtgcacccataggacccgctagctggtaacttttatcctttgattcacacaacaggacctgcatgac

SEQ ID NO: 80873 - DNA, 658 bp, Zea Mays
cacccaacccaccaagtcgtgcctccaattgctcactagcatgtcccaatttgggatttccccgaaatcaaccaagaacaccgcgcggtgtgacctcgccgtggccaacgtgtttcaggtccgttcatgtcctctggttccttgtttcagtatccttgggtgctcttgatactctctgacccatccaattgagctagaatcaattggatcatcgggaacatctcggtcggtccattccttgcactttcactttgagcagggtgatgtagagctcgaatccagcaattaagtgaggggaaatagtcgcgtagggttgaattcggtgtccagcaaaggggagggctagccgttacgtagtttggccagtacaggttcgccggagttcggtctagcgctgctcgctatcgtggacctggcgttgtagagaagcagaagtccgggagggatttttgtaactgtcagtgagacatgggaatagcgctgcgacccttttccagttattcaaatcagcagggacctattcgcaaagccggcagcgtggtcgcgctttcgcctgtgtacgggccgtctcgggccagattcagcccaatactgtagcacctttctctttttcttttttctgcgaggactagagaatttttagaaaattgtagaaaaa

SEQ ID NO: 80874 - DNA, 918 bp, Zea Mays
agatgaaactggaagagtttatacatttaaagcaaggggagactcgataatgcaatatcttaacaagttcaatcatctctcctagtatgctatagaccaagtggacacgaacttgaagaagaaaaattgcttcatgagaggtttgaatgatcgactccagcggaagatggccacatgcctggatctcacttatgcagggccataagcacagcgctgtcagtggaagccaagaattcaggacaaggaaaaacaaagaggtatgggggtgacggatcatctcaagggtttgaaaagcagtcaaggttggttattcgtcctttcaacccaaatcgctcttctcctcgtccacccacatatcctttccaacaaccagttttcatccgtcccactcctgccccccgcccaaaacaatcagccaagtgcccctggtgctcgtttccccgccctacccagttcctctaatggctgatttaattgtgggaagtctggacacttcatcaaagactacccctatccaaagcagaataaatcaaattttcagcagacttctgggaacacgactcaaggaaagggaaatgtggccaaccctccagcgagaaaaaatacaaagaaaactgggcgagtttactacacccaagtggcgaccacccgggaaggagaaccggtgatgataggtacgtttttcgttgccaaccatcccactgtcatcctttttgattctggtgcatcacatacttttatgagcaagacttttgttgagaaacattgcatacatagtactgaatcaaaagagggttttgttattcaatcgcctgggggcaaatatttactaaggaagtagtcttccacgtacccgtaacattggccggacatgagttccctaccaacatgatagttataaagggacaagatgtagat

SEQ ID NO: 80875 - DNA, 756 bp, Zea Mays
ctaccgatcttgtgtgggattcaaaggatttggcctactggttctagagatatggagcactctagtaggatctgtctcacaacccgagcccaaggcgaatacctggttttgtcgtgtctaaggcccgaatcccaattccatcttcagatatgtggtagaggggttagtttagcacatatttgtcaatgggagctcacggttttgaattaggggtcatggtgaacacgctcgagtttgggtgagggggctgaatttcagaaatctgaaattctgatttctatagaaggcttccacttgaatggcttgtttggggattttgaaaaatccttttgggcaaactctcttactattttttgtagcttgttttgtgcattaaaacttttataattggctcaagtcatgataatgtagttttcttggtctttattgagttttctttttagtgctccattgccctctagaaagggttgttagggttttggcattttctttcttccttaagcttcatatggtcagggtatggttcctagggtgaaaaagacttgattaagttcttgcctctaaattttggtgtcttttgctcaatttaattcacatgtgataatggtcgcaatgtggggattgagggaaaaaccttgggtaacagtggggtgttacaaccctcccccttaaaagaatatcgcctcgagattcgggttagggtcctccaggggtatggagaaggttacggcttgcttccatggccttggtttgttt

SEQ ID NO: 80876 - DNA, 591 bp, Zea Mays
gccaaaagcctagcggcattgaagtgtttatggtgggccacaaaggaccagattctagtaaccacgagtagatgtgcagctagacgcccacggatcggttggtgagttttggctcaaaactataaaaaaataaactatcgaagtttctgcatttgtaagtgtataaatggtgtataagcaacatatggggaggagatggtttgacgtcatggctccgaatttgattggcgacatgcatcattggatccctcagccgtgcatgctagtggtgatgacaaagcgcatggacatttagctctaacttatcgaattacacaattgctactaacatgttcatgcacttaacacatttttgaaacacttgtaggtacacactttttgatggagtgattgactaagttgaggtgggatcttagaggatgggttcatcgtcccgtagctcgatctctcgtcggtcgatggaacaagatttgtaactagtgaggttgcgcgaagagatgagacaataaagggaatacttcttggtttgcatgcaatagaaacaagtgatgtttgaagtaggtgtaactaatgcaaactctaaattcgtat

SEQ ID NO: 80877 - DNA, 357 bp, Zea Mays
ctcgggcgtatggacaatccatcggcctctgccttggctctgagcgggaaaccagcgggcgcaagtcaacaacatagtgtaccgtcacgtcggcttgcagggcgccaagacatctctccttcaaatacaacaccaggcttcactgcagacatccccttcatgtataaatagggcagtagagtccctccaagggacagacaagaaggacacaccgacgaacactcacttctccacctagtcttcagtattggcacttgcctcaatcatttctagggacttggggacttcccctctcccgccgtgcttgtaatccctactgcagccacctcggtgcgagtaatataagcctcatccccc

SEQ ID NO: 80878 - DNA, 785 bp, Zea Mays
cagccgaaagggtatcgttgaatggtggccgtccgatctaaaccaagggctcaaattaaatcagtctcacttgaaccggtaagcagtgctagccacacgatcctgcgcggatggctcagatcggatccgcaacccagcaaaccggtatgcactcacggccctacgatctaccatctacggtcgaggatagcgcctgaccgcaacccatctaattcgtctgctaacgatccgatggccaggaagcttcttcctccccaaggctggacgcggcggtgaatgcacagcgcacggcgacacctcaccggagatacataatctctcccctctggttccctaaatccgaatctgacgggtgctagacagacggggcgttattgcgaataggttggggagaatcttaccataggtagaagtcacaagtcgtgggtccatggcacaccacggagcattgaggcccacggcggcgctaaggtacccggcgagcaattcctactgcgccaaagctcgaatcgtccctaccgaagcagctacacgaagcggaaacaagcacgaagctattggaggattgctcaccgagaatcgcccgcgaagatgctctgcccacggtggtcagcggattccagaggaggaatggacggcggcgagaaattctttggtccagggcgacgcttacgccagatagcaagcttgcgtacgatcctcggtcactggttatcgcctccgaccaccactctgggatccgaacggcaggaattgccgcatgcaacggtggcggcgtacttttc

SEQ ID NO: 80879 - DNA, 737 bp, Zea Mays
caaggctgtcattggccttgcaatcttggagaaaccttcaatgaaaccctgatagtagccgtccattccaatgaaactcttgattccccagacatctttcggtgctttccaatccagaatagctgctacctttttcggatccacaactaatccatctcagtttataatatggcctaagaacaggacttcattgatccagaattcgcacttgctcagcttggcatacaactgacaatctcgtagcctctgcaatactttcctcaagtgctcttcatgctcttgctcattctgggaatatatgaggatatcatcaatgaataccactacgaacttgtcaaggtagtccatgacacactattcatcaagtacatgaaataagttggcgcatttgtcaatccgaatgacatgatggtgaactcatatagtccttaattggtgataaatgcggtctttggtatattcgaaggtcgaatcctgagctgatggtagcctgacctcagatctatcttcgagaacacattggctcctctcaactgatcgaacagatcctcaattctgggcatggggtacttgttcttgattgtgacttcattcaaagatctgtaatcaatggacaatctctttgtcccatttttcttctccacaaataacattgggcggcccaaggcgaggtacttggtctgatgtagcctttctctaacaactcatcaatctgcttcttgagttccaccaattct

SEQ ID NO: 80880 - DNA, 2002 bp, Zea Mays
ctaattgaagccttttgcaactaatctggctttaaatcttggagaatcaaattctagagaagaatctttgagtttgaacacccatttacaaccaacaaagtgaaagttgttgtaccttacctctcgcaactggagtgacccactctccatactgatttggttgttgtctctgtctctgaatgcgatgtgcaataggagagtctgaagcctctaaagatccacctgaaattgtatcatctaactgaccatcagctgcatctgactcatcatctgccccatcagtgtcatgaacaccacctatagactctgacaataatggttgttgctgctactgattgtcaactgtagtagactcggtcactagagtctccacctcaaattttaccctctatgctacccgctctacctcagaatcgtcacctgaagaagctccacctcaagtgggagcctctcccaaccatcgacaacttggagtaacgatcgccatctcattgaaggtcacatttcttctgacaagcacctttggggatttatcttctttacaccacatacaataccctttaactccatccccataaccaagaaatgcacacttcagagctcgaggttgcaacttgttctagcgaatgtgagcatacgtcggacacccaaacaccctcaagtgatcatattggggtggtttgctagaccacacctcctttggtgtcttacactcaattgttgttgacgtggagcggttgatcaagtatcatgctatggtaatagcctctgcccaaagactctatggtaaacccgcatgggaaagcatacaacgggtcctctccaacagtgtcatgttcatatgttccgctactccattttgttgtggagtaccaactatgatgtagtgtatagtaatgtcgatgtcccggtaaaacctctcaaaatattcagagcggaacttagtgccattgtctgatctcaaatattgaccttcttttctgtctacatttcaaccatagccttccactgaccgaaacaagaaaatgtatcatccttggactttagaatgtagacccaaaccttactgttgaaatcatcaacaaaggttagcaaatattttccacctccaactgaagtaaccggtgtaggaccccacaaatcagtatgcacataatcaaatatgcatgtagtcatgtgcacagacctactaaatttcaaacaagtttgcttcccaaaaacacaatgttcatagaactgcaaactgcatgtctttcgactgcccaacaggccacgacaactcaactcagacataccccgctctaacatgtgccccaatctcatatgccacaatgtagtcatggtgtcatcatccacatgggaactagatgccactgcaactatcctagtaagcaaactaccctgcaataaatatagatcatctgtatcaggagtagtaatggccttcatcacacacaaggaacccctaaacaccttgatctgatatttttgagtcacaaatttatagcctttccgatcaagtgccttaaaggagattaaattcttggttagcccaacaacatggcgaacatctatgagagtacagataatgccatcaaacaactgaatctgattgtgccaataccaaccaccttgcactttgtgttgttgcccatagaaagtgagccccccattcataggctcataagtggcagaccactctctgtgcggacacatgtggtaagaacaagcaaaatcaagaacccaaccagtcttgaagctcatatcacaaacactagaagaacactgcccaactgaagaaccatctgcactcacaataagcaaatcaccatactttctagtatcattatctgcaactgccatagtagctgaagaagaatcatcagccttcctgccattattttctttgtccttcttcttcttcttcttcaatttaggacaacaccaattaatatggcccaattccttgcaatagtggcaacaaatttcattcttgcccgaa

SEQ ID NO: 80881 - DNA, 801 bp, Zea Mays
atcgattaaaaactttgcagcagcatccatgtcattatatttgaaatggaggctcaatagactgtcataaaaatgcaggtagtactgaagaaatgtcaaagatgttaaagaatcgatgcttcttttcatatgtatcaactcatcccgttgcccaaccatctcaaagacacggctagccatcaccactgtatttacatcggccacaactccgatcaatgacatcagttccattattttctgggccttgataatgcatttaaaggtcacacatgactccaaaaccatattgaacaaggtggcattgttttttattgggtccagttttttcatctcccgcctatctgtaacttggtccaaaaagctctcgcaagtctcaatcagaacatcagtggcaaggtaggagcctacctgtgacttcaacatatgcagaaacgacatggtcagcatatcaacatcgggaagctttctactctctagtattatcctcaggactgtggaggccgggataggcatctgatctcttgcgagcgccaatgctagcctcatcagtgagccacaattgagaagatttctattaatttgataaactgagagaaccatgtcaaatgccctctgaagccacctcctactagacatgtaggacagcgacacaattatactattcagtacccgcggctcaggaagaccgtgaagcttcttgtaattgctcaaagattgcagcgcctcttcaacattcccatccttcatagcacaatttatcttcctcaacagaatttcacgggatggcgcctcccatggtag

SEQ ID NO: 80882 - DNA, 704 bp, Zea Mays
aaagactgcaaggtgggaccatggagcagcaagatggaactatcacaagagcacgactgagggggggtagtttcttcttcataacttgtcgtgcatgtgtgcagaccaatagtccgggttcatgggggcagaccccatcgggttatcatacacgtatgcgtcatttagttaaaaaaggaaacagactcaacccctttgtcttgctctatggatagaacttacagagatattggcatcagggtaaggtactcctccagtcgtagctagatagttgcccctgggtcggtgcaatctcgttaccttggagggtccttcccagctgggggagagttgtggagcacctcttggtgtggcacttgccgccgacccaagatttctatccgcatttgacacgagaacccttgcctctggatgtgatcacttctgcatgtacctgtctgcagctcggacccgtgggaggtccggatgggcctccggaggaaggcatgcttcagcttcgtagaccgggggacacggagttcacccgatgtccgtctagttgtcttcaccggagtaggagcctccggcaaagatatccttcaggtccccctcgggcgactgatacccgaggtctcgttccggcgcgaccacctcactgtcgtccaccttttccttgccgggctggcggcgaggcggggagccgtctttggaggactgctcgcgcc

SEQ ID NO: 80883 - DNA, 1967 bp, Zea Mays
gttgttcttgcgaatcaagggaatttcttctttttcctcctcatcatcatcaagcacacaaccgccaaccctagcatcgtcacaacctctgacatcgtcctcgagggtggtgctcaccgggccatcaccgaggagtgatgttgaagggccagcctcttgttctaagcatgataaccgccgaagtcatttctttctctttttctcctcattgggcgcagctagatgcgtcgtctggcatgattgcttgcgatgagcaccttcaggtttctgaatttctttgtcttcaccaaggttctacccaatcgcaacagccatcgactcagtatgggcagagtcggatgattccccagccagcattctgagaacagcgttcatctcagcttcgtcagtactggtcggcatctcgaactaggtctacctctctgcctcaggaagaccctggaatggagcgacgaaagccttgatgtcatctaatgagggtcgcactctatgacccggactgccatctcaaacaggagggttggaaatgaaatcagaaaagggactctgtggaggtagattctaggcagaataagacaaggggcaccagcatttgaaaccctgccccttagcatcaagtcaattcggctcagcaggtcctcatcaggaatgtgtctattggtaattcgggtagcgtcattgacctcgatgtatagataagctgggtaaactctatccctcagaggctggatgttcttgaaaacgaagtcagcgaccacaacctcagcagtcaggcccttgtctttcagcgcatatctcgacaagtagcaccctagattcggctaggggactctgtccagctgggcgtgctgacatcgggctatctccctgatcgatgagggagggacttgtcgtggttctccatggtaaaccactcaacgcgccatcctttaatgatgaccttcaaggggatatcaagatgctctattttcttgccccgacgaagctctaagttggcaccaccgacaagttgatgttgtcctccagccatcccgggccgacagtggtatagatattttcaaagcccgaaatgaggaagaattctaaggaaagcttcgctgaggtgcacaaaaacgacaatttgaagaatagaattggggtttaaatgtgtaagattcagatcgtaaaaatcaaggaggccacggaaaaagggagaagttggcagggcaatccctcagatgaggaaaggcatgaagacgacagctttgtgagtgtcctctgtcggaacggtgaccccgcaccagatttgccaggaacacggctccttcggtggcagaatgccggtttcgacgaggtgcaagagatcagacttggagacgacatacatgtggttaccggcaaatagaagctggctattgggatcgatgggcagaatgattgcaatagcagtactttgtctcttcctcttgggggccatcgcagtctcccaagtgaagtgggcgggctcatgaactcagaaaacagagaagcgtggaggaaaaaacaagagttagggttaggagctcaaggggatacgttagcataaatatgagttggctcgataagtcgggcgcaaaaaatgtcaggtcataactcggaaaagtggagatcacaatcatcactcgagcattacttctaaaatgccagcgagccgctaatgcacaagcaaaagcacgcaacagtggataagcaaataaccatattttttattcataaggggagttcgtcacaaacttgaaaccgactcattatgagtcggcctcttccaccacttggtcgtcacactacattacactactctactacttacactacactatactaatactactctaatctactacttcttagtactacttactactactaccactatctgtattaatatctaaaccagcagcattatgccactggccttgccgtcgccgtcgtcgcccttgccgtcgtcg

SEQ ID NO: 80884 - DNA, 744 bp, Zea Mays
cataccggcagcgaccgacaacgagcaagcatgcgagagagagcacaagtagcggcaaagaaggcgatggttgcaatcaaaaggcaataaagcgtaagaaaaacgaagtggtggcctggccctttttatattcatagctcatttcaaaatcccaaaaagcgcacagcgaaccgtcacatcaatcacgtcattacggtacaaaattttgattgtgccccttgacgaagcctaagctgcgatcaagggcagagagactctaggatcagctcaccaagttgagccaaacggtgccccttgacaaagcctaaccttgagggactaatgtttggaggagggttggactggacctcgatcgctctcaatgctcaccaactactaaccacaagtcagaacatgtctgcgagcacattgatccgagggcgcccttaggcctaggaaaccttgaaggtgacacctagagatggtgcgaatgtcggataacagagggtgctacgatgacaaaagcacgaagacattgccgatgatcgagatatatctaacccgagcagacccccgggagggctcgaagactaacaagcccccttcctagctacgaccggatgcgtcctagacctctccacaaggcctcctcacagtcagagcagaggcccaacaatgaagactcctagagtgaaggcgtacaagacaggccaaagaggactaagtgtaggaggttgaaccgagctggggctaccccagccgcac

SEQ ID NO: 80885 - DNA, 407 bp, Zea Mays
gtgaattttaactttgttatttggttctcatcatgattttgtgtttttcaaaatctttttacaagtttttccctcttgcactaaaatggcctatttagggttatttagggtttgtgaattcttctcaccctgaggtgcatgacatggttaaggcataatccttaagatgaaaaagacttaattaaacctttgttcctaatttttgaagtcctttactcaatttggttcacatgtgataatggttatgagttacctctgagaagaaaccctaggtgacactggggtgtcacagaaagccggcaacggccttgctcgtgctcggctgctggatggcaatggccacctcaaataccaccatgctcttctagggttcgctgcctacgacctcgggcacgttggagccttgg

SEQ ID NO: 80886 - DNA, 369 bp, Zea Mays
tgcgccccttcatttttggagcaaccagcggtcaggaaggcgaaccgccgcacaaggagcatgcaaccgccccgcggttaagcgctccctcatcttcgccgaaaccagcggtcgacaaggagaaccaccacgcaggaagcatacaaccgccccgcggttatgtgccccctcagcttcgctgcaactggcggtccaacatgggggcctaggcccacatgtcatacaaccggtgcaccggttgccaggtgtggaaaaatcgcaccaccgctcgcgccaatgccacgtcttctcggggccgtcgcagctgactgaaaagataggttttcagaaccaatgcaacgactcgaggtatcccgcgcatggcccaac

SEQ ID NO: 80887 - DNA, 625 bp, Zea Mays
cgattccccagtgtacatcgtgatggcggggggctatagcatcgtggtacgggcgcctgtaggatgtgacagccgaaagctcgaggcctcgatggatgggggctcaggctatgatcctcatcggggttaaatcgacccccgcggcgctggctatactgatggtcgtcatctggctccatcgatacttcctcgctgctccctggtccaggcatgttcaacgctccctcgcctatttccaggttccagtgagatggggtctgttccggtcccgccttaggctggagcaatcgcctcgacgaggcgtcgttagttgttggtgaagacgtggtgctctggctagcccccagctctcgatgtcgtggtacaagacctttggcttgctgtcgcatggtgagactgagtaggcttcgggtttcttggtgggtcccccgttcactcggaatttttgccctagggagtctgttcgggagtgttgcagcaagcgcgatgttctgatgtgcccgagggacttgtggtggtccaaccttgtcgtagatcagaggatgtggggtgcgagttgctttgatgcgcatttgcagaacgcctcatcgtagattctctatttgccatcgaggcaacactcgct

SEQ ID NO: 80888 - DNA, 899 bp, Zea Mays
gcccttgcttcatagtgccagcaacgactccatccaccccctagcatagtagctgatgcatacgtctagatcccaggagtttcctaaatgcgcatgaggttgccccacctcccgagaagcgtcgttgatccgctcgcccgcctgcggaacaggtgacgacccacacatcagcagcacatggcccacgccactgcggctttccggggccgccgcgtcgtcgtcgctgggtgcagccggagttggcagccagtctgcggcttcatagcgggtggttttagtttcggaaaggggtttcggcttccacatgcatcccacacccaaaacagttgtccacttcgcaggcggtcatgcgcacgacgttggtcttttctctcgtgaagcatgtggtggcggtaggtcaaccagcacaaggaagcttcatcagaagccgcggagaagatggatcgaggaggattggagcacttgatccatagccatggtcggtgttaccacactctcatgttctgatttgaagatgctatgtaagttgttccatttcatatgaccgtgtgcctatcctgagatgtcgtgtgcttctgttagatccatttgcaaggatgaattaacttccgtctttaggatgatttaacttagctaatgttgtcatttgtcgcccagatcacaggttagtttggtcatttttcagcttgccggatggggggcaaagttatggtggcatgctacaaccatgtgtgtgggtatagacaaattctgtacataatctgaggttatgttgggctaattattaactagctaattttagctgggtctaataaacgtgctaattttggtagcaaagtgtccaaccagttgatagccggtcatattagccaaattagcaactagccatgtgcatctaa

SEQ ID NO: 80889 - DNA, 503 bp, Zea Mays
taaacggcgacccccgtgccatcaccggaatccgccgcgcggaaagcttgccagcgcatctgaagtccgcgcttcttctccaactccggtcgacggcctataaattgagctcggactccgcttcttctccccattacgcacctcagtgcttaagcaatcgactcaattccgccagagaacttgcgcagccccaattccctctatcctctgttcttagctccgccgcaagaatccatccgtggccagtgcaattcgagttagctcgagtcttctacttccccgtttgagtattctcaggtacccgtgatgcttcccgacctatccaattgaattataccgtcattaatcgctcggaacatgcggttcctttaagattctccgctgtcgccgtgggcagagggttgtagagctccaaattagaaattgagtgaggggaaatactccttaggggtagaatctggtgtaaactaaagattagcgtcggccttcgccccctccggccg

SEQ ID NO: 80890 - DNA, 648 bp, Zea Mays
ggactactttgtccacctcacccactcgagtgtggactcatatcactcgacaaagaggagtggacagccctggcactagcgtggtcatgggaacaagaccgacgactacatcggtcacttcgctcgtgggggagatagccagagcatgggacgtgccctcgagctctttcttcctggatgtcctctctatccagggaagagtagaggatgctcccatctccaacgatgagcccaatgtacaaggggaggagccttcgcaacatgaggcacgccaacgccggaacagtcatcgtaacattcggcgtcatcatgaaccagagaacatggcccgtgcaacccgcatcccaggacgaggcaactgagacatgagagactcatgatgatagggcgctccacgagcaccacaattcttgacgtcgcgatcgtcgccacgcctaggagcgcgagcgagaatgagcagcgcgtgatgccaggcaccaatgcgagaacccgccccttccttggaacctgctgcccaacttcacccgagccctgaacacactgagcgaggtcggcgaggcgttggctcaaattgccaacgacctaccccgtaccccgaacatggagggctaccgacatatcctcacccaagcagtgataccatcttct

SEQ ID NO: 80891 - DNA, 701 bp, Zea Mays
gtggagttcactggagttttgggcttgtccgagggagtgaggcaaggtgaccatacacttggggagggctttataggcatgctcgggcatggctaggcacaacagcgtggggtgggctatctggcgctcaatgtgtgcacgtgggaacgactagtgcgcaatcatcccctcaggcacagcgtcgagcacgtggcacaacttggtgtagtcactttcaatggcccgctggctccatatctcggcgaatttgggcaagatatttttgtaagatctcttccttggacacccctctatttgtcttgtgtggaggccgaggtgtttcatggtctgtgcaaggagtagtctagtccctaaggttagtctacctaactgttccatcccgagaaagaaatcatgcgaaatcatgtcaaacagatttggttcgacttcaaacttcaccagggtgttctaggggtcttttggtgccactttgtcaattgagccaagtggttttgagttttggaacaaggtgaacgcgtttgatctttgtgagggggctgattttcagaaaactgaaattctggtttttatttggaagttccacttgagtaacttgttcgggggttttgcaaaacctttttgtgacaactcccttactatcttttgtagggtattaagtgtactacaacttttataattagcccaagtcatgacaatgtgat

SEQ ID NO: 80892 - DNA, 775 bp, Zea Mays
ataatgtcttcttctgagtcgaaggcaggagaagaagctccttcgacgccctctgctgccgacgtagcagaaattctgaaggtaatgactgactccccgcccttcaaggtgctaagcccactggggatcagaactgacaaaatttttatagaagaaaggacaaccttcggctgcagaggagaaagtaaaagagccaaagaaacaacgaatagtaaatgtgatgcaagccattgaacgaacaccgccttcagcttcggcggctaagaccgtgactgctgtgggtgccgaagctaaagctaaagctgctgtcgaagcaaaggaagctggtgaagccggagctacaatgtcagatattgacagtcttatatcagatgtaattaaagatgtgactgtagaggaggacatggccacagcgccaggtaaagaaagggaaattgataccaatccttcgggcggagaatatttcaacctttggcacctgagcggtcaggagctttctgaagaagagaagtcggagttaaaagaatttgctatgtcgtgcggataccaactggggtctttgctcttcggtggggttgatgaggagatcttaggatgtattcgcaaccgcaccgaggcgaagatagtcggcactttatcgaagagtgttggccttccgaagttagagactgatatcagctgctatcgacggcaacatattatgggtagcttattttattcaaacttcaaggtgcgacctttggctaggttatttttattatcttcatgtgaattg

SEQ ID NO: 80893 - DNA, 329 bp, Zea Mays
aataatctcctaagttgttccctggagcttatctccttaattatctcctaagttgttaggccccggagctataagggtgcctcagattgtaatagggtttttatcaaaagaagtcgcacctgcgtgggcggctacttgatcacggtggcgacccccacgcgccctggtggtcgtgttcctcagccgccacgctgcgtgccctattccctgcgctcctccactcaatccaccctactatctcacccttcgtggtgtacgcctccccgtcctgcgcatcgtagcaagattcataacacacacatacatttgttggcctctagctgagttgg

SEQ ID NO: 80894 - DNA, 529 bp, Zea Mays
agtgttgtggtgcgcatatgccggatgggaacatttaatcttttgccatatttttgaatgacactaaattattagtcattgacaactgaatcattaatatagcattttgtgtgacatctatctcgtaaagatgacaaaagattaaattgtcatgttagatgcggatgtagatgatatatgatgggttacagaatgagatatttaggctagtttgaagacatgatcctattcttttaacccacagtcaagcagggctatagccatgaaaacccccttgcatatacatgtgggtcaaaatcacctgtcgggtcatcatacccacaaatattaaacatctatcaaaataacacattacataaatggtaggctttgactacaacaagaggtggacgagatttagcaactgacggatccgacgaggtatgaggacgagagggtttttgattattcgctactctctatccggtggccaatgctcaagatcttcgatgtgcccgtggtttggtggctggcggtcgagttctaaaat

SEQ ID NO: 80895 - DNA, 421 bp, Zea Mays
aagcgtgcagtgccaatttaaattagcgtcaatttaaaccgactgctccgctagtagggcatagtggtcaccccgagtttagataagagtgagcatgtcgcaccgtcttaagtcattgcgaacttaagccgattgctccgttagtagggcatagtggtcaccccgagttaagtatgcatgagcatgtcgcaccgccttaagtcattgccgacttaagccgattgctccgttagtagggcatagtggtcacctcgatttaagtatgcgtgatcatgtcgcactgccttaagtcattgccgacttaagccgattgctccgttagtagggcatagtggtcaccccgagttaagtatgcgtgagcatgtcacaccgccttaagtcattgccgacttaagccgattgctccgttagtagggcatag

SEQ ID NO: 80896 - DNA, 558 bp, Zea Mays
agggtggactttatagtgggaacttgtattctattgaggggagctcggcttgctgtctctggatagcgtagtcctcctaacgtcgtccgtagggtcatgtgctgtcgtacccctagtatggcattctatattgttcattcagtatgtgagtccccgtagcttgcttggtgccatcgttgcggtacctggtgagtcccgcaatgtgggtttatggtaaagttcaaggtcgtgtccggtacaacttcatcttccatcataccccttgcatcactatcaaacacgcataggtatactcctgacatgggatattgtatcgtcctatctggtgtatgggtcactgtagagacttcgatgctgaggcctccacgattagagttgtcggccccacgagtcaatgagggaatatccatgggcacacgtgggtgtgtttcatcatgtctatctgacaccttttggcactgtaggtacggcctggtcatggttaggtggtgttgtgtcttgtcgcgaccgtcatgggttgacaacatcggtctgagatccttccttgcagatccgctc

SEQ ID NO: 80897 - DNA, 549 bp, Zea Mays
gtaaagtattacaatacacttgcaggctgttgagggccacactaagctctgccacacgagcttgagcttttgcttcgtggtcccaagcgatcgaatgtgagttgacggcccaatcaatggctgaatcccattctgaaatctcatattgcaagcggctgacatcagctgacaattcagctatacgctggctttcctgctcccatgccctgtttctgtggcgtagttctgaccggagttgctccaccctagcttccaggtctccaattgggtcattgttgccactactactcccttcatgtctaggggctagctgatggcaaggcacaccaaaaggtccagtagatttgcgtgctgttttccttgtacgcgccatgtctccataagaggggaagatttattagtatattcttaacatgatgcatgcatattctaataattatggaatcaaccttcgttgatccccagcttcctatatattgcactctgttacccaactacacaagataagagactaccagaaagtgatacggtaagaatgaaggaatattt

SEQ ID NO: 80898 - DNA, 458 bp, Zea Mays
cacgatgatgtgttgttcccatagtatgttagaaggggaggaagcctccgaccgatgaggccaatgaacatttcgggaagatgctcgaggccccatgtccaaaccatcgctaccccatctggctcgcctacaaagactgtgggctgcccaagaagttcctaagcaaggaggcaccatctgcgagggacctgacccctagaggggtagcaagcaggaaagaaagggtcccgctttccctgattaaacagggtgtatgatgatctttggagggtctgactactacatgttgagttagcaccggaagctcgatcaacgcgatgtattctaggtctagcaaacaatcctggcttttctcgactagtccgaccatgccatcaccttcgattactctgaccatcccaagcatgtcccatggcctaggcgatacccacttatcgtgaatcccatcgtcggatcgg

SEQ ID NO: 80899 - DNA, 398 bp, Zea Mays
ggaaagagtgggccgcctgatgaggcaggcgtgtaataaatactagctgatttgatatttcgcacaggaagaaaatgaacaaagttttcccatctttcccagtttcatagtttctatccgttcttcttcctcgcttctatccttccacggctgcatcagcgacgcgaggctgacacagcaacagaggtgtgtgtcacacaatggtctgtttcataatagattcaacgttctcccatcttctccagacgaatttttttagctggcacgaggctggggggccatcgccaacgacaaatggctgtagaaggataccggacgcaatatgaaacgatttgttgttgttgttaaaaggaaaaaagaaacgcggacgagcgtgccagtgagaccgatgggagggc

SEQ ID NO: 80900 - DNA, 318 bp, Zea Mays
acgcaaaatgcaatagcattatagcaatggaaacagaggcaatgctcacactatcacttcgtttgatagaatagcaggatggttctagtttcgccaaaagttccatttactgaacaagtttcttgtcagacgttctacactagtgctgctgaatgtaatccaaggatacgtagacgtgagggcacggctgggtgcatctaatctactttggtcatactagcagtggattgtaagcattaagcattcaacccgatttgaaagtccaattcgtaatctgtctgtctcctccacatatttggaacgacatgtccacatggg

SEQ ID NO: 80901 - DNA, 558 bp, Zea Mays
agaaaatggaatttgggcactcggctcggaaacgattgctcgaaacggggaaatgagtgaaattgaagcctggtatatcggatgggtgtgaaatttggtgaatatgatactggaggtgttgtgaaggtgcctgaaaaatttgggttcaatcggagcatttttggctggtttgggcatttcaccgagcatgtggtgtgtggaggtttagggtttcggtgaaatggctatttgaggtggtgaaaccctcccgaaggagctaagaacctgcaggggattcaatggagcactagggcacacaaccatgcactgggattcacaagatttacacaagaatttgaaattggcataagaggtgggataggagttcacaacactgactaacagagagagaagagggaggcaggaggagcttgggctgctcaccagaggaagggcaggcacaagcaccggacgatgctggagcacggtgatcgccggtgaggggaggtcgccggcgagggagagcagatcgccagagaacagggagacagagagcagagaggaaactgaaagcctctg

SEQ ID NO: 80902 - DNA, 920 bp, Zea Mays
ctaaactatatcgatgggcgaagtcccttcgcaccacagcttcaggcctccccttagccgcaaaattacagggcgggcacatacccaaaatacaacgacaacatagatcatacttagtacatcatgagctactaggttgtagttgcaaatagatcaaggggagatgacgttaccatggcaaagtcatagcaaagtccttagacgcaacctcctcttcatttggagattttgatccctttgctttcttctctatgccaccctaatagatagcgcttttgcttttaagccgtcgctatcatcaccactttccgcgacctccttaccattcatagtaacaccagaaccctcctcttctccttcctccgcatccttgggatatggcccgtattccagctcattcatttcgaaaactctgttcaagcgaatgttgccatcacggaactccaagctctttgtcatctcagtctttgttgaatattttccaacaatttttacagcctccgtctcgacctcgctcatgaaggccgccccatcgcaatcgccaagttcaatagcgaaagtggggcttacaatcttaatatcttttcgaaaaagcgctcttcaacagcatccttcaccgcacaacttcaccaactgtccaacctgcgcttagaggccacacctgatatgaaatgtactcttcgactaaatctctgctgctgctcatcaccctcgcgcgacgtagcaccgtctcatcagggtccttttccacgacttcaaagtcaagaaaggcgacaaagtcgtgcgccattataaaactggccgccggttgagccacaccaggcaccccttctccaaggtccacataaaactaagatttaaaccaactacccaatctattcttcgcacacgacacaagctcatagaccttgctaccaact

SEQ ID NO: 80903 - DNA, 935 bp, Zea Mays
cccggctggaggatttccccttcgtcagggtcctttcataaacacttgattttagatcatcttgtcttaggttgactgaggtcagggctgcctgtctaggatgacttggtcgggatttttgtttggggtgattaaggtcgggtctatcctggtctgggaagtctgggttgctttttgatgataggattcgtcctaattgggtgaacttaaatcgaaaatcctagttaggggaacttaggtcgaggtgtcggtccttcccttggttggattcctcgaactagggtttctcttggtcggaggtcgtcccgtgtcaaatctatggagcttttgtgttgttctttagggtatcccaattacgagtacacattattttctgtttgttctttagggtatcccaagtatgggtatatgttcagtgcagggagaagcctttaatcttggaggttgcctggccttggtcatggtgcaacactaggagagtaacatgtgcggaatggtcacactcccctagagtatgtaggggtagatggtgtgatgtccctaggacattgccgctctagtggggtgcgcacaaaagactagcctacatgtttgttatatgtcggctcacggagccatatccatccaacgaaggtcgctagagtgaggactacatgagatttatatgcctcttatggcgtggatcacaatttgagttgatggagtaggttatagagatagttgttcgaactggcaaacatgctaacattgccacaattgtgctacacaacaaaacacaagaaactcaaaaggaaatgcaccatattcctacttggcgcaccaaatgtcattgcataatacagtagagtacaaagagtaccagaaaaagatataactaagacggagcacgacgtaggtcggtggtcgtgttgaacctaggcacgagtgggagctag

SEQ ID NO: 80904 - DNA, 281 bp, Zea Mays
ccaagttgtacttacctgaactagaagaaggagcctgtcaccatttattagtagatgacaaggagtccaatccgattgaggcaattagaattatgtcagaattccccgatgtatttcctgaggagttactaggtatgccacctgaaaggaaagttgagtttgccatagagcttatcccaggcaccgcccctatttccaagagagcttattgagttttcggaccagagctggtggagctcaagaagcaaattgatgagttgttagagaaaggctacattaga

SEQ ID NO: 80905 - DNA, 906 bp, Zea Mays
tcttcttcaagtgtatcaatgtcctccagcctggtggcctcgacttctgctatgttttcgaagatcaatcttggcgccccgaacttgagatcagcgggtagcactgcttccgacccatagaccatgaagaaaggagtgtttccatgcagagctcggctaggttgggttcttaggctccaaacgacatagggcaactcccttatccactttcctgcgaatttttcattcttatcgaagacctttttcctgagtgcctctagtatcatcccgttagcttgctcgacctgcccgttggctcttggatgtgctacagatgcatacttgatctgaatgcttttttgctcgcagaagtcgaagaactccgaacttgtgaagttggatcctaggtcagttatgatgttgtttggtatcccgaatctgaatattatgtcttgtatgaattccacggccttagcagaggttaaagaagcaatgggcttgaactctatccatttagtgaatttgtcgattgctaccaatagatgagtgtatcctccttgagctttcttgaaaggtccaatcatatccagtccccagcatgcgaaaggccaagttactggtatggtctgtagttgctgtgctggcagatgttgttgttttgataggtattggcaagcttcgcacctctgaactaactcggctgcatcattcttcgctgttggccaatagaatcctgacctgaagaccttcccgactagtgttctggatgctgcatgtattccacattgcccagcatgaacctcctccagaagttgcttcccagtagatgagagaatgcacttcatgaggacacctgatgcacctcttctgtacaatgtctccccaatgagtgtgtagtgagccgactgtctggcaatgcgctcggcc

SEQ ID NO: 80906 - DNA, 601 bp, Zea Mays
aaaatgatagaagtattctcggtgttatgtgtagtcagtaaaattttctattttcagaaagggagctataatggaggtacagcggatgtggcttcaaaaatacggtgctccactactcactccgaattaactttttttggttagcttgttgaatggaacgtgggctgatcaaccagcacttcatccctggcaaaacatgtctatccctatctatctatctacaactaaaacatgtctaggagaatcgtgaaaaaaaggaaaataagggaatatttggtgtggtgcctaacttactacagtttatcatgattaaggttggacatatttgacttgtttagacgtgtgttcagtttgtagcacgatttttcccaatatcgaagatctcattgataaagttttccaaatgttagaggaaaacataagaaactcgaaatacatcacatcttgagctattttgtcgattagggggagaacgtcgatgccataaacatcaagcttatcgaccgttttccaggagaacaaatgatctataacatctttgatagtgcagtggatgatcctaacaatcactacccaccagagttcttgaattcgttgacgc

SEQ ID NO: 80907 - DNA, 553 bp, Zea Mays
ctgggacgggcttggtctacgccatggcagcttccatcctcctatcttgatggaatgttgctatcctcctttgcgctgcgctcgcaataatgatttggattatgggtcggcatctttgggtgttggattatggaggtggtggcagcataggccaccattggggaggagtggccgattgctggtttttgctggtgcgtggagtttatggggggaatggttggtgtgtgccattgctactgcgatggtttgaccattagtttcactgcaaggacagcaacagcaacagctgttggtatggactctggagtggtgctgtaggtcaattccatgtgaggtttcgtgtttccttcaacaaaggcgcaggggttgccatattccagctactgtcgttgctggaccggctacaaagttgcacagcaattcactgtcacgaagcaatgaacaatgttctgcagtcaagcttgtcactgattgctattcacgcatgaattggtattcttctttttgataaacgaattgatctttatgatgacgctattaggctgcgtgctac

SEQ ID NO: 80908 - DNA, 450 bp, Zea Mays
atttggtacaaaatacaattataggagagagtacattaagttcaagctagacgactttgattctttgacccatgccatctttaggcaatcaacccttgccaagttcatggtgacccctactaattgtacttgttgttgaagatgctaggtctcaataatggtgtactctcactcaaagatgacttgaagtgctcctataaatgtgacattgaggttgtttatcttgtggctaagtcccaactaataagccaagtgcaagaagtagccaatctctcctagttgttacaacaaggcaacttcgatgtacctcacaagaaatcaagagccttataagctcccaaggagactccgctaaagatgactggcttgttaacaggcaactcccccaagatgataactatcaatgcgaagcttgaccaagcataggaagacatgctcatcagagtttcc

SEQ ID NO: 80909 - DNA, 302 bp, Zea Mays
gaagtgtctggtaatgacgagagagctgtcggaattttagataaagttgatggtaaagtggattatgtggatgccaatcaagattttgaagaatttgattgcgaagagatgttgcgccatatggaaccagaaatgttgagttctgtgggatcacagaaagggctatctaaaatggagggactggaaagtgcctcaaaagaacctttatatgatgaatcaaagggttgtgacaaagagtttactacactacgtacagttctagaacttcttaagttgaaggttagcgccggatggtctgatac

SEQ ID NO: 80910 - DNA, 295 bp, Zea Mays
caggagccttgcctcaataaaagccacgttagcgcttcccggtgatttcccctctctccggtcgccagcgcaccttctccaaattagacgccaccgccaagggattctataaattgatgccccagtgagttccgctaggtaattatgcatctaatgcaccatccatcgcctctgatcatccaccatagcctcccaatttcgcatttcccccaaatcgagttttccgcgacgccgagagtctctcaccatggccaaccctcctcaggttggttcatgcttctctggtagatgttct

SEQ ID NO: 80911 - DNA, 1075 bp, Zea Mays
tttattatttgaggaataatattataacttaaattgtgttctaatatggagacatgttattaaataaatgtgtgtgtgtgtctgtatgaagtaaagaaaaggaaaaaagaagtcgcactcatgctgagattttgatcgtgcatttaaatcctagtttaacacttaaaaccaaatacgaattcaaattaaaattggataaaggaaataggacataaaaacaaatgagaaataacaaaaaaagaaaagaaaaggaaaaggggaggggctacctgcacttgggccgtgcttctcctcgctaacctagctaaacctttcgtgctagctcggttatccaatcaacgccgtcaggtgggcctaaggagctagcctccgtccgcacatttaggtcaatgggcaatggtatcggcatgtcagccccttcctctcaaatgccggattgaacgggatccacacactaacgaacccgaatttctgttatttctaattaaacggggcaccctctccacaataggaagcgcctttcaggaaatgaaacggggcaccggagcgagtaatcaggctacgccggtgatctagccaccttgacgcatggcggcaccgccgggttgtctcgtcggtggtttgggagatgcgaggttgttccggggctgtccatctagtgatgagcggctctgattagattcaagtgtaccggtttgtgggaaaatatgagccgttgatctcgatctaaggggtaggataagttgttgacgtggtgctcgctcggccgaggaccctggatctaaggcccgacgtcacgtaccgtttcgatttagtagggaatctgatctagtccctagattctagatcagacggccatgaatcgtgtgtaccccctttggccgggcgaagtttcataagatcccctgatgattttaggaatcaacccgcattccacccaaaaaagaaagaatttggtttaagtcctaaaatttatgcaacaacccctgatttcttatagaatagtgcccctagtccagattttcagataattataaaatcaaatcccagaaaaggatttttagtataaaaacaa

SEQ ID NO: 80912 - DNA, 471 bp, Zea Mays
cgttctgctcatgagaagaccccctccaaacaaccttttggttcgcaagtaaaaccttaaaaaaattaccatatgctcgagttggaatttttaaccctggtgtgttttacccttgaagttacacctgcacaacttatagatacccatagcttgaccgctagaccaaccctagtctccttgtgcacttgtttggtgtctagttgcacaaaccctatcaaggccatgtttctttccatagatcttgtcccgaatcttcataacctttctagtgctcatcctaagcgatctcatgtgactacctctcctttcacctggatctggtaatctttttccttgtgaatcatgttgtggctttatcatccgaagaatctccggatctttcattgattctgccccgttatctggttatctgttataacccgttctcaagtatccaatgtggatcaatctaatatcttattcctggctaat

SEQ ID NO: 80913 - DNA, 684 bp, Zea Mays
atttatttttagccctgataaccattcaaagcagtaaagaattaatttcagatttaaaattgattttttgacccgtcaatcataatcattgtgtcatctgcgtattgaatatgtgaaatacctcctggtagaacatcgttcaaaactccagagatgtgacctttggaaatccctacatccaaaagcacactaagggcattagccaccaaattgaaaagcagaggggagagagggtcgccctgcctaagacccctaaaagtcttgaaatatttactcctctcaccattaatgttcacacatactttcccattctccactgttctcataaccatattggtccatctgtccgggaacttcttcaattttaaaacctctgctaaaaaatcccatctaaccttgtcataggctttctcaaaatcaatcttcaaaatcagagctcttttttaatttcaaatcatgaattacctcatgaagtatcactactccttcaagaatgtttctgttttttatgaagcccgtttgattgcccccaacagccaccttggctacctgggaaagcctattagaaaggactttggtgaaaattttgaaatcgacgttaagaagacagattggacgatattgcttaatcgaggtggcatctttaatttttggaaccaaggagatgaccccataattcagcct

SEQ ID NO: 80914 - DNA, 681 bp, Zea Mays
gaagaacgaaggggtcatgtccttttatagatcaagggtaagacctttcagtggggacttgtattctactggcaagagcatggctcattgcccttgggtggcatagtccttttgacgtcatttgtagagtcatgcatagccgtactcttgggatggtgtaccgcttcatccgtccggtatatgggtctctatagtgagtccgatgttaacgtagtgacacttggcggtcccgcaggggtagacttgcggtgtgcttcggggtcagctttgtcttccatcatgagccttgcgtcaccttcttgtgtgtgtaggcatatacccggtatggtgtatcgtcccatccttttcggtgtgtgggttactgtagataatctgctgatgagatccctcgtgactggggtttactagctccacgaggcattgggcgtatgcctgagactatacacgagggtgtaccgtcgttttcacagggacttctcagcgcccctctagtatgccacgcacacgtccaaacgtgggttggtgacatcgagtctcgtcctggctgacgtgggtctgtagtacttgatcgaggccaccgcctcaccgaattgctcaaaagtggcttggtcggtcactccacctcgcagggttgctcgacagggagatggttgggcgctctgcctcatagggttggtcgat

SEQ ID NO: 80915 - DNA, 391 bp, Zea Mays
cgccaattgagctaagctaccttagatcgccgggaacgcagtaggatgtccgtcaatcatgcggtcaccgtggacagtgcatgttagagcgccattagtgaaattagttgaggggaaactctcattaggacttgaattcggtctttgccaaagtagaacgtcggtcatcgagttaatcggcaggtacaacttcaccggagcttggccctgcgctgtccgccgccatggacttcggactgtgaagagatagaagtgcaaggaccttttcgcaaatgtcagtgactcagttaaatagtgcgcaggattcttcttcagatatttaaaccccggagggcttcgatgtaaagccgcctcgcaggcgcgggtgcgcgtggattctcccctgctgtag

SEQ ID NO: 80916 - DNA, 516 bp, Zea Mays
caacaacatcaagtttgttctctagttgtggcatagaaataatagtattatcatcacacgactcttctttatcacaaggaacaataagacaatcctcttgtaacaaagccaactcaaatttatctaaaggcatgatattggtagaattactgaaattgtttttagaatcatccatagaaagaaatttttatctcattagtgctttcacgtctatcctagtttgtggtttctcatagtcatgcaaataattctaccaaactaacgcatcattcgttaaagtacaagccacaattttaatttttcgtctataacatatacgacatcgtgcaaaaatcttatccattgatacttcccattcattatactcatttaaaaaatttcatcaaaaaagagaaggttggatatatcgaacccaagggagatgaatcagcatcaatggtgtgcctctcaaaggctttagtcaatgcgcacatcatctcctttaattcagataggagacacactcaccatcagtag

SEQ ID NO: 80917 - DNA, 284 bp, Zea Mays
agattgaggaactacgtgctaggtgcgtggagcgccactatcaggagctgggtcccccgcccctgttgggactcaacacccttttcgctcgctgccccgtggtcatcatgcttatggcacccctgactgcaagaccaatatagactttaagccctagatcgatagaattggagtttgtaataaatgtttaaatcaatgtcttagtcttagcattcttagttagttttagtttgcttatcatttgtttctatgtttgtcatgacgaacttatgatggattcggct

SEQ ID NO: 80918 - DNA, 989 bp, Zea Mays
ccaagattcgtgctcggtttgagtgggatattaccgtggggatgaaaagatcagagggggattggatagagctagccatgtcgtacccagttgctcggcaatgtggctgagcagtcgtcaccgtggtggccgctgttaatcttgatcgcgccacgccataggccatcttaccatgtcgtagtaagtcgtgtagagtagccgattgctaccctaggacattaccccattgagcgccacggtgaacttgcctcggtagaaatatcccaccgccaccgtgaacaccctcgtctcaagttcatgaagcacgtaatcggctcctttaaattgagcactccccttgctctacctctctgttatgcggccatcccaccctcagctagcccctctcgtgcaccatagcctccaatcaccagaattccctaaaaccatcatcaaagccgtcgtgagacatctcaccgtggccagcccttctcaggttagttcatgtctctctaggccatgttttagcatcctctagtgctagtgaagctcaccgacttgaccaattgaatgctactgtggtagggcatcgagaacatcgcttcgccgccacagagcaccgccgagaatgccctcacatcgaccgaccctcccatgctctctccatccaaattcgcgcgcataccatacctccggtgagcagttgatactcaccctagcttcaatttaaacgctaatgtgttctactactcggaacgggcttgctggagctctggctctgttgtggtcctaagcagatacaaattaggattgggccaatcaaactacgttggggaataagcttggatggtctcgagcatggagttcgtgtgctcgacaccgccgaaacaggtcactggtgacaagtacgcgcggttccagccaagtgttcgaccggagcactgtcgaggacttaaagccgtgaagagatagaagtaagaggacctatgtgaaattgttagtgacacaaa

SEQ ID NO: 80919 - DNA, 1082 bp, Zea Mays
ccctcttgggtggtaaaccttgaggagtagcaaacaactcttgatgcttgtttaccaacttggctatactgtcaggcatctgctgaccctcctttttagtggtaattctcaactccaacatttgttccactgcttcttgcctgactagaccccttagttgtgctttcgacaactgattacatgttttcaggttggggattacaccctgcagatggatatcttttcctttatacacaaatttcatccacttctcagcccagtgtatggatatggggctgtggctctcaagccaatccatgcctaatattagatcataaccatcaagagacagcaacttgaagtcagtctgaaacatcaccccaccacagtaccattgatagtctagtataaactgtttgctcatcaaatacctaccatcagtcacctttacccttaggggtgtctgcaagagctgcatcccttttaccactccagccaagtgttcactcatgaaactagctgaactgcctgaatcaaccaggaccaaaacttgctggcaatgtatagatgcccataatctaattgttctattgctctcacttccactgacagcagcaacagagatagccagaactccctcttcagttgatgccttagtctgttcctcaatctcctctttctcatcctcattcacctcatcattgacagctatcgcccacatttcttcgaccaaatgcaagggaacactgctggaacaactgtggttgtagccccacttctctccacatttaaatcataaacccttagctcttctataggattttaatgcagcaagtttattttcttctgccttatgtccattagctgttgtcttacgatgttccccatatggtgtaaacccacgacttacagggactgctactgaatttactcccaccaaattaggttttcccggtggctttgaatacccactcatctccacccttctattttccctctttccagtgtgcatcaacacatcctcttgcaacatggctagagaacaggcagtgtccaaatcaactggacgttgaatcaccacaactgacttaatttcatccttt

SEQ ID NO: 80920 - DNA, 704 bp, Zea Mays
gaaaaggggggctgaatagggaggatcaggctagctaaagcaattcagtgcttccaaaatatctgaagaagatttttttccctgcagaaaatatcaaacctttggatgtgtttgagcctgccgcagtggaatttttttatccgtccttcctctgtctgtattactggacagtggatatttgtgggcagtgaaccttatctgctctattccctatttgagtaattggacaagttgatattttgggctgaaagtgctgactaggttcagtgttatgggtgtgtctgtgcatctgtgaggaacttgagcatgaaagacacgtaggggatgtccatgtactgctggcaccctgggaatacatttgcactgaatttgtgcaagtccagggacacctgccccactttagctgccataaaagacatggttcagtgaacttctttccctgagttccttgcagcgtgtggtccctatgccttcaggttcgtgtagcttctcctttccccagccatcattgtgctctatccagagctgcacgcgccaaactcctatgagttgtgaccacgcctaccaatttgtcacctcgccgtggccaggctaactcaggcaagtattggtctttgttgtgcttgttccatgtcccccttagatcagtgaagctcaccgagctgttatccctaacgatactgtcatgttttggccggaacaag

SEQ ID NO: 80921 - DNA, 536 bp, Zea Mays
caaaatgtgaataatttttcctgctcgtagcatcagcccagaatatgaatagcaactttccgtcctcgtccacaatgaaatcataaaaaaacataattagcctccttctttctctctagttgtgcgacaaataattgtgcatctgcatcctttattttctcccttagtcctcgatagtaattctggagatcccgctttgtacaaccaatattattaaatccaccatcactgacttgtaggattctaaatgcctgtgaggtacctatgcttgctttgtgacatgtaaataatgtatgcttggctctttcactcacaacacggttcgatcggaggaaaggggtcttatcaggagagcaaagtggatgattatgctcctcaaccaatgcagtgatatggtacttcttgtccggacccaacttcacatacatatttgcatcacacccacatcttgtcagtgcatgtttcttttgttttatagcaggaccatctgtctcattcaccttcttaaaacctgcccttgaacacataaatctctt

SEQ ID NO: 80922 - DNA, 338 bp, Zea Mays
aaagcaagagccttctaattacctccttgagcatcactgagagatcaagcctaataattgatggatcaagatgccataaaagcaacctactacaaataaaagatatgactaaatcagtatattatagagagtagatgtttaaaagtccaaggagtaacaacaaaaatacactctttgcttaatatgtagcaaagagccagctccatcggtgtgaggaatcctgttagttgtgacacagttatttctagagtttgattcataagagccatattacacatactccatgtgtttaagaaagctgagcatttacatattggccgcactaaatgatgcaaaag

SEQ ID NO: 80923 - DNA, 568 bp, Zea Mays
attgagatggcggtggaggactactacgccgcgcgccccggatcccggaccagggtcgcgctgcgcttccgggactccgccggggacgtcgtcgccgccacttccgccggtaattacatacaatacaataagcctgatggttgcgatagattcactggtgtcagccacgtacctaccagtggcaatggcaataactgaagcgaaaattccatccctgcggttcccgtcccgccgcgtggaaaatctgtgctccgaatgcgcgttgacagttccacgatgatggggacgccacaggcgacctcgctttggttggtcggtccttgggaaaattgtagccggacggttttccgctcatagctagctgctcaaagtgtagctctccatctctcggtcactgtcactgtcagcagcggtggtttgtggatggtagcacttgcagatgcgtgcatgctggtgcttccatcggtaaattctcaacagagacacgtagaatctatctgctttaatttgcagaccaaattatccgttgggccgaaatgtttgtgggcttcagctccactattattcg

SEQ ID NO: 80924 - DNA, 396 bp, Zea Mays
gacttggagacagtctgatagggtgaagacaggcaaggaaagggctttgagtgactaagcgaaggtgaaggacaagcagatggcttgtggaccgaggtaccatggctaaggtgaagaagagagtacttgcaagatgtcgacacactaatcagattatgaagagtcatacagtgatgaagatcacaacattacaagacatcatttgaagtcatcaatttaactcaaatatgatgagatgattcaaatcataagactcgggggatttctagctcaagataagtgaagaagcatggtcagaagtccaaggaataggtatcaaagaaagaacctagaaagggctcacaattgtgtagactttgagagaaatgaccataaagtgaaaaaaaactagaaaga

SEQ ID NO: 80925 - DNA, 946 bp, Zea Mays
catgataagtaagattgtggaaatgctctagacattcagccatcttctttacattctcccaatcatagtcatttcgatgaccacatctttgcctctcttcagatagctcaattacatagttaagttcctatttagccattctcaacaacacctcatacacatttgtggccttcaacatttgatatgtgtaattccatcttgttgggacatcaagcttcaaaaatgctttgcaatccactttctcttcctctgcaatttccttgaacttgatcaatcttgaagtcccactttttatataccgaactgcatccctaacacgttgcatagaaagatccaattctttcaatccatctagcacaattaagttcacaatatgtgttgcgcacctgatgtgtaggtatttgccatctgcaatattggttttctgcaattgccttcccaagtaagcaacaccactatcattggcacttgcattatcaaccgttatagtcattatttttgtctaaacctcatttaaccaagcttttcatcaaggttttcccaatgttgtcccccttatgtccctttgccttcaaaaaactaatgactttcttgtgtagagtccaattctgatcaataaaacttgttgtgtaagaaaccttatgatgtgtaagaaactaaaaatgcatgcatgcatggtgtcatatatattgttactccttatttctttaacatgtgtgcactcatggatcggacacgtatgaagaatgagttctaactaaaccttctactctcctctcaataggaaggataatgatgtgcaagagcaagacaaaccaaaccaagcgactgtcaattattactatcatatcacattaccgaaaaccagctctttgacgaagtgccaaattatttaccgagtgttttttaggcatgctgatacaaaaaatactgtagcaaattgatt

SEQ ID NO: 80926 - DNA, 736 bp, Zea Mays
cttatttttaccatttttgtagaatttcctacaattttccaagtctgacagtaaaaagaaaagggaaaagaatgaatagtgctgggctgaatccagcccaagccgacccatcaacaggggaaactctcgcctgcacgtgcccacgccggtggttttgcacagagacccctagcgatttgaaaaactcgtaaagaagctgcgacactattcatgtgtctcactaacattcacacttaaaccttcacacttctttctcttcacaactctaagtccccgacggtgaacggcggcacgcttcggcgaacctgtatcgaccggactacgcaacgaccagtgtccttacttggtctacacctaattccacccctggcgatccaaatctatcactcaattgcacaagtctggcccggagttcttctgctcatgacaacgacaagatccgagaggtgttcccgacgactaggcgtggtatagtttaattggcgaggttgccgagtatcacaagcatactagagtacggaaacacgaaccaggagggcaagagcggacctgtagacggtcgaccacgacgaggtgactcgcggtggagcggagagtggatttggggggaacgaaattggggcgctactatggatgatcggaggcgagggctggtgctctgggtttgtaacaagtagacagaataggccgaggcatcaatttatagaggacggctgcaaggagggcgaatttggac

SEQ ID NO: 80927 - DNA, 667 bp, Zea Mays
attggtgttttaggtcgaaaaatttgtcttcggtttgacgaggtcttacgtgggcaaaacaattgacgagaacgtcttgatattcactgatttctttcctaacagatacagggttgcgacacataattgatcagatttgcctttccttacaaagcctacctactaagtgttcccatatgggccttccgtcgcctttctcctacctagctatgctccaatccacgcgcgctttgcgatgtttatggcgctagatgacacgtccatcttgtcgccatggttctcgaagtcgtggtcctggagaccaaccatcgtggaggtgagttcgtagttcgctcgctcgcaagtgtatgtcattttgatggatgtggagccgtgatgatcccacgtggttcaggcatcttcagctttaggtatgtgtagtttggcacgaccatgaacttggcatagcacgagctctcgagtatggcgttgtaggatcctgggaagtctgccacctcaaaactacaagcgttcggtgcggaaatcggctcggacgccaaacgtgacggggagagtgattcgcccgagggggtaggcctggtggctgggtatgacgccacggaacggccccatgcttggtcgcaacatggagcgtgtgatccctagtccatagaaggtctcaatggac

SEQ ID NO: 80928 - DNA, 713 bp, Zea Mays
taaaaataatctcgtcctcgagattagtaagaaaagggatatacaaagattgttttgtaattgagattctagtttctaattggttcaatatgaagagtttttttctttaattagtaggtgattagaaaaagcatgggtatcttttatgtgtagccacccaattatgtaggataaaagatgggtaggttagggcaagaatagtttgtgatgagaaagattatggtgaggaaaggttttcatcacgaatggtgggtcttgtctcatttggagatccggattggctcttatccttccttgatgacattgatgtcttccttctctggtcttggtttaattgagtcgaggtcagtgtattttatcggagttggagaaatatggtgaatatagataggggtgagatggactacatgacgtaggtgagaagtttatttgatgttaattgaaaatagacatattatgcaatccatcatgactctattggttgggttagctctacttaaggttagactttgttaggttagactaatctatcacattagatcagatctaggttagatcgttatgacaaaatagactagataagatctatttaatttattttggattagatcctggttgttactttaggatgagataagtaaaatggttaggataagacaaatctttcaatataagatggacctatcaagataagagagaatcttttaagataa

SEQ ID NO: 80929 - DNA, 452 bp, Zea Mays
aatttatatgtcgtgggatagtatgagtagatgggaagcatcataagtgttttagcctatgaattctttctgcatgtgaactcatgttcttttgtgttgatgtgcaggaagtgcagaggatcagacgcgaacatctagatgatgatcaatgtgttgttaatgatagagtgaaaggtcgtctaacagttacccgtgcatttggtgctgggtatctcaaacaggtaaagagactgtaggttgattgttatgaaaggtccatataggggaaacaagtaaattttaatgagaagtctgtctgatttatcgacaaggttcaatgatgagttgctagagatgtttcgcaatgagtatataggtgatacaccatatatattatgcacacctactctttgccatcataagctctccatcagggatcagtttcttgttctttcgtctgatggcttatatca

SEQ ID NO: 80930 - DNA, 583 bp, Zea Mays
cttttgctgacccaaaatatttaaaagagcaacatagacatggagtttgaaattatttacccaccattgccactagttatgagaaagcaataatctagactctaaagaagagttgcttcacctaaaggattggagtagagctactctagaatggaggagagccatgccaaacacacacataaaactccggctacaaccatgacatgagggggaactataaggtctttatgctcactagtgttggaacttgtattttttatatgttatttttatgaatcgatgattagcaagaaaacaatgggtattacacaatatgactcgaacctatctaactgaccatacggcgcttccacgcgtgtctaggttcatcactatcactaacatgcatcatgatccctgctaaccgtctctttttagtaatctgtgtatcctggtgttgttgcgtaatgacatataaagaacataaagttgctttgtttagaataagctactttcacataatacaaccttattttcggttctctgtttttccaagcgggtgaaaatagagagatgttacatgattatttcaatgaagatagag

SEQ ID NO: 80931 - DNA, 473 bp, Zea Mays
ttctagaaaaatagtaaaaatgtgaaatcaattatattagccttgtattggaaaaatattagatatcaagtatttgaaaccctttacagctgttttgttgaattagtgcttttcaataattggttaatatcattagattcgtcaatgtaaaatctctaaaaattggacatatgagttgattgtatatttagaggttgtagaaagagtttcacgtagaaataaaatatctaagtgatttttagtaatttgttccgtatatgctagaaaaagagaaattaggtgttgttcttgtgtgaagattaaatgagatagtaattttgtgtaaaatttagtagactgaaatcagaacattaaaaggataattggttatgtttaaaaggcagagtaccagaagagaatttaatgatgtatatatgatcatttgaaacacttgacaccagtagacaattggcactttaatgatgtatgatcct

SEQ ID NO: 80932 - DNA, 1278 bp, Zea Mays
gtaaatgcagtatgatggttttgaaatttcttcgtatttcgcggggcatagaggtcgccctaagatgagtaattgcaaacgtgctcgtgttggattaagtagacgcgagtgtaccgtgccgatttaagtcattaccgacttaaaccgattgctccattagtagggtatagtggtcaccccgagttaagtaagcgtgagcatgtcgcaccgccttaagtcattgccgacttaagccgattgctccgttagtagggtatagtggtcaccccgagttaagtaagcgtgagcatgtcgcaccgccttaagccattgccgacttaagccgattgctctgttagtagggtatagtggtcaccccgagttaagtaagcgtgagcatgtcacactgccttaagtcattgtcaacttaagttgattgctccattagtagggtatagtggtcaccccgagttaagtaagcacgcaggttgacagtgaacaatttgagtgcctttgaagtctttttattgataacatatttcttagcttacagagtacaatgtcgtctcagtagcttttgaaatatagctaggggtaaaacttcctgagatgttctatgttccatgagttcccaatttccgtgccatccatttgagtaaggcgatacgacccaggccgagtgacttctgctactatgaatggtccttcccatagtggcgacaatttgtgccgtccctcccccgttagaattcagcggaggatgaggtctcccactgcaaaggatcgatgccgtatggccttgtcatgatagcgcctcagagtttgctgatattgggctgactgaatcatcgtattcaatcgatcttcttctagtacatcaacatcctccagcctagtagcctcagcttctgctatgttttcaaagattaaccttggtgccccaaacttgagatcagcgggtagcactgcctccgaaccatagaccataaagaaaggtgtgtatccatgcaaagctcgactaggttgagttctcaggctccaaacaacatacgacagctctctgatccactttcctgcgaacttctcattcttgtcgaaaactttctttctgagcgcttccaatatcatcccgttggctctttctacctgtccgttggctcttggatgcgccactgaggcatatttgatctgaatgcttttttgtttgcagaaatcgaagaactctgaacttgtgaaattggatcccaggtcggttatgatgctattcggtactccgaacctgaatattatgtcttgtat

SEQ ID NO: 80933 - DNA, 339 bp, Zea Mays
gaggaagtttgggcaacaattaagtctcttcctaatgatcgtgcccctgaaccggatggctatataggaagattttataaagtatgttggaacgttattagagctgatttcatggcagtcattcttactctgtgtgggaaaccctaacccctgagtggggttgagagttgtattaatagacttggtagttgggccaggcccattacagtagggacgagagggtaaatacacaggagacaacaaaaaccccaacaggtactctaacacccccgcagtcgcaactctatcctgtacagatgttgagactggaccgaaagtctaggaatacactcgacacaa

SEQ ID NO: 80934 - DNA, 593 bp, Zea Mays
cgacatggtgcgcgccgtgaaatcctacatgatccggcccaaggtgacaagccactgcgtccccaggaccagatcatagccagcgagaggcatgacgaagagatccacaaggaacctctcggcggcgatgatgatcggcgcctgccgaatgaccccggggcagaggatgcgttccccgttggccactgtggccgtcagacgcggacaaggttggatgaccaagctcgtgcggcgcgcagcttcctctccaatgaagttgtgggtggatcctgtgtccaggagagccaccagcgtcgcggtgcccagttccacctagacttgcatggtgtcgcatatgggaactcccgccactgcctgcaaagaaaagactggagccccggcttcatggttagattctgcagcggctgcctcctcgtcggtgatggtcacgccatcgacgaagaagatgcggcgacagacccggttgtggccccggaagtacttctcgttgcagttgtagcatagtccaagacgacgtcgttccgcttgctcttcagtagacaaccgcttgatcggctggccgtcaaaccgcgttggtgctgccccaataggag

SEQ ID NO: 80935 - DNA, 403 bp, Zea Mays
agtactgctgctgctgaagctggacccactgaagccgaaagtgccgaagctgaaaccgctgaagatgtgaatctagacgccacactatctgaaattgataccatgcttctggatgcggccgcggaagaatatgctgcagccgctgaagagattccgggcacagtggatggaaaaggaaaggagaaagccgaggatatttcgaaagaagaggacttcaattttcaagatatacttgggcaagaattgtcgaaggttgaaaaagaagaactgaaagagtatgttatatcttgcgggtacagaccaggtgcgttactctttgggggagtcaacgaagaaagcttaggatgccttcgggaccacactggggcgaaggttgtcggcactatatcaaagagtgttggcc

SEQ ID NO: 80936 - DNA, 627 bp, Zea Mays
gaggcactcaagccctgcctaacacagaacccaacaccaaacttctcaagtaaagatgcaactgagtaacaagtgatatgtcgtctcactttgttgattgtaaagggcgcacttatcaccatattgaagcccatgtcgcttatgatgatcctcagcccaaagtcttatgcattacgatcgtgaagaaaatttaaccttcgatggattcgcaactctccaaatctccttggtgtcaatcatggaggtctagagaaatgggtttacaacaggctagcataaataccacgttcaaccaagatgacatgcaagtacaagatcattggttgttaccactagacatgcaacatagtggaagaagagcacggcgacatagtggaagtaattgtacatcattgcataccagcaacaacaacatgtaagtgtgctcctcatgtttgttgttgatcaacatcttagcaatagttgcaatatctccatggaatccatatcattcgaatgaaacgttgtgacgccacatgcgcagtgagagtaaaggcagtgatatcttgggcacctgtaactacagggagagaggtaatggctagaatgtttctctcttcaatcacgtcaactcctttatatatagac

SEQ ID NO: 80937 - DNA, 507 bp, Zea Mays
ccccagccaggaggccgatcgggtcgcgttcggcccactggacgccagcttgcgtcagccatgcataggatagcaacgtatctcggctgagacgctgcaaccgatatacgcacgcaaaaaggtatgtggaaatgtgcataactcatgcataaatggaaaagtttctgccacgaatcacgggaacgaatatttgcatgtgcatgccggtttacgattgcataacgctgtgagacatgatagcgtaaaccatgcaacatttaaaatctcccaccggtttgagataaggaaagacgtgctcttcgtgcgcgtaaataaaaccgcagttacgggaggaaacaaatacaaggttagctcgtccacgttcgctcgtccacgtctttatctcaggtattggcggcggttagcggcggcggaagttagaggtacggccggcggcgagaaaatgtccagcaccggagctggcgatgacatgccacctgtagcatctgtaaatacgccagcaggtac

SEQ ID NO: 80938 - DNA, 683 bp, Zea Mays
caaactgtagcggcgctgcttaacaatttcatatctttaaaattatgacagcagaggtaacaaccaaaaactccagaggcatctatataaaattccccacaagttttgtatacaacttatcattaaacaccaacatctaattagcccaaaaccatccacaaggtacatcctgcaatctgtttttttggacagcaacacacccggattcaaacagcgatatctcctaatttataactccgaattgagcgcataagtacttgttggaaaggtatgacaaagctatacataattctcatactgtttatcactaattacccacgaaaaatccccagaaactgctaatactactgctgtacgcccacctgcagaaatctgtttctttggacagccacatacctggattcaaacggtgatatctcctaaaatataactccgaatcgagcgcataagtactcgttggaaaggtatgacaaagctctacatgattctcatactgattcccattaattacccacgaaaaattcccagaaactgctagaactactgatgttcgcccacccactaaatttctggacagcacctctaccaattcgcatacgcaacatctattcaattgaattgcagcacaaataaacaagagataaacacaaaaatcaccttggattctccccttttccttcctt

SEQ ID NO: 80939 - DNA, 580 bp, Zea Mays
attttcccctggttacttttatcagtaaccttcggcatgtcaggaatttggaatgtgatggttctagaaatagtttatgcatattgactaccttgactaagttcgttcttttataccctacgtatttgactatctccaccaaattctttcttgaaaattgcgttaatctatcgtgttgctgaacttgattggatctgaagagaatcacattgatgagttatttttgtaagactagcttctccctgcaaatgaatagcacaaattaacattgttgcttatagatttgtgcgatttagtttttagtatatggtaagtggcataactttgttactttgttagacaactagcaactggtagcttgtgtgtggagtactggaatggacttcactagtctctgaatatgtctcttacatttcatattcttttagtggtagaagtgattatggaggaagctagctttagggtgctgtaatgtgtgagatctgccgtacataattcatatgtcaatatgagcatcagttttcatcactgtttgacctgaaatttgagataccatcatcttttttatagttgtaactcc

SEQ ID NO: 80940 - DNA, 500 bp, Zea Mays
ttctgggaacatgtctcaaggcaagaaaaatgtggccaacattccagtgggcaaaaatacaaggaaaactgggcgagtctactacacccaagtggcgaccaccccggaaggagaaccggtgatgatgggtacgttttttgttgccaaccatcctgtcgtcatccttttttattctagtgcatcacatacttttatgaacaagacttttgttgagaagcattgcatacatagtattgaatcaagggagggatttgttattcaatcacctaggggtcaaatctttactaaggaagtagtcttccacgtacccgtaagattggtcggacatgagttccctaccaacttgatagttataaagggacaagatgtggatgtgattttaggcaagaattggttagcccaaaataaggcaatcatcaatgcggatcaaaggactattcagctaagtcatggacaagaagtagtcaagttgtccatccctgtatatgtcccaattaaag

SEQ ID NO: 80941 - DNA, 657 bp, Zea Mays
tctcctaaaatataactccgaatcgagcgcataagtactcgttggaaaggtatgacaaagctatacatgattctcccactgattctcactaattacccacgaaaaattcccagaatctgctagaactactgctgttcgcccacccacaaaatttcttgacagcacctctaccaattcgcatacgtaaacatctaatcgattgaattgtagcacaaataaacaagagttaatcacaaaatcaccttggcttctccgcctttcctcgctacttcttccttccaccaaattccaattggagatttgcacccacgcgacgtagatcaagcgggagggctgcacctaggagaggagaagatgggggcggctagggtttgtgggatggtggctgcaagagtttgagggaggaggagatgagagaggggggcggctgcacaaaggctagagaggggggctgcacaagggggaggggattagagggagggcggctagggttaggggggctagtgggccggatcaagtttcacaccacagctcccgaccctagcgcatgagtctaaccaaaaaatttactgttttactggtgaatgcttcccaaaaattctaaatccctgtagcacaggacccggaagagaaaacaaagaaaaaaagaataatctt

SEQ ID NO: 80942 - DNA, 466 bp, Zea Mays
agataatgacctcaaaatagactagtccaaaattttaggatcctaaacagatataattccaatacaaataactccttgataatgatgttttctagaaaacttgtaaatacgaaagttttagataattttataagacttctagaaagtacaagaacactaaattccaagttcgtatgcgatgtttatgctcaaaatgccgaactggacaaagactaatctgataaggacatgatgataagataaaatatgatcggttttgtagatgggatcttttttgaaaatcgattttgtaggatggaagcggatggaaaggatcaaactgaacaaaaacaaatctaaaccagcaacaagaccttaacctaggactcaaactcaatacatctgaatctaaaaccaaattgtgcaaaagctaaggcaaaggttgtaggtcaacgaagtttgtaggtcaacactgacattttttttg

SEQ ID NO: 80943 - DNA, 506 bp, Zea Mays
gaagactgaggtacctaaggccacagaggagaagaggttcttgcaagaggtcaaggttggtcaagctgtgaagagacatggtgcattgaaggccacgatataaggacgtgacttacaaccattgttgtaatcatatggtttatggtttatgtcatacggctcaagatccagctcaaagaggaaagacatggtcattagaagtgcagaagtatcaaagtcagaacctagaagagcccaaagagttaagtatactttgacttatagttttggtcattcctatgtttggaaatgttcttgttgaccattgtagggtgtttgagctcaaaaatgaataatgggatcaagtataatatacttggagttttggagtccaatcccaagctcaaacaggccaaaaggagcaaaacaatgaaaaggttaagtatgaaaggtttgattacaccaacatgttgcacacaccttttactatgtgtttgacacattggtttgcactctaacttgtttca

SEQ ID NO: 80944 - DNA, 351 bp, Zea Mays
cagccatgggcaacaccggccaatggaaacgcaggggcaagcgcacgagctgctgctgccgcgagcgcgcagggggtctgcgaggggcacgcgaccatggccggggagagggatgggagaaggacgcgttgggagggaggggaagaagaatctgtgcgtacctggtaatcgctgtccttcacgcctgcgatctggatctggggaaagacaggaggttttgcgacggctagagcagtatttatagaaaatagaggatgtggaaggcggttgtaaaatttgtcgcgtgtcgcgtcatggctgagcgaaaaaaagacggtcacgcgacgagttgcgcgatacagtgtacgatgg

SEQ ID NO: 80945 - DNA, 400 bp, Zea Mays
ggtcgattaagcatgtttacattatggctaattaggattaaaggggatgataaactgctaatcttctggagacttcttgttatctctggatgagatcaccaccgtcttttgtccttcaacactcccccttgatcgtatcgatcctattacatcatctaggaatacaaaactattctatatctatcctattttgtgtattattatcttacaaaaaccctgtgggaaaaatagataataagacacatttcgtctgttgatattacctcattaaaaactttatatggtaaaacctctttgagggaaaaatccatacgaagataagagtataatataatgtcaactaggttatattctcgagagtgatactccccgtgattcttgcaaatctctaagtcgtctc

SEQ ID NO: 80946 - DNA, 429 bp, Zea Mays
ctggcgttactagaactaaaatttgagcatggcatcatatgcattgacgtgtcattatgtttgttacacctagaatgcatccactaggttaaaacttcaaaacaagtgtgatgtggtgacttgaagtgttcttaaccctagaataggttacttaaccatgggattagggtatatgggcgtggtgaggccaaattgagtatttcctcaaaaggttattggaaatgttcacaagagactaagtttgatgaatttgagtggcacacaaaccctagagtacccaaaaccctaaagagaaccttggaaaccctaatttgtgcgctatatggtgattttgatttctaggcacttttggaccaaattgcatatatcaaagtggtagggtatcaaaaaccaaactacttttacatttgaagatttctaagttgtgtg

SEQ ID NO: 80947 - DNA, 373 bp, Zea Mays
ggttgcttctctcacgtagttgttattttcacttgaatatattcctctatcttgttttttgctgctgcagacggaggttgattaccttggccaactttagttcctctttgttacttctgtcggataagacagagatagggtttaaaggcaacagtcggaactttttgtgcctaaatatagtcacgacactttcacaaacatcatttgcaaatctgaacactaggcttgatattactttgttttcatgttaacaaacggaagaggttattatggatccagtaggaattctgtgacatagttttactccttcgaatggcacgcagtaggttcacaaatttggtagagaccaagttacggaagtacttccacatat

SEQ ID NO: 80948 - DNA, 573 bp, Zea Mays
tcgattcggagttatattttaggagatatcgctgttcgaatccgggtatgttgctgtccaaaaaaaacagatttttgcaggtgggcgaacaacagtagtattagcagtttctggggatttttcgtgggaaattagtgataatcagtatgagaatcatgtagagctttgtcacacctttccaacgagtacttatgcgctcgattcgaagttatgcattaggagatatcgctgtttgaacccggctaggttgttgtccaaaacagattgcatgatgtatcttgtggacggttttgggctaagtagatgtgggaatttaattatcttttaaatacaaaacttatggggaattttatgtagatgcttccagagtttttgattgacatcactgctgttataattttaaagttatgaaattattaagcagagccgctgcaatttggtggtgatggggagagttgtcgctcgcgacgggttggaattgtgcgtaggtgcggcattgtttattagcatttgttatgtgaatttgtgcactaaggtgtgtgtcaaaaacaggtggtggacttccggatcgta

SEQ ID NO: 80949 - DNA, 275 bp, Zea Mays
gtttggctcaagagcagaagatggcccttcagcaagcttcgacactttggccgtttcaatatacctgggccggtcgtcaaaactttaaccttttttcctttcggcatggtatagatagccgaagcagcagcctttcttttctttccctgttttcgcgagggataaaaatagtctgggtacacaaaaccaattacatcaaaaaccatgttcaatcttttcttgcctcgccctccgaaggccactgtcatggcatcatcctcggccctcgtgtaggc

SEQ ID NO: 80950 - DNA, 397 bp, Zea Mays
aaattatctcaaagattaacaagtaagcccttgatttgtgaagtccttgattttccaaaggtatgtgtgtagtagatctgagagggagtgctccttaaagcctacacacaaaatgttatgcgccaatccttgcactatgatgagaataagatggaataagaacaaccacaatagcaaagaacacaagaacacgagatttacttaggttcggtcacaccatttaggtgccctacttccccgttaaggagcccataaagagctaggacttttccaacactattgctcccctcaccaaccaaacagatcaagatgaggtcactcactagatgctcgagagcaagtgatacaaacttcttgaggccttccacaaactcggagactctcaagcgatgactag

SEQ ID NO: 80951 - DNA, 466 bp, Zea Mays
agggattctgaaggcattggtgattttgatgttgatagcggtgcagatgatgccgaagaccgggcatggaggccaagccatgttgtcttcggaaaatctattgtaagaaaggtaagaattgagatgatgaagggcaaatattttcatgatatatccatagtgagagccggaggagagagcacttttcctcttcccgaggcaaataaagtagtggttttccgaagtttcatgaaggttgggctacgctttccctgcatagaatgttagtcgaagtgctgaagagttttgagatattccttcatcagcttactcctaaagctttggttaaagttagaatttttatctgggctatgaggagccaagggctggagccagatgctgattgcttctgcaatatccacgaactatcttaccaacaaaggcaattggaaaggaacaatattataataatttcggctactattcc

SEQ ID NO: 80952 - DNA, 352 bp, Zea Mays
gtgaaagccgcttcttcgcaggctctatataacctgtgtaacaaggccgtgacctgtgaagtacgtgtgcaaattccaacgtgtgtatacatagttgcactgcagcactggcacgtgtcagacgactacatatataagctaacacggtctatatataatggtgaaacagttaggccatagcccatagtaattggaatcaaaaccgtaacttacccatgattcgaattgcacaataattaaccattaggcattagctagcgtttgttatggaagaaaagagtagcctaactgagacgacgcgtgagctcactgaacgatcgtcatatatgcatgcatatgtgctatgcaaaaa

SEQ ID NO: 80953 - DNA, 454 bp, Zea Mays
gccattcttcccggtaagtctccgtgcgcgttcgccttttcctcccctttaattagtgcgaagtgcgttcgcagtggggtagtagaaagcggggtcgaagctcgcggcgatggcgccgtcgcgttctgcgtgcgccgccgtggggaagctcggctgcaggcggaggatagagaacgattcctggccgttgatctgatggtgggcggcctagattagaaggtagttacccccttagttcaatggaaccgtgaccgtagatctgtgcttcgacgggtgagagcatgcttgggtattttaaatccggaccgtagacagggatccaacggttgcgatctagtttctgtttgatccgcgcttgatctatttagaaccgttcgatgataatctggcggcccgaacttcgccataccctttcgcgctggtagttttgctaaagagtccccgaggaattcac

SEQ ID NO: 80954 - DNA, 465 bp, Zea Mays
aagcttcgtaacaagaaagagctttggcaaagtaaagaaaaattttcaacttcattcaaaaaacaagaaattcaagcatcagatggccagagtgcgttccatagctagggttacgcgcgacagagaggaagccaaaagtgctgaaactgccccaatctccaaagtgatgaagcgctcagggttggtagcatcggaggatgcacctgccgctgaagcagaacagggtgatgttgaggagactgagtctgaagatgattacagcgtggtgccaaataaacccagccacctggatttcgggaaatccaccatctctgaagatgatttgcctaagctgttgaatttgggctattttagtgaagcgaagaaagagctagttcattttggtggggaagagactactccgaagccaggaaaggatgaagtagtggtcttcaaaagtttctttaaagctggtttaagatttcc

SEQ ID NO: 80955 - DNA, 340 bp, Zea Mays
ccgtggcatacaaattgaagttacctccaaaaatgtctgccatccacaatgtattccatgtatcccaactaaagaagtgtgttcgattgccgactgagatcatagcagaaccagaattctagatagagccagatctatcgtaccaagagtacccttccaaggttctggattgcaaagaaagatcgactcgggctaaatcgatcaagatgtataagatccaatggagtaatcactcagaggaagaggctacttgggagactgaggaatttttgtgttccaactgccccgattgcctacctaaggaaattggtacgtaatcatgcccaacccctcctcctgc

SEQ ID NO: 80956 - DNA, 467 bp, Zea Mays
tcgatagagcaatcatgacagagaagaagcgcataatcttctaataactaccatgtcaacacccattcaaattgattcatccggtggtaaagttcgagccaatagtgtttgcttgaatgtaggtgtggaaataagggggatagagtttctcactaacctcatagtaatgggtactcaaggaatagatgttatcctagggataaattggctagataagtaccaagcagttatcagttgtgataagaggacaattaagttggtgtccccactaggagaagaagtggtgactgagttagtctcacctgagccaaagaaagaaggttgccaccagatggctattgatagcaaggaggcagattcgctcgagactatcaaggctgtgtcagagtttccgaacatgttcccgaaagatttactaggtatgccacctgagcggaaagttgagtttgccatagagcttcttcttg

SEQ ID NO: 80957 - DNA, 952 bp, Zea Mays
cgaagatggggggctttgtcgagtatgtgctcgtcacgtggacaaagcgaagtcccctcccacgaggtgagggttccgctagccttggttgaggtcaaaagacattagggacctagaccacagtaggggcttcatgccctcgaggccgaaagctctgtggagttccagtgcctacagtggacaccttccccaacgtaggccgtgaagattgaagcgaggactctatcgcatgtgaatacctcacctccctcaatgtgatgtcagagggcgggccaagggaacgatcatagagatcttgaagcgaagacccttgggacttggagccagaggaccgggcatgagtaacgcagcctaagtgggacaaccatcaagcaaggcaggcccacttgttggccctagccacactgcttggtcgcgggtacagtaatgggtgtaagtaggatctaagttgcactgtgttgtaatgaccccgttgtgtagtacattccaaggatgtagcaggtagccgagggcacatatgtactttagtcttttgtccctcagttaccctataaatactcccgcccggaaacgagatgggacatgattgacaagacattgagagctactattcatcatctgctcactgttttgccttgactgctcccaagtgtttgggtccacctatcagaatccaacaccctctttttacgtggaacattttatgtttgcgtaattcaattcttacttttacattactagaattgacatggtagaataaggttagaatttagtgtgcaaaccttttgtgatagaatagataacaatcttaggcacaaggtgtgaagtgggttatcctatatgatttaattgttgtgagaaatttatgattcaattgttgtgagaaattttaaattagtccagtccacccaaacacttgtgcatcttgattcctttatctcctataaattgt

SEQ ID NO: 80958 - DNA, 773 bp, Zea Mays
aagaaatctcttgctgtctttgcttcatcatctctcactaggtatgtgatcttagttggcacgaggcaggggagcagcgtatacactacaaatatatattttgtttatatgtatatactaaagtacgtatgtgatggctagcctcaaatttctggaggtttgagtgctcattctgcactattttttgcgggcgctggacatggggatggtgaagccatggtatcatgtccacattaagttctggttcgagtgctcgttctgtactatttttgcgggcgctggacattgagatggtgaagccgtggtatcatgtccatattaagttcttaatagaatagtatacatatagacacctcgtaatctgtttttctgctgccgtgaagattttacccctgctttatcggtatcgcacatttcctatctccatctcaagatactacgctgattggttggatttggttcccgaatggaaatgtctgaactgaaacgacgttcgtatttgaagaaacattaagcctgatgggaactgtctgcagcagcagcaccaggaactgtagtaatcaagcagccacagcttcagccgcttctaaaaacggcagccgagcaggggtataccacagcacattccagacgcaaactgaaaccgaaatatggtgatacaatcttttttcaaatgtctttttgagtgagagtaaggtgacgttgaaaacctgggcggcaaacagttgctttttgggtacaagttcttgcctctcccatgagatagggagaaa

SEQ ID NO: 80959 - DNA, 838 bp, Zea Mays
tcagcggctaggattagataggggtagcacgtgtcgctcgcataacttggagccattagatcccacattaacgaaccagtatctgccctgctgcccacttacacaaatcccctgatcaccagaccgactgtccatatcaaaacgacgaaaggttatctagaatcaaacctcggtcgttgatccctatatcaacatcacatggtcgtcatccccaactatctactagctatggtggtgcgctgatgcacattggcggagctatgccgacgagatacatatagtagtcctggtcaatccaaatccgaaactaattggggcaacatggtgccctgagaatggcgattcgatggggagatctgttggtatttgtgacccgactgtgcaccacggggttacccacatgatgcttttggataggacgacattgttgactatgacttgatggtacgtgtaggggcatgtcgatcttacacaaaggtttatacaggttcaggccactttagaatgtgtaacaccctacttcctattgattctgtgtattgggtttttctctggagtatgaatactacaagtgagttttgtgggtgcttaggtgttgtcagtgagggtgagtgtcaagtaagatggggtgagatgagatgattttgtaggggactcacctcagcttatatacatgaccagagagttatccctttacaagttgtgatcactatccactctacttatctcctcctttatcacggtttgcagccctacatatccggtgttcgatcaccttctcagctgagtcatcgccgaatgcctagctcctcatgtgtgtgcaactgcatcacccaag

SEQ ID NO: 80960 - DNA, 681 bp, Zea Mays
gagaagcggcccaatttcacggcgatgtccagctgggatcgttggttcgccgctcaccgtgaccagagtttactgcggcgaattgcggggtgagtaaccaaccatcgtgtttccctggtatagagcaccgttaggacttctcagattggagcttcgcgcgtgatgtcggggattagggctaactagccatggcgccgccgtgggggaaacatgctccggcgacgaagttgggcgggcgcgtccgttgtagcgcgtaccgttgatcctttatgcaacgttcacgattagaagcaggttaacggttcggccaacggcgcgatgacgcgtccgatcgtgattggacgattcctgttgcgcgctcgtattctgaatcattgatgcgggatcctgcggctattgtggtgtaccgcatggggagggatgagatctaatcctaagcgtcgaacccagatccaacgactgtagtcacccgataacgcttcggccgtgcactttcacataagaaccccttaagattttagaaataacccgcagtccatcccaggcgctcactgagtctggggatttattgcaccgaggcccttgcactctctgactttcatgcgcctagtccaggggaaataaaaatagagaattaaatatggaaattgatttttaatgcaaaagaaattccagaaactt

SEQ ID NO: 80961 - DNA, 538 bp, Zea Mays
tgtttagcttcttcttgagcgtcgtgagattctttttcattttttctaatcgcttcatcagctatctcacggtcgcccttcatccacacctcggagtaaaatctcccgcctagcgtaaaagcttcagccgaagggtctttaatgtcatctgctgagaaaacaaatcctggttgaactacagccttagcatgttcgcaaccagctttctctaagatcgacgtggccccccgtgcaccagcgaaggcgcaaaagtctcctcagtttaaaatttcgtcaaaggcttcgacttctccgctgatccactggacgactccatcagggccgccacggatgattttttgctcagaagaatatgccccaaccctagcaaagctgtccttcaatttcttggcgcattccaaggatatttcataacatttctcttttgaaacacgaagctcatcggagttcttttgtgctctagacctttcgacctcgtaaatttcatgcttcactacttcaacttcaaaattttcagcagctttagcaactttctttt

SEQ ID NO: 80962 - DNA, 524 bp, Zea Mays
atttctgaaaggaggttcgcgcccacatcgttttctgaacctgcgaagtttctgaaacggcaaaaatcaaggagtagtaccactagaatgatcatgcgaagagaaaggaacgggcaacggttgggtacttggctccatggagacgcacatcgatcggaatggccattgaccgcgtcgccgtatcgacgaacttatcggaagcagttatgaggttgtcttcaacaacatcctgtaaaccatcctgtaccctaaatgcagaggaccaaggcatccattacgtctccaacaacagtcgctatcagttcctctaaaatctagcgtggccttgtcgtccactatcggtggcggactcgtttccgctcgctatccgccattgactgcaggtctggcgcttccgtttgctcccgcgctggctcggacgtttcccatcgcacgctgtgcagcaactgtttacgactccgacgatggtgagggtgcacgaaggaggcaacgccaaacgatgtcgctccacgtcgccgtccagc

SEQ ID NO: 80963 - DNA, 299 bp, Zea Mays
gtgggtgtgtaggggttcctcttcgaacaagcattggcataatgcccaacctcaccacacttgaagcaagtggtgacagtagtagtgccctgaccagcaggtctcgccggagtgccagtgggggctgcctaactagtatgcggagtctgtggtgtcacctatggtgtctgctaagcaggtcgctggtgagactgtagccctccttctagacgagctggtgtaccctggggtggagcatagcgagggcggatgctactgctcccctaacccttggtgatagccttccgcatcatctcgcc

SEQ ID NO: 80964 - DNA, 434 bp, Zea Mays
cttgggcttcctttccatgcggcccacctccctcacctacttcgactcagtttggccagccggcctggtcctgcgggcacaccgtctcatgatgctctatccccgcgccagcccatttcgcgcatacatgcctgaccggtaggtggacccatcgagtagtgacttctctaactcccacgtccttgttgtgaccaccatatgggcccggatgcacagaaccatctctttcctctccgtgttacccatgtccatgggtgagcgtaacaaccgcgagcggttcactcggattgttttcatacaaccctagtataagactgggagcccacacccccttcgtcccatcgagttcaaccctcgtatgcggcatgggaaaggagaacatagagcatcaccatgaggatcagactggtagagaggaaacttgccactgcggc

SEQ ID NO: 80965 - DNA, 1262 bp, Zea Mays
gctattgtgcagctttcgtcctcaaaattcttttgaaccctcagggcgttgctcagaattaagctctatgaaaaagaaagataaatgtttagcatgagaataaaagctttattcccaaattcataaactttaagtttacaattcctgtaccttcaggctgttgtacgcaaggctgtccgcgaggtcatcctttgacatggcggaaaggccaacttcgagctttggaaatcccaagcttttagccatctcccggcatacaaatatctctttgttgtccaggagacagtacaagaaatcatcttcgtctgtgccattaaacaccaaggccccctccgaatatttcagtttccgggcgtaatgtttggcttctaagatttcttcttcggataatcttttccctgaagcatgtcgaataatgtaattagtatcttcggacggagctttgggagcaggagctttagtttttctatcacgacttgcctcgctgtcatactggtattcggagtttgttgctcagccttatcctcaggcgcagcaggcttcgtctcaatgggcactgaaggcccagcttcggcttcggcctgggctttgacagctttggcaactttcttcgtaggaaaggggtcaaggcttttgtggtctccatgacagcgtctagcacgctggccatcctccttctcttgggagttgtggcaggagcctttgtcatcttcggcaattctgcttctgccggtgggctcaaaatttttggcatcatcactgttttttccaattctggctctctggccgtatcatctttggcttcggctagcccaactgtagacatcttcggcactacaatcgatccttcagtgctctgagcagcgagagtagcttgttttgcttcggcagtggaagaggtcccttcaccaaattcaggcactacggccgtttcaatatatcgaggccagtgggttaaaacctttattttcttgcccttcggcacgacagtggtggctgaagcggcagttttcctcttttttccttgccttctcaaggggtagtagtaatcaggatatatgaagccaattgcataaaaaaccctgttcaatcttttcttgcccagacccccgaaggctgaggacaaggcatcatcttcggccctggtatatgtcccaagcaactcgtcgctagtagcctcaatgcatttcaaccagtcatcatttggttcatcgaacttctctctgtatctgaaggtgtatttcaatcgaactaatccacct

SEQ ID NO: 80966 - DNA, 563 bp, Zea Mays
ccttgaaattatagtagaacaaactgccgataatgtgttgccgcctatagcagctaatggcagtttccagcttcgaaaatccaacactcttggataaggtgcttatgattttcgccctggcgcggtcgcgaatgcatcccaaaatttattcgtcgaccccgccgaagagtacggacccgggctggtaaccgcaggatatagcgaactctttcaattctgatttatcctctttggaaagttcttgtccacccaggtgccgaaggtcaaatctttatatttcgaagaggtatcttcaattccttttcccatatcaggcgttgcggccatgttttcctcggcaaccttatatgatatgagtttgtcgatatccgacatcgtggttgcgagttcttcagcttcggctccggtggcatcttcggtatcgacaggcatcgctgcttttgccgccgaagctgagggcggtgtttgctcaattgcttgcatcacattcacaatccatcgtttcttttgccccccgaccttctcctccgtagccgaagcggtttcctttaattgtaaaaggc

SEQ ID NO: 80967 - DNA, 289 bp, Zea Mays
aatatcaccaagtgtggtttctagattaggatcttcggtggtctcagtttcggctccggtggcttcagcttcggtggttgctccggtggcttcggctccggtagtttcggctctggtggctgtggtttcggcagtaacaacgctttcaattatttttgacgtcgatgtcggtggtggcgtctgatgaatgacatcggccacttgcataattcttcttttcttcttcggcttggcaggactttctgttgccgaaggttctttttccttttgaaaaaacttcgtcagttct

SEQ ID NO: 80968 - DNA, 285 bp, Zea Mays
ctttagctaattattagatctagtgcattcaaacatggccttaacaccgcgggtatattttctaataaaaacttccttgcactttgtggtgacgttactgcagacctagtttttagtgtcatgtcatcatattaaacagtgttcggatgaagttgttattacagtatgtttctagggcatctgatcatgttgcaacaatggagataaacatttgtttaaccatctagtgagcacaacattgtgtgctggtagctcactttcatgatggttcaggataacattata

SEQ ID NO: 80969 - DNA, 766 bp, Zea Mays
cattttcagccagcagttcagattactcaaagttcaaattagtaacggaggattgtgaccttcattagctcataacctgtatagatattactcaaagttcagattactcaaaacactaatagccaattcgtgtagacctctgaacgtgtagacctctgtatgtgatttggtcatactgatccccatgtttgaacgtgtagtttttgcttcatgtgaccatttggtcgtactaatccccaaagattcatgttagtgttctctatattgtctcctggaatagtgggtgcaatgcttttatgtacactgggagtacgaagggtactatctctggtgtcaagttcccttccgtgatcatctttagcttcatccatactggccttatctacaggaacctcatcattctcattgtggtaaatttgagagagggtaggtttaattaaaagtatcattatcaatagacattgcagcacactttgtgtcaggggcagttcctgagtcagttctgatgtcagatgattttttgctcgcattgtgtgctttcataaactgctctggagtgctcaagtgttttccagtagcacccactacattgctaccagagacagtaggacctccactaggtgcatggacagcagagtcaacatgagattttgttctgatctctctaataggggtccttctgtcaatacgtctgctacttaatgagcctgtaccagcatcttctgtttcatcttcagagtctttagcttgagctcccagtatctct

SEQ ID NO: 80970 - DNA, 545 bp, Zea Mays
ccggcgtaggctcgatctatccggtgaccggacggcccagttggatgccgccacgaccacggtccacgacattcatgcatcgtatgtgcatgcatgtcccatagcaagagtctaaataaagctggttgttattatttcgtgttactcctatgtccgatagcatatactacaggattggattcttgtctcacgcacacacatactgaacacaaagcccatactagattcggatcttgcctttcacgactagattagtagctatgggtcgatttaattaggagagctccaaaactttatagaactagattttagaacaacttgaacttcgagagctgcgccatgaatgttttgagtctaggaagtaggaacagtatttttgggagttgcgctatggatgtttttttttgttgttgtttacagacagtgagcctgattgtaccactgattgagtctaggaacaatattttaatttgggagttacttgtacctgtaaaattgtacccctcgaccctcgttgagttaccccactttgtatccggcgcttg

SEQ ID NO: 80971 - DNA, 1116 bp, Zea Mays
cacgcgctcccagaagctccagggcacgacgtgtgcgcgtctcggacccgagcgtctaattcaattgagcttgctgtcgacccctctctagctctctctctcgcccctatgccctcccgcacccgcacccgcacccgcacccgcaccacgctgctgccactcatcgtcctacctccgctgccctccatctctgctccgcttcggacctcccccacttgcacgagacgtgaccaacactgcacaactatcgtccgaactgctgggtatatgttagtacaccaaggatgaagacgacaatggaacctgcttcaaagggcatcctaggagcggagggtgcgctacatgaaccaagagcaaagaggaaactgagcccaatagcagggcgaccggcctagactgggtgcactcgttcccctggcctgctccaacgtttgttggttccccaagctgcttggcatacaatctcgatggactttattgaagggctaccacggtcttaaagttttgactgcatattagtggtggtagacgtatttactaagtatgctcactttattccattgtcccatcctttttcagttgttaccattgctcagtccttctttcagcacgtttacaagttgcatgggcttttagttgctattgtgtctgagcgcgataagattttcacgagtattttttggaaggaactcttcaagctagccggggtcagtctccacatgactagcgcttaccatcctcaaacagacgggcaaacaaagcgcattaatcaatgtctcgatacttatcttagatgctttattttcacttatccttccaagtggccagttggattgcttcaacagagttctggtataacaccagccaccattcctctattggcaaatcaccatttgaagtgttgtatggatatgttcccaggcactttggtgttcaggtcccgaactcttcttctactgatgcaacatctccaccagaccaaacaacatctgttactgcagtagcatctccaccgggccaaataacgtttgaagcataaagcggataagcacaactctgagcgtacattccaaatggggaatttggtattcgtcaagctccaaccgtatgtcaaga

SEQ ID NO: 80972 - DNA, 558 bp, Zea Mays
gtgacatgctcatgcttacttaactcagggtgaccactataccctactaacggagcaatcgacttaagtcggcaacgacttaaggcggtgtgacatgctcatgcttacttaactcaggatgaccactataccctactaacggagcaatcgacttaagtcggcaacgacttaaggcggtgtgacatgctcatgcttacttaactcagggtgaccactataccctactaacggagcaaccgacttaagtcggcaatgacttaaggcggtgtgacatgctcacgcttatttaactcagggtgaccactataccctactaacggagcaatcggcttaagtcggcaacggcttaaggtggtgtgacatgctcacgcttacttaacttggggtgaccactataccctactaatggagcagtcggtttaagtcaataatgacttaaatcggcacggtgcactcgcgcctacttaatccaacacaagcacgtttgcaattactcatcttagggcgacctctatgccccgcgaaatatgaagaaatttcaaaaccatcacactacat

SEQ ID NO: 80973 - DNA, 692 bp, Zea Mays
ggagaacacaaggagtctggagatctaatggtggctgctcggcaagaatggacttgtggtgttctcaaatcacaaaaggacaaaaccgcaaatcacaaaaggacaacagatctaatggtggctgctcggcaaggaaaaaaatccaaaaatcgcggagatctaatggcggcacatgcggctagaggagatgcggctggagaacatagggaggctcatattcatcttatctcgttgcaagagtcattacttatataggagcttggatactcacataaaaatttaaaattgaacctaggtaacagttaaataattcagaccttggaaacagaaactatggaactatagaatacatgttaagggacaatgtggtaatatgacaacatgtggagggcaggatctttttgtaatgtaaagttgattaccctggatacatgctagcaacatactcatagggcctatggggtgtatatgtattctaaatggtaaaggacataatagaacaatgtagtgaggcaatcttaactgaaatctttggcatctagattttacttcttttgttttagaattcagttttgacggtttcatcagatgcaagactgttcgtttggtgagttcttgatatgttttaagatttctggtgagtgatgacctaattgagtttgtaatgaaggatctatcaaagtatgaataag

SEQ ID NO: 80974 - DNA, 821 bp, Zea Mays
gggggatgtaccctttggatcgttacccgtgcaagtggatggccgcgcacccgatttggggcgccctcgctagggtatccattgtcggccacttgcggagcaactcggccgagaagaactagcaccaaagacggaagtgggggacatatcgagacatcccttgcatagggcagcgaaagcggccatatgtagaaccccattgggattcaggtgatgcaactaaatcttgtaatggtgcaacaaccccaccaaaaagggtgagcaggcatcgtgaagccacactcgtgaaagtgtacgatcaaaactacaaagccctctgcatatgtggaacttcttcggagccgggaagcaggtagtcgccgttgcggaggaggccttgcgagacaagagcgtctaagcaatttttattggccagagagcagctccataaccccatcttcgctacggtgggtggtggcggcgtgaggcgatggtgagggggtgagtgaggccctaagaaagcaaaccttggaagaagaccgaacgacgccaagcctaggacgactagcccaccaggccacaaccattcgatcgaggacatacaccgataaacaacaagagatggtaactgacgtattgcctattttgatgtgtagggttaggacaggtgagacaggcgccccacaggcctaaccactaggtcgggagatggccacaccagaagtggtcccgtggcccaaacactattaagccgagactgggtgagacgactcgactcatcttttcaatatttcgatattcgatgttatttctctcttactggcaaagacctgtcacacccg

SEQ ID NO: 80975 - DNA, 310 bp, Zea Mays
aaataacatgttttcttctgcctcgcgggcttgcattgttcagatccggatggatctcgctactatcaagaagcgggacctttctgctgctgattattttcgtaagataaagagttatgtgtctgatctggcagttgctgctgcgcctcttcgtgaagatgaaaaagtggcctaccttcttgtcagtcttggaccagaatacgactccttcgtcacagccatgatcactaaaggtgaggctctaacttttgatgatatttatgctcattttttgtcctatgaagcacgtcagctccaacatcaagcggag

SEQ ID NO: 80976 - DNA, 525 bp, Zea Mays
cgaggaagaagaagaggaagtccccctagttcaaaagaacagtcggcgttacagagtcagtggggggagtagcgatattccttctccagctttgtctgctcttgttggtctgcaagaattatccatagcaaattttgatcaggctctcgaagatgtcgttcctgaagatctgctatccgaacccactggtggtgatatgatggatgtctgttctgacactccaggtgtggtgttagacgtatctcaggcagcatctcatgcatcgtcgaccttggaaggcggtcttcggtgcccagaggttggtcaagattgctcaattcccatggaggtggctgagaatccttcagccttagaggtggctattgcagagaactcaatccccaagggtggtgctggcgattgcccagcccccgagggtgttgccggtaatgatccggctcaggtgggtagcgcaaactgcaacccagcccccgagggtgttgccggtggtgatccggctccgatggacagtgcgagctacgaccc

SEQ ID NO: 80977 - DNA, 1028 bp, Zea Mays
ctgtgctgcagctggtgatggggtgtcaaactgtgatacattagaagttgaactgttctgcacatgcaatgcggttggtcttacatgaggataaccagatacttctgttatgttgttagcatgaagctgtttgatttgcttaggaataatatccccaaaacttgcagagacactggatgatagaactcgattttcattggcaaagttcgacttcaccaaagtggacgtggatgtgtgttcctgctggagacgtagagcagtcgattcactaaaacactcatcggtatcttcggcaatacctataagacaaagacacgtttttaatgtatgtttatggcttcaaactttaaattgagagtgactccttgcaagcaaaaaggcaaggattaatgaatcatagtgtaacttctacagtaaggcaaaaggaaatactgcccaccaggtatgagccagtaacaacgaatggcggaatggcaagctaattgatgatgattgaaatccatcggatagagaatttactgcagtaatgctcaaatgctctgaatttacaggaacaaacatatttctacaggttaacatagaagacaacaatatatgagaaatgtctatgaaggccatattcaaatccactagatgtagcatattcagtaacacgcattcaaatcaccatttcatttctatttctacaccttcaaaggttaagatatgaggcaatagtatacttcatgcaactagtcctaatatatcacaattgctatagacctaccacagaacttcatatatgggtgtaaaatgaaccaacctaatatacacaattcctcatatgccgcccataaaagaggatctagagtcaacgcttgtgtaaattgttcagctgcagctgaaattctgcctgtgcacctgcacacagttgagataaatatctgaactctgaagaaatatagaatgcagcaacatggattcagttaagccatgaataataaacctgtagatcactccaaggaggtagtgtcctgttgctccacttg

SEQ ID NO: 80978 - DNA, 1191 bp, Zea Mays
ctataacaaagttgtagagcttttatacagaaacaactttgttacagaaacttaggtgtgttgccattgaaatttaggagcaattgggccctaaatcctggctgtcaggtgactgaagaacaaacgccatggtacagtagaccgagtggatcagaatgccagcgtaacttgctcgccgccggtgacccccccctgcgcgaagattcacgccgccgccgttaggattcgcgttcgcggcttgtggataacctctcggggtaaaagatcctcgccaccgtcaagctggaagccacagccacggtactcccccccggccgtcggtcgaccagataagtctcaccgccgtcgtgttgccgccgttgcacgccacgtgcctctgcgctggttctcaccgcggtgatgcaccggatgcatgtccggcgatcaccggaaccactgccacgataaaagccacgtcttccccgcccagagctcgctttccctctccggccgccagcacggtttagccaaattgctcaccaccgctcgtcctccatataaattgagtgcgccacaatctccgtagggcagtaagctatccagccaccgtgaatcagcctcaatcattcactgagagccgcgaatttggagttctccccaaatcgttttccgccgccgtgaacccaccccccaccgtggccagaccactctggtaaagttccgcgcctctcaagtattgttttagcatctgtgtaggcatgtaaagctcaccgtagcatccgtttgcccaatccgggcctgcataattgggaacatgggatcgacgccgcggttctcgccgtgtgcgtggacaggccgttcgcagggcgctcttgtgaaattaatgcgtgttccgaggccatccttggtcagtaaagcctccccgatggttagtccgggcagtcgtcgccggccatggccggtacagacctcgtcggtgatgaacggggagcgcgccatgaccaggggtactcatggagaagaattagaaacccgagggcatttctgcaatctgtcagtgacttaatacaatagtgaatggacctatttctgtttagccgttaagttgaggaccttgctgcaaagttgccaacgcgggcgtgggcgcgccccggtttcacgtgctgttgggcctcctagtttgaaattggcccagtactgtttagagttttt

SEQ ID NO: 80979 - DNA, 920 bp, Zea Mays
ttaggcgacttttgctcggatgagtgatgcgtctgtgggacggcttcacactcttaggtgacttcgcgcacttcttgtgtgtatccgactgcacccttaggcaactttttgctcgaatagttgatgtgtctattggacgcctttgcacacttcttgtgtgtatccgactgcacccttaggcgaatttttgctagatagttgttcgtgtcaaacacgacggctgacttggttacttgccgttgcggtgactactttgttgtcgaatagggtaggctagcttggtggccgcttttcaacatgctcgggctatgctctctctttttttgttggggaggggatttcctgcttgttttactacatggcgctgcctcgttaaaaacctcgcccccagcaaggaaaagattacgggcctgagaagcaatgtatcggttgtttttacaaaggcacgatgggcctgatagtgtgatgtgctataggaagcactttctcatgttgtctacattccaagaatacttgaggtctgcccctgtctgatctacgagcctatatgaatttggggatgtcttcttaacgataaagggtccttcccactttgattcgagtttgcctcgtgattctattcttggtgctctgatgaggacgaggtctccttcttcaaattcttttggagtgacagctttgtctctccagctctgcattgctgcttgatatttatctagtgtattgaggtagcgagcccggtctccatcgaggagatcttttgcagttggctcgttgacaaatttgaggttaccctgagcagtgggaagtggccctaccatgttgaggacccagcgctgcggaggccatgtgttggagattcgctttgtgagctgcaaaggtgtcctactttgaagggcaaacttctggcaggattcgct

SEQ ID NO: 80980 - DNA, 1285 bp, Zea Mays
gcgctgggggacaccttcgacttgacgatgaatggaccctcccactttggctccagcttgccccgtgactctgtcctggtggttcggacgagtatgatgtctccttcccccccattctcttgggacgactgcgtggtcgtgccaggcctttgtttgagcttggtatttgttgagggcctgcagggcgaagacacagtctccatcgatgaggtctttggacgttggttcgtctatgtcggggatggctgatgcacttgttcgaggtgacccgtgctttatttcctgcggggtcatggcctctgatccatatagtagacgaaaaggagtgaatccagtcacctggcattcggtcgtgtttagtgcccagactactttagttagttggtcgacccatttacccttcctgtcgtcgagtcgccttttcttgatagtagtgaaaatcttgccgttggcgcgctggacgatgccgttagattgcaggtgatatactgaggccaaggcaagcttggtgccaatggagaagcagaagtccctgaagtcctggctatcaaactgtttgccattgtcgactgtgagctcggacgggactccgaatcggcaaacaatgttttgccagaagaatttttgggcagtcttcgacgttattgtgcatactgcccttgcctcgatccgcttggtaaaatactcgatggcgacgaaggtgaacttgaggttcccttgagccgtgggtagtggcccaacaatatccagcccccagtgttgaagtggccatgtgtgggcaatcagctttgtgaattgcgaagggttgcccgaacggggagaaaacttttggcaggcttcacacgacctcgtgactcgatttgtggcgcagattatagcgggccagtagaacccttgacgtatcaccttagcagcgagggccctaggccccgagtgagagccacaagttccgctgtggacttcacgcaggatctggatgccttcggtttcggtgacgcatttaagcatgggttgactgacccccttcttgtatagctgaccctcattgattgtgaagtcccggcttcggtgcttgaggcgcttggcctcgttgacgtcgcttggatggtaatatccttgcaggaacagagttattggggcccaccaatcttcggtcatgatgaggttgactatgcgatggccctcggtgtcattggttatttgtagaccctctgggactgcggacggctggcatgccgatgacgtggtagaacacgtcggagggcaaggcttcacctctggcggc

SEQ ID NO: 80981 - DNA, 671 bp, Zea Mays
ccggagttagataacgcatacgtggcaccatttcccgagtccagccggagacctcaccagcggccaccgtgacccagtgactttgccgcggtgtcacccatgccgcgatctccctcactgtgtcttctaccgacgtggtaaacatgcgctagcaaagctatccggggccggagatcgtctgccgggtcgccgtggctataaatagcacggtggtccacggcggggtatgaacttcgcacacacagtgagtttattgatgcctaaattcgcactgcctctgccccctcctcccaaattggttgagcacggtaaaactagagtcccttgccgccgtatagccccaagctccgccctcaatttcaaccaagcacgccgtgacgccattttcccccaaattagtccgccgcgccaccgtgaacagctctgtcgtggctagcccactcgggtaagactctgtccaattcatgtgttgtttttattgctctatgtgctagggaagcttaccgtggcacccgttagctcaatttggccatggttaagcaggaacgcgtgcccatggtcacggttttcgccgtgcatgtggacaggccattctcagtacgttcgggtcaaattaatgcgtgttccgaggccatcttaggtcagtgaagcctccccgatagttagcccgg

SEQ ID NO: 80982 - DNA, 917 bp, Zea Mays
atgtaaaaatcccttttttaacctctgccagtcacggtgcagtggatggaagcacgatggaaatggcatagaagtgtgcatatgaggtcagtttgctggcggatggggaaaactgagcacgaagtaaatttaggggtagcaagaaggagagggtgccaaataagggcacaacctctatcagtcatggtgcagtggacggaagcacgacgataatggcgtagaagtgtgcatatcaggttagtttgctggcggagggggaaaactgagcatgaagtaaatttaggtgtaacaacgaggagagcgtgccaaataagggcacaacctctatcagtcacgatgtcgtggacggaagcacgacgaaaatggcgtagaagtgtgcatatgaggtcagtttgctggctgaggggggaaactgagcatgaagtaaatttaggggtagcaatgaggagagggtgccaaataagggcacaacctctgccagtcacggtgtagtgacggaagcacgacagaaatggcgtagaagtgtgcatatgaggtcagtttgcttgcagagggggaaaacttagcacgaagtaaatttaggggtaacaacgaggagaagttcccaaataagggcaccaatgtaaaaatcccttttaaacctctaccagtaatgatgtagtggacgaaagcacaacggaaatggcatagaagtgtgcatatgagatcaatttgttggcggaggggggaaaatgagcacaaagtaaatattggggtagaaacgaggagagagtcccaaataagggcaccaatgtaaaaatccttttttaacctctgccagtcacgatgcagtggacggaagcacgaaagaaatggtgtagaagtgtgcatatgaggtcagtttgctggcggagggggaaactgagcacgaagtagat

SEQ ID NO: 80983 - DNA, 537 bp, Zea Mays
cttgaataccttgtggagctaagggtatgctcaatttataggattcatgagcagtggtctgtgaatttgagatgtcacggtggtggtcggagagaaggggggcactggcgcaagcaattggtggctttcaccgtggcgagctcaccgacgatcaccgaatatgtgtaacccgagctattgcgacgtggtaagacaccaaggcacgtggcacacgatcattgagcggctaacgccggcgaggatgatcccgaccagctgtggttcaagtgggtacggctggtgcaaaggtgagcgagtccaagctaatccgagcgccaagatttttactcttcaccgttatccatctacgctaggcatgaatcaccacggagggcaaatccgggcgcacggtcgccggcgatgaggcatctgaacctggcattctgatccagacactgtaccatgacactgcctattcagtcggtctgtcagagcaacttgcaaggagatttgttcccaaattaatgtagtagctctatgatccagctacaaatcgac

SEQ ID NO: 80984 - DNA, 327 bp, Zea Mays
attataaacattgaagtatattcattaagcaacaagaaaggttgagaaagcttggccaaaacaactcaaataaaaccccaaaacaagcttctcatgtggggacttaatgggaattctgtttcagaattctgaaattcagaccttgagccaaagatcaagcatgttcaccttgatccctaactcgaatcctaatggccccattaacaaaaatgtgcctaactaacccctctgtcatgtgccaggagatggcattgggacgcgtgcctcggacacgtcaaaccagagatcttctccctgtgtgtggcagtgagacaaacaggatttctc

SEQ ID NO: 80985 - DNA, 313 bp, Zea Mays
tcccgcacattttgcctggccagtcctcatacgtcatccttagagccttaatatgacacgccaaaattggatgacctcttcacccaggtcaaacaccgataaatcacggcatctatcgttagcagcaaaacttagactcacttggaaattgaaattgatcaattgatgcatttgatggcgattaatcaaatggagatgggtcggtggctgcattttatcgacgcgcgcgggccagaggggcagggcgaggcgacgagcggaacatgtcaaaatggcacgaggtgactgaagtgagcgcatagaaggggttttt

SEQ ID NO: 80986 - DNA, 404 bp, Zea Mays
gagagaggcagtggggtggaggaaaaagggaaatccgactcatcgaaaacgacatggcgagaaatgaggactctgtgggaggcgaggtcaagacaccgataacccttatggtcgggagagtaaccaagacacagcgcgtggagcgaggggcaagcttatgaggagcagtggaagcgagattggggtagcaagcgcacccgaaaacacgaagatggtcgtaagagggatggatgccgaagagagcgaagtaaggggtggggagggcaaccgccttggtggggagacggttgagcaggtaggtggcagtggcgagggcctcagcccagtaacgagcgggaagggaagcctggaagagtagagagcgcacgacatcgttcgtcgtgcgaatcatacgctcagcccgg

SEQ ID NO: 80987 - DNA, 428 bp, Zea Mays
tgatctttcatttcttatatgttgcaaggacgcgtataaaactttgctataacaaaattcaaatatgcctattcaagcatgcatgaaatggtaaagcatcttatctaaattgattataaacatgcataaacagtatgatacttgcagtgccactggctgatttatttttttactgttgctgatgagtttgcttgcagacctaattgaggttcaggttttttatgggcatgcctttttgaaccatttatctggtatctggtattgtggtataccaaaggctagaataatataacatatacacattgttaatgttattgtgagtgaaattcagtagcaggctttttttatgatagcttgctgtatggatgcagtgctccattattgagttagatgcaggaatgctccattatggactttttcttgatttg

SEQ ID NO: 80988 - DNA, 657 bp, Zea Mays
cgatcacatgtgtcttgtagcacatcttgggcatcgggcgccgacacatcggcaagtaatcggtcaatggctctgtcgtccagtgcctccctatggcgactaggggatccaagatggaagggggtcgaacattgacgatggcttcacagacttcagggactgtatccagcgctccatcatatcctcgtcgtctcagccatgcataaatgtcaaatcaaagggagaagggtctctattacaactgtgatgaggtttactcgcgtgggtatcgttgtcagcccctattccatttggaagtgctcagcgagggtgaagaggatgattcactggaggaggaaccaaccctatctgtaatagccatgaagggtctgaagggcagtcgcactatgtaggtcattgtagtaatggggtggacaacgtctggtgggcttagtggatagtgatagcacccataactttattagtagccatgttgcttctttggtgcagatcacataatcgtcagggactggacagaaggtgcaggtagcctatggcgctcgattgccatgtcttgggcggttgtcagatgtccagttttgcattcaaactcacatcttctcagactcctttttggtgattcccttagaaggtttcgatgttgttttgggggtgcag

SEQ ID NO: 80989 - DNA, 428 bp, Zea Mays
ttcaactatgaaatccataccaatttgttcccatttccaatcaggtaccttgagaggttgtaataatcatgttggcctttggtgctcgactttaactcattgacacacatcacatagtgcaacatgagtggcaacatctctcttgaaaccataccaccaatatttttccttcaattcctggtacatctttgtgcttccagggtgaatagagtaagccgaatcatgagcttctctcaaaataagttggcgtaggtgttcgatttccggtacacagattctctttttaaaccatattgtgccttgatcatcttccgtgaaatctaggcctttacccaaacaaatcaaagttttaatttccttaattttctcatcagcttcctgtcctttacgaatctcttgttccaaagtagattaaacttccataacca

SEQ ID NO: 80990 - DNA, 598 bp, Zea Mays
acacgaggaaatcactgcgtgcagtcgaaaacaacaaatttctaaatttcagctcctatataattcaagaattgccatgttttagagacttgaattattctaacactttaccatttgttagagttaaactaatcaaatgaggactaacaagtagacttacaatttttactcaagtcatttagtgcactaaaattaccacatacatttaacaaatgcattcaccccgtacatagcatcatcacacatgacctcgacttaaccgcaaaggaagagatgactacttcggcatgtcacaacctctctaccgaccaaatcaatcttaactacatcgatcggacctcatatcacgcaacatttataatttactatctcaaatacaaccatatcacgacatgtacttgggacacttcggttcaacttacgccatcactactacaacgcacttcggcacatatgtttgataacacacctttctaaattaacctatctcatcttccaaacaccaattatatgtcacgtttacatttttcacctaatttaacctacaccaacgatgaatacataaatataattatcctagaccaactcattagccgag

SEQ ID NO: 80991 - DNA, 498 bp, Zea Mays
cgcgctccacccggcgagttcggcggcaggcgcgacgagttcgactcgaggagggagaagacggtcctggcattctagccctaaccgtattctgttggtgagtgggcaggcgagttcgtcgcggcgggattcgtggatccgaacgtaactaacatggggaagaagactggcctgacttgcgggctcacaaagcagcgagcagatcgggagcgtgggtgcgacatcgctttgatgacgagtgggccaaccgagtcagtggtcatggtggggcatgtgtgtcgttcaggctgtagctggtagagccaacgtgccagcgcaagctactaggcgaagtcagcggcgagcggcttgggatgtagccatccggcttgctccacgctgcagcttcatggccgaaatacggatgccagcaagacatcagcttcacagtacagtggccagcgagtaggccgcgtagtggcccttcggccaatgttctgggccaaaggtgacatcccc

SEQ ID NO: 80992 - DNA, 399 bp, Zea Mays
cttattcataacccgagtggggtcattgatgccactgtacagataagcagggtaggccttgtccttcaaaggctggatattcttgaaggtaaaatcaacaaccacagcctcagcagttagacctctgtccttcagcaagcaaacctcggtgagcagagttttagcctctgctatctccgaaggagtcagagactctacctagcttggagtgcggacatccggctgcctccctaactgaggggggagagactggcagtggttctccacaataaaccactcgatacgccaccccttgatgctatccttgagggggatgtcgaggtactctatcttcctcccgcgacgcatctctagactcgtgccaccaacaagctactgctgtctccctgtcattccagg

SEQ ID NO: 80993 - DNA, 574 bp, Zea Mays
gtgaaatcttcctctgaagcctctcacggttcctatacacctctgtgcttcttctattcgctagcgaaaatcattgtctgccctgatgtattcatccattttttcaacatcttctctaggaattgaggaggtttcttgacaaagtattgggcccctagacttggatgaagcccattgatcattgctttagtgacgatttcatttggtacagttggtgcttgagcctggagccaaaggagtcttcaaccataagcctgaagatattcatcctgctcttgtgtacactggaacaaaacttgtggagtaatggaatttgtctagaaaccatgaaagcttgtgaggagcatatatgttagcttttgccatgatgggacagttcctagccaaagggaagaataccaaatttaagccacatacctaaatgccatgacaaatgactctatcataattgccccatggccaccataggatgatattgtagctttgtagctcatcggaaactactttagatatgataggtcgtcatacattggccattgaggtgatttgtacagtggtggccatgacgtagctt

SEQ ID NO: 80994 - DNA, 769 bp, Zea Mays
acagcgatgaaccgagctccggcgaacctgtaccggccaagataagcaatggtcgatgctctaacttggatgtcacctaattcaacacctaataatcgatttccctcactcaattgcacaatccgagccctaaatcgccctgtccatggagacagtgtgaactacagatgaatagaagtgttcccggcgatctagcgtggtctagcttaattgaatgggtcgaggagcatcagtggtatgtaagagtgctgaaacaagagagcagagggcaagatcggacctgaagtgcactggccaaggtgagagcttgttcatggtggcggaaaactaatttgggggaactgagcaattcgggggctctggagagtaattggaggcacgagtgggtgtgttgagtgcacaattacatagcggtgtcgagggtgtgctcaatttataggtcccttgagcggtggcccgttaatttgcgattgcgcgatggttatcggagagaaggggatgcactggcgcaagcgattagtggctttcaccgtgccgagctcaccgacgatcaccggatatgcataacgcgagctactgcgacgtggtaagacgccagggcacatggcgcaaggttgtggggtggctaactccggcgagcctatccaaaggggttgtgactcaagcgggtacggcggccgaagtagaatagtggccggagtccatccacagcgcgatatttcttatctccttgccgttatccaactgcgccgagcatgaatcaccgcgg

SEQ ID NO: 80995 - DNA, 757 bp, Zea Mays
gcggaggatatgatggagggtatgatgtgtagtcagggaagaaggtcctcatcacgtcttcctcgagtgaggagtccctagggggctcatcacccgcagaaaaaccagatgccgaagatgtacgatgatgaggaggaggtggagggtggtgatggtaaccagagccggatggccgcgggtcaccaggaatgggtcccggacccgggtagggaggaggaggacagtgaccagagccgaatggcctagggtcaccgggagtgggtccctgacccgagtagggaggaggaggatgaggagggtccgaggtgaagaatggatcatcatagtcctcgacctcatcctccagggtaatgaatgccacaccaaactcctgttggtgccactcattaaggtcagtggggatggtaggggctagaggtggaggggacccaggagggagaggatgaccagtcacggctgcataacgacgaagatcctcatgcagccagtcggtcctgcgacggcgcacagactcctcgaccgcccgggtgcggcaaatggcgaagacaccaagaaggcccttggccagacgaatgaacagtcctcggcctcggccctgaccctggcccggaccacttcctctcccgctgcggtccatcggacgtgaggcagcggcggcgcgagaggaagatgggtgatgaggaggctgaggaggtggctcatcagaggaagcagggctgccagaccctgagggagcccgcttcatacgagcagctgg

SEQ ID NO: 80996 - DNA, 454 bp, Zea Mays
gatgtcctccgtttttttctcattacttgtggcattccacatccatgtacatatccatctgatctcttgtggaatatcccccaatattttattgtgttaaacctttgattgcttcttactatcatacttaagtatactctttatacttagctttcatgttcaacacttaacaaaataggttagtcctttaatattgttgtcatttaatccaccaaaagccacaaggggctagatgcactttcacatacctttataaacgtgttactcacttcctataaattttcttgaaggatgaaatatggctttagcccccgaagacttagactagctaggcagaattggggcccctcaggggaaaggcagaagtaacaccgacatggctctgctattgtctcgtgtgaaagtttcgacgtaacctcaacctattttatcacactctggtagtcacttcgac

SEQ ID NO: 80997 - DNA, 606 bp, Zea Mays
ttttcgaagtttagggaattatttttatacttaaaatactttctatattcattttataatttcctgaccgcgcccgacattttctaagaatgcagggttctgtttgcaaatactagggcctcggttgtaagggtttctttactgccgaggacgacgggtttatttaaaagaagtcagagggctctttagcaattatctacgaccgaaggggtatgggccatcctggaccgttgaatcagagttggacgtatgagattaaatcaagtccatctgaaccggtacaatcgtaagatcctaatcctacggtcacaattttatgaaatgagatccaataggatccgtctgttaacagatcagtggtccagatcgaattttcgagccgccatctacctcatcattctttagcccacgatcgagatcccacggtcaagatctccccacccttcatcacagatccgatggctcacgagtttcttctccccccagcgtcaagtaagctgagcggcggccttgcccagccgcacggtggcggaccatgccgcaggccgattccatggcgaccccgagctctaatctctattcaagcgagtgttacgcgatatatga

SEQ ID NO: 80998 - DNA, 851 bp, Zea Mays
atagatccaaaagctcaacaggtttacttctgtgtgcttttgatattgtgttgtctgcagtaagatagattatgcctatatccttattccattttctttccttattactctacttgtctgccagcttgcagaagcagcaggatcttcattggtgtccattatcgtagatcacatattcctctatattaaagatactggttagtagtagtgccaaacaatttcagatatcaacctttttgtcctgctacggtgacttgtttattaaatcattggtgcaaacagagtttcaacttgaacttctcatgcggtctttgttcttctcacgggtaattttctccaagacttcaactgctgttatactttacagtttgatttgttcactgttagtactgtccgctgatgatatgcttgatttagaatgcatgacctcgtagaggatttaattacaagtttttctttatcttaaaggcaagcatttcagacggcgaatgctcaaagaacttatcttgcatcaaggtcggcgggatgtttctgaggtactatatctgtccttgttactcaagactacacaagtcctgatggttgtgtcattcacttacaaattgaggcattgtgacccctcacgcctaaagtattgaatgacattagaccaatattattttggttaaggcataactgaggttcctgacggttctgaatataggatattgtgactgtccgtgtcaaaagtatcaaatgtcatataactgtcattaacaatgaacttggctgacattgccccctcagtgtctgattcacgttttttttcctggtgggcacgctctatcaagctggtgcccaaaataattcgg

SEQ ID NO: 80999 - DNA, 296 bp, Zea Mays
tttgtttctctcgaggaagaccgctatgcacatgaggtggcataaagattgtacagacagacaagatgggttaatggtgcacccgtcagatggtgatgcatggaaggctcttgacaaatttgatccagatttttccagcgatgcaagaaaagttcgtatcggcttggcaactgatggtttcacgtcgttcaatatgaccactgcgtcgtattcatgttggcctatcattgccataccgtacaaccttccacctgctctttgcatgaaatatgagtttatgttcctatgtcttgtta

SEQ ID NO: 81000 - DNA, 779 bp, Zea Mays
attcgttagtacaagaaatttgtatcctcctttccttgacaaaatctatgacatcctgattcaaaatggaaatttcctacacaaacacgtaagcagttacaataagcaacgtaaaagttctataatagtgtatcagtcaccttcaaagtggcatcacattagctgatcctgatcgtcgatgttgttagttggtgtctgttgtcctacactggttgtgtaaccagataatgtgagtcaaccagtgctagcctcatcttcttcgtgccacacatactgaaccaaagaaccattttcatttcttacgagctcttgctcttcaatttattcaccccacatgcatacaacacgttgtgtagctacaactagattgacttttaacagtgattattgtttcagcaccacacatctcagtcaacatgcatccatcgatccttaccatgcagcaccatgacataataacatctcaggcaagcatggcaatgaggcacaatcatgtcagcagactgctcatctgcactagaatgtgtttgctcaaaagatattattcaaaatttagctgaaaaattttgttcgttgcacaattattgtattgctttgtttgttgaatattatttccttggtgatgggctgctgctgctagcaaaattgagaacggatgggttgtaagctattgttggtgcctggtatcagagagggagacagggggtgcacctatccacaatctcgaggtgagaataccgaaactgtctaagagacttctcgaggtgagaatatcgaaa

SEQ ID NO: 81001 - DNA, 325 bp, Zea Mays
agttatgattaaaacaagtaactgctgtattgctgtcaaaaaaattctgctagtgcttatttaattgttagttcacccttttggctaaaaatggttggttagcactaaattaatatagacttgtcatgactaagcgtaataatgcatgtgtgccatgttttatatgtttcttctttagttgattgtgatatagaatttccatagacattgatgcctatgtcatcggttaaacttgtgttggatgctttggtgtgataaatagaagaactaatgaaaagccgtagcaaattaaataaacgcttgtacttatggggtcgtatttgtg

SEQ ID NO: 81002 - DNA, 542 bp, Zea Mays
gcactggcaagaaatgagcggtcttggtcaacctgtccacaataacccaaacggaatcatggtgcctggaggtattgggcaatcccacgataaaatccatgcaaatgtcctcccatttccaagatggtatgggaaggggctgcaaggggcctgctgcctttaagtgactggccttgatcctctggcaggtgtcacactcggatatgtacttggcaatttccctcttcatcctggtccaccaatatagagatctgagatcatggtacatcttgttgctaccagggtgcatggagaatttggaaaggtgagcttcatctagtatcttgtttctgagctcagggtccttgggaacaaccaatctatctccaaaccatagaactcccttgctgtcctgtcggaaacacttgtatttctctgccttttgcttgaccatttccttaatcatttggacacccttatcctcaatttgcgcccttactatttgctcttgcaatgtgggttccaccgagatataacttaagtcacccgaagaaacaacttcc

SEQ ID NO: 81003 - DNA, 695 bp, Zea Mays
cgagttgctagtgtgaagagcaagtcagaagtttgagtgtgatggatcacgttgcagtgaaggtagagaaggacttagcaccgatggatcaggtacaatggtaaagagcaagcaaagttgcgatcgatcaacaataaagtcatatgatgatataaagtggatcatttcatctatgaggtatcaagccatgaaaaacttgtgttaattacaagtggctcgatggaggttgatgcttgtgtaacatcgtcattggaaaagatgaaatagaatgcataagacaaaggtatgacttgtaggaaattttatttcactgatcaaaggttatatagagaagtgcatggcctaatgtaggatggatgtgcattctattgagaggggaaacttatttgaatattgatcatctagtgttacctgatagatcggttccaaaaaagtaaaaaccctttattaaaatgctaggatggacttaaggtggtggtggtggtcccatggggaaacatttgtggttaacatatttttcaaaagttcaaaagcaactttaaatggtcgataaggtggcacaatccgtgttaaaatgttggtggagaaagagctgaatgacacttgacccctaagagaaggaacgagtgaattaggaaacctaatttctctctaaattttggccacctagtcaaaacctatgcaatacaaccaag

SEQ ID NO: 81004 - DNA, 837 bp, Zea Mays
cctcccatgatgatcgccatggtcagctcttcgtgtttctggcaaccattgcgagtccgaaatctgtggagtgggcatataggtctgctccggtgaggtcgcggtcgccgattcgggcggcactgcttcgggtggacgttaggtggaagaaacgtgtgggctgttgatcggccgatgtatggtcgtgattgaaccgcgcgcctattctcatcggccagtgatcggctattggatgaccagattagaccctgagtatagtgctctcatgtgtaatatgtgccctccgatcgggatctggtggttagggttagagcactcttcaataagatccggaccgctgatcttaggcggagggctcgaattagattcgtgttacaattgaatctggaccgtggatcggtgatcgagcagtctcgggcgcgtaccgattcgtttaaagtgatgaagtaatctacgacattgatttctgatcggatggaccttgttccccggtaccccttcgaccgcgacgaaattgtaaaagagcccttacactttccagaaaccaacccgccatcctcgattatagagaatttgttcacctaagcccttggaaattgcagaataacccctggcttcttcagaaattagatttgagctcggtttagtataaatcaatggcagaaaatgatttttaatataaaaataaatccataaacttatttaatttatagaaaatccattttaactcatttttaatccgttccagttgcattaatattgtttatcacctagtaactctgtttagacatgaaacatagattaaaattgtttacttaatttatctcataccaagca

SEQ ID NO: 81005 - DNA, 674 bp, Zea Mays
tgattcaaccagagaagcacaaacggagataaactgtatacatgatcagctaatccaaaccggaacaatcctcaagatgcattgatcctggctagctatgtcttttgctgcgataaataatggtaaatgtagtcccagatctggcaaagacacacacacctttcaatctttcatgcgcattggatcgggcagagattgcttgtgccatgagatggatctctagaagattacacacattatcagagagtgtaagcacagtctgttgcattgccttgccgtgcaagatatttgactgtcctgtaccaattagttcggccaccgttaggaaattcagctggatctcttggctcacatgttgcccataactagtttggacccatgggtagcctcttgccttcatcttacatcaatgcatctgtacgcaggagagagaagtagttaaagcatctgctagtctagccatgagtgagctgagattaaaagtgttgctgccatggggcctcaaaggtgatggatgctcatgggagtgccccatgattagtttggctgagattgcaggcacatgcatgaagaagtggcaatgataatgcccttatgttgtcaaaccagaaaaattagtaacctgcacgattagtaacatgatgggtgatctaaaagagccaataggatatcag

SEQ ID NO: 81006 - DNA, 564 bp, Zea Mays
aaatatgctcgctccgaacagctgtatcacgacaaggtagagttacaacgcaaaccaaaggcaggctcacagtcaagcaaatcatggacccgggaccaacaacaggaatacccccatcaagaccacggtcagctgcagccccaggtccacagcatagctaaccaacaacagggcagtgccccctccgcaacgttacccttaggagaaaagccgcggtggaggcgggccaagaggtagaggccgaggtccgcataagcccaagaaatttttactgcttcttccacgacgaagacttagaccatcccaccagggactgcccggataccaaagaaactaaagagcgtatggccagggctacccctgcaaacaaccaacgagccatcgcacatacttatcaaccccgccaataccataatcctcgctatggaaacgaacaccaataccacacttagcatcaaaattacaatcagagggctccacaacacccatagctccagtaccaagaaagatcgacacttccacttccacccccaccacctcccccaacaaaccaacaagtccgcc

SEQ ID NO: 81007 - DNA, 1130 bp, Zea Mays
cttttttgttcaatttttttgggctgttgttttttttctcctttatttctcttcttttttggattttcttttcttgattcaggagcacacaagaagtaacacagaaaattggagttcaaacaagtgaaagaccaaagttattcatgctctaagatgcactctaaattggaggacagaaaggaaataatgtgcacagaaattgcggtggcacctagggtttgatgcaaaaggaggggaaaacacataaactggactctaacacgacttaaccagcaacaagacttcaaacaaggacacaaactcaacactacgaactctgaaactaacaaatgcagaggctatggcgtggaaggttctacgaagggggaaaacaatatggatgtggattctaggatgaaaataaacactcaaactagggggattcgatgcaaaccttacgacatacctttgctctgattaccacatgatatgacttaggccccatcttctgaaaggttcagataactatcgatttgggcagattcgagacacaccgatccgggttcatatccgaagaaatgaaccctacaaccttaacaccacgaatcctctggttaccaaccaagctgttgctcgattgacctcgccaagaaggcttactcttgcctgcgaaatcgaagaacacaagcaagtgcacggagaagaaaccaaatcacagaaagtattcgattcaactcacggatgggggtggcggctggataaaggagtttggggcgtctatgaccacctggtcgcaaccctaggggccaagacaagatacacgacccaaagggccaaggacagtggcgcagcaccgagacagattctggacaccaacttgtggaatatttttccgtcgactcctaatgaatttggaccttgtaccagctctatttgaaagtttatcttcttagctttccatccatataaatatcacccaaatctgagtccgtatgtgacctgggcggccattttagcaaaaactgctcctggagcccaaaaacagactcgaggtcagttggtttgggcgtccctcttgacttgtatgtccttgttggtcctccacgcctctaagctcttctccaagtattccttggccttctccatggttc

SEQ ID NO: 81008 - DNA, 545 bp, Zea Mays
agctattggcactcgaggtggtgttcttgttgcttggaagggaagatcttgcaagaatttaggtatgcgagttgacaggttctcagtttatgtgaggtttgaccatgatgaggggctccccttggtggttcacaggagtttatggtcgtcaagtggatgtgctgaagattcagtttttgcaggagttgcatgatgtccgtcaggcttgtgcaggcccatgggtggtaggtggagactttaatctgatttacagaattgaggacaaaaataatattaatttgcaagggagatcctgcaccaacttgagttcgcacgacactctagagcgctctcttcacatgaggattggctacgaagaaaattgaagtgtcatgtgctgggcctggtatccttggaaagaacaatggtgagattaaggtctcggttgagatggataaaagatggcgatgcaaacacatcctattttcagcaacgtgcgagatatagaaagaagaattctatggctaaactgaaagttgaggaaaggttggtttttgatcaaaatg

SEQ ID NO: 81009 - DNA, 746 bp, Zea Mays
atcaatcaacaactcaaggttagagaatttcgcaacacaagccgaagtttgtttcttgacattgttcatatcctccaagccctaaaccaaacaaaattaaaagtgggatcaatagtattttggagggatgccctatcctctaagccccaaaccaaacaaaattaattgtgggatcatcctctaaatcttataacatgtttggatttctcgccatgttgtctcacttagcctcagctaaactagtgttgccagcaaaggtgagacctaagaagacatgttcctgagacaatgggatcgaggaacgagaacacagaatgctatttttcgaactatgaaacaaaagggtgtatgccttttgtgttgtcccatcgtagcttggaatgtgaacaatgtgattctagaacaaaaatacggaacaatgcaaccaaataaaggaattaatttcctttttctctgtcgtgtgattaatttgttttcctcacacctcacctccttttccaccggcaccagccgtcagcaccaccactgacctacaacccaaagtagttttcgcaccctatcgagacagaggtggtgttccatccatcaatcagcatagtcaaacctacctgcaacccacaacacttcgcaccttatcgagaaaaagatggagttaatcgatcaatatagtcaaccttccacccatcaatcgatatagttgaccttccacccattaattggtacgtcgtctcaaccttccacctatc

SEQ ID NO: 81010 - DNA, 489 bp, Zea Mays
cgacagtgatgagtatgatgcagaaagtgaagacgaagattctgaagattgaccgtggcaaccaagccataccatcttcgaaaaatcgactatcaaacaaagtcatgttgatgctatgagaggaagatacttccgcgacatgactattgtgagggttggaggagacagcgctgctcctactcctgaagtaaatgaggtggttatttaccgaagcttttttgaaagcagggcttcggttcccgttgagcagattcttggttgaagtactgaagacgtttcagatctttcttcatcaacttacccctgaagctataatcaggatgggtttgtttatttgggttgtgagaagccaaggattggaaccaagcgcaaggtgtttttgcagcatgcatgaacttttgtacgagacgaaggctaccggcaaggagcagtatcacaacaactttggttgttacggattcattgctcgatccaatgcaagccatccag

SEQ ID NO: 81011 - DNA, 433 bp, Zea Mays
cgtatactgtgtggatatgacttcttcagaaaatctttttgaaaattcttggcaacacacccaatgggtgtgcccaaggggtgtcttggtacgcagagcgtttagcctactgtcctggagtagtaacttgatgtgaccgtggggtgtaatcatattgcctgagcagttgaccttggtccaaatgatgtcgtgttacgagaagcggcgcctattgcctgactcattttcaggtggcttgaattgcttattaaatacttgcgactgttcggcgagcgtggtaggaagtgtacagtcaccccggcctctataaatagcctgcttgcaccgttgttctcttcactcatccttcgatcatctgttgttttcttcttcctttctcttcttctccaaccaaccatgggtagaggtaggaggggtcgtggttggcctcgcc

SEQ ID NO: 81012 - DNA, 723 bp, Zea Mays
cctaaccatttgatcctccggatcctcaactaccccacattgtagcatacctttctgaagctcttggtagtattcctgtaccgacatgtctccctgatctaagcattgtaatttttttgaagatcgcgtctataagaagggggaacaaagcgagctcgcatgtcctcttttaatgcattccatgtttgtggtgcagcacgtgtgttaacaagttcattccaccaaatgatagcaaaatctctaaattcactagtggcttgtctaaccctatgttgctcaggaacaagatgggaattaaatttttgttctaccgtcatctcccagtctaaataagcttcagcatcataagaactcatgaatggtggaatagagaacttaatcttagcaaatggatcatagtctggttcaggattatgatgacgacgtctaccattacctcccataccttgtcgattacgtgcgaggcgttgtcgcagcggtgcatacacatcgtcgtcatcgtcgtcgttgtccacaggagagtgagctggggctagagttggtggggggatgagcctccagtacatccatgcgtgtaacaagttcatcaactcgtcgatcaagctgctcataggatgtcgccgcagagtcctggtattttttaaaagcttcagtcatcgcgcgcatcatctccttcaattccatctgagagacacacgcatcgtcgttaagcttatgcccctt

SEQ ID NO: 81013 - DNA, 585 bp, Zea Mays
cggatgtggttgtgccgggcgatggaggtcggctgcgcccagctagaagcttcgaaggagcgcaggagagaacggaagactgacagagcgcgtgagcgaacagttgatagcgcacggtcacccatactccaaattaagcggacgaggaacgcgcgctatattttagcggaggttttagcggttgttgttggagcaatacagaacgtccagatcctctatatttagggtacagagtgctttacagtctcttgttggagacagccttactacttatagaccttcagctaagttttccctcaattgtatctttcgggcctccaaatcagcccatttcgttgggcctcttcaactactttttggtagcctacgatgcaacaggattccatgtttgcgcatagcacgtaattgagttgatatgttttgctttgtttaatccctgcctcccacgtgaattatactctctccatcctaaaatatctctccagtttcaatgttgatcctgcatcatctttttaaaaaaaaatcgctacatttcttttaaatcaactcaacgtaaaatattaaaaagcggtgcagcaggtggag

SEQ ID NO: 81014 - DNA, 1212 bp, Zea Mays
cctgcagcaaatcgcatgtctctctcttaccccctctctctctcgtgctcctggcacgaaccatcgagctacgatcagcgacaccgtcctaccaaaaagcaccacgagggtatacctgggtgtgcggtcgaacactagacaccgacggtccagaccccatacccggatggtttgaacctgctgcggacggtctggattggcagctcggatgatccacgacctggggatcttgcgtgacaccaattatcagacttttgatattgtgaaatttccctcgctttatccgataacttgatgcgtcttgtgccaaattgttagctctgcaattctcaaccctagatatgtgtcgaatgttgaattcgtcaaaagaatggattatgccccagcatttttcaaggtaaatatttagagtaccatctaaacattggtactcttctaatatctgctggacaaccagctgagaatcaccaaatgtcttcacatgtttcactcccatacaatttagaagttctgaaccgaataagagggcctcatatttgacttgattgttagtgcaataaggttttaatcggttagagaagtcgaaggaggcgttacttgacgaaacaagcacaatgccaattccttgcccttcattgcaaactgatccattaaaatacagagtctagggagtaacagtgagatatgacatatctagtttatgagtatcatcaatccgatgttctataataaaatctactacgacttggcctttcatagattttaatggttcgtaggccaagtcatattctataagtacataagcccatttactaatcctaccactcatgatcgggatttgcaacatgtatttaatcacattggttagactagaaacggtgcaatgactagacagtaaataacacctaaacttggtgcatgcataaaataggcataagcataacttctcaataaaggtgtaccttatttcagcatccaccagcctttgacttgggtaggttaccacgtgttcctttcctttggtatcctatatcagaacaactccaataactttctcttggcttcaatgtataacctcaatggcacccctacttgtggtgctttcaatactagagccaaagacaaatagtttctaataatatcaaaggcttcctattgttctacccctaggtgaatttgacattatttttaagcctaaggataggagtgaag

SEQ ID NO: 81015 - DNA, 516 bp, Zea Mays
tggtgtggatgggcaatgatggttgcttcaacggtggagatctcgaccacttcatcacgaactatcccgagatgaaagacaagtcagaggctaacaaacatgactatcactttgaccaatgcatgggaaagtgcaagtacatctctagcaagtacaagtccaaggggaggttcaacaaggaggtgatcaagcaaaagtatctttagaaggccaagcataaagagcatgccttcttcacctcccttagtgaccttggcaatgactccgatcacacttcttcctcgatacacaatgagcttgagaggtgggtagaggacaagttgaataggttgtgcttcttcacagacaccacttgagaactttgcaccatggcgcttagagaggatgtggtgagcgactatggcgaggacatcagtgatgattctacctttgaggtgtcacttttcacgaatgaactcatcgctaagttggataagatggtggttgctttagctagttagtacaagtttcttaggc

SEQ ID NO: 81016 - DNA, 746 bp, Zea Mays
tgcatgcgataacagggggccacccactggccatcgtgcttctggccgggctcctccgattcaaggagaggccgggacagtgggaagctgtgctgcaggtgcagcagctcatggtgtcatcgtcgtcgtcaggacctgcagcagtggaagacgaagaagcagcagcagggagcagcgaccagatggtgacgataaccgctggaggaggaggaggaggtggtggaggagcagcgaccagatggtgacgataacgacttcattccatcgtcggtgcgccgcctctcgtcctacatctccgacggcggattcaccactttcgccaacaagttctccaagctgcgttccttcctatgctgggccagtgacgactacagcgctactgcaggcggaagcattaatacggataagaatcttgatgatctcaagttcctgcttaggtccaagttcctccgtgtcatcgagatcaaggggctgaggatcaaggagctgccggctgagatctgcgacatgttccacctgcggtaccttggtgttcacagcccgggcctcaagaagctcccacccgccattgccaagctgatcaacctgcagacactggacataaggggcactgcagtcaagaagatcgacccgtccttctggaacataaagacgctgcgccatgtccttgcccaggacctcgagcttccagcgtcgtcgtccatcgtccaacagctggacggcctgcagacgctgcagggtgtcag

SEQ ID NO: 81017 - DNA, 552 bp, Zea Mays
ttcatccctctaccaactaacccttagcttactatctagggtgctggtcgcctctcttgaggtgcgaaggcgccttggcttcgtgcctcggttagtcaccttaccgacccccctggagaggaccgatgatgctcctttaagggatttaagcgtgatacgtttggccttagaggcggctaatgttgaggtgtagtgtgtacaatcgtgactagcagctcttaacgacctcggggcaggtaatctatcgtggtgcgacctttgggctctcaaggttttctagattcctgactaccttattgttcatcgtaggtccaaggcctgaagcgctaggcttttccctatgtgtagatcgagctacaagattcgtttgtgcatgggggagaaaacatatgtcgcatctccttaacatcccggagtgtgttcgcaaggctgtggagtttgggatcactgtggtgcattgacggcctttgacattgcgcagcttcactgtggtggctaccttcatgaggttgtcggcctacctgctgagacaacgtcattggacttggaact

SEQ ID NO: 81018 - DNA, 312 bp, Zea Mays
ctcctttcttcatggtctatgggtcggaagcagtgctacccgccgatctcaagtttggggcgccaaggttgatcttcgaaagcatagcagaagctgaggccaccaggctggaggacattgatgtacttgaagaagaacggcttaacgcagtaatccaatcagcacggtaccaacagactctaaggcgctatcacgacaaggctgtgcgacaacaattcttctcagtaggagatctcgtcctccgccgaattctaacgggggagggacggcacaagttatcacccttatgggaaggaccctttatggtagcag

SEQ ID NO: 81019 - DNA, 925 bp, Zea Mays
ccggggaatagggtccttcctatgccaccgaccccaggtcaccttcaacattcgcgaagatgtttcccggagttcgagcgaagtcataacctccccaggcccagcacatgtccccgtcaattcctcaacaaaaaacatagaggcccagcacaagtcgccgaaggccctgccgcttccctctccgtacctttcacatctattttcctcttccaagttgatgtgatcacagcctttcccttcgaggtgccctcttcaaaccgggtcttcaccagtttccctcggtcgttcctagcatcagcagagtccccctccgggtaaggatcgtaccacaagcaatttagttctaaaactcggttcaaccttatgttgcaacctcatatatcccaactccttatcatctccgtcttaatcacaaacaacaatattaacatcctctgactccacctccctaacaaaggcggctgcatcccgcccttgcagatcaatggcgaaggcagggctctgcaccatctaatcacccaaaaagggcatcggtcaaagcttgacttcgcccagaccccacccgagagccaacgaccaactgctcatccaggctgcacaccgaagggcctcttcatttctatctcctttcttcactttaaattatggaaacaccaaataacaatgcgagcacaaaatggacaccccttaaacatcctctagcgccacataaaaccagaaatcccaccagttaccccacttgttcttggcacactgaacaatttcaactacttcggccaacttcttccaagtccatggtgtgaatgtgcaagacctaaattgggcaatcaatccaccaatcttcttcttctgccaatgaaacaataattcttggtgaatacctcaacagatggttccccaccatatgaagtcaccgcccagacta

SEQ ID NO: 81020 - DNA, 848 bp, Zea Mays
attttagtttttaggcatagtgtctggcttccaggatttcttcttcggataattttttccccgaagcatgtcgaaaaatgtaatcaacatcttcgactgaagcttcgagggcaggggattttgctttttctgccataccctgccctgctgccatgccggtatgtgtagtttgttgatcagctttgtctttaggcacgacagccttcgtctcaatgggcactacaggcctagcttcggctttggcttggaccttagaaacttctgcaactttcttaataggagcaggggtcaaggcctttgtggtctccataacagcgtctagcacgctggccatcctcctcctcttgggagttgaggcaggacatttttgcatctttggcaaatttgccactgccggtgggcttagaatttctggcatttttactgtttcttccacctttggctcttcgaccgtatcatccttagcttcggctggcccgactgtaggcaccttggcattacaatagactctttagcgctctgcacgatggaagctgcttgttttgcttcggcggttgaagaggccccttcgccaaattcaggtactacggccggttcaatatatcgtggccggtgggtaagaaccttcattttcttgcccttcggcacagcagtggtggccgaagcaacaatttttctcttcttccctttccttcgcagcgggtagtgataatcagggtaaacgaagccgattgcatcaaataccatgttcaatcttttcttccctgggcccccgaaggctacggacaaggcatcatcttcggccttggaatatgtcccgagtagatcgtcgctggtagcttcaatgc

SEQ ID NO: 81021 - DNA, 441 bp, Zea Mays
agagggtacaggcaggatgtcatcgccagcgccggtggtcgacatattcttcgccggcctgacctctcacttccgccgccgctaaccgccgccaataattcagatggacgagcgaacatggacgcggctgtaaagttgtattagtttcctgccgtaactgcgcctttattttcgcgcacgaaaatcacgtcttgcctcatcccaaaacctgccgtgaacgtttgcatggtttacgctatcttgtatcacaacgttatgcagtcgtaagcgtctagcacatgcagatattcgtgcgcgcgattcctggcatgcaaagattccatttatgcatgagttatgcacatttgtacacaaatttatgcttgcgtaattgcatgtcgcgtgtaaagcgggatacgtggttatcctttgcataaatggcgcaggctggcgtccagtggg

SEQ ID NO: 81022 - DNA, 585 bp, Zea Mays
actagcaatgcttctttcccaaaacacctaacataattggtctatcatgcatgcaaataattacacatgtattatcaacattgactgtgcaatcatcatatcgcatgtctcaaggatcatgcaagtcatgcgacgctttgaattccacacctgatagttgagagagggaattgagggctttatgtatgtgtgtgcaattttcactatttggttttctcacacgatccaatgctcttgcctagtattcccttcttcccctggtcttcttccgtcagctgttatcgttccctcttatctgtcggcacaatcgcagtggtcgtgacctccactcttgaactactaccacatggtagggtcctcaaccaaaaaagtttagacatggtgagcaagctcctcgagtgggtcatgctactggcgtccaacaatgtttgctcaatgatgaatctgatgtagactctaaaggatatgaaggagtacaccatctccttctcccatttgatggtggaaatgaacttcccattttcgagattctttctttacatcctcaacttctatggtctctaggttaggcatcttacagtgcac

SEQ ID NO: 81023 - DNA, 278 bp, Zea Mays
ctactctacatatcaagaaattatatgatgaaggacggatagcagtcattacagatgaccaaatgtaaacttcttttgggttgatgactgaggatgaaatgacaaggatggctacagaagaagctgctaaccaaggagatcttgcacaaggagacatcactaaagatgtttaaacatatggtgcacccatcctagttaaagatttgacaccatcaaacttattgttcttaaatgataagaataacccagagattgaatttggcaccatgtttctaaat

SEQ ID NO: 81024 - DNA, 289 bp, Zea Mays
cacgaataataaagaatgcatgcattcagaaacaacggtgattgtttataaactaaactgcatgacgagagctgacgacaaataaaagcgtacgtagaaaagagatcagatcacagggggatcgatccagcctcctgcatgatccatctggcgggccctagtgcatttcgtacgtaaaagcaagcaactccatcgatctcctaatgattgcccgtccgcgcgcggagcagactaatgcaaagggcaaatcaaatcattttgttctcgtcgtggaatccttatgtgttca

SEQ ID NO: 81025 - DNA, 985 bp, Zea Mays
aaaatctcaaccttggtgtatttccttcttatgtgttgctgcaaaagagaaaaatataaaaatatttagaaaaaaagaaagtcacaaaaaaatgactagagcaaaaatcagggaaaaagagataagagagtagcacataagcagaaacaaccttgatctatttacctctgtgattgttttggtcccaacttgtttccttgttgtacctagatcattgttacctcctttcttgtgcctttatcaaactgttctaatacattttctaggccagcagctaggatgagtgcttggaacacttgttaagcattgttatctgttactgacttgtgtgccatagatatatatttagtgagccttcccaaagctccacctttctctcaagcagaataggtactcctttgcgttcacaccaacgctctttaggcagtcacttaggccaccgtttaccacctgcagtgctagtaagagaataggtactcctttgcgttcacaccaacgctctttaggcagtcacttaggccaccgtttaccacctgcagtgctagtaagaaccttgtaagagcggggtaagacactttataagttgtgttccaccaccacccctaatagtagttataggttttatactgcttgtttgttgcctttgttttgtttttactaacaattacagttccaaagaccaaaacgaacaaggacaagagccctaagcctactaatgatgagtgtgtctcccaactggaattgaaggagatgatgtgtgtgatgagtaaagctttcaacaagtactaggattctgcagtgacatcatatgatcggcttgatcgatatgtttctagacttgttacatgtatggacgcgctagaggctcgtcccccataagctccagccacaccagctgtcgatgtagtagtgttctttcatgtggaggacgatgacgacaacgctgatgttgatgcaccactgcaaagatgccttgcacataatc

SEQ ID NO: 81026 - DNA, 442 bp, Zea Mays
cgccgccggaccgcccgcctctcgcgctcgaggaggacctcgcggaggcgaacgcaagctggacgacatcctcgacgcccagtgcccgtaccacaaggacatgtgccacaccctccagaactgtagagacttcaagcattccgtggggaacggccgacccttccaacctctacctcctcccccgccacgaggaggacctggagaacctcgacaaccctagcagcaggaggaggggggaggtggagctttcccgcgcgttgacagagaagtcaacgtcatcttcggtggacacgggtcgcaagaaagcaagagacaacaaaagctcaacaatcgtcagatactggtggcggccaccggtcctctcgccccgtaccgatggtctgagcactcgatcaccttcacccgggcagatcagtggctcaacttcgaccacccgggcaag

SEQ ID NO: 81027 - DNA, 393 bp, Zea Mays
caggtatctttatcttcgcctcactctcttatattgctccgcatacctctaaggacaccttatgaatgcagatcgccatcttctcccacatgttttcatattctttctttcaaatgtcctctttgacaaccctttccttgaagacttttgacgtctccatttttagtttctaccactttattctcacaatcatcatttgtttatctatacaggcacgcacctaaaaatgaaagaccaccaccataaatttatgttgagatacaacacagtccccaagtatcatcttgcaatccaagcatgctcgtttatcctctcttcatgcgagaacaaagtcaatttgagtagattgttggccactattaatataggttactaaatatgattctctctttc

SEQ ID NO: 81028 - DNA, 354 bp, Zea Mays
catggcaggacatgtcaatggctgggggagagccatcagtgtataaccccatcccttttcagtggagcttcgacactagctctctcaccagcttgtatgctggtcttcccttcccctcaggatgccttgaatctaaggaggaagatggtccgggcattggcctagacttccccgggcttcgtgacccaagtccatgctatagttcctgttcacatgatacgaactgctttccaacagcttgggtgactacaacaccgataaggggggttatgacccaactcgggagtgcttccacgtgggtcacgaggagcgcgacaaagggaaccatctcgacatgcctcgggagaatgatgt

SEQ ID NO: 81029 - DNA, 424 bp, Zea Mays
gtcgatgttgatgcccgtagcagcccaaaagtcgcgagcgaatccacggaggaagaggatatgcggcgttgtctctggaccgttggagcagacctctcaggtatcgttagggacaatgttcttcctgtgtagaatcattacgctagaggccctttcgccttcctgtgtagaatcacgcgactgaaggtgatcgcacgtcatcgtccaggtaaagaatttcatccagggaggttgttggggcgaaggcgtaacgccccctcgctcgagaagccagtgtccgaggattcaagactggggacctcgaaggcccgaagagagttacattacaaagtgtacggggagaacacgcagacgaagactcatggcccacctcatggcttgtggtagcacgatagaggaggagaaccttcttgagggctttttc

SEQ ID NO: 81030 - DNA, 571 bp, Zea Mays
ctttgaagctagttatctgaagattgatcctacgccgtgaagatcgggcatcgtgacgcatcaagctaccaaggtggttatctcatatgagtgggaagtgacttcatgaagcgccgctcagacggtgatacacccactacattataggcttgagtttacaacacatggatatcacattaactcctatgcacgttagcttaaccagcaccagtggcgtcagcataccaggaacatctctctttggtcccaggacagaaaacaggatggagaacatatctggtcggacgtgcaacagttgaggagaaggagatcttagcccaccgttgcacttatagctccatgttgtatatatttaatactagaacactgggcctagttcccttgtaacgtgccaccgttggactataaaaagggatggcacatacgatataggggcataagctcacttgaactccctcggaggcactcataagctctcaagaaatacaaccaacggtggactaggatattacgctctggcggcccgaaccactctaaatctttttgtgttcatccatctcaccaggcaaac

SEQ ID NO: 81031 - DNA, 500 bp, Zea Mays
atcagcaagttgatccttcgtcatcgcacacaaaccaagctcaagttttggatagcccatcttgtccatcatctcatagcaaacattaatctctttactgtctggcagacagtagaggaagtcatcttcgtcatttcctccgtataccaaggaccctcgggggtatttcaagtccttgccataatgttgcacttcgacaatttgttctgatgataactgctttcccgaagcgtgtcgaacaatacattccaaatcactctgcgaaggtgcttcgggagcaggtgacgtgggctcttctggaagtctctctcctatcagctttactggcgcagctcccgaaggtcctgcttcagcatgaatagaagtagcgctggaagtaaccactttccttgcatctccaattttcttgccagaatcttcggctgaagcaggagttggcgtttccatcgattctaaaacagcatccaaaacactagcaatcctcctcttcctcggagttg

SEQ ID NO: 81032 - DNA, 627 bp, Zea Mays
ctcgactaaacttggggtgcaggactctattgcgcctagacccttgcctccatcatgctcgaggaacatgcctctattgtgcttgctacccccacactactacacttggggtagtcacattctttgccgccctagaggggcatcatcaccaccattttctcaaatgtattgttgttgtcgaatagggtgtagaggctagctagtgtaggtagcatttcacaaatgacacaacatagagcctaactagcatattgtgggttttcggatggatgatcgagtcaaaccccatctcgtcacacatctcatcacactcattgatgtaatcccacaattccttcgtatgcttatgaagtggggcaatgcactaggacatgaagtgtgttaggagggtggtagtggtgagccctaccatggaaaccactttgatattctacaacattagctcctaggcttcatacatgttggggacatatttccactagacctagtcgaacactggctcatccaccgacatctctaggtatgggatcaagaaaactaagacatacatcctccaatgatcctacttcctagataagttgatgggtgacgtacgaggactagcatcaacacttgatgtagagatgg

SEQ ID NO: 81033 - DNA, 369 bp, Zea Mays
caaaatatgatacatatcaaaagctcaaagaagaaaatgagaggcttaagatgagcttgacacaacttaaagggaaatgcatagctcaaccttcccaagataaccgtgatcacatggtgaagaagcttgagacaggaacaaccgcggcatgcactacatcccttgaagaaaatgtcaaggacttgaggattgccaagaagaggaagcaaaagaagaaaatcaacacctcttccaaaagcctcaaccatgcctccataaaaggtaacatccaaagtaataatcaagttacacttcatacaaatgaaaataagaagtgtagagaatgctttgaaaaggggcatttgattagatcatgtccctacattaaaa

SEQ ID NO: 81034 - DNA, 529 bp, Zea Mays
ctaacctgtatacttgcgtctttgcatccaaggtaagcttttccctggtatacagctagagatttgacatgcttgctcctgtaaaatgtttgggtgcttcttgatgcacaagagaactgtgacagaatcaaagtaaaaacaccattattgttatgtgttccatttcttgagacaatcaccaagtgcatatcatatgaataccttgagaacgctgttctgtgtaagtacaagaattttgtcaccacaaatatcaagtttttgtacagcctctcttgtctgaatcatctccacgcactctagcttgcgctgtgccatttcccatacctgcaaatgatcttgtcaattaacatcccgcaattaattttcttttacggttttagcactgaagttgaattggttacccgaatagatttgtctgctgatccactcaggaggttctccccagtttctgatagtgaaaaacatgtcactgccttcttgtgctcttttacctccctgatgattactgccctctggccttttatgtccc

SEQ ID NO: 81035 - DNA, 580 bp, Zea Mays
ccacctctagcaatgaagccccaaatattagctccataagtgactcaattcgtggggctctccacttatgatggggatccctctacctcgacgggtgccgaagcttgaccaccttcgcatgtgcctatcgtagttaacaataggttggtcagctctggtcctagagggcttagagtaaaaaagagcaaagggcgagtaattacctcaagaattcaagtgcagcccagtgacaaaacaaaagaactttccttcccctacttttgtgtagtttccctctttgtctttgtctcagtaattctagctttcttcttctcgagaggggtggccttatccaatggtgactattcgtcactgttagtttcatcatccttcatctcatcatcaataggctcaacttgtttgtctatcttggaagtcttcttgtcatatacctttgtgctcctttttctttttttctccaacttcagtgttgggcaccggtttggagtagtccgggtattcaaatccaatagcattcatgactctattcaatcatcatttcccatgggttccaaggcagcagtcaaagctttgtcttcct

SEQ ID NO: 81036 - DNA, 345 bp, Zea Mays
aaaacctttattttcttgcccttcggcacagcagtggtggccgaagcagcaatttttatctttcttccttgcctccgcaaggggtagcagtaatcagggtatatgaagccaattgcatcgaaaaccctgttcaatcttttcttgccccgaccctcgaaggctgaggataaagcatcatcttcggccctggtatacgccccaagtaactcgtcgctagtagcctcaatacattttagccaatagtcatttggctcgtcaaacctgtctctgtatctgaaggtatatttcaaatgaattaatccaccttcactggacccggcaccggtctccttcggcatctcccag

SEQ ID NO: 81037 - DNA, 622 bp, Zea Mays
ggcatccttcactagcttctttgcattgttttggaacacacgttcagcgtgccccatgtaatcctctccgtcaggcaaccgatatcgaagctacaacataaagaatacaaatacaatggtatgagtcatagaattacaatattaagaaacataacaaaaaaataaagaattcataaccaaaagtcatgacacacaagtccctgtctgtcggtgtggtttcgttccttttttaacttgtactcgtcctaggtactaacgagcacctcatcgacgctatctccatctgacaccttcactatactagggtagtgaaggcggcaaagaggacccaacgtaaggttaacctgagtgtggttgtctttcgttttatcagggaaatccatgcatgtatttatgagggcttggcaaaagttactctcttgatgcatgacgtcgatgttgtgcatcaaaatcaatgacttagcataatgaatctcccacaagccacatatgtgagtccagttatgctcctcactaaaaccttgataccttttctcactctcgtctaggacaagtttcctatgctcttctgtaatttctatcccactacgtcgcttgggcgatcccttcgtgacgatggtgc

SEQ ID NO: 81038 - DNA, 740 bp, Zea Mays
ctcacatcgcattcttgtatacgtatatttgccggctatagttagctagcatttgttgttccgtaatcatctcggatacatatgtatgtgtatgtggctatgggatcttgtgcagttcgtcgcatataatagtatctctgtaatcatcacgtatgtattccgagtgctagagtatattaggcaacttttgatatggttggtttataattgattggattgattgcaatctcgaaataacattccttatctattagagtatattaggcaactcttgatatgttttgtttataatcgattggattgattgcaatcctgaaataacattccttatctgttagagtacattaggcagctcttgatatgattagtttatgattgattagattcattgcaatcccgagataaccttccttatctccaagccatttactcctatatattcaagctagggactcaatgcaatacatcccaccatcccattcccatgcattatacacaatccctccttcattcatggtatcacgactcacgagtttagtttgaatcccttggcctccgacttccgctgcccctagggagatccatctccgctagaggcaacacccttgaatgatgtgtcgcgggtcccaccgatcctccacgatcgttgccactataggatgcccgacagatcagtttgatcatgtcgttcctcgtcatcgttggtcgtcgtcatgctttactagatcagagatctcacc

SEQ ID NO: 81039 - DNA, 351 bp, Zea Mays
ccctgatcccctaagtaatccatgaggattgcttcggggtttatctggtgaatatgatgcgttcccagttttttggatggaccttttttgctatggttggcatggttccacacttatgccgtgtatgtgctccattaatgccaaagttgggcatcagcttgcatcggaacctatcatagctaggcttagttattgccagagctaggagttgtccttggccgaagctttagctcgatcgtttggtcaccggctttgttatgcacacatctcccctcgaaatggcccgatggacccttttgagtggagggctacccacaaccgacctagttggcatggtgtggctgactgtct

SEQ ID NO: 81040 - DNA, 452 bp, Zea Mays
gtttaagtttagacgtcagaacacctaacttgtttttttaggatttctattgtgaccggtatggctattatgtgtatatggtgcatgcatgcaatttattcatggcctacatgtcatgaacatgtcaatatggctggaaccatatgcatagtcaaatctgatgtaatgatctgcatgtcaacatgtgatgatctaacgcatacatgtaatttgtttactagcatacattagttagctcatgaagaactcatcacttgaaggatgacatacctacatcatggagatggatatcaacatgatggacaaattattggagatagagatcaccatgtaacagcaagccataatgaatcacaattgttgtgtgaatgtcattcttaatgttctacctgttcatgcaaatgttgttcttgcgtgaagtagcatgatccctcataaatgtttaagcttag

SEQ ID NO: 81041 - DNA, 564 bp, Zea Mays
cgagcacaaactgaaggtctacccccaggcaaggccgatccggcaaaaattacgtcgtttcacgcccgacaagagagaagccattcgcgctgaactggcccgcttgatcgcgactgggttcattagagaagtgttacatcccgagtggttagccaaccctgttcttgtactcaaaaagaataaagtggattggcgcatgtgcgtcgactatacagatctcaacaaacattgtccaaaggatcccttcgggctccctaggatagatcaggtggtagactccaccgccggatgttctgtgctgtcttttctggactgctattccggataccatcagatcagtctggcaaaggaagacgaggaaaagacagcgttcatcactcccttcggtgctttctgttatacctccatgtcgtttggcctcaaaaacgctggagcgacttatcagagagccattcaaacaagcttagccgatcactggggcaagcgtgtggaagcctacgtggatgacgtggtaatcaaaacagagaactcggaaaacttcatcgaagacttacagctcgtttt

SEQ ID NO: 81042 - DNA, 1135 bp, Zea Mays
atggaagcaaggtgtcgacatatccagaatgatggcacctgggaccatcattgtccccacgataaatatgtggcaggcaggcagccccgggtccacgagtacgagtggactcacccggggtaaaacgctagtttacccttgccttacagctccttcctagggaagccatcgctggtcgacccctgtcacggcctataaaagcgagaggctagcctctaggcaaagggatggaaaaagagaaataaaaggacacttggagacgaccaaacgccttcagacgcagacgaacccgcaaggacaaacaggaggtggagcgctgacgaggaccaggaggccggaaccccaccaagccaaaacttagttaggactccacctcttagcttctaaagctctacttccaccccgataagagatctgggagcctctcctccctctctcaactgcttgtaacccctactacgagtttgatcatcaatgctgccggtagcgcatgcactgatgactggatgtagggatgtgctgcccgaactagtataaatcttgcaccctccacacacatcttctgcagcctcgaaaacacataataaatttacttgtcggagtgagatacgaaacactgacattggcgtgccaggtaggggccttgcgtgttccgcggcgagatcatccaagctctggatggcaagtcgcgatgataaccgacctcccagaatggtgaactattttagggagccttatattccccttaatcggcaaaggataagctattaaggctctagaatcccgaccccactgttgaggagagcgagggctagcggcgacccccacatcaaatcagtcaggaaagcggcatagtcagggtggtgccctcccaaccaactttgtttgaagaccccgacactacattagaggcccttgacgccctcaacctcacccctcgcgagcgtgtcgagagcccatgattgaaaccggaaagattgctagatgcgacgcttccgtcgaaggcctataaagccaagcatgagggaggctcaccatggttaaggcgtgtcgaatgccccacaaaacatatcattgttaaccaacaatattcaaatggccgaccgtgttccagttttgagctcatttaaagggg

SEQ ID NO: 81043 - DNA, 635 bp, Zea Mays
cgatgattcaccggcgagcttatctgctccagccgtagggtagagggggaggcacgggaggccgtcggagtggcgtccagctcaccggcggtgaggattcccttaccccgtgacgttatccgtctagctgagcacgaatctgaacgccggtgacgcgaatctcggcgggggatcgtcggcggtgggattcttctgcggcggctgatctgatccggttgggcactgtaccatcgtgagcgctccatcagacaactgacagaacaatttgcaagggagatttcttttaatttcatgtgacaacaggtccaagtctctgcatcaaagttgtagtgctacataccagctacaactcgactatagggattaaacttatttgagcactggatcaaggttgaattcatacccaaagttgaccctgttacactgaaaagctgaatttcagaatgaaactagcctgacagtcaaactttgagcataattatctccaatattttctccacaacatggcttgcactcttaagcaaagttgttctcctatgattgggctacaaactttttgtggtcactttgggcaaaaaccctatatttcagaagatacagggctccaaagttgaaccaactaaactgaatttcag

SEQ ID NO: 81044 - DNA, 560 bp, Zea Mays
gtagaaccatgcggaccagaatgcatcgcggtgtcgcttcgtgagcatcgattgagactcgggatagggggcaccgacgggaattgttcgccgccgtgcaagcagcgcggcgagccgcttctcgccatgggaaacgcagaatcttccaatactcacggtatgcataccttcatcgtgtccgccgtgtgcagatttcagatggggggaaagagcgtgcaccatcagatctcgttgaacggctaagattagaagcctatgataccccttcgcgcgatcgattctaggtcgtagatctcagatcgattgaataggagccgagcgtagttgtatcaaatctggaccgtggatctcaaatcctatgggccctggcgcataccacttcgtggtatgtcagatttaatctgaggcgtccatttgtgatcaggcggtgcaaagtagcccgtaccctttcgtcccgtcacattttctaaagagcccctgattttttttgtaatccataaaatttttactatttattttatgagaactagtgctctctctcttttttaaataaaaaattc

SEQ ID NO: 81045 - DNA, 489 bp, Zea Mays
ctggaaccttgcctcaaatggtatactcttaattaaatcgcactatgtggccctgatgctcagaaaatacccctaatgtcaataaagagatctggaagttaaaggcaccactgaaatttaaaatttttcctttggtatctgcgaaggtgtgcaattctcacaaaggataatctggctaaacaaaattggcagggaagtttagcatgtgcctcttgtcacaaggatgaaaccattaaccatctgtttttcgagtgtcggttagcctagtcagtctggagtgtgctttagtttgccactggaatcaatcaaccaaaaaatgtgcaccatttgtttggagattggctccatggtttcaacaatgtgttaaaaactgtgtttatacttggagcgacgatgatgtgctgggtgctctggatccatagaaatgatttagtttttgagaaaaaaaaccttttgcgactttgcaagttatccatttggcgactcaaa

SEQ ID NO: 81046 - DNA, 743 bp, Zea Mays
ggaaaataaggcgagctaggctggcggggtgcgagccgggctgcctggttcacttctcccctttcctcttttcttatttgctttcccttttgcttttatttcccttttaattttggtttgaatatttaaacaagcaaaaatccaatagaaaattccaaatgcatgcatagtatagtgtgcacctaaaatgcatgaatgagttgttggtgtggttgttcatgatattctgtgtttaatcctaggtgtaggcactcagtactttttttaaaaaaaataggttatgatttctagggatgttacggtaactctctaatggaagggtaagctaggtggcttgggctccaaggagtaacctaggtctttcctttttacgatcctctcgtcgtcatcttttgtacgccggttgtgaccccgagttgataagggtagaaattacatttgggtcttgaagctctagaatcttctagataatccgtcatggagctcatgcatagatgaagatgaatcgccatccagccttgtttgaaccaaatggatcttgatgaaccagttgtgtccgattactttttagtattcatcgatctattctttccccttccttccttccttgattcctttctttctttcactgtattgatcaagcattctgtggggtaacaatactgccatcatcatctaacttgtgttggctgatgatgcggaaagcacagcattttcttttagataatggataccaatccagc

SEQ ID NO: 81047 - DNA, 432 bp, Zea Mays
caggacctaaaggaaaaatattggtggtacggtttgaaaagagatgttgctacttatgttgcactatgtgacgtgtgtcaacaagttaaggccgaacatcaaagaccaataggattgctacaacctctcaaggtactagaatggaaatgggaagaaatcggtatggatttcatagttggattacctcgtactggcgacggctatgattccatatgggttatagttgataggttgactaaagtggcacactttatacctgtgaagacaacttactcgggagcccagttagcagaattatacatgtcgaggattgtttgtgtgcatggtgtaccaaagaagatcgtatcagatcaaggaacccaatttacctcacgcttttggaaaagattacatgagtccatggataccaagctaaacttcagctcagattac

SEQ ID NO: 81048 - DNA, 646 bp, Zea Mays
caactttgtagttctatgaaatgggaacaattttgcttaagagtgtaagcaaggttgttatggagaaattggagataattaagtctaaagtctggctgtcaggctgttaaagtctgaatttcagactgacagtgcaaccacaaagactttgggcatgaattcaagcttgattcaataggaatttggctactgctgctatggcaaaattatagctggtttgtagctctacaactttagtgcagagggatgataaagttgtcatgcgaaatctagagagaatttgccctgaagttgctctgtcaggttaactgaagtggaatgccatggtacagtaactgaagaagaacctcaggttcatcccctcaccgtcgacgaccctcgcgccacgattcccgccggtgagctgattcgtgctcaccagtgcttggataacgctcggggtcacgtaaatatcagcgccgttgataagtccggccagtaaacaacttcggccaccgtacaggttgccagtaaacaactttggataagctcgctggtgactgccgccttccggccttgtgccacgtgccctggcacctccatcgcgtcgccgtgacccgctttaaccttctgtccatcgccggggagatggccacggtaaccggac

SEQ ID NO: 81049 - DNA, 463 bp, Zea Mays
gggttaataggagaggcttcagtaaatgcagttttggacattattggaagaatggatggatgatgagaagtttgtgtttatgtttggtttctacagaggatgttcagcaaaaggaaacacaattttgtcaaacaccacatcccttgatatataaattctactagtgagatgattgaagcatttgtatccttatgagatgaactgtaaccaagaaagatgcaacattttgttctaaaatagagtttcatttcattatagggtctcagctttggccaacaagcacaaccaagcacatgaagggtggagtaatttggttttgtgcaaaagagcatgtgaagaggagtgtcatagtcatttgtgcaacttggcatcatgttgatcagataaatagcagtgttaaatgcctcatcctagtaccgtaagggcatctatgcttgggcaagaagagctaagccagtttcta

SEQ ID NO: 81050 - DNA, 808 bp, Zea Mays
cgggaggtgtcagctccactgttttttatgacgttgggaagtcctttgtcacagatatcgagggaagagtcgagctcgggtgaggcggaggcggaggcccgttcgaggttgcaaccaagccttgtctggagacttgatgacgcgcgccacagtctacggagtggccctccacgggattcgtgggggagcaggtagccgaggcctggttcaggcgaggcggatcttacacccgaggttgagtttagcgtcgggcgaggcggaactcgtgcttgaggtcttggtccatgtcttgtcgtattacacgtcccgtcaggacctgtcaggcatcgtgcgcacgcgtaatgatgtagatgaatctttgacaatattgtggtcatgttgaaagattcacttgcagccttacgtggggtaggtgcgcgcattaaatgttgttgtctcccaacggacttcggccaagctttgtctttacttgtccggggcaggctcgagcgataaggacatgaccaccctaggatgagggatcctaggccgagatggaggttctctcgagcatccgttctgaccaaggcagacctcgggcaaggaggagttttgggaagagccctgagggggacctcggacgaggcggagttttagtaagacccctaagggggagctcgggtgaggcggaactttgggaagacctctgagggggaccttaggcgaggcgaagttttggttccttgttcttggaggacgtaccttgagggagtccttgggattttaagctcgttttaggtgcataatctggtacccctaattattgtac

SEQ ID NO: 81051 - DNA, 530 bp, Zea Mays
ccaatcgcgcgcgccagtaaccttcttcctctccggccgctagtgcatcttcgcgaaattggacgccaccgctgtgggagcctataaattgccgacctcgcctgctccgctaagtagttgtgcaaccagtgaagcaacccgtgcctcgaatcatccactaaagctcctcaatttgggaattcccccaaacctgctttgcgccactgtgaaagagacctcgccatggctagctcacctcaggtccgctcataccctctgctcttttgtttcaatgtccttgtgtgcccctgatgctccctgaccccgccaattaagctaggacccccttagatcgtcgagaacgcgttggtttggccattgatcacacggtcaccgtggacagagcatgttagagcgtcgttagtgaaattagttaaggggaaacgcttgttagggctcgaattaggtctgcaccaatgtagagcaccggtcgttgcgtgaatcggccggtgtaggctcgccggagcacggcccagcgccgttcgtcgtcg

SEQ ID NO: 81052 - DNA, 552 bp, Zea Mays
acagagggagtatatgctactgaacatgtggcacgcggaagtgaatagttgcatgaaaatagatatcataattgcatgctgtagtggcctcgatatagatagcttgcttgaagagatggctatatactagaaacacatatttagttgagttccgccagggattgcaacttaagatgtcatgataacacatgaggatatttggttcaccaatgtgtagcacagtagcactgcaacaaacaacatatgttccaaagtttactatctatcgatgttcattttgtagcactagatataatccgttcataaggaaaatggattgctccgatcgctttcagttgttagactgtctctaacaagactctgtaaaaggtcctctccgctaaatgtagcaaacaaagttgtccggtacgcctccaacaagaacctatacaacgcccgttaaattgtagggtgcattcatcatccgccaaatgtagcggacacatgaaagctctctatccactgttcgctcccacatcgtctccgttcgctcgctccctcgtcggttcggca

SEQ ID NO: 81053 - DNA, 847 bp, Zea Mays
atctgtcttcggagttggtggagaaggatctccagattgagcaaatgggcaatcgcacccaagagttggagcagcaagtggagatacggtacaagaccattgaagtcctagaaaatcaactccacgatgtgcaagaggagctggatgaggccaacgttcatctagatatgcgccatcaagatatgaaccaagcaatggaggcagacggaaatagcgaggatgaggaggatccttaggagtttaaaccagcttccagtctggacacggcttactttggagtacccccttcacctacggccagtgctgcctcttctactcagggttagatgggtcaagaataagcattttagaaagatgggaagaccacataagcttagcttttggcaccaactattgtactaggctatagagtagatctcctaatattttgtaacccggaaaaacctgtatgggtaatgcaagatgaatgaatgattatcttcttttggttcgatataattttgtgtcgctatctcctcataatattaagtcactgcttgaaatatttgggcttaagtaacagtggcaaattcatatttttcagatggcagctagaccctgtcgtgggcaaaacgagcagatcccccccaccgccccaagctccaacgatgcaggagttaatggctcaacagaacaaaatcctgagacaaatggtgcaacgtcagctccaccctagcagtttggtggagggcaacagcagcgcccaccggccgtagctacctaccaggagttcttgagcacccaaccactgccattcacaagggcggaaggcccactcaacaccaatgtgtggctcatggtggtggag

SEQ ID NO: 81054 - DNA, 778 bp, Zea Mays
gaaaagtagggcttagatgatatggtatgtgaattgtgtctagggttattggacagttcgaaactacactaacaattttctttcctaaggaccggttcatggagcgaacacccataaaaatcgtacaatcatgtgataagtatgggtgcgtcctggcatagtaagtggtggaaccagttatagtatgcattaaacggtggtatggggatgatggggacatggggtaataccaaatccattgaaaagtgatgtgtgggagataggagagatactcatgttatccatttggcacggtaggaggaccttacatgaaaggggtacttttctattggtagaaatcttagtgggcgagtataacctggttgaaatcatcgaaaagccttgaagtaatcttctagttgcacaccaacaggaagtgtgtaagtgacttacaaccacagactgaatgaagatattcagacacccaatgagagagggaagaagtcacttctcatggaaaaagtgtcctgctgtcatttgggcccatttgtaagcccctccttgtggtagagtttgtagtgtatttgatgaggctgtacttaacatcactgtcatgaccccataagggggaatattttggagctgtagcaggtaaccgggggcataactatacttaggaggacacacccaccaacccggttacctataaatattctcgcattgtacattgatcagacacgcttaacaagacgctacagttcactgcttactgttttgttgagcaccagagttccctctt

SEQ ID NO: 81055 - DNA, 409 bp, Zea Mays
ctgggggtcttcagctttgatgggttaaactgggttggatggagcgggctcttggatccgcagggctctacgttggttatgggtaaccaagtaggcctccatcaacttctagacatgctcatccttggcttgcttcagggcttcaacagcaatgacttcacgactttccaaggcagctatacgggcttgagctgtggtgagatccacatggagctgacggctgtgcttctctgcatcttctgctcgggcaatcatctgacggtggtgccgagccaagaaatcatactgtgcatccagggtgagcaggtatgcagtgaggtacgcgactgaggggtcgtcctcaagcagctgctgccctaccaatgcacacatcctggccatccaaacgggacggtttctctgaaaggga

SEQ ID NO: 81056 - DNA, 595 bp, Zea Mays
ctacctagttgaatatgaaaggtagtgaatcaaatcctctcgcatcaggtgtgcatataacatctgatacatatttgtcttcataataatattacacaatcaaaagaattcattgatggaactgtcaggtacccaactaatgccataagtttttctatgcttcagtccctactgaaagtccaacaacaattcttatcacaacacttgtcatgtgtcctaaggctgcatctgaaccttgtgatctctaggaagcattattagatctaaagtggaaggagggaattggatcttgaatatctaactctcatgaataacgaaacttggggaccgacacccccaacaaaacacataagcctcatagacaacaaatgggtgtacaaagtcaaaacaaaaaaccaatgagccggtagacagttttaaagcaagactagtggcaattggattcaagcaaagacatggagttaattactttgatacttttattccaatagtcaaatcatccaccatttggtttttgtcttttctctagttgttacacatgaatggagcataaggcacatgacattaaaaagccttcttaaatggattgttggaa

SEQ ID NO: 81057 - DNA, 951 bp, Zea Mays
gaccccgcacgacgataaaaactcaggcactggtcgacttcatatcagagtggactgagcaccaggtcctggaaagcccagaagacactgaaatatggaggatgtacttcgatggctcgttgaggttgcaaggagcaggggcagggattctctttatcgctcccggaggtgaacaactcaattatgcactccagatcttatttccagtatccaataacgccatagagtatgaagcgttggtccatggactaagcatcgttgcttcactcggcatcaagagattaatggtgtacggcgactcactggtggtcataagctaagtaaacaaagactgggattgctcgaccgactcaatgagcaaatattgtgcagcggtgcagaaactgtaagacaagttcgaaggactagaattccaccatgtgaaaagggattgcaatgcagcggttgacgcactatcaaagctgggatccagtcgggcccaagttccacctagggttttcgtccaagaaatacagcaaccgagtgtcgccacaaatcagatggaggaatgccatgttctgagtcaggcagaggcagatcccaaagactggagagagccaatcatcagatacataaaagacgagtaagaacctgataacaaggccgtgacagagcgcatcgcgagacagtcggcccactataccattatagggggcctgctgcatagaagaggggcaggaggagtcctcatgaagtgcattcattcggctaccgggaaaaagttgttagatgagattcatgccgggcaatgtggcgtacatcacggactctggttggaaaagctttcaggtatgggttttactggccgacagcgaagaacgatgcatccgagttagtctagaagtgtgaggcatgccaattcttatcaaagcagcagcatgtgcctgcacaacagttgcagactattcctat

SEQ ID NO: 81058 - DNA, 300 bp, Zea Mays
ttggaataccatgcaatcgcactatttgatcaacataagtttatgcatacttctctgtcttgtgggtggtgtgcactggcaagaaatgagcggtcttggtcaacctgtccacgataacccaaatagaatcatggtgcctggaggtattgggcaatcccactataaagtccatgcaaatgtcctcccatttccaagatggtatgggaaggggttgcaaaggacttgctgtcttcaagtgactggccttgattctctggcaggtgtcacactcggatatgtacttggcaatttccctcttca

SEQ ID NO: 81059 - DNA, 435 bp, Zea Mays
gatgcatgatgcatatgtatgaatttaacagaaaatagcacaagacactataatgccacacggtagtgaactaaacacaaagcaacaagacaccgcaaacaaccacatgtaagcactagctatctatatgtcatcgagcacactaatccaacaccactggaaaatgacaaacactatcatataattaaccaacgcaaacacgacatcatgagtacaagcatttatcccatttgctcgagtctctcattagttcttctattattatctctactactcttaagaacagagtgtaggcgtccacatggtgcatggttctgtcgtgccctcctccgtgcatgcccctgccccacccccgaccgtgatcccaccggcaaacccgaccgtcatcctcctcccccgcctcccttccatcctcgcccgccccttcaatacttc

SEQ ID NO: 81060 - DNA, 428 bp, Zea Mays
aaacgactaaatgttgttaagtgtcctaggggacgaatcaccctagacaccttaactcctttagtagcatcccagagcatgagaggcttcatggcttagttcctttagtagtgcctcgagacacgaggcccctcaaagattataatcttctagctagggacgttcggaggcactaggccatgtagagtcctaagacctagtgtgccctaggttgcttattacttaacgggacttggtgtagctattattcttttttagtgcccccaatatcaagttacccaatgttaatccctaccctagataggactaggggtgatcctagggcatgatgccccgagagtgataatcctagtagtcgggaccctcaatagcttcctataccatgatcgttgaatgtgtttttggtagcattgggtggtatgtccttc

SEQ ID NO: 81061 - DNA, 520 bp, Zea Mays
aggtttgggagatccatactttttcgatcagaccttagggatatgagaatacacatgctatcctagagaagaattcactgttcataagaggcagacataaaggtggagtatgaacaatgggctagaactcccaccacaaacaagaatggggagagctaggaggtcttgatgctcactagtgtttgcttgttggaggcagacataaaggtggagtgggactaatgggctaaaactcccaccaccagtaagagttgttggggagcgagttaagggggagctaggaggccttgatgctcactagtgtttgtgcttgcaaccttgttctccttattttggttagacctgtgagatccgagaatacacatgctctcccatagaagaattcactattcacaagaggcatgtataaaggtggagtaggaccaataggctagaacttccaccacaaacaagagttgaggggaagctaggatatcttgatgctcactgttgtttaagcttataggaggcagacataaag

SEQ ID NO: 81062 - DNA, 975 bp, Zea Mays
aactatcggtgctccggtgcggttgacaccaaatttgacccataataaccatttcccctccatcaattgcagagttctaactctaaatcgctctgtccacggtgacaacacaaaccaaggacaatccgtggtgttcccggtgctctggccaaatctagcttaattggccgggtaggtaagcatccacagcatacagagatactaaaacgagagtaaggaagccatgaacagacctaaaacgagatagccatggttagctcacaccgcacggtgtttttgattgatttgggggaaatcccaaattgggttctctggtgaacgatttgagacacgagtgggtgtgctaggtgcttgaatacctagcggagctgagggcacactcaatttataggattcatgtgcggtggcgacaaatttggggaaagacgcacggcggccgaagaggggaagagtttctggttgctcaagcatggcgattgccggtgcaatagctcttgaggtggtaaatccagatgcgccacgattactacatcatggtaaaggactacggcgtggcacatttggggtcatcggcgtaccacggcgacaccggggatccggccacgttgcgcggctgcaggcgcagttgataagcttcaacccgcgatcaaatccactcccttgctgatcttttcaccctcccggtactatcctgcccgagttctacacgaatcactgcaatcagcgcgaatccttgcgcggaggttgccagtggcgaggttcactgaatctgatcctatccaatcactgtaccattggaaccgttcatcagagcgcctgacagagcagattaaaggccttggttctccaatttttgtttgacaactttataagccctctgtaacaaagttgttgttctatatatcaactacaattcgactatagagaccttgcccatttacttattccctcaagctagaatcgaatccaatgttc

SEQ ID NO: 81063 - DNA, 425 bp, Zea Mays
gctgagggcatctgctaccacgttggccttcccggggtggtagtggatctcaaggtcataatctttgatcaattccagccatcttcgctgacggaggttgaggtctggttgagtgaaaatatacttcagactcttgtgattggtgaagatgtgacatttgttcccaatcaggtagtgcctccatatttttagggcatgcactatggctgccaattccaaatcgtgtgtgggataattctgcttgtgtggcttcagtaagcatgatgcataggcaatgaccttctcattttgcataagtacacaccctaagccttgccttgaagcatcacaaaagacgacgaaatcctgatggatgtctggtagtgttaaaacgggtgcggttgtgagcttcttctttatgatttggaagctttcctcacacttcg

SEQ ID NO: 81064 - DNA, 672 bp, Zea Mays
agcaacatcaccaatttacaaatcatagtacagttcatgagtcatgataattgacagttcacaaatcatagtacacgtccaattcacaaatcatagtacagttcacaaataatagtacatgggggcgagcttgcagtttagtagctatatttggatttccttcgatctctatcgatctcttccttctgtctcaatacattcattgtgtatattgtatggatatgacttgttcagaaaatccattgaaaattcctggccgtccttccgatgggtgtgactaagggacatcttggtacgcagagcatttagcatactgtcctggagtagtaacttgatgtgaccgcggggtgtaacatatcgcccgagcagttgaccttagtccaaatggtgtcgtgttacgcaaagcggcgtctattgcctaactcattttcaagtggtttgaattgcttattgaatacttgcgactgttcggcgagtgtggtaggaagtggagtcacccctgtcctctataaatagccttcttgcaccattgttctcttcactcatccttcaatcaaacgttacttctttcacctttcatcctcttctccatccgaccatgggcaaaggcaagagaggtcgcagctcgccccaccatgtcggcgacaagcggaagcgggacccgagccctcc

SEQ ID NO: 81065 - DNA, 340 bp, Zea Mays
gctaactatgcagttctccaccatgggcaccgcgacaaccttgaacatgccatcctaatggttatccttgctcaaatttcagatactaaactgctcacataaacttcttgattgaattttgagtccgtcaaataatctcccaattaagtccatcatcctgaacaacacgaaatggagaagttgcacatttttgcacagttaacacaaaaaaagtcagcagaaggaaagaagggcgaatgctaaattgagaagcgagagtaacaagaggacctgcgtgacatgttcgtctgtgtcaaggtcgaaagtgaatcagggctcagatgtccaatctaggcaaggc

SEQ ID NO: 81066 - DNA, 535 bp, Zea Mays
aataagtcttatgccgctatttatagaggattatttgtatttctaagctattcctatttatatagagtctatccactccggtagggcaaaatagatcaactcctagattttcgttctgacggccacgtgttccacatgaagtttcttcgccttgacgcactctctgttgtgacgccacgtgccgccaccggctccctccggaaccgcctccgccgagttttgaagcccaaactcagcaaaattcatcggtcatagcgtagggtggtttttaggatcaactaccaaaccaccataagtatcgcacaacgtgcgcatcactcacgtcctggacacgtgtcccgccagtcctcgatcgcgccagcaacacgacctgctctatcacgtcctcacgcgagtgtgtgtcctaggtgtcagccaccacgattactcacctagcgactctggtacctcagtcatgtcccagtgctcatccttcatcgctcccggtccatcgggataaacccgcatgaccttcaccttcaccatcgaccattgt

SEQ ID NO: 81067 - DNA, 728 bp, Zea Mays
gatgcacacaccttgcataattgcagggacttcaagaaatcaataggtcatggccagcctttacaagaactcccgccaccacctccgcgatgggggcagaatcttgcaccaccaccgcatggggacaatggtgcatcgttaccccatatgacgatagggagatcaacttcatacttagggggcatgactcccaagagaacaagaggcagtagaagttgtctgatcatcaagccttattagccatgactgatccgttggtggcattctggtggtctaaaatcccaatctccttcagtcagaccgatcaatggctcaacttcgaccacccaggaaagtactcactgctcgttagcttggtggtctgagaaagtcgagtcaataaagttttgatcgatggtggtaacaacatcaatgtcaccttccctaagtcattgcaggcactcgggatccctctcattgagatctatgagtcagacaaccccttcttctacactatgtagcgcatggaggaatacccgctagggcacatttacttgcttctgaccttcggcacgtcagacatcttccacatagagtcccttcgcttcgaagtggctagcttcaactgtgcctacaacgccatcatcgagtgacatgggatggccaagttcatggccatcccacattactcatacctagttctcaagatgctagccccatagggtgtcctcattgtgagagcagacttc

SEQ ID NO: 81068 - DNA, 498 bp, Zea Mays
ataaccggagggtgcttagacaacaacaagtagaaatgaatctgccaaatcctccactagtcggagctgatccagcaattgcagcccagatgcggataatgcaacagatggctgatactatgacagatatgcacgtatagatgcgacaggagcatcaggagatgcgccaagagatggaggagatgcgccaggagcaaagggtgcaacagcaacaaccaccactacctccaccaccaccatcagctccacccaaggataaacaccgggagtttatgaggcacaaaccaccaaccttctccaactccacggacccactacaagcagatgactggctaaagtctatagataagatgctcaacatagctcagtgctcggacagagagaaagtgctctatgcatcgggacgtcttactggccccgctgcggattagtgggatgcgtactgcgctgctcatgctcccgttaacacaatcacctgggcagaattctccactcaat

SEQ ID NO: 81069 - DNA, 405 bp, Zea Mays
gaggggaggtcactagcgcgagtgattcgtggctttcaccgcggcatgaccaccggcgttgaacggacatgctaaggcgattcactgcgacgtggtagagcacctaggcacgtggcatccgagcggcaggcggccaactctgacgaggttatctggaccggcagtaaggcaagtgggtatgacgactagggcgaaacattgtcccaagctcatccccagtgctagatttttcatccgatgatcgttatttgtgtttaactgggcatgaatcgcgacgccgtagtgaatccgggcgcgagatcaccgacgacgggggggctgaacctgagatcttattcagtttactgtactatcagactttcatcagagcgtctgacagactgatttgcagggcccagatctcag

SEQ ID NO: 81070 - DNA, 363 bp, Zea Mays
acagcaccatggcgttggctccaccatcctctgactgggtcatcgactccggtgcatcctatcacaccactcccaccacaggcatgttatctcgctcccacccacctccttccacacaccctacctcgatcgtcgttggaaacggatccactcttccagtcacctcagtaggtgtctcggtgctccctggaccgttctatctcaacgacgttctcgtagccccacacatcactcataatcttctttccgttcgtcggttcgccatcgacaattcatgttccattgagtttgacccgtctagtttttctgtgaagaatctggccaccaggaccccactcgcccgatgtgacagcgtcggggccc

SEQ ID NO: 81071 - DNA, 486 bp, Zea Mays
ggaagttggatcctcgtgctgtgaagtgcatttttgttggatatcctgcagggcaaaagggatacaagtgttggagtcctagtgaacgacgtttgtttgtaagcatggatgttgcatttagagagactgtgcctttctatggtgagaaaacagatctaaatttttttcttgattctgtctctactagcacatatgaagctagtcgagagggggagaacagaatggttgattcaatggaacaacaaccaaataaaatggaagtggtgattggtgcttctcaaaaaatgcaagtaatgccaagtgaattggagccacatcctagtcacgagaataataaaccttgtggagacgacttacgatataagggcgaagtatatacaagaaggaagtcccatgtgcaatctcaggctcctgaaaccaattcagcatcaagtactgagcagttttctccaaacacattagaggctataaatgtacctttgacgt

SEQ ID NO: 81072 - DNA, 968 bp, Zea Mays
ggcgcatgcatccgtgagcttcttctctgtaacaataaaggcagaaggaaactagaaaatgcagctgttcgtgcgttgcgccaaaacctgtgttgatcgcgtgttcttcgtgtgagagagtgagaaggagggagcaaagacccaacgacgttggatcggcctgtgggaaccggtcactctagcgactcccggttgcatgcgcaacgagaggccaaaaatagactataataattttcgacggtcatatatagctcaaccaccgcaggcagaaggccaattgcgacaaagagctcgacggaggatctgtagggcggcctgatgaaagaaagaaggacaagtggaggcacgacgaagtgctggtagccacaacgggccagaaaggaaagaaaccgccgaccgaggaagccaccgaccatttcgagaaactgctcgaggcccccatgtccgaaccaccgctatccggtccgacacgcctataaggactatgggttgcagaggaaattcctaagcaagggaacaccgcccgagatgggccaaaccccagcagagtgacaagaaagggaaagtgggagctgctttccccgatgagtcagagtgtgtgctaatcttcggagggtcagattactatgcaccgagaaggcatcgaaagttggaacgacgtgaagtactctaggtacaacaagcatccccgaccttcctcgattggtttgaccacgccattacttatgatcctaccgatcacctggagcatatcctccgacccgggcgatacccactcattgtcagtcccattgtcgagtcagtgcaactgacgaaggtgttgatggatggagggactaggctcaatatcctttagtcagccatgctcgacgccatgggcctcgaccgagagtgcctccgaccgataggagggcccttccatggggtcatactaggatgacgagcgaccttgcttgggtggattgacc

SEQ ID NO: 81073 - DNA, 1049 bp, Zea Mays
ggaaagcccaccgtgtgggacctctgaacagacggccaggatattgtcttcaggaggctctaatagcatgtctttgggtatgacctcctccagtacttaatcaaaatctgatattgaaagcccctgaagactgacaagggccgacagagctggagagggaatatcactacccccctcgctacctctatagtgccggctgttcttgcggatctgcggaacttcctcttcttcttcctcttcgtcctcgttaaacaggtagacaacaacctgtgcacgatcacaacccttggcatcaacctcaggaatggcctctgccggtacatcatcaggaaccagtgcagaagggcctgcaccctggtccaagcacgacagtcgcctcttcttccttttctcctcgacaggtgcagtcgggcggctcactcggcatggacgctttgggcgggcacctttgggtttccgagtttccacctcttcaccaagttcttgcccagctgtgatggccattggctcagtgtgggctaagtcggatgattccccagccagcaagctaagcacatcatctatctccacgtcatcagtgctagccggcatctcaaaatgagtctacctctcacccttaggaagactccgaagtggggcaatcaaagcctcaatgtcctcagaagagagtcgcactctaagacccaggctaccgtcacgagaaggagggttggacacaaactcagagaatggcctaagtggtggcaggttccatgcataataggccacaggagcaccagcatttgaaactctacccctcaggatcatgtacagtcgactcatcagatcttcagtggaaatttttctgttcgtgacccgggtagaatcgttgacaccgctgtacaaataagcagggcaggccctatcctttaatggttgaatgttcttgaaaacgaagtcagcaactacagcttcagagtcagacctctatccttcagcaagcagatctcggcaagcagtactttagcctctgttatctccgaaggggtcgaagattctatccagctcgg

SEQ ID NO: 81074 - DNA, 1143 bp, Zea Mays
gaaaaattcagagatagccttgcctgaagttactctgtcaggcttgtatcaagaaactgaaactgaacctgaagtcagaagtggtcaccgtgatatgagaccgatttaagcacgccataacttttaatacgttcggttttgatccaggaatcctatagtaagtttggagattgatgattagtgaacaacttttcttaagagggatcgctctgttcctaacaagaatcgagagataatcgggtgggatcatggccggttcaggcgactgaaatagatgagccatggtaaagtgttttggatggatcagaacgccagctcagctcgccgtcgttgatcaccgtccggaatcgtgcagggtgttgggtggataacaccgggaaaaaggtagctcgtacgtggcaccctctccgtgctcggccggagttactcaccggcgggcgccgtgactcagtggattccgccgtagtggcactcatgccgtagttctccctcactgtatcactttccgacgtggtaagcatgcgcgtgtgttactatccgtggccgggggccatccgttgggccgccgtgcctataaattgagcagggggtcacggcgaggtgctcgctgatcttcaagtgagctcagatacaactagaaattcacactgtcctctccaccttctctcaaatcgattgcacacggtgaaagcccagtcccttacgatcctatagcctcaatccccacccctaatttcatccagagactttgaattgccacttcccccaattcagtccgccgcgccacccaaaacagcccgcccgtggccagcgtactctgggaagtcattgtccaatccttgcgtcgttctagtgttcttgcatactcgcgaagctcacggtggcggccgtttgctctgatcgaccgtggtttggcgagaacatgtactcccgtgctcggttcccgccgtgcacgtggaccggctgttctcggggtgctagagttaaattagtgggtgttccgaggccgtcttaggtcggtaaagcctccccgataatcggcttgagcaatcatcgccggtcatggccggtatgtgcctcggcaggcgtgaacgatgagcgcgccgcggtcgaggactagtttggagaagaaatagaaagtcg

SEQ ID NO: 81075 - DNA, 514 bp, Zea Mays
gctatccccttggtcacccaaaccccgggatcagacctcctgtgcaaactcaggtgttcccaggtcagaattcttttaagtggggtagtgttcctggcagacttaaccatcttgccatcccaaggaattgatgtaattctaggaatggattggctagctaggcacaagggtgttatcagctgcgcaagcaagactattcttctcatagatcaccaaggaaaggcagtttcctgtcaagcccaaccgcccgcaaatgatccaatgatatttaatctggcagtagaaagcatgtctgtaatcaaggagtttgaagatgtattcccagaagagttacccgggatgccaccagaaagagaagtagagttctatatagatctcattcccggcaccgcacccatcgcaaagagaccataccgcatggcccccactgagttggcagaattgaagcttcagatttcagaactacaacaaaaagggtacatctgtcccagttcgtctccctggggagcacccg

SEQ ID NO: 81076 - DNA, 571 bp, Zea Mays
gattttagtgggagtagactctattaaatgtttaatatgatttactctatcttggatatttctgtcttagtattttgcattattttgttgtagataaatggcacctagcacaccaacatttactttgcaatcaattcttgaaaaggataagttaaatggatcaaactatacggattggatccataacctaagaattgttctcagggctgaaaaaaggaagatgttctagacaccccaatgccagaggatcctagtgaagatgcaattgctgcagctaaaactgcttataagaaggcaatggatgctaatcttgaagtgagttgcctgatgcttgcttgcatggagcctgagctacaggtgcagttgagacaaaccatgaggcacacgatatgatcgtggcgctcaaggatatgttccagactcagcatagggtagaaaggttcaacgtgtccaatgcctttctggaatgcaagctagcagaaggcgcaacaattgggccacatgtaatcaagatggttggttacagtcaaaggttggagaagctacgcttcccaataggccaagagttggc

SEQ ID NO: 81077 - DNA, 742 bp, Zea Mays
aactttcctttcaggtggcatgcctggtaactctttagggaatacatctgggaattctaacacaatcctaattgcctcaatcgaactggactctttgtcatctactgataaatggtgacaggctccttcttctagttcaggtaagtacagcttagttactacttcctttccgaatggggacaccaacttgactgttctcttgtcacaactgacagtggcttgatttctgtgtagccaattcatccctaggatgacatctaacccttgagttcccattactactaggctagcggggaagtctatcccccttatttcaatccttagattcagacaaatcctatcgtactgaacttttcccccaactgaattaactcttaaaggcacgatcattggttctatggggatgttatgtgattctacccaagatgtagaaataaaagaatgtgtggcaccagtatcaaataatacttttgctgggtatgattcgactggaaacatacctactgccatgtcctgagcaccttggattgcttcggcctccaggtggttcacctttccacagttgtaggcctgaccccggactcctggtgcttgctgtgctgctccttgtcttgctgggacattgactgctaccggctgctgagctgctttcttggggtagttcttcgcccagtggttttgttctccatagtagaagcatgcacgaccttctacttgcgctggggctgctggaccattcggg

SEQ ID NO: 81078 - DNA, 480 bp, Zea Mays
attttttatcatacggtcaaaggaaaaacaaaatcataaaactactctaagtgtctctcaacttcaatggatatttagaactagtccatacttgaccttatcacccatctttgggaattgaaatgacttccatacttacggtcaaaggaaaacaaaatcttaaactactctaagtgtctctcaacttcaattgataattagaacaagttcatacttgaccttatcatccatctttcggaatcgaaatgactcccattcttacggtcaaagaaaaaacaaaatcctaaactactctaagtgtctctcaacttgaattcatatttagaactagcccatacttgaccttatcatccatctttgggaatcaaaattacttccatacttaggggcatgaaaaccattgattccctaaagaatcaccattattgtaacataatttaatctgcatctgcagaacacgcgttagtcacagtaattgtg

SEQ ID NO: 81079 - DNA, 657 bp, Zea Mays
ccattgactcaccacaaacagaattaccaatgtagcgctaatatggtaggagttggaacatggaaacactaccgattccctcacagatcgtatacgcaaagtttattactcagattatatttatatattagactagtatcatgctcgtgcgttgcaacgacacttaaattattgaataaatgttagtaaaagcaacagacaccgataacagaaaaagatttcaggctggatgaagatctattgaatgttgttcacaaccaatagactcgtgtgttgagaacaaacagaagaataaaaccaatcacttgaatccacttgtcgaatctattgaattgaaactgcttacatgttctaataaatttcactaacatgcagtaaataggcaaagttattgatattccacatatcatcagaatgcttccttacattgatggtcacactggctgtagaacaaaatacatccaaatctatactacttattaagacagcaatagtagtttgcctttttacgttctgccgttctgcctgttctgccttcccacaatctgcaccgtccatcccaaagccccgttttcgtgtgtcgtccgtccgccgtctcgcgtgcgtcgcctcccgtccgccctcccccttccgcacgcgcaacatggctccctctgc

SEQ ID NO: 81080 - DNA, 622 bp, Zea Mays
cctttgtcttctgctgctgaagtctcagaaattttgaaggtaatgatcgagtccttcccattcacactgctaagtcctctgggattggaactgaccagcctcttacagaaaaaggaaatctcttcggctgctgatcggagagacaagggccagaaaaagcagcgcatgatgaatatactacaagcgattgagcaaatgccgcccccagcttcggcaaataaagctaccaaaccgatcgatgccaaagcaaccgctacagtcgaagatgaaaacctcataaccactctgtctgaaattgacagactgatatcagatgtggttgtggagaaggaggtggtcacggcagcttcagacaagggaaagaaaattgatgaaacctcttcagagggagcggatttcgacctacggcacttgggcggccaacaactctctaaagaggacaaatcggagttgaaagaatttgcgatgtcctatggttaccagccggggtcaatgctctttggcggagtcaacgaagaggttgtgggatgcatccgcggccatgttggtgctaaaattataagtaccctgtctaagagtgttggattcccgaagcttgagagggacatcagttgctataggc

SEQ ID NO: 81081 - DNA, 458 bp, Zea Mays
gcgagtttagaacttcgccgaggtaggaagactgaatatctggatattcccctgaaggacaacaacaaaagttggcgctttgagtggttcactttggggaatcataataagaccctccctagttgattagggaggcagcttgatatgaggttggctagttggatagagggaccaacagattcagagtccacaaaggttgctgctttgatgaatgagattaccagcctgaaaagtagaggtctaactgttcaggctgtggtgattgattttgtgtaccgcaacattcagcctttgaaggatcgagttcatccagcatacttgtacactagagccaaagaccctacccaggtgaccgatagatttttttttgaaaaatgttctacttcgggttgggatgacgatgaaaggtgacatcttcaatgagggcgctcctcaggcctattcaacatggattttcc

SEQ ID NO: 81082 - DNA, 536 bp, Zea Mays
tgctaattgggtcgccctacatgctaatgtatgagcaagtggcgtgtgtagacacaggatgggttgttcgtaaccgcattgtttgcatctctacgcctagttccaacctagggcagtaacacctggtgacgtggcccaatgggtagtcgatatttaccttgttggccccaactcggtggggctatcaactagtcaatcaggttggtaccaatcacattgtactatgttctgatcataccaatcggtggtaccaacgagtccattggacgatcaagtcagtaccggtcgatgggttacacatgaccgaccctaattggttggtttggtcgatattgacctaaattggtcagtatggaccgactttagcaacatgacgtgttctggttagcccacatgtgtgtaatgtcaactagctattttgaaccgtttaaagtctaaaaattcaaaaaaatagaacctggtctttagatagaggggtgtttgagttcattcgcatccctcactctctatttcgtttatcttccttaatattgtag

SEQ ID NO: 81083 - DNA, 492 bp, Zea Mays
aagacgactgcgataaagtggagcagaatgatggtctgtgggtaagtgtaaaagcgtcgagacaaggaacatcaagtaattcccctaccagactacctcatatgatcaaattaaaagagaaagcaagaagtttatactttattccttatgtacacatccattgtatttttttagtaggctgccaatttttccaaacaaaagtatgtacacatccaatgtttctagtagaaaacaagttatttagcgagaggatgtaatatactacaataaaaaaacatgggtcaatcatttggtcctaacagatggggcaatcatttggtcctaacgcatgggcaaaaatcagtgtaatttcacaacagattgttgttagggactccacacaccttatgggggagagtagtagggattatgtgttccaaggtgacaaacacagacagagctgctctacaatctgatactgaaaaagaacaataacaattatgatcagtatga

SEQ ID NO: 81084 - DNA, 327 bp, Zea Mays
aaaggcgaaccatgtttgtatggatacgtcttcaatcctataaaacctggcccaagataccacagcccactcggaccagaataccacagcattccagctatttgggtcccgcctcactactgtctgatgtgacacagtaggtaggaacagtttccaccaacataaacctctgcccaagaaaagcccaaaaataattcctcgcaccccgctcaaaaatacatttgtattttttgattttccaaatatctctaaatattcaaattctagaatattccaagaatattcatttccttttctttttctccctatgattataaaatccaaaac

SEQ ID NO: 81085 - DNA, 820 bp, Zea Mays
gttgctcttggattttgttggattgcagtagtagtgaggaatagttcgacctggtgagggtcgtgaagattgttacacacgctaggttgttcttgatcctacgcatcggggcttatgtggccaccgggtggaatcatgggtcaccttcctttcttcactgttacatgattaattgtaatttttaagagtttttttgggtttccctggccatcaatctggccattgtttatggagttgcagaagcgtgctggtgtggttgcactacatgctaggaacattttcagcgaccacgctatcattgacttgggcatcgcacccaaatgatattaccatattgatatttccacgcacatttataatcatccattgcaacgaaggtattacaaacaaatcaaccgtgggtagtgcttgttaagaaatacgaagtttttctcatcaagacatgtaaaactttaggatgacatgagaaaaatacaaatcaaccggtcaaatcaaaggttagcaggcaattaaaaaactacagaaaaagggcttggtacaatacagtactgctaaaagaagatttgcgatgcaaagcctgctcaatgcagtctagacatcatggcagccaccagcggcagtaccaggcaatgccctggcagtcacaagcgatgttctgggtgaacagaaaaaagaagagggtattgctgagtcctgaccaggatactttaggcgatcaagcaagcacgcacatggtaggaaaggcaggatatcagtacctcggccataccttgacgagacagagacaccaccaaatcctgaaaaaggttgcaacgttctt

SEQ ID NO: 81086 - DNA, 370 bp, Zea Mays
cgtccatcatgcttagcacattaaaaatttcaaggggtaggatttgcaagcgaacaagagctcatactttaaaaacattgtagcgtgttagtgtgcattgctttcacaatgtattcatctgaatctgctttcacttcatgccacttcacaccacctttgctttgaccacctatgcaagaactatttcgaatagccctcaagaaccgaatgttggtcacctcttgaagctcctaaaaggaaccacaacaaggcaacagaattaaagctaggatacttcccctcttgccataaaatgaagaaggggcaatacgagaaggatgaatgcattgaaaaataagtgaatgaggtaaatatacaaacaattactaag

SEQ ID NO: 81087 - DNA, 349 bp, Zea Mays
cagcgtgccttggtgaggccgaggactccggtgcggcctccggtgtggcagaggttatctggcatggacaaggttcactctctggagggcgcgcgcaagacctcggtctggaggcgccttgcttcgtcgcatgatcatgccgcgatggagcctgtcatggatctggagaggcagccgcccttacagcccaagcgaaaaagaagacgttcaaaacgcgggaaaggggctgcggtgttggggaacagtcagtctccccctgctgacatggttcctctcacgtcgaacttgccctcttgtgttctggaactttcaacggacatggcaagagaagaagttgcactccgtcgag

SEQ ID NO: 81088 - DNA, 920 bp, Zea Mays
attttactaatgggaaaaaatatttctaactacacgaatattcaacgactaaccgaatataatccaaaatgaacgaaactgcactacaagcgaatttaagcctatgcaatagctaaaccaagtggggacttgaaaaaaaaatggtgatatatagatccgactcaggcgatataccgagcatgtgatgagagacgtactgaactccactattctacacgatttagttacatttttcactaaactactcctgcgattaggtattttaacaaacattttacggttaaccaccacatgcttgccaccaacaagataatcatcacgaccaacacatttatctaattcgcctgataactcaatcagcaggaatagtgaatcaaaatgcatttaccaaatcgactagaattccacgtaaatgacaatgatcctggttcaagtcttcagtcccatctagcaagcgatgcatagacctcgctcctttaccaacagatccatggaattttttccctccaagcacacaaataaccacacgtaaataatcacgtaattagcaataaaggtttggtgttgggtggggacaaacaacacatagacatcgagtctcaccggcgatagggaactgcagggatcgagatagagcttgctacggcatttcgtcgatcatgctgaggcacgacagggaggaagttccatggcggccattgatgaggactggagcagggagagacaccagggcacagacgagcgcggcctggggccctgggcaccagagctgagctcgcgtcggagctgccagaagagagcacgccacacgcggctggaggaggagcgcgtcgcgcagtcgggcctaggcgcagcgtcgatgaagcttgactggggcgaggtccaggcgcttgttctggaggtggaagagaatggcgggg

SEQ ID NO: 81089 - DNA, 829 bp, Zea Mays
aataaaagtagaaggagatgtgactcgtcagtcaaaaggaaatcagcatcggaagatatgcttggcaacccagccatagcggcctcatcactcacgccagcgagcagcgacatacatgcgcacgggggtacgacgtcattctccttccagaatgttgggttcagtatgcaagtccaaaatctcctgctcgcgcgacgtcggctcgctgagaatatcattggagtcagtattagagccaactccacttcatcatatgaatttgtctgtgtatatattattcgtcaccctatagatcactatagcttaaaaaacgtagaagatttgttaagtcattataggggtgagtaatcatcaccgttatgctatttattacctgaatcaactattcgatccccaaaacgcgctacccaatcgcagtctgattataccacgttccaaccggacgtgctcaccgccgcacctcgatcagccagcacgctacaaccatcccaccacgtgccacccctcgcgcccccacgctccaccaagacggatggaactgtaatggtaactgggtgattgaaattataacgaaaccgtaacaacatgactaaaactacaacgaaatgactgaaactataacgactgaatttgtaataggatagattagttgaacaaatgtgtattgaatgaccgagggaaaaaggtaacgtattaataatcatcaaagtgtcttaaattagattctacgtgatcaatacttgaatgataataaatgtcttaaaatataatttgaatgattttatgtaaaacgagaatgatgtgaacgttgagtgactttgcaattgtg

SEQ ID NO: 81090 - DNA, 1370 bp, Zea Mays
gctagatatgagtggtagcctctctgttgcccatccttggtagtagtgtgtgcctcatgagctcatacaaaaacttggctactggagtgaaatctgctggagaacgccgagacccgtctgtaaacggaggtcaaaacagggcggcgacatgatcagtgccaggagctactccaccgtgagggcgacgaggagggtctgaagtaccatagcacatactatgaagcctcgtcgacgacttagggaaaccaaaaagatctctgatctaagcagcatgcaaagtcacatcctcacgctcaaacctgaacctcatccactgatggtctaggtcgatccaaactgtggcatagaacactctgacccactcctcaacatagctgcctccgaagatcaagagagagtataaacctggcagataggtgatatggcccttggactctggaccggccgttgaacggaaggcagtgagatccaatcatcagtgagccctcagagcgatccgagcagacagttgtgcactaaacaaggaatcctgggtccaagtgctaaaaagtggcacagccgctgggtccctctgagctagcagccacgagtccacgggcacgtgtctaaatcgacgtaccctagtagttgtggccctctaaagatcaagcagacgaggatccgcagtaagaggtttcacctcagtctcgtcacgctctcggaagagaggtggtggaatgggtggagcagaagtgggagcagtggaagctggtgtggtggaaggctcgagagcggaaggagctggcgaagtgggtggtggagtggagattgggtctgagggagtggattgagtagtggaggagcgagtccgagatgagaggcaacaaactcgaaaagtgatctaatcagagccaatcttcagctgacctccctgctatgcctgatctgctgcacgggtggctctgtccaactgtctcttcttcttgccccttgctactcaaggtagaaagccttgctctttcctgtttgaaggggcaaggagggtcttggtcatctcctccccctgatggtgtgacattctttgtccgcaccatccaaaactggctactaacacactacaagataatgagagaaggtaagcgagagcaatagagcagcacgtaaggactgatttagaatgaaatggctacctaggaatgtcttgagagagtggaaccaagcaggataggatatgcgcaggcgggtaggcgggatcactgaaatgacagaagaggtgagcacgtattagtcacatagtcataagtatatgaaatgtgaataaatacataaacagagagtcatgacacagagactaagggttttggggaaacaaagatcaaacggcgcgagaa

SEQ ID NO: 81091 - DNA, 345 bp, Zea Mays
gttcggggacctctgccgctggccggatttctcacccgaaaaccaacgccgccacaggatcgcaccacaccgtggacaaccccctatttgcctctgccattggtaagtattccaccaaccatgtccatgatgttctccatgttgcgttgcgtgtctcggatctaagtattacgtgacctggtgtggattgcgctgctccggtaatgtcctccaccgttgtacactcagcgctgccgtgtccttgtgcggattggggaagacgcaccggtggccgttcgattccaggggaacggtcccgattagaggagttagggattggagcctgggtcgttgatctgcgatcgc

SEQ ID NO: 81092 - DNA, 387 bp, Zea Mays
ttaataatcaagcatgtctgtgtagcaggagtaacttaaatatgtttgtgtagtatttagatgacctgcacatcattttaacgttgaaattgaagagtaacatgaaaacaaaactttggatagagcaagtgtattactggaaactttaatttaattttgtaacagattaaacctcaactacacaataatcatgtgtggaggaaatatggcacacataggatgatgggataacagttcatgatccatggcagatcagtgcaacatctgttaaacttaacaatgcaatccctaatccataaaattaaaaggtggcatcgacagcctgcaactcacacatctccaattttcacacagacacacaacaaaaagaaggattgggatgtattc

SEQ ID NO: 81093 - DNA, 819 bp, Zea Mays
gttattataagagaactctgccaaagaaagacacttatcccaattcttaccatagtgtaacacataggctcgcaacatgtcctccagaatctgatttactctttccgtctggccgttagtttgaggatggtatgctgagcttcttatcacatggttccaagtgactcttgcagctgctcccagaaacgtgctacgaacggtgctcctctgtctgacacgatagtccttggtattccatgcaaacgcactatttggtcaatatagttttctgcatacttttctgccctgtgggtggtatgtactggcaagaaatgatatgttttggttagcctatccacaatgacccaaatggagtcgtggtgccgggaggtgttgggcaaacccacaataaaaatccatgctgaggtcctcccatttccaagatggtatgggaagaggatgtaaggtacccgctaccttcaaatgactagccttgattctttggcaagtgtcgcattcagatacatacttagcaatttccctcttcattcgggtccaccaatacatggatttgagatcatgatacatcttgttactgccgaggtgcatagagaatttggaaagatgagcttcatccaatattttctgcctgagttctggattcttaggaacaaccaatcggtcttcaaaccatagaactcccttgctgtcctcacgaaagcatttgtacttatccaccttttgttcgagcatctccttaatgacttgaacacccttgtcaccaatctgtgccaggactatttgctcatgtagactgggctctactgagatataattcaa

SEQ ID NO: 81094 - DNA, 726 bp, Zea Mays
gggggctagggaaaggaaaggatcaaaggaggagcagcctaggggggttggggggcgtcgattgctgaatgagagagaccggcggcgtcctgcgtgcgctccagctgccatatgggcgcgcgacgcatcctcaacacggcctgatgtgctgactggaggctggaggctggagagcaggaagaatcatataatagtgtagtgcaggatctcgactcgacgcgcgtagcaggccggtaggtaggcaggcaggcatgtcatccaggaaaggcagaggcagatcggtcagtaaagccctgtgccgtgactgtcatccagcctgaaaggaaagcttcaatccaacggtgaacagcgccggtgggaagcgtgtgctgcccttgtgggcttcgctttcggcgaacaacgcttgcactgatgaaaccgataccgccggccgccgctagtcctctgcacacatctggctttggtcaaacgattcacgatgatgattcgatgaaggaagctcgccagctgagatgagatcgacgagaccagttcgacagacgggcaggcagtccatggggataggcgagccgagggagggacgcagatcggcacagggcgggagacgagacggcggtttttcgggaacatgtgtgtatggagcatgggcatggagatgtactgcttcgaacaccttctcctgcggcagattctggagctaggtcgccagatgatcgtgagcttcat

SEQ ID NO: 81095 - DNA, 318 bp, Zea Mays
ctcgggcgtgtcgtggcctcgagcaagtcttggccttgggcgtgtcatggcctcgggcgagtcatccggtgtgccaggcggtcgagggcttcaatggtcggctcagctgtagaaggaaacagaccgcagatagaaggaaattgagatcttcttcacaaggaaaggggcaacgactagggggctcatttggggctataaaaggaccccttaggcacccatttgaagtatggatgtgcattaaacaagttcatacatcaagtgatcatattctttctctcctgctcttgtgtatctctctagtttgtgcaaaggcgcagt

SEQ ID NO: 81096 - DNA, 592 bp, Zea Mays
aaaacccagggactgatgtacaaatattccctagactcagtgatcatcgcccacggatggcgggttgatttaagaaaagccgaggggctcatatgcaaaagatcatggccgaaagggtatcggacgaccctggccgatcgatcgcgcaccaaccgcccagattagatcttcaaacacgccgaaccggtatcctatcctggccatcggatcgccatccaatgattcgtattttaagtaccagagatcaacctgaaccatccgatcgacatcaaccggtcgcgggcaaaatgctacccagatttaatctaacggcccgcacatattctcccatcccactctcatctctcccctcaccagagcgtaaggcggcggcgcccccaagctgagtggtggcgccatggccggagcttgccgagagacgaccccgatgcccaacttcgatttaaacgcatgctacgcagagcggagaggatggcgaattcaatggaggggttcttaccgagattcgtgtagcagttcgccacggccacagtaaatggcggatccgcggtggttctttggctacaacgagcaattccgtacaccagaacag

SEQ ID NO: 81097 - DNA, 330 bp, Zea Mays
tatttagaagtgagtaacatagataaatttgtttctatgcaaatccgagaactttatagtgaggaaatgtatttacgcacttcaagttttgttttcttctaagttgtagatgccccaggttaataagtttaagttgtggtaaggttaaggagatttagtgcttaagcatggtttacgagtgcttaatgtttgaattagatccgattaaataagaagcgtaattattatagttagtcttatgacgaaagctagcgtttacttgtgattggttctaatgtcttgctagtcaatatttaatcctctactgtgtaacattatttagtaacgtac

SEQ ID NO: 81098 - DNA, 455 bp, Zea Mays
gaaccatcgccgtcgtaccgctgtaccggtggcactgccgttcgggcctcggtttggcggggggaaagcactaacgacaagcatgttatctagccatagcttcgcgtagtgtgtggactgaagacactgccgcaatttcttgccggtggtgaagctgcaccgccgtccgcctggtgtcgtggccgggaggaaccactccgagaattccggtgagaaccatctgcacagctaaaccatgtcctcaatttcgtgtcgtgtcgtttaatttgagtatgggggtgtggagcgccggattgagatccctccggcgaggtagccactgtggccaacgcggtgccgtcgcgacgttggggggaaggagttattaggtccttggccgtaggatttgagatggacggctgggattagaagtagcatttaccccttcgcgtattgaatccaagcctttggcgcct

SEQ ID NO: 81099 - DNA, 492 bp, Zea Mays
aaaaattcagatttttgcttctccaacttttcacaaaagaacacatagataatatagttctaggatttgaatccgaacgagatgcaaacagaccaatcaaaacaatatcaatttttatgtttttggactgcgcttaaaatggtggatattctcaggatcagacaaatttccacagttatacaaattcgaacacttggatccctctgtcatctataacatattggagaattaattcgattattacccttgcatcttattctctttggtaacgtgtgcagtccaatttataaaaatcaaacgcctaaatgttccagttaatgcaacatgtaggccgtttcagagtgagcacagcaacaacttgcgagctcaagaatcaccacgacgttaacatgtcggacacacgacagtggagtgacggaatacgctacacatcatgaggagctagagcggtggcagatccggataaacaagggataacgatagggagataat

SEQ ID NO: 81100 - DNA, 398 bp, Zea Mays
tttcaagaatattcagccattgaaagacagggcctacccagcttatctgtatcgagggctagccgactcaactcgggttactaacagaagaattccttctgcagacttggtgagtcgactagagatgatccttaggggtaaagtgtcaaatgttggtgctccagtggcgtactcggcctggaacctgcctccttccaaagccttcaccttttttgtgtcgaatccacctgccactgatggcagcttgggtcttagagtgcgaccctctgctgaagaagttagtgtcttggttgcctcgctcggggagattcctgatgatgaacggcaagtccactttgaggtgcccctgaaccctagtgatgcagagataagcgctatgcttgatttgctggccgagg

SEQ ID NO: 81101 - DNA, 454 bp, Zea Mays
caagcgcattacatccatgcacaagtctacaccaagaaactatctgcgcacagaccaactacaggcacagccagaccaacataataaatgcgccagaccaagcgtgcaacgcccctataaacatagccggatacgcgaaggcacagagcctcatcatacaaactatagtacacacttacaacgagggcatcacaccttacatcggttcaaccttcggaatgattctcatctccctatagttaaataacattatcctaagctcctcaccctcaaaaagacttcgcaactccccctcacccacactcgccccagccggcgaggacaacaattcctgcttgccagccctgcccacacgaagccgaccgccatccacctcactcactctacgcttcgccaccgcccttcgccgcctacgcccagcactcggaccaggcacaacttcagcatccgcaac

SEQ ID NO: 81102 - DNA, 478 bp, Zea Mays
cctatagcaaaattgtagctggtatatagagctacaagtttgttacagatggattagcaagttctcacacaaaaatccgagatctgggcactgcaattctgtatgtcaggcgctctgaataaggattccgatggtacagtgctacacaaatatcacaggttcagagaatctcgccgccggtgagccgtgcgccggattcgcgcccaccatcgtgattcatgcctcggatgtatagattacgctcaagggtgaaaagatcttcacctcggatgaacttagagcattgttctgtcatatgtcgtgcccacttgcaccggcgacatggccaagcggccatcaccgaagtttgcgcccttcaccacggtcgggccatgccttaggccagttaccacgtcgcactaggtcactttagttagccaggctgtcgccagtggccttgccacggtaacatccatgaattgcttgcgccagtagctcc

SEQ ID NO: 81103 - DNA, 734 bp, Zea Mays
cctctgctagagtgggaggtacaggcgtgggatcggagtttcctccccaccacgagaagttccagccccatcatgcccacgagttcttgacggcatctggagaagaaaacatacttgattattacacatcacaattacacagcctctattacattattccaaacttgttctacttatacatactcaacttatacaactcatttttccttatttagactacataagaaaacaacctactactatactaatctagtcctctacatccttgtctgctctcgctccactgctagctttgggaggacgatcatctgcgatgttcatgggaggaggggccccaaagagatccaactccccataaggtcctccgttatccgctcctgttgcaccagctcccatcgctgcaactccggtggcacgttcggatgtaactggtcatacaacacatgcacttcctcgtgcaaaagcattattatacacttgcagattttccagggctaacgctttagctcttccacccgggctcgggcagtcgcctcgcaatcccaggctatagagcgtgaatttacagcccagtcaatagccctatcccgctccacaatctctcgctgcaaacgctcgacctctgctgacaacttagcgatgcgacgactatcatgcgcacgctccctgcctccatggcgtagttccatcattagacgttcaactttggcctccagatctcctatgggatcatt

SEQ ID NO: 81104 - DNA, 427 bp, Zea Mays
tgcataaagttttacccgaagtaacccgaagatatataatataatgcatgaaagcctttttggcatagaagacatcacaaattgggattctattagtaagcaaaaggccttaccaaatgatttaagactataaatctcagtcatacattgctcaaccagatgttggcacattgctatttgtcgctgaacggcatgaagcgaactttgagataaatggctagtaccttagcaacacgaagttgcgagtacatcgaaaggtaattctgagaattttttcacaacattggtgtgacaaaaaaacattgtgtgttcccgtcgaaccactttactcgtcctgtctaggacctctatgcttgtgttgcatacatctctcagaattataaatacttatagtcgctaaattgacttggcataaatggtataactt

SEQ ID NO: 81105 - DNA, 613 bp, Zea Mays
ggaagggggcatggtcggatgacatcgttggctgagaaccaggactcgctggtttgccaagctcgctggccgtcaaggacgaatcgtgttgtcacgataagtgagatcgaacttgttgagcgacccgacgtcgcaaggatgatgagtgaggcaagggcgtcaagaaggggacatggttagagggtgttgggaataggatgtcagggggacgggctcgggcaacatcgggaagaatggagttggacatatagataagagaaccagaccaagtaagaggacaggagtcggaaggactcgaccgatccgacgaggagacataggacggagctattttggcccacccaaaaattattttttatacttaatattaagtataagaggattttggaaattgaggggggcatggcccactttgccctccctctctgtgcctgcctctggcatcatataatcatataaataaaaaccaatataacacatacaaccaacacaatatatagtgccaacataatatataatactaacattatatatagtgccaacataacacaataacacacaaataatgatacataataaaaatgtaccatatttcatcaccaacatataatca

SEQ ID NO: 81106 - DNA, 738 bp, Zea Mays
tcctcgtcatcatcgtctgtttcttcttccgggtggttcgtgatcacgcgcttttctttttaacaactagtactaagaatctaagataagggaacaaaacatgaccaacgcaaaaaccggggggggggggggggggggcaagaattcgcaacgacacgactacacgaggccaggccaatggagcgtccaagctactgtaggagtcccagctttcgcggcgcgtcgttttcgttaggccgtagggggacggatttcgggatttgaaaacctgggcatattctgcgtccagaggattcgctggggatttggggggaggttagaatatgcggccgggtgcttgctagtactgaacaaaaaacaaagggcaccgaaagccgcggtcgcctttctcgcaccggcgccgggttgagatgagaacgactcgggtcgctgttctgcggaaatgggggcgcaggatatcgtgtggttgctggaaaaaaaacatgtgctgggctcgacgatatttttacccctcgacgacctcgaaggatgctgctatagctcctcttggccatagaacaggagcaggagtgcatgcagagctcctgcgccggccggcgagcatgaggaactgaggatggatggtaggcatatgtgaggaacatgtgttcggttcggtgacggtgacgccagccccggcccttgcctgtctgcctacgcaggagcctacctgcttcatccggctctggttcgtccatc

SEQ ID NO: 81107 - DNA, 1000 bp, Zea Mays
cgccttctcctctgcatcgtctgggagacttcgcgtgtcaacagtagtcaatagccagttatgtttgatgatctaaacaagcaagaaaggaacaaatctacccctcacccacccactctagagtttctatgcttattttcatagctcttcacgagtggcttatttggatttgagtcaccaggttatccgtcgaatcatccaatcctaaatccgagcctagtaacttgtttggtttgcatccatagttctatgtccatcatggaacaatccaaccaacgagctttttgtgggaccaactcatccaaaaaaacgtccacaggtgttctacatggttgggttccataccagtcaatcgaacaaaccaaacacgctgtagagttacctacatgtcgagtttccacacctgtcggttcaaaaaacctaccccacaacatctggcataagaaacatggttacttcattgttcccaatactggcaacaatcctcgaaacctgaaataagttctagtgaattgcacagcgaaaaccaaaaaaagaaaaaaaaaaccttgtggaatgaactacgcgaaagtttcgacgagttggagcctgaccccaagtccccacatatcacatcatgattgagtcataagtgcatcctgaaaaccacttgtaagaaattatctaaacaccaaaaaaaacatggttattgttgttttaagtggatgaaaaacatataaaatattaaaccatactgcttacatcttcattgtctgagacttactacagctgcagagtgtcccttgtaaaatttggcgcatcttctgtttataagcatatttaatcggtgatgacatggatacgtattttatgtttttcccctccatgttcaacaaaatcccagagtgagcgatttatgtacaggtgatgccactgtctggattttttgtgagcaaactgttgaaattgccgtcccattatgccgctggactaattttagtggcctgttgccctggaggtg

SEQ ID NO: 81108 - DNA, 488 bp, Zea Mays
cattaagttaccatcaacaactccctcactgtttggaccaagatgaccgccatctcctaccatcgccggtgattgtccagagccggccatctccatcgccaactagttctccagtagtcggatatttttttcgaatgcaaggaaatcacggatgatactctaaacaagtaactgcacccacgtttccagggtatttccataatttccgcaaccgtaccgatattgtaggtgtttaacttcaatacaaaacaacactacaacttcttacgcacaatgcctcaacattttacgccattctgtatatactatatatgcaacatttatagcgtacctttttatgacaatccattcatcatcttattcgatattatctttaactgcctcaattaaacgccatgcaagatccattaattccgcgcccacgtttcagattacacacgtttgcatgcgaaatctaattcctataattctgccaattaccaaatgat

SEQ ID NO: 81109 - DNA, 475 bp, Zea Mays
gattagtgttcggtggggagattagcagtgactcacttcgaatggtggatcgcagtgactcgagtggtggatttgagacagttgttatactggttcagggcttgcgccctagtctagtgtagtgctgatcgtagtattgctctgagcgtgttacagttggtgtgctcgtgtgttcaaaaaagaggggtccttcccttttatacttcaagggatggactatacaatggggactttgtattctgctggggggtgctcgaccgacggcccttggggtagcatggttcctctaatgttgtccatagggtcgtgcttagtcgtactcccattatggcgtactgcctcgtccgcccatcgcacgggtccctttagctggtcttccgctgacattcttctggtagtgcgcgggggacccacaggtcatttgtttggatcaggtgtgcatcgtgcagtcttgcatgtcgtcacgtgcttgcgt

SEQ ID NO: 81110 - DNA, 314 bp, Zea Mays
cccaactgcatattgcacaagggctgagtcatgccaaagttcaatcttaacagactcatcaccatgctcatgagtttctccctcttcttcttgtcagctttcacgtaaaaccactcgttcgtccacccggtcaggcatttggtgtggtagcctatcacggggacctttggacataatgatcatcagatgaaggtcataaaggacatgccttcatgatttcatagataagtgagaatgcaaagagacaacaacagcaagtgtatctcaatgatttattcgtatttgcatcccacaaaacatgcatgaatgttaac

SEQ ID NO: 81111 - DNA, 1243 bp, Zea Mays
tttgatcacatacaaagtttggagaaaaataagctcaaagttgtgatgtcagtcactctgatgactgaatttaggtcaccagtgacattgcccaaaattttgggtcaaattagagtaggatctattgctcgattgaggatagttgctatagtcgatttgtagctggatcatagggctacaagtttgctacagatgaattagcaagctcttatatgaaaatccaagatctgtgcactacaaatctgtctgtcaggcgctctgaatcaggttttcaatggtacagtgtctggatcagaacgccaggtctagatgcctcaccgccggtgaccatgcgcccggattcgcgcctgccacggtgattcgtgcccagcgcagatggataacggtgaagggtaaaaatcttggcactcggattagctcggactcactcacctttgcggctgccgtacccacttgaaccacagctagtcgggatcatcctcaccggcgttagccgctcaacgatcgtgcgccacgtgccttggtgtcttaccacgttgcaatagctcgggttacacatatctggtgatcaccggtgagctcgccacggtgaaagccaccaattgcttgcgtcagtgccccccttctctccgaccgccaccgcgacatctcaaattcacgggccactgctcggggatcctataaattgagcgtaccctcagctccacaaggtattcaagcactcagcgcacccacttgtgtcccaaatcgttcaccagagaccccaatttagggttcccccaaattggtccaaaacaccacgcgaagtgagctcgccgtggccagcgtgcttcagttccgttcatgctctctactctcccgtttcagtgcccttatcttctcctaatgctcctcgacccgttcaattaagctagaccacgctagatcatcgggaacacctctgttcatccgtagttcgcgctgtcaccgtggacagtgtgattaagagctcggattgtgcaattgagcgaggggaaacgattattaggtgttgaattaggtgtcagccaagttagagcaccggccattgcgtgtcttggccggtacaggttcgctggagctcggttcatcaccgttcgccgtcgaggaccacgggttgtgaagaattagaacgtggagggcttcggtgtaaatgttagtgacccatggaaatagtgcacggggttcttcgctagttattcaaacccctggggacctcggtgca

SEQ ID NO: 81112 - DNA, 624 bp, Zea Mays
gagcaattggcattgcaggatcttgatctgcaattgctcacaaactattattttactttcacaataaattatttgacttttttgcataacaaattcacataccacatacctgttagcataactctcggaccctcgcatcccatacatgttttgaatgaattgaaagcccattcaaaagtctgaactgtttcatctcccaacaaaacaaatccaaacattgtacactgcagatggctgttagctccaataaacatgcccagtggtttatcatatatgtttgccttgtgtgttgtatcaaatgtcacagcatcaccataatctgcatattcaccctgcatacttgcgtgtgaccaaaaaatactcactattttcctatcattgtctagctgaaattcacaaaaaattgtggattctgtttcttgcattccataaagaaagacaaaagtttggctacatcatttgcgcagttttctcgtctccttgctgccctcctacattagtatgcacaaaaaatgattatccaaacatttactatagtgatatttatggcactcaatatatacataggcaacataaaaagattccttacatgttttcagatcttgagcagttaccggtacgttc

SEQ ID NO: 81113 - DNA, 574 bp, Zea Mays
ggcagtgcatgggatgtcgcgggatatccttgtgatcagaaagcaacacgcacgcacgcgaagacgatgacaccgggaaaacgcgcgtaccactcactcttcatgcatgtctacggatggctgctggttccagaagttagtgaaatgtagagacgcatgcatggtatccatgtacgcacgaagtaatgttgcaccttataaatccacatgaacacacaaccttatattatatatgccatcttgatgtgcttcatagtaaacgagacgatcgacggtgtgcctggctgcttcttgcccttgcccgtgacacatacatgcatgcaatgcaatgataggataggattggatttgatcggtagcttcttggagcagagaccagccagagaggtgatgtggagagagagagagagagagatgatagaaaaaaatgaagaaaacgcagtgggaaaggctgcaacgggatcgcccgcaggatctgcccgttcaggacaggatttcagacgctgaacgtgcaagtgattccccttgtttgcttctgtaccccacccctttcgaaaccgcaggaactttttgc

SEQ ID NO: 81114 - DNA, 484 bp, Zea Mays
tataacacacagtcctaatataatatacatttcctctcaaccatcacaacaacgctttttttgtattttgtttttctataaccgacatatttaatcgacggtttaatttcgtaattgaataaattaaaaacaaaagttaattaatgtgacaaaatattagcggaatagtatttatgatttagttaatctctacgtaggatatgatacaataatagtagtctgtatcgtccacaacaacacaacaatatgaatcttctctagtaggtcgtcattgtttccgactgaaatcgttggcgaatccatctgcttcaacaggtgtgtcgtgtcttcctccacaagctttgcctccatccacatgtatataccatgatagggtatcccatttgagcacatctctcccacgtccttcactcaagcatcatttgtcatccatcgcaccgttatgttttgtagctcatcatgtttcctttccaccacctttttg

SEQ ID NO: 81115 - DNA, 466 bp, Zea Mays
gttcctgctgatggggcaaacacaggagcaggcaatgataaggacttgcctgtgttggtggatgacaacagtttcattttcatgaacatttgcctgacttgtcgcctagtttagacttcttctattactattttgtgtgtctcggctattgttttgttttactattttcaattctacttatatatgatgaatgatactcaaagaaccatgatagatgttgcagaaggcgagaattctgtaaactcctccactgcattactaatcaactccaacaaatcaatttatcagttgacctcccatgtttaagcataactgattaaatgaacattctgtagtacagaccattgcaaaataaaactagcttgatgtcaacttgtcaagcaggaacttaacgaagagaggccaggccaggcctcaacagagcaaaagtgatctatcagcagaattgaaggcatcaagcgcaaag

SEQ ID NO: 81116 - DNA, 606 bp, Zea Mays
tcaagggttggaccatataggggagatctgttttctatgagagagagagagatcggctcctctaggttgtcgtgtgggtcctccgggttgtcgtgtgggtcctccgtattatcatgtgggtcctctgtagagtcgtgcgtagccgtactcctggtatggcatatcttctcgctcatttgtcatatggacccctgtagttagtccatcgctaacaccttcatagtagcgtgcggtgggtcccgcgggtcagtcccatggtgtggtcgtgcgtggaatggctctgtctatcatcacaggcctatgtcacccaccggcgtgcgtaggcatacaccccggtatggtgtatctattgcattttgtcgggcatgcgggtcactgtagagactccggcgttgaggcccctaccaccggggctgactagccccatatgtcagtgagggcttgcttgatagggacttttcgacactgtacccgaggtttggatatggtttggtggtgacacatcttgtcatgcttgacgctggttagcagcattggggcagtccgccggtcaggttgactcggagcctgatcgtgtgccctgcctcgtaggtcgctcagtacttg

SEQ ID NO: 81117 - DNA, 443 bp, Zea Mays
cttaccttgatgtttatcttatatcgaccttaaaaatatcctcttttccatctcaatctgagcattctattttacctacttttcccttggtcgtatcctcttctttgtcgctgacgagttttcaacttcatcctttgttgtgcttctgtttggtgttgcctttacctttttccatctctcgacagcttggtgattacattatgtctgttatctaaaatctccaatctcctatctcaatttgggagcagtgttttacttatctcacccttggcaacatcctcttcttcaacgcgtgtaaggcttgacgtaactccattctttgttgtacttataccacactatgggctcttctatgccttcatctgttctctcgtacccttgtctgttatcgcctttgacccttgcgatatttatatcttctacctaaatgcttaccttgaact

SEQ ID NO: 81118 - DNA, 316 bp, Zea Mays
cttgaattgggaaaattaggtgtagtaccagagagcctgctgatgggagtatcaaaaccaattactcgtgaaggtgttctttttatgaaatatgcagcggtagataatacctcatcccaaagttccaagggcatagatgcatgagataataaggagtaccttacttcaacaaatgttggtgtttatgttctgctatgccattatgttggtgtgtgtgtggacaatatagtgggtgcatgattccaaggcgagcaaaaaaggaattgggacttgatactcacctccaaaatcggtttgcactgcaatgattttcttg

SEQ ID NO: 81119 - DNA, 371 bp, Zea Mays
atgcttttagaaccgtagatccacaattagaacaaattatagacaagagtatcttcccctctagttataatagaaaaaatatttccgaggaggatcaaagatgttttcgcttaaactgcctagcttatgacatcttaagtaattctcttagcaatgaagattatcatgccttcatatcaaattataatgaatccattcatgatgcgcatgatatttggactagaattaaaagcaaatttgatgaatccaaacatgatagttcattttgtgcctctacttcctttggtatttgtgaaactaactctttgaaggaagaagaagaaaatgaacgatggagaccaaacaatgaatccacctctccaaaaggtttg

SEQ ID NO: 81120 - DNA, 1266 bp, Zea Mays
aaaatcactcaaatccagtgcatctctatgaaatccatgtgtgcttgtgtgtccctatagcttccctgcaggttcccctctccttttgggaggttttccactctaaaatagtcgtttcaccgtcatttgataaacccacacgccaagtgctcggagaaatgcataaaccagtcaaaatagctcaaatcgaccccaactttttacagcacactccagctactgtcagtacctctcacgccaaatttcacacctatccgatattccagacacccgtttcacaacctatctatctttatggtgatccatttggagccgagtgccaaaaatgttttttctctgccaaactttaaaccaagcactcacttcactcattttcatacatatatacctatctgtgaagtatcggctcatttcccagtcatttcatgccccgtttcgaatttcaaactctctgtgacacaattcactgttcaaacatcgttctcacgtcgtttgacctctgtttctacaaaactcttagtttttgtgtcataactctctatgtatgtatttattcgcatttcatatacttatgactatgtgactaatatgtgctcacctgttatgtcatttcagtgattccgcctgcacgcctgagctactcctgtcttgcttggttactctctctcgagacattcccaggtagttatttccctctaatcagccttacctactgctctactgctctcgcttaccttttctcattatcttgcagcttgtcagtatccagttcaggatggtgcggacgaagaatgtcacaccatcaggggggaggagatgaccaggaccctcctcgccctttcaggcaggacaaggggaagactgtctaccttgagcagcaagggggcaagaagaagagatggttggacagagccacccgtgcagcgattgccattgtagcagcatcagatcaagtagagcaggtaggtcagttgaggatttcctctgataagatcgccttccgagtcagtcgcctctcgtctcagactcactcatccgctgctcgatccactccttcagacccagtcaccactccacctccctctttgccagctcctgccgctctcgagccttctgccacatccgctgtgaccacctcctccaccactccagcttccactgctcctgctcccgctttcgctccaccaattcctccacctcgctttcaagagcgtgacaagaccaaggtgcgaccactcgctgttgatcctcgacttcttgaccttc

SEQ ID NO: 81121 - DNA, 672 bp, Zea Mays
aaataagtaatgcgcatgtgggttgtacagtaaaaaaaggaaaagaaaaaaatgtgtgtacgagggaagctttacctagataacaaatagtaaatatcgctaggcaatgctaactcttgtcgttggctcttaattagaggggaaaaaagtcgttttctgcacaacattacacgactcggtagcacatatacaagattgactcatcattcatgatcattgggccgacaattatgcagtcaggaatgtactgtaatgtacagcagcacatattttgctattccatgcactcgcgtcgtagctaggggtgacaataaactctaaggtgctgtttggttaggctaacgcagtgggaacgacaatggaagcagctaacagcgctatcaactgcagattagttattaccgtgttttgtttgcttggctcgtgaggaaggtgattagatatgggatcagatgtcacccaatgcagagcggtaacaaacttctactagtctataaacaaatgacggtgtcaacgatcgcagctggactcaaccaaacaataaccaacgagacctaataacgttgtaaactaatctcgtgccataaagaccaaaccaaacacgtagtaaatttttacactataaagtttaaggatcggatcagattaaaatcaagttttatttctattaat

SEQ ID NO: 81122 - DNA, 556 bp, Zea Mays
ggagggagccaatcatcagatatataaagaatgaagaggagccggatgacaaaactgcagcagaacacatcgcaagacagtcagcccactacactctcattggggaagcactgtacagaaggggtgcaataggagtcctcatgaagtgcattcttttggctactgggaagcaactactagatgagatccacgccgggcaatgcgggatacacgcagtgtccaggactctggttgggaaggtcttcaggtctggtttctactggccaacaacaaagagtgatgcagccgagttagtccagaggtgtgaagcttgccaatacttatcaaaatagcagcatttaccagcacagcaactgcaaaccatacctataacatggccatttgcatgctggggactggacatgattggaccattcaagaaagctcaaggaggatacactcatgtgctggttgtcattgacaaattcactaaatggatagagtacaaacccatcgcttctctgacttcagctaaggcagtggaattcatacaagatataatatttaggttcggaat

SEQ ID NO: 81123 - DNA, 496 bp, Zea Mays
gaaggccagggcagatggccttcatgaaaattttggttgttacaattttgcgtatcgaaaggatacaaaggcaccagtccttagctaccgcacgaaatggccaacaggttggaaaaatgaatggttctacatgaaggctgacgacaaaaagggggagaagctgatgaccatggttatgagtccgctgagtttgagcttcggaatgaccagacccttatgcaatatgcaactggggtcgccctgtcagctggctgaagtagaatttagagtggtagctgagcagatcagtaccagggacttggtgcaggaatacttggcaaacagaacatatccgacatcaagtggctagggaatgctgaagaggaaagaagtggggaagaagcatgaactggttcgacttgcttaccactttaagtttgagaaaaaattaaagaagccttgtaaagattggctagacatgattgagaccatgtgcaatgagatacttgggaattat

SEQ ID NO: 81124 - DNA, 697 bp, Zea Mays
ggcgagtcgacgaccagcacgcgcgcgcgtccagcgcaaccgcgtcacggaaccctagcgtcgcctcgttcgctgcccaactctcctccagactccagtgcacaggtctccatcacggggaattctcatatagcaagtcgtcgtcctcgtcctcgtcctcgtcctctcctccggtgggtggatcggccatcgcgccgggccgggcgggcatacctacgtacacactccccggttcccgtccccgtccccgtcccgcattcgattggttccttcgtcttcgtctgccggtaaggaattcaattcccggatgggttttctacgatcgagtgcgcttcggtcttcgtctgcttgttttgttatactctgcttgctctgaggtctcagctagtccctcagctaccgcacccaaatccaaatcctgcctgctgggatggatggactgccgtccaagcaacaaaatttgttgcggatctgttccttcggaggtgggacttttttttgtcccggcttcaccgattcttctcgctgctggggcgggactgcggctttctggatctaattcggcgttcctcgatgccgaggatcacggggatggacgagattgtgtgctaatcctagcctggcgcactagataaaccagcgttaggttgtcagttatgtgaattattaatccatggtgacgactgaccaagttgca

SEQ ID NO: 81125 - DNA, 627 bp, Zea Mays
ggaccggttgagtggtgaccaccaccttgtaacctatcactgctttgctttggtaaacacacagcagtggcgttctactgcgcccgccatcatcactcgttctcagggatcgagatcgaggagtgaaatgcaaggagaagatcggactggatggcgccacagctgtcgctgtcgttctggggacatggcctacactttgaccgactgtcgtgtcgcaatgaatgaacggtgacttaaacgaaagaaaatcagctacgtatgcaatgcaaatgtcgaaacatgacgcctcgcggcacgcttgtgaatcggggatcaagtaggtaatggcgaaggagccaccgaaggaccccgcaccgtacgaacaatggtggctgctatgctaccctaccagctacctacactagctgaggcaaacctcggatctgcttggatgacagaaaaaggcttatttttaagattaaagtaacctttaaaacaattatgcgtatgcgtagctcataatagcatgtttacgcagcagatttgatatatctttaacacatatatccagtgtttcgcgtaaaatagaaaacgcgaaactgtagatgtaggggataagataaatgatttgatagaagatttgccgga

SEQ ID NO: 81126 - DNA, 361 bp, Zea Mays
cttgggaggagacccaactgtcagagaccctggggtagggcggaaccaggaactgtaatccagggaatttgacgtcccttccaaaatgtgactgttctcaaaggaagggaacgaagaaaggggaaattcgaaattcgttttcttaaaattgcagaataattccaaatgtccctgaactttacaaaaatggcattggaaagccgaggtaaccgcaccagacgaaccagtcatcacagaaatgttagaggccgaaatcccaagcccagacgtgaaaggcccattctgcaaaatgggccgccattgaagcttacggtccctagatagaccagaatttgaatttgaaaaatggcgaacatcgcgc

SEQ ID NO: 81127 - DNA, 985 bp, Zea Mays
gccatatggaattgggagaaaatttggtttcaaatcgctcggttaggccaactgatggagggttgccatggtacactgcatcgggggggaagataaggatcagcccctcgccggcgataaggatgccaccgtggctcgggataggtcgtcggcggccgcggtaaaggtcctcgtcgacgtggcagagagttactgaggtggcaagccctggttaatcgacggccaccgtgccatcaccagaatctgctgcgcggtaagcttgctagcgcaatctgaaatccgcgatcctcatccaattccggtcgacggcttataaattgcgcccgagttctgcttcttcaccacatcccgcacctcagtgactgagcaatcgactcaatttcattggagcactcccgcagcccccaaatcccctttctccctgttcttaactccgccgtggtcagcgctcttcgggttaataacttctcaattgctccctgttctagctcatttgtagcctcctattactctcagtaccgaccaattgaaatttggccgaagcctttcaccgaaacacgcacctgctctatagaacgccgtcgtgacacccccactgtcgacccgcttttcggttcttattctgcccaaaccaaagcgtgtacgtaaaccctggtgaacccgtgaacctttccccagcctcaatttggtcatccacgccatcgtttggtcggaacacgttcattcctatgcccatccgccctgtcaccgtggactaattgattcaatgccccattgatgaaatagattgaggggaagtgtgcggtaggggtctaattcggtctttgtcgcacgggagctccagccgtggcagcatccggccggaataagctcgccagagttcggcgagtgatgttcctcgtcgtggaccttggtctgcgaaggattagaacgtgtgggggggttctttggaaattgtcagtgactcattgcaatagtacagggc

SEQ ID NO: 81128 - DNA, 641 bp, Zea Mays
aggggcaacaggaatagcttgcctcagaatggccaactcctgctgcatggcctgcatcgcggctaacattgccgccggactcattgaatccccactaggaacttgcgggctgccacgagccctacgaggcggcataactgcagccacaagagtaagtaaataagtaaataagattggcatagcacctcatcaaataatgtcaaaccagcactgacaatatcataatatatcagtagtaaagcagaaaacccattatatatgtgtagtgtgtcaatttatcattatttcacttgctaggacctacaacctattactctgataccaactgtaacaccctattgctcccacacaatgagtgttaccaaagacccttcccataaatttagaaaaaaaacatatgaaaagaaatggagacagaaagtaaaataaaatccggcaacacctcccttgaaagtagcataacgggaggaacacagagtttatacatgatgtagaagaaaggtaatccacagtgtataatcaggatgcaaaggtagaaataaacatttaagaccaaaagaaaatgaaatcagccaatcaaaaatttcgaccaccatgaagactagaacatattaaacccctggcacacactatttcataac

SEQ ID NO: 81129 - DNA, 340 bp, Zea Mays
atttgatcccgccttgcttacacttggcgttttttttctgtctctcagtgcactagtatgaagtattctgtagctggtatctcatataacatagtacttggaagttggaacttgggccccgatggatgtccgtactagatattaactacttatcattgctatattgtacagatcatatgcactaattgatgcatatttagaactcctttatgcattctgatctacaatatacatcagtaggcactttgtttagtcccaactctctttccaatgaggccaggggtctatttcgtgctatgattaatagattaacagatagactcctgggtatgccttcggc

SEQ ID NO: 81130 - DNA, 691 bp, Zea Mays
ggacagcaaaccaagtggtggaaagtaaagatctccacgtggtttccggcaaagattccccagtattttgattatctactcttagtaatagggatctccgtgtggttagttctttctcgaggtaagactggtatgcaccaactaattctatctgcttcaaaattcttgttttacaaagttgtgaattcactatttggtttctccctctttctttccaaaatttgtttttcgtgtgattactggttcaaacgggactagggccggttcaaccagggttcatcaagtttttgtatatggaaaatccaggttcaactggaattcaaattcagcttcaaccgggaatttgcagagagttctctattgaaatgcggttcaaccaagattcacatcggttgaacaggatttgcgtagtcgcccataattttcagatctgagtcgagggcggatatataagcctttccctctcactctaaacactaaggttcatgaaccaaaacactttgacgactgctctccctcgattcaaagtgattcaactccgatctcgcgccccaagtccttcccccatcgattggtgggaagattcttcagtgtgagataagttcttgatctaaagcgtgattttgactcaagttcttcgatctctctctgttgccagttggtgcaatcgttcttacttgcgaactctttg

SEQ ID NO: 81131 - DNA, 634 bp, Zea Mays
ggaacactccgtcatcagtaagaggaatcaatgtgagtatatataaccaaacggatccataatccagaaacaattcagcttacattcttgcattccacagccgagaaaaaatggctacaaatcaatcagggcacatctgttcgctcgtttgcatttcaggatgcttgcaggttcttccttcttgaaagtggtgtagcgatgttcgtggcacttctcatcaacatatgcatcatctctatctctggaactgtctgtaactccagcaacgtctcaccagatgactctgcaaaatgcagtgacatcaccttggactcctcgtccttcctcctgagggtattactgattttactgcctggtcactactcactacctctggggctctgttgactaccagagagttttaattaattgccagctcatttttcatttcagaatgtgctaggcaacatcagtgcggttgtgtatggtgtggctctcttggcttgtggaataagctcttccatcactggtacttacgctgggcaatacatcatgcaggtagcgctttttggcctgttgaagatgcatagaggatctgtatttgtcctaaccagcaatcatcgttaaactaacagattataatatcatattctat

SEQ ID NO: 81132 - DNA, 427 bp, Zea Mays
atcagtgaggtgtgccatggcgtcactctgcagggcctgtaggcggtacactgcgctcatacactgaatagtgatcctcccaacctggtcgggatgcatggcccacacgtccttcacgtgactcactcggttgcaccacatggggtcatccctcttctcggcgggaaagagtcccagtgggtgcatcatcatcttgaggggatgatatccgtagaaggttgtcagggcttttagcgctgtggcctcggtggtgtcgtccgccctgaacccgatagtctcaaaatcaagggaacgccatcccggctgcagagggtgagactccagggtcagccaaaccctataacgtggcacccgatgctcctcgtacaactgcaccctatacaaaggggttgtagggtaaccgacggagcagagcacctcccacaag

SEQ ID NO: 81133 - DNA, 578 bp, Zea Mays
gagacttgtgaaccaattctcgcaagattttagacgagttttgtttttcttttgtccatttttcatttgtcatgctgccatgccatgtcgacggatcaaaagttatcctaagttttttgctccaaactgttgaatctggaaaaaaaaagaccgaaactttccagacacgatcaaatggtctagagcatgccagggcaaagcaagtagcatgggcacaaggctaagattattgttcaggcaagtaagcagagcaaagcagagcaagcaatcttctcgcccaacttggctgttgttttcatgatagcttcccttctaattagagacatacggtgatgactatgacctgcttattacctggtgcagcagggttagagctagcctactaataagtttattagtaacagcaaagagagtggcagtcgcaggcttgcgtggcataattgaagctggaaagagtattctgaagagccgttcttggagccgcatatcccctaccagagtaccaggccaccagcaggcaggcgctgcccgcgtgcgtgaatttttcagcagtgacctcaccggccggcgaacggctg

SEQ ID NO: 81134 - DNA, 347 bp, Zea Mays
catcatctccaagggatgatacccacagaagattgtcagggctttcagcgctgcggcctcagtggtttcgtccgccctgaacccgacagtctcggagtcaagggaaagctaacccggctgcagagggagagactccagggtcagccaaaccctgcaatgtggcacccgatgctcctcgtataactgcaccgtatacagaggtggtgtagggtaaccggcagagcagagcacctcccacaagatggagggaaagccctcgtgggaaaggtagtcaaaactgaagcgagtgtctcctccattgatgggggtgggtaaagtcatctatgaaagagggttagacgtaaatg

SEQ ID NO: 81135 - DNA, 529 bp, Zea Mays
ctatccagggttctatttgcaaaatgctataacaatacaacttgtttgaaatttttacctagtaaatgcactctaggtgtgtcaaacatatgcaatgccaatgtttatgatgccatgctcaagttttagtagcagtaacaccaggggtgttacaacggcgagcccgaggccatgcagatcgacggagagcggggcggggccactccaacctcacactagtggaccccgtacctagaatttctcctccgaggagaactccctctcggcaaggccaaggtccggcacctcactcggtgggcaaagacttttgtactacttggagaagaaaaggagttgtactgacgcagcccctcgggaattctccaacggtgcatccccatcagccagggacaagaattatttggcgaaatccactcggggcttgagggcaccacgcggcaccccggaccctcattggaaacgtcttcaggcaagggttctactagtcaactgcagtcaccaacgctaccaggattgtgcgatcctgctg

SEQ ID NO: 81136 - DNA, 608 bp, Zea Mays
taacactggggctgcccaaggtgaggtacttggtttgatgtagcctttctctaacaactcatcaatttgcttcttgagttccaccatctctggtacggatacttgataggatctcttggaaataagggtggtgcctaggataagctctatggcaaattcaactttcctttcaggtggcatgcctggtaactcttcagggaatacatcggggaattctgacacaatcctaattgcctcaattggattggactccttgtcatctactgataaatggtgacatgctccttcttctagtttaggtaagtacaacttggttactacttcctttccggatggggacaccaacttaactgttctcttgtcacaactgacagtggcttgatttctgtgtaaccaattcatccctaggatgacatctaacccttgagttcccattactactaggctagcagggaagtctatcccccttatttcaatccttagattctaacaaatcctatcggactgaacttttcccccaactaaattaactcttaacggtgggatcattggttctatgggcatgttatgtgattctacacaagatgcagaaacaaaagaatatgtgg

SEQ ID NO: 81137 - DNA, 688 bp, Zea Mays
ggagactttgccgtgtgtggagggtgccggggatcttcctagtgcgagtactgggtgtaggcggcgaagggtggtgggaaaacatagtgtgggtgaattttcgcgaagtggtaggcaccatcgtatggggatggagcgtggccatcttcgagtagaccaggttggtaaacgagaattgttgtcctcgccgattggggcgagcataggcgagagggatcttcgaaatctttttgagggtgaagaattgaggataatgttgttcaattacagggagatgggtatcatcccgaaggttgagccaatgtaatatgtgatgccctcgccatgtgtatgtaactgtaatttgtatggtaatgtggcttgttggccgtatttgtacgcttgtgttggtccggctgcgcccgtaggcgacttttgcgcagagtgtcttttaaataaaagacttcgattaacgcacttgttgtgctattccggctgcacccttaggcgacttttgcgtggagtgtcttttaaataaaagacttcgattaacgcacttgttgtgctattccggctgcacccttaggcaacttttgcgcggatcgtcgcacgcgaggatagtctacgctgcctctcgcggtgacttcggagtggtcgaatgccgaagaccgtcgatgcggtcttttttcgacatgttgtatctgagttt

SEQ ID NO: 81138 - DNA, 275 bp, Zea Mays
agagacactgaaaccgtgtagactttgactcgatctccgaacgaccgcagaaccacaaccggagctaatccacacaatgcgaggcaaccgtactggaactcacaaggcacgaactagtggatcccagagggatctcttcacaagtctaggagaacaaggaagaacaggggtagagtaaaaactcggcagctcggctgtggtaatcacttggattatcaaattatcaaaggttatcaaaacgttatcctacatcatagacataggggggtatttat

SEQ ID NO: 81139 - DNA, 1064 bp, Zea Mays
cagacggtgtggcagcatctggtctgcatcaagacgcgtcctccgatgagacaggaaacctcccagcgggctccggtgtggttgaggtttcctgggtgacctccggtgtggcagagactctccaacatggacatggttccttcactggagggtaaatttcaggaaccgcctcgcagtaaggtttcagtatggaagcgcctcgctacatcacaggatcatgcaacgtcggaagcaatcgctgaggaagacaagaagatgtgttctcggcccatgaggaaaaaaagacgttccaaacacagaaaaggtacaactgcgcatgatttgggtcccactcaggcatgcccacctctcccccccccagctggattgtttcagccctgaggtggcttggccaccctcagcctcctcttgtgttctggatttttctaaagtccttgctagggtggaaattgcccttcgtcgtgctctgttcgtctctgtggctggtacacatcctgggtttctggttctgacgtgttgaaggaggtgaggcattgttttggtgttaagttggaggacatgaggattcatcagacctaccctgaagacttcctgttgtttctaccggatgaagacacaacaaccaaggttctcaacgaaggaagacctctgaggggacccgtttcagtttgatgctcaaaagatggtccagatttgctcatgcatcctcatcgtcgatggctgagttggttgatgttaaattaataggcattcctcaacatgcctggtgtagatctacagctaaacagttgcgtagggactcatgttgggttgaagcattacattcagaagctatggaaatgagggattttcagccttgatggtgaaagcatggtgttttgatcctaaaaaactggttaggaaaatggatttacacatcttggaggctaggatagatgatcaggaaaagatattcttaacctataagatctccattgatatccttccaccgaagaccctacaactgtcatcggctaacccaccacctcctcctccacctccgtcgggaagggaacctgatgatg

SEQ ID NO: 81140 - DNA, 389 bp, Zea Mays
tcgtagatgcctgggatccccagggaggtgatcgagcaccatctgaagatcaaccctgacgctaaaccggtgagtcagaagcctcagagacagtccgttgagtagcaggacttcatccgaaaggaggtccggaagctgctagacgtcggcttcatcaaagaggttcatcacccagtgttgctggccaacccaatcatcgtccccaaggcgaatggtaagcttcgaatgtgcatcgactacaccagccttaataaggcttgtcccaaggacctgtatccacttccacgtatagatcaaatcatggactctacctccgggtgcgacctcttgtccttcttagatgcttactctggtttccatcaaatccagatgtctagggaagataggaa

SEQ ID NO: 81141 - DNA, 713 bp, Zea Mays
gagagcctcttgggcctttggggtccaagaaaactagtcacccttcctaaggagcttgtagaggagcataccccttttttcaagcctagagacaaatcagatgagcgcagcaatgcactcgaccagccgctgtactcccttgaggtttcgaatgggtcccatccgctgatggcttcaatctattcttggttggcttcaatcctgcagtcggagaccatgaagcctaggatcttcccgttcgggactccgaatatgcacttctcagggttgagcttgatgcggaacctttggaggctagagaacatctcctccaggtcagtgatgaggtaatcggacttcttggtcttcacgactatgtcattgacatatatcttgacgttgtgttcgacttggtcagtgaagcactgaagcatgcatcactggtatgttgcactaggattctttagaccaaaaggcatggagacataacaaaatgaaccaaagggagtgatcaacaaggtggcgtgttggtcactctccttcatggcgatctggagatagcctgagtaggcatctagaaaggaaaggagctcacatcctacagtggagtctataacttggttgatgcatgtgagagggaaagggtcttttggacaaaccttgttgaggcctgtgtagtccacacacatcctccagttctcattcttcttatcaacgagtaaaggattcacaat

SEQ ID NO: 81142 - DNA, 818 bp, Zea Mays
gccaataagaggtacctcagttagaaatatatcacatagtcatgttttcactcaatctcgccgtcttccttttctatctcatacccgttgcatacagtgctatcttcctccaatcccagtgatgtttgtggatagggattataacgatccgaaacagtattacaatatggaaaatgaaaacggtcggttttgacttttgcatatttgtggaatgaacaaataaggaaacagtaaaaaactccatatccacaagggggcaccctaccaaaccccggtccaccatagtccacaacaaaccaaggcatttgttggatgctgtattgcactaggacttgtgacggactaggaatatgttgtagttaggactatttatatgtaactaagatctagagattactctcccacatatacttataacctttcagcctcaggcctaactcagctcaaaagatagcttagtcaccatgtggcccagaggtgttttctgaccacgcgctagctttggtaacccttgttagtgctggcagatccggtctagctttctatacctacgagtcggagccctaggtccaatatagcccacaacaaaccatagttattaggaccggaccaaacatcgaactgggagatcgtcagttcgctggttcactggccgttaagaacctgttgaactgctgtttcgataattttggaccggaataattgaagtgctcacaaatacgttataccgatgcaatataatagtgatatacaacatataattagcaacatgggctacagtgccgctgtgtatggtggggcagggatttgggagtttt

SEQ ID NO: 81143 - DNA, 575 bp, Zea Mays
caagttttagttatagtaacaccaggggtgttacaagagggttccactacatcaaagatgaaacttggtcggggataggagcactgcaggatctaagttgggcagatacaccaccaagaacatcctatgattatgaaaaaataagcaaaagctagtttgccaaaggaagtagtaaaaaagcaaaagatgactcacctgaagattggagaggaacaaaggaagacccaaagcaggaagagttgatacattgcttgatgaggggagatcagcgggaatgatatcaaaggtatgactcagaggaacctcagccccattagcaggcggcagactcctggcgcctggttcactagcctctaaagtgaccagaccagtgagagttgtagatagatgtgtaaccgcaacctccttggactggactggcagcgatacaacgtggacgtctagggaagcaccagagggggagcctgccccaacaccctcgggaactggatcgcacccggcgccaccctcaggggctggatcctccgtggcagccacctttaaggctgaagatccctcagacatgtccataggag

SEQ ID NO: 81144 - DNA, 508 bp, Zea Mays
gtcagacattgcctatgcgatccaacaggtgtgcttcacatgcacaccccgcaggagccccacctcactgctgtcaagtgaatttttatctacctccatggcaccattgactatggcctacttctttggccctctccaacttctgagctgatcgtttacacctacactgattgaaccagctggccccaacatgcactgatccacctctagctacattgtgttcctaggtgctaacttatcttctaatcctagaagcagttgcatgtcctacctatatcagctacttcaagagcttcatagccccctcatgcgtgtcaccctcgtctactatcccatgcagcactggctcacaaagcacaaggagatcgagctccacttcgcccgtgagtgtgtctttattaaagatgctcgtgttctccgtggcctgaccatgtcgcggttcgtcaacatcttcactaaggggttcccactgatattttcctagagaggggtgaatatgcaactccag

SEQ ID NO: 81145 - DNA, 607 bp, Zea Mays
ctcctctcatctccggtggcggtcgccggctgatcggctccagtgagcaactctctgggtagtgctcctccctctccattatccggtgagctaaccttgtcttcctccctccctctattctttagttgtatgcagtgaagcctatctctcccacctctttgtattcacatcaaaattcactccaaatttgtgaatcatttctaatgtgtgtgtgcctagccccctattgagttcctttgcaggtcttgagctccctagggagggtttcatcttctcaaacagctatttcaccgctattcgcaattcccgcacaccaagtgctcggtgaaatgcaccaaccactcaaacttgatcaaatcgaccctagttttttccatcaccctcatgccacctccagtaacactcacaccaaatttcacgcctattccatatcccaaacatcgaatacaccattgttctccatttatagcgatcgtttatgagatgagtgcctaaaatttattttcttcgcaaaacttcaaaccaagcacacacttcactcattttcactcatatatacctactcgtgaagtatcagatcaattctaagtcatttcatgcctcattt

SEQ ID NO: 81146 - DNA, 491 bp, Zea Mays
actgctagctcctgtagcacacggccgggcggcggcgcggcaacgggcagttcaccatccatgccagcgcgtcaagccttcggcgccgttgcctgtgacgtagcaaatcaaaagtgaacaactggtcgttattcctatgctatgctgcctgcttcgtgctcgtcgtccgctccagtagtcatagtcagtgcatgtgcgcgcgcgcgcgctttagaattagaatctagagctgacggtacgtagctagataggccggttgttccattccatgatatagggtaaacaaagcgtctgctgctagattatgatccgggccgcgtacgtttggcgatctgcgagctgtcgtcgcttggctttaattcgaaacggtttgtactatttttatttttacagtatttaatctttatatattgtaactgcagcagtccgaacggctcaacttgctacccgtctctccctataaaatatggactttcactattgatttgatg

SEQ ID NO: 81147 - DNA, 471 bp, Zea Mays
agtttattgacaaggtaatttgttttgcgaagattcatttctaacttagatgggaagattgatgctttcactcctattctttggctaaaaaataatgtcgattttgcttggggggcagaacaacgagggacttttgttctcattaaaaactatttgtctttggctctagtattgaaagcaccaaatattggagtaccattcaagttatacattgcatccgaagatagagttattggagttgttctgactcaagagactgaagggaaagagcatattgtgacctacttaagccgaatactagtggatgttgaaataaggtacgcctttgttgagaaattatgcttatgcttttttatgcattcaccgaacttagatgttatctattgtctagtccttgcactgtttctagtcaaaccgatgtgattaaatacatgttgcaaaacccaatcatgagtggtagaattggtaaat

SEQ ID NO: 81148 - DNA, 474 bp, Zea Mays
agtgacttgggtgtaggcgcagtcctgatgcaaaaaggtcacccaattgcctttctcagtcgagcattgggcgtcaaatcccgcggcctttccacttatgagaaggagtacatggccataatacttgcagtccaacaatggcgggcttaccttcaacacaccgaatttgttatccttacggaccataaaagtttgggacagctcaatgaacaaaggcttcacactccatggcagcacaaagtttttaccaaattacttggattgcaatacaggattcagtatcgcccaggctcagagaaccgtgtggccgacgccttgtcccgttgtgctccagctgaagtccatgctgtctcagtagtggtaccacaatggttgttgaacatccaaaacagctacagccacgacccaacagctcaatctatgttggctaagcttgccatcgatccatccgttgtttccaattttactctaacc

SEQ ID NO: 81149 - DNA, 349 bp, Zea Mays
ccacgacacttcctcccccgggaccttgttatgggtggtccggagcttacttggtgggtccaaactccacccaatggctccagtctgctttacttcgtgggtccggctttgtgcgcataggggtcctgcgccttcttgaggaggtctgggcctgatgatggtgtctcaaacaacgccaccttaaccgctcacgagatacctttggggctgttctccgcgtggctagggatagccgcacaggcatcatgccttcataccgtagtaaggggtacccctgaaccagggtaccgacagtagccaagatgccttcctatggatcagttgcatgccttcccaggtctccagtgcc

SEQ ID NO: 81150 - DNA, 434 bp, Zea Mays
taaaaaacatcctaccataaattgccgcaaacacccctacataagggttgttcatgtcttgctatcttgtgttcattttcgctgtcgtagttgtgttattcgatgtgagttgatgtgtgtttttggtgacttgaacacttaaaacataatagatgtatcctcaattgagttcttaccatgtagagagatataaggggatacgatttgatctactatgattaaattcctctattctattgaagctcatgtccaacctccttatatactgaagggtgatggaagtacaagtcatgtaatattttaggccttgttagggtttctcgcccaatgattcagtcttcctttgtcttatagcctagggctaacaacataccaatcgtctccctctgccatactagatgtgaaacattaacatagttaactcatgtacgaac

SEQ ID NO: 81151 - DNA, 533 bp, Zea Mays
gttaaagctaaccatatcacgtccagttccacttgtccttctttgtatgttttacaacaacatggtcaacttcaagaaggggagcaaggttggacgacatcaagcactacatcaacaccttatgcaggtaccaacgactttgagtcgaggacgactcaaaaccaaaaaggggagaatgatgagtacatggacgtcaactatatggttaaggcccaatcaatcatagattcccaacctcaagagaagttgaagtccagtttattcatgaattcggttcagactacaggagtgggtctcacgaaaacggacgcccaggccacatacagactccattttcgatgttttaggtaccgttggaaagctaagaagataagatttccaactcatctggtcccacgtcaaaatatactcagagctgatgggaattgtcgtaacaagatgacgtccagaatctacaagaaatcagcgacgcctgtttcttggcctaaaggccttgtagatcctagagttgctcgaccaccctgttggccacc

SEQ ID NO: 81152 - DNA, 427 bp, Zea Mays
tttcatcatatgccatttattggaataacacaacaggcaacatcgaatcaatagaataacacaacaagcaacattgaaccaattgcaggagttgactataacaggaatggaggtgtgcctagcttagttagtcagggtgacaggtttggttgtgcattccaacgacctagattcgagtactgttcaacttaggtttgggtggcaatttcttcttctcaatgaaaaaccaactagttcctcctaggttggatctgagaccaatgacatttcaaaaaatgaaaccttccactctcagatacatttggctgctttcttaatacattcaaaatcatttggatgactgctgtttagggatattgcctgcagcaacaatatacaaaaagactagtaccacctttcacttttactactagtctactaaaaggtg

SEQ ID NO: 81153 - DNA, 411 bp, Zea Mays
ctttagtgtgctccccacttggtgaattgttttggggtttttgttgggcctttttgtaatacctttcttaatacattttgtggatttacttatatacttcatctttggtaaaggttcccttttgtgatttggccatttgcccactctttcccctttaatcccatgcttagggtttaatggcttaagaggagaattagggtttttgaaccttgttcatgagtgagaattgtatgaaggctagggttcctttcttttgatgatcaatacttggcttaaccatgcttctaagcttttagtgcctttactttccaacctagcatatagggtgagtaggacacaagtgtgctcctttggccagggctttgggtaacacctggggtgttacaaaataccccaaaccaccacatcctt

SEQ ID NO: 81154 - DNA, 1224 bp, Zea Mays
tggtaagagctaatttggtgttgagtgaggaaaagagagccttccaaaatttgctagtgaacaccttatctctgtcagatactagagacctaggtgtaccatgcaacttcacaatattgtccaaaaacacttgagccactttggttgcagtaaagggatgtttgagtggaaaaatgtgcatacttagaaaatctgtccaccacaactagaatagagttatacccttatgatttgggtaatcctttaataaaatccattgttagatcttgccatgcaccttgagggattagcaagggctaaagaagacctggggtgtgaatcctctctgccttagcctgttgacacactacacattgcttaataaagcacaccacatcagccttcatgcctttccaccaaaacaaccttctcactctgtgatagttggcctaacccctagaatgaccacccacaatattattttgcaaggtatcaatgattttagtcctcaaggcagaattgttagccacccatatctaatctcccttcctgatgacaccttgctgcaatgaaaatcccccttcattgggactatgtatagccaactggcccaacaacacctgagcctcttcatctgtaacataagagtttaccacctcctgaatccaaataggttttacatccgctactgattgcaaagccatgaaatgtcccaccctagatagagcatctgcagcctaattttcatttccctttttgtactcaatttgaactacagtcccatcatttttgtcatggccttcctttgcaattatgaatgtaacacctggttctccagaaaaatcagggccttatgatctatcctgatgatgaactcagctctctgaagataagttctccacttctccactgccatcaataatgccagaaacttcttgtcatagatagacaatcctttatttttcacactcaatgccttgctcaagtaagcagtgggtctgtgcctttgcatcaaaattgcccctattccatcttcacaggcatctgtctccaccacaaaactgccatcaaaatttggtaaggccagaacaggggtggacatcatagcctttttcaatttctgaaaagccatgtttgctagatctgtccactaaaaccctttgtgctgcaataagttggttagaggttttgcaataactccatacccttttacaaatcttctatagtatccagtcaggccaagga

SEQ ID NO: 81155 - DNA, 637 bp, Zea Mays
tgaaaatttgaatccgaaaaaatgaacttgggtgtgtatttatcagtcgttctgtttgcctggggaggctcaagctggtaaacgaagcactgttgcttattagtttaaggattgttttgactgccgtattacgtactcgggtattctaaagtgtgaaccgaaagggacggagacagtgtaattcctcctagattgtccttattgagtcgctaatccgccattaaaatatgcgatgacagctttcaaatagagaaggaagtagatacggctattaaaatcttcagagtggtgggcctcatccagtcattccaacacttcatatatatacacatggtgtgtaatagatttccaagcgcaatagtatacagctctcggctgttgtcttcacctcggcagcttcatccccgaaacccattcacaagatacatactacacaagtaggctttgtaggtttgtaggcagcagcagggcgcctccaagcttcgtcactctagtagtctgtgtaagacatggagggggagaggaatgacatcaacgtgcagaggtcagacgagatcctcatgccgggtttccggttccatcccaccgacgaagagctggtgagtttctacctcaggaggaagatccagcagaagcc

SEQ ID NO: 81156 - DNA, 691 bp, Zea Mays
tgactgcttgcgtgaactccacgaaataagattaccaccaaaaaagacagcaaagcctccagtactacgtcgatcatccgcatcaccagcccagtccgcatccgagaaggcactgagtaacggagcaccagattttgtgaagcatagacccatatcaatcgtgtcatgaagatatcgcaatatccttttaaccaccgaccagtgttcagttgtcgggttcgatagaaattgacacacacggttcaccgagaatgaaatatcaggtcttgtatgcgagagatactgaagcgaacctaccacactgcgatagcgagtggtatcatcaggtgagagaggtgtaccaccatggagtgacaatttttccttgggaagcataggcgtggagacacctttggagtgcatcatgttggtacgggtcaacaagtctgaaatatatttcttttgagatagaaaaagacccttcgatgtgtggctgacttgaatccccaagaaataactgagaggtccgagatccttaacaacaaaatcatcgcgtagttgggcaataagatgagaaacagcagaagtggaggagccaataataatgatgtcgtccacataaataagtatgtatagttgagtaccattttttgttatagatgaacaatgaaacatcagccttggacggatagaaacccaaatcaagtaattt

SEQ ID NO: 81157 - DNA, 390 bp, Zea Mays
aagctctagggtgctcaccccgagcatggttgtgacgtcgatctcactatggcgaccaatgtcatggatcttacagtcgttcgtgggccaaccgacgtggtactgtgttgttcatcgaggcagcaatggagtcccctcgggtcgtggctcttcataggggcactatggtcccgatcatacccctctcggtacctagctcctcgtgccattatgcgtgtgacgcttcgatgttgattcgcacgtcacgacgactgttgaggtggtggtgcatgtcgtcttcaggatgggcctgtagaaaagaagataattttccacctgagtgaggatctatcgataaccctctgtgtcgggtgtgtgaggtaagtcatttatgattcgagctagtacact

SEQ ID NO: 81158 - DNA, 400 bp, Zea Mays
cttcggcgtccatgggatcagcagagtgggcaaaaacagggatggcccctcatgaactctgcccgcttgtccctgggcacttgaggcatctggacttacactggaggctgaggtggtggtggctgctgctgaacctgctgcatcgctgctaatgtctgaccaattgcctgaactgcctgggtctacatcaagaacatctgttcgatagtcatcgagggtggcggtggcaaatgctgctgcggggctgcttcctcttggggtgcctgctgtttaggctgagcacgcctcgcacctctgcgcctgttcttagacatctgtagaaatcacacacatatatcaaatctgactctacagtctttcagcataagaaaagatgtataaaaaatcttcataaaactga

SEQ ID NO: 81159 - DNA, 1358 bp, Zea Mays
tccgttagtagggtatagtggtcaccctaagtcgagtaagcgtgagcatgttgcgccgtcttaagtcgtcgccgacttaagccgattgctccgttagtagggtatagtggccaccctaagtcgagtaaacatgttgattccgagtccaatcaaatcaaagtaaattgatagtcaacagtttgaatgcctttgggaatgaaatcttttattgatgacgtattctccaattacagagtacaacattgctccgatagcttttgaggccttgctaagggtaaaactttctaagatgctctatgttccatgaattccccacttccgtaccatccatttgagtaagccaatatgatcctggccgagtgacctccgatataatgaatggctcttcccatagtggtgacaacttgtgctgtccttcctccgttagaattcggcaaaggaccaagtctcccactacaaaggatcgatgtcgtatagccttatcatgatagcgcctcaaggtctgctggtatctggctgactgaattactgtgttcaatcaatcttcctccagcacatcaatatcctctagcatggtagcttctgcttcaacttcagctatgctttcaaagactagccttggtaccccaaacctgaggtcggcaggtagcactgcctccgaagcatagaccatgaagaagggggtgtttccatgcagagctcgactgggttgagttcttaagctccaaaccacataaggtaactctctgatccactttcctgcgaacttttcattcttgtcgaatactttcttcctgagtgcttccagtatcataccattagccctttccacctgaacattagctcttgggtgtgctactgatgcatacttgatctagatactccgttgttcgcagaaatcaaagaattcagagctagtgaagttgaatcccaggtcagttatgatgctattcggtatcccaaaccttaatattatgtcttgtatgaattccactaccttggctgaagttagagaagcaatgggtttgtactctatccatttggtgaatttatcgatggcgaccagtacatgagtatcgcctccctgagctttcttgaagggtccaatcatgtccaatccccagcacgcaaatggccatgttatatgtatggtctgcagctgttgtgctggtaaatgttgttgctttgacaagaattggcaagcttcacatctctggactaactcggctgcgtcactctttgctgttggccaatagaaaccagacctgaaaactttcctgaccagagttctggatgttgcgtgtattccacactgtccggagtggatctcatctaatagctgcttcccagtaaccgag

SEQ ID NO: 81160 - DNA, 499 bp, Zea Mays
cttgtgcagaccatcggctctggcctttgtctgataatgaagttcatgcacacgacagaatccttcggcattgacactttttccttggcttcagagagcccatatataaacactgagcctaacaatagcattcggggtcagctaatggagatatatctcaaatctcttcaaaacctcccctatcatatcgtaaagggggaaccaaagctctgtcctaaagaagctcttaaacacgacaacctcatcctccttcggctttggaactacttcctctccagcaaagcgaatcagttcatcttcattttctccaaaataacctaacttcttcatcacaaccaggtcctcagcttttactgtggatcttccaaattcaatatgactaggtttggttgtgctcaaaatgctattgtcctcttcactttcgttgtcactcccaacctcactcttagtctgttcagcttcgacattgagggtaccttcgatagttgctccctcttgc

SEQ ID NO: 81161 - DNA, 755 bp, Zea Mays
acttgcttatgcgcttttttctaataaaggttatcacaacaataatccataaatatcacatattggttcccatatgttctgactctgtttttgaagagttcaacaatatatcaacaaccgaacaacattgttacctataatgtattttgaggattgaatgcaaccggttgatcttaagactagatctgatcaagcgaacatgttatcaaccaatctctactcctataaatcactagtctcaatgatcattctgtgtcatgcacaaaagtgcataagtttgttcctctcttccgcatctcatctaacaaaccagataagataagccttgagtgtttcctgctcctcgtgttgtcgttgtatattaacccaaattcccatctctcttttaccgtctctgcctccatcacctagattcttccaacttcccatctctcttttttcgtctctaccatgctcaccaagattgttctgcaccgccatagaagacatcctacaacttcccatctatcttttttgtctctgcttccccacctagattcttccaacttaccatctctcttttcccgtcttcatctctcttacctagatcgtttcacacccctataacggacatcctgttgtgcgagtcgccatagaggacatcgagcaggccatcctgctagcctctcactccagccaccgtcatcgcgccccacccatggagctgcctttaccttcctccatcaaccagcgcaaattgttgtcgcgactctccg

SEQ ID NO: 81162 - DNA, 453 bp, Zea Mays
tttgtgaggaatctccataagttggagtctttcacaccttacacagtatgatcacaatcaagaacaagagtaagggatggattagcaacacacacaagagcacaaatgcaccaagacaatgcatacaagtgaataaaagagcgcacaaatgaaaaccagcagagtctcaactcaaagtacgctcagatcgatctcgaacgaactaaggtgtgatcgaagtctcagagcatgttgtatgctcttatgtttgtttcagtgtgttacatgggtaccgctccatggcgcccaggggtccttttacaacactaaggagcctaggagccattggatctccattagggaagcaatcaaccattcctatctgcgtgcaccagattgtaaatcagcgatctatttcctttatcagccgagccgatcgttgtgtgccttcagtcacatggcacactagacaca

SEQ ID NO: 81163 - DNA, 650 bp, Zea Mays
gtgaagtttatgtgggcagcgactacatatggcgatgagcctttggttgaggtcttcactaagaactattgtctgcactggaagaagaaagttgctggtggcaagattatgcagtttggttcgtgcacattcattttgaggactaggaagacttcgggtgaagttgtggaactcgttccgtgtgcaaagaacaagtgggggaactggtgggatttttggttttatgtgacattgaaggacgtcgaaggtgttccatggctgcctccgtccatactgtgctcgcaatgttacatcgccttcccttagtttaaactgaaaaaaggagatgtaaacgaagatgtccttcgtcgtgcttccaaggcgagtagcgaacgtgacttggtggatgagtttattgtttacggagtgtggcctcttgcacacggctgggaggtggatgaggtgaagctgcgctcaatgccttttttgaaggaccgaatggtgttgagtcctacctcaccattgagctatggggttgagacactgcgacttttgtcagggaggtggaggcagaagatgtaaaaattgtagggaaatattcgacgaagatggagatgccaaggagttgaaacatacgaggttcgaatatcaggctaaattgtatcttcaag

SEQ ID NO: 81164 - DNA, 407 bp, Zea Mays
ccgtcgtatgttcggacctacactaatcctctccataatagatcttcaggctcacaagtctaaccttgactcaaaggtatcttaggtaagaagtttcaacttttgttgtaatggttagattataagggggtataaatgttgaggacatcacccctttctatgtacccgctgaccgttttacatttatgcatattataatgacacgagctcaaatgcaacaattaaatttagatgtgagctcgttcttagagcaactccaacagaacccgtaaagcaacccgtaaaacatttatttagagaaaatcgcattttgagccctccaacagttccctctttgtgtccccattatatttgcgtcccgcatatacggtcttctctcccgcaaattttcgtgacgctgattcttc

SEQ ID NO: 81165 - DNA, 525 bp, Zea Mays
gaaggtgtctctactctctactctctagcactgtgtatgacagacagtggactaagaaatgattcacctttttctaatctaaagaaaagtcatactcatagtttataaaactaaaccatacaagccactcgacagtgttggctaggattgctctaatcacacaagccagttaacaagtagtggcaggagtgttgattcactggaagtaagctaaacctaaagctgcattaaaatgatcacattaaacttattcacatagccaacaaagccattaaaccccaataaactggcagtttctttgcacaccaattaaactggcagttttcttgcacacctctggatgactcaggctttatctatgtttttcataatcataaatactggatgtctaggaatgctttccttggagtaaatgtaaaaaacaaattgctagtacttcaaagacacaactaaaccactgtgatgcatcaatgctactttgtggtagaattattctgaattccaatgtttatacttctaaatggg

SEQ ID NO: 81166 - DNA, 598 bp, Zea Mays
ctgccacagtcacaatgttttgactgcatcttagtggtggttgatttattcactaagtatgctcactttattccattgtctcatcccttttcagcagtttccattactcaggcattctttcagcaagtctacaagttgcatggcctcccagttgctattgtctttgaccgagataagattttcacaagtaatttttggaaagaactcttcaagctagccggggttagtctccacatgagcagcataccatcctcaatcgaacgggcagactgggcgcgttaatcaatgcctcgagacgtacctaagatgctttgttcatacttgtccttccaagtgggccaattggatagcttcagcagagttttggtataacactagccaccattcatctattgaaaaaacaccatttgaagctctctacagctatgtcccacgacatttcggtattctggcattggacagttcttcgtgtgatttggttgcattcatccaagacaagcaacgtatccatctgttattgcagcaacatctacaccatgccaaacagtgtatgaagcagcaagcggataagcgccgctccgaacgtatgttccaagtg

SEQ ID NO: 81167 - DNA, 641 bp, Zea Mays
tattcatctttaggagttgctctatttaaattgcgaaaatcaatgcatactctgaccttatctgactccttctccaccggcacaatattagatacccactctacgtatctgcaaggtctaataaaaatagcttctagcagccgatgaatttcgtccttgattcgtgggagaaggtctggacgaaatgttctagctttttgcttgaaaggtctaaaaccgaatttaatggacagccgatgttctacaatctcacgacttaatcccggcattttagtgtaattccaagcaaagcaatctaaatattctttcaatagaccgatcatttcatttctaggatcggtctccagggtcttgtttacaaaagtcggccttggagttttaccatctcctatgtcgatctcttccaaaggatcggccgatgtaaacccctgtcctagtttatcgagatctctgaattcctctatcatgtcccccatagaggaatcagatgatctttatgtgatggtggactctctggtctcggcagccggatcatccgtgatactgtctttacgctgtggtagatgttcggtcttaaagaccgaactgttttgtgaaagaccggaccatccggcctcagaagccaaactgtccgtgaccaa

SEQ ID NO: 81168 - DNA, 405 bp, Zea Mays
tatttttttcgaatgcaaggaaatcacggatgatactctaaacaagtaaccgcacccatgtttctagggtatttccataatttccgtaaccgtaccgatattgtaggagtgtaacttcaatacaaaacaacattacaacttcttacgcacaatgcctcaacattttacaccattctgtatatactatatatgcaacatttatagcgtactttttttatgccaatccattcatcagcttattcgatatcacctttaactgcctcaattaaacaccatgcaagatccattaattccacgcccacgtttcagattacgcacgtttgcatgcgaaatataatccctataattccgccaattaccaaatgattcccgcctttccattaatccaccccgtcacggcgccgt

SEQ ID NO: 81169 - DNA, 814 bp, Zea Mays
ctttccattgcctatctctgaagcaattgccattgaaaagaaagcttgaatagagggatgcacttgtatttaaaaatatgcccatggctagttatgttctatcttttgaagccatagccaacaggttctaagagcctagctcatcaattgtaaatgagagatacccagccctccaaattgtgttggtcgagtgaccttggaccaggccacttgacaatgccctccatttgcatcttttcttcctttccatagaaagcttcttctgattttgtcaatggccttaagtgcccaagctggaaggtatattgccatatctacgtataataacaaggaggtgagtatagattgtacaagaattctccttccaggttttgtcaataggtctgccttccagctatggagctgatcaactatcctatcaatgattggttgaatgtgctgtttactgagtttccttagagatagagacaccctaagtattttgaaggaaaattggctaattggcagggaggaaaacctggatgacatcaacatcttcatgttagcattgggtaggtaatacactacttttctccatgtttgttcttagacccgatggatccccaaaaatcttaagaatatcaaatttgatcccaagatcaacaaatgtaggatggagaaaggtcaccattgtccttcctgatagaggctgcaaaaggctaacatttgctgccatctttaccatgtagaataaaacatccatgactaaaacaaacaacatggggtacaaaggatccccttgtcgaagtcccctttgatgcaggatggtgtgttc

SEQ ID NO: 81170 - DNA, 609 bp, Zea Mays
gtcttgttgtacattgtttcttctctattaacaaatatccgccattttgaaaagaaggaagtgtctacccactagccaggcgatatgaccttggcgcatagaacaaagagtttgtgaatcatgggatttagaggcataaggtgtatcatgggattgagaggcataaggaatcctgagcttgctgaaaagctcgtccatggtgagagtttcgtaattggatgactcgatgaccatcgagaccttcacttcccaaacctttcaatctagagcatgtaataacttcagcgctctctcatgattatcatagggaagttgtgtcttgttggcacacatcttgatgacaatcgaatagaaccgagaaaacattgtatcaatggtctctccagccagctgcacaaaattctcgtactctcgtcgatacgtcacaaagagtctgttctttacaagatcattgccctcatggaatctcttaagggtggactagatctcgtgagtcgtagcaaagtgtccaactcgcttaaactcagccagggagaggcacgagaacaatgcgttttgagctttgttattcgaatcatagaactccaactgagtgatctgagcactcgc

SEQ ID NO: 81171 - DNA, 656 bp, Zea Mays
gctaagtataagcccctgcgtaccataaaaaagttgttgtaattcttatcacaacttaaataagcatacttcacatttgaaatgaaaaagaagccttacctttaagctgttataggccaatcagtctgcaaggttccccttcggcattgcaaacaggacatcttcgagttttgggtatccaatgttgttcatcaaaacccggcacacataaatttctcttctgtcttggaggcaatacaagtaatcatcctcaccatttccaccatagacgactgcccccaatggatatctgagtgcctcagcacatgattgcacttcgacaatctgttctgtagtcagctttcctctggtagcatgttggatgatgtactccgaaggcccggttgttttcttgtttactagcgctagcacttccttttcggagggggccttttctttggtaacaggctcttcggccttctcatctcccttgacctttgccttttcctaaacaataattttttttggaatgttggcaagggtctcgacagccttcagtgcatctacaactagtgcactctcagtcttttgtgcgcttttctccctcgggaagtctggtgtaggcttaagtttaacaggctcctcgacagacgttgaattgaacataagagtacgtc

SEQ ID NO: 81172 - DNA, 291 bp, Zea Mays
catcggatccctatccaacggcccataaacgatcttgaactgcacgatcttccagccatccaatcaaggatcaatggccactaccgacttggccgaaccggtacgtgagatttaatccgtgtcgtccctcccttgatctacaacctacaacacttcctggcaagcccttcaatactgaatcgacaccctagatctaatccagcgaaatggtgcccccggatttaatcctgatcgcccatcacgaactcaacggccaagacccaacgtccagctcaggccagacgtcggtga

SEQ ID NO: 81173 - DNA, 510 bp, Zea Mays
tgtggaccaagccaggaacgaagaggccgacgcgttggctaaggcagcggccaaaggcgaggccttgccctccgacgcgttctaccacgtcatcggcacaccagttgtccgcaacacagaaggcttacaaataactaatgacgacgaaggccatcgcattgtcaacctcatcctgggtgaagattggcgggccccaataactttgtatctgcaaggtcattaccatccaagtgatatcaatgaggccaaatgcctgaagcaccgatgccgggacttcacattactcgggggccagctatacaagaaggggatcagtcatcccatgccaaagtgcattactgaaagcaaaggcattcaaatccttcgcgaagtccacaacggaacttgcggctctcactcaggacccagggccctcgctgccaaggtgatccatcaaggattttactggcccgcaataatctgtaccgtgaatcgagtcgtgaggtcttgcgaagcatgccaaaagttttc

SEQ ID NO: 81174 - DNA, 316 bp, Zea Mays
gctgtgagtcgagggaagtttggatgttggacgaaagtagagattaaagaagatgtgggcatatgacaaatgggtctgaagggcgacacaaatgcgttgtggatggtgcgacaacgattgtgatgtggcatgtgaggaatggtttgcggattttggatattatgctcgccgagagaaagacaaatatatataaaggagaggacgtaggacgtggttgccaattttattgagcctcacatcctgatcgagcgagagaggtggttcacgatctcgcgaaaaggacacgagatctagaacgggctcaacgagaggaaga

SEQ ID NO: 81175 - DNA, 785 bp, Zea Mays
gtgaaggggcactccggagggagccgcgttcggtccagaagctggctctatctcctcgagatcatcctctccctcgctgcctgcctcatttgcctccatgtcttggtggtgtaacaccccaggtgtttatcgtctgctcgaccacgagtgcggactttaacacgtgatagcggtgaatgtaaaggtcattaaattttaatcatcttcgtttatcacgattttgatatcgtgtctgtctccatctgtctaaattttctaaatctattttttgtaaaagatcagactttagtaattttcggaacatcgaatctagtattgtttgggttgatccatcgacgtcttgcccaaagtctaatccttgaaatcagatctggttccttaaacgtcgtttgaaattctttcacgcttgtgttgcatgtgtctcgtgggccggcatcgtggcgcgtggctggtgctaagcgatgtctggacagcacacagcctctcgactacgcgaacgatgcgtgacgtcgcttccgaaaggatcacaatttcgatgctgcatcgatctcgcgtatttatttcacgaaatgtcgagtctggtgtcagtttaaaatttatggattaagagaatacgaattcggaagctcgacccactcttacgatttttatcccggacaaattaattggaacttaacgatagaagtgctgcaaaaattaaatcggactgagataattacagccaggacccagtattcataattaatccgtttctcatattgtaattgcagaaaactaatatatgc

SEQ ID NO: 81176 - DNA, 401 bp, Zea Mays
tagctctcaaagctaaagtttcaaaggaaattgaaaaggaagaaagtgaagatgaaggaaatggaagtgaaagtaatgaagaattggctctctttgtgaagaaatttaacaaattcatgagaaaaaagaagggtcaacctagatagggacaaacatcaagaagaaatgctttcaatgatagaaaatgttttgagtgtggggaacccggtcacattgccatgaattgtccaagcaagaagaacaagggcaaggatggagatgataaaaagaagacgaagttctatcacaagaagaaggatggcaaggcctatctagttgaatgggattcggatgcaagctcggatggtgatgatgatgattcttcatccaaactaaatgtcgtaattgctatcaaggaggct

SEQ ID NO: 81177 - DNA, 389 bp, Zea Mays
aaaaaaatatacaaaaaaattagaaaaacacttataaatttctttgggttttttagaacgcacctcaaaaacctagtctaatttccattattctttccttgattccgtggtccaccaaaacaaacgagatattcacttcgacgcggttcggggtgctttgagcttgaagattgaggtcacaggtcacattataaaaaaattctgcagatgcaactgggttgggaacttggaatatatcaacacttgacgaggtctgggaatttgattccattcactcgttaacccatctttggagcccagcaattcgcgtcagattagacgagcgaacatatccacgcaaccctcttttaccatcgatgatagactgaatgatcttttttgtatttatt

SEQ ID NO: 81178 - DNA, 528 bp, Zea Mays
ggggagtagtgagtgagccatgccaccatagagtatgtctagcttatgacatcgagagcctaacacaaaagaatttttgtagaggtacgtgctaaagtgtgtgtaataccctacatcttcttactgatcaacaattgttgtatatggatgatacacaaggttgcaggctccaatctagagagttacaaagcctcctcattgaggagttggggtaagacaagctatagtatctctgactgttacttccttggcttgattgagttcaactatcttggcttgggtttggtggatcttggagtgatttcttgtggcatgttcaatttctgattcaatctcctatttggcctaaattgaatgctactctaccacattcttttataatccaaagtcatggtaattttacatgtgtataccactcgtggtatctatttgtcattgggccaataacccttgtccggtcttggtcttgtgatctttgtggcctgcaaaaggtacgcatcaacataatcattcctatggaggtgtgta

SEQ ID NO: 81179 - DNA, 499 bp, Zea Mays
ccatgctccactcagaccggtcttttcgagagatgttcgaaagtctaccgatgaagaatagaatttgcagtgacttaaccggtctctagatcgttctcatcggtcctctatatgttcctcactacgttcaacgtcatgtgtcaaccgtgagtgtcgttcaagtgttctagttcttacatgcatgagcactcgaggagcaggtctccaaagtgaatgtggttcaagtactcacctactcaggtgaacaacaacaatcaagtttttagggagtatctataagcgatgaccgtttgctttcttctctacttagtgccaagttttgtccatttctttggatctctactttatttatgttcattatgctatgatcacacgtgcacctttctaatatcacaaatattcttattcttttttaaaattaaacagtaactaaaaatacctaagttttgcaacatcactacatcaaccttgcctcaagtgctcgtgatgcactcctcgt

SEQ ID NO: 81180 - DNA, 522 bp, Zea Mays
ttggactcgagggggccaagcaattaggagtaggtcagacaaacagtacacgacaaaacaaatgacatgggatcccaaatgtcttatccatcgtatcccatctagccctaagacaaggtatttataggataaccaggagaccggggatctaagtacgttcgtacccctagttacctgctacattcttggactatactatacaatagggtaattactgaacaatgttaccctatgcctaattacgcaagacactatacccatggaggaggctgacaggactaggtgtgtcccagcatgccacatctttcatgcattcggccccttagcttcaagttccaaacgccttcgtcttggggctttccactacgtcaaaaacatatctttagtgacatgtttttatgagtgacacgtgtaaaacatgtatcatattttatgtctataattgaattgattaagtgacgcgtaaaatgacatcactaatagaaccactttgctgatcctggaattcgaacccaaaacctt

SEQ ID NO: 81181 - DNA, 428 bp, Zea Mays
tttcaatttaagagttcaaaagatctagaacttttaagatactaatattgaccgaatttaaaaatatttaaaaccataataaatcatagatacatacatacatcagagtcacatctacagaacgtaagttggttcaagccgtgcctaactttgtcgatcacttagccatctcgtgctcggcttagtccatcgcgctagggtaacgacctagacaagacactagacctcgtgccatgtcgacacaggcactatgttgatcacatcgtgtcatgccaaagcaccacgagtcccgtgtcatgcctaataccggcctatttaacacgacccacatagccatctatatttagtgccactaacattgtcccctcactcgacaccaccacttcgctccagggttgacgtacttctctactgctataaagcgtcat

SEQ ID NO: 81182 - DNA, 298 bp, Zea Mays
gatgtatcatcttttctcgccacgtggtgccccttgagccgcccacgtggtggggtcgggtgctgttcaccgtgcggctagagaacgtcgtacgggcaccgcgtcttcatactgtagtaaggggtacccctgatgcagggtactgacacacatgatcgagtagaatcttggctgggcagaagtaaggtgaaactcccacagattggggatttgatttcgacgatgcggctggctacatctagcactacttggtgtcgggtcatccaattggctcccagaataatatccaccttctcca

SEQ ID NO: 81183 - DNA, 1053 bp, Zea Mays
gatagatccaggtgctgttggcgaacgtcattgcctctacacacgcgtggatcgtccggtcatcaggtgcggaccgtccagctcagcgcagggaacctcgctcctgctgctagttcgtggaccgtctagccccaggccactgaccgtccgcacttccgtagagagcaccaccgctggtacacctcgcagtgattggcgcccagatcagcgctaacacttacaatccttcaccatcataacaaaatctcgaagatgtatgacctttgctatagaggagaccaaagcattgaaagctaaccaactgattgctctaacaattacatcgaaagcaaagatttgaaaagaaacaatgaatctgacacaccaaatttttattggcccttcgctgacacctgatcaagcgccatagaggtatgaagaggtcagagagaccttattccaaagaactatgatcgctagtactttgttcatgatattagaaaccaaatcctaaatcttaaggatcaataaacctaatataaaacgacgaatagaaggagatcatgttctcatttctctgtttatcagtaaatttgccagttaggacaaagaagggagaatatagaatactgtgggggcagcggtggcggcgactagcagactcttgcattgtttgtttgccgagcaccgatctcttttctactcctttaaaagcataggtttgcgccgtcgtgcatcttgcgcacacggaattgtgtaggtttattcctttctctctctatcacctaacaaacagggagagataatgatgttatcacctgaataagccttatctcgccagaagcgaaactaatcctgctataaatctctcacgtcttccgctacctcactgcgacccaagtcacatggtgcgttctttggccctcgctccgcgacatcgaaaagccccaccacccgcttgtaagaagccttaattacatggttgggtgttttgacaaagagtctccactcaagcgacccaattttacaaagagactccactcgagcgacccatttttgaaaacccgatgttgt

SEQ ID NO: 81184 - DNA, 550 bp, Zea Mays
ggcgtagtgggaggtggattggagactgggtctgagggattagatcgagtaggggtggagcgacccgagacgagaggcgacggactcgaaaagcaatctagtcggaggcgatcctcaattgacctccctgctctgcctgatctgctgctgctgtggcggcaactgctgcacgggtggctctgtccatccgtcactttttcttgccccatgctactcaagatagactgccttgcccttgtccagtctgaagagacgaggagggtcctggtcaactcctccccctgacggtgtgatgttcttcgttcgcaccatcactgactactgacatgttgcacgataatgagaaaaggtaagcaagagcagtgagcagtaggtaagtaaagatgtagaatggaatatctacctgggtacgtctcgagagataagaaccaggcaggacaggggtcacgcaggtgggcaagcaggcacactgaaaggacagaagtggtgagcacgtattagtcacatagccataagtatatgaaatgtgagtagatacatcatagagaat

SEQ ID NO: 81185 - DNA, 826 bp, Zea Mays
tccttccaagactttcatcagttttgtgtcaaatccccccgctggtgacagtggtttgggtcttagagtacgaccctctcccgaagaagttgaggctttggttgattcgcttgatgatatccccaatgatgagagacaggttcattttgagatgcccataaacccacgcgatgtagagataagtgtcatgctggatatgttggctgcggattcctctgactcggttcctgctgaaacgctagctgtggcaactatcccatagcctaagaagactttgacttcccagagatctgatagcattcgcccgaagcgtcctcgccaagccaatcgaccaacttctcctgctgaggggaagaagaagaaaaagagacgacttcggcgagtgtcatgcttgaatcaggatgccagcccttctgctcccgctgctgaggaagtgccagtggagctttttactggagttgatcccaatgggtgtgaccgggctgacgctgaccccaatgggtgtgaccttgatgatgctgagcccaatgggtgcaatccagccagagcagatcccaatgggtgtgttgttcgtattatcgacgaggatgaggaagaggaggaagaaatccccttgattcggaagaacagtcggcgctatatagtcagtggggagagtagtgaatttccttctctagctttgtctgctctcgttggtttgtaggaattatctctggcaaattttgatcaggctctcgaggatgtggtccctgaagatctgctgtccgagccgacagatggtggtatgatggacgtttgcactgatttgcatgatgttgggttagag

SEQ ID NO: 81186 - DNA, 489 bp, Zea Mays
gggcgccattttgtcaattgggccataaggttttgaggttgggatcaaagtgaacatgtttgatttttgaaagagggtcggttttgaacttgagaaaaacttgaattttcttttatgcctttctctttggtgacctttttggggttcttctgaatcctttttggggtcacactctttctatgttttgtagggtattaagtgtactacaacttttataattagtccaagtcatgacaatgtgatttacatagactttttgccataatcccctctagggctccatttgcctataagggatgtgaattagggtttgggtcattcccttctcttttgtgcatgataaggccaaggcatgacttctaagatgggttacacctacttaggatcttgatccccaagtttggtgtcttttgctcaatctaaaccacatgtgatgatgggttcaatagtgtagtcttgagtgaaaaccctaagtaacaccttgggtgt

SEQ ID NO: 81187 - DNA, 408 bp, Zea Mays
ttgcacttcttatacttgcatttggtattagtgcttgtgaagtgcaggtaatcatcagactaagacattattccgctgcaaccgactaagtcaagtaagttgagttcatttgggttgaaagttttaattgcctattcctccctttaggtgacatcaaaggtccttaactaccccgaaggtacttttagtgcctcaccgtcagttttctagagtaccccgtgaaaatgattgaagatgatgacatgctcaccgtcgtcgttggtgtatatcaatgtggaggcaagggaggtcgtggcttcgagccccgcaatcacctttgcgatgttggttaagaacgacattgccacaacgaccacagttatcctttgtgaccgattgcaactcatcgtctttagtagtaggtggctg

SEQ ID NO: 81188 - DNA, 772 bp, Zea Mays
agatagcacagtatgtggcccggtgtgacacctgccaacgaacgaaggccgagcaccaaaaacctgcaggcctattgcaacccctcccagtacctgaatggaagtgggaagaaataggcatggattttgtaaccagactaccccggacgcaaaaagggaatgactctatctgggtaataatagatcgcctcaccaaggtagcccatttcattccagtgaaaactacttttggaggagccatcgttgcccgaatttatctcaaagagatagtcagactccatggcatcccaagaaagatagtgtaagacaggggaacccagttcacctccaaattctggacaagcctttagaaagctatgggcaccaagctagatttcagcaccgcttatcaccctcagacaaacgggtagacagaaagagttaacaaagtcctcgaagatctattaagagcatgtgtgctagcattcgatagaagttgggaatccagtctaccctacgcggagttctcatacaacaacagctatcaggccagcatcaagatgtcaccattcgaggcattgtatggacagaaatgccagacccctctcatgtggtccaacgtaggggaaaagcactagaaggacctgcctttgtcaaagaggcggaagagaaagttgccctgatccgcaggagattacttgaagctcagagtcggcagaagagttatgcggacaacaggcggagagaacttagatttgtggaaggagacttcgtctacctcaaggtctcccca

SEQ ID NO: 81189 - DNA, 620 bp, Zea Mays
tccgcgaatattcaggggaaaggaactggacttctcaaagtttttatgtttaggccatcataaatattgtgttagtgacttctgttggcaaaagtccagtaaccacactaactactggaaatacaatgttctcaagagagtctagctaggcactctcggcggttctagttaacttgtaaaaagttgatatttcaagttctgttgcacgaatgacaggtacatttttactataaaaatgttcaagagaaggaaagacattcatgctgtcaaatcgaatccctttcaagttaacaaccacatctcacaaagccatcaattcaactttcttttttttttcaaaaaaaagggggggagtcaatttacgtaggtgttcaatccataatttcacacagctgaaaacctataccgaccatctaaagtcgacggacatcacagcacacctaaacgatgctcattaatgcagttgttagatcatccagtcgcgaccattatctgtggatgtatcagaatttcaaaagtccaagctcgacaaatagtcatcaaggaaattcccaaccatgattgaatcgtgggctgtgaattgccacatcaacatggtccaagagctcctcaagtcacgc

SEQ ID NO: 81190 - DNA, 486 bp, Zea Mays
gttagtttggcgtccacctgtaattgatttggtgctctgatttggtctgccctgcaggggattggtgtcaagtcagtggaggaggagcagggtcttggtcctgaagcacgggagaaggagcacaacatcacgattagtgagatcccgatctcccaaatgatttcagtttgcacttattaaaggtccaatgtagaggggttctaaaaaattggtgtaaactccagagcaccagatgcttggtcgatttaatatatgataaattgggattgagagcaaccttgttttctccttattttctaggctccaaaacctagccagtacagaactgaagatagctttgccagacgccagctcttagacgatcattatcgaatgatcgctgtagtcctcaaatcttccctggtagactgatatatggttcataaacatttgtcgtctcaaacagtttctgtaaaaggctcctctctccaggttactatgattcag

SEQ ID NO: 81191 - DNA, 602 bp, Zea Mays
tttgcatgcatggagaaaactgcgctgatctattttggcaagcaattattattgtattaattgtgagtgatctaattgattgactgtgtattaatcatgttagtgttgtgattacgcggctgattacttgtctattttagtcgcgttgtgtatacatattaagggcaagacgttgtccctctgtaccgattttctactactcacgacaaaacgttgcgctgccttcatcttcctcatcacgtcgctgacgtgacaccgaagataggagagcaggatctccgaagcttacgtcccatccttgccatgcacggggtaggggacgtatcatgtttttaggaagtagcgtcgcgactgctcgctgttcgtctgcttgctctacgccgacaccgtcattctcgctggcttacttcccctacttacttttgtgttgttctagtgtcgacaactccactatgagaatgactatactttctctgtcgtttattctcgtaatccttcaatcactagcattagattataaactgcgagtgtcgttcattttattattatcggaatcattgtgtttgttgggggtatgcttcgtagtcgaagatcctaaaaag

SEQ ID NO: 81192 - DNA, 755 bp, Zea Mays
ggcgccgacacattcttcgtgcgcgacatcctgacctgacgactgcaaatgagagagagaagctaagcacaagtcgattatagtcgatagaatatcaaaggaggagatgtctacctggaaaattcacacgagaggtggaaatccaggcaggacaggagacggctcacggacaggcgaggtcactgaaatgacagaagaggtgagcacatattagtcacatagtcataagtatatgaaatgtgaataaatacatacacagagaaatatggcacagaaaacgagagatatggcgatcgagaggtcaaacgacgtgaaaacggcgtttgaacgataaatagtgccataagaggtttggaattcgaattgaggcatgaaatgatgtggcattgagccgatacttcacgaataggtttatatgggtgaatatgagtgaagtgtgtgcttggtttgaattgaggcgaagaaaatgaaatttgggcattcggctcggaaacaatcgctcgaaacgggaaattgagtgaaatttaagcctggaatatcggattggcgtaaaatttggcgaatatgttactggagatgttgtgaaggcgcctgaaaaatttggggtcaatcggagcatttttggctggtttggacatttcaccgaacacgtggcgtgcagagttctagggttttggagaaatggctattagaggctgtgaaaccctccctaaggagctagaaacctgcagggatacacaatgggcacataggaa

SEQ ID NO: 81193 - DNA, 866 bp, Zea Mays
atcttcgccgccggtgagctggacgccactccggctagccgcggtacctctcccctttctcaccgcccctcggattagaatctcaccgccgttgtgccttcgccgttgtccgccacgtgtccaagccttgccatcgcaccaccacgattcactttagctccccgttgctcaccggaatagctgccacggcgttgaacacgtattcactgcgccggtattcttccttatctccggccgcctgcgttgctcggccaaattgcacgccaccgtcgaagctccctataaattgagctcgcggttagctgcgctacatcatcatgaaaccagagccccaatcccaccctcaatcgttcgccagagctcgtgaatttcgaattctccccaaactggtctccgccaccgcatgatcaagctcgccgtggccagctcgattcaggttagctcgagtccctctgctgcttgttctagcatccttaggtaccccgcaaacccctcgacccctttaattgaaccggaccgccagggatcaccgggaacgcgtaccattgtcctcatcgttcgcggttcacgtggacagagcttgatagcttaccaatcgtgaaattaagttaggggaatcgttcggggagggtttaatccggtgtacgccgctcgggagcaccggtcgttgcataaatccaccggcacaacctcaccagagttcatcctccgcgctgccgtcgtcgtggaccttcccctgcgaagaaatagaaaccggagggcttttctgcaaactgtcagcgactcagtgcaacagtgaccgaagccatctccagttagccaaaaacctgagggcgtttctgcaaagcctccaccgcaggtgcggg

SEQ ID NO: 81194 - DNA, 478 bp, Zea Mays
cccaaccactaaggtgggagatgttcctcttggaagggagttcacacaggtttttgtgactcgcgtgctaaaaagggaaagtactctgccatgaccatacttaggtgtagagagtatgggggatgctctttttatgcccgttgcatggccaacaaataaggtaatactacaaccttgtattttatttatgtaattaatggaacaagcttctaatgttctatatttttagatgggtcgtaacaaaaaatcaacgttgacctaaggttctacagcagcaggtaaatattttcttcatatatagttgtgtataagtgtagagttggattaaaaacagagtgaatggtactactgtgcattcaagcacctacatgattgcaatataattaggtagcatttaggtagcatttcagcagattatgacagtcttctacgatctgtgtaaaggagaaaataagcagttatgctcatgaataaattc

SEQ ID NO: 81195 - DNA, 836 bp, Zea Mays
cgccaacccgctctgcgccgtggtcggttctccaaactccatccccgcctctggtacgcacctagatatcttcgccatgacttgtgttttccattgtagaggtttagagtagggtggaccatggagtggccatttggattgttcgctggaggctcgccgtcgtgaggcgtgcggctgccgtcgctggtgggggtcgaagtggaggtgatgagcgctgactgtagattcttggacggatggttctagttagatctaggaataccccttcacgtgattgaatcctatctgtctgattcgatcgaacactgagcgttcgtgttgacatgggggtcttgtgagccatccatctgtgatcatgtgggcgacgttggatactagtttgtaatacctaagatctaatcgtggccatcttttgataattcaatggcctagcaagactcgtacccctttcgaccgagaaaatgtgcaaaagaacccctataattttgcagaattaacccgccatccacatagtgttaggattgttacagggaggccccaaaatttgcaacttaaaccctaagtcctcaggaatttacgcccgccacccctaaccgagataaactaaatagaataaattataacattcctagaaaatgatttatagtgtaaaaataattttagaaacttaataaatccataacttgtttgttgtaattccaaattaatccattccagttgcattggactaatattaatattttttatcagttagtaaccttattttactatgtatcatactaataaaaccaagcacttaatcttgttagcttatgctaacacataaatgttcagat

SEQ ID NO: 81196 - DNA, 499 bp, Zea Mays
ttcgagactgccactatttcccagacatgtattcagttgagctgattctttctttccaatcttctaaaaagttgggttccctttattccgaatggttttcaactgagggcgtctgctaccacgttggccttcccggggtgataatgaatctcaaggtcataatccttgatcagcttcaaccatcttcgttgacggaggttgagatctggttgagtgaagatatacctcagactcttgtgaccggtgaaaatgtgacacttgttcccgattaggtaatgcctccatatctttaaagcatgtactatggctgccaattccaaatcatgggtggggtaattctgctcatgcggcttaagtaggcgtgatgcataagcaatgactttttcgttttgcatcagcacacaccctaagccttgcctcgaggcatcacagaagacgacaaaatcctgatggatatctggtagtgtcaaaaccggtgcggttgtgagtttctccttta

SEQ ID NO: 81197 - DNA, 478 bp, Zea Mays
catatcacacatacttgcaaattgttttcacatcataatgaaatatatatccatgtgcaaattagcaagtcaatttttagaatagttcggttcagaactttatgcgaaagaatgttggctctatgtctgtttatacgaaagaatgttgtctcttccctttcctataggagggtgaaataagttttattagcagcgtcgtaccggaggtgccagtagactcagtgtgccagtcgcttctcaagatggcctcactggcagcaaaatgttctctgatgagttgactcgcgtgcttgattgggattgtactttatctcttctgtcagctaagctctggtgaattcctccggcatcaacgttagcacgatggttcgtccaaccgagcatgtccccgattcacaaaactatatagttgggaacctcataggtagattcatagtagttaacagtttgcttaaacaaattgacgtggttgtttgat

SEQ ID NO: 81198 - DNA, 385 bp, Zea Mays
tattgcaaacttagtgcatggtaacatagattactcgactggatgtatggatattcggtttgaaccaatataaaatccttgtgtccacttcgcacaccatccgcaccaagacgcaaagcactagaattattagctggtggttatgaaacatcgacagttggcgctccatgtaggggatattttgcgtgtcatgacacttttttcacccccgtagttgcgaatggctaaccacatcacaagctaggtcctaggggtaggcgtgcattttggtagtttcaactttgtcatcggcatagagggagcactgccgcggatcacggcgcccgtacaacctctcgtcaatactgtcgtcaacaagagtttgcattctctactactcttaaac

SEQ ID NO: 81199 - DNA, 435 bp, Zea Mays
gctatctggggattcgagcgacaatgatagctttgatgtggaaagtggtaacgaggatgccgaagatcggccgtggaggccaagccatgttgtttttggaaaatccagtgttaaacaaggacagattgaagggatgaaggaaaaatattttcacgatatatccattgtgagggatggaggagaaagtaccgttcctcttcccgaagcagatgaagtagtggtttttaaaagcttcatgaaggctgggttcgttttccattgcacaagatgctggttgtagtactgaagacatttaaaatataccttcatcaacttactcccgaagctttgattaaaatgaggttttttatttgggctatgaggagccaagggctagagccagatgccagatgcttctgtaatattcatgatttatcttaccagacgaaggcaact

SEQ ID NO: 81200 - DNA, 519 bp, Zea Mays
cccctgtatcttttagtctgtagacttttggtaacaaggttctataacaaacttgtagagtaactgtaggagaacaacttgtatttagtgtactggccctaaatccgcatgaaacaaggataaaaagtggttcaaagtgggactgacaggttttatttcagacttagtctatggctgattgagacctgaatttcagataaaagtgtcaagtttggagctccttggtagtcaatctctttgtttttaggctgtagtttctgtagcaaacttggataccaatgttgggggagtaatccctagtgagggacatacccttgaaacttcttagaaatgagagaaaacactgcacaaagttgtgttgtcagataaaagagtattgactgttgtgcagtagcctaagtctgaaatatgtgtgtctggttaaactttggagctttgtggtgcttgatctatatggttttggactgaagttattgtggaaagtttgaagaccatatgttagtgaataagttcctttga

SEQ ID NO: 81201 - DNA, 999 bp, Zea Mays
tatattattataaggaccaatttatcattaggtggagaaccccagtacttcaactctttgaggagagagatttccagtatgttcacactaactggtagttcaaatgctttcagacagaaaaaatgattatatagtcacatggtttatttgatttagacttcttcatgttaggatcatatgaatgcatttttattggttttgtacagaaaacatatgtatggacaacagaagaaaaagatccagtagaaaagatctatcggtatgctctttgagcctttctttttctgttgcctttgacctttgttgacaaattttcgaatgcattgagtttgatgtttattccttgcagcgaaacgcatgggcttgaaggagttcaaaatggggtatgaatcatctcagtttgacctttgttttaaatccattgattattgacccttgtgtctaaactgccctaagatacttattcctggcttcataaatcacaaaacggagccaaagctatagtcaatgcagaaagtaaactgagctaacaaataaaaaacaatgctacgacacacaagatcaacaagctagagcctaaattaacatcagtaattcaaatccacttaagtaatatagtgtgtgatgtaagccaaaaaatcccgatgtaaccattctagccaaagactctttagcccataagtaattcatgtttttgtagatgctcgacatggttcttggtgatccatagaatgagcaccctgatctctgttctcctcggttcctgcgtgtgtggaaaagtagcggtgaggttcaataactggttacacattgttttttgattgctcagcacaaccatgatgtttgatgaaatgttcaactctgctattgcacatttgcacgctgcagtgcagtgttgaaatgtagtttactttttgtttgagaattcacatgacatgtcaatttgtacatttttaagagtccaaattaggttcgttttgcataatacatgtggtgttt

SEQ ID NO: 81202 - DNA, 579 bp, Zea Mays
tcttgagagttgaatgaatctatcgcggtactcgttgactggcatgctcccctgcttcagcgacaaaaattccttcttcttgatcttcattagtccagcagatatatgataatttttgaactgagtagcaaattccacccatgtgatagtatcagcaacatcgtgggcaacggtgtaggaatcccaccaatcagcagcaggaccagtcagacgacccaaagcatatagaaccttctcccggagcactatgcaataatcaacatcttctccacagacttcaaccaatcatcagcgtgcagaggatctggagagttggtgaactcccggtgcttgtcccggggtggaactggtggtggtggaggaggctatgatgtgtgctgttgttgcacccttcgctcttggcgcatctcctccctctcttggcgcatctcctgacgctcctgtcgcatctgtgcatgtatatctgccatagtatcagccatttgttgcattatccgcatctgggccgcaactgctggatcagctccggctggtggaggacttggaggattctgaggattcatctcggcttggtgttgt

SEQ ID NO: 81203 - DNA, 416 bp, Zea Mays
aaataatttctcgttttatattttcttacaatttgggttttacatttcttaaagaaaacaaaactagacaattatacgtgcacacaacccttactacataccatgaaaaatagttttagcaaacaacctttctgattatttatataatcacccttaccatatctctactactctataaaaatctaacatagatcgtggtgcacggttttacctcctcacggcgcatacgacccacatgttagtgtctcccttcttccccgtgctcgccctctcccctctacccctgcatccgcatggtcctcgccgcaattccctcaccgatcgatgtctctgccatggaaggaaaaatcccgtcactaccacagaaggaaacacatcccctcgtcgctatccacgcctcacaccaatccagcacg

SEQ ID NO: 81204 - DNA, 665 bp, Zea Mays
ggaaattctgaattctctggctatggtgggtggattgaggtgagcagtggtgcactgagcacgtaacaagagggcagaatagagagggcactcaatttatagaggccagctacgggtgctatgaattttggacgaagatgggttcacgatggtgaagaggtgagtcaccagagcttgtctaccgtgccgctcaatggggtaagggctcgaagcagtaattggttgtccaccacgacttactatgacatggtacgatggcgtatggcgtggcacgatcagagtaaatggcggtcatgacggcggtggtcgtgcgaccatgtcgccggcaagtgggtacggccagactggctcaatccactccccctcacatcttttcatcctcgcggtaacatctcacccaaattgagcacgaatcattgcggccaaccgaatcaccacgcggagaacgccgatggcaaggttccctgaacctgcgatctttttcagtctactataccatactgactccattaagtgcacctaacagagcaacttgaggggcatttttcttcgattttcatacagcgaactaccaattcgaccatagaaaagttgttccctatacactagctacaactttgtcataaggatcttgattagttactcactagatcaagcataatcca

SEQ ID NO: 81205 - DNA, 419 bp, Zea Mays
aatcttaattgggtgctcggaataagttaaataaggttccagatctacatcagaaacttctaccactttgtcgggcaattgaaggcatttcttaagttgggatacgtgaaatacattatgtatggccgaaagatggtcagcaagtttcaccttataagccacggatccacactgcgctagcatttcaaaaggaccaacatatcgtggtgccaactttcccttgataccaaaacgatttactcctttcataggtgaaaccttcagatacacaaaatcaccaactcggaaaaacaagggtcgtcttcgcttgtctacataacgttggtgacgattttgtgcaatctttaaccggagctgaataactttcatgttctcttccgcctcttttactaaatctggcccaaagaaaaaccgttcac

SEQ ID NO: 81206 - DNA, 558 bp, Zea Mays
gaagagacgaaatttattcatgtctctaatgagcgggagttctggacgaccgctaacatgcataggtactacaggtaccttaattctttgtccaggatgaccgttctcctgaagggcggaaatcaaatgaacgtccttggggagagtcgagtcttccttctcctccttgctccaaacagtctcgcccgcatcaatgtgtttgacatgatctgggaagagatcatccgtgcttcctggtctcctctcagagggtgtcatcatgcaccctttatcatgaagatgattgaagtggtcacccagacccacttcaaaaaaccagtcaaacactcccgctacgtaccctactgggttgattcctccaacccagctgctcgtacgaagcgggctccctcagggtctggaggccctgcctcctccactgagccacctccccagcctccccatcatccatcttcctctcgccccgccgctgcctcgcgtccctctcctggccgcggatctcccatgccacgtgctcgtggtcgtggtcgaggttgtggccgagggatgggtgctcgc

SEQ ID NO: 81207 - DNA, 885 bp, Zea Mays
tccgagtgctgggcgtaggcagcgaagggcggtggcgaagcgtagagtgagtgaagtggatggcggtcggcttcgtgtgggcagggctggcaagcgggaattgttgtcctcgccggttggggcgagtgtaggtgagggggagttgcgaagtctttttgagggtgaggagcttaggataatgctatttaactatagggagatgggaatcattccgaaggttgaaccaatgtaaggtgtaatgccctcgctgtaagtgtgtaactatagtttgtatgatgagactgtgcgccttcgcgcatccggctatgtccataggggcgttgcgcacttggtctagcacatttattatgtcggtccggctgcgcctgtagtcggtctttgcgcggacagtttcttggtgtagacttttgcacggatgtaatgcgcctgtgattttgtgcgcttgttgagttagtccggctgcacccttaggcaacttttgcacggatgtaatgcgcctgtgattttgcgtgcttgttgagttagtctggctgcacccttaggcgacttttgcacggatagtcttttgaggaagacttcaattttgcgcacttgttgtgctagtccggctgcacccttatgcgacttttgcacggatagtcttttgaggaggacttcgattttgcgcacttgttatgctagtccggctgcacccttaggcggcttttgcacagatagtcttttgaggaagacttcgattttgcgcacttgttgtgctagtccggctgcacccttaggcggcttttgcacggatagtctttttaggaggacttcgattttgcgcacttgttgtgctagtctggctgcacccttaggcgacttttgcgcggagtgtcgcacgcgggg

SEQ ID NO: 81208 - DNA, 1016 bp, Zea Mays
aagcttcacgatggcctatagaatgcgaaacacaagttaaacaactatgaccaaccttaggaaaggctgaccacgcaggtgcaccactcggcagcgctggtgaccaccgatggggaacaactggtgttcttggctaccgacggtggaacgggggaaacaaagggtggcatggatgcgtaacggagaggcgagactgagagcaggctcaatttaaagggagtcaccatgacggtggtcaatttgacagctgaatcacgacggcagcggtagcccgtggagctccacgttagcctcaaaggtgtccacaggccagtaatgtggcagacttaccacgaaccctttatgacggttcaacatgagagcccccaaccagctgtgtggatggccggagcgaccggtggcttgctacggtggcggtagatgaagcacggtgaggacacgtggtgtccgtggctagagcggtaactcgatcaccgaatccgagccagagatcttttaccacttcattgatccacgtctcagcggcaccaatcgtggtgcgagattgaatcatggcgggggacatcggtggcgggcacacataactcaatcttgttcagttcactgtaccatgggatgttcattcagcgcgcctgacaaagcgatttgaggagttcctttctcaaatttttatgtgacaacttgtttatccgactacatcaaagttgttgtccgtcatgctagcttcaattttgttataaggttcttgctcatacctccactcgatcaaatgcaattcggttccaaagttgatctaatgccactattagtctaactttcagaccaacacacgactgatagcccaacttctaggccattttgccccaatttctttatagctctagggttcaatcacttaatcaaacttggactactttaatagctctacaaatttgttgtagtgacccacaacaaaatctccatagatcaagagatacatagatctaatgtcagcacaatatcactgtttttcaaag

SEQ ID NO: 81209 - DNA, 790 bp, Zea Mays
cagtctagaaattttattggcaaaacatcatctgtcgctccggagtgccaaaagccattacagtggacaacagagcgcaatttgattatgaagccttcaaaatcttctgtgatcaaatcggtacaaacatacactttgcatcagtaaggcatccagaattcaatggtctagtcaagcgatcaaatgatgttattctcacaggaataatgagatcaattttcaatctatcgaagggcaagtggtcagatgaattagtaaaagtagtgtagaatcacaacacatcggtatcaagatcgataggtttcaccccattcaaacttttgtatggtgatgaagttgtaactccagaagaagcaaaaacaggttcaatacgaaccatggcttcgatagatgatgaagatacttataaaacatcgaaagacgcaatagaagggatcaggcttcaggcgattgaccatatcaataaatatcaagtagaaacaaccaagtggcgagataggaaagtcaggctaaaaatataaagccaggacctttcttggttgtgatcttcggctagaccagggtcctataggctaaagggtatggaagggaatgatattccaaggtcttggaatgcagatgagctttgaagatactatgtataacaattatgtaatttttcgttatatggttccttttttctttcaagcagggagaaaggttttttgatagggccatattttgtaattctttcatctattagcccattcaatataagggcaaattccccagtatgtaaaatgtaaagtct

SEQ ID NO: 81210 - DNA, 499 bp, Zea Mays
ggtacattgtttttgtcataagcatgatatttcaatgatggatatggaagatgactatgtaaacccaaagaagccacgacaaaggactggtataaacaatgagcatcattatcgagttgattgtttctttgctgtccttgacctgttaagagaagagtttaataacagattcaatgaggaaaattctgagttgctcatgtgtatgtctgctctaagcccaagtgatttattctctcattttgacaaggaaaaattgatacacttagcaaaattctacccggatgactttgttcacaatgatatggcaactcttgagtatcaacttggcctatacattgataatgtccaacatgatgaaaggtttgctaacttgcaaagtataagtgatttagctaaattgatggtggacacaagaaaacacctttcctatcctttagtgtatcgactgttgaagctcgcattaactcttcctgtcgccacagcaactgttgagagatgt

SEQ ID NO: 81211 - DNA, 552 bp, Zea Mays
atcgagtatttgttagaggacatcagttcagcattcgaatgatataattactctcttgttgttttagaattcatcagcttgtaaatttgcagtagtgtaatgacgcgcgatgattatggaagttgtttgtgggatttagaagttatctctgtatgagtaatcataattacgtcgaatcgccttaagtcgatgctgacttaagtcgattatttttgttaatagggcgtagtggtcaccctgaattgcgtaggcatgagcatgttgcaccggcttaagtcgctgctgactttagccgattgttccattagtagggtatagtggtcaccccgagttaagtaagcgcgagcatgttgcaccgccttaagtcgttgccgacttaagtcgattgctccgttagtagggcatagtggtcaccccgagttaagtaagcgtgagcatgttgcaccgccttaagtcgttgccaacttaagtcgattgctccgttagtagggcatagtggtcaccccgagttaagtaagcgcgagcatgttgcaccgccttaagtcgttgccg

SEQ ID NO: 81212 - DNA, 633 bp, Zea Mays
gtgagagagaccagtacacagtgaaactagcgtgcagttccattccagctcgagcccaaacactccaaacatcatctttagtttaaaaagagtccatagttaaaagctaaaggtgaaattattcctcaagacaccttcatcaaaagagagatgctgcagatgtggaactctggccatgcatctttgaggaaagcaatgctgcgttggtctctgtgcgcggaaatgaacactagaacgagtggtcatggagcggcaggcaggcgcctacactggcgaagagaaggcaccggccgaccggcgcgccttttccctttggatgcaaggaagaagtaagcttcacagcgaatctgggcatcttcgtccgaaatttctgtaaaagccttgcattggtatcttctgtttcctgcttttatcttgtcctctcttccctacaattcaactttgcacctcccaaattcgaacaaaagttgaagctgaaagtaagctctgtagctgaattcatcgcaatgcaactgatgatgcgcagagtgtttctcaggaagccgagagtttgcgttggctgggtccatatatatgcagtcttgttttgatcctgacgtttgcttgatgtgttctcttcatcttctacgttgc

SEQ ID NO: 81213 - DNA, 616 bp, Zea Mays
catagttgagaattatggaaattctctcccccacccccgatcgggaagacagccggatgttcgcaccccaagctggaccgagtctcccacagatcaggaggtagctgaggcgggtgcgttgctagctgaagttggactactgaaagagaggggtctgactgctgaagctgtggttgctgattttgtcttcaagaatattcagccgttgaaggacagggcatacccagcttatctgtattgaggcctagccgactcaactcgggttaccaacagaagaattccctctgcagacttggtgagccgacttgagatgatccttagaggcaaagtgtcaaatgttggtgctccagtggcatactcggcctggaacctgcctcctcccaaagccttcaccctttttgtgtcgaatccgcctgtcactgatggcagcttgggccttagagtgcgaccctctgctgaagaagttagtgccttggttgcctcgcttggggagattcctgatgatgaacggcaggtccattttgaggtgcccctgaaccctagtgatgcagagataagcgctatgcttgacttgctggctgaggattcttccgacgctgctcctgctggggcatcg

SEQ ID NO: 81214 - DNA, 452 bp, Zea Mays
ccttcaactacggacggtccgccacctaggaccagacggtccacattacaaaaacttcatgaaacatagaaactccgcgtttttgcccatcatctcaagttagacctacggacggtccgccatgctggcccggacggtccgcggtacctcaattcagcccacattcaagaaatcgcttttgaataagtttttctttcacgaaccaaagcgttgttagccctcacgcaaatgcaccaactatattagcaatgaggcactaaagacatgtcaagtaagatattgacccctcttgatagtacgactatctagcctactaacccggtcaattatcaacctctaagcaccggccttttgaccggtaaaacaaaaacctattgttatacctttgccttgagcattcaattccatctccttaaatgatgaacaatgggcatccataatgtagccaacca

SEQ ID NO: 81215 - DNA, 489 bp, Zea Mays
tctgcaatgtagggccgaacggtccacgacctcgctgcaggagttgctactctctgcgtactttcagatggttcgcggctaaggcccaaacggtctgcaatggtgcagagtcttattttttcgcagaaacctgaatcttgcctcctagaagggaccctgtcagggaggagagattctaggattgtcttggggttggtaggccacccaagacgcctctggacaatgtagagctgaagagaggtgaagattgagattgagaaaggctaaactaaggctagactactcctactcctaatgcatgcaaagaaacatggtaaataagataaattggtttgataaattcgattgtgttggtgtcaatcgactgtaccccttcatttatataagagggaggtctagactcgtttcaagtctgctcccaaacaaatcccgtggagtttggtaacaaatctcgcaagaaattaggaaccctaactgattctattccca

SEQ ID NO: 81216 - DNA, 400 bp, Zea Mays
cagaaaaatacaaatgcttccgtcaggacagcaaaggaatcctatggtttggagaccgattggttgttcccaagaaccctgagctcagaaagaagatattggatgaagctcacctttcaaaattctccatgcaccccggcagtaacaagatgtatcatgatctcagattcttatactggtggaccagaatgaagagggaaattgctaagtatatctctgaatgtgacacctgccagagaatcaaggccagtcatgtgaaggtagcaggccctttgcaaccccttcccataccatcttagaaatgggaggacatttgcatggattttatcgtgggattgcccaatacctcccgacaccatgattccatttgggtcattgtggatagattgaccaagacggc

SEQ ID NO: 81217 - DNA, 507 bp, Zea Mays
gaaaaattttcacagctgtcaaaaagatgctcctcgacgaaaaaagggcaggtgggccgatttgttacccgaggcggtctgggcgctaaacacgactgagtgcagggcgaccgggttcacccctttccgccttctatatggatcggaggccatgaccccacaagaaataaaacatggatccccacgaacagttccgtcagccgtccccgacgtggacgagcccacttcgaaggatctcatcgatggagaccgagtctttgtcctataggctctaaataaataccaagcccagacaaaagcatggcgcgaccacacagtcatcccgagggaattcaacgaaggggacctggtactcgtccgaacagctcggacagagtccaggggcaagctggagcccaagtgggagggccctttcattgtcaagacgaaggcttccccagcgcttacaggctcgcaacgccaaacggcgaagacctggagcactcctggaacattgacaatctccgc

SEQ ID NO: 81218 - DNA, 511 bp, Zea Mays
caaacattagttaaaaatgggtagcaagaaatgagttggaatagataaatctaagttgatccacctcctttaaaacttaagcacacttatctccttactgctaccttaacacttacatttaaccctctttcactgatgtcttcatccacccccgccaatggaggagacacccgcttcagctttgactacctttcccatgagggctttccctctatcttgtgggaggttctctgctccgctggataccccacatcccctctgtacatggtgcagctatatgaggagcatcgggtgccacgttgcagggtttggctgaccctggagtctcacccctgtagcctaggtggcgttcccttgattacgagactgtcgggttcagggcggacgacaccactgaggccacagcgctaaaggccttgacgaccttctatggatttcatcccctggagatgatgatgcacccacttggactcttccccgccgagaagagggatgacccaatgtggtgcaa

SEQ ID NO: 81219 - DNA, 588 bp, Zea Mays
atgattttgtggtcgtgttcctggatgatattttgatttattcaaagatcgaggccgagcatgaacaacatctccgtctcgttctgggtgccctaaggaagaatcaattctatggcaagttgaagaagtgtgccttttggctatccgaagtggctttcctggggcacgtgattaatcagcagggtattgtggttgatcccaagaatgttgcggctgtggtggagtggaagagaccctctagtgcctctgaaatccgaagtttcttggggcttgctgggtattatcggcgcttcgtaccaaatttttccagcattgctaagcctttgactaggctcttggagaagggtgttccctttgtctggtccggcgattgtgaggtcagttatcagtcattgaagagcaagttggtggacgcccctatcctagctttgcctgagagcggtaagcgtttcacagtttatacggatgcttcgcgtattggtcttggctgtgtgctgatgcaggaaggcagagtgattgcttatggctcaaggcagttgaggaagcatgaggggaattatccaactcatgatctggaattggccgcgg

SEQ ID NO: 81220 - DNA, 557 bp, Zea Mays
cgtttggtaggttagaggggctacgagcatctctaagagctcccctatccctaatccaaccaccatattaggagagttggcttaaaatctctactccaatagatccctcttttatcctcattaattggtgaccaccaaaaacaagccaaactcctctcaaataaacaggaagatgcaactccaccaatacaactggtggccaacaatcctcgtcatttagaattctcttgcgtccgccaccacttgcacatactctggcctctaggcttgccatccaccacctgctgcccgaacgctcgccaccagcatggctgtgggctgtggcattgttgtgtcactagagctatggttgatatgcatattggagagacgtcgtggctgttctacatggatgggagcagggtggggatgaagggatggaggagtatacggttggataagagagactggtagaagagtaaaagggaaaaaataaagtattaatatgtgacaagtgggttctatgttttagggaggtttattggtgatctgttggagtatttcactcaatattctgg

SEQ ID NO: 81221 - DNA, 743 bp, Zea Mays
gcaattgggactttctttgagttggatgtgcttaattaaatgttgggcttcgggcaaccctaatttgttgggactcggccaaccccacctggctgggtgtattatctggtatcagagctagggcccattttaaaaaggtgggaatgatgagaacatcatccactattacccgttgtcaaagacacaattgacccagttggtctaattatagtctagcaatgaccgtgtaagcctcagaattatcctaccttacttaacttgggatgaggaagccaccttaaaagggagaaccacccccatcaaaaccttttcttaagttggttgtgcttaataaactgctgggctctagacaaccctaatttgttaggtcttggctaacctcacactgggtgtatcataacctagcaaggttgctcgtttatcggcaacaatctagctgttagggaaacacgagatcagccggtggcaatgtcgaaccagatttcgactttgagctcgagatggacaacacgtggatgcgcaccatgtgttcttcgatgtaatgctatcaagaggaaagagacttgcgctctaatacgtttcctttattttcctattcatccctagtacataatggatgtcttatcctgaccaacacattttctttatccggtttaaaccaaacaataatagatgttttttaccgtgttccttcaaaatagaaaaattataccaatacaatttctgccaacacttttactttg

SEQ ID NO: 81222 - DNA, 849 bp, Zea Mays
agtctgaaatccagactaacagtgatactgagccaactttgaactagaaatcaaccctgatctaataagaatttggccatggttgctataacaagatttttgttggatcctcagaaaacaactttgttacagaccaatcaactggttgccagtgaaaatcgggtggaaattgggtttcaaatcgctcggtcaggcactctaatgatggctcccatggtacagtatctgatgaagatcagatcgaccgtccccctcgccgtcaacgaccctcgcgccatgattcccgccggtgaggtgattcgtgctcaccagtgtttggataacgctcggggtcacgtaaatatcgccgccgttgataggtccggccagtaaacaactccggccaccgtacaggttgccacggtcgctttggataagctcgccggtgactgtcgccttccgtccatgtgccacgtgccctagccctccatcgcgtcgtcgtgacccgctgtaaccttctgcccatcgccggggagatggccacagtaaccggacactaatcgcgcgctagtaactcctggtccctcctgccgccgcgcgtcgtcgcccaaattcacggccaccgctcgcgggctctataaattgaccgcgcccttatctccaccatgcattcaagcagctaacgcacccacccgcacctcaaatcctccaatagggagcttgaatttctaacttcccccaaaatcggtttgaacacaccgcaagaacacttcaccgcggcccgctcgattcaggtcagcccataccctctgctcccttgtttaattgttctcatgtgcctgtgatgctcgtcgacccacccaatggatc

SEQ ID NO: 81223 - DNA, 1150 bp, Zea Mays
ggaagattggttttatgtgaagaacgacttgacagcgagggaggacatcaaggaggttatcatgcgccccatatggtcccgctttggtctccgaaagccgaaggttgaaattgatgacgccgccgaagcgtgtcagaaggcgtttggtactgtttgcttcttcattggtgcaagagatttaattcaagagcatatagcattcaaagtatggccacttgtagagagctgggaaatgccgaaggagaccatcaccaagtctagcgaaggtgaactggtccggctgaagtatacattcaggtatggggataagttcgatgaaccaaacgatgactggctaaaatgcatcgaagttacaagtgatgagctgcttggagcttattccaaggcagaagataatgcgctatctacaaccttcggaggtcagggaaaaaagagaataaacagagtttttgacgccatcggcttcgtctaccccgactatcactacccgttgcggggacaggggaagaagagaaaagctgctgctttggccgccctagccgagcctgtgccgaaggctgcgggcaaaaagatgaaggtacttacccaccggccgcgttacattgaaccggctgtggtgcctgagtttggcggggaggcctcttcagctgctgaatcaagagaaactgttcctcccatgcagaggactaaagagccggctataatgccgaaggcaccttcggttgagctagttgaaatgaaggttgacaaatataaggctgaaaggtcaaaaactgaagaagtaacaaagatggcagggattttaagtccttcaacagaagcaacagcgctgaaggcacaaaagagttctgccacaactcctaagagaaggaggatggtaaatgtattagatgttttagaaacaaccgattccataagtaccgctcccacagggaaggttgccgaagctgacaaaacacgaaccaaagctgatactaatcaaatagaagttgaagctacaataacccaggctgaaaccgaggcagggcccacagtgcctgctgagacaaaccttaccacaaccgagcagagggccgaaggaataactccagatactaatatagcttttgagaagagtgtggccaaagaagctgaatccattgcccctaaa

SEQ ID NO: 81224 - DNA, 586 bp, Zea Mays
atcaaatgcggcttggtctctgcggtggagaagaacaagggggcagcggctaagtctccgcgatttcgggtccctccccggtgaaaaagaatgaggcgatggcgtctccctctatgcggtggagaaggtgaaggcgacgacggtcggtctctgcgttggagacggtgaaggcgacgacgggtagaatctctagggttcggcagtcgcggtggagaagaagcagacgacggcgataaagctagggttcggccgccgcgagcgttacgggtgaggagagctgaaaaaactgcgtgctcatgggcccgatacacgtaatctgctgagcgaaatcaacgcgaaggcccatggaccgacacgtggattactgtttcgtaaacgaaaacataagacatcgtaatatcaatatttgtgtggggactagtacggctgcccagattgcgggaacacaatcttctcatgggcccggatgcccgaaacatgcgcataccaaaaagtgtgtaaatcgttgcacgaatgagcataacacgtaataatatttgacgtaagcaggtggtacagtgagccaaaaagtctgcgcacctggtcg

SEQ ID NO: 81225 - DNA, 531 bp, Zea Mays
acacacatatatcaaatctgactctgcagtctttcagcataagaaaagatgtatagaaaatcttcatagaactgaacaattgatcatcttcactgacagcttctcagataaagaggaaagtggaaataaatggattacccaactaaataactaactttattgataactacaccaagttgcaggggatacccacaccttggtgacaatcattacaaagatccaacttcattacatgttcatcatgacaagcatccaacaaaagataaccaaactaactctaactaagactgactagactaagacactgaattaaacattattacagactccgactccatcgatctaaggatctaaatctatccgggtcctgcagtgtagggtaccatagtcgaagcgaccacggggcggtgaacggtaaggatgctgaatcccaataggggcgggagaaccaccatcaagatagtggcgtgtcgtgcattcagcacgcaattccgcaacctctgcccgaaccttgcccaactcgtcaagggc

SEQ ID NO: 81226 - DNA, 369 bp, Zea Mays
ggcccaatataactcggtcgttacttctaaaacgccgacatggtccagagcagctcggcagttatctctaaaaaatgtcggcaatgcataactcaaccgttttctccatgtaaacgccagcagaaccaaatgctactcatcaattaccagtcattactcgggtgttacctctaagaacaacgacaacgctgggaatgaatacaagctatcgattgactataaaagagcgatgaaaaaacaaagatgagagactcagaacaagtcaaaatttccttcaatatattgataagggaagtccttccacgaactcaaagaccaactcattatgagccggcccttcttccctttttcgctacattacattacaac

SEQ ID NO: 81227 - DNA, 666 bp, Zea Mays
gtacgaagcatccacaacctagcacaaggcgaagaaaagacgacccagtctcatggtcaatcaagccagcaacaaacaagctcccagcagcagtcctctcatatatgtttcgatcgccaacttcgagaggaggacggggaggctgaagctttggcgacaagttcaatgcacatccgaggaagtcgttctgcttattttgtggtgaagataggggccacacaacaagtagttgctaccacaccattaacaagcagaaagagatttctttgtcagcatctcaaccttctcagccaaaggaggtgttcagtacatctttgtactgttcacagtatgttccatagtacgttcatcctcaatcacaagagccaagtttgcttcaaccttcggcctcaaatgcttcgagtaaccctgtgatgagcgcatggttgccatgtgctaccttcttcctgtgaccacccccttttgatcaggtccttgctggtcatcccaaattcccagtgcaagacatgcaacaaaggtatagaagggaagcctctgaagctcgtactgtcaacagcatgatcccagagaccaagcacatatactgaaaaaccctaaggggctaggtaagcaaacccaaagcagacaaagaaatactactatgcatttatatttgatttttcaaac

SEQ ID NO: 81228 - DNA, 584 bp, Zea Mays
ttctctttatgaactacctatattttatttgtttatttatgtgtttgatgattttttaaataaaacatcgtgtttcattcacaatacaaatctataaaaaattaatgtgtcactgaggtggttgtgtaggccgacggtaaaggctaaatcattgtggtagataagaacttacgatggtctataacgcggtcggtggtgtaatctgtagctaacgtgacgagtggtatagaccaagtgcattatatccaacctaagatagatagaatagaaataaatgttggctccacaatattaggtatgtgtaaaggatatataccagggtacccaagacgtttagataataaagacgctgacctatgtgccttactcggactcgactatggaactcaaacctagacttaggttatatatctcggcccacaagtcagaataagatctacacgcccaaatagataattaagatgatagtttgtgattgattaggactgtatctctgtaataacaatgtatcccaatttattagggaatccccatagaagataggctaaagaacctttgtaattgtagatagactaggactcttt

SEQ ID NO: 81229 - DNA, 639 bp, Zea Mays
caaggatgctcaagaagataaataaaaagggattcgaatttgattcagagtagcgagaggaagcccatcttcgaaacagattgctataattgtggtaaacatgcttatctagctcattcgtttatcggtgggagtgtctacctcctgcagctctggatgtggtttcacatatcggtgggtcgtccgcagacgttccttcctcgcccctagttctgtagtgttcctcctcgtcgacggcctacgtatgtgtgcatatgagaccacgatcccttatggcagagcgaagcggacgtacttggagtacgtcaacgagctatacacactctaggcatccaacgtacatgattaacaatttcattgcatactgatattattcgttttattgcaaaatggcatgttattcaacatttttgtaggtcatatgggagttgtaccatgaagctgagctggatgtatcgacgttcagtgagctttgcagattggacgaggacttgttggtgtcctcttatttgcttctggtgtgttgagtgacaccttccatttagggttgttagacagtttggaaagaaccaacaatggctggtttcagattttccaaccgatgtggcgttgcacaagtaagtgtggtttctcaaattg

SEQ ID NO: 81230 - DNA, 303 bp, Zea Mays
ataaactaagtaagtctgcaatagccaacagcaacacgccatgacccatgagccaacacagatgacatgtgaaaacaccatgagccaacacaactgacaacacatgtagaaaacaccaacacaggcgataggtgacacaccgacacttgaagttcaagagttgaactgctaaagtccttaacagtcaacaacacaggctgacaggtagcacttggagagtacatgaacgccaattcaccgctgagacattcagtcttcactggagagcacatcagcacacaccacttagagtcttggacagct

SEQ ID NO: 81231 - DNA, 540 bp, Zea Mays
cgggctaagttttctagagacaccgaaccaaaaaactcctttagtaggtgataccctaagaaggacttggtcacccactgcaaattccaagtcccgcctcctcacatcagcataactcttctgacggctctaagcggccaaaatattctaacgaaattcccgaaccttctcagatgtctgctgcacccaatcaggaccaaccagagatctctctcccaaggtctcccagcatagaggggagatacaccgcctgccatacaaagcctcatatggtgccatcttgatgctagcctggtagctgttgttataagcgaactcggccaaagcgagatgatcctcctagctacccttccaagatagaacacaagaacgcagcatatcttccaaggtttggatagttcgctccgactgaccatcagtctgagggtgaaaagcgacactaagcgagagtttggtacccaatgcactatgaagactctcccagaatttggatacaaatttggagtctcgatccgaaacaatggacttaggcaccccgtg

SEQ ID NO: 81232 - DNA, 335 bp, Zea Mays
gtgcctgatgctgggctggagttatcccgggcggcatctcgcacctcatcgaccttggagcacagtcttaagggtcaggaggctggcccggattgcactgttcctatggaagtggttgaaggtccttcagccttagaggtggctgcctcggagggctcggccctcaaagatagcgctggtgcttacccagcccccgagggtgttgccagggatgatccggctcggatgggtagcgtgagcgatgacccagcccccgagggtgtccgagttggttctccctctaacacttccatggatgttcacgtgggatcttctcctccgcactctgattgtat

SEQ ID NO: 81233 - DNA, 302 bp, Zea Mays
atagacctagaggtacaaccagcaagggcaaaggtccgatggaagttaatagaatcacccgataaatgtcgtaaacaccctagctaagaccaataccccagttgcctcagtgcacccgaatggacatttcaagtgtggagaggttgggcattatgctaatgcctgccctaagaggaactttcatatgccacatgctaagaataactactaaaggtcagtctagaacgcccatgcacacaactcgcaaggcaaaaactagcaaagctagagtaagggcagggtgaaccatgtgactactgaat

SEQ ID NO: 81234 - DNA, 783 bp, Zea Mays
gtctgaaagagaaggcaactgaacatcgtgtgagagaaagaaagaacaaggtggagttgtcgaacttggggccgttgtcacattgaaggacacgaactaggcgatgaaactgggtggagacccaactaaagaagtgtgtgagggtgtgaaaggtgtcggacttcaaacgcacaggaagagtctatataaattgagagaaattatccaaaatcacgaggtagtatttatatcctaaaagactgggtataggagatgtccagagatcacgacgaacaagatcaaaagtccgctcaaccttagaaatagaggtagcaaaagagagacacacatggcggcctagctgacacacatgacacatactcccaaaatggtccctgctataagatatctctaaactactatcgaacttggtcatgatgtcagatcgaggttgaccgagacgatgatgtcaagtggtggaggaggtaactttaatttatgatgcattagtgcaattccgtggtcatgaaatgtcagtatgccacactgcagctgacatttcgcattctctgctcgcaggttcgatctgaggagaagctgaacgaggctctgaaggtagccctggagtcatggcgtaagttttagcatattcactctaagatcttgttcggttgtatggggatcggagagaattgaggggattaaatctttttctattcaatattgattaccaagagatttaatcatctctaatctcttttaattcactcctaactgaataatccctaggtctgctcatatgag

SEQ ID NO: 81235 - DNA, 472 bp, Zea Mays
ctatctttcttgagacaaaattatttaaatcttcatgatctgaactttctcttgtcatgcatgtaaagtcatacaactattccttgccacctattatagggtcttgcttacaattccaaaaggaatatcttgtatgttgcagatacgaagaaccatgcgtcgcgataactacctccattgagttcaattggatcattcggtttctattaacttctaaaatgacttagaaatggcttgtgctgttgtccagtttgattcactactcatttaagcaattggtagttatattcaaacttgttttcctcgtcacttgtgccttccacaattttctttatcacttgtgcctcgtcacttgaactaatgacatgaatgaacactatcctacagtaagaataatatttgtgaaatgaacttccaatctttaggacagttccaaattttgcatttggccaattatttaagttagtttgcc

SEQ ID NO: 81236 - DNA, 349 bp, Zea Mays
atttttgattaaatgactaagcactggtgctgaatagaaattgaagataaatgagtgtaaagttgtgctatcagaagccagttggacagttctgaacactagtttcagaaaagtatggccaccagtgacattggccacacttgaggttcaaatttgggttggattcagtaggaattcgactaggcatgatatagcaaaagtgaagatggtttataggtctataactttgatgcggatgggtgatgaggttgtcacatagattttggaaagaatctgccttgattgtgctctgtcaggcactttaaacaggggtccaatggtacagtagcagaaaaatctcaggtaccgt

SEQ ID NO: 81237 - DNA, 623 bp, Zea Mays
gctgtgttctaatgcaagaaggccgagtaatagcttatgcttcaaggcagttgcgctggcatgaagaacattatccaactcatgacgttagttgtggtggttcatgccctaaaaatatggcgtcattatctgctggggaatatctgtaacatttatacagaccacaaaagtttgaagtacactttacccagtcagagcttaatatgagacaaaagagatggcttgagctgatcaaggattatgaattagagattcactatcacccatgcaaagctaatgtagtggcagatgcgttaagtcgtaaggctttctgtcattgccttaccatgaagacttctgacattacgttatgccaagaaatggagaagttgaacctggggatgattcagcatggaacttcgaatcatttgaagcttgagtcagtcatcctgcaaagaataattgatgcacaaagaagtgatgagggaatgaagcacattcatgagaaaatagaagctggaaaaaccaactgcttcagaagagatgatcaaggtgttgtatggtttaacaaccgcatagttgtgcctagaaatgatgagatccgccagcaaattttggatgaagcccatcttagtcgctattct

SEQ ID NO: 81238 - DNA, 626 bp, Zea Mays
gttcaatcttttattgccccgacccccgaaggctgcggacaaggcatcatcttcggccttggaatatgtcccaagcagctcgtcgctggtagcttcaatgcatttcaaccagtcatcgtttggttcatcaaacttctctctgaatctgaaggtatatttcaatcgaactaggccaccttcactggattcagcagtagtctccttcggcatttcccagctatccacaagtggccacaccctataggctatgtgctcttggattatatctcttgtgccaatgagagcacaaacatggctaaaggcattttggcatgctttgacgtcactttcaataaccaccttcgaccttcggtggccgaagcgagaccagatggggcgctagataatttccttaatatcttccctttcaatcagattatttttaacataaaaccattcctccatccaggccccgggccatctttttcggtatgttggcaccgggtagcttgcattagagcgggcaatgaatccgtaataaccgaagttgttgtgatattgttctttgtcggtcgccttcgtctcatacaaaagttcatgcataatgcaaaaacacttcgcactcggttcctgcccttggcttctta

SEQ ID NO: 81239 - DNA, 1034 bp, Zea Mays
ttcctgttcttaaaataagacagtagttcaatggcatggaaggaatttctagacatgggggtcaaattggtctttcccattctcaaccgacagacgattccctcgaaactaacagcgatggcacacaggggattgaaaatctaaactgatggcgtagaagggattgcataattttcgatggcatataggagattgttatagatttgcatggcatacaaggaattttctcataataaatagtgaagtatgtggtgtgaggtgggacaagattaaatttttttctctcacttttttctatgttcgcaagattaggaatggtgagatggaggtactagactatagatagtcaaatggttcatatctaacgggtcgcaccgagaaacgattcatttaattgtgatgtagcctagaccgacatgattcaaaataagtccataccgatccaatccgagaaccgtgctaggctgccttctcggcccacaaatccggcccgaccgagcacaattattttttattttcaaattattaatatgtatttacaatatctatttttgtacaatataatatttattcttcgtatatcacaaacgtaaaataaactatagagcctagcgttgcttcctggccgatgggagggagtcgttgggcgttgtaggatggagacccactaagaaactttcacttaaatatagtaagaatataaggaagcatcatatacaactattcaatatcttatacaatatctaacgaatataacctatacttatgcgtaggtgtaccctagatgatcatagcaaaatccataaggcaatctgcctctcttaatacaaacgcgattgcgttttaccttgtaatattgcatgacaccacaaaacgtcaccagtatgtgttgatgcttccatgtttattcccttgcatttccagcattcagttacatcccaagatctttaccccaagatataggccacatgaggaagcacatgtctcttctacaaacagagaagaaagtaccacacatcgatacccaagaaaac

SEQ ID NO: 81240 - DNA, 654 bp, Zea Mays
ttaatggcactcatgtaccatattgatattatttgttcatgttctatgacgcttctctgtattatgaactattgacgtctttttcttgtaatgcaattcacttgttacttgatcaaattcaattttagtttttatatactcatcaaattcagttttagtttttatatactcatcgaattcagttttagtttttatatactcatcaaattcagttttagtttttatatactcatcaaattcaatttcaatttttatatacacattttgataccttaaatgtcgaagcaaataccatctgtagagaagaagacaaactatttagaaaccagacaaaaggacaagagaaaccaaacaaaaggacaagcatcaactacatatcgactcttggttcaccacttcttcccccctgcttcagtagtatacctaatcttgttcttgctcctgagacatatccatgaagggtaataaccaccagaaacaaagctgtcatggaagtataaaagaaaatttaaacaatgccaagcatgcattaaaaagagaacaacagatgtagacaagttgagatcatgagaaccaacttttctaccagattactagccattacaaactagtggtttagagctgtttcaaaactacaaaaaattgctaggctac

SEQ ID NO: 81241 - DNA, 476 bp, Zea Mays
gttcttcgcaaagagcccgtccctacacgactgtctatatatattatgtcttgactgcatttattatctagaggctcatgattgtatcatgcagtctcttaattgtcttttgtatttggaaaactagtccaagggttcagggttgtacatgtcgggcctgtttggattacatgtgctaaattttagcacatcttgaggagctaaattgctagtggttcataaagtttagcactttgcttttagtacttctgtttggacctccaaatgtgtagctaaaagtgaagtgctaaattaactctagcgccatggatccaaatagatcccaagtgtttacctctagctacacctcaagttctagctccaagctttgatcttagcggtaataaatgctagagatgctgcttcatgttcaaagattatccgtccttacaaatttcccataccacatgtagaatgagaggcaaaagacctttctg

SEQ ID NO: 81242 - DNA, 445 bp, Zea Mays
gttcacaatcatgaagatctgcaagctaaaccctgaattttggacctatttgcaaaaagaccctatttgagtcctaaggctaagtttgattttcagaaaattgactcaatttttggagccttgtaactctcagatgataaagattttgccctaggtcaccacatcaactatgtagatctatcaaagaagaataactttgcttaagagtgtaagcagggttgttatgaagaaattggagaaaaaatgcactcaaagtttgggctgtcaggctgtttgttgtctgaatttcagactaacagtgcaactgcaagaactttgggcacgaattcaggcatgatcgagcaagaatttgcctagggttgctataccaagattatagctggatcctagagctataactttgctaaagagtgtcgatcatgttactacataaaattaagagaaa

SEQ ID NO: 81243 - DNA, 608 bp, Zea Mays
catgtgtccactaagattatagaaattaacagcctggcacatgtttagaaacaataaaatagaagataacattaacagacttatctcactagtaactattgaataaatgtcagtcaaaatcacattaataaactcgagtacttcaggacatcacacaacattaccactgaattcacaagcataattggtgtttatatttcaccatcatggaacaaatgaaatagcacatgtattgtttcctcaatatgttttatgatgcatgtcaccatgcctattatgagcaaaatgagtacaagtgccgaacaataaatgccagacccttatacaatcatatatagttgcaatcaatctgggccacagttactacttaaagctgcatgctcattataatcaggaataacatgtaagcacactcctcaacaaaccatgaagaggtggagccatctacaagcacaattatctccaggtagcaaaaaattatcattaaacaccaaggaggaaactctttttctactacaaagagtgcatatgtacacttcaacctgccaaacaatgtatgtatccaattctatcattctatggattatgaatcgattgtctggtccatc

SEQ ID NO: 81244 - DNA, 441 bp, Zea Mays
tggcaacatctatgattctgacatcaaacccacgtacaaatatagacacggggagatagagacgaaacggggcacttttatttcacttctgcttacccatacagacaaacacgtctatagagaggggggcaattatacatccccatgcgttttgttttttatgattagtgaatcatgtggttcgacagcgactacgtatattaagattcacccacgtcgagataatcactttcatgacaccaatataacttacagagctttcggaaaggcatcaaaacaatggagcatttgccagaaatttcattgcaaaaacgagccactattatttcggtctacaacatagaaaaacatcagcctcttcctaccaaatctaatctatgttcaacatccttgatccatcaaagattaaacaacatcctttttatttgatgtttgttagtg

SEQ ID NO: 81245 - DNA, 506 bp, Zea Mays
tgaattgtctacatcttttcttataagattaatggaatgtcgtctgcctgccttcctgaattctcatcatgctcatctcgtgcgtcacggtcttacatgtggctctgacgcttggttcattggctacgtgtgatggggttaaaaggatgcagtttcgcttccattgcttaaccgtgtgatgcggtcactatcggccggttcagacgcagacgacggccggccggtgcttagaactctacgctccggcgaccccgaagaccagttggcatcgtcgtctcgtctactgggcataaagccatcgctccaccctctcacccctaccacaccaacgcatcacctcgcccataatgtcatgctgcaagtggaagacatctgctcagacgttcaccttacggtatcgtcggtatggttttatactgtcttcaactttttgtcacagttatagtaatcgacaagatatgaaatctttccaatttcaattttttgaattcagaaagcgttggtcg

SEQ ID NO: 81246 - DNA, 461 bp, Zea Mays
agatcttaacatatcctctagtacttggttggtcctctcggcctacccatcagtttgaggatggtaggccgaactaaaattcaactgtgtgtccaagcactcatgcaacttctgccaaaaccaagaagtaaactgtgatccccggtctgacacgatcttcttaggcactccatgtagacaaattatctgagccatatacaactttgctagcttggctcccgtgtaattagttctcacagggatgaagtgagccacttttgttagcctgtccacaatcacacaaatagagtcataccctgcaagagtgcggggtagaccaacaatgaaatccatgccaatttcttcccatttccactcgggtaccttaagcaggtgaagtaatcgagcaggtctctgatgcttggcttttaccctctggcaaacatcacattctgccacatgtgcagcaacatcccttttta

SEQ ID NO: 81247 - DNA, 592 bp, Zea Mays
catgacatatcgagcttaggcctaaacgcgctgactgcctacaggacccacaatacgacacaccacgacgagacctaggctgaggcagccaggggtcaacatggcacagggacgccaatgatggtgccgggactcttcgccgcccacgccacccgccataaatagcacgatcagagacacccagatgaccgaggcgtatacggacaaacgcaaccttaccaaggtagaacgctcaattttaccacggcacagtagctccttctgaaggaagctaccggtagccaacccccaccttggcctataaaaggaggaggtcggccacgaaatgaaaaggaggacactcgacggaagacccacacacactcgatgagaccagaagacccgaaggctagagccaaggcgcgagccgccgcgacgtctaaggcttagcttagaactatagtctcgtagtccttaggtgcacccacacataagagacatgggagatcctccctctctctcgttcgcttgtaacttctactacgagcattgagcaacaaatgcgtcggtagtgcgagccgccaaagtctggatgtagggacattctgtccga

SEQ ID NO: 81248 - DNA, 900 bp, Zea Mays
caaaattgtagctggtatatagagctacaagtttgctacagatgaattagcaagttctcacacgaaaatccgagatctgggcactgcaattctgtctatcaggcgctctaaacaagtttcccatggtacagtagctaaaaaagatcctgggttcagatcccctcgccaccggtgatctcgcgccgtgatcctcgtcgtcgttgcgattcgtgctctgtggggtgcagataactcttaagggtaagaaatatcgcatcgtggatgaactcaggccactgtttcgccccggccgccatgttctcttgactcgcggccgattcagatgactcatcggagttagccgcctatccaccgtgcgccacgtacttgggtgctctaccatgtcgcagtaactggtcttaggtgtattcgttgccgctggtgacctcaccacggtgaaggccaccaatcctttgcaccagtgcacccccttctctccggccgccaccgcgccatctccaattcacgagccaccgcccccggatcatataaattgagtgtgtcgtcgactccgctaggtaattacgcgtgcaacgcactagcacttgcctccaattgtccaccagagccacccaattgccctctttccccaaatcggtctaaacaccgccgcgtgagcacctcgccgtggccagcgtgctacaagtccgatcatgtcctctactctcttatttcagtacccttatgtgcccctgatgcttctcgacccgaccgataagcaagaacccattggatcgccgagaacacttcgtgttatccgttgatcgtgcggtcaccgtgagcagagaagttgggagctcgaaccgtgcaattgatcgaggggaaacgtttgttagatgttgaattaggtatcagccaagt

SEQ ID NO: 81249 - DNA, 816 bp, Zea Mays
gtcaaatacagggaaggtcaggggctactgcacaaatgttcccaagactcagcaaacagaacaatagactgcgggtgggttatttgattttgcagaggctctttagcataaatgccaaggcgatggggtatcgccatatgtgggccgttggatcaaaattcaatggcacagattagatcactctttacccgaactggtaccctatcctggccgtcagatcgccatccaacggtttaggttttatacgggtgagatcgatctgcacgcgcaggatcgggatcggacgaatcatatccactcatacgaaacgatgccccagattctaatctgcgacgtcaatcacgtgatcagtggccccggcgcatcttctccacacgaacctggtacggcagtgccacccagtgactacggtggttcctcaccggagctgcgctatacgaggcaccgggacgctaaactccacaacgatcggtgccatacgaaatggagatggtggcagacatagggaggcaacttacctgaccagaaattcggtgacgagagcaaccatggcgaggagcggacccgcggtgatgcttgcccaccggtgagcaattcaccaggaaggggagccgaaatttcccacgacgactcaccgacatctacggcaccgagacccgcgaacacccatgactgcgtcgagtactccgaatgccggtgaaggtaagggatcttgacggcggcaagcgggcccaccgtggacgaacacccatggcagaaattcctccgcgcgcccatggtccccgcagtcggaagctctgcacatttccacggccc

SEQ ID NO: 81250 - DNA, 1123 bp, Zea Mays
gctatctaaaaatcagctctagtacatccatccaaacaagatggctatcgattgagttgattttttatccaaatcttaactaactgttaagcaaataggcaaccaaccattactaatttaggttgatttctagcccaactagtaactagctatatgtattcagacacgccctaatttcaactaatgttttagctatcatttggctaataacaattactagctattaaaagttctctttcggcaaaacaactaataattagtggatgaatccaaacaaagtctatgttaaagaatattggggacttgaggtgtgtattagatctcttaggccgtctgcaacagtctacctaaaatttatccaaaaacattgttctacactgtagactgtattgttcgcagagtagggtttgaatatatatgtataaggattggtaagctgctagagatagctttataggtccaatggttcaatctgtgtagggtcaaggctatacattcattcacggtccaaatccaattgccctgaataatagttccacaccgagttaaagagacttttgcagatgtttaaagcaaactttgacgacaacatatctagtataaaaaatattagaatgctaacgtgctaacaaaacttgtctattggatctactatccatggcggagtacaagtccaaatacaacgaggcgagtacaatttcactatgtagttctttaaaaaaagtctaagaaagaaggtaaattacactcagtcatagatggtggattagatgaacaatattttacattaagatgttagcactataataatttttagattagataggttgccttctttaattattatcctaaatctgtttgtagtttccatctgttcattgaaaaagtaatggaattatttgacatgcaagaataggcctcttgaggtatcgtactagtttcttcccacattggcttcaatcattgaaaagaccgttgagattaatggcaaaatcccaatgggcaccgactaatttccgcttatattctacgaactcgcgtctattctcctattctctctttactggtaccaaggtgaaaagggtaaatagatgccagccatccttctcaccaggcgtttttt

SEQ ID NO: 81251 - DNA, 434 bp, Zea Mays
gaccgatgaggcgtgtctttgggaagacgagattaggcttttgtttctttggtgaagagcttgaactgctcttgttcgattatagggagcttggtctgctttcgaaaagggagcgccgagacagctgagggataaactcgtgtttcttatatgtgttgtgccgcttgtgggtggttgtgttggttttgcttgctttcttcgcatgttgccgattgacaatatagtacgtgaaatgctgcctacgccccatttagtgaccagcgaagaatgcgaaggtatggttcaggatactgtcttcgcatttttgtgttgctaatccgattgcaccattggcgacttttgctcaaatacaacttgcctttgtgcatttatcatgtccgtccgactttgctccgacaccatttgccttcgcacttttgtcgtgcttatccagc

SEQ ID NO: 81252 - DNA, 541 bp, Zea Mays
aaaaaaacttagatagatgggttttctctgctctctataatctgtctttgctcaaccctcttgtcccttccattctttcatacccatacagatgtcagaccttggaatgtgaactacaagtgaggtcactaagtgcaaagaatacatggtgttagcaactcctccagctaaggatcagatggaacagttcaagaaggcacatgcacagtttctgcaagcaacttctcaagtggtagctagactccaacaagttgatttagcagaatttatagcacatgagcagaccaccgataaccatatgacatcaaccacaacatcaccctcgatagttgacttagaaaagttgttacatgcacaagctctgataatacagaaagcatctcaactcacctcctcataccagcaagtattggcaagtcgaaacgtcactagaaatgaaacaactgatgaacagacacaaaaggatgcacaactaaaccaacagacaagtgaccttggaacatgttgttgttgtgagtactatggaattccttgtcgccag

SEQ ID NO: 81253 - DNA, 582 bp, Zea Mays
ctgccctctcatcctgggacttacagataacagaactggaagaggaggtcattgtcttgtagtctggggttgagtttgccgaccacttcagcttggatgtcttggcatatctagttttcctgaattatgttgggcccttcgaatgcgttggctatggctgcagaagactgatcctactcgcccttggtccgatctccacataaaagttcctggaaaagctagagctttcttcatggaggtggtcattactgaggtgggagatggcacaaatacaaagttttggaaggataagtggttatatggtaagtgaattaaagaccttactccaagttttataatattatacccaagaggattatcaatagcaggacaatttatgaggcaattacagatagaaaatggatctctgatattaaaggtccactgacagtgggagtcttaacagattatcttcagttgtgggatatgacttcagtttggcagctgcagcttgaggttgaggataaacatgttttcagtattgctcctaatggcatctattcagcaaagattgcttacgagggcttctttttggggtatgta

SEQ ID NO: 81254 - DNA, 456 bp, Zea Mays
taatgattttattcaagaaacttgcgtttcataagcattttgcggaaatttcataggtcgttacaactgatatctgacagtaccgaactagtaaattatcattggctagggtggtggcttttggtgccccgtcgggttgctaatcgtcgtctggttagtgaagcttttactcggccgataggggaaatacattgtattaagaaaagcttaatcggagtcttgattgagcccttttgaatatttactcttgttttcaacctctctagctcaatccatctcatgtgcacacgaccattagaattcgaacttagggcttgtccacggtcggcatatttggaggttctctcttcagggcaaatctacgtataaagcgctgctgagaagatttggcagtcttgggcgcccgagaagtgtcggtgttggtcaagcaaaacaaatgttggacgacgaacaatt

SEQ ID NO: 81255 - DNA, 602 bp, Zea Mays
gttgaaagatagaaaaggttgtagataacctggatcatatctgcaaaaacctacaagatactttgattatttttcaacaatacctaaattggcatatttcgatggagggcttggaggggaacaatttcttgacccatcagaagttgctgacatagaagatgattgcactgaagacgatgaggagtgggattctaagagtttgtgggactctattttcctcgagatgaagtatatggagaattgtgaaggcacttccattagtcagcaatgccatgatagggggtggaattttgaagattggtgggatcacactacgtgaggattcatcaatgagttaccatgttagttagcatagtagatgatgatatggctggaaccttttgaatacaaatataacctgcttaggtggttgtaatcctatgatgtgaacttatttggcacaatgtctatgtgttataataactctagcacaatgcactgtaatggagttcccttatgttatttctcccaatccttctggttgtgtgtctctaggatcattcataagttgttattgtgtgcttatatgttgtcaacagccttgcataaatagcaaagagtaa

SEQ ID NO: 81256 - DNA, 573 bp, Zea Mays
gtagagcctctattatcgtggaatatctgtatacaaagaccttcaattaaagtatggaatatttacagatataacactcgagtaaatcttgtacactgtaaccaaccaatcaaatgcaacaagtaaacatagaaagtattctacgataatactacccgctagccaaactgacacaagccttaattatgaaataaccaattagatgactctgtgcttcatagataaggtgtgtgcaaatatgtaaatctcccttactgaaacgagaattccaatccagaacaaagtggcagtgggtatcatgttaagataggagctacaaaccgtctttgagaaagagttttggtttagtctcttgcatcgttttggtctccaagttttgcctccttcacttggagatttgtcctttgatgactggtgttgcagccaggggcggacctatgtgtagcccagtgagggcacaggcccccgctcatttctcggttacaagtaatacagtccagattttcactattaggtcctatgctcggtctaatttaaatgccctcgctctgacattttagtgttggttgttgt

SEQ ID NO: 81257 - DNA, 727 bp, Zea Mays
agtctctccccaccgcgcgctcacatcactcacttccatgtgcaccccggttgtcggattcgtctactccttctgaagtccgaaccagagtatatgcaacaaacctctcatgaagatcctctcgcctacaagcaggtgattattggcgctgaccccggatataagactcagccctgcgcccctggaacccaaaccgtgcgcccttggatagctcgccctagcgcagggagaaagatgaagccgccaccatgggcgcgtgccttcaccgacactcggagtccaaggatcagttgaaaggattcgtttgggagtgttcaaagtgttccgggtgatcaccacacatgggaagtgacgttgcaacaatgaatggctcgtcggacttcgccaaacgtcgagaagccgcaccacaatgggatcagacgtctcagcgccgtaatccatggtaagccttccatcgaaccatttgcccgccctcctctgcgcgtagcacctgttaatctcaaagtagggggcacgagtgtgctaggcgcattcactccggcatgcccatcaccgcgatgtgggcggtgccgccggcatcactgtcgggtggtggaagaagtgtggaagtcatcggatctgaaatggagggataagattagatgagaataacgcttcggccagggaattgtgtgccatccgatctaatcggatgggcaaagtgagatcgggcaccataaaaatatcg

SEQ ID NO: 81258 - DNA, 944 bp, Zea Mays
gtttgggggaatgctcccaaatctgtatgaggtaagtaatactatgtgcgcttcaatgatgattacagtaaattcgcatggatttatcctttggagttcaaatttgaagtttttcataaatttgtcacagtccacacagactcaggagacgaatatcaaaagcttcatagttttatttcagaaattggtatcatccatcatgtttcatgtccatacgctgcatcaataaaataggttagcttaaagaaagcatcaccatatagatgaggttagtctttccctccttgcacaaacctctatgcctttaaattttgggatggtgcttctcttgttgtttacttgaccaatgatacgccatgcaaattcgtcaattatgaaaaaatgttgaaacacttgtttaatcaaacatctaattatgtgtctttatgtgtctttggatgcgattgttggcctaaccttcgcctattcaatactgaaactctagttttggtccgcatattgtgaattcttgggattcaatacttttcataaaggcttcaagtgccttgatcctagttctggattctagatgagtctatctcatgagacgttaccttacataggtttgtttttcgttttgccaaactccatcccacgaccgggtggcgcctccaacaaaaaagctgccttcttccacctcacctagtaaatcctagagtttacatgatcatatgactaattgttcaactaatcccgttgataattttggtgcgagtattgatagttttcaggaagaaataacaacgaaaaatgatagagattttgcagcgctcaatcatttgcaattgcaagatggagcagcgccctccctagggtcgatgtcaccaacatcttcgtaggaaaattctgaataaatccatcgagaacatagtgcaagactatatgaagtcgcatgtacacacgca

SEQ ID NO: 81259 - DNA, 293 bp, Zea Mays
cgattatattatccttcagtggacaagtaattgtaatcttaaagtttaaaggtagtcaagtcctttaacatgaattataaagatgggaccctgtaaaatatccctcattccactcataccactattttgtgtttgggtaattcacttgccaatatttaccatccaatgtttgtgtgcactcgttaaccgcatatgaccacaaatggttagaccagcaaagaagacaacacccagtgtaaatgaaaacagcatcttcaacgacaataaaaaaccaagacctcatcaaaataaac

SEQ ID NO: 81260 - DNA, 434 bp, Zea Mays
ctcaacattatccatcaattacattggcacccattcattcattttgaatttaaatcccattgaactaatgctgctcactgctccccatttattctccaccgaaatcagtccagaatcaaccctctgctccccaccctactctcccgctggaatcactataatcacttcactaaagaatcaatgtgctagggttcgaaaagaaaaaggtattatgcaatactataagaatagccatgattattgctcagaaaataatgatcaaacaatctgtcaatattctagaaagaaaaatcagaattgtcatatgcaatgaattgcgtttcaacatattacttgtacaacaacgaatgcattgaaacaaaattgggtaaggccagccaatacaatcacaccatggtttcatcatacatagttttacaggacaacaaagacat

SEQ ID NO: 81261 - DNA, 344 bp, Zea Mays
aaccagaaaggaaggccattagcccaacaccacaggaagaggagctggatcaagagatcagaaatctagaggctatccaccaacaagtggagagaagggagaaaatgcttcggctgtcggaacttcagaagaagattgatgaagctgtcgaagagatgcatcatatcacacaagacaacgagcaaggacgaaggccacaacagagagagcttcgtcaggaaaccccaagttatgatgatgtatggtacgacaatttcaatcttgataactttgctttttatgatgcttccccctagcagcagagttgcaggctaccccatggccaccttcgtacaagctgccat

SEQ ID NO: 81262 - DNA, 886 bp, Zea Mays
tagagaaattgtgtgccataagtgccatggccgtgggcacattgctgctcaatgtctaagtagaagaacaatgttgttgaatgaaaaaggtgaatgggaatcagacagggatccagaagatgatggaccaaagtttgatgaagaaattcaacaggaggagaatgagatccagctagaagaaggagatcatagttgttttatttctctttgagtgctaagtgtgactgctgaaagggaagaaaatggacaacgccacaatcttttccatacccgaggtatgatcaaagataagatatgccacatcattgttgataatggtagctgcaacaacattgctagtcaagagttggtggacatattagaattaaaatcaaggcgtcatcctactccatataagatgcagtggcttaatgattgtggagcattgtgtgttagccgtgtggtgaatgttcctttttctattgggaagtacaatggtcatgtggatcgtgatgtccagatttcggaggaaccaacaagttgtctttcttgtacaaaggagagtgaatctctttgcttcctttgacaccagaggaattgatgaaggatgatctaaagaagaaacaacgagagagcgagaaccacttgagagtgatccacaaaaataataaggaagagtttctgaagccaaataaaactccacagcctcaagacaccaggaaaagtgggattagtcatgatgactagaaagggggatctaaaagatttaagtgaacctaatgccatgttctttgtgctcttgtgcaaagatacacttctttctactaacaacttaccctctactttgccaagtattgtctttgatgcattataggatatgaggatgtgtttcctaatgaagtacaac

SEQ ID NO: 81263 - DNA, 553 bp, Zea Mays
gaagtggaggtggatgacttagaggagcttatgtccttggtgatgttaggactactcctgcactgctgcatatcttgaggtaagacccatcaaagtacatggtccattactcttggtccacaacgaggggtggtgcctgagcctccgtccactctacgataaagtcggtcaaggcgtgagacttgatcgtagttctagggacgtagcttatgtcaaacccattcaacttgaggggccactttgtgatacatctggacgcattgtgattgcagacaatttcgccgagcggagccgaagataccactgatatggggtgctgatcgaagtagtgtaccatcttcctcttggcgataagggctacatagagcaacttctaaagttgagggtaccgaaccttggtattgatcactagttcgctaacgaagtagacgagcctttgtacttcgagcgagtaaccttcgtctgctcgttccacgacaagcattgcgctaaccacctgggtggtagtggcaatgtagaggaggagagtctcatccaagttgtgtgcgactag

SEQ ID NO: 81264 - DNA, 1098 bp, Zea Mays
taaagatctcacgaagctatgaaatgatgaagtgatgcaacaatgtgcccaggtgcgcgaagaagagaatgagaagttcatgtcacaccacatggtggatcgacaccagaagattttcaagcctttcggtcgatgagcagtagtggtttgaagatctcacgaagcagtgggatgatgaggcactgcgagaacgtgcccgggtgcgctaagaagcgaatgagaagttcctgtcacacttccgacaccagaagattatcaagcaaggggagatcaagctagactctctcgtgcctttgctccaaaatagcaatgtaagtaattctaataataatcaatctacttagaacaacgtatgggagtggtggaaaaattactcaacaaacccacatgtacatttgaaaaatctattgttcctagttttccatcgcatgaggttacaatagaggcaacctcaccaaacgcatcagcgacaaatggacctctacagtcccagccattatatgataagccaatgaactcatactcagggtagccactgctcccacaacccctgtgcgatatgacaatgcccctgaccacagctgtactatccaagtataatctcggaccatctggcccagaccggactgttcagtaatccactgtggaccgttcgatgtcgcgctggatcgtccgatgacgtaccacagatcgtctgatgtacaacactcaaattggtacaatatacacacaacacgcgcgacactctataccacaacagcactatcctcctccatctttggcccaccaaagccaaagcatacccacacctagggctgaatactactcaacacatagggagttagaggggtttgcatcaccacacacattagattgttctcatatagacagacgacataacaatgctcgatcatatgagcctcactctcgagattcggtcatatgctaccagctaccatggataagatttgggaggaaatgaccgaattattctacgacaggttggggatcgatatgtccggctcagagtcgtcataacagaaaccatatgattaccgatttgacaccatcccatacccacaaggggctagattattg

SEQ ID NO: 81265 - DNA, 497 bp, Zea Mays
gaaaagtggaggtctctttagcaaaaaaaaaaacatggccgaagggatatgctttgctctggactgtttgatctaaaaccggacactatggttagatctaacttaaagtgaatcgttacgcatttgtggctctcggatcgtcgaccgacgggtacgatttaaaatacttgagattgaatactagacgcaggatcggacgaaccgaccagattaatccggccgaaacattacacgcgttctaatatcagtctatcatccgccgatcaacggccacatgtgcacctcccacactcagaccgggaggcccccgctcctacgctaaacatagaaataattaaaaaatatgtacgtctaaacagggtacaagaaaggtctaagaaaatcgtggcgaataagtaatccaatcaaatcatttatggtgtgtgtctacgaccgatttcgccagctcaactctcccttctcaatggagtttctggaccattaactttggactttgg

SEQ ID NO: 81266 - DNA, 597 bp, Zea Mays
gaggcaaatccttggttttgtcgtgtctaaggcctgaatcccaatgtcatctttatatatatgctagaggggttagtttagcatatatttgtcaatgggagctcacggttttgaattagggatcatggtgaacgcgctcgagtttgggtgaggggctgaattttagaaatctgaaattctgatttctatagaaggcctccacttgaatggcttgtttggggattttgaaaaattcttttgggcactctcttactattttttgtagcttatttagtgtattacaaattttataattggcccatgtcttgacaatgtgattttcttggtcttttactgagtttcttttcagtgctccattgctctaaagaaagggttgttagggttttggtatttcctttcttccttaagcttcatatggtcagggtatggttcttagggtgaaaagacttgattaagttttagctcctcaagattggtgccttctgctccaactaaaacacatgtgataatgggtcacaatgttggtactgaggagaaaccctaagtaacacatggggtgttacagcaccccccttaaaagaatctcaccccgagatt

SEQ ID NO: 81267 - DNA, 470 bp, Zea Mays
ctcggtggcttaggcgccttaccacctcgactgtgccatgccctggtagtaatcgctgccctcgtgtcccacggccacctccccacgatggacgacctagagtttgtggagatggccggtggagatggggacctcatctacgacacgctctgcacggactccgactcagatttaggtccctctgggagcgatgatgagtagcgcccccggtgacaaggggaacgaggaccatccggacaccatagcttcatcgacagtcctagcaggacaggatgccacgcatggtaggaccggaggaaacaccggatgtaatgattatggcaaaagagctcgtagtagatgaccggtcggagagcttccgcaccttctttgtaaaaccaccgaacggttataaataaagtgtgttgtcaagaatgctcttagccacaaacatggtaagtgggggagagagcctcagtcgcaccttggtc

SEQ ID NO: 81268 - DNA, 354 bp, Zea Mays
gagaaaatcaagctcaaaaacggtctgtcaggctaactgaactccattcgccatggtacagtaagccccaaactgaagaagatcacgattcacccccctgctcgtcgccggtgacttttcgccgggattgttgacggatcgccacgattcgtgcaccgtgggcagcagataagctcgggtaggtaaatatctggcgcccggattgagttgagcctcgtggcggctaagcccgccgtccttcctccccagctcatcggtcgaacggataacctcgctgccgtcgagctgttgccgttgcgcgccacgtgcttaagcactagtcctcatcgtggtgactcacggggtgcatgtcca

SEQ ID NO: 81269 - DNA, 873 bp, Zea Mays
ggtcgagcgcaacaaaacccgatccgaccctgtgatgaccataaaaaagggcaccgagtccttgcctcctttcctctctcgtcgtatactagtcactgccgccgaagccacagaaagagagactgctcgcgccgccgcagctaatactcacggttgacgccatctaaccgtcgacgcgaggactgcgaagatcacataggcatgccgtttgggataggagccatccgagaccaaatcgtgggctgttcgttgtcgaattcctcaccggagatcaaaacaggggcggaactacccccttcccatgggcagtgcacgtcgcgccaccgtcgccggtaagaacccccttgacgaattcgcattacccttctcttcaatcccatgttgctagaggaatccgggagggtctgggtgccaattcgccttgtcgtcggtgaggcgccgccactactaggatgcgcggctacgctctgccatcagagggagaagatgacccctcgaccgtccattcaagattggacggtagagattagagcatgggtaacgtttgggttgaattgatcagtggtcgtctgttctgcgatcgacgaccccgattagatcgcgagcgcattaaatcctgaccttggatcgctgatccaacggtttatccagcataccggttcgggatggggattgatctaatctaggccgcgcgtttccgatccaacgactcgtgtgccacgataccccttcgccaggcccgttttacacataagtcctcggattttgccagaatcaacccgcactcgtaggcagtgatatgatcctcacaaacaggtcccaaaaattatacttctaaccccgaacatcctggaattttcacctgtagtccag

SEQ ID NO: 81270 - DNA, 552 bp, Zea Mays
cggtccaaatgacacctctggccagggaattattgggagacgatgtcggcttccgtgggggcagccgggtggacgcagcgacgtttgatttgttggtgactgtcgtttacgccggcttccagtggagtgcacagtggcagcacaggaagccaacagccaacacgcagtggggtgttctgatctgatccacatgcgctcatgcatgtgacaaacacataagctcagttcgtaaggcccaggaacagtacacgtctaccaggcaataggcatagcaccagccaccagctgcaggatctgtcgcccactcttctcaaacgattccgcttccacacgttattggcgatcggtagcagcagcatcactgtcatcttatctacagccggatacctgaagctgtgaagcccatcgctgcaaaactatcgcttcagtcgggctaccggagtaaacggccggcctttcccgtatagcttacgtgggctgcttcttatctacagactgggcctccattctatacacctcacgtttatgatgccaaacgctaccaaggctttc

SEQ ID NO: 81271 - DNA, 1394 bp, Zea Mays
aaataactctgagtgccctcaaccaccacaccagcagttcagcattccccatttgcattgctaggggagagacaatagagagccaaagaggggagaaaagacactatgccgattggagaggttgtgctatctgccttcacgcaggcactctttgagaaagtgcttgctgctactatcggagagctgaaactccctccagatgtcactgaagaactgcaaagcttatcgagcatcctgtcaacaattcaatttcatgtcgaagatgccgaggagcggcaattgaaggataaggctgcacgcagctggcttgccaagctcaaggatgtcgcggatgagatggatgacttgcttgatgagtatgcagccgagactctgcgatccaaactagaaggtccatccaaccatgaccatctgaagaaggttaggagctgtttctgctgtttttggttgaacaagtgtttctttaatcataagatagcgcagcacataaggaagattgaggggaaactcgataggcttatcaaggaaagacaaattattggtcccaacatgaacagtgggaccgacaggcaggagataaaggagaggcccaaaacaagttcgctgatcgatgactcaagtgtgtttggaagagaaaaagataaggaaaccattgtaaagatgttgctggcccctaataataactcaggccatgccaacctttctattattcccatagtgggcatggggggactaggaaagacgactctaacacagctcatctacaatgatgaaagagtaaaggagcatttccagttaagggtgtggttgtgtgtttctgaaaattttgacgagatgaagcttaccaaggaaacaattgaatcagttgctagtggattctcatcagccacaacaaacatgaacctgctccaagaagacctctcaaaaaagctgcaaggtaaaagatttcttctagtccttgatgatgtatggaatgaggatcctgaaaaatgggacagatatcgttgtgctctacttagcgggggaaagggaagcaggattataattaccacgcgaaacaaaaatgtggggatactaatgggtgggatgactccttaccatctaaagcagctatcaaacgatgattgctggcagttgttcaaaaaacatgcatttgtagatggtgactccagttcacacccagaattagaaataataggcaaggacatcgtgaagaagttgaaaggcctgccactagctgcaaaagcagtcagcagtttactatgtaccagggatgcagaggaagattggaagaacatactaaagagtgaaatatgggaattgccatcagacaagaacaacatattgccagctctgagattgagttacagccatttgccagccacactgaagcg

SEQ ID NO: 81272 - DNA, 710 bp, Zea Mays
gttctgcacttcttcaggacatccgctttcagaatcctgcattgcgcattcgtgatgccaggattgatgggaaccgtttctggactctccagcatgtgaatttttacaactcagtaattcttcccaagaaatatcagcccatactacatcaacggtacatcaactgggaaggatgtgaggctattggagacccagagatgacataggcattgagggcctgtgaaagaaagaagatgaagaatataatgacattctaatatgattggaatgatgaggccattgctcagttttattcaactctttggatcaagctggccgatgaggaaagtccctacaactttcctatcttaatttctacatcgaaggcagctggtacaaggtgagctaccgtcggttcgctcacattcttggattcactgacaatgacatttctggtgataagatcaaaatccatgatttccgccaacccaccaaagatgaagccagagatcttcatctctctgagtctggaaaatattgggagtccaccaacatgcacaaatattacagatatatcaactccctcagcagaatgaccctcattcctaaaggggtaaccagatgaatattcttggagagagcaaggtcttgctctcattcatgaagcccaacagctcagagagcatcaacatctttgatatgatctggcagaagattatccatgcttcctg

SEQ ID NO: 81273 - DNA, 557 bp, Zea Mays
gaaaattcctaagactctgcgaacagtcccagtggactgcgggttgaatcccttaaagtacgagggctctttagcaaattgtttcaggcgaaggggtatcatcgcacgggaaccacacgattcgcaacccacggatcagattacatctacctctaaccgaaccggtactaaactaaggccgccagatctccatccaacggtcacagtttaatgaattctagatcgaatctccaccaccggataccgcatcaacggtcaccgattgcttcgactgaatcgatacctagctttaatcctagccgtccacggcccgatgaacagacaacagccactagtatgcaccttcacggacaacggcggcgagtcgccggagcgccacccagtttgtcgcctcgaggtgcgcccagctcaaattcagtggaaaagaaagcgcgaggtgaagcgaaactgtccagaggcttacggggaatggattttgtctggagaacaaggctcgcggtgtggcgcggccctgcggtgaaagctggacgccgtcgagcaattggcgggttcccggc

SEQ ID NO: 81274 - DNA, 937 bp, Zea Mays
gccgagtgttctccccacgcctggcgctaagtcactgacgcatgggccgactctatcagctcctcccctcaacagaaccgaccgcacccaccgccgcggtttgcgccggcaatcctgcactggtcgtttccctcgcgactagataatggggggggagaaagattcctgggccacgctcgccacaccatcccgcactacctttttacaccgagaccagaacatcaccaataactccgccgcgacgaaccaagtgtagccggagagagagagcgccgccatccacatctgccgctggtccgaccttgggtagcaggtcgggaaggagcgcgaacccgggaattactgattcatcgattgcgtaggctctggggtgagcaggttctcggcaattgctcaccggaacaacgctcggccgcaagatccgccatccaccactgtcgttgccgtgtcattgccgctggtatgggcctctctgcatttataccatcgcctcgtaaacgtttagcactccgactgaagcgtaagacgtctggagtgctggtgggcttagctccgatggcgctctgtcgtggggatcctagtgccgccatctgtgcggtctggaggtgggggacaacatggctaccgtcactcggttgatgaacgactgtgattagaacatgaagataccccttcgctagacagatctggtccattggatcttaatcggatgacttagattagatcgggatgtaagcgcccttcatccgttgatcaccgatctaacgttcctgggcgctcgctgagtcacttaaatccaaatctattgtgatgcgtccgttttggatcggacggctcacgagagccgataccgcttcgttggctgagttgcaaaagagcccttcggctatttgataactaacccgccatccagagagtactattcactgagtctagg

SEQ ID NO: 81275 - DNA, 361 bp, Zea Mays
tgaggtcccaccgtcccagtcctctggacgtcgggagcggtgaggatccaacttgtcggggcacaaccacggtggcggaggcggtgctttggtcatccagcggagggtgcggtcccctggtcgtcgggaccttcatcatcaccatcatactcgatgctcacccgcaccaactatgacaactgggtggtgatgatgaaggtcatgatggaggcatgtgggctgtgggaggcagtcgacaccagcaacgtcgagcgcagcgaggatcggtgggtgatggaggcgagcctacgagtggttcctccggagatgcaccagtccttgggggtgaaggtgacgacaaaggaggcctaggacaacctga

SEQ ID NO: 81276 - DNA, 696 bp, Zea Mays
gcgaggtgcgaaactagtgatgtgccaaaatcccgggcgtgactgcggaacagagcccacgacggctaggaagcaagcactagagaagggtagcggccatgggatgagcaagtgggagcaggagctgggctgtgcgcacgacggtgatgagggagacgaggtgagcgcgctgcgtggtctggagcgacgtcgaccgcagatggagtccgagtagtgctccaagcacagtgaagaggacgttgaacggaagagagtagagaggcatatgtgcgtgcagtaggaccatagaagataaggacttgctcccaggttgagcggcaagagaaaaaggataagaaaggagacgtggatagataaaaacaccggggcagttagaagcgtggagaatctagaagaagaacgacgtgtgatgagagaggtctctaaaaaatcatacacctcaggataagaagaaaggaggagcactttagggatgagggtagagagatattttcttctacgaagaataaacaatccaaatttagaattagagtttaattgggatacgaaatgagggtctaaaagatatataaaagggtcgaagaaaataagatcgacaataatatttggaccagatttaatttaatgaaggttccaagaatcagataaatttatatcagttatttatatttgaagatttatatcgaggcaaggaac

SEQ ID NO: 81277 - DNA, 338 bp, Zea Mays
gcgatggtgaagtgtccggtgaagaataaccgacacacgattggctcctagagtctggcggcctcacgaaagcgtccactagtcgtggcgaagttccggccgaagctccgagggtggttcgctaatttggacggagatcaccagtggcggcacagcggtattcccccgccgttgtttttagtactttcggcttggcgtcaacgatgagggtgactcccaaatcacgcgcatgagcggtcgagggaaagagcacacccaggcccagcatttattccacacaagcaccacaccaatgcccgtcgccgatttcctcgcgacgtgcatgacatacccgggcg

SEQ ID NO: 81278 - DNA, 896 bp, Zea Mays
tggttacctgcgaaaggcaactggctgttgggatcgatggggggaatgacagcaacggatgaacttgatgctttccggttgggcgccatctcaatcttgctggcaagcggagcggaagcagtatcgcacaggcgcaaagaaggcttggatgcagaaaagcaagaactagggcacggaaagtagaggcgcgcaacaatgcaatacatatggggttttcctgggccagataccgtttccagaaagcgcccagtcatcacccgacagttatctttaaaatgctggcgtgccatgtcatcactcgaccgttatttccaaaacggccgacgcggcctgttctaactcggttgttacctctaaaacgctaacgtcacgatcagccattcgaccgttacctctaaaacgccgacgttgccgtcaatcactcggcggttacctctaaaacgccgacattgcattaagtcactcggctgattacctctaaaacaccgatgtcacatccatcactcggtcgctatcactaaatcggtaaggtagctccaaaggattcgaccgttacttctaaaacgccggtatcatcagcaaccgttcggtcgttatctctaaaacaccgacacggcccaccataactcggccatcattcttaaagcaacgacgggatttcggatgactcggccgcaaccaccaaagccctatcattacaaataaggcaatcagaaatgtgattcgatgatcacaaatactcctcgcgcattgataagattggcgaacaacgagaaagcaacataacacacacagaagtggagcgaaatcacttttcattataaagggaagctacagaacttacaaatcaactcgttatgagttgatgacctccctactactacattacacttcac

SEQ ID NO: 81279 - DNA, 779 bp, Zea Mays
tcggtcataactctgctttgaagaccaaactcattgctgcttccacactagtgctcttggggtcactctagtattgatgctacttaccaccgaatcaaacatatgtttgtttggaaagggctcaaacaagatgttgattcttttgttaagcagtgtcctacttgtcaacatgtcaaacatgagaagtctcatccaactaggttattgcagcctcttcctattcttcaaggtgtgtggcaagacatctctctcgattttattgtaggcctccctcgctcagatggcttcaattgtattttggtggtggtggattgtctgactaagtacacccattttattcctttacgtcaaccctttcactgctaatcaagttgctttagcagtgctaactcatgtggttaaactccatggtgtgcctacttctattgtctccgatcgtgaccagattttcactagtggtttttggaaagggttgctcaaactgttggatacaaagctgctagtcagtacagcataccacccatagactgatggccagaccgagcgtgttaatcaatgtctcgagatgtatttgcgttgtactatccacaactctctagccaagtggaaggcatggctgcctctggccgagctgtggtacaactcttcgtatcactcatccttgcaatgctccccgttcaaggtgttatatggatatgaaccgaaactgccttctttccctgttttggctgatgtttccactacagatcttccctcattgatcaaggaaagggatcttc

SEQ ID NO: 81280 - DNA, 864 bp, Zea Mays
gataaattaacaactttatttaacaagagtggtggtaatatagaggatttcaatctaccacaacgatttagtggagcacagacttggacaccaaatcgtctaattgaagaagaaatgccaaataatattgataaccttttggatgaatctgaattcctcatttcccagctcaatattcagcaaaggaatgtttttgatacaattgttcagactatcttttccaacaaatctggtttctactttgtttctggatacggaagcacaggaaaaacctttctatggaatgctatagttagtcatctaagagcaagagagaaaattgttttaacagtggcttcatctggggttgcctcgcttttgcttccaggaggatgcactgcacattcacgttttaaaattccatgtgaactacacgaaaccatcacctgcaacattaaacgaggaacaatgctagccgagttaatcaaatcaacttcattgattatttgggatgaagctttaatgactcatagatttgcttttgaggctttggacaaaactttccgtgaccttctagctccacattttgaacaagctaaaaaaacaccttttggtggaaaggtagtagttcttggaggtgatgcacgacaaatattgcctgttatagaaggtggcacacgctcccaaattattgatgcaactgtctctaactcttatttatggggttctgttactgttataagtctgactcaaaacatgaggctcctctcaagtagcacatctattgaaacaaaaaaggaaattgctgaattcagtaaatggttgcttgatattggtgaaggaaatgtaccagcaacaaaaagaaatgctgaaactgaaagttcc

SEQ ID NO: 81281 - DNA, 348 bp, Zea Mays
gggcacccaagatgaccaggacaattttctagtttggtcttccaccattcactaatctcttggctagcctttacgaccgcacaattttcattgccttcaacaagttttttccgaaggtcctcaacctcggctttatgagcttcggcctgagcattgtattacgcctcatcttccttcactttattcaccaatgatattagaattttgtccttctccagggctttgtttctcagctgaattacctctgatcgaaggttgccaagaactattgtgcagctttcatcctcaaaattcttttgagccctcagggcgttgctcagaattaatccctgtgaaaaagaaggatta

SEQ ID NO: 81282 - DNA, 782 bp, Zea Mays
tcaattctcagagaattccaaataagtagtatcacgtggtccttgaggaggacctcttcctccatgtggttggaactgattgcccgccatttcacgcaagaagcgcgtattatcagtggtggcattgactagggcagcgatagcctcagccaaagttggtggtactggtggtgggttaggagtatcctccctaccgcgggaagtccccgcaccatcatgtgcgtgagtccgtgatggcatctgaggcaaagaaacatttggaaaaatataacatgccaacatacaccatcatattacattgccaaaatgtaataattatacagactccaatgtacaactcgactttattacttattttacataagtataacacttagactatactattctagtcttcttcatcctttattcgattatgacataaaatattattgattttacttcattatttccctaggaaagattatatggcaagttaactgtggaaatgagtactatataaattcataatatagatgtagcgttgaatcaacctctatggaattggattaatttatttctactagaaggcacaagtcacattttagttttattctttctttctaaaaagaaactatattagacactacaaagttattctagaagacaaataatctatggttcactaaaagaattatattaaactaccatttggactatagtaaacatgatcatggctatatcatttcaacattaatagaggttctactattttttagtgaacaggcaatatgcatataaac

SEQ ID NO: 81283 - DNA, 979 bp, Zea Mays
ggagttcgtcgacatcagtggcgaggaagtcgagggagccgaacatggcataacttccaagagcgaaagtgttgtcgtcgatgagtgttgatgagtgggccatcggagtgatggaagtcttttggcacgctaacggtcccctacttggcgcaccaactttcgtggtttcagaaaccaggggacaatagaatttgtgttcgatggaggagctagcgtggacccactccaaatggtgaattgtggggattctaagagaatggggtgtgagacggtgaattatacttgttcaggctcgtgccctagtcccatgtagtgctaatcgtagtattgcctgaatagtgttgcagcgtgtgcgcgtgtttgagaaggaggagggtctgcccttttattgttcaagggtagatcttacaatagggacttgtttgctattcgtaagggggcactctgccaccccaggttgaggtagaattcccaatgtcgtccgtagggccgtgcgtagccgtactcccggtatggtgtattgtcatgtgtgcctgccatacgggtccctgtagggagtccttcactgatgtattcgtagaagtgtgcggtgggtcctatgggttagcctcatgacttggtcgtgcgcgatgtagctctgcttgtcgtcacgagccctgcatcactagtacgtatacgttagcatacgcttggcatggcgcattgttctttcttccctaatatgcgagccactgctcagactctagggctaaggtccccttgtaactgaggttgattgaccccacatggcagtgggggcacatctaaggctgtacgtggaggcatccgagcgtgtttgatagcgacctcccggtgctactttggtatgctgcacatatgtccagacgtgggttggtgacgacatgtcttgtcatagctgtcgcaggtcaacagtgtcgggcgggtcctccaccttgcagcattggctgattcggagttg

SEQ ID NO: 81284 - DNA, 611 bp, Zea Mays
cttcgattctagtacaatactattgactgttctagcctcagattgttcccttgcatctcgttgtggtgtgttttgcatagaaaactgctattggatctaaagtggtcctagatgttgttgctcatatgatgaaggtgctggtgtaaatggctaaggcaaaatccaacgagccaaagagtgacttgctgaagcatgagcccgagggttatggacttggctgttggttacagacatattctagaatgtatggggaataatacgaagcagtctgaaagacttgatttggttgattctgtcgtgcttcagctttggtgatttctttctgcttctagattatgacttgacaggttcttgttttatgccccttgtcctctccataaaaaaggcagaacatttttcttggttaaaagttgaatcttcctccaaaactccttcctcctcttccacctcttggggccggtggtctgaaggtattttgtgattgttgttgttgttgggttcctgtaggttgaggttgactttgttgtcctcgagtgtgattattttttttgtcttcgttctaatttggattatgtatggttttgatatgtcttgggttgaaccgtccgccg

SEQ ID NO: 81285 - DNA, 1006 bp, Zea Mays
ctacttccacggcatgaggacactgcacgaggaatgggtctagatggcgtccctgcacctcgacagagttgccgctgaatggtactacaccatcgagcgcgactacggcgacattacctggggtcgtttctccgaattgatcaatcttaggttcggccccccactgcgcatgaatggcctcgctgacctcaaggatctctatcgcactagaacagtggatgattattcacgtcaaatttccttgctgctttgccgttgtgacaatctttcgcagcgtcaacagaccaacctcttcaccgctggcttgggtgagccattgaggaccgatgtcgaactccaagggccaactaatttgcagtcagcaatcaaccttgctcgagcatatgagtgtcgcatggtgctggctgtaagcacacactccacggtgcgccctgcagcccgtggcgtgagtacgcctattaaatcagttgttggaaaccaacgccctcggttcaagcgtctttccagtgaagaattagcagcaaagcgggctagtggtgagtgctaccattgtactgaaaagtatactgccgatcacatatgtgcaaacaaaggggttttcttgctggaattaacagaagataatgagggtggtgaaacattggatgatgttggcatctctctccatgctctcaccggtattgatattggcactaccatgaaactttctgtttgtttgtatggccgtcagttagtggccctcgtggacactggttcgacacattccttcatcaatgattctgtggtcagccagctgcagcttcaagttgaacctcgtccaggtctgacggtgaaggtggccaacggagattgggtaactactgcgggtgtgtgcactcaactgcctctggttattggagaagctgatttctcgatatccttctataccctaccactggatggatttgacattgtattaggtgtccattggcttcgcactctcggaccaattttgtggaattttgag

SEQ ID NO: 81286 - DNA, 657 bp, Zea Mays
tctattgatattgctagtacattttttgttgagcaaatgttggagccaaaggctgttccaggcatgccaaatattgtgagctttaagatacaaattcaacctgattagccctggtcctgctgatagttagctagggtaagtgcgatacagtggtagggagacaggtagcttattttcaagacagttgattttatctccaaattagtatcattaattgtctgtctggtgtttatttaaaagttagtattgattaaatactggatctatggctgcaagtcttgcggaaagttatacatttgaaagtgatgtattgtagcattttatcatttgttatgatgtcagaaagtgaactacatcagctttattcaaaaagaaattgttaaccttgaaagctaaattgtaatatgggacgggagaaaagaccaaatctgagctctataatccttgcttcatggtggtggattgttttggcaagatttccggagtcgatcttgtttaagttttcccccttctgggcttaagtcaggaggttatctgacatccgccaaatgtttttacatgttttattagttcatggtctgccttgataaagatcctcaagatcctcgtagttgcgcttaggctgttcacaatagactgtgtaaaataggggattaa

SEQ ID NO: 81287 - DNA, 339 bp, Zea Mays
ccacatctcctccctctaggcgaggtccttctcctgtcggatgagatccgtcgcccgctcctctagggaggcatccttcgccttaaggttttcctcggcaagagagattttgccagccttgtcatcaagctcctgctacagcttctgcagtgtcgcctcggttgcggtctgcttatcccgctgcttctccagcattgcattgtaggctttcaacttctcatgaaactctgtgatgaccacctcccgttggtccaagcgctctttcttcttgaccagcttcccctcctctcgagtcgctttctgttcccacttgatcacctcctctaggtcctccttgag

SEQ ID NO: 81288 - DNA, 417 bp, Zea Mays
ggagattttggaccgtggatctgagatccaagggccaagataggaaactggttcacttaaaaagttggtctaatctgcaccattggatggtgatcaaacggttgacatatgtgcgtacctcttcaccgtaggaatcttgcaaaagaaacccctaagttcttattaggataaaagaaataaaaatcaatcaggtaatttgcagtttagcccatggaaactattttgagcataaaatatctactacttattaaggcagcaaagggtagcctgcctctcctgttctgccacccccgttctgcccatctcgagccgacaggtgggcctcctgtgtcagcgtgcgtctcttctatgtcccattcacgcgacgcgggcacgcaacaactgctccctctccggtctccgcaccctccatccatt

SEQ ID NO: 81289 - DNA, 371 bp, Zea Mays
cttaagttgtagcttcgtcaccatcatcatcaacctgcgagcaaccacaaaaagaacatagaataatgtaatatctaatagagaacagaaagaataggagtacaagccgacaagatagaattgaatatacttcatctagcaacagccttgattggtcacccgcaatctctcttgcacctttagcctagatttgagtgacaaatccattccctatgctaactgcttcggtggacatcccagttaagtcgcctggagaaatatcgaagttgggtttattcacagaattcaggtgaatgtactagccttcttgaagatagtagtggtccctcacgatgcaacaagagcacaaaagtcacattgcccctccatca

SEQ ID NO: 81290 - DNA, 517 bp, Zea Mays
gcgggttggcgctgccaatttcgccgttcttcctgctgctgctggaggagttcgaacttcaactccagcacctcacaccccactccatcctccaggtggccatctttgtccatttctgtgagatgttcgtgggagtggcggcttgcacttcccttttccgccagttttttgtgctggtgaggtctgggaagggcaaagatcacctcggggcctactacttccagtcaaggacagatccgacggtgacctacatcacttcccttggcggtgcgaggtgggagaactggcgaaatgactgggtgatcgccagtgctgaggtcagcgaccgccttgccctcctgagtgacgggcccagactcgagcggaagcaatggagggtaaaaccatgcctcgtgccagagttcgagcccgtcctggacaggattagggaactggcagttggtggcctgacctcgttgcacatactcggggatttcttgaagcgccgagtcatgccgctgcaggggaggccgcgcct

SEQ ID NO: 81291 - DNA, 982 bp, Zea Mays
ctctaaccaaacaatagttttgaagaaataagtagaaaaatcattcttgatgatgataaaaagaaaaggtcagcaaatagtcttcatctccaataaaaccataccagcagcaagttcaggggagcaaaattcccaaccatcccgaatgcaaatagctgtatgagcaggatattgcttagctacctcagcctcgttggggttcagatctgcattggatacaaagttcagaaatatgaaaggtatcaaagtgatcaaaacataatgtaccagtcgcaccaaacaatttataatgtatttggtttcgtgcttcgcctcatgcagcatggcctggttccgtggcgagacggataggttcgtccggcgttttcttgcagaatgagttggctcgtatattggcttataggttcgtccggcgttttcttgcagaatgagttggctcgtatattggcttgcgactgttactgtgcgggatgagtcaatgtggcataatctcattaggtgactcaaaccaaacagctctataggttctcggacataggttcggatgactccagtgcccacccatgccgcaaaccaaacaggctggtagtgtatcagaacatgtagtataatagaaactttgcagatatttggagctttaagggtagacattaggacattactgatgttcatgctcaaatatgtggtatcacagcaattttccagatagttagagctttggagtagacatcactgatgctcgtaatcatgtatatatattgcagataaccattaaaattgagctccctaatttcacagtttttttaaacagaaatcatgataatgatgtgtgacctttcttatgcaaacattaaggtgtatttaaaatacataaaaggtataatatctggaaaatataaaataatgaaatatctcaatgaacatcctgttatccccattagcactaatctgactaggttatatgccaattgaggccctgttt

SEQ ID NO: 81292 - DNA, 625 bp, Zea Mays
tacctttccccagtagtgaggtaagaggtttcactaacatggaaaaaccttcaataaatcttctgtagtatcctgccaattcaataaaacttctgatcttagacgcatccttcggttgcttccaatttagtatttcacttatctttcctggatctactttaattccaccatcagtaacaatatgtcctaggaaagcaacttccttcagccaaaaatcacacttcgagaactttgcatacaattggttgtcatgaagcttctgtaggactagtcttagatgatcttcatgtgtttcttcattcggagagtatacaactatgtcgttaatgaatacgaccacaaactgatccagatattccatgaatactttattcatcaagttcataaagtatgcgggtgcattagtcagtccaaatgacatgaccaaaaactcatataatccatatctcatggtgaaggttgtcttgggtacatcttccgctcgaatctttagctgatgatatcctgatcttagatctatttttgagaatttcttagctcctttcatctgatcaaataaatcttcaatccgaggtaaagggtatttattcttaattgtcacttcattcaaacttctataatgaac

SEQ ID NO: 81293 - DNA, 673 bp, Zea Mays
cgaggccaaggaagctgctctaattgtgcagagcactaaagagctgattgtagtgccgaagctgcctacagtcgagccagtcgagactaaggttgataaggctgaagagccaaaaattgaagaaataatgaaaataccagaaattttgagccctctaacagaggcaaaactgcctaaggtgccaaaggcttctgtcgcgactcctaagaggaggaggatggccaacatgctggatgctgtgctggagactacgaaggccttgagccctgctcctacaaggaaggttgctgaagctgccaaagcgcaaactgaaactgaaactaagcaagcagaagtcgaagctacaaaaactcaggctgaaaccgaagctaggccttcagcgcccgccacgacgaaacctaccgcgcctgaggaagaaatggcagggcagattgcacctgaaaagaatgagactgcttctcccgaagctccaattgaaaatatcgactacatcgttcgacatgctttggggaaaaaattgtccgaagatgaaatcgctgaagcaaggcattatgctcaaaaactaaaatatctgaaaggagccttagtttttaacggaagcaatgaagatgatttcttatactgtctcccggacaacaaagaaatatccgtttgccgggagataggtaaaagc

SEQ ID NO: 81294 - DNA, 748 bp, Zea Mays
ccggcctctaggtcctcctcctattcatcagtcttttgggtgtcatcttgtctggggtctatttgtatgtccagggggccggtctcattcttttataggttaaggaagggggttgtccaaatgttgcttccttaggaaggagccacctggtgaaggtaaaactgggtgttctaccatgaggtaaagccatgtgtgcttgcggtcgcctggatgtcccatattctttattacggacgacacgggcaacgtggacccgaccatcaccatttgggctatgccgacccttggactttatagcctagggttcatcgtggctcgtcgtgttgcgccctgccagcggcttactcacttaggcctagtcctgactcctgatagatcatgagtgtgctgctggctggggtacacgcgggccatagatgtgtcgcggtccgaggggctcgtaggtcatgagtgctctgcgggcccaggggttcataggtcatgagtgggaggcagaccgacgcctccactatggctcggcgctaagagcagttattgcgatcgattatttatgacagattggtcttgggccaggcgcgagatccactctagtggtttccctccggcacacccggcctccctatccgatttcaccacgcccaaactcgtgctcggtgccgcggggtttgtccgagggtgggttcttttaggatagacgttacctatccctttcgactaaccagcgggccccatttgccagagtcctttt

SEQ ID NO: 81295 - DNA, 618 bp, Zea Mays
gactcgagggtggtagctcttgaatttagcatggcacggtggcggctggagagggggaccgcggtgactgtagctgttaccgtggcaaggccttaggcaatagaagggttgtgtattgtgatcaattgcaacgtggtaagatggctgacggcatggcataaccgcgaggaacagcggcacgacggtgatggtcgcacggccatgtcgccagcaagtggacaagtgacagagcggctactatgctccaagttcatccacgacgggatcttttcacccggagatcgttatctgcgtttaactgggtgtgaatcgcggcgccagcatgaatccgagcgcaagatcaccggtggcgaggggggttgaacctgagatatttctgcagacactgtaccatcaggatcttattcagtctttctgaccgagcgttttgtaaggcctggatctctgatttctatataacaacttgttaatctctctgtaataaagttctagcataataatcccacaataatcttgctatagtagccagggtcaaacactcactggattatcttcaaaagagctcccaaagttcatcccaagccactgtcagtaagatttcagattctgagctgactg

SEQ ID NO: 81296 - DNA, 877 bp, Zea Mays
cccacctgttggtggcttaggagggtatcaattgcggtgtaatcaagaaatatgtactcggtcctataattaccctgttgtactgtgcatggcgggaatatagttgatagctagagatgttacagtacttagtttaccaacccatggctacccctataaatatcccggtcctgtaacattctggacacacttggtaatacaatcacacaagtagtttgtcgcttgattgtgctactcactcctccttgttcccgagtgttgggttacagattcccgtgccaacaagtcattgtgaagtttgacacctcctccagtatgtatgcctctacaatggaagcctctattttgcatttatttctacatttctttcaaatagtctttagatatctctcaattggataacaccaatgtccttacacaccccccattcgggcctcatacaggagatgcagaatcaaatgcgtcagcggagcgtcaacggattgaagtcgggtggaatcttgtccagcttacacagtaacacgagtgttattcttttcgagcctgcaatcatggtccgagaaaactcttttgcacaaagctggtggaagaaatagttcaactctgcaagcactagctagacatgctcaaggacatatcctcaaaccatcgtcggaagaatttgttcaatcgatatgtggtagtcatgactcttcacccctaagacttgcatagtagataagttcaccccctactcaggttagatgcataaccatcagggaacattaacatcttgatccactatagtatttcgttcctctaggccttgttcaggatgaaatcggccttaggccttcttcatgtctttccactactaggcagcttcatatcttggttt

SEQ ID NO: 81297 - DNA, 691 bp, Zea Mays
gtgaacttggaagaacttggagatcgaattgtaaggaattgagtgagtaactgagtaagatctttataacaaatttgtagttggttctttggacgacaatattgatgcagacaagtgaccgagttgttacataaaaaaagagaacaaagctctccaaatcgtgttgtcgggacgtctgatgaagatcgccatggtatagtgaccataaagatctccagtgtcgtgcgctcgacgccggtgatccgccaccacaattcgcaatcgcttgggagatttatgccatgggaagtgtagataatgtcgaggcgaggtgaaaatatccagtgcggggtgaatccggtcgctggccggaccggccgtcgtgtcccgccgtggtcaatcacgctggcatcaccggagtgtccggccaggctacgtgcctcaaagccttaccacgtcgcaatagactgctttaggtagcttgttcatcacctaagacactgccctagtaaaagcaacgacagcacttgcgctagtgacttcccctctctccggccgccaccacccttccttcaaattggacgccaccgccatagaactatataaattgcggcccccgtgtgtttcgctaggtatttacgcatccaacacaccagcccttgcctcggatcacccaccagagcccctcaatttctcatttcccccaaatcag

SEQ ID NO: 81298 - DNA, 391 bp, Zea Mays
agttgctctatttaaattgcgaaaatcaatgcatactctaagcttacctgactccttctccaccggcacaatattggagacacattctgcgtatctgcaaggtctaataaaatcagcttctagcagccggtggatttcgtccttgatttgtgggagaagatctggacaaaatgttctagctttctgcttgaaaggtctgaaaccggacttaataggcagccgatgctctacgatctctcggcttaatccaggcatctcagtgtaattccaagcaaagcaatctgaatattctttcaatagaccgatcatctcatttctaggatcggtctctagagtcttatttacaaaagtcggccttggagttttaccatctcctatgtcaatctcctca

SEQ ID NO: 81299 - DNA, 469 bp, Zea Mays
caattctagagaagtccaaggttgtttttacaaagaagaggacctacctgtgatgattcttgactgagacaggagcgcgggttgatttcgaaataagacagggtctcttaagaaaaacggctatggcagaggggtatcgttgatttagagccgtaggatatgatatatgcggctcagattagattagagcttcatcaaaacggtacacgctaaagaccgtcgatcccgagatctgcatcacagatttaatgaagtttttatttcctatggatcgtccgatcaccaccccacggcccagatttatcctccgaggaggcatctctacttctcatcataaccgcgagtcccgagatggacggtgcatagggcattttcttcatccgtgccaagacgcattagccgagcacggtggtgccacagctagcgcggcgacgctctctcaccggcgcaagtgcgccccacctccggc

SEQ ID NO: 81300 - DNA, 274 bp, Zea Mays
agagacaaaatcatataggcagaaaatgttgcttaaaaaagcaatgaaggtggtaaaccatgctagtatgtcaaaggcagggagtgataaggccttggacacaatggatgaactattggagatgcttgggtgtttggagccagatataggatgtgatgatgctggtggtgcaagtactagggagggcaaccatgtgttgtttttatacaattattctatattttattcacaacttaattgttgccaattgtaataattaaacgttccagggcga

SEQ ID NO: 81301 - DNA, 854 bp, Zea Mays
tcatcaaacatgttagataatcctgatgaaatagtttagactctacccctatagaacaggtcttaacttagttcaccctgcactaaataaagaatgacagatcgacttggccatatgcaactaccttaaccatctgatagttgcataacccctcaattttaacctagcaagagattctatcttatcataacatatctaactaatctcaaaacatcctaacatatcttaataatacatattctaccctgttggacctatctaacctaaactagtctaatctagatcctatctaacctaatatgctctaatctagtgtgagttacttaatgctggtacaaggattaagccatactcttaagtcacttaagcctaagttagtgccatggatcaactcaaccatacactcccaataaattgcacaatccatttatgtgaacctattgattaaaagaatgtcctactcatagacccaactatcttaactatatctctctagctcagatgaagacaccaagattggagaccgaagatgatcaacctcattaagaaaggaataaacaccaactcaagtcttcaaggatcaagtgaggtcaccaagatgagtcaagatccacaatctaggatggagtcttttcttatcctactctttcttaccgaaacctatatatgccctaaagacatcttctattctacataataaagtggacatacatatattacccatactctcctatcacttactaataataaaaagagagactcttgattttgaactaattagaaactaaaagctaaatttcaaatcactcttcctatatcctctttctggcaatctcgagggcgagattattttt

SEQ ID NO: 81302 - DNA, 542 bp, Zea Mays
aatcccttggtctttgaatgctcatattcttggagtcttgcatactcttatattttcatgtatgcttatcttcatacccccaatgtttgtttaagacatttcagttaacatgtccttgaccacccaagtttcttaatgatccatgagtggtcattttattttgcacatccttggtgatctcgttaattccttgtaacttccttcggtaatgaatttttacttcaactcttttagtgggacatcattgatcttatccttgattgttttctccacttcgtcactttgggagtcttgccttaactctgtccatggattatgcttttcatcattatcacctttatccttatcacctctatatcttaccttgatgtttatcttatactggcctttaaaatatcctcttttccatctcaatccgagcattgtactttacctacttttcccttggtcgtatcctcttctttgtcacctgcgagtttttagctctatcctttgttgtgcttttgtttgttatttcctttacccttctcatcactctatcc

SEQ ID NO: 81303 - DNA, 603 bp, Zea Mays
tacaggtgtgtcaagtgtgattcttcggactcaagcggtgttctcaagtgtgaggagtgaagagatagcaaccaaggtcggtcgatgggtttatttttagcgccgagttgaaattcaatcgtaacctcttggtggcctaaagttggggggcacagggcacgagtgcaccctcggttcctacacttgatacatttagtgccttttcaacagctataatcccaatatccataaaatagtttttaacatttctcaagtatcgaatgcactcatcggacacagcactactagacatatttgattcatgttgtgtcgaagtgtataaatagcatggtctttgagtgttctattcaatatggtactcgtgcaacatggaacaagtctagtgcactatagagatgaagtgcataatgatttacatgctctttgagtgcccatttcgctaggtcatccaatgcatcataggacacatccaatgacatattcggtagacactggactcgactccacagtggtcagctaaagattatgcatcatgtacgagcccaccacatatttagtgcacgtgtccggttccttctgaaaattaaaactgcactgagagcg

SEQ ID NO: 81304 - DNA, 934 bp, Zea Mays
gggggccagtggcagactcgtctccattccaccattgggggagcagctgtgatacatcgtgcgactctgttctcaagcctctaacaatgtgaccgagtacaaagccctcgtgaatggcctacgcattaccatagaactgggcgtccgacgcttagacgtctaaggggactcccagcttgttgtaggacaattaatgaaggactcagactatcgtgaccctaagatgatagcgtattgttaggaggtacgacagctcgaggaccagttcgatgaccttgagctaaatcgaatcccccagtgagataactacgtagtggacgccctcgcaaaaatagcattaggatgagcgaccatctcgacagggatctttgccatcgatcttttttggaccgatcgtccgttacgacgaggccagctaggagggcggacagccccccagacacattgccctctgaccccgaagttggtcgttgtcgtggaaagaataaacctccagatcggtcctgcaaacaattagagagctttgtaccatagcttcctaaccaatggcctgcttcctcaagacgaaaccaaggcacaaatgcttcatcggcaggccaagcccttcatcctaattggggaagatctctaaaaagggacatattaggataagacagctatgcatctcaatcgaacagggaaggcatctcctagatggcatccacagcgggacctatgagcaccacgctgccccgagcagcctcatgggaaatgctttctggcatggcttctactggtcaaccacaatatcgaatgcacacagatggtgagaacatgcaaagggtgccaatactacgcgcgacaaacccatctacccatgcatgcgctccaaaccatccccatcacctggtcgttcgccgtctggggactctgtatggccagacctctcataaag

SEQ ID NO: 81305 - DNA, 306 bp, Zea Mays
tctgaatcgatacgcagccctggacaccggattaccgttcaacggcccagattttaaatcgcttggcctatccaagaccgcccaatcctagatcaacgcaccagattgatctcactgaatcggtacactgactctaatcctagccgcagatcacaagatggacgccccacgtccgtcttcaaccttcggccgagctaggcggcggtcctcccaccacgaccgacagtgaatcaccagcgcgcggccaatccatgccccgactcgctacacaccaatcgatatactattcatgatgccaggaacaac

SEQ ID NO: 81306 - DNA, 718 bp, Zea Mays
tctagtcttcgtcatccttggttgcttcatttcctgttgtaggagaccgttcgtcagctaggttcatggaaggagggggcctaaaaagatccaactcctcatcaggtccttcattttctgttcccgatggtccggctcccattgcagcagcgtcagaaggcatgtctgggtgcagtcgagtacacagtacatgtacttcttcatgtaaagtattacattgcacttgcaggctgtcaagggccgcactaagctctgccacacgagcttgagctttttcttcgtggtcccaagtgatcgaacgcgagttgacgacgcaatcaatggccgaatcccgttctgaaatctcatattgcaagcggctgacgtcagctgacaattgagttatacgttggctgtcctgcgcccatgccctaatccggtgacgtagctctgaccgaagttgttccaccttggcctccaggtctccaattgtgtcattgctgccactactactcccttcatgtctgggggctagctgatggcgaggcacgccaaaaggtccagtagatttgcgtgatgttttccttatacgcgccatgtctccataagaggggaagatttattagtatattcttaacatgatgcatgcatattctaataattatggaatcaaccttagttgattcccagcctcctatatattgcactctgttacccaattctacaagataatgaacta

SEQ ID NO: 81307 - DNA, 523 bp, Zea Mays
ctccctaacagattccccgctatcctcggtggtcagctccctcaacccagcctgccgccgcgttttcttctctgctgaccgcaacggattcttccccaaatcgcgctgtccgtggaaatcggctctcggtttccgatctcgtccccgccactcgactatataacgcacccttgatagcaccgagccacctcgtcgccatggccggagagtagacatagaccgtgggagggagaattgccgccatggacctccatgcccgccgtcagcgaggcctcagtgtagactctggggcttcgtataatcgctggggttgcgcccgtggccgagacaaggaggttcagccactgtgacaatcccaattgctcgtcggtgttcgtgtcgacgcatccgaaaacgctgtgctcgtgggcagctcaccgctccatcttcacccaggtaaatagcgctccaatactctacccatgccagtagcttcgtgttggaccatgcggggttgcgaatggggcaccagggcaccgtgtcg

SEQ ID NO: 81308 - DNA, 560 bp, Zea Mays
ggaggtggtggagcaaaaccttgtgcggaagatggattcgaagtggaagacttctgtggcaccaaatgtgttcatggtgttgaaggtgattgtcatggatccgccgttaatcaacgtcgcacccccttaccacccgaccgcgcacacccacgtgatgcttttgtgtaggacgacatcattgatcacgacttgatggctcgtgcagaagcacgaggcgattactcacggatttatacaggttcggcccgctttgaattgcgtaacactctacttcctgttggaggcattgatgttgatttctggagcgtggggattataagctgaagattgtgggtgacggtgagctgaggttgtgggtgatgagagatgaaatggtaggggtccccttcggccttatatatacgaccagagagagttatcccattacaagtcatgattactatctacttgcttatctcctttatcgcagatcgcgtccctgcaaatccggagcttctatcgtctagccgcccgagctttcgccgaatgccaagcccttcaggtgtttacaactgcctcgc

SEQ ID NO: 81309 - DNA, 1053 bp, Zea Mays
caaatacttgacgtcggaggagcacgagatggagatgtcgaggaagtggtgtaaggcgctgaggttagtcatggtgaacctcgagtgcagacaacacataatatgctcaagagagctatcgaggaggcaatgagaacgatgtcgtcaatgtataataggaggtaggttgtggttggcccctccttgtagacaaagcgagaggtgtcagatgtggtggagatgaagccaacacatcgaatgtaggcgacgagctgctggtacctcgcatgaggtgcctatttcagaccatagagagacatatacaagacaaacatggttaggagcgaaggggtcgacaaaggtaggaggctacaagtggtaaacgacctcatccaagtgaccatgaagaaaggagtttttcacatccagctcgactaggcacgcaagaccgtgatgctgagaacaacacggatcgtggctgacttgaccaccagcctaaacatctcatcatagtcaatgttatgctgctacgagaagccatgaatcatccaacccactttgtgatatgcaagggagtcattggcgtggaacttatgcttgaagatccacttgcacgtcacaatgttggtgtttggtagacgaggaacgtggcgtcaagtgtcgttggtgtggagggcctcatattcgtcaaacattacgacacaccagttggcgtcgttgagggcgctgcaatattttgatgggatgggcgaagcgattgtcaaggtagttgccaaggaggcaaggtggagcttgggctcgatattcatggcaacatctcgctacgggtcaccatgggatgtgacaaaggcgacagaggggtgaggcgcttggggacactaagccgaagagtcgactatcctagaggcctagagcctgtagctgtccaactatcctagatagccgtgaggagggttggggattatggaccttagcagggtgtggatggcaaccatagacgatgctgaagcgccctggaggtgaagcaagagcggttggggctagaggaggctgacactagtctgaactgaccca

SEQ ID NO: 81310 - DNA, 533 bp, Zea Mays
tgaaaatatgttgtagcacaagttcaacgaccttatcgctttgaagaacagatcaagagcagtgcttgttaacagtgcgcattcggctagactgctagtccacttgctgtcaggacttgtgactatttgtctgaccacagcattcccatattcagctgcaacaagaaggcatgaccaagaccaaccacgatgctgctcctcctgctgtcgcccataaccaccacgatgctgcctcctggaacggcagcagctaaccgattgactggaaccatgtcactcacgccttgttcgtttgtgcaggattgtacccgaaataaggtcctcctcctgctgtcgcccataaccaccacgatgctgcctcctggaacggcagcagctaaccgattgactggaaccatgtcactcaccgactcacgccttattcgcaggattgtacccgaaataaggtcccgttctgcaggccggtctccaagccagaccggtaaccaagtcagcctagggtcgagtggaacatgtcttgttactcattcctg

SEQ ID NO: 81311 - DNA, 1540 bp, Zea Mays
atcaccggcctgaactgattgctccgttggcagggtatagtggtcacccttagttaagtaagcgcgagcatgttgcaccgtcttaagtcattgccgacttaagccgattgctccgttagcagggtatagtggtcaccctgagttaagtaagcgtgagcatgttgcaccgtcttaagtcattgccgacttaagccgattgctccgttaatagggtatagtggtcaccccgagttaagtaagcgtgagcatgttgcaccgtcttaagtcattgtcgacttaagccgattgctctgttaatagggtatagtggttaccctgacttgagtaagaacgcaaaacgaagaattcccgaagccttttttattgatgatgcatttcccgatttacagagtacattgccgccccaatagccttttgaatatagttaaggataaaacttcctgagatgttctatattccatgagttctcgacttctgtgccatccatctgtgtgagtcgatatgatccacgccgtgtgacttcagctactatgaatggtccttcccatagaggtgacaatttgtgtcgcccctccccgttagaattcggtggaggatgaggtctcccactgcgaaggatcgatgctgtatggccttatcgtgatagcgcttagagtttgctgataccgtgttgattgaatcaccgtgtttagtcgttcttcttcgagtatgtcgacatcctccagcctagtagcctcagcttctgctatgttttcaaagatcaaccttggtgctccaaacctgagatcagcaggtagcactgcctccaaaccatagaccataaagaaaggagtgtttccatgcaaggctcgactaggttgagttctcaggctccaaacgacatatggaaattccctgatccactttcctgcgaacttctcatttttgtcgaaaactttcttcctgagcgcctctaatatcatcccgttggctctttatacctgcccgttggctcttgggtgtgccacggaggcatatttgatctgaatgcccttttgctcgcagaagtcgaagaactctgaacttgtgaagttggatcccaggtcggtgatgatgttgtttggtattccaaacctgaatattatgtcctatatgaattccactgctttagctgaagttaaggaagcgatgggtttgaattctatccactttgtgaacttgtcaatagtgaccagtacacgagtgtatcctccttgagcttttttgaacggtctaatcatatccaacccccaacatgcaaatggccaagttacgggtatggtttgtagttgctgtgctggtaggtgctgctgttttgacaagtattggcaggctttgcatttctgaactaacttagctgcatcacttttcgctgttggccagtagaaacccgacctgaagaccttcccaaccatggtcctggatgctgcatgcactctacattgcccagcatggacctcatctagaagttgctttccagtatctaaaagaatacacttcatgaggactcctgacgcgcccc

SEQ ID NO: 81312 - DNA, 279 bp, Zea Mays
gaaggacatctctgatattatgccatgaccgagagtatgactctaagagcaggataaaaatggggtagttgaatcttagccagtggaatctgaggttaatgcaacctctatctcctcccttgcactataaaaaggtgaggctgagtaacattttaaaggactcacatatttgattcatatctagacactcttacacaagagttcacctagagaacaaatataaaggccgattaggactattaggctagaactcccaccataaccaatagatgaggggag

SEQ ID NO: 81313 - DNA, 297 bp, Zea Mays
actgctcgttgtctacgtaaagtaatcattcacactatgcacttgggaaataacaaacaaaagcaatataccaaacatatgcagcagagagatcacaagttcatagtagaaaggattggcactctggtgttccctaggtctaaggtagaggactatacaaagtgattcattatccactaatcaggtttaagtcagtggtgaggttaaatcattacatggttttaagtctctgaacttgggtgcttaagtccataaacttaggtgctccaacttttattaaagtctaccatcttctaa

SEQ ID NO: 81314 - DNA, 496 bp, Zea Mays
ccctaacaaacgcactcagagaaacaaggactaaactctcgaggggtgacagccgagccacctatgaaaaaccaagacgtcccctcgagggtctcccacctcgaacagggctccgcctcaccagaaatcgacgccactcacttcgccttgcccgaggtcacctcagctcggtccatctcgcccgagccagcctcaagcagataggacaatggcacccaaaaacaggcaggggacatgcacatttaatgtgtgtgccaacccgcactgtggcagcgaagcacagtgatgaacaagacatcggtcacgtccagcgcagtggcatgattatgcctacacaaacagtgtgtgcatgccacctgacgccctccgatgggacgcctaatatgacaagccgagcggataggccttcgggtgcaacctctccgcctcgcctgaccccaggtccagccttcgggcaatttctccacctcgcccgacgtcaagctcagccctcgag

SEQ ID NO: 81315 - DNA, 721 bp, Zea Mays
cggagtcactaaaaagtgtgttggctccgatttgggggcaaaaactaagggtgaacctcgagtcggtgctcactgcgggaacgcagacggtccacggctcaggactggacgatccacgacctcgctataggagcgactcctctatatgcagcactggacggtccacacgttgggggcagatggtccacgacggtgcaaagtcgtcttttcgttggaaaaccctagatattgcctcctgggagggaccccgttggggaggaaagttagagtgctccgggatcggtaggtcacccgagacatccctagatgacgtagaatcgcctagagatgaagaaataggtcgagaaaaactaatactaaggctaaattactgctactcgtagggcgggaaagtaaatgaaatgatatataaattgattagatcgattataggtgtgtgtaattggccatacccctttatatttataggggagatctggacccgtttctatgcatttcacaacaggttcccacgtggttacggataagaatgctctggaaagggacgttcacccgagaaactaatctaaacgcaaaccgtccgggctatacacgcgcagaacatctggccgtgcccaggtgtcaaatctggtgctcaacacaatcaatatagataaattttctaatgtttagcactaataatgttaagatcgctgcccgtggctaggttgatggactagtg

SEQ ID NO: 81316 - DNA, 551 bp, Zea Mays
aacaattttgatgtatatatatgagagtgtacagaaatatactcaactggaaatcgatgttttgggtctattttcctgctgtcaattttcgctttccatctttcatctcgttcaacatggaggacagctaaataaaaaaaaacaatcaatgaaatgggagtgctgcagttgaagtttcttcagaaaaataaactatcataaggtgctgatgattcggtccattatcggcctgttaattttaacgatagacataagatcctaataaagtggatcttgctcctttaactgatagcatgccaactctagccatgagatttgcacatgcaactaatagttgttcagcattcggtaaggtgccaacgcataagaaatttggaaggcatgtgatcatcttgaaattgcaggattcagattctaaatgcttaacgcacagcaggcaggagaaacagaccagcctgtcagtgtcatgaagtaccaagaacgctgaagtcaactgttccttccactagcaatctagcatgtatcaaccagcctagcctagccaacagctg

SEQ ID NO: 81317 - DNA, 1267 bp, Zea Mays
cttcggttgaaggttccttcgtatcgtctgcagagatgatagcttctgtctaggctgcagccttaacatgttcacaaccagttttctccaaaactgctgcaacccctcgggcacaggcgaaggcacaaaaatctccatggtcactgagtatttcttcaaaagcttcgacctcttcgccgatccattgaataactccttcggtatcgcctcggataaatctttgctccgatgagtatgcacccacctttacaaagctatctttaagtttctttgcgcaattcatggatacttcatagcatttttctttggagtcccgaagttcttcaatatttttctgcaccctttctgtttccatttcacttatttcttgttttgctttcgcaacttcgaaatcttcattcatttcagcaagcttcttctttaaatcttcaacctcggctttatgagcttcggtttgtgcgttaagctgggcttcgctagttttcagtctatccaccaaggagagtagtattttgtctttttcaagagcttcattccttagtgtaataacttctgatcgaagatttccaagcgctagctggcagctttcatcttcggctttcttttgggcctttaaagccttgctcagaattaaaccctacaaaaataaacgatgagcacatactgaaaaggaaataaactacaaaaataatctgctttttaacaagttaaaagtgttcccaccttcagactgttataggcaaggctatctacgagtttgtccttcgtcattgcagacaaacctaactcaagcttcagatatcctatattgtctgccatccctcgacagacatcaatttctttattgtcatgcagacaataaaggaagtcatcctcatcatccccaccatacaccaatgaccctcgagggtactgcagatccctggcataatgtttcgctttggcaatttgttctttcaataatttcttccctaaagcatgacgcactataaattctaattcctcagtagatgttccaggggcagggaactcatattcttcggtagcaacctcttttcttaacaatgatggtccctcagcagcctccaaaggccttgcttcagcaccctcctcaacggcccccgaaggtcttgcttcggcgggggttgagggcccagcctcaatcgcagcccgcgctgtgccagcatcggcagatccctttacaatcttctcctctgcagcacgcgctgaggcaagagttaacaccttcactgattctataataacg

SEQ ID NO: 81318 - DNA, 704 bp, Zea Mays
cgcggggcttattgtatctggtccatgggcccgcgtctccagtccatcttcctccccgagtttgactccgcgaagcttggaacgccggcaccgattgcgggggtggttgcgggcgctcgggccacccttctggggctataaagctataatccaaggaccggattccttctaccccttgaaaccctgccaccagtgccatagaaccggtgagggagtacatggcgcgacgacctcactgccgtcgtgaaggtattctagctcacgtcattgggcgagtgcggagagtggtgcagaagctccgtcatcgcatgtgtgacctacgcgtagcggattgaccagagtccccgaccaaccttgatcgaaattgctcgtcagagccacaagtccgtcgcggatccgcttggcaccgcagccaacctcacccgaacgccaaacctcggtaagacacccatacatcaacccacagtcatcttggtgcatctagggtttgtcgtactagagtttaggaccctatgtaggccggttgatgctcaccggcgatggcgccaccgtatcctggcaagtgcgtcgccgcccagttagatttggatgtggggatggtcgtgcaacgttggatgtgtattgtgcggttctgattagaactccgggtaccggttggttgtagtggaacgataaccgtagatctagcgatggatggttccgat

SEQ ID NO: 81319 - DNA, 871 bp, Zea Mays
tacaaacaaaactggattcctgttcgcattttttttgtgtgtgttgatgatcagacaatcagtccatcgtggaagagagtagacacatacacctttattttttatgatacatgttgtccctttggtagatgtcatgatggcaaccaggcagcagtacctgagaattgagaggtagcctagcctcttgatgtgagcactgtttggctgccttcaggctggcgttctgagatgaaatgttgcgtagaaattgaagcacctcactactttcgattagatctggctttcactcgtggagtgcaggcgcagggcagtttgcagtctctcttgaccagcccacacttctgcatgcttataaagtgcacgcacactacaacactaaatctactctctcccaatccttccccgtctctcctgtctccaatgtgcatggcacgggcggaggaaaagaaaatattttgctgtgcatgacaagatgtttgtactgggggagatcagggttcagatcacatatgtcctcgtgatatgtcaaagaagatcttgtggaccatgcacatagatcacacatgcatgcatgcatgcatgcagatgcagtgcagcagcacaaggctgccttgcaatgctgtagctgtcagcagcagcaacaacaaggcctgcagccatgcactgatgccatggaaagacacatctctgatgaatccttgtgaatgaatgaagccgctaaacgggtctgggcctgctcgtcctctgtgtttcagtgtcccctctagtgtttgttctctactttcttttgtctctagctgtctctgatatttttatttttatttttgcattgcagtagtgctcgctgctggctacctcacttggcacttgg

SEQ ID NO: 81320 - DNA, 466 bp, Zea Mays
gtggctcatatgtctctagagtaatttgtatcaacatcatatgatgatgatatagtgcccctagcaaatctatcttctggctaataatccttgtcatattgatactaaaagtgcatctagacctttgtgggctttagtgaattgaatgacagcaatattaaaggactaaccagtttgctagtgttgaatagcaaagtgagtatgatgcttataccatagtttgatgagtgaaaagcatacaaaggttcaactcaaggtaatagtgcagatatttcataagacattaaatgaatatgtggaaatgggattacattgcaaaagagaatgcaatcagaatatcaaatgaaagatatgtaagaaggttaaacattgatcatattctgagaagatggttactcaacataatctcaagatagtgtgacttaaggaaagctattgaacattctacaacactaagacatcgcat

SEQ ID NO: 81321 - DNA, 420 bp, Zea Mays
gataactagtgctctcataaaggcaaaggtatggaaaatggaactgtgcaattttattgattatcttgaaattccattgatagtgatcatagctgtgttcttgcatttcattggtaatatcgtggcttatgcattagaatgttgtttcttttggtgtacctaaagaaccttcttaactatgatgtgcttaagacatgatcgtattgtctttcaattggtatatgtgctccaatgatagttaagtatgaagcatgtctaagttgcgtgtaaatgttagacttcctgtgagtatccaattggcttgtgtgccactgaggcatgcattgttgtatttagtcaacctttcatttagccttcaattgatgttaagtggcttttcatttgatattcaaattggcatctttgtgtgatgaaagtgat

SEQ ID NO: 81322 - DNA, 410 bp, Zea Mays
ggatttgttcgtaattaattttgaacacaactagacaacgagttggttttgagaaaacatagggtctctttagtaaaacatacacaatcgaagagatatcggccgatctgagccgtaggatctaaatcatgtgcccacgaatagatccttatctttacactccttatctttacaaactgatatgaagtctcattcgttagatctcgaatcagtggcccaagagtcgtccacacaaacacctatccaaagtccttggatcgctgatcagcggcttggttttaatgcactggaacattatctgactttctaatctcctccgcccaaactagatcggacggccggacgatcttcttcctccttacggacaccagtcggcggtgcctgatctcttgtgtcggtgctaagccgga

SEQ ID NO: 81323 - DNA, 630 bp, Zea Mays
ggaagtttagagcgtcttgggccccgagagtgtagggccttaggacgtttctttgagacgtgttggcttgaaatacctaattcttgagagggtgagatcaagcttttcgaagtggttggccttcattttttgttggagccaaggtagatcgtcgagggagtccctgagagggaatccatcgatagttgggtttccttcatcaaaacctttaaaggtatcttagcaacattcaaattttgccaatgttgaagtacaaggaagtgaaactacagttggatatttaaaccccatagttggcaccaatctggtaccaaacactaggggtgtactgcctggcggtgccctttatggtggcatggatgatccgtggccctaggctagacagtccacgacctctctgtaggagcggctccttccctacgtcgcacggacggtctgcgctctaggacagacagtctgcgatggcgcagggttgtcttcctcctcacaataacctagatctcgcacccctgggggagagaccatagggtgttccggggttggaaggtcaccggaggcatccccaaacaatgtagagccacctagggattaagaaatcaggtcaaggaaaagatactgagtggataaagt

SEQ ID NO: 81324 - DNA, 331 bp, Zea Mays
cccatcctcgttttaatttggttgcccatttcaggttgcttgcacgggacgctttacggtttacctagcgtacacagccacctggcacctggtgcggacaggaccctccatcctcatccacttccatcacgtacctataaatatagagccacctcgtcgacacagcaccttccatcttccaccggctacagacgcgctgcaagatcagtactctgatcgatccaccaccacggcatgacgtgctctctagcagcgacggcggcgtccacctccaatctatgccaccctgcgccacagctttctccatgggcacgggcgtaccatcctggcc

SEQ ID NO: 81325 - DNA, 408 bp, Zea Mays
catttttcttagacatttccgcttgggttgtctataccggtaccctcttccctttcggccccccttcggtaggggatacaacaacaccctattgcccacttaggctccctccatcctagtgaaactatctttgtcccccacattgcacgctatgcgctcctctatacaggacccacgtgggatgtcgttgcctgtgcacgtatttcagcacgtatttcatcacagatgctaagaataaaatgatattaaatgtttgtggtgggttacagagggaaaatataggggaaccgttgcggaaggtaggaaaataggggtaggaatctgggtgacgtggagaaaaagtgggatatagggggataaatttagagggaatcgctacaaatagccttagactatccgcatcggtgc

SEQ ID NO: 81326 - DNA, 465 bp, Zea Mays
cttgcccctcaaggcttttcgcaagaaaaagaaatccaccagcagcacattgtgcaacaaatccatcaataaagagatgcagaccaccttcatgatgtcaaacgttctagatgtcccctcatgtaattcgatagaaaccacaccttataatcccatatgcaagcagccaaaacccaataccaatgtcaccaatgctttagcaatcccctcctccactccaatgaataccatacagcctcgcaaaggtatgaaaatgaacacaaaaggaaaaaatcggtatgaaggcaagtggaatggtaatatttattacaccatcgtcgacaccagtattgataaatgcaagggcaccaaaaaatcaatttgtagcaatgacttcatggtctctagcaaaaatcctaagcagacctttgaacaacatgattccatcataaagggaaagcgaaggtttaatctcctctccaatct

SEQ ID NO: 81327 - DNA, 1184 bp, Zea Mays
gtctgaacatagcggcgacgtgagcggtgccaggagctactccaccatgaggacgacgaggagggtctgaggtaccatagcacatgttgtgaagcctcatcgtcgactcagggaatccaaataactctctgatctgagttgtatgcaaagtgttgtcctcatgctcgaaccaaaacctcatccactaatggtcagagtcaatacatactgtggcatagaatactcggaaccactcctcaacataccggccaccaaaagtcagcaaagagtacaaccctggcaggtatgtgatgtgaccctctaacgctaagtcaactgttgtacgaaaagcagtgagatccaaacgtcggtgagtccgtagagcaatctaagttgacagctgagccctcaagaaggactcctgggtcctggtactgaaaagtggtgtagctgcccgatcctgctgagcaggcagccacgagtccactagcacgtgtctgaatcgacacaccctggcagctgtggccctttgaaggtcgagcaggcatgggtctgcagcaagaggacgcatcttagtctcatcacgctcccagaaatgaggtggaggaataggtggagcggaagtgggagcgggagcaatggaagctggtgtggtggaggtagtagacgcaacaggtgtgatggaaggctcaagagtggtaggagctggcgtagtggaaggtggagtggtaactgggcctgagggagcggatcgaatagggatggagtgagcccgagacgagaggcgacggactcagaaagcaatttggtcggaggtgatcatcagctgacctccctgctctgcctgatctgctgttgttgctgcggcaactgctgcatgggtggctctatccaaccgtctctttttcttgcccccttgctgctcaaggtaaactgtcttgcccttatactatctgaagtggcgaggagggtcctagtcatctcctccccctgacggtgtgacattctttgtccgcaccatcctgcactgactactgacacgctgcatgataatgataaaaggtaagcgagagtagtagagtagtaggtaagtaaatatttagaatggaatagctaccttggtacgtctcgagagagaagaaccagacaggacaggagtcatgcaggcgggcaaggaggcacactaaaatgacagaagatgtgag

SEQ ID NO: 81328 - DNA, 543 bp, Zea Mays
gtaatatttcatatgacaagagaagctcaccgtcatctcgaaagttaccgtaaagaagagggctgatggtgacagacttcaaaaagactagttaagaagggaaaaaaactgatttgttgaagttcactcgagcgacgaggaagagaaaacttcgcttccagggcgatcagataagggtgtcgcttcagggatgcccgagagccttgcaacggctcgtgagtttattagatctttggaagagggcgaagtggtgacataccttcgcaagatcttggtgtctcgcagaagggcgaggatatggcttcgcagtaaagtgaaatgtttgttgagagttgagactgatgctggtgtgggatgtgcaagcaatccacttgttgaagctggggtgcccaccgttgaagccccttgtaagggattctagctagcccctatgaatcccctccgcttcacttgctctcaaacaagcgctcagggaaggctaaagtatgtaaatgcaccatatttgttactatgaaatttgatgatgataatgatgatgttttt

SEQ ID NO: 81329 - DNA, 2311 bp, Zea Mays
caaattgtacattcacgctctaagttaataaagttagtaagtagttaatactataatatgtaccataatacttcaaagtcgattaatgaatagttatattctcatcaggccttgtcaactgtcatctcctggtgccgacgaggaaccaatcccaacttgtagccagggctttgtgggctcaccatccatgctcaccatgtctttgaggtcgctaattttagctctcttcgctggtgtgctgtctgcctcttcctcctccatcaccgcatcgatggcatatttttttcttgtggcatccttcttctggtgattaacattgcttggtgctgcgacagctagtggctgcaagtgcgctacggttgcgtttggcgcgattgtgaggtcgagcactggcggaggcacgtccacgaccattggttggggctggaggttgaactgctgtttgactacgccgccaacgaaatcttccgttagcgacgggatcatgctggcggtcaccgtgttacaagggtctgatgtgtttgaggtaagccagtggcatctcttatgaccaccgagtgcttggccagaggtgaacagccggtggcataccgaacactcatgcattttggtgcttttcttgaactgtgccgctgcaacggcgagcgtggtctcaactaatggattgtgttcgacgatgggcgcaagcgccatggaagaatacagtgatcgtggcgtgtcggaacttgtccctatgttggtgtcgacgatagtggtagcaaaacctcctgggacatgtgcactcgcactcgcactcgcacctgcattgatgatttcgtcgacagcaggagctttgccattgtcattatttcttccatctttggcgatattaacggccaccacttgatgatggcgtgttgattcagtggcattgctcgtctcgaacttggcagcgaaacaccctttgactttcttgtggctagcccggtggcctccaagagcctggtgtgaagtgaatacctttttgcacgccttgcactcgaaaactcctccacgtggtgcgggtgagatgtattgaggcacaacgagtggcgaagaaggcagtgcggctacgactgactcttgtgattgtgtgaaaaaaggaatcggttgcttctgatgatgatgatcgtcttttgtaatcgtcgcgataacgttcgcctcctggtcattaatgttggatttggaagacgatagcataacgagacatttcgcgaggtcttcctcctctcccacggtgctggtggaaggatcctcctcggtcgtcccaacgcgacgtgatctctttcccttcgaccatggggttgctagtatcggatcctcgtcaccaccaccatcagcgttcgtagggggagatgatgacgaaggtaccggactacccacctgctcttcttctcctcctcctccctcatcctctgatctgctgcatctcgcatgctgaaggaaaagttccaatgacgtaaactccttcccgcagtttttgcacagctgacagctcctgatcaacctattcggattcgcccggagcgcatacgcatgcgtcgccgacgtcccaaccgcgtcgtcccactcatctgctccggggcatcgcgtgaccccctcttcatcgagcgagccatcgtcgtcgtcgacgacgccgaacccgtcgacgtcgctagcagggccgtgggctctcatatgcccaccgagcgcactgccacacgtgaaccccttgttgcatactcgacagaagtgcttgtactctggcggtgatggcggcggagacggtggcatctggggaattaaatggtaacatgtatgtagtggtgaggggaaagatcaaattaattaagtaactaatgtgattgatatatatggagagctatagctagcaggagaagaagtttgcatgcacatcacataccagggacgttagagattcacacattgccgtgcgacagattcaatgcccgctacaacgatgtcttccgagctataataacacgccacatgcctatgctgatcacaacaattaattggtcatggtaacatgtggtgagggtaaagatcaaacaatgcatgtgggggaaagacgcagtacgtacgcacgaaccagagatgacgatggagattcacacattgctgccgtgaccgtgggacagattttgtggtggcgacgagacgacggcgtctttctcgtctttctcagcgacagtgcgtcgtcccagtacgttgttgcagcaaaccgtttctctttcaacttcctaatcgtaaaaattgtttgccatatatatacatgcttctctgcctccct

SEQ ID NO: 81330 - DNA, 682 bp, Zea Mays
gcgtgcgccccgcccacatcgcccgagcactaggtaaagccccgcacactccctcagctcgcccctacctcactttcgcgctcccccgccctcgcactcacccagccgcggagctgtttccccctcgtcgtcgcttcactgttccgccgttgccgctggacttctgccagcgctttggccacggtgagctttgcctgagcttggcgcatcgggaacccagagtggtttcccctttcctcaactctaccgcccggtccgcgcttaacctcttccctgagcaggccagagttcgctgccaccacaatccttcgacgtccggccaaccggagcctcctcgcgccacgccaagtcaccccgagttccgtcccaaggtgagatgtctgttcccatgctcgatttctcccaattccgctttgtcttggccaattcggctttgctggtgtttggccgcgctagtttgttgcgcccgcgtagtgactggctgatatagcctggtcctgtgcccctactttggtccgtagtgttccccataccctgtcgtagctagcccaggccttagtgcaccctagacctcgtctcctcggctggaattcctcgccggagttgcccgacccgcccggagcaccttcccttcgttgttctcccgtttctagtcccgttcttgcggccggtagtctgccag

SEQ ID NO: 81331 - DNA, 1038 bp, Zea Mays
cccacttattctttgcacacggcaccagttctaacacttgacctccagttttgccagtattcggcgtgaaagtgcgactccagaactgtatcactttaccacccatggtcttcttctgccaacagaggcaatagtgcttcgcgaagactttgattgagggtcctacaccatacgtggtcatggcccacacaaacttagacaacacaacaatagcgttcggggtcaagtggtcaactagtgcagttgaacgtgggcgacttcaaaaaacgcctcgaatactacgatctctcctcgtgggatcagagtcttctcagtttcaggaactcgtctggtacccaatacaaaatagcctaaccgttcaaattcccgcacgtggttcaaggggaccaaagaacgaccgaattctagcgtctcctgcccagccacgcaatgagcgctagagccacccaccgacaatgacatctcagagagcttagtgctccataatgaagaaaagagggcggtggcacataccgacataagcggcgtgcagtttgcttaatccgcgccaacgcaaacactacttgtagaacacagagaaatgtgcgaggcaggagaagaggagtaatgaaaaagtagggaccggaaaaagctttacacagccccgcccccttatttatacaacacccgagcgacactttggaaaaccatgaaccgcctctcatcaaaagacgagccaccatacgtcagcctgctacgttagcgttcaacggtcacaaattttaaaaagcaattggcttaacttatgattgagggtagcgttcatcggtcgcttctacaagacttcaggattgtctcaacaagttgaaccaacccgtcagggggggagctcatgttggggcaaagacgtgacactcccctcgactatctccaaactattgagacggagggagaaaaggcgaagaccaagagactactgacgacacgaagataaccgctccatggtcgcaatgaagtctaccaatcacaccagcccacgaaggggactgacttctacta

SEQ ID NO: 81332 - DNA, 386 bp, Zea Mays
cctttgcctccctcgtcacctgcgagggggccatgaatgcgctgtctcgcgagggctgcagacactacgaggtcttcgaccgatcagacgagagctttgaacgcgagatcttcaaggccgaagaccctgttgtgaagcagtaagcgggggcactttttgataggatgtggggtgcgcatggtcgggaggctgtcagggagcgatccgaccgggcaagagagcaggtgaaggttattattttttctgtggtttgttgcgtgtgggtatgtgtagtttttgctgagtgaatgtgctgttgctgcagatggagcgtgccgaggacgtcgaggacctcggaggtctggtcatcgcgccgcccgaggctgcggaggtcaaaccggtattgc

SEQ ID NO: 81333 - DNA, 529 bp, Zea Mays
ctcggacacgccgattaggttgcgttggtaatcggctgagttatgacattagctgaatattgactgcgccttggcaacacgacgcagtatttgtgccgttcgaacttcgctgtgtcatgtgattgctatgtcgcgctctcgctaaatcggatcgctcccgttgagtcggagcgccatcgccgagtcacacatttttcgtgggccctgaaggcattgcatgtgtgtcgtaactattgagtcacagttgcgcttgttgcgcctgttgtgcctattgcgcgtatttatcgtgtaccccaactaccaagccacaactgcgtctgttgcactggttacaaaggtttgatgtgttgtcgttgccctgatggtcgcacacacgttgacgccagatacgctagagcttgtactcgcgtggattgtgatgggttgttcaagcccctgaagtgacattatgtgcaaccttcgtaaataattttatttgactttatattttatttgaccgtgttgtgtggcatcatatttatatatcgcc

SEQ ID NO: 81334 - DNA, 376 bp, Zea Mays
tgggctacgacaacataacaagcctatgtaacaagcaccgttgtggctcgatagtcggtatacacgataagtccacataacgtgcgcaataggtgcaaattgtggctcgatagtcatggtagacagacagtgcttgtagggcatgcagaaaatgcttgactcgatgatggtagaccgactcgacgggaccggtccgattaagcaagagtgtgacatagcaatcagatgacgcaaccaagttcgtatgatacaaatattgtgtcgtgttgctaggacgtaaccaatgcttagccaatgtcataactcagccgattaataacgtggcttgatcgacgcgtctaagtactcactatacaatttaatcgcttggcgggcg

SEQ ID NO: 81335 - DNA, 508 bp, Zea Mays
gagaaatcggacatggatctggccgactcggcggcgcgctgttccagcaagccaacacgggattcccatttggaatcgatcgcatggagacgtttatccagctcggacaggagggatctggtttgcgattctagcgcgagggtaagtgtaaagtctatcggagtagaagacgccatggaagaggccgaggacgaacgaatctgataccacttgttagctacgactactggaggaagaagattgcatagagaaagcagaggaaggagacgggaattggggaatttagggtagtgtattcagagttcagtttttccatcccgtcaccagagcagtattctccttatatgtgacccggttaccacgcagggaaacccacacacaccacattacacccattcaggtccgtgtacacaagtattagctcggcgagtacgtcgaccacgcccgagcaggtgctggccagcatcttgtggctgtagatcctcctgtgacacctcgggtaatactg

SEQ ID NO: 81336 - DNA, 632 bp, Zea Mays
gtcgtgaagatcgggccaccctagtaccaaatataatccggtacatatcatctagtatcaaagctttcgttgtcacggtaggtcttaatgtcatccatttatttatcacagtcttcatccatattatattttgttttgtcgtatagtccaaagccacaaaaaaacctataaccctttggcagtactattaccttgtgttgtttaaagttcctcaagttgctagttaccaccatcgtattcatattgtgtcattgcatttgatctcaacaccctattagtgttataaaaaaacaaaaaaaagaagaagagaaagaagtaaaaaaaaattgaaaaaaattgtgaaaggggattgtgttgcagtgtgttgctgaaaatttcagtttacattgatttggtgagaatctttccagcaacaatttcatatcttttagcacgtcaacacacttggttacgtcaacacacttggttgacagtaccaaaacccaccttgatcagcctcctatagctccactaaaaacctgaaccaggacgtttgacttgtgatcctttcgaccgctctaccacctctgtcgaagctgtcacaccggcaccatcacagtcctagagatcaggaaagagcttgggtaagtaag

SEQ ID NO: 81337 - DNA, 311 bp, Zea Mays
cagcgtccagcggccctgacgccaatgcttgcacccgtgcgaagccccgtagccagcaattccattgtttgcatgaatgaaatcatcgagacgattgacacataataaatccttacagacttgctgtagattcatagtgctagatgtggacaataaagcgtcgctgtatgcttctccttttctttttggcgtgtgtagcggcatcctttgttcctgcctggcgtcatcccacttagttgttcttttgcattatgattgaaagccttcatgcttcctcggtcaatcaccggtgcgcactgggagcatcgccg

SEQ ID NO: 81338 - DNA, 867 bp, Zea Mays
ctcacttctctcagctcagattttgtggctaccataactagatgttctcccacttctttctttttatctcttaaatttggcttgtagcactcactcaccgaattgtggatggcactcaatttcttttgctcttctcctctacttgctgcactaatttcagttttcttttgtaagtcttcagccatgatttgttgagtggtcataggcttgaatacaaactttctcccttttagatctagtgcgtactgatttgttcttccacaaagatgagaataacagtcatattgccaggtcttcccagcagcaagtgacacacagacatgggtgcaacatcacactcgactgtgtcaacataaactccaatcttgaatagaactttcaccttataaccaatcttgatatctcctgattcattcaaccattgatatggatgagggtgtcgctgcaacttcagaccaagcttttcaaccatctcatgacttacaagattatgttagcttcctccatcaatgatcacctttactactttgtcttgcacttttgctctcgtttgaaaaatattatgtcgttgtccaattttagcttctttcatttgaacactcaagatttgtgtaaccacaagagcggtaccatgctcaaattcacatctcgtatgttcttcaactttatcagtgtcatctacatttcctgcttcacctttctcttcactagctgatgtatattctccatcatcatttacaaggatcacgcaattatttggacgctccttaatgacttgaccacgacctccacacttaaagcactgaatatcactactcttggctattgaacccactgatgtagaagtggatgctgctggtttaaaac

SEQ ID NO: 81339 - DNA, 560 bp, Zea Mays
gggggaaaaagctatgacatatcagtatgacagtatatataaatatagcagtatgactatgacacataagtatggcagtatatatatacttgcatttgttcatccaaatatatatatataaatatatatatatatatacactactctatatgatggtagactaggcatccacagcatttttttggtgaagcacgtcttcccccgcccggcatcagtgttcgcgtcctctctcccgcaatctccgctctctcctacaatccccgtcctctctccccggatcgccgcttgaccatcccagaccatcagtcacgtttatggcacaccagcatccgcatctatggcacaccagcatccgccaccaggaaatctcgcgtctatggcacaccagcatccgccaccacgcgtcgcgtttcctatcccacaccagcatcccccaccacctcctcctcctcctcgccccacatgccccgagatctcgcatccactccgtctatggaaggccctcacaccatcagcggaaagggcgcacctcggcgcgcccagccatcctcggattccgc

SEQ ID NO: 81340 - DNA, 517 bp, Zea Mays
ctcatccaagcctactcttgccttggtcagtgcacaaaacctcttcccctttctataagctaccgattatgtgtgggggtcaaagaatttagcctactggttccaaagatatggagctctcaactagggtctgtctcacagcctgagcccaaggcaaatcttcgattttgtcgtgtctagggttcaaaacccaatgccatctctttttgctaataggagcccatggttttggattagggatcaaggtgaacgcgctcgagttttgggtgacggctgaaattcagaaatctgaaattcagatttctatagagagcctccaattgaatggcctgtttgggggttttgaaaaattcttttgggcaaactctcttactacttttgtagcttatttagtgtactacaactttcataattgactcaagtcaagataatgtagttttcttggtctttattgagttttcataacggtgctccatttgcccttcaggaagttttattagggtttttggcattttct

SEQ ID NO: 81341 - DNA, 332 bp, Zea Mays
cgcgattagttgtccaatttgggtagggacgactaggatctgtttttgccgtggactcccggttgtggcccagtttgggtgggaacaactaatgggctggtaatagggcccattagtgttagggtttagtaaaaccgtctgctacgctctgcccctctccctgttctaccagcaaactgtttgattccggcggctgccctctcctagtgatctgttcctctcttgaattcccctctgttcatcactgcacccttctgttcatctctgcacctttacaaacctcaatttctttcattctttgtgttagtgactggtatgactgatgttctgaa

SEQ ID NO: 81342 - DNA, 730 bp, Zea Mays
gaaagcttcagaaagttataacaaccaaaattttcatgtagcccatcttctctggccttcgtttggtaatgtagctcatgcactctacataaagcttcagcatttgggtccattgcttggcttcgaagggcctagatgaagatgttgagcctaacgatagcgttaggggtcaactgatgaagatagatttcataattatccaaaacttctctaatcatctcgtgaagcggaaaccgcaatcctgctttgaaaaagcttttgaaaactactactttgtcattttcggctttagagtggtctcttctccggcaaaacgaataagcttcttcttagtttcccttaagtaacctagcttcatcatcatgggcatgttagactcagacacagtagatttttcaaaatccaagtggctgggttttgttgggatcagcgtgttatagccttcctcttcttcatcaacattttcttcctcgacatcagcttgctcagcttcggcagtaggtgcaccttcgtcaatggcccccttcatcacaactaatcccgattgtctcatgacttcggagatcggggcagtctcgatggcttcggcctcctctccttcacgggtcacccttgcagtcgagcgtactctggtcatttgatgatgaattttttgcagtttttacgaagctaatgttttttacagtcttttgacgaagctccctcttttgacgaagctaattcaagatga

SEQ ID NO: 81343 - DNA, 1027 bp, Zea Mays
cactcatacaagccaaatttagttttgaaagcagttttccattcattgcccaatttcattctaatttggtggtaaccactacgtaaatcaaccttagagaaccatttagaaccacttaactcatcaagcatatcgtctaatcgaggaataggatgacggtacctaatggtgatgttgttaatggctctacaatctacacacatgcgccaactaccatctttttttgggaccaaaatgacaggtacagaacaaggacttaggttctcacgtacataccacggtccaaaaggtcttggacctatcgctaaatctccttagctcttcggggtttgcccgatatgcagcacgattgggcaaacttgctctaggaatcaaatcaatttgatgctcaatcccgcaaatgggaggaagtccaggaggtatctcagtgggaaaaacatcgctgaattcctgcaaaaggttagtcacaggcgcaggcataatgctagcaatatcatcattggaaaataaagcgtctgtgcacactaaagcatagcagcaagtatcatcagcatgtattttagcaagatcagaatttgtaacaagcattacaggagctttcaaatgaatggcttgctgattttcagatttaacaggtggttcattatttgtatttgcagctctatccttgtcaacttgtacaatcttagcaggagtcaaaggaagcaaagtaattttcttgccttatgcatgaaagtgtatgtattactccgaccatggcgacgtgcatcattatcatattccctaggtctacccaacaaaagagagcatgcttccataggtacaacatcacaattcgcataatcagaatatataccaatggaaaaatgcacgcgtactatttgtgttaccttaaccttgtcggtatcattaaaccatcgaatgtggtatggatgcggacgtgggtgtgtgggcaagctaagcttcttgaccaaatctaaactcaccaaattgttacagcttcctccatcaataataacacgagcac

SEQ ID NO: 81344 - DNA, 521 bp, Zea Mays
cttttgcctctttgatgaaggcaggcccttctagggtattttcttccatgtttgaccacatcagaggggtttggcatctccttccatacaaggcttcaaaaggtgatatcttgatgctggcctggtaactattgttatacgagaattctgcatacgacaaactggactcccaatctctgttgaaggtcagcacacaggctctcaacaaatcttcaaggactttattgactctttctgtctgtccatctgattgggggtggtaggcggtgctgaaatctagcttggtgcccatagcttgctgaaggctcaaccaaaactttgaggtgagctgcgttcctcagtctgatactattcttcacggaatgtcgtggattctgactatttctttgaggtatatccgagcgagggtggctcctccgaaggtagtctttactggtatgaagtgagctaccttggtaagacggtcaattatgacccagatagaatcgttccccttttgggtccggggcagtccaatcacg

SEQ ID NO: 81345 - DNA, 674 bp, Zea Mays
ctcgtggctgcctgctcagcgggatccggcagttgcgccactctttagtaccaggacccaggagtccttcagggctcagctcagattgctttgcgggctcaccagtgtctggatctctctactttccgtatagcggccgacacagagtcaaagggtcacatcacatatctgccagggttgtattctttgctgactttcggtggtcgatatgttgaggagtgggtccgagtgttctatgctacagtttggatcgaccctaaccatctatggatgaggttccggttcgagcgtgaggacatcactttgcatacagctcagatccgggagttattttgattccctgagtcgacgatgaggcttcacagcatgtgatatggtacctcaggccctcctcatcgtcctcacggtggagtagctcctgacacctctcacatcgccgctctgttcagacctccattcatagacgtgtctcagcgttctcctgttgacttcaccccagcgacgaagttcttatatgagctcatgaggcgtaccctgctaccgaggatgggatacagagaagccaccacacatattcaactctggctccttggtgctctggtatctcactctgtgttcaatgtggttgatttcctaatctgtgagatagaggacatagtgttggatggtcttcg

SEQ ID NO: 81346 - DNA, 408 bp, Zea Mays
tgaacttcacgctggtattcaatctgaatggtgagactatcttcctaagttcacttctatggtcaatgttggctaagtcctggttataggttgtagagtaactcatgccttagtatttcttgtaaccattcctcaaatgtgtgctggcatccagattttgcttgcagctgcaaattcaggggcatcttcaaagatggtaagggaacaatctgacatctctgggatggtgactatagttgtgtcctttgtgatctccactgtgaagaaacaacttatcacctattcaattgtcctttgctggaaccatatgggtattcattgggaccattcattggacttctctatgatcatatccgcaatggagcatttcggaaataagttctttatgcaaataatggtcgtttcgcc

SEQ ID NO: 81347 - DNA, 972 bp, Zea Mays
ctgctctccatgccagtcctttgggagggcacaatggttttccagtgacttacagaacattaaaggaaatgtttgcttggccacatatgaagcagtcagtctatgacaaccttacagaaagcacctatagaagctccaaataccagtaggcagtagctgaagttttttcttccttctagcacatccaatggtatcctagctcctgaatctgttgacattgccaacctttctatgttcatgatttctaattgtttcttcgtgcttattgttacttagctacttcagtcatgtccggtggatgatcactcattcctctatttttgcattgctaggataggatatttttaatgaattgcagtaccctgtcttagaaggggttgcaatagacccaactcattggctttcaagaacagagagtgcaacacatccatgactatgtatgaacagcattggtgaaagagcatccccctgtctcaaaccacgctggtgggaaataagctctccgggcattccattcatcaacaccctagtagatgaagaacacaagagctttgagatgatgttacaccagatagggccaaaacctaggtgcccgagaacttcaagtagaaaaggccacgaaacagaattgaaggccttgccaatatcaagtttgaggaggattccggatagcttttgcttgtagatggctttggctatttgctgcaccagtaggaaattgtcatgaatacttctccctttcacaaaggcgttctgatttggcgacactaactcaggaagcctggcagcaagcctattagccaatattttggtaacaagttttgcaaaactatggatcaggctgatcggacaaaaatattttacttcaagagcctctatcttttttgccagaaggatcacataagctgaattgaggagatgtagtttggacatcaccatggaggatcacatttaaagcaaccaagaaatcag

SEQ ID NO: 81348 - DNA, 316 bp, Zea Mays
aatgacgtcaaaaggattacgtcaaccaggggcaacaaatcaagctcttaccaatggggaacaagtcccttttgtaaggtcctacccttgagctataaaaggataggaccccttccttcttcccacacacacacgcacgagctgtaacacatctcttaaagcaatactacgatcagcactacagtggactatggtgaaagcctaaaccagtatacctctttgtcccgaccctatgttcgaaccctaggtggttcaccattcagagtgagtccgcgctagcatcccttcccaaacacaaattttattttctccctgg

SEQ ID NO: 81349 - DNA, 413 bp, Zea Mays
cagcactacaagggtcaaggagtgaagaagatgacatgggcactggccattatcgctgcctctcagtcagtctgtgagctagtgggagtgtgacagagaggccagccggcccggccacactgcacgtctgcacgtaagtactccagagtccagacgtactgctgcccgcgtcgaggagagcgaggaaacagggaaaggcgtgcatgtgcatgcatgcctgtactgtacgtgtacgttactgctatgctactgcctgcagatcgattcgcaatgaggtcatgtgtctccgtatgcacggtcgcacggtcgaggaatctaggttgggactagtataagtttcaacgttcctgtcgtgttattcttttacaaataacttctacatctattttaaattaatctaccccatgtctgtc

SEQ ID NO: 81350 - DNA, 323 bp, Zea Mays
cattaggagaccatccctttcccttgggaacgacatacaagcgtttcaagctgcttttaacacagtatgcacttacatgggcaccagggacttagtccaggaaacatattgcttatagagtgtggccgctcggaagtggatgggagatgtcgaagaaaactgccgttgggtccagcgaaggtggtttggtctatctgaaatatacattcaagtacaggagccagttcgatgagccaaatgatgactggctgaatgccatcgaagcaaccagtgatgaactgcttggtgcttactcaagggctgaggatgacgctatggcaaca

SEQ ID NO: 81351 - DNA, 488 bp, Zea Mays
acacataggtttgtagatcgttattttgttggtcaccacttgttgatcatcccaatgatgtggggctcattctttcttttgttattatattgtttggtcggtgaaacgagaggactttgcatttgtttttctgttgcttcgtacataaaggtatataagattatgtactccatctataccaaaaatagaagtcgtttataaccatttaggccgcgttcgtttgtgcaggattaaaattacgcacatttctgtccttgacccggatatagtgcatccggtgatgaatccaggtctggaatcaatacaaaattgcagaatagctcgtcctttttagcctagaataaagacacttgcaacgcctgtttgacagccacgacagtactaacaagcttctatacagcaatggcagcactaacaagctgtaatatacgcaatgtcttgccgttctactagctggacttcggcacgggctgcccaagctacttcat

SEQ ID NO: 81352 - DNA, 429 bp, Zea Mays
cacaaactcgataacatcaaataccctattcaacctcttttttccccgagctccgaaggcaattgtcatggcttcatcttcggcctttgaatatgctccaagcagctcatcactagttgcctctatggcatctagccagtcatcattcggttcatcaaattggctcatgtatcgaaaggtatacttcagatacaccaaaccattttgtctggagccagcggcagcctccttcggcatctcccatccatgagcaagtggccacactctgtaagaaatatgctcttggaccaagctcttgtgccaatgtaagtacacactgtattaaaagctatctagcacgcttgcacatcgtttccaactgcaatggccggcctcctaatgtcgaagcgagaccatatagggcgctgaatgaccccttttatatcttcc

SEQ ID NO: 81353 - DNA, 274 bp, Zea Mays
ccggtgtcgaacaacatagcagagtatgaggcattggtgcatgagctacacatcgtcatttcatttggcatcaagcggttgatggtgtatggggactctctggtggtaataagtcagatcaacaaggattgggactgttccactaaatctatgggcaagtactatggtgttgtctaacaagtagaagacatgtttgaaggcccggagttacaccacatggaaagggaccgcaatttggcagcagatacactgtcaaagcttggttccaacagag

SEQ ID NO: 81354 - DNA, 1251 bp, Zea Mays
ctgaattttcagactaacagtggactgacatcaacttcaagctcaattctgagcatgatccagtgctcaactaagtttaatccctatagtcgaattgtagatggtttgtagctctgaaactttgctacagagagtggagtgagttactagagaaactttagagaaatttggacctaaaattgctctgtcaggttcatctaactgaacttcctccatggtacagtgctatcgggaggatcagatcgccagcgcaacggtcctcaccgctggtgacctgctgccgcaatttgggcttggctaagttggatagcactttgggtcacataaatatccttgccgtggataactccggccataaacaagtccggccaccgtaccgtgtatggcgcggtggaaagttcgatgggctcgccggtaaaccgtcgtcgcatggccttatgccacatatccgagcaccctgtcgtatcatcgtgactccttactactgtctcatcaacgccggtgcggttgccacggtgggggacacgaagtcgcaacgacagtgctcttccttatctccggccacccgcacggctcggccaaattatgcgccaccgacgaagctgcctataaattgagcccccgggcagctgcgttaggtcatcacgaagcccaaacacccgttcttcccctcgattgcccaccataaccggagaattccccttttcccccaaattggtctctgccaccgtaaagcaccactccatcgtggccagtccgttctggtaaggcaccatccaattcgcccgttgttctcatgtccctgtatgctggtgatgctctccaaaccgtccaattaaactagaagcccaccaatcactgggaacacgaactaatgtctatagctttcgctgtcctcgtgggcagagcgaaatagatcaccaaatatgaaattgattggggggaaaccattgataggccgtgaatttggtgtagaccgctcagtagcacctatccttgccccgtttggccggtccaggagctcaccggagctctgccgtgccatgcatcgtcggggacttcgacgtggaaggaaatagaaaccgaaggaccttagcgcaaactgtcagcgactctgagtaacagtgaaggaacccattcccagttagcaaaaaccccgaggccctttttgcaaagctgccagcgcgggcgcaattctgtctggacttgggccgcctgggctgaaaccggcccagtcctgttgaatctttt

SEQ ID NO: 81355 - DNA, 300 bp, Zea Mays
gggggtcttagaattctgaagctgtggcctatggtcgggaactctagatctcgccgatgtcgagctttgtacttcacatggcacaggcatccatcataggcatcttagttttgggggtcttagacgtatgaagctgtggcatgtggtcgatgtttgagagcaaagttgtctggcaggctccgaaccaaacaacatctaagcctatttctagcggctattctatcttatcttctacttgatcctttaatttaaacttcatcctgtaaacaatgataatgtacttcatttcatgacacaaac

SEQ ID NO: 81356 - DNA, 671 bp, Zea Mays
gcatgatcggacctgtggagagctggctacggtgagctcacacagtacggtgttcttggtagatttgggggaaatcccaaattagagctctttgttggacaaatccgagacacgaatgggtgcgctggatacgtgactacatagcggagctgatggcatgctcaatttatagggcccgagggcggtggcgtccaattttgtgaaggtgtgctggcggccagagcgagagaagagttactggtggcgatctatcgtggcgattgtagggtaataagcaacgactgtcactgggtaacgaccacgactcacggcgacgtggtaaggtagccaaaggcgtggcgtgaccgagaaaaacggcggtggccgcggtaatgaccatgcggccacgtcactggcaagtgaatgggtgacagagcggctacagggttctgagctcatccaagatgaagatttttccatggtcgatcataatccatgccacagagggcatgaatcgcagtgttgacgtgaattcgggcgcgctggtcgtcggcggcgagggggatgaacctgaatgatgtgcacccgttgggtgattgcccgatctttcgatgagaaggtgtgtaataactcgattgggggaggagacgacgttcacggcccgactacagccttccaaagacgctgcgcct

SEQ ID NO: 81357 - DNA, 1000 bp, Zea Mays
aacatatttaatcatcaactaatagtctccaactttgagcacccaacaattagtgcttaataaagattgctaaaactaaaccgtggatcaacaagcttcgatatatgttttgctttgcctttacctacaagcaagggacgacaaggggtagtgacgtgtagcttcgtctccaaacaccgtgatttgctgaattccttttccattggtgcacgtaatagtcatagtcctcgtcaaatatcatcagcagattctcatacgctgctaagtcaaaaggacgattcagtaaaaaaaaaaggcaaataattaatcagtgttttccttgtacgaaccaactcttgtgcacccctcactacctgctgacccctgctgttaacttctctaccccttttttgtctttttctcagaaagtcttgggcacattcactgattcacattagtacattacacactccaaaacatctttatatacacttgcgataactcgccaggcaccacttcgtcctctgttggaacacatttgattcctgtccaagatttttcttgagcaagcaaaggaattgaagctacaaatacttattttggatcctaatgaccgagatggtcagttctgtgcttgtgcaggagacagtcagccaaattctatccggtatagttcgaaggtacgagggcaaagagaactcgactccaaatgacgacctggagaggctggagatggcgcatatcaagctggaggcagttctcgagacatccagcaggtggcagatcactactggttcaccgctgtcgcggtggcgcaagaagctgaagcgggctgctcaggagtgcgacgacacgctgtgcgagcacaagaagatggtcctcgaagaagaagagacggaacaggaggtgaggaattcttccttccccagaagactagcgcacgctaccagatccttcgttttctcagccttgggccgccgcagcaacgacggcgagtgcagctccagcaggtccgccgtcg

SEQ ID NO: 81358 - DNA, 948 bp, Zea Mays
ttggtgttcaagtgagttagattgagagagtagaaatcaaggagaccttggaaaaaggggaaaacaggcaacccaggccccggatcaagaaagggacgaaaaccacagactcatgggtatcctccatgggcacggaaatcccttgccaaacacgtcaggaactcgactccttcgagggaagaacaccaatttcgacaagatggagcaaatcgaattcatagacaatggaagcatagttaccgcagaagtggagttggctgctcggatcaatagggggtgacggccacagcgccccctgctttttcttccttggcgccatgagacctcacgaaagcatgaaatcaagcgtggatttgccaagtcacgagaatttcataggggagagttgcggtgaaagaacagagctagggtttgcctgccaggaaccgtcagacagcgagtgtgtatatgcgtgtacagtgtagacctggcacaagcgcaagcacgagggaaacatatttttagatcgaatggaataaatgctaagtcagatgagctaaatcagacaggttaagtcggacgggttcagccggacaggtttagtcggacgaactaagtcaggcagaaaacacacttctacgcagaatcaatcgagagagattagtcgagacacaagaaatcgaatagaacaaagaactcaataccaacaatcaaatttcaaatgcagagcaaaaccaaaggaaactcaatattctagatagataaaactagcaagctttattcacataagctggaggaccattacagaggaagggtcagttcattatgaaccgacccctgcaaacgattcctactcactactacacctaccttctactactacaccgcactatactaatatctaagctggtggcgctttgccaccgtcgttgccgcccctgccgccgtcgcccttgccaccatcgtctt

SEQ ID NO: 81359 - DNA, 712 bp, Zea Mays
gataagacttcgagatgtccttctgccaggggcgtcctgatactctcatcgcagacttcttcagatcttcgggagagactggccactacccagacggtgatcaaggctgccgaaggcgaggtggctggtcttcatgctcgcctagtggtggcagatcaccttgttgtgggttagtgtggtcttctgctttcatgaagaccccctttggttgtccctgactttttccctttttcctatgccattcccagcactagattcaaagtcatgggccttcgcgagggtgcagacgccgtggtcgccttcgtccagggccagggttccgattgaggagagtgccttctcgacgtagccaacagggtgtgcctagtcgtccgtcgcggcgcctactgtggtgtcgctggtgctctggcctttgtgcagttctggtcgggctaagaggtcagcactgggtaccttttggaggacaagaccggtgaaagtgaattcatcccttttgtgggttttggtgatttggataacaacacatttaaaggtctaacatgtttgctaagagttgaacatgaaatttagtatgatgaacatacttgaatagtgtataatgaccaatgaacaaaggttcaacacaagattaaataaccaatgagacaatgcaaatggatataatatggtctctatattggtttgaatatatggacaagacctaagaaatcac

SEQ ID NO: 81360 - DNA, 299 bp, Zea Mays
gcattattctctctgtgtgtgcaatgcccctgcttggcttctctgtttggacactatgatagatgatgtgctcttgctaaatgcttatgttttgagtctacattgttttgtactattagaagatgaggcatgtattttagctgaaatcagtgtcctatcaaaatacagagtgcaagattgagttattgacacttgaaatggtgattaaaactaatttaggttcctattttccccctttaaaaactaatttaggtataacttgatggaatgggctcattagtatataccgagaagagttc

SEQ ID NO: 81361 - DNA, 625 bp, Zea Mays
tggaacatggatggaaataataaacaactctccctacaaactagaagatctattcctatccttatgcaataatcccttataagtcgagtcatagtgtaattacggagatagagttctgacatgtagatattgtcctaacatatgggtcgagtcctgccgggatccaagtccaagtcctttgactgagcttaagtcttgtgtccaagttaggcccacatgtcagtatcttcattgtcaatgtctctctggtatccctagtgtattccctttacaatgaccatagaccccactacccactcgtgctccctgtacgcatgccctgccttcatgcacactaccgccacctcacaccattgtagcgcacccaccccacatgcatgtagttgttgtgaaaccacataaaccggttggccacaagtgccaactcctcaccccaatgcactcaacttgcacctctgaaataaacagcaaagaggacatagcgaacaaaagaggtgaagggttagttaaagaaggaccacctcctaacaagggacatgttgggtgcatcaggattctcaatcttgactccaattttggtggcccgagccatggtgaatgcaacaactttattttaatatagaat

SEQ ID NO: 81362 - DNA, 336 bp, Zea Mays
atatgggttcaaacctattgctccgatagatttgttgccccttccattgcaggaaagaaccaatatggaagcttccaagcgtgttgcatacataaaaacgatacatgagaagaccaatgaagcaattgagctcaaagcagtgcgcaaggctgcaagcatgaacaagcataggaagaaagtgttatttgaaccaggggacttggtttggattcacttacgcaaggagcgtttcactgatcaatgcaaatccaaattgatgccacgaggggatggtccatttcgtgttctttccaagatcaatgataatgcatacaagatagatcttcgtccaagcta

SEQ ID NO: 81363 - DNA, 585 bp, Zea Mays
aagtgatcttatcatgcatagcaacaaaaccaataataacaaagcatgactggtgtttcacatgtaacattatcacataaccaagtatagcaatagcaaatatacccaattataagtaatctaggtataaacaaggtcaacactggctctaagggtggggcaaaggggcagccgccataggcctcataatctagagggcctcattccatgtacacacactagtatattatttatgagttttttgcatgtctattgcatgatttgattacgaggatcacactggaccactgtaaattagtcttgaagcgtcacatgctatgcgagaccctagacgtctactcgtttttatgcgctgttgcatgttcttggtggcttgcggaagtacagatccacgaacacatttggcaccatctgtcgcttacacgagcgtggagccgtgaagaggatttgaaattctattacattcgttttatgtcgatgtcacacaacaatttctgtggtatagatataatttttgtcataagccaacaacaattgaaatacttgactgcaaattagagtttaaagatttgttcttttttattt

SEQ ID NO: 81364 - DNA, 2987 bp, Zea Mays
cctagcaccgcccagttctcagatcgaaacgacacaggtccactttgaatcttggcgggctagtttatgccactattaaattggtcgtgcctcggaccggcccgccagacacgactcgtttcgtcatctatagtccagtacatccatcctcatagtttctgatctcgtgagcctggaaaaaaagcaagagaaaaaactttatcacgtctcacccccacaccatatacctcgccacacgtctctgcctctctcctcaccatatcgtcgtccgtcgtctcaagggcaaaatcgtaggtgtaccatgaggtgtagcccactccgtgtgatccaaaccgtggagcacgcatttagatccgcgtgaggcgaactactgcatcctgccgcacgcgatagggatcaagacaataattcagaaaatccttgtcggctaggtaccgaagggaataagtatgtcaccgaagggaattaataattctcgtcagtattaggctaattctttccgatacatggctaatgaggagtggtattagtgattaattaattcccgtcaaccaccaaagagaattaattaatactcgtcggtcatgtgtagtcgacatttaacactagactgcgcaaactcctgtcggtcccgcccttggatgacctggattataagtacgtagatattgcttgtggccaacggcaattaagacattatccccgtcggcttagatagctgacgggaattaccccacgatcaataactctcgttggctatggtcaagccgacgggagttatcctatgttgttgcaaaccagtagcctattttactaatttctcatctaaccacacaaacaacaagcttatattgtatatcaattcccatacatcacaaacaccattcacaattcacatacatcacatcatcaaatacttcacattacaaattcttcaaacaaacacatagaagcacatattcatttcaaatcacaacaacgagacaagttaaatattttgttcaccaaagcacataaaatttagtttaacacacaccattcatcatccataaccaaagacaaaccacaagtccaaatataaaaaaatagcatacaatggtttagggacaaccacttggatggttcgagctttggtcactgccaccaccaggaggagggtacacaaagagggactcaacaaaagtcgatccagctggttcagttacactcccacccattcctagtgtagcctatgtaagaatgcaaatatcaacaagttaagtatacaaatgtatcaaatcataagaatatttcgagagttacaaaacgtatctggtcttcagttgcaggtatatatgtgggggtgatgattgttgcatccccgatccctatttaatcgacatttgattaagtttagatacaattcatgtgttgctataataactagatgaaattatacattagacaatgttataatagaatttgctaaagattaccatattttaccaatttctcatacaattcacacaaacaacaagaatataatgtatatccatccacatgcatcacaaacaccattcacaactcacttacatcacatcatcaaatacttcacattacaaattcctcaaacaaacacatagaaacacatattcattttgtcggtgttttggaccaggggtcctcaaccaactagtgaaacgatattgcgtgccctagacccagatggtgatttgagttgacacaagcgatttatcctggtttggactacgagaggccatacttccagcagaggtgggatgatgcttatattactcacacaaaagtgctcgtggtaggggttacaagcatagcgggagaggggtggatcctaagtcccagctggtgattgaggcaagtcccaataccaggtaggggagaagaatgatcaagtgttcgcctgccttgtgtctccctgttccttgtggagccgtgaactatcctatttataagctcggggagagttgccttgtagatgggagccaactacatgctgtgaaggggtgtcttcataacctatagacaatatggccttgtactttgccgttgacttgggcttgcttgttttctgctgagagcagaggccgaggctgagggcttggtcacgtacccgagccccctggcgtgggatttcccataccgtagtggttgacatagtgcctgtcatgggaaaaagcttcttatgggatgcgtcagctctactatttctgatgatgttgggaagtcctctgccataggtatcgagggaagaactgagctcgggcaaggcggaggtccgtctgaggttgcgaccgagtcttgtcttgagatttgatgacgtgtgccacactcgatggagtggccttccacgggattcacaggggacaggtagccgaggctgggttcgagcgaggcggagcctacgcccaaggtcgagttctgtattgggcgaggcgaaacttgcgcccgaggtcttggtccgcatcatgtcatattacgcgtcccatcaagggttatcaagcggcatgcacatgcgtaatgatgttggtgaatctttgataagaccgcggtcctgttgaacgattcgcctgtagcccaacgtgaggtaggtgtccgcattgaatgcggttgtctcccaacggccctcgggaaagttttgtctttatcgcctaaggcgggcacggacaaggtggacatggctgccctaggatgagggagcctcagccgggacgaagattctcccgagcttacatctcgcccgagacaggcctcgggcgaggcggagttttgggaagacccctgaggggaacctcaggggagacagagttttggttccttattctaggaggacataccttgatagagtccttaggattttaggtgcgttttaggggcctaatctgggtacccctaattatcgtacccgacagtagcccccgagccttccaaagaagtgtttcgacacttgtttagaggttcttctgttcttt

SEQ ID NO: 81365 - DNA, 592 bp, Zea Mays
cttgtagtttccaatccatgaggcttaggtagatagtcactatagcaagtttgtagagctaaaaaaggggtaaaaacttgattaagcaacttggtcctagaaacatttggaaccaagagaaaagtctatccaaagtggagctaatagattagagattctgaacataagtttagaaactgaactctgggtttccagtgtgttggggctgagtttgaagctcttttatgagcaatccatggagctttggactaagagttttgtagtaaagtgaaataccatataagggtgaacaagatcttagaatagagttggacttggtgctgtacaaaattgggagtaaaatgctctcaaaatgtccctgccagtcggtttgaagtcactaaacaagttcagtgtcgcgccaatgcatggcatctcgcccccggcaatccttgcgccgtgatccatgctcgggttgagatgagtgctcggttgtgagtggataacaaggaagcggcgaaaagatcataagggaggtgaatttggtctctagcgagctcatccaccgtggtcgtgtggcccgcgccgtgttcttgcaatcactgccggaggt

SEQ ID NO: 81366 - DNA, 653 bp, Zea Mays
atggatcagagagctgccatacgtggtttggagcctgagaactcaacccagtcgggctctgcatggaaataccccatttttcatggtttatggattagaggcagtgctgcccgctgacctaatcttcgagacaccgaggttaacttttgaaagcatagccgaagcagaagcaaccaggatggaagatatcgatgtgttggaggaagaacgattgaacacagtaattcagtcggctaggtaccaacagaccttgaggcgctaccatgataaagctgtgcggcaccgatcctttgcagtgggagacttggtccttcgctgaattctaacggggaagggcggcacaagctatcaccactatgggaaggaccgttcatcatattagaggtcacacggccgggatcataccggcttacttagatggacggcatagaagtggggaactcatggaacatagaacacctcagaaaattctatccttagcgaggcctcaagattcttgaaggaacattgtactttttaatctgaggacttcatcatcaataaagttttcattttccaaaggcattcagactcttgacttacagctgacttcgattgggcttggcttgaaatcagcatgtttacttgacttagggtgaccactataacctact

SEQ ID NO: 81367 - DNA, 601 bp, Zea Mays
gtaagttcaggtgccctggcgcaaaaggtcttaagacacagatgacccaccaggtggactgcgggttgttttcgtgattctgctggggcttttctgtaaaacgcgtatggcgaagaggtatggcggtttacttgctgtccggtcagaaatagacgagcgagattaaatcaccagcgcaacgaagcggtacacatctgggattgttggatcaggactaaacggtagaaattttatgaatcgcgatccgcaaccggccattgtatttaatctaacggtccggatgccccgcatccgaaggggaatcctaatcaaatccgaaccgtcaatagaagatccgatggcgcacgcgttaactcagctgcactcgcccaactccggccaccggggtaactctacgcggcggcgccatcgccggctttccaccattagcgcccctagctcacgaccttcactcggaatactactaaatgaataggataacattgcgaacgcattggtaaggttcttaccggaatccgagtggcgttccgcccggtccacggcgcacgacggagatgcagcgacgacgatgaatccgcccagtcacgatgtacaacaacac

SEQ ID NO: 81368 - DNA, 653 bp, Zea Mays
gaaagggatcgcaacgcagcaacagatgcattatcaaagctgggatccaaccggtcccaggttccacctaggttttcgtccaaaaaaatatagcagccgagtgtcaccgcagagcaggctgaggaatgccacgctttggaccaagcagaaacagatcccaacgactggagggaatcaattatcaaatacataaaagataaggaagaactagatgacattgccacagcagagcgcatcgcgagatagtcggcccactataccatcatagggggtatgctatatagaagaggtgcaggaggaatcctcataatgtgtgttcactcggctactggaaggcagctgctggatgaaatccatgcggggcaatgtggcgtgcatgcagcatcaaggacattagtagggaaagctttcaggtctgggttctactggccaacaacgaagaatgatgcagcagagttagtcttgaagtgcgaatcatgccaattctttcaaaacatcagcatctacccgcccaacagttgcagactattcctgtaacctggcctttcgcatgctggagggtggacatggttgggccattcaaaaaagctcaaggaggatatactcacatactggtcgccattgataagttcacaaaatggatagaatacaag

SEQ ID NO: 81369 - DNA, 366 bp, Zea Mays
tcccatggctttaagctttcaaagccctagcatcactgcttcgtattctacaatgttcattgtacactgaaattccagcctgccgcatagcatgatcttattttttatggtgaaattaaaactgttgtggcacctgcgccgaaggtctcccatgatccgtcatagaatactgtcaaaacttcttcatctatcgaatgcacatcgtcatgagcccctggtattcagtcagcaataaagtctgctagtgcttgagattggattgaggatcgatggacgaagtcgatagtgaactcattgagttatgcagatcattttccaacccttcctttgccttctctatttcttataatatctttaaagggttga

SEQ ID NO: 81370 - DNA, 396 bp, Zea Mays
ggggaagacagctcgtgcttcgacaggcgtcagccctagcgcagcttcccggcgacggcgatgagcctgggagctgaggtgatcgagctctccagcgacgaagacgaggagcctgtgcccagcactaccgctctcatccaccacgccccctcctcccctcccgacgtcaagccgcacctgctcgccgacgtcgatgtgaagccgctgcttcttctcccgccgccgctccaccccccgggctacggcgcgctcgtgcccgtgaagaccgaggagcccgtgcccgtggccaccgtctcgtcaccgcccagggcgctcccgccgccgcgcctctgccgccagttctggaagtccggcgactacgtcgtcgcgcgccgcaaccccgatgtggccggcccc

SEQ ID NO: 81371 - DNA, 786 bp, Zea Mays
ggaactttggggcattgtaacttttgacctgggtgcttttagctctgagattccatagcaaggtggtagaggtttgttttgtgatcataattggttaggcttggtcgacctggttcaggtgggcagtagaatgttggactcgataaacttcagtgtggatttttaactataagccagatctttatgcacagttgatggcggttagttttggcctgtggtgttgtggatatgtgagggtgtctgtggggatgtaaggatagaccttgagttccaaatatctaagcctaaggaagtttataacttatcagacagttgctgtcctgctataatatgagtcctgcatagtgagatggacagacactgcgtgtcctgtttcatgcaactcctaaccctcggtgtgtgcatagtgagatggacagacactgcttgtcaccgttcttatttctgttaccgtggccaccagtgtagtattgttcttcctgtcttctcatgcccctgatcctaaaccagcgagtcctttatccctctctatcttcgtgctcgtaagagctttgctgtgctgttctccctgcctgaactcgccccgcatcgtcgacggacatttagattgacgaacatttaggtcttacgaacatgttcttcgtgctcgtaatttctttcttatatttttgtcgttgtcgtcgctgttccccatcctggtgaccacgccgaccaatgttcccaccccgccgtgaccaaggctttccaaggtgatgcttgtttgttatgttcatgttccctcacccc

SEQ ID NO: 81372 - DNA, 623 bp, Zea Mays
ttgggaattacactaagaaggaggaccaactaatgattgttgccttcagcacacaggagaaatgaaggctaaaccgagtgacggatgccctttgcttcgagtatcccgattatgatagacttgacgaaaaggtcaggggagtgaagaagaaaagagttgcatgcatcctgaaaaagacaagcatagagatatgtcgagaaggacaaaaaggaaaggttataaaaaatactaaagttttcgccagaaccttcaacatctaagaaacagaagattgcagaatcgagtcgtgatgacgaagagaaatcttctccaccgaagcactctgtcgataccccttcggcaacttctattagcgtaatggaaattttagagataatgactgaacccttgcctttacactaagaagcttattacagccaaagaagaaatatgctagggacactgccgagcacagatagaaaaggggccttcggcacccagtgcaggaaatgcccagaagaagcgtcatatgatgactgtgatgacgactgttcttgataccccccactggcaattcaaaagaggactgccccttctgccgctgatgaagctactgaagtgcctcaatagaccgaaaacagtag

SEQ ID NO: 81373 - DNA, 483 bp, Zea Mays
cccaaaccgaggcacgagtccacgggttgcagagaacgcgacttgtacagatccaaatgggtcgatcagatctgccgacagttttaacaatataccacgagtatatgacgcagagcacaggatccaagagctccggaacgctcggttgcagaaacacatacaggacgagctgcagctgcaagcgacccaaggacagatgcgttgctctggcacgtgccatgtcataggctcaaagcaagcaaaggtatgttgcacgaaaagtgaaagggggcagtgcagagggcagactagcagagtcgcagtgccctactgccgtcgttctccaggcacgtcccatgtcgaaggctcgatccgcgagaacgtcggtgccgcagtctcggaaaagaaccatatcctctatcggtgtggcacttgcagttgcaggcggaccacctgtcgtcagagttcagttcagacaaccatcgtggattcatcatgtactac

SEQ ID NO: 81374 - DNA, 428 bp, Zea Mays
tgatttactatgcgggagcgctgtgctacgtgtggcttcctgtcgttattgggtttgagtgatttctcacgacctatctatggtataacaactcattgtggtaggcgcgaagctggagagaggaacaaatctacgcgtttcgtacgtgacgtatgacacacgaaactattgctgtgaaggaatacatatatacaacaccgagtttaatcgaagcaagaaataatacaatcacgcaattttatagtattgttaaatttaatttctttgccatatattcatatgtcgtgcttaagagagagcgaacacgtaggtttccctcctgatacaattccgtagccagttgacatttatttttgtttggtccactgccttgatcgtccggcgatgcatcatgcatgcatggtagcaataagcttcttaatcaagga

SEQ ID NO: 81375 - DNA, 1177 bp, Zea Mays
atttttattaaattctatgaaaaaataagaatctagcaaaattggttctacatttttaggatttttctacaattttctagactttttttaactctagcagaaaaagaaaaggaaaaagtcaggaatagtactggaccgaatctagcccaggtcggcccaacaacatcagatacgcgcccgcgcgcgcgcctgtagactttacgaaaacgcccccgaggtcttaactaatttgcaaaacgttctactgaatattctaagagtcactgacatcttacaccgaggtccctggaacttcgtttcttctccaaataagtccctgaccacggtgcgctcgccgtcgatccccgacgcggcatgtataggccatggccggtgacagctacctcgtctagctaccgggaggacataaccgaccaagggtgacctaggaacactcgccaatttggcatgaacacactgagaacggtctgcccgcgtgcacggcggaaaacgtgaccacgagctcacattcccgttcaaccctggccgaattgaccaaacggtggccacgatgagcatccagtgcataccaagttgcgaaaacggcacttgagaggcgtagaaccttaccagagtgggctgtccacggacgagctatccacggcggcttagagacccgagttgggggaaaatggtgtcgcggcggctctgggcgaattgggggtggagattggggctacacggccgttaggaactgtagtttcaccgtgtatactcaatttgagaggaggggcggaggatgtgcgaatttgggcttggatcatcacacttggtggaggtgtgcataccccgccgtggatcatggtgctatttatagccacggcgacccgaccagctatctacggccacgaataacttcattagcgcatgcataccacatagggaagaggcacagtgagggagatcgaggcatgggtgacaccgcggcaaaagttactgagtcacgttggccgccggtgactaactccagccacgctcgactgggttcgcgggattgcgccacgttcgaagttatccatccccggatcgattcactggatcgcgcgagcccatcctattcaacaatggccctgatcttatcccctgtgttcttcagatatttcagtgctttggatcttcaggatttgtctgaaccgac

SEQ ID NO: 81376 - DNA, 371 bp, Zea Mays
tatattaaattgataggcaacttcatcttccacctcccacaatcacttgtaaccttcaaactcagaggaatccaatactcagcaccacacagtacgtagggtaatacgcacttgcgcaacccgaacctgtataaatcccccgtgttccgacgtgcccctacacatatcatcgagtagcaatcgacgttgtcgtccttccaaaagctctacgcgggttaccccgtggtgcgccatcgggactaaacaccggtagtgtgcgcgtacaaggaacaaagtcctcatagaactcgaggaagacggttctaacgaccggatcagaaaatcagcacacaaataaaaacatttttgattttttagaaaagagtttaaat

SEQ ID NO: 81377 - DNA, 2205 bp, Zea Mays
aaatctcaaggtgtaggaacgatggctaggctggcggacgtcgtcaccgcggctggcagcttgccgagccacaatgaccgagacaaccccgcccaactgcagggagactttattcctcgatggagcctaatacaaactatggtatgcctttatagtatgaggcgaccacttaaaaaggaactaaataatttattctggaagtaaactaatgcatatctcttattttggaagtaaactaatgcatatctccctgtaataaaaactttcctactaactcgattgctagccactttgttgatcacttccctttcttgctcctgttgctccttgggctagatcctggcgctggcgcctctgatattggcagcccacaaaggcatcagtaacatttcccccctccacaagaaatagctcgtccgcgagcttaaaaaggatacttctgtgtgaaatcttccaattgttcccaagaggcatctgaggctggccgacccacccattggactaatagttcccaaactcctctattcagccgagccttgagtacctttgtccggtgtaggaattactctgccatgcagaatttcgggtaagggtactatggctgttggtgctgtgccttcaaacttttttaacaaggacacatgaaaaacgtcgtgaatccgagcacgtgctggtagctgcaacttataagagaccttcccaatgcgacttgtcacctggtatggcccaaagaagcgaggacccagtttcgacggagtagccgcggtgacacccactgctgtctgatgttgtaaacggagccatacccagtctccttcctggaactctacctctcgtcttgactgatcctgatgtcttcacaatttgtgcttgcaccagccttgctttgatttcagtcagaaattcatcccaatcttgaagctgttgatccactgctgtaaccttggcgatgcctggatggtaagacaccaatgtcggaggctctcgaccatatactacccgaaaaggggagcacttgagggtggtgtggtatgaagtgttgtaacaaaattcatcccatggtaaccactgtagccaagttcttggacgatgccctgctaggcagcgaagatacatgataataactcgattgaccacttctgactgtccatcagattgaggatgaaaggcggaactcatatgcagcttgacccctgctaagcgaaacagctcggtccaaaacgcactagtgaaaaccgtgtctcgatcactgacaatggagcaagccaagccatgcagccggacaatgccatcaaagaaagccttggctactgaggctgttgtgtatggatgtcccaatggaagaaaatgcgccatcttggagaaccggtccaccattatgagaattactaatttaccgcccaccttgggaaaaccttccacaaaatccatggaaatatcactccaaatacctgctggtactggtaatggttgcagtagcccggcagggtgcaagtggactgacttgttgcattgacacaatgagcagcccttcacatattctctgacccgttggagggcatgagcattatagaatgtagcccgccaacggcgcaccgtcttctcgacaccttcatgcgccccatcatgggcgtcggccaagaggagtggccacagagatgacgcatttggcacaaagatcttgcctttaaacagcagcaacccatctacttcaatccatccctctttggtcgtccctgctgccagctgagcacagatagtctccacttgggaattagtggtcgcctcatctcgcaggttgtcaaatagcgagaatgttggtagtgacatgctatgcagattgcccatgggttcctctctccgaaacaaggcgtctggagcaccattcaacttgcctggacgatattctacagtcaaatcatagccaaataatttactgacccatgtgtgttgggtaatggtggagagctgctggtctaggataaacttcaagctgtaatgattagtgcacactgtaaaggcaagatatgggcgccaattacgcacggccttgacaagatcgattagctcgcgctcataagtgggcaacttctggtgatgtggcgcaactgctcggctaaagaaggcaattgcaccatcaccttgatggagctcggtgccgaaccccgcccctgaagcatcacagtccaccatgaagcgcttgga

SEQ ID NO: 81378 - DNA, 297 bp, Zea Mays
ttgatttttccattgccatatgaaaaaagttgcacaaaacaactgttcttagtccttcgttcattcttgttctgtgcttataatacgccaataggatggccaaattttgttttacgcaagactgatattaaaactattgtgtctaggcttgaggtctaaacttgtgtacttaggtctgcacatctggtactagatctattttaattaagttatatgttttagtccttattcgtaattctcataacttgagatccacgatgtattattttcttcagtgttctataatctatattattt

SEQ ID NO: 81379 - DNA, 831 bp, Zea Mays
gcaagcatggcgaagcccggcgatgcagatgagagtccgcaagaaacatctgttgttgacttgttgttgcttccactcgggacatggatagcgagctggcaaggctgagtacccacgcggcgtgggcctagctaggtggtgttcgaccgacgacaagtacaagcacagtgagaagggccttatgctccaggtttgggatgcgcgaagaagacatcacggtggtgcagcattacccagaggatttcttcatcaccttcgagcaccagcaccaccgtgacgcggtggtggcgtgacacgaattcacctacggcaacattgacattcgagttaggccatggcagctccctgttcatggtgaccgcatcaactttgactaccatgtttgtctctgcctcgaaggcattcttttgcatgcgtggaacgagggcatcgccaagcgggcggtggctatgagctgcgtgctagactacgtcgagtctcaatcactacaaaaggaggacacaaggacgctcaacctctgggcgtgggcgtggaacccttcagacatcccaaaggtaacttggctaaccattgttggcaggaacatcactgtccacaacatgccatcggcgggacaaagtggcttaaccttcagggtcatcgtccaccttgaccttgtggagggttttccgggcaacgaggatcaaggaagtacgcgtgcgttcgactggaggcttggagttgttgatggcgagagtgctccacgcgacatgcacgaccctccacctcgatgtaacgatcatcaccgagacgacgatgacaacgaccgccgtagacgtcgcctacaacgtg

SEQ ID NO: 81380 - DNA, 527 bp, Zea Mays
tagcatatgtgtatttttctttttcaaaatcatttatttttcaaactgtatgttcccactgtttgcactcgcatgtatactctccagcttatatgtccgctgcaactttgaattggtgttatccccacacaattttattagacctttttgtgtgttgtacgacccaatcattatcaccaccatctgggtcagtcactattttgtatgtagtggtatatttagttgattcttcaaatctattcataacagctctagtgtatgcccttgagacactgacttcgaacctatacaacgtgtcggttgttcttggtccctataagttgttaccatcattattacataaaataaatctcatcgattattgaactacaaaacgaaataccttgctcatcaatgtctcctttgattcttccatcttcctgttatgcaacattttcatcatttgtttagcaaactcatgcagaggggtgtttgcatctacatgtgattttcttcactaaattgttcatgctctcactgcattgcgt

SEQ ID NO: 81381 - DNA, 884 bp, Zea Mays
acaagctcaactccaactaataatagtatgatcgtccatcgcagttcgcagtcctagtgacgttggcaatcttttcacaaactaggcattttgactcagtataaaaaatgaacctgtcttcattattttattctataaatatctaacgaacatacatactgggttccatccaggcgacctggtccagcgtctatgcacgccggacgaagtgaagttctacctggcaagcctgtacgaccgcgacggcgacaagaacatcaacctcaagacgaacataaactgcaacatctcgtcctgggggagggggtgcgacgccggatgggcctgcgccgccgacccggtggtcgtcgttcgggatcccaggaacggcgtcccgctcagagcgaggggctgccaggcatgctgcgagggcttcttctgcccgcgcggcctcacttgcatgctccgtgagttgcatttatcagctagcttgccccgcgtggggccacgctctctcgtgcttgcttgcttctgacttggtgtccctccctttcctcttgccgtcgtcagcttgtccgctaggctcctactgcccacgcgccacggcgaaccagacgactggcctctgcgacccgtaagacgcattccttcctgctgctactgcgacagacggattcagtgtgccatgccatgcgtgtgtctcaactactgtggggggcttttggtattatcaggtacaagtaccagatcaccccgaactcgacgaacggttgcggaggcgctgacatgtgggccgatatccagagcaccgaagagatcttctgcccggctggttaccactgtccgagcacaacaaggaaggacaactgcagcactgggtgggtactgcatgctctgtttcttct

SEQ ID NO: 81382 - DNA, 601 bp, Zea Mays
gtttggttatgtgggttgtcttattgacgtccaattactcctgttgagcataatatcatgttattattttagtattgaaagtaatatttatgaagcttttgcatgagtctatgtcaagaagtacattagttttcttgttgttatccctccattgctttatgagtgttgcaaattttatctcttttgagaggagaaaaagacgttatatgacatgagcaccatttgcttcacatcaacagaatagttgcggagatctctagtagttgaattctggtgtaataacaaccatggtttatagtgctagagacgagtatgtcaggtgtttcgtacattgtcgctacatggatgtttgaccttagtggcattaacaaacgaggttgttgaattcgttaattgttatgcttagtgttctaacctattaggtaaagtgttgtttaaagactttggggagttgcatccccatttggtagtgggaaaccctagtgttgattgcacctgccaatgccttgggtttcattttatattgtttttttattgtggttaaggtgttgcttggttttgggagtcattttaaattagttggaggctgaatcaggcttca

SEQ ID NO: 81383 - DNA, 346 bp, Zea Mays
agtgaatttgaatgaactttgagcctaattttgagtaagatcctgtgattatttgatggtgaacattgtgacaaagttaaagctggtttattagactataactttgatgtggtgatatgatcgagttactacatagtatttggagcaaatctccctgccattcgctctgtcaggctgactgaagatgtttgcaatggtacagtaacgaaaatatcaaccgatttagagtatctcgccgccggcgaccgtgcgccaagatccatgctgctgttgtgatccgtgctcaccagtgactggataacacttataggtaaaaatcttcgcttggggataactacggtggctg

SEQ ID NO: 81384 - DNA, 774 bp, Zea Mays
tgaagactaggtttcaaataaggcgtgagaagaaagggaaaagttttgaccctttggtcattgaagagtttatttgggacaatgagtgggctgactcatcacatgtacaccctcaaggtactcgtgggtgtgagtgtgtccaggatggtcttacatgggaggttattgatgaagctcttggtgcatcaagctcactccgaggccgcaatcttccaaggaatgctagcagagggtgtgcaagaaattcaaatccaagcttggttgaaaatgaatcaaatttaggcaatgaggaagaggaagaagattgaaatccccatgatgatgcttatgttactaattgtgaggatgcttccattcccaatgatgctaatgatggtggtgaaaacatgcaagctgcaaacaaccaggatgagtttgaagatgcacattgagacttgagatatttcagtttcaacggtgtctttgttttgtgttgctttgctgtgcactatcaagcttttggttcaaacttgtgatgttgttaccttgttaatttcttatgttgctggcttgctgcagtttatgccttatagtggactaaggactatttgtaatattgttgaacattgagtggttgtgtggagcaaggttttaaagtcgtccgactaattgcgattagtcagccttatcgctagtccaagctcaattagggtctccgactcgactagagcgattagtcgtcctagtcgccgactaatcgcgattagtcgtccgactaggggttatggtcgacta

SEQ ID NO: 81385 - DNA, 583 bp, Zea Mays
aatagtcatcttgaacgattgcagaagtaaatgtggtgtgctagttttggagtttttttcctaacttatgtcaatcgcttggttggtaaggcatagtggttgctctaagatgagtagacatgagcatgttgcaccgtcttaagtcattgccgacttaagccgattgctccgttagtagggtatagtggtcacactaagtcgagtaagcgcgagcatgtcgcaccgtcttaagtcgtcgccgacttaagccgattgctccgttagtagggtatagtggtcaccctaagtcgagtaagcgcgagaatgtcgcaccgtcttaagttgtcgccgacttaagctgattgctccgttagtagggtatagtggtcaccctaagtcgagtaagcgcgagcatgttgcaccatcttaagttattgctgacttaaggcgattgctccgttagtagggtatagtggtcaccctaagtcgagtaagcgtgagcatgtcgcaccatcttaagtcgtcgccgacttaagccgattgctccattagtagggtatagtggtcaccctaagtcgagtaagcgcgagcatgttgcaccgtc

SEQ ID NO: 81386 - DNA, 753 bp, Zea Mays
cgtctgtctaccacccacaatccaacggggtggtagaacgcgccaacggaaaaattttcgacgctataaagaagagacttctagacaagagaaaaagggcaagtgagccgagcaacttcccgaggtcatttgggcactcaacacaacaaaatctagagccaccggattcacccctttctgattgatgtacggatccaaagccatgactctacaagaactaacacacggatcaccatgaacaaatgccacagctacaccagatatcgacgagtcaataactaaggacattctcgatggagatcgtgtaaccgcccttgaaacattgaacaaatatcaagcgcaaacaaaggcttggtgggacaacactgtcagtcctaaagagttcaacgaaggggacctcgtcctcatcagaacaagcagaaaagagtcccgaggtaaactcgagcctaaatgggaagggcctttcatcatcaagaggaaaatgtccctaaatgcctacagactcacaacacaatccggggaagacctcgagcattcgtggaatatagacaacctgagaaaatttcatgtataaggtaacaaattccaaggccttcgcgcctttgtagcacttacagatacattattctagtcatacccgcactcttttcctcgcaaggggtgaggtttttaatgaggcggcaccatgtaatacatcaccacgaaaattcccccacaaaaaatagacaccatgacaccaagatgtcaaaaaag

SEQ ID NO: 81387 - DNA, 408 bp, Zea Mays
catatagcctacatggtgtggccgcttgtagaaagctgggaaatgtcgaaggagaccatcactaactctagcgaaggtgatttggtccggctgaagtatacattcaggtttggggataagtttgatgaaccaaacgatgactggctgaaatgtatcgaagctacaagtgatgaactgtttggagcatattccaagatagaagataatgcactgtccgcagccttcggaggtcgaggaaagaagagactgaacagagtttttgacgcgattggctttgtttaccctaactaccgctacccgctgcggggacaagggaaaaagaggaaagctgctacttcagccactccagacgagcctatgccgaagggaaaaaagttgaaagttctgacccaccggccgcactacatc

SEQ ID NO: 81388 - DNA, 945 bp, Zea Mays
gttcacaatcatgaagatttgcaatccaaaacttgagatttggacttatttgcaaaagagccacacttgtgctcttttgattaagtctaattttcagtgttttgagctcatctttgtggccttgtaacttccaaacaaaagggatgttgccctaggtcaccacaccaatattgtagacttatcaaaggagaataacttcgcttaagagagtaagcatggttgttatgaagaaattagagaaaagtacacccaaaagttgactgtcaggctgtctggaaactgaatttggcttgacagtgaggtggcatgaagttagggctcgaatataagcatgatctagtaggaatttggctatagttgttatggcaacattgtagctgaatcattggtctacaactttgctgcagagctttgggtgggatgccatagaaaattgagagaaaattcgccgtaaacatagactcacagactgtctgaatgagcctcgcgatggtacagtactaaaacagatcgactgcccagctattcaccgtcgacgatctctccgccatgattcctgcttttgctacgattcgtgtttgcgggaaaagggataagcatgatggagtgaaaatctcggcattggattagctcgggctcaggcacagataagattcgccgtacccccttgctcatcgatcactcgggataggatctcgccgtcgttgagccatcactgctgtctgccgcgtgtccagacactttaccacgtcgcggctaaccgtgctacgcatatccagtgatcgccggaggagccgccacggtaaaggccacgttgcgtggccaccagtgactcatcctgtttttactgatcacgctccgccgctcaaattcattgtgctcgcgatcagtctctataaattgaagccaccgtgagctccgcaagatcatcgcgtacccaaccac

SEQ ID NO: 81389 - DNA, 750 bp, Zea Mays
acagctccatccgcattgtctgatgatgatttcatggatgctccaacattgaagcgcaatttcagatcagctgcaccctccacttcagtaaataaccgttcaaagaagaagtctcgtgtattgaaaatggacatccctcccccacaagtccccattgtgtcaagtagatcaaagtctgatattgatgtcaagtcaaagaacattatgaaaacaagctcagccaaacagaggacacccagaaaatctcaggtactatgtatatatttatgtttgtttaggtgttaattttggtgtacaatcaatgttgtattacccaaatgttacattttatatattattattttggtatgctttttattttgttagtgttgttagactatagttatttacaaccatctaataaatattatatgtagatctatattatccttagttataacaatatatatacactgtgtattaatacatattcatttattccagcagaaattgaatatctgttgcatcctgtatgatgtcattatgtcaacttggataatgagtgatcgacggtgtggcgctgttggtaggttgggatttcaaagtatatttgatttgcgtaccgacgcattagagagcaggtctctcataaggtggttgatggataagctggatccagacgacatgacaatacgcccaggggctggtaaagaactcaagatcacaaaagagacggttcgtcttatattgggattgccaagtgctggaggt

SEQ ID NO: 81390 - DNA, 525 bp, Zea Mays
gggtgagctagcagatgagactgagaattttgaagtggaaaagcccaaaacagaaatttttagtgatgagaaggactgcctttagaagattgttgacgagatacgaagcttgagggaagtgtgcttctctacagccacctagtgctgtcagaggttaaaggctacctttgcatcaattggggcaagctctggtaaaaagaactatgtagatggcgatgctaccggagttgtaaaatggatccatgaagaggtagaggccttcagcggaattttatcgactagagaagactattgcacttggataggcgccggaggcatggcctcggtgctataaaaagctggttgtgaatacgtaaaggctgctagctagtcttattttttagtatccctgggagatgtgaagaagccttcggccaaagcctccgtcctaggaagaatttttactaacacctaaaatgctggtggagggagttgtccaccgaggcagctaggaagaatagggaaaatgtgtttccttaataattt

SEQ ID NO: 81391 - DNA, 536 bp, Zea Mays
gtcgggtcttgttgtgccagaaaagcctgttgccgaaggtactttgactgctgaagcagaccaaatcacagttgaagagggaagtggtaacaaagatgaagaggattacaccatcctgagccagaaaaacctagtcaccttgactttggtagatccactgtgacggcagatgatatggttataatgaataaattgggttactttggtgaagctgagagtaaacttgttcgttttgccggcgaggacgtggttccagagccaaaggatgatgaagttgttgtgtttaaaagcttcttcagagcggggcttcagtttcctctttatgatataataggagaggttttgaagaattttgaaatatatcttcatcaattaacacccaatgcaattgttagacttagtgtctacatctgggccctccgaagccagtggatgagtcctaatgccgaagctttctatcgagtgcacgagctgcattaccagacgaaggccagggcagatggccttcatgagaattttggttgctacaattttgc

SEQ ID NO: 81392 - DNA, 593 bp, Zea Mays
agggtggaagtggaccttagaagctgcaggatggagtcctagctaagtcttggctcggtgggactctggcctcttggtcctcgtcggcgctcctcctcctcctcctcctcatgttcgtccttatgggtttgtgtccgtctgaaggcgtctgattgccctaagagctcttttctttctctcccccctgtctggaggccaactcatcccttttattgtctgggagaggggttggccgtcggccagcagtggattccctaggaaggagtcgtaacgcatgagtaaaaccagtgttttaccgtgggtggagccatgcgtactcgtggggctcgaggctgcctggctgtctcgtatttaccgtggcagatgacgtgtgtcagtgatggtcccaggcatcatcattttggatacgccgacccctagcctccatagcttggggctcggcacaacccatcatgtagtgccctgcgggacgtatgcgcactcaggcctagttcgataggccataagtgtgccgcatgccgaggggtgtgcgagccattaatgcgccacagtcgggggctcgtaggtcataagtgggaggcggaccgacgccg

SEQ ID NO: 81393 - DNA, 870 bp, Zea Mays
cccagtagcacgtgaataacttcgtggggtaaaaagatctcgccgtggatgaacttgggggcactgttgcgctctgtcgcctcgtccacttgccggcgacgtggccaagcggccgtcaccgggatgtacaccattcaccgcgattgcaccacgccttaggacatcttaccacgtcgtcgcgattcgtagtgactgcccagtgaccgccgtagctcattacccagtgaccgccatgacagatcgccacgatgactcacccctctctcggccgccaccgcgatttcttcaaattgggcaccaccgctgatggacattataaatcaacaccccagggagttccactaggtattttcgcatccaacgcaccaacccttgcctcggatcatccaccagagcccctcaatttctcatttcccccaaattggttagaacaccgccgtgagagagctcgtcgtggccagacgtctacgggttagttcgtacccttctgtgtgatgttctagcctccctcatgtcttctgttgctcgcagacccattcgattgaactagaccgtcttgaatcacctagaacaccgcgaattgtctccagtagtcgttgccaccgtggacaaaggaactctgggccggtttagtacaattggttgagagattagtgtcgccgagggtggaattaggtgttgagcaacagaggggcctagtcgttgcgttttccggtcgatacaagctcgccggagccactgctccatcgtccgtggtcggggacctaaccttgcaaagaaacaaaaagggaggggtctcggtgtaagtgtcagagacacatgtaaatagtgtgcaggattcttaattagttattcaaacagtcagggtcc

SEQ ID NO: 81394 - DNA, 511 bp, Zea Mays
ctgaaaggagctctgactctactgactgaaacatgatggagtgggtccagctggtctattgaagcttggtcccttgggtggaaacccaaaggattgagttctctggtgtcggtcatgttgctgagctcggaggacttggaatttcctcttgaggtgacctttttcttcttcccttgccctttccacttgtatggctttgtttgagaggtgcgagaagctgaggaaatcttggctggctgggatggtcttgagttctggtctgatccctttcaaaaagcgagccatcttcttggcttctgtgctgacgtcatcaggcgcatagcgggctaattatgtgaatttgtgcacgtactcactgacagatcttccaccctgagttagttcccgaaattcatcttccttgagctgaacgatcccttggggcacatggtgctctcgaaaagcagtttcaaactctgtccaggtagcatctctgacggtagcgttgaaggtatcccaccaagctagggtc

SEQ ID NO: 81395 - DNA, 529 bp, Zea Mays
aaatctgaattcagtgaaaagtgcccagtttggagctcagttgtgactaatccctttggttttggactgagatttttgtagcaagtttgaagaccatagtaagatgaataactctcataaagggagatgggcttggtgctacataaagtagggagtaaagtaaacttagagatcggctgctagggtggctgtgactgaaggttcagttgctgaaagctgaaagacactatttgatgccaagtttggagttcttttatggccaatttataaggttttgaactaaggatattgtagcaaagtcagaaccatttaaaggagagcaagtttcttataaagtgttagtctagttactttgtagaattgggagaagagtgggttccaagttgtgctatcatactagagtgatgtgcttttagtaactattgctggcagttatagtttgcttttacttacatttggagctttgtagtaatttatccatggagtattaggttgctgtgatatcttggcccctgggatgggatatcct

SEQ ID NO: 81396 - DNA, 633 bp, Zea Mays
cattatactacatactagtatatatacatgcatatggtttggcacgtgtaagaggagatttaggtttcaacgcgacctagctgacctgacacgtgtcgccccagcagcaaggaggagcacggaacaaggaactacctgttcccagctcccttctgattattgttagttaggttggtcatctcacatgacatgacacacccaatggccaatgctagggtttggggcccgcaggggccaacctactccgccccgtccatgtggggccctggattgtatgttcacggttgcctctagaaaatttgatgcatctagatcattagatgctctagaaaattttgaagttgaagatataaaccttataaaagacatttatataagtcattttagaacctggagtcgtcccaaacaccccttttcttgttaaatctatttgaaagagtagctaaatcactaaattcatagtagtgcatgcacgactgatcactatcatcagataatacgaattcgcccttttgatcgccttacaaaatttccaatatccctccacaccactccatctttaattgcaatctaattgcctatgaatgtttgcattttcacgtatatatacttataagcgtgcgtacgtgtgca

SEQ ID NO: 81397 - DNA, 630 bp, Zea Mays
agatcgttgtgtaatatttgttctcccgactaagctctgtcgtttgcgcgtggagccgagcgattttaggtcaaggacagagagttgtcgcctcgtcaatgtggcagtgtcacagggccgagttccgaggcaaatccatgccaagatcatgtcaaacggctgagtcttgctcccaaatttttcaagggtatgttcaaggtagtttggcgctatttttatatttggacttatttggttcgagtttcgaaaaatagagaacgcagtagatctttgaaaaggggctgaaattcagatttctgaatttctgaattttcccatagggcattagttcatgggctgatttggggattttggaaaattcaaatgaccaatcttccttactacatcttgtaggttatttagtgcactaaaactttgttaattggttcatatcaaaattttgcatttttcccaagtcttttctccaattcactctatgtgcttaaatggcccatttgaaggtgttagggttttagatgttttttctcccttgaggtgtatgatatgtttagagtgtggcttttaagatgaaagagacttaacttaggtttttgttccttaagtttgttgtctcttgcttaattaaaatta

SEQ ID NO: 81398 - DNA, 326 bp, Zea Mays
caagtctccaccccttgtccatctctcaatttcttgtccaatcttgtgaatccagttggtggaatgtgttcaattgtccctagtgtgtatccctgcaggttcttggctccttcgggagggctttcactcctcatatggccatttctctgaaaccctaatatcacgcccaccacgtgttcggtaaaatgcccaaaccaaccaaaaatgctccaattgaacccaaatttttcaggcaccttcacaacacttccagtaacctacttgccaaatttcacgccaatccgagattccaggcttaaatttcaccaaatttcccgtttagagcg

SEQ ID NO: 81399 - DNA, 1219 bp, Zea Mays
gcacaatgtagcaaagttggagctggtctattaggctacaactttgctgcagagcattggtctagttgccatggaaaatcgagaggaaattcgccctaaacatggtctgtcagactgactcaagagggatctgatggtacagtaactgaaacagatcacaagttcagcccccctcactgccggtgacccttgcgccgtgatttatgccgtctccgcgattcgtgctctctggtgaggggataatcacggtagagtaaagatcttggcaccagatcgactcgggctcggtcacggctaagctcaccgtacccacttgctcgtcgatctgtcgggatagacctcgccaccgttggccacttaccactgtgcgccacgtgctcaagcgttgtaccacgtcgctgtgaatcacgtcttgcatgcccggtgatcaccggagagccgccacggtgaaagccactaagcttgcgcgacagtaaccttcttcctctccgcccgccagcgcatcttcacgaaattggacgccaccactgtgggagcctataaattgccgaccccgcctgttccgctaagtaattgtgcaaccagtaaagcaacatgtgcctcaaatcatccactagagctccctaatttgggatttcccccaaatcaatcaagaacaccgagcggtgtgacctcgccgtggccaacgagtttcaggtccattcatgtccgctgtcctcttgtttcagcaccattacttgctgctgatactcgctgacccatcctattaagctaggaagccctagatcaccaggaacgcgttcactcatccgattgttcacgctgcctccgtgaaccagttgatgtagagcctcattggtgaaattgagtaaggggaaatgattaagagggatccaatttggtgtcggtcgcacaggagcaccggtcactgcgggatccggccggtacaagctcaccggagctcggttcctcgccgttcgccgtcgtggactgcaaactatgaagagatagaaatgcaagggcttattcgaaaatgtcagtgacccagttaaatagtgcgtaggattcttccttagatattcaaacccctgagggcttcggtgtaaaaccaccccgtgggcgcgggcgcacgtaggttcttcccttttgtaggccggttgggctgaattcagcccaatactattcattgtttttccttttctttttctgtcagggttta

SEQ ID NO: 81400 - DNA, 459 bp, Zea Mays
tttttactgatcgtattttgagtttcccagcgcgggattttcgctctcgtagtcacacaaggtgtcgtgatcggaagggcgggcgctgtgacctcccttctcttagtcgtagttgcgaattccctccttttcgttgtacggccccgcggccagcacttaagtctgaaattatagtagtggaaaggtgaggcccctttgtgaaaggaacgatgtagcttggggaatctttactaatgctcgtgtattcttttcctcctcgcccctattttacttggggcaaattaccgcctgcacccttgctcgaggggcggtggtgtgcgtgctggtttgtttctgacccgtcggcgagctaggcatgtttcctcgttaaatgagtcacctcgccctagcatcacgtgatagagagttgcatggccacctttatttaatcgttccattctccctgttttcctcactttg

SEQ ID NO: 81401 - DNA, 883 bp, Zea Mays
taccaaggagttccggggctaacccataaaaatcccccagactcagtttgatacagcaatggaccgcgggttaattcgaatattgttcagggtctcttatgtaactttaccagacgaagaggtatcggctgatatgagccacacaaaccacgatccacggtgaggatcagatctgcaatcaggtaaatcagtacgacttctccaccctcggatcaacttcaacgtcccagattctaaatagcctagattcatttactaacgaccgatccgaatcggacggtgcacgatcccctcacccgaagcagtacgcatcagattcaatcgcggccgcaaactcctgatccaacggctggttcgttttctcctctcctcccggctcaacatggcgccgccgcccgaaatcgcggtgacccacggctggagttcggccaaatccagtgctagggcccctaatccctcaatcctgacgacctacgcagtgccacaagtacgaccaagagggtggatgactcaacagggtaagagatggccacagggaagctacccgcagtgagaggcgatatttcggcacccgtaatgtccgttgagaaattgtgccatgcactgtgaccctttccgcccacggtcgatgttgcacccttctagagaacatggagacgctcgccgaccaatcaccgggaacccgacgacggtgcccactcacttggacacggtggtacagagctctgtcccctcccaatgtcgcgctcctcatagctgaacagaggtggtcgcgaaggcaggaaagaaggaggaaaggtcggagccgggaacactagtctttccctcccctttattggcgctaggatggcccaggcgccgcaacagaccccgcgggaatggc

SEQ ID NO: 81402 - DNA, 280 bp, Zea Mays
gtggtatatagctctccaacattgctacagagcatagagtatgttaccatagggatttgtgagcaaatcaagcctaaacattgactgtcaggccaactgaatcctatttcgatggtacaatagtccaataaggatcagactgccagcgttggatcctcaccgccggcgactcctccgcgtcaagattcacaccgctgccgttgcgattcacgtcgccggtgaccagataagaccgctcggtaaagccatgcgctggacggcactccggtgaaccccccta

SEQ ID NO: 81403 - DNA, 532 bp, Zea Mays
caaatttgggctttacaaatcctaccccccttaacagaaatctcgtcctcgagatttgttagaaaagggatatagaaatccaaacgtttggttgtagtttagcttcgagtttttcccaagtggttttaagcacatatgttttctattttccttaagtccttaagtcagggatgggttaggaaatcctaggtgtattatgcttagctattaggcagaagtagagaaggcgggggtaagaaggattagggcaaggagttcccattccggatggtggaccttgattcatctggtgatccaacttggctctttgaagacttgagttgatgtttatcctctttgatgtggttggtcttctttggcctttcttcttggagttgccatccgagttaaggacatatggctatagctaggatagctagggtacatgaggtagttagatttaaacagagttttacttttgtttttaggatatctagattaggcaacctatgatgtaggttaggtggttgtttacggacgagttagtccaagg

SEQ ID NO: 81404 - DNA, 310 bp, Zea Mays
tagatttttgggcgggttaaatagggaaattcaggacatccttgcttataaagattatgctaatgtaaccccgattgtttcatcttgcttgcaaagctgaaagggaagtgcagggacgacgtgctagtgcaaggtctaatgtttctgcaggaaaatctacaccatggcaacagcgcacgactacgtccatgaccggccgtacaccagcaccaactccctcgccaagtcgaccagcacccccgccttcctccggcgacaaaccacgtgcatcttccacaaattcagcaaccaaatctgcccagaaaccagc

SEQ ID NO: 81405 - DNA, 404 bp, Zea Mays
ccttcaccccaggatcttgaggagcattatgattactagggcatgaacaacaatagcgaccaatctatagggataaactagaatatctagttgtggtcctttgttaagtgtgagacacaatattgtctttaagtacatttaggttatgacttctgtcatatgtgaacttgtttcttatgtcgtaccttgccgagctatatattctaatcgtgctgaacaccgatgggaactttctgtacttcttgcatggactttataatgtttccccgattagatattatatgaaatgatgaactcgttcgttcaatcatgtgcatagatcggaaatggataatacctttgaagaaattgacgaaaatgttctagagggcgtgcactacactcctacaatcaacttggtcgat

SEQ ID NO: 81406 - DNA, 506 bp, Zea Mays
cgaagaaggaattctgcatcgtatagcggatccaccggagaagaagccttcctcgaaaatctccgaaaaagccggaacggagcaggaaagagcacaacctccagcaccccgggcgaagactacctcctgcaagaaaggagcagagaattcgtttacccggaaaaccccgttgtccacctcatccacgaagagatggacacggattacaaggagaaaagaagcaaacgaggtaaaggcccgtcaagctgctcttctggcaccttcgccctcaaaggagaacaaagagaagcttgtcgtcacggcaactccattctaccccgacatcctcttcatcaggggaagagtggaattgtcccccatctccgacgatgagccaaccgtacctggggaagaacctcctcagcgagaagctcgtcgatggaggaacagacgctggaatgtttggcaacatcatgaagccagagaacgagacccagcacagcctgtatctcgagatgagatctcag

SEQ ID NO: 81407 - DNA, 490 bp, Zea Mays
ccgagcatttgcacatcgtacttcagcgactgcgggatcatcacttatatgctaaattgtccacatgtgatttctggctaagggagatcaagttcttgggtcacaccaattatcaggatgggatatcagttgatcctgagaaagtgcaagaggcaatggattggaagcctcctaccaccgtgcgacaaattcagagttttttgggattggcaggatactatcggcatttcattccagatttctccaggattgctaaaccaatgactgaattattaaagaagggagtaaaatttgaatggagtcagaaatgtgaggatgcctttcatgcattgaggcagcatttgacgatagcacccgtgctagcatagcctgacaacaccaaagcttttgatgtgtattgcgatgcttcgggcactggactgggttgtgttttgatgcaagacaacagagttatttcctacgcatccatagcactcaggcctcatgagca

SEQ ID NO: 81408 - DNA, 668 bp, Zea Mays
taattagtaccacaacaataattgacatatatcaaaattatgaactatgaagtatcaaattttacctttcctagatgcgatattccaatccttggtacagactagtgcttgaacaacctcaggctccaaactactacggaatttgctaacaatgcgccaactagagctaaaagcagattctaaggtgacagtagagacttgaacagcaagtacatcacgagcaagcaacgagagaacaggatatttcatttgactgactttccaccatgacaatatgtcaaactgtgcaccgttaccaggtgatgcacccgtacttgcacaaacactaccgcttccagaagccatcctataccaaacaacgaaagaaatgatctgagtagagaaaataacctggagaacaaattgttggttcacacaactaatatatgaaccgacgtgatggcctgatgggtgacgaggaaggttgctgggtcggcgaagctcctgcggggacacagcttgacgttgtagcggctgcgaagggcaagaagacaatgtgttgaggtggatgtggtgccgtctgttggccatcagtccgtcacccaccgccaccagccaccaccgtatgggtttctgctagtccgccgctcgaccgccgcacgagctagggttgtggcttgtgcttgtcg

SEQ ID NO: 81409 - DNA, 774 bp, Zea Mays
gctattctttcttctgtaaaaattttgtcagttctgatcccagaggacttagcagtttgaagggcggggattcaatcattaccttcagaatttcggctgcttcggcggcagagggcgtcagaggagcttcttctcctatctcatctatcttcggctcaaaagaaggcgatgtgtcaagctttcgctttttagagattgtcgccttcggtttaggagctgattttgttttcttaaaaactttttcatcttccttcactagccgagtagcttgcctactcaggatgctgacaatccttttccttttcacccctttggcccctttgtcaagcctctcgtaatccgggtattcgaagtttaacgtgtccatcacctgatttagccttcgttttggtcgggtgctgaaggcaacagtcattaattggtcttccttcttggtgtagttgccaaaactttcgttgcacattgtttcaatcatttctagccactctttgcatggcttcttgaattgcttctaaaatttaaatcggtaatggagccgaacaagttcgtactttttgccccctcctttttcttaggcattccccagccactagaggtcgaaaatattctatttgccaagtactcttgtactagatctctagtgctgatttcggctgctaccactctgaattctacttcggctagctagcatggggagctaagctgcatgtggcacaagggccttgtcatgccaaagcttaatttcaatggactcatgaccatggtcattagctt

SEQ ID NO: 81410 - DNA, 380 bp, Zea Mays
tggcgaacaatggggcaaaggtggcctaggacggcgtgacgtgttttcctgacagctatagcagatttgcgggcgaggacaaggcgaggcagtcacaagcaaagaaaaaacggcggcgttactcataaagactagcttccgagatgtttggcaggtggccgtcggaagttacgcgtgtttgaccgagcttttgaccaagccaccgggagttatgggctgggccatcggaagtgtataacttccgagaggtttaatctgggccatcggaagttaggatttacgttcgagaggcttcaagggccgtcgaaagttagttacttcttacggtttttatctataaccgcaggaagttatttggtcataggagatttaagtttttg

SEQ ID NO: 81411 - DNA, 378 bp, Zea Mays
gtagcactagaactcctagcctcatgatcatgtgagcgtggaggcataggaggcggaggcggaatcccaaaatcatcatcatcatcatcaactgctgcgtcctaagcttcgaactgatgaagagcagtatcctcggcctgagtgtcaaatactggagcaggtgctagcacaggatctttaggcgctggacggtaggacccaaagacgaggcgtgaggcctcaagtgtgccctggaactgtggaggccgaatcagctgagcaaaaatgtgacatagatagtgagcatatggcagccgtcgacatgcacgcagaccatccaatacggtgtcctcgatctcacaaataaggaaatccacaacatcaaactcagagtgagag

SEQ ID NO: 81412 - DNA, 552 bp, Zea Mays
ctaaacttggcgaaggggtttcttcaactgccgaagcaagacaagttgatcccgtcgtgcagagcgctgaagaaccgattctagcgccgaaggtgcctacagtcgggccagacgaagccaaggctgatacggccagagagccagaattgaaagagacaatgatgatgccaaaaattttgagcccaccggtagagacagaattgccgaagatgacaaaggctcctgccacaactcccaagaggaggaggatggccagcgtgctagacgctgtcatggagactacaaaagccttgacccctgttcctattaagaaagttgccgaagttgccaaggtccaggccgaagccgaagctgggcctacagtgcccattaaaacgaaggttgtcacgcctggagataaagctgagcaacaaacttcagatactggcatggcagcggggcaagatatgatggaaagagcaaaatctcctgccctcgaagctccggccgaagatgttgattacattattcgacatgcttcggggaaaaaattatccaacgaagaaatcttag

SEQ ID NO: 81413 - DNA, 340 bp, Zea Mays
gaagtcaccaattcacgccggtgtgccttcctccttggattggagaaccagaaatggattttctttgagagtgaaaaccaaaattatcccccaccctattctttgcctgaaagtgcaaacgagtaaattattcttttttccttctctcaaagtgcaagtgcaagtgcaagtgagtatagagaaacatatagataccataaataaaactcggtgggaaattattaccagctcaaaaggactagcggagatcgttgaccatgagagggacatacgacgtggcaaagaggccagaaaatggtcaagaaaggtgatgtgagccgcgccatgtcgtccattgctg

SEQ ID NO: 81414 - DNA, 303 bp, Zea Mays
gtgaaaatgtcagccagctgtcaatgggatcaacgtggcgcaaatcgatgcgccttttttagaatggtcatgaagaaagtgaaaacgagcatcaatgtgcttgggccttgaatatagcataggattcttggcaacacttatggcactcatgttatcgcaaagcagaggcacatgatgaaaatccaaaccaaaatcctgtaaagtagacatcatccataacaactgcgagcaacaactagcagtagtagcaacacactcagcctctatggtagactgagcaaggctagactgcttgcgcgaaga

SEQ ID NO: 81415 - DNA, 454 bp, Zea Mays
ccccgacgtagatgaaccaacctccaaggacctcatcgacggagaccatgtcttcgccttgtaggccctcaacaaataccaagctcaaacaaaggcatggcgcgatcacacagtcgtcccaagagaattcaacgaaggggacctcttactcgtccggacaacttggacaaagtcacggggcaagctggagccaaagtgggagggtcctttcatcgtcaagacgaaggcgtcccccagtgcgtacaggctaacaacgccatccggcgaggacctggagcattcctggaatatcaataatcttcgtaaattttttgtttgaatccctagggctaacacgcccttgtaattcaccaaacaatatcattccgacccgcactcttttcctcccagggggtgaggtttttaatgaggcggagccatgtaatatacacgcaaaaatcccccgcaaaaacta

SEQ ID NO: 81416 - DNA, 1295 bp, Zea Mays
cgaagaccatccaggtcggcgcagacccctcccagaccacccgcatcgcggggaacctgggggaaaaataggaactcgcgctcgtcgccttcctccaagcaaatgccgacatcttcacttgggagccgtcgcagatgcctgggatccccagggaggtgatcgagcaccaactaaaggtctacccggacgccaagccggtaagccaaaagccacggagacagtccgtggaacgacaggacttcatccgtgaggaggtccggaagctgttacatgctggctttatcgaagaggttcatcacctcgtgtggtggccaacccagtcatcgtaccaaaggcaaatgggaagcttcggatgtgcatcgactacaccagcctgaataaggcatgtcccaaggatccgtacccactgccgcgtatagatcaaatcgtggactctacctcggggtgcgacctcttgtctttcttggacgcctactctagtttccatcaaatccggatggctaaggaggataggaggcataccgcttttgtaacagtagatggactatactgttacattgtaatgccctacggtctaagaaacgccttgccaacatttgttcgggcgatgagtaagaccttcggggacctgatccgggacaaggtgcagatctacgtcgatgacatcgtggtcaagactagggaggggtcgactatagtggaagacctgaccctggtttttgacaagctgtgggcaacccgcaccaagctaaacccggagaaatgcatcttcggtgtctctgcagggaagttgctggggttcctggtttcatatcggggcattgaagctaacccggagaaaatcaaggctattcaggtgatgaggcctcccgcccgtattaaggacatccagaagcttacggggtcactggcagcccttagctgcttcatttcgaggttggctgagagggcgctgcccttcttcaagcttttgcggaaatcaggcccatttgcctggaccgaagaggcggaacaagccttcaaagaattgaagcaacacctagcttccatgtcgatcctggttgctccggagccagaggaaccgctatatttgtacattgcggcagctgcaaaggcaataagcatggtgttagtcgtcgaaagagcggcacaagaaggacagaagcctggaaacttaggaccagctacagagacccggactgtccagaagccgatctactacgtcagcgaggtcctccatgaagcaaaggccagatacctcgagacgcacaagctcctctacgccgtgttggtcg

SEQ ID NO: 81417 - DNA, 592 bp, Zea Mays
tcaacaaatataacataagccatgaaatcgtgaatcaatcacaaatacatggctctcaggttgaatttctgcttcttataactatcgtatgctttgtctccttcccataatagtttcaagtcttcaaatagaggtctcgtcatcacattaagctttgttctaggatgttttggactaggtatgacaagacacaagaatataaatcctatattatgcaaagaactagtggaaggttgcatggaatagcaaacatgggccaacatgaatacgatgtcacagttagattgaaaggtgaggaaacatctactgccaagtcaatgcgaacatttctctcatctctagcaaaaactcgaaacaaaggcacctagggcctagcatgcatatatattagttaggtgcatcatcacatcaggattgtcacgtacatggttgcattcttcaagacaaacaaacatttcaactgaggtacaagaggcatgtaccgaagttatttatgtgctacctctattatcatggtcacaccatcctcatttacaacctccacgaacctcattttgccacatgttgcgcacttcttctcattcacagtcta

SEQ ID NO: 81418 - DNA, 390 bp, Zea Mays
gaccggccactacaccagctagggtgttgaggcgatcctcaccagcttcacctgggacgatgctggtctgacttcctccactcagacgcagaggaagatgcctgaacttcgtgtcctgcagctgctgctggtaggtgtggctaagggaccacagggtccgtctggcagcgtaggtggatagtggtgtcagggactcatgagcagacagagtcctaaatcccctatcccctgcatccatcaccctgacgtggatgcgagtgatgtagtagcaagcccggggaggctcgctcactcgccttgtttcgtacagggggtggacgtaggtgcctagcgcgtgcagcacgtcttgcagcaggttggggaagtgccccgtctcgaacattgatgtgt

SEQ ID NO: 81419 - DNA, 514 bp, Zea Mays
tgctaagataggaagaagaatttgtcgaggagagaggaagcgcgccgtgggggttgtgtggtcttttatagagaagaagatgacccaatgcttgtactagtgtagctagtacatctagctaggaacggatgggtggatggatggatatgcacttgtgcagtcaaagcaatctggagagaagagcgaagaatatctgttccagccgtactccagtgttagttttgtttaacaaaccctaggtaatagtttatggattagtcctgattgcgcctggccaagtatcagccgaacccaagcatccaagaccaaggtttttttgaattagttctgaacaggatttgtactctctgcgtatatttcatcgactcaaatgtgttagcaacgaaacatagagataagctgatagtaacgttacaagaccaaatacaaataatttaggatggaatacatgatttccttagggtcaaagtaactgtaatgagggctagatgttcttgttgtgccttggcaagtt

SEQ ID NO: 81420 - DNA, 703 bp, Zea Mays
aaaattgtttacgaaggttgtgtataatgtgacttcaggggcttgaacaacccaccacaatccacacgagtacaagctctagtgtctggtgtcaacgcgtgtgtggccatcagggctacgacaacacaaccagccttcgtaattaatgcaacaagcacaattatggctcggtaaccggggtacacgataagtccacgtaatgtgcgcaacaggcgcaattgtgacttgatgatcacgggagacgggcagtgcctgcagggcatgggaaaaatacgcgactcagcgatggcggtctgactcaacgggagcgatccgattaatagagagcgcgacatagcaatcatatgacgcagccaagttcgtatgacacaaatattgcgtcatgttgccagggcgcaaccaatagccaatgtcttaacttagccaattaataatgtaacctgatcggcacatctgtgtacccactatacaatctaatcgctcgacgtgagtccaaattctaaaagctcaacataatataaatatttagagcgatttgagtatgccttatatagactttacatgcattttaataattttctgctacaataaataaaagcagaaaaataaacaccaaaattattgcatgagcataacacatcagcattttccatatttaaacatgtatttctctattaattatttactgcaggaaataattaat

SEQ ID NO: 81421 - DNA, 570 bp, Zea Mays
tgaaggtaatgattgaacctttctcgtttgccatgctaagtcccctggggtcggatctgactagcctattgcagacaaaggagaagggaattgaacaaagcttgggagggaaggagactgctttggctactgggggaaatgccaggggtcagaagaaatggcgaatgatgaacataatgaaagccatccaaaagaccccctagcctcggcggaaagaactgttgtgtctgctaatgccgaaggtaataccgatgccgaagctgatgaggccgtagctgaagttgagaacctcgagaccacaatttagagattgacagacttatagctgatgtgactcccgagaaggacatagctaaagtatccactgataaggcttcgaccttaaaaatgaaagagttgaaaaaggcttcttcggagggcttagagttggacctacggtacctgggcgaccaagaactcttcgatgacgatatttctgaattgaaagaattcgccattgctggtggctacaagtccggatccgtgctctttgccggtgtcgacaaagagattttaggatgcaccccagac

SEQ ID NO: 81422 - DNA, 949 bp, Zea Mays
tactggacaggtttgaagctgcgacacaaccttgatgtgatgcacatcgaaaacaatatatgtgagtcaattattggtacactactaggtattcccgggacgtcaaaggataatattaatgctaggcttgatatggaagacatgggcataagaaaatctttgcacgtgaagcgtgatggattcatatagcgcttctcttgctccatacacaatggataaaaagcaaaaacttgctttctatgattttctaagaagtgtaaagtttctagatggatatgcttctaacctagcaacatgtattacaactgatgaatgcaacctccaagagttaaaaatgcatgatttccatataatactgcaacagattctacctatcgctctttgaggaatcatggataatgacatgtacatagcaattgctgaactagggaacttttttcagcaattatgtgctaaaacattgaagttaaatgttttgcatagaatgaaacctaaaatcccaatagttctatgcaagcttgagaaactatttcctcctgcatttttcgatgtcatggtccacttgactatccatttacctaatgaagctatcttgagaggtccggtgcaatatggttggatgtacccagtcaaaatacagttatatatttttgaagcattctgtgaggaacatggcacgacctgaaggctcaattgctaaagcatatgttgctaatgaatgtttgactgcttattcacagtattttgatgatctcgacacacgacataattgggagggcaggaatagagagtgtattgatatgaacaagggtgatttatctattttccaacatggagttgatttactcggagctcaaaggattacataccaagaaaatatatatgacaagatggtttggtatgtggtaaacaattgtccagatgttgaacaatatatagagtatgcctt

SEQ ID NO: 81423 - DNA, 1107 bp, Zea Mays
gggttctacagggtgtgtgcggtaggcgcaagatttatactggttcgagcagaatgtccatactttcaaaattcctagtatgggttacaagcgggcgagggagggaggagaggctcccaagtctcttttttcgaggtggtagtggagctttagaagctaccaggtgtagtcctagctaagtcttggctcggcggcggggctccagcctcctaatcctcatcggcgctcttcctcctgttcgccctcatgggagcgtcgtctaaaggcgtctggggtcgtccggttgtcttctgaggtgtctgaaagaactccctcccaccctgttgactggaggccaacccctcccttttataggttgggagaggggtcggctagcgatggcttctttgaggagtcgtaaggcaaagttaattccaacgttctacccggggtaaagccacacgtactcgtggggtcaggattgtctatttcgtatttaccatggcggatgacgtgaggctgcgatggtcccagacgccatcattttggctatgccgactcctgacctccgtagcctggggctcggcgcggcccatcgtgaggtctgcatactcaggcctaggccatagaccatgagtgcgctgtagactgaggggcgcacgggcctttaatgtgtagcagtcctgggggcttgtagaccatgagtgctatgcgatccagtggatcatgagtgggaagcggaccgacgatcgtgttgtggctcggtgccagacatagttaaatgcagtcgtctatttatggcgagtcagtttaggggcggacacgagatccactcgagtggttcccttccgacacgccccccgtaaggtttcgccacgcttgatcctaggctcagtgccccatggtccgaccgagggcgagctcttttagggttgacatatccacctctcgaattgactaatgggtcctagcgaccagaggcccttcccttagcgtactctctgattggcgggtcccatggaccggggataatttcctagacattagcccccgatgagagagtatctcccttcagggaccggtaacgggttggacgatgtcccatcttttcgttcctcgagaaattgc

SEQ ID NO: 81424 - DNA, 510 bp, Zea Mays
tgtgtgttggtgtttgtgactagaccgcgcacagcggggttacccatgtgatgcttttgggtaggacgacgttgttgactgcgactcgatggtacgtgcaggggcacgtcggacttgcaagagggtttatacaggttcaggccgctttagattgtgtaacaccctacttaccgttgaggttgtgtactagattttctctgaagtatgaatatttcaagtaagctttgtgggtgcttaggtgttgttggtgaaggcgggtgtaaagtgagacaagataagatgagatttgtaacggtgccccttggccttatatacacgaccagagagttacctctttacatgttgtgatcattatctattctacttatctcctcctttatcatggtttgtagtcctacatatctggagttcgatcaccttctcagccgagtcatcaccgaatgcctagctcttcatgtgtgcgcaactacatcacccgagatatcagtgcttcgacagcgcataactcgg

SEQ ID NO: 81425 - DNA, 455 bp, Zea Mays
aagggatggaaaagataaagggagataaaagaaaaatagaagaaaacattagtgggtctcgttctcatttcagcccaactggacaacccccgctcagccaacacctcagcccatagaaccaaccgcgctcactaggatgcatgtgggtcaccaacatgcgggccccgcgggcaggcactcacccttgcgcacacggtaccctgactggtggggcctcacggtcagttaactaggcggacaacatgtcttctgttgctcttccgtcacgcttatgtgtggggcccactgtccagaatcgtcatctccaaccaacgcggcgggctcctgtacagtaaaacggactccgtaacaaactcaagcgaatcccgcggtctccgcctgagctctgcgcgcgcgtttcggagggccagggcgatgctgggctatataagtgcagggcgccgcaatatccccac

SEQ ID NO: 81426 - DNA, 311 bp, Zea Mays
cttggctgatttccgaagcaaagggcgggtcacgctgcgcagaggcagaggcctaggcgtgaactgcgtgcggaagggtgcggcgaaggattcgcagggtggactaacgatggagattgaggatatacggagggggtgcaattgctgcatgcgtcacatggcgatgggcgaggaaggagttgcacgacatcaggtccatctgtcagatcggaggtgggcagaacgtgtggcagaaccacgatgcacgatctatattatagtcttatagagtagtagagatatagatgaatccaaattaggtggggaccttt

SEQ ID NO: 81427 - DNA, 1814 bp, Zea Mays
ggaagtaaagatttttttactgacatcataaaataaatatcagtaacaccatgaactttctccacctctggtcacacaagaatgtcatcaaggaaaacaaaacttagaacttctgaacttttgaccgcttgtatctacattgggtgcatgaaaaaatttacttgagtttcattaattttatataataaaatcatgcagtatctggaaacaatctacatcgagaaactaattatactagttcggagcattccataaaccacagcagtagcgaccatatgtttaatttcttcaaattttaataagaaaaggagctctgtatgcactaactttgagcttctcatgtgcttctttaactgtctttccgtcctttttctttctccagttgtgtccatccttccggaagtatctcaatattttccggtcaaacagaaacagcgaaccacctgagaaattttcaagcaaggaaagcaatattagtacatccgtaaacacccaaaaaactgagctctcattgcaaagtgcaatcacatgataacataaacaaactcaccaactacaacctggtcctatcagaaggtaatggtgtctaatgtcattaacaaatgattggtgatagaagaattaatggtccctaatcttctaaaagttcaatgagcgagtcaatcagcatggttaatgaatgagatgttagaaaattatatgaaacatacgttttaatataaaagatatccacgatgccatttgcatgattaagtatatggcacctgagctcaaatatatggcatcaacaaaacaaaaaaaggaaaatggtaaaaccggggtcctaatgttccgtagaaaacagaagaatatatcttcctacagcataaaaatcctcagaactcatccactgcactaacatcccatatgccaatgccaccctcatgagaaaggactaactggctaaaactgcatgctgacatggtgagggggtgtggataattcgagtaagaagaaacattactttgaggtctgtttggtggctctggcgcaatggaaaacttcttgtagtttgacaatatttggcagatttcagtgggccgcagccacctactctgagcttccagtagtatctgaggaatatctgcagattaacagcgacattaatcagtcgttagccaacaacaccatcaatcacttgtggtacggtttccacactaactagtgcagtaagtttccttcacccatttccccttcgtttcgagaaattcaactccgtgatacctcatagacaactgcgacctaccgaaagtgcaagacaagctctcaagtcaaaaacaaaattatccacaatagttctcaccctgaggagctgttctaagcaaaacacgaagccctaaaatcagccgaacacgcaacccagaaaaccctaaaagggtataaacacgacgcggcagctcagggctcgaagctagggaaacggtaaaaatcccctaagcttcgaggagaaaacctggacggaggcatagagatcaactcagcggtggcggaaaccgagaggcggacccgcacgtacctgggggctggttggacatggcgtacttgcgaatctcggccatgcgacgatccgaccgcgggcgctggcgccgccaccgccggctccaatcgcagggttcaggaggctaaaaattgcaggcctctcaaggggatttggggattttttttttttgtctgcgcggcgaggcacttcacgggatttgagacacggcgccgtcggattggaatatttgctgcgacggcggtgagtgtgacgagtgggaaaaagggtgcagtcg

SEQ ID NO: 81428 - DNA, 1176 bp, Zea Mays
ttgagtgggccgtaaactcgcgctcttttgcttgggtttgtgaagccaaagctctagctcgagtagcagaacatagcgcatccctcgaaaacctacaagcatactgcaacaccttccatgaagaggtgcacgtattgtatgatcggctgcacccaaaagtgcctctagaagtggcagcaatgggagctggaccatctggaacagcaaatggagggtctgatgggggaattgacctttttggggcccctccatctatgaatcttgctgatgaacggtctcctgaagcaggcagcggaacaactaaggatgaagaggattagagtagtatagtttaagcaatgtactcatgtaaaataaataagaaggttgagttgtaatactgagtatgtgtaattattactgttccgcaatgtaataaagatggtgtgttggcatgtaataattccagatgttttcttcctcagatgccatcgcgaacccatgctcatgatggggcaggtacatcccgcagcggggaggacactcccaatccgccacctgtacctcctaccctggccgaggctatcgctgccttggtcaacgccaccaccgacaacacgggctttctgcgtgaaatggcgggaaaccaatttcaacgactaggaggaagaggtcaaccacaaggaccacgcgacaccacctatctagagttctccgagacccgcccaccgctctttgtcaaggcggaggaacccctggaagctgacgagtgggtgcgggtgatggaacaaaaattcaggctaatccgatgcaccgagatacagaagcccctatttgccgctcagcagttaagaggccctgccagcacttggtgggcaatcttttccgccgtccagcctgcgggacatcaagtcacttgggaagaattcaaactggcatttagggaacattatgttccggaaggagtgatgcaaatgaaactggaagagttcatccgactaaagcaaggggtggattctgtgatgcagtatctcaataaattcaatcacctctcccagtacaccattgatcaattggatacagacttgaaaaagaagaattgctttatgaggggactaaatgacagactccagcgtaatatggcaatgtgtctggacctcacatatagcagggctgtcagtacaacactgtcagttg

SEQ ID NO: 81429 - DNA, 561 bp, Zea Mays
tggattttaatgtgaatggtataagcctgaatagaccagatagagcaaaaccaaaagggagaacaatcaaagatgaagaacaaaggatactgaagcttggtgcaaaagagaaaaagaagaatcgaaggtgccggatgtgtggtattgcagatggccacaacagccgcagatgtttatgcttggaggagaacagggcaaggttagcaagccttgctaatcgcaataatggacgtcccctaggttcgaaaaacaatactacaaccactactctacattggaatgaaacaacaactgtagaaaatagtgtctagtcgttaacgacgatgatgattcgattggtgaacctttgagccatgatgtcaatatggaggttggtacaagcataactccatagatagtgttcaacgattgtggtgtcttacgcatgaaacaacttgtgtttgtagaagaataaatcaggtatggattatataattgcaatgttataaactttaggcacaattatactaaattggattacaaatattttctattgttttgtcacatgatgtacgcaattgc

SEQ ID NO: 81430 - DNA, 939 bp, Zea Mays
gattttttgtcgaaacttcgcctaccaattctggatgcaaaagtttgctgtcctcactcaaacctgcccgacctaagatccaacgaatagctcagtcatcaatatcttttaatattgggtccaaagtgtcgttagctatagcttccttgattatcctgttccactgcacaacttaatggtgatatccggttgaccccaggcgatgggggtgtttgttcatcttcgctctttgagaattagtttcgcccagttctttggccttcagttcggtcttctgacgaacaaattcctcccactgagcttgagtgattttacccattttcttgggcggaggaaccttattcttcttaacaaattccctattcatctcggccttccacccacaaaacatcttggccatagcagagagcatcgacttccttactgcatcctctgtgccttttgggaccttgaatgactcagacaacttagcccatagcttattgcgggtgtcttcatctaaatccttccatttttgaagtgtgattagcactatatctctaacagtagacccacaggaatttcgaaactttgtaaccacgttaagtggttcttcaggaaacccctctgcatttagttttgttacgtacataactgcaccttctttcatctgattgggacctcgtcgccctcgtttccgcttatgtgaaacggatgattcaagcatcggagcatcctccgtgtttcgtgtagaacatgcatcctctttcttctcttcatttgaaatctatatattgaaacaattaatggtctttcatatatgaacattattttagaacatagtcggcatatttctatttacctcttcatcgttgggaatatagtcggcatcaagctcatctgatgtttttttcttccttggaggtatatgaggacaaggattgtcgtcactagatctat

SEQ ID NO: 81431 - DNA, 413 bp, Zea Mays
aaattctgactgtcagatgcactgaaaggggctcgccatggtacagtgccagaataagatcagaccgccagcgtgacagcctcgccgccggcgacctctctgcgcgaagattcgtgccgccggcgtaccgattcatactcggggtaagtcgataacatcgcggggtcaaaagatcttcgccgccgttgagctagatgtcaccccggctagccgccgtacccccctttttgcactacggcctgagctgataagctcgccggcgacagccatcttccgatcttgcgccacgtgctctggtacctccgtcgcgttgccatgactccctatagccatctaatcatcgccggtgaggtcgccatgacggtagacacgagttcacgcgcgctagtaactccctgtccctccgaccgccg

SEQ ID NO: 81432 - DNA, 692 bp, Zea Mays
cgtaaagactccagaacacgttattttccgattgggccgacttttgtcgtagtttgttgtgcgaaaacggtatccattgacgtcatacccagaatatttctttaccctataagcaaagccattggctacttgtcacaactcggcactcatagatggatctctttggccctgcaagtattcgcaagttaaaagacgctaaattgagttcaaagatgtatctcttttacaaactaagcacgtaccttacgtttgaaccaggaaatgaaatcgggcaacccatttctcgcaccctttctaagaagagtgtcatattcctgtggagtggggtcccttgatcgacgccaaaattcatgaagaaattgttccatgtatggagtcacctcttcaaggttggtcaatacatatagcatgatatgccgccactcttcatgtgtcagggtcttggtggtcgagccacttgcgcttctgagttggcctcgaaatatgctaaggttcgattcattgtcgccatcattgtaacaaaggggtggattatgcatgctcggcagtttgtcaccataataagttgttgtgaagtttgagacctcttctagaatatatgcctctgcaatggaagcctcgattttgcatttatttctacatttctttcgaatagtatttagacatctctcgattggatagcaccaatgtcc

SEQ ID NO: 81433 - DNA, 562 bp, Zea Mays
gaaatgacttggaattgagccgatacttcacgaataggtttatatgggtaaatatgagtgaagtgtgtgcttggtttgagtttaggtgaagaaagtggaattgtggcactcagctcgaaatcaatggctataaaggggaattagagtaaattgaaacctgggatattggattaacatgaaatttggcgaatttgttactagaggtattgtgaaggagcctgaaaaatttgggatcgattggagcgtttttggctggtttgggcatttcaccgagcacgtggtgtgcgacgttttagggttttggtgaaacggccattttaggtggtgaaaccctcccaaggggagctaggaacctgcatggatgttcaaatgatacacatggacagtcacaagagcttggatcaacagatttcacaagatttgaaaattggagacaagggtggaagagaacctccagttgtggctgttggaacaggagagaaaaaatgggggaggcagagatgtgctcaccagagaagaggaggccgagaagcaaagcctgagggggtcaccggagcacggc

SEQ ID NO: 81434 - DNA, 1135 bp, Zea Mays
gcggctgcgggaagccatcgaggagctacaccggcaccagggcggtggcgttaagggagatggggacgagcagcgggagggagagcgggggtgcggtcacgacggggagtcatgcgcggcgcacgccgcggggaacctgtgccagagcttcctgctttcgtacggtgtccgcgtcggcatcggcatcctcctccgcgccttcaagctcgtgcgccgcaggtcctatggctcgctcctcgaccttaaggtactcctcctgttacttcgcatcgtggcgtaattagatcggctgggatgacagattaatcggctgccggaattcagttgagagcttgggattggatatgcaaattcactacccttggtttcattggttgatttgagtagaattggcgattttgcacgctgatgaaaatgtcatgagaaggaattgagcgaaggacagattcatgctcacatgctgctactgctgatgttacagctttcgctttctcaattcttattagattggactatcggtgataatgaactgacaaaatttaaaatatttgagccagctgttgcagcatttgtagtgcatattctagtagccagtacatgccagagcagaattggttgctttgactgatatatgtctgcataatgtttcctagtatgcattgctttggtctatttcgtgccatgaggctgtccgcgccccattccaaacaaatactgttcggccactactatctgacctactggttcattgtttacaaatactatcccacaactaatgtctctccatgtccatgtttcgttatttaattaagtatatactcatctctatagactatatctatatctatctactatattaaagcaccagttttcctggttccttgttttccatcgtcgttgtgctccccacatttaaataaataaataatgctaaaattatgcacgaattcaccatggctgttggctttaaaccccacattcatacccacctagcaacagaacacacacacatctgtgtgttttatattctgtacctaattataaatggaaatcaaaacaacgtacaagcactttgctagtttgaataaaaaggacagacctagtgtcggagtctcccacatgagtggggtatagg

SEQ ID NO: 81435 - DNA, 655 bp, Zea Mays
cagttaagcatgtctttgatttttcttaccctcagtccaaaagtatttctatttttcctctatttatttggttttgggtagtatacttaactaaattgaaactctaaaaagtcttgcagtactcagggtgtttgttatttttcctaagtagttcataatatttaggaccaagcaaaatttgtttgaccaaatttggctggataaaatttgagttacgaattttgcaagttatgtattcatttaaaagaataaagctttaaaggttttaaggaaaaccagtttgcaccgaggcccctctggtttcctctaaccatttctttcaacggtgcccctgcggaactattcccctgaatcactgacttcacaaaaaccccccggctcgtgtttctttcaacctgggctccttcccccttgtaatagtaaccgcggagaggaaaaagggtagtgcggcttaccggcggcgagggaggtccgatgaagggctgggtgaggtctgggaggtcctggcggtcacgtcgaggtgcaagtcatcgacggtgatggccagaataggtctgaccgcgtccgcaggtggtagggctcgttggcgccttgtgctccggcctgctcacggcggtagggctcaatcaaatggcacagggagcttcacgggatg

SEQ ID NO: 81436 - DNA, 573 bp, Zea Mays
tcgaagttaagccactgatcagctcggctaaaggatactgtgtgctccgaccatcggtaaggagcgggggcactgttcgtggccactagaacttgccgatcattaagtttttgttgccttctgttttcttgtgttctgtggcctccgaatatgacgttgaccttctggtcaacgcgcgggaaagctccacctctcccccttcctattcttgaggctgcctaggctcattaggctctcctcgaggcgggggaggtggcagtggctggaacgatcggtcgtgcccgatgaagtttttgaagtctctgcagtttcgcagggtgtgccgcatgtccttgttatacggacactaggaatctaggatctcatccagtgttcgtaccccttcatggggtgcgccgcgagctcgagcggcaggtggcctggcagtgtgcacctcctcgtggggcctcttctcccagcgtttgtctgttgctggttcgtgtcccttcgtggtccgagcggtatgggttttgtgattccaatgaggtcatgagcccactcatccgcagtgatgtatacgcccgcctctatgaa

SEQ ID NO: 81437 - DNA, 534 bp, Zea Mays
gggtggttgatattgttgttggtttgcttgttgtgtcagagggggtggcagggctaatctttcttggtgttgaatgcatggttgttggggggaaagcatgattgtagtttcattggtgttgtgggtaatatggatgttcgttttggtagtgatggtggtggtatggatggggttggtaggtatgagcgatggctctatggttgtattttggggcagctctggccatctggtccttggtttccttagtttccgggcagtctctagttgggtgctctgagtcttcatcatggaagatgtagtagaactttcttggctgctagggacctctgcctctgcctttgcctcaagttgcgttgccattgtagccttattgtggagggtagttttggtgccggggtggccctctgtcggttgtagctggtttgtgatgttatggacttggagttgctgaccacactctataagggcagagtcttcctacgggggccttgtccatgtcctgctggtttgtggagtctcttttggattccgttg

SEQ ID NO: 81438 - DNA, 357 bp, Zea Mays
cgggagatgggatcagagcacggaggatcctgtaggggacgcgacaatggggggcagacagtggggtgttgcggcaacacgtaggcgccaaccgccaaagtcattggagcacaacccccaatttctccttcctcgaatcgaaccttttaattgtgcctcctggtgcgggtgcctcttcctcttcctcttgctctttgctccagcctccagctagcttcgtctatataagcaaccagccatcagccttccttctctcctagctagctactagtacctgtcctgctgtccttcacatacatctatccatcggtttctcagctgctgctgcatacacacctcggccgccgccatcgtcgt

SEQ ID NO: 81439 - DNA, 488 bp, Zea Mays
ccttgtaggaagtgtgttaactaattttggagagagaccagtgaagtgcgagaacacttgatatgtgatggttttctaaaagggtacacaacatgaaccttacatggagaagctttgttctcctttgtgaatcatggtaacaatgatgatgagtttagtgagcatcctagcgaagatgatgcaatatctgagttgttaaaggatttagcttgtggtttagatgatggagggcatgagcggatttacatgggccaaagggggtcatgtccccctcaatttaaatatttcttatacctaatgttcatttacggttaagtatagaaaaaataaagttgtggatggactaaactagttctgtcctgagcctcttagtcagatcaatccagtcctctcgactcttgtccttctccatcacatgaccccgctcccttcctagtgcaccgccctttgaggagatcgacattcgacaaggtacatatagtttcaat

SEQ ID NO: 81440 - DNA, 645 bp, Zea Mays
tagtagcttcaatgcatttcaaacaatcgtcatttggttcgtcgaacttctctctgtatctgaaggtatatttcaatcgaattaatccaccttcgctggactcagcagtggtctccttcggcatctcccagctatccacaagtggccacactctgtaggctatgtgctcttgaattatgtcccttgtgccaatgaaagcacaaacattgctaaaagccttctgacatgcttcgacgtcactttcaatagccaccttcggcctttggaggccgaagcgagaccagatggggcgctggataatttccttaatatcctctctttcaatcagattatttttaacataaaaccattcctccatccaggccccgggccatcttttccggtatgttggcaccaggtagcttgcattagagcgagcaatgaatccgtaacaaccaaagttgttgtgatactattctttgccaatggccttcgtctcgtacaaaagttcatgcatactgcaaaaacacttcgcgctcggttccagcccttggcttcttacagcccaaacaaacaagcccatcctaattatagcttcaggggtaagctgctggagaaagatctggaatatctttagcacttcaaccacaaattttctcaacagga

SEQ ID NO: 81441 - DNA, 478 bp, Zea Mays
atgcgcctagcactttcatgagattgatgaacgaggttttacgtgctttcattggtaaatttgtggtggtatattttgatgatattcttatctatagtaagtctcatgatgatcatattgaacatttacgtgttgtttttgatgttttgcgtaatgcacgtttatttggtaaccttgagaagtgcacctttagcaccgatcgtgtgtcttttcttggatatgttgtgacatcgcagggcattgagatggatgaggcaaaaattgttgccatcacgagctggccacttccaaccacggtcacacaggttcgaagttttcttggtcttgcaggattctacaggcgatttgtgcgggatttcaggaccattgcagcacctctccacgagttgacaaagaatggagtgccgtttcgttggggatcgtcacaacaacaagcttttgatgccctcaagtcgaagctcacacaagcaccactgct

SEQ ID NO: 81442 - DNA, 651 bp, Zea Mays
gtagtattcgctcatattcttggcgaagggttgccgatgacgaggggtcaacgtctgctctaactcagcccacgaggggggtcaattgccttcgtgctctgtttgatggatgctatgagtggatgtgtctttgcttggcgtttgatgggccttcgtggtggaccagttcccatctgccttcgttggtcatgtcgcctcttgccgagggggccacttcgatacatgtgtgtgatcaagtagtttcctagtagttaacagtgatcaagatatggatcgttcctcgtcccaacaaccactccactaactaatggaggagaagcgactaagtgggttattaaaaaaagagcagtgcactttctcaactcgtatctatcttgtcttttgattaagataaagtatagtatttgttcttagcagtttaacatttggtatgtggaggatcatatgtccatgttaaattattttttttgtgtgtaaagtccaccacactagcttatcactagactctgacgtgttgtcacccattgcattgttgtatatttgtgtgtcgtcgtaacacacaacattatactagtttttatagataggagtgcttgttgcacgtttgtgtacaccattttctttttcttttttcaaaaacctcttaaccac

SEQ ID NO: 81443 - DNA, 339 bp, Zea Mays
caaaccgtgagtccattggctaagaacgggctaaatggattgtacaggtctattaattagcgatgggccaacgaaatcataactggaccccgacacaattttgtggccatcaaggccatggcagctgggccacactgggtctatgagaaactggtgcacttcacacgtgcgccatgtgtcattccgtgatgcacgcatggctagcgtgctgtccctatacgtacggcagcatgggacagatctctccctcacgtgatcccgtggtggagtcgtcgtcaacccctagccgataagcttcctgagctctagattcacctgccacacacgccgacacgcgat

SEQ ID NO: 81444 - DNA, 1216 bp, Zea Mays
gtgaattcttgatccagacaattacttgccctttaacttgaaatatgaaatattctgaagaaactacgtgcatcctcagatgctgaagcaagcctattgatctcaaataacaacgtgttttcagtttgcctatgaaatggcgcgccttattccctctgtcgttgtttacctagttaggtcggaatggtgtggactcagctgcagcgaatcgcactccatcaacaggaaggtcaacctttgcacctccagttggcgttagtgtgaggcctctacaagctgtggaaattcccaatgggacacctagggatagaaggtgaattgtcaagctttttgagatatttctcttgctaatgcattgtcacattgttagcatgtctcttcaaaacagatgtcgctctcattctattaatgattttctgccccatttcgtagtggggttcaggggttttctcgatctatgtgagattgtcttcttcatacgatgcttggggctgccttaccccaccggttgagttttttgtatataagtagcaacaagatttggattaacagttgatatttcacggtgctgtagggctgtttatcccgatcctactttcgcccagtccacacggtcacgggactcacatgacagttcaacactgacagaagaggtctctgtcgccgagcataccgctcacaccttctacattctatatttttcagatgcttttgtactgaacagttagtgaacttacacggggctttcttcagtaatagtagtacctttttccaatgaataaatctgcaaatgctgtttttcttttgcagcttgaaatgctaaaagatgagaatgtaaatcttctggagaaggtgtgctatgtttcttacttctattctaacaaattttatgaatcagaaactagaagtgtcttcgtctcatactaaacttatgtaatatactcaaattcagcttgggctagcagaagagaaacttagacaatctgaagcccggacaacagagctcgagaaacaggtatctgtttagcaattcaagtatctggtattagtgtattactgtcctagattctgcttcattcgtattataaaacttgatatagttattagttctgtagcttcttttttttagcgaacgtacatggttttgtagcttctatcagagatctgaattttaatactgtgattgatgagtttctcaacatgcataatagtaatg

SEQ ID NO: 81445 - DNA, 731 bp, Zea Mays
atttcatgaatctactcggctattgctaggaagatcaaccttttaccagagcaatggttttcgaatacgcgctatggtaagtcacttgatcaaaactttcaccttgttcggctaccgcagctacaatccatagaaacacaatactgtacaagccgtattgcttgcaaacataccatgtaatggtacacctgacaacatgtttgtttgcatcgcagttagagaagccgatcaccgattggactgggcggcccggctgaggatatccatgggggtcgcttactgtctggagcacatgcaccagctgaaccacctgttgtgccaaggaaccttgactccagcactatatacctcactgatggcttcgctgcaaaggtctcggacactgccaccaccaagggatcggattccagctcaaccgctgatgacgagctctcctcggtttcaggcatagatgccatggttcatcagtatggcatgctattgctggagagactaaccggaaaagttgcctactccgaagaagacgacgacgacggggtttcactggagcacttggcgtctcgctacttggatgatggcagcatgccccttgcggagctgattgacccgagcctcggttggttccctcaagaagccgcgcacgcactgtgcgaggtcgcaaggtcttgggttgggtggacccagaccccaacaagagaccactgatggtacaggtggctgctaggatgaag

SEQ ID NO: 81446 - DNA, 280 bp, Zea Mays
tttatgttgaagctagaatctagagcagtgccaactaccccctatgtattaggagccctgggcttgaaataactaaaagaatccccaaccaatcgagcaaatccggcttagcccaacccagtccaagcatctggtcacgctgactgaaactacccacaaaaccatggtgaaaaaccgaccacccctaaaactgtcccaaccagtgtttaccctatgtgtcaccgtgccgagatccatggaggattggcccctctccccaagcctagattcaaggcatcac

SEQ ID NO: 81447 - DNA, 459 bp, Zea Mays
ggcgaaggggtacactaggatccgagccacaggattagaaaccaagggctaggattagatcggccaaacactgaaccagttggttttctaggccaccggattgaggatcgacggtctagattttaaagtcacgcgatcgattttcatccgcccgatcgagatctaacagccgcgggtgaatcgttatcgcgcttctaatcttcaccgttcattagaaaatcaacgccacacgccatcacccccaacccagccaccagtagggcggcgctacacccaaccgcggtggagggttggccggagttcagccatcaggcgcaccagtgccccaatttacaagcccatacgcgctacacggtactgagatcaaggcgaattggtcaagggcacacttacccatagttcggacgccgaggtattccgaccacgggtggtgtggatctgcggcgaccctggcctgcc

SEQ ID NO: 81448 - DNA, 529 bp, Zea Mays
atcgtagtgttgctttgtagcgtgttacaattggtgtgcttgtgtgttcaaggaggaggagctatcatcttatagttcaagggaagaaccttacagaggtgtcccgcttttcaccaaagagagagctctactgccccgagcgctgaagtggtatccctaaggtccgtagggttgagtgtggttgtactcccggcatggcgcactgcatcattcgtccgatgtatgagttcctgtagcgagtctgatgttgtcgtagtggcgatggaactttgtcttttgtcacaaaccctgtgtcaccctcctgcgtgcgtaggcatacacccggttgagagcacctagagggggtgaataggtgatcctgtgaaaatcaactctaaacaacacaaacttagtttataaaatgttagtgaagtcaaaaccaaggtgctataaatatagagggagataactcttcacttgattgtacctttagaatgtgtattgaacttaggaacaatagtgcaagtgattaaatgagaactctaaggaa

SEQ ID NO: 81449 - DNA, 688 bp, Zea Mays
gtgactcatcccttggatgctgtgagctcaaccttgcccaaatttgtagcaccgatggtcaacacctataaattgaagactctctctgctcctccatcttgctacagacccagcgcaccgctactcacttcattttatcgaccatagcctgagaactccaaatttccctagaatcagccagaacgccaccgtgatacacctcgacgtggctagagaataccatgtcggttcatacttctatggtctgtgttctagtatccttagggtctcctgttgcttgtaaacccaaccgattgaactctaccatagtattttgatgagaacactgcctcgccgtctttaagcgccatcgtggccctccttagcgtggccggctaattccatcttctttccggtcctttaggccattgttacagtagccccctaaactattgaggcttgccatgctttgtgattgaacactatcacactacgttgatgggaacggcttcgccaatccttggtgtccaccgtaatcgcggatagagggtatcccaagcccgattagttcaattgatacatggaatagggtcgccttggctcgaggatggtgagcaggtgctccaatttgctggttgtcgatgtttgtagcaaaatccagtgagggatagtcgacgggcgagggcgtcgtcgtcagggacatggaacc

SEQ ID NO: 81450 - DNA, 370 bp, Zea Mays
ggagcccaatcatttcttctcatttgtcgatcccctatcgtacacagttaatgatgtagggttgtttggtttcctgctaaggtcattcttagtgggagtttcatcatagtttctgttgtagtttttggaaccgagggacaataagatttgtgttcagcataggtgctagcgcggactcactccgaatggtgagctgcaatgggctcgaaggtggatatgagacgagtgggttatactggttcaggctggagtcttagtacagtgtagcgctggtagtagtattgcttggagcgtgttatagttgggtgcttctgtgaagctgtgggatgtatcttggatgatgggtttgtcttgaccttttataactcaa

SEQ ID NO: 81451 - DNA, 618 bp, Zea Mays
tttatctcggaggtatccggtagtgaactcttctcaggacagttacagaagtaatgaccttcacgtccacattgatagcaagcttttcttgaagttatttcttgactttttccatgtttcccttttttgtttcttggacctgatgcgaacacgaggctgaaactgtgtgcaagtgatcgtccatccatcaatgtaatactcatgtgcttcttcttgtagctgggcatccttgtgatgtttcctttttggcatactttgcaattcatcaactgacagtgcattagatacgagagaatctgctattagatgttcttgggggaacatctgtctatttatgccagaaaataaaatcatgttcttctattttgtagtttcactttcgtttgtactgatctggcgacaaggaattccatagtactcgcaacaacaacatgttccaaggtcacttgtctgttggtttggttgtgcatcctgttgtgtcttgaatgtttgttcatcaactgttttatttatagtgttgttttgacttgtcaacacaccgcattctttgcatttagtgacatcacttgtagttatcattccaaggtctgacatctgtatgggtatggaagaatggga

SEQ ID NO: 81452 - DNA, 423 bp, Zea Mays
gacgaggcggtcgttggcctcggcgctggcaatcacccagtcgctgcgccagttttcccacctcgcaccgccaaaggtggggatgtagacgacggctggatctggcctcgtctggaagtagtagacactgatgtggtccctagtcttcccggacttgaccagcacggagaagaagcggaagagggaagtacagggggccacacctacgaacatctcgcagaggtggacgaagatggctgcctggaggacggagtggggcgtgaggtgttgaagctgaagccctaactcctccagcagcagcagaaagatgggcgaaatcggcagcgccaacccgcaagagatgtaggaggtgaacaacacgaattccccggtggcgagatcaccgaggggggcagcgccaacacggattcttccgacgagccc

SEQ ID NO: 81453 - DNA, 458 bp, Zea Mays
gttttagctgtgtattatactagaagtaccgtgcaacagtgtcagagttatacacaccctaattagtagagctaaaattaagcatcattaatggtaatggcaaaacaattattaatatcatggtgaaattagacctcgaaaaacaaaagctattgtagtactacaacaacaggcaatatatttatgacaatgatactgcatgagagtacgtttgaaaccctaaacagttagaccctgctagctactttcgtgctccaaaaagatccacgtcttcgtgcatagtatgtttcgtatcaaaaacaggccttaaatgaagccccccaggaatcgtgctgtcgtcgtgaatactccttttcttcgtgccgtgtggtgtagggtccttccttcattaactgagacacgatctcgtgccatcaaattttggtcgcgctattcatttatatatacgtacgtagtac

SEQ ID NO: 81454 - DNA, 423 bp, Zea Mays
gtggaccatagacacaagtcaaccaccaggtatgtccttcctcattgcaaaattggactgaaatacagtgaatgtcaattctatgctgtcctgtataaccaatatgccgcttccaggccataagcactcccccacttgccccaattgatgggaggaaaacataaacagtaaaatctgcacctagcatagaaaggatagatcctctagggacagtttgcattttagtttcctgaatacagatcacatccacctgggaggaaatcaccaattcttttaccgaatcttgccttacagaagagttcaaacccctcacattccagatcaaaatttttgaaggatccataaaaacacacagcagccagaccgccaaagaagagagacagggctctaatgagtctctatcgctgctgggaaggaccagcc

SEQ ID NO: 81455 - DNA, 507 bp, Zea Mays
attcattccatacgccggccggatcctctttcactttcactgtcatcgtcatcatcatatatcatctctgtacaggtgtctctgtccctctctttccctgaatgtgtgtcacaagtcgtcgccctccatcatagcatacgtacgtacgtacagcagagtcaactacctctagctgtgctagctagttcgtactagcttcttttggatccatgcatgcatgtactccctccccccatatctcctacgtatcacatgtctctgttgcatgcatgctatcatcgctcactcgcttgctagttgctacgtacactgaacatttgttacacgtaaatgatatatgaacgatccaaatttcagagggcaggcaccacgatccgtccgtgacaacatgcctctctctatctctttcccctggtcaactgcccccaacctgcagaatgaggatggcctggccgaactccttgggtgcaaactttttagtgacaacgagaattaaggggtaagctg

SEQ ID NO: 81456 - DNA, 341 bp, Zea Mays
cttgagccggttgtagttgggcggtaccatggtggatcgaggggtagaggtggtggtgaccccggaggtgtgcacatgatttttttgagtaatcccacatgaaacacatcatgaatgtgtgtcgtggccgaaagttcgaggcgataggtcacctcgttgatcatggccgtcaccttgtatgggctatagtaaaacgacctaatcttgccacgcattgctgccggcagggtcgttggggtgtgatgacggacctgtagccatacccaatctcctggtgagaaggtcaaagccatgtgtcctcggtcgtaggcatgtttggccaccgcctgggcttgttccag

SEQ ID NO: 81457 - DNA, 562 bp, Zea Mays
cgagctcgcatctcctcttttaacgcattcatgtttgtggtgcagcacatgtgttaacaagttcattccaccaaatggtattaaaatctttaaactcaataatggcttttctaaccctataccgctcaggaacgatatgggaattaaatttttgttcaaccgtcatctcacagtctaagtaggctccagcatcataagaaccaatgaatgaagtaatggagaacttaatcttagcatatgtatcattgtctaattcaggattatgatgatgacgtctaccattacccccataccttgtcgattacgtgtgaggcatcgtcgtagcagtgcatcaacatcgtcgtcgtcgtcctcctccgcaggagagagcactaccgcaccaacagctggagcttgtggtgggggacgagcctccaacatgtccatgcgtgtaacaagttcggcaacacatcgatcaagctgctcataggatgtcactgtagagtcctcgtacttattaaaagcgtcggtcatcacgcgtatcatctccttcaattccagctgagagacacactaatcatcg

SEQ ID NO: 81458 - DNA, 303 bp, Zea Mays
gtctggaatccaatactcttggatagagtgcttataattttagcaatggcgcggtcgcggatgcatcccacaatttcttcatcgacctcgacgaagagcattgaccccggctggtagccgtaggagatagcaaattcttttagctgttggccgcccaagtgtcgaaggacgaaattcacgccttccgaagaggtttcttcaattttcatccccttatcagaaactactgcggctacctctttctccgcaaccacgtctgatataagtctgtcgatttctgacagcgtggttgtaagattttcg

SEQ ID NO: 81459 - DNA, 626 bp, Zea Mays
cgcggcccaaccagccaatcggtgtgcccatactcagtaccaggtgggcccgccttgtcatagccacctcccacaacgcgtcgcaggcatgacaccgccatgtggccccgtgttgtcagctccatcttctccccttgctttctcggtaagagataccgcgccacaacaaactccgcgctaactgcgacctggactcgatctccctgggtataaaagctgaactcggggccccgtgacctccacacttgcaccgtgccgcagaagctgcttcgccgtagagaaggggaggaaggcaaggaaatctgccgccatggtggaatctcgggtgcgccaacatttttggttgtgcggggtaatcaggggacttcgtcggtgatcaccgagtgcagtcgtgcgcttactggcaaggacatccgctgtgggtttggcaaatcatcaccggagttggagccccgccgttaagccactccccaccgtggtcggcctccgcggcttcatcaaagctgttatggggtacctcctctgttccgctcatgttccaattgcattttgcactgggtagttcgacgtgatcgctggggcttcgcggctccggcatgccatcgccgtcgctcacgggcggcgcc

SEQ ID NO: 81460 - DNA, 1210 bp, Zea Mays
ctagcctcgatgacaaataggaaagtgtgctcgtccagttcctgcaagacaatcgggacgtgtttgcatggcaacctgcgaacatgccaggagtcccgagagagctggtcgagcacaaactcaaagtgtacccttaggcaagaccgatctgacagaagctacgacgtttcacgcccgacaaaagagaggccattcgggcggaattagctcgtctggtatcggcaggtttcattagagaagtactacatcctaaatggctagcaaatcttgttcttgtactcaaaaataataaagttgattggcgcatgtgcgtcgactatttcgatctcaacaaacactgcccgaaagatcctttcggactccctaggatagatcaggtagtcgattccaccgctggctgctctatgctctctttcctggattgctactctagatatcaccaaatcagtctagcaaaagaagatgaagaatagactgcattcatcacaccttttggggctttctgctatacctccatcctgttcggtctcaaaaatgctagagcaacttaccaaaggcccatccaaacatgcttagccaaccactggggcaagcgagtggaagcctatgttgatgatgtagtaatcaaaactaaaaacccggatagcttcatcgaggatttgcagcatgtcttcaactgcttgaggcgctaccgatggaagctgaacccagagaaatgcgtgttcggagtaccgaccggaaagctacttgggtttatcgtcagccatcgaggaatagaagcaaacccagaaaaaattgaagccataatgagaatggagccaccacgatcacagaagaaagtacagaggctcactaggtgcatggcagtgctgagtcgtttcatttcaagtcttggcgaaagagtaataccattctataaatactcaagaaggtggataaattccagtggaccacagaagctcaagaagccctggaagcactaaagaagtttctaactacaccaccagtactcaagcagccgcgccgagctacgtccgatcagccagccgaggacctactactatatatctcctgcaccactcacatggtaagcactgcattggtagtcaagaaagaagaagaagggcgtgcgtatccagtacaacatcctatttactttatcagtgaagtcctcggtccctcgaagataaggtaccctcaagttcagaag

SEQ ID NO: 81461 - DNA, 364 bp, Zea Mays
aaaggggcgggccgggggcgctggggcggagcggccacatcgaggtgtcgctgtggtgagtcagcaagtccgttgcaggatgacgacgatgaagcgatagcttgcgaagggtagcgagggtaggtggtggcaagcgacaaccattgccgcattgcgacggtgtggtgggaccaagtgagatagtgaggacagttggtgtcatggtgccaaggtaggatctcaccgagatcctgctcatccgtagttgcggactaggagacaaagtagcggtgttgcgtgcaggatcccgacgacgcgatgagctgacgagtgacaaggaggcaaaataggactaacaacaggtgggttaggtcacccactaacc

SEQ ID NO: 81462 - DNA, 415 bp, Zea Mays
ccggctccatacggcacagaggcctagtcagcccgaagcttaagctctgagggctcagcactagcgtcttgagcttctccctcttcttctcatcgaccttcacataaaaccactcatttttccaactagttggccacttggtccgatagctaaccaccggagtcttcatatctttgcgataggcgaagttgtaacaaccaaagttctcatgaagaccatcttctctggccttcgtctgataatggagctcgtgcacttggcagaaggcttcggcattcgggtctattccttggcttcggagagcccaaatgaagacgctgagcctaacgatagcattaggagtcagctgatgaagatagatctcgaagttttccaaaacttctccaatcatttcgttcaaaggaaacctcaatcc

SEQ ID NO: 81463 - DNA, 352 bp, Zea Mays
gccgggaggaaatcagtaccaacgtcagaacaaccaggcagctcatcttcctgccctagcaaccaaccagaatggccaagcagccccagcacaagtaggaggtcgtgcatgcttctactgtggagagcagaatcactgggtgaagaattgtccaaagaaagcagcccagcaaccgcaagcagtcaatgccccagcaagacaaggagcgccacagcaagcaccatgagtccgtggtcaggcctacaaccatggaaaggtgaatcacctggaagccgaagcaatccaggatgctcaggacgtggcagtaggtatgtttccagtcaaatactacccagcaaaagtaatatttgat

SEQ ID NO: 81464 - DNA, 285 bp, Zea Mays
agatttgggcatgaaggaggtgatggatccaagaaacagtcaaggttgctgatccgtccctttaacccaaatcgctcttttccttgtccacctgtttatcctttcaagcaactagttttcatcatcccactcctgcccttactcaaaacaatcagccgagtgtccctggtactcgtttcccggccttacccagttcatctaatagatgcttcaattgtgggaagtctggacatttcatcaaggattgtccctatccaaagcaaaataaatcaaactttcaaaagg

SEQ ID NO: 81465 - DNA, 676 bp, Zea Mays
ccgccggggattctcgacctgggcatcgctctggtctcggcttgcggttgcggatgctcgcttgtgtcgtccacacgtctccatgtaccttcccggagaggatgtcctctgtgggtggactaattgcttgccggagcaatactcggccgcggatttgcagctcgctgtggaccgttcccaccactacacccttgctggtaagaccatctccgcatcctctgcgtcgtccttctcgttgcgatcgcattcgtgggttagtgttttaggcggcgggccatcggccgaggcctcgccggcggccagcgccatcgtgggacgcctgcgcgtcttagaggatctggccggaggacggtgatggcctcctggccgttcgttcggcagtggatggctgggattgaatctggtgagggagacaaccctggatcgttggatgaccttcggacgatcaggattagggcatcgcgtaccgattggctcggcttagtagggccgtccgatgcggggcgagcgcgtaggattagatagtgttcagaagtgacctggaccattgatccattatccaatggtcctcgctgctcaccggtacataacacgccagatccaatcttcgccgctagatctaatctggacggctctagttacccgatacccctttggcctgcaaatctttctaaag

SEQ ID NO: 81466 - DNA, 870 bp, Zea Mays
gcaagtgctcggcccatgtatggttgtaaaccaatatatcatcaaagaagacaagcacacccttcctcaaaagtggggccaacgcagaattcatagcgctttggaaagtcgctggggccccagaaagtccaaaaggcatcactcgaaactcatagtggacgtgatgagtttgaaacgtcgtcttgtgttggtcctgtggattcatgcgaatctgatgaaatctagctctaagatccaaagtagtaaaccaagcagttcctgacaattcatcaagaaattcatcgatgattggcactggaaatttagttttgactgtcagggcattcaagtggcgataataaacacaaaatcgatatgtgttgtctttctttttaactagaatgactgaagaagcaaattcactctgacttggctggataattcctgtcttcaacatatcagcgacttgttgttctatctcagtcttgagggcaggagcatatcggtatggccgcatctggacaggtcgagcccctggaagcaagggcaccttgtgatcacaatcccgaacaggtggcattccttgaggcacctcaaacactgtcgaatactgatgcagaagctgctgaatatcatcagggagtcctttaagaattgactgctccttatccaacaggtcttgaatactgcagacttgaatcagggcagtctgcatgaccgaagcttggattcctcgcaacatcacagtagaattccgaagaggaatgcacaaccatttatgtgcccaatggatccacatgggactatgagcttctagccaatccataccaataatgatatcataagtgggcaagggcaacaccttcaatgtggatgaaaaggaaacaacac

SEQ ID NO: 81467 - DNA, 730 bp, Zea Mays
ggagcgaggccagcagcatgagctgcggcagcagtccgcgcagtgactacgaggaagatgtgggtggcgtgacctgcatcatccatccccgatagatatgattctcaccgcatctcatctcacgagtctgaaatttaactgggagcagggcgatgagtgtggcagcatggaagaattcggagcgcccttatcggtgaaatactctttcagcaacttctcgttcaaggtgaagtatatttctcataatattgtcagaagaatccgttccttgttgcattgcatacgagttctctctctctatatatattttttgtgtgtgtggctgtgatgtgcagaacatctctcagctggcatccatgaactacgacctgatgacgaagcataacaacctggatccgttgcagtcctccagatgattgcgtcatcgtgtggcaatgaagggtagccaaagcaaaatgctagtaaatgtagcttgcgctgagaccatgcatcatcgatcagaagataggaggaggatggtattggtatcccctgatgtaatctctgacaactagctagctgcagatacatagtgcattataaaccttcgattcttcatagaaagaaaagatggtgaatctctttctttctttcttgtttaagagaaatggttcacaaattggtataatggtaatctaaacttagccatagctggccgcatcgagcataaatcagcgaccacaaatgaaac

SEQ ID NO: 81468 - DNA, 856 bp, Zea Mays
tcgcagactccttgcagaattggaactcgaggccataagcttgtacttgtgcgtggattaggccacaaggttcattcacgctcatgggaggaatcgtaatttgtgcctcctcgacctcccgtatcgtgtttgcgaagttgtggggtttagggttcaatggggcgctgcagtggctcttgccattgcacagctacactttagtggtaacctccatgatgccatgggcttgcctgatggatcaacgatggtggatctataccttttaacatgtgatttcgatggtgccacgaacgttgtacttagggtagtgtcagtagagaaaataatagatgatctcccatagctcttgttttgtggccagaccgtcttgacattgcaacgtgcatgggttttaggtccccaagatcctagccaatctcaagatttttcttggtccgcggggcacttttcgtgcggctttcactcgtccaccatatttgtgcggggcgagcccacgatcctctgcttgatgctgaggtctgtctagggggtgtcccgtctttttatcttactctcccccatgcatccccttcacgagaatgaggggaggagattcgtaccacactttcctcgatgggctagcagtgatgctcgatgagttacaaatgggtaatccgagtgacgccctcgttcctttcacaggatccaagcacggggttcgttggggaccatcctcatactcccgagcaccatctcatatagttatcgactccgttcgactggaaccaatggctcgctgcctctctcctcgaacatgagctgattatgcccttaatgcttcacacgtcagggtcctggtcgctagtgtgcccatcac

SEQ ID NO: 81469 - DNA, 400 bp, Zea Mays
gctttcaccggcgatgagcggacatgctaaagtgattcactgcgacgtggtagagcaccaaggcacatggcacccgagaggcaggcggccaactccggcgaggttatcgggaccggccgtaaggcaaggggggtatgccgcccagggcgaaatagtgtcccgagctcatccccagccccagatctttcatccgaggatcgttatctgcatttaactgggcatgaatcgcgacaccggcgcgaatccgggcgcaagatcaccggtggcaagggggactaaacctgagatcttattcagtttactgtactattagacctcatcagagcgtctaacagaccgatttacatggctcggatctcagatttttatgtagtaactacttaatccatctgtaacaaag

SEQ ID NO: 81470 - DNA, 362 bp, Zea Mays
ctcggggtaaaattgcctagacacagatcggctggctccaggactgcgggttgaatccgcagaaacggaggggctcttttgaaagaagtgcacggcaaaggggtaccgttgattcagagccgtccgatcctagatccagggaccagattagaaccccgactcggtacgcgcctgatttaatctctaccgcttgttttcaatccgaaggcccgagttctattactatgggatcccatctccatcgcccaactacaatcgaacggtcagcatccatcttcttcctccagccacacccaccgatcgcggcgcccagacaacggtggcaattcgccggcgagcacacacaccgacgctctaacgct

SEQ ID NO: 81471 - DNA, 365 bp, Zea Mays
gtttgagacggccttagctggctgacgtgaatgaacattacttatttcccccttttagtgagcggagttattgttcaatagtatcatggttcccattattcaagttatgattacatgtgtcccctgtttaaatcaatttgcctgaagtgtaatgtgtcgattagttgatgtgcctaatgccatgaatgaagaatgaagggttaatcttgttatgcaaaatgtgaaatcatcaagatcaaactcgcctctacgaagaactttgttatgattgaatcattggacttgatgctgctatgtaattatgagaatgcaagtcatgctgaaaattggctgttttatacacagatgaccgtttctgttgtttt

SEQ ID NO: 81472 - DNA, 463 bp, Zea Mays
ctcgatctgagctagattatcacatcacacattttcctcacagtaggggatattaatttttctggagacaattggtttgagagctcgttattcttagcaaagaatagttaatgggagcttgccatgaccataggtagctcggatctttgccattactgtatttccgaaggatcaatatgtattatgaaccaactgcgttcttctaggttccatatgatccaaactttgttctctgtgattttgtaaaatatcttagttgcctttggaaacttaggaacgccaatctctcacagactaatcaacaactttgatgtccatgttttttatgcatgtggcatgagtaatgactgaaatatgtaaaaatgaagagctatggaatggcatgatgtgaatgtggcattactacatatctattaaactactcaacccaagttagtaactatcttcgaatcacctttggagg

SEQ ID NO: 81473 - DNA, 591 bp, Zea Mays
gatgaacctctttgtgaggcagatcaccatcaaggtgaattaatcggaggagagttattacagaccacgtgaatatgcaatcagagcatatgctttgactaaggctgatggatcatattcgtaggcgtccccgagaatagatcaaataccaataagtcaaatgtggatatgatattaatcccgggtatatccacatctacatcaggtagaagcattcagaccaatatggttactcctcaacgatttctggcaaactccatatacataggagtacacactaaacgacaagtttagtttggcttttgtgcgttttatagaatattgaggcattacactatatgtgcattcctccccctaatgccgagatgttctaaaagcatacagataaaatccctaaccacaatcatccagttgtggccaatgtatgctattttggtgatttatttgggaaatcttacgcacattacagataagggttttatgcagtgagcattggacttagattaatgtagtggcatgaatactacatctttttccttcaacatgaagggttagtctcaacatccagcgagacacgcaacaacaagttgc

SEQ ID NO: 81474 - DNA, 333 bp, Zea Mays
ggcgcgtcctgacggcgagtcctcgaagtcacaaaaattgactttcgagggaacgccacggcgtaagagccggtgccgcaactgcgtcatatacggccactaggcaatcgactacaaacgcccaagaggggcaagaaggaggcacctccaccgctgggaaggattcgttttgcagaactaaggaggcagctgggcatcatcaaaattgaaggttgacaagattaagggggtgaatgttgaataagcagcatctagtctgtaatcgtgtcaaatattgtcagcatgtagatgcattagttagcttatttatggcttaaacatgtttgtaatagt

SEQ ID NO: 81475 - DNA, 1092 bp, Zea Mays
tccaatttcacttgcttgcttgtttgcttctctaaccttgcgttccattcttgcctaccaaatctaatcttagtactattaattttagcttcgaattgtacattttggtgttgtcataattttctttatatggtcaattctgccaagcttatgtaactcgtagtatttggtcatttacaatatgtgcttaggtgccttaatcttcacctgtaagaattctcgctggacagttcctagagactgttagtatgctagcgacttttcatacagttttttcttgactgaggtggttgttcagtagcattctgcttttaaaatcagtacgtcactattgtgtgggtaccttggactgtcacttgactccaactttggcctggatgtattggttcatatgtaactgctcttggttgatttgttgattcataatgtggttgttagtgtcggacttcatgtgattgggtaagttcaattagttgtctgtgacgtactttttgtttgccaaaggaattttttgtcctttttacaaggaaactgtcctaactttttgaattatttctcaatcaaacatgttgtaatcctcatagatgtataggagcagcctgcttagtgtcatctgcatactgcaggatggccactccattctcaatataagctggcactaatccttcaatcagcttgtttttctgggctaaacatatgattttagctagggtgtcagcagcaatgttaaagaggaagggggataaaggatccccttgtctcacacctttcccagacttaaaatagttgccacaagtattatttactttaacacttaatgttccagaggtcatcaccatcttaatccaatcataccttttctgacagaagcttctcttcttgagatattcgaaaaggaagtttcaactgattttatcataagctttttcaaaatcaagtttcagcaccactccatatttcttcttaactctagtgtcatgacgaatctcatgaagtgccatcaccccatccatgacatttatatcattaaagaaactagattgacttttactaatgattttccccataaccttcagccttggtaaagatctt

SEQ ID NO: 81476 - DNA, 306 bp, Zea Mays
cttgatgcctagcgatatagcaatgttcagtccatggatcagagcttcatactcggctgcgttgttagaggctggaaatagcaactggagggcatatttgaggtgctcgcctccaggtgcggtaaagagaattcccgcgcctgctccctgcagtttcaatgagccatcgaaatacattcgccatacttatgcggtttctgggttatctggtacttgttgttcagtccattctgatatgaagtcaaccaacgcttgtgttttaatggcagtgcgaggtcgaaattcgatgtcatgagatcccagttc

SEQ ID NO: 81477 - DNA, 343 bp, Zea Mays
gctcgcatatgactgcggatgctggtaaaatttccaccctatcctcgcccacattctccacaccttcgtctatcattgtgggcaatggtgctttacttcctgtcactcccatcggatcacatactttttcttttccgcatcgtagtctagttcttaacaatatcttagtttcacctcacatctttaagaaattgatttccattcgtcgttttaccaccgataataattgctccatcgaatttgatctgtttggtctttctgtgaaggatttggaaaccaggaacgtgatcgccaggtgcaatagctctggcgacctctacctgtttatttctccagccaccag

SEQ ID NO: 81478 - DNA, 348 bp, Zea Mays
tgcaatggttctgaaatggcaagcctaggcgtgccacggttactactacgcagtaaagagctacgacgtgcataaatgaggtcgccggagtaccacgacgacaccggcggtccggccacgtcgcacggctacaggcgcaggtgataagcttcaccccgcgaccaaatccactcccctaccgatattttcaccccccggtactatcctgcccgagtcctgcacgaatcaccgtgatcagtgcgaatccttgcgcggaggtcaccagcagcgagggggatgaatctgaagatttttttagtattgtaccatggccaccaccttcagtcgttctgacagcccaagttgagg

SEQ ID NO: 81479 - DNA, 421 bp, Zea Mays
ctcagcgctagctcttttgcaggcaccaaggcaggcaggcagcttccgagcacggtacagtaccggggcggtagcagtatatgtatgcctgttggctgttgcctgtatatatcacaggctcaggcaaacatctcgccacgccatgcatgcatgcgccgcttgcttaatttatctcgatcggcgaggagcggaaggactcaggagaaatctcagggagagcacatcatcgtacgtgttggagccagacgaggcaatcggatcggacaagcgcgtgaatgaatataatgatggaccatggtggtgggccacacagcacacacactgatgagatgagatgagatgatagattgatgagcttgccgtgcctcgctctcctcagctaacttcagttagctttgcatcacctatacggtgtgagtgt

SEQ ID NO: 81480 - DNA, 479 bp, Zea Mays
aatacatgtaaaccctcacttcatctgatcaaggctaatgagaatgatggatgcacagtaactactcttaataagctaatgtggttcctaattagacctagataaaaaacccgtggctcgataacacattcacgactcattagacgctcggctcgactcgactcgtttgaaatgagtcacgaattgagccaacattttaggtcggttcttaacaagcaaagcccgacctacctcgcgagcctagtctagctacataggcacacaaccaccggtgaaaccctaacaagacggagacaacaacagaacatgtgaatagctccaaagtggtagagtgattgagtcccatactcccatcccatctgccatcttccgcacccgccaccaccaactcccattttccatgtccacgcggaccatggctacaggctccaagaggtcgcggtctcgctagcccggccgccagcagtccagccactccc

SEQ ID NO: 81481 - DNA, 730 bp, Zea Mays
ctggatcgggcgtcaaatactgaattgtacagggtctctggcgcaaaagaacctaagactcaggctaacccagggaaggatcgtgggttgattttcattttagtcaggggcccaattgcaaaatgagcaggccgaagaggtgtcatgtgatctgagccatcggatcgacagccaacgcagaggattagatcggtcccggtacagatcggcaatcaacaaagtccgcccgatctaaaatccatggttcggatttacaacccccctgcgatcgcctcggctcgcccgatcgcgatcgaacggtcctagtgcactctgggtgaatcgttatggtgggcgaaatcgcagatgtgggatccaagatcaacaacaccgatctaacctgacctaacgggtttgccaacctaatctcagtcgtcggtgcaagatcggatggataagcccatgtcttcttcctcacgcaccggaacacggcggcgcgcagagccagggcggcaaacattccggcgacccgcccaggcgcaaccccacacccaaacacacccgattgacactacatgatcgcagagctaaagcgaaatgggtgggagataactcaccggtgaccatgcaacgaagaccactgcccacgcaccgcgcggatccaccgtctggtgggagcgacggcgagaaattacgggtaccctagtggcccccgatcaccctggttgacactaccgcgcgcacacccacg

SEQ ID NO: 81482 - DNA, 1191 bp, Zea Mays
tgaatcacctttgtacccctgggataccagaaaccctaattaaaaccctagaaaaccctgaaaccaaaccctaggggcttatatgcaaaattggtccacttttggactaaagtgcaaaaaccaagccaaataagtattttaagtcctttggttcacaaatatgtggacttgaaagcaaaaccctgagatttggacttaagtgcaaaagggccacacttgactcatgtgatgaagtctgaaattcagtgttaaaggctccactttgggtctttgtaactttcaaagtatagggtttttgccctaggtcaccacatcaagattgtatcccaactataggagtataactttgcttaagagtgtcagtagagttgttaagaaaatattggagaaaaacccaatcaaagatgggctgtcagactgtttgaggtttgaatttcagaataacagtgttatgagatgaactttgagctcgattttgaatggggtccagtgactttttgtgacaacaccatgtagcaaagttgtagctggtatttagcactacaattttgatgcagagacttggacctgttgtcacacgaaattgggagaaagtaaagctccaatgggctctgtcaggcatctgaactgagcatggccatggtacagtgtttcagggaaagcagatatgggtccgatggccgcggtggaaaaatctcaccgccgacgacctatccgcgccacgattggtgccggagttgagatgttcgggcggcaagcatcttcccccgaagatctttttcctccggataggaccgccgcggtggaaggcactaaccccggctgccacgcggtcattcctccttccggccgtgtccgatcaccggcgccgctctcctctgttcggccacgccatcacggatttgacggtcttccggccatggttgaacgtggcaagctctaggggaatgccgtgttcggtgccatcgccgatcgccagctcgggctggcaatagttatcgccgtgaccgcgattgtgactctccgcggctataaattcaccccgacctcgccctcccttctcaaatcaaccaagccccgaccttcgtctccaaatcgcgaagcagtagcaacccttcctaacctcaactagccgccctggctgaagaattgccaattttccccaaaacagttcgccgcgccacccaaaac

SEQ ID NO: 81483 - DNA, 1090 bp, Zea Mays
ctgagaagtgtaaggacacaatagtcacaactaaacaccatgggagagaaagaaagaacagaaggtggagttgtcgaacttgaggctgttgtcgcgctggagagcatgaatcaggcgatggaactaggtggagacccaagtgaagaagtgtgagagggtgtgaaatgtgtcagacttcaatcatagtggaaaagtctaaagaaaatgagagaaatcatctaaaatcatcatgtagtatttataaccagagaggctgaatacaggagatgtctagggatcacaataaacaagatcaaaagcctgatcagccatagaagtagaagtagaaaaaggaagacaagcatggtggcctagctgtcatgcatgacaaagactctcaaaatggcccctactacaagatatatctaaaatattggaatgcatggacatgttgtcaggtctagggtggccaagacgacgatgctaagtggtagaggtggtggtagaagccacaacatgcgaggggaaagcattggtggaggagatggatggccagaggttgtagagtggccctgagctgtcacatcaggagagaaggctcctggtacccaaacccttcatagataaaccaaacgggccaaacttaattgaactggtgttatcggtggtgaaccgacgaacagaaataaggttttggatgatgtgaggggcaacgagaacatcattgaggaagaatggtcccagaagaattgagtcacctactgaggtgaccagaagggttggaggggtgtggggaatgggagtgagataacatgcccgcaataggagtggtgtggtacgaggtgccaaagtcgatcacctagttagtgggggatggagtcagcgccatggtattgaacggcgcaacgagggaggcctagtcccatcctctagacagcggggactaaggtgtctaggtaagggtccctggagccgagaggagatgcagagccgacgttgccaaaagcagtggacgccatagggtggcgtcgccaagagagccaattaagggggtgcggcgatggggcacccgtgccgaggctcatgcacatgaagtggtcttggttcatgg

SEQ ID NO: 81484 - DNA, 1020 bp, Zea Mays
cttggctcatcaactatacttgggtcaagtagtcacttctacaaccaatatatgtgcgtttacacattgtataatatagtcagtaagtagggggtggatcgcacacggcgaccttgcaggccgctggaaccgagctgtcacctgcctgcctaccgattgtgccacagtcacgtacgtacggctcacgtagacagaaacagaacgcgacgtagcagcagcctctggcgtcgcgcatatggctcgtcggttcgtctccgacgttttactgtgtccacgtttaaccattcgccggccaaacgtctaaatttcaccgccacggccacgcgttattcctctgaaagtgaaagggatgcgtgtctccctttcagcaggtacgcagacgactcgatctgagccgggacgcatgcacaccgacgacgacgacgccttccaagcaaggcacgagaggtaccgaccgaccgaccgagtctggaaaagacgcggtccgtccgggcgaaggcgcgtactatcttagtccagatgatgatcgttccataaacatttgtaccaggtgatgatgctcgtacgtaagtatcctgttagcgtcatacagttcattatctatgcctcttcgctctactttgtcaataataactactggagtaataaccaggaaacacttcccacttcccgtgtccttcctttttttttatcgagcaagtgcctgtgtgcacagcgtgggacgccaactttttcgacctcgctgtggagtggatacaatcgctctctaatcttttttcttcttctttctagataactaactactaggataatcgtcacgagtggtagtagtgggctagtgtggtacctaatagtttgaaaacaggcgcttgcgagcagcatgcatgcggaatgtgtggggggaaagggagaaaagaaacccaaagtaatgctaatgctaatgcttacggcaggcggctcctcatcgctcgtttcgtcagataacaccacacgcctgcgcctttcccacttccattccac

SEQ ID NO: 81485 - DNA, 432 bp, Zea Mays
atttcttgacacaatgtggtgttagaggtccttgctgtaagacaatggcaagaagccttgcgacttagtgcatcagccaccatgttggctttgcgtgggtgatagtgaatttctaattcataatccttaatcagctcaagcaatctcctctatctcatgtttagttctgactgggtaaaaatatacttcaaacttttatgatctgtatatatatggcagatattccccagcagataatgacgccatattttaagggcatgaaccacaacatccaattctaaatcatgagttggataatgttcctcatgccggtgcaactgtcttgaagcatatgctataacttggccctcctgcaattctaaatcatgagttggataatgttccacatgccggtgcaactatcttgaagcatatgctataacttggccctcc

SEQ ID NO: 81486 - DNA, 561 bp, Zea Mays
ctatcacaaaattgttaagaagttggaatggtcacttctatcacatagatatgagagtgttacccattagtgctttcgattcaattttggggtatgactggttacatgatcatagtcccatagagtgtgattggaaaactaatgtcattagttttgtggatgagaaggttccagtgattcttaaaggagatgaggtggaggactctttcattgatggtacaacgggtatatatatctcagttgcacaaatgggagaaaggaaatggggtgtgggcctttgtgttggtagaagccaaggtggaccaatagtcacacctacaacatgtagatgttcaatgtgtattgatggaatttgcagaattgttcacagttccaaatcaactacctccatccagacttctagagtatatgatcactatattcctctattgccaagagttgtacctatgaactccataccctatagatattctcctttccataaagatgagatagagaggcaggtgaatgctttattagaagctggtttgattactccaagtgtgagtccctttgcctctc

SEQ ID NO: 81487 - DNA, 408 bp, Zea Mays
caccaaccttcccaaagcaagcgacacttccatccttagcagcaaagcctaacctcgatctaccagttcccctcttgaactgactgaccatcatgcccaactgggggctcactgcatgacacccaattcaagatagatcgaaggtatgtgttttcttcctcgattcttgtcttgtcgtgtctgcaggactcaagggcagattgcaaaccctcacaaagtgcacgctgcgcaggtgcaggggcactcactgagctagccttctcaagcaaagctatcctagcgtctctctctgctagctcagactgcaagccaggaaaaatgttacacacacccaacaagatagacctagatctcaactcgttgtgctcatctagcaagggtggagtacttggtctgcaaagtggtgat

SEQ ID NO: 81488 - DNA, 568 bp, Zea Mays
ttcgtgccgtgggcacggggaaaagagagtcgagcgattttctgtaggttcaggccgcttgaggagtgtaataccctacttcttggggtgactttgtatgtgtggggtgtttacaagtggtgtctcccgagtggagaggtgctaatgagatgaaaatgatggggatctccctaggccttatatacacgaccgtagggcactctctgcacacatgctgatcacactcttctagcttatctcctagctaatagcgaccaaactttgcttatcctgaggaaaaccctgcacctccgttccgagctatccccggcgtttgaggaagtcgggcgtgggaaaagcgagcagcttcaacaggatcacacccaagccacgaataatctggacgtgagcccatcgcttttctaggtcggcccatttccaccgttgtctttgcctggcccacaacgcggtggccttgtggggcgactggcttgtggccccaagcagggtttttgccttctagtggacccggaggttatctgtcccgcacataaatggtatggatattatctgtccatattcgaattcg

SEQ ID NO: 81489 - DNA, 682 bp, Zea Mays
ttacagcatttgagactggtgtttgagaagttgaaggaacacaagttctttttaaagtaattgaagtgtgtttttgggaagttggagttgttgtatctagggcatattatttctcagaagggagtatccaccgatccttctaaaactgaggttatggagaagtggcctacacctaccagtgtgactgagttgagaggtttttttggtttaacagggtattataggagatttgtgaaggattatagaatcattgctaaacctctcactaaccttctcaaacataaggcatttcactagagtcaaggtgcttaaacaactttccagcagttgaaacaagctatgtgtgagacaccagtgctagctttgcctaattttgaagaagtatttatggtagaaactgatgcctgcatggatgggattggggcagttttaatgcaaagaaacagacccattgcatttcttagcaaagctctatgtgagaaaaatcagatgctatccatttatgacaaggaattcttggctcttttaatggcagaggaaaggtggcgtcaatatctacaaagagctgaatttgtgattcgaacagatcacaaggcattgagttttctaaatgagcaagtattgcagtcgaaattgcaaaagaaggccatggctatattaatgggactacaatacaaaattg

SEQ ID NO: 81490 - DNA, 522 bp, Zea Mays
ccggcgagcctgtactggccgtaatacacaaaggctaagctccttactcggtcgacaccaaattctacccctggcgaccctaatccctcaactaattgcatgaatcctggccaaaatctctctacccacgatgacggcaaaaatccgagacaatccgaggtgttcacgatggtttgatgtggtctaacttaatcgaatgggtctacgagcaacaaggggcttgagggaggctaggacaccaatcaaagaagtttgaactgacttgcagagggctggccacggcgaagtgttcacggtggcgcgaaaaacgtatttggggaaacacgaaattgggaggctctagtggatgatccgaggcaagggctagtgcgtcggatgcataattacctagggaaactcatagggggcagcaatttatagagtcctacgacagtggcgtctaattttgagaaggcgcgcaggcggccgaagagaggagaaatcactggcgcaaacgctatcgtggcttttaccggggcagag

SEQ ID NO: 81491 - DNA, 842 bp, Zea Mays
cttcgaccaaggtagcgtacaaagaagcttcgtctgtgcgcgcaaatggtgaagatgacagccaaagttggtaacttcggacacaagccaaaggggaagctaccaaacaacgaaggccgaaacccacacagctgaggatggagaaaatatgttattgtcctaatatcatttgttaacaatgtgtataaaaccttgatgggcattattgtaattatgtacaaaggtgattcatcttcccttataaatagatgaacagtgccctatagaaagtacatttttcgagggaacaacttcgtgatgcttagccttcgaagtaccttcgtgtcaccttgcgttaaggagacgaaggtatgcttgtaaactcatctaatgtaaaaaaagagatggaataaaaatgctaaggcaaagaagatggttttcatacttcatggtgtaatgttgtttcaatctgcattgtttcatttatacttctttataaagacattcgtccttcacattaacactttgaagtcaaggatggagaactacattcttaacttgtgttgccttgattttcaatgcctctaggggattgaaatcaagtatccaacattggcgcccgcctccggtgatctcacgaccacaacgagcttcatcactacaaagacaatggtgaatcatcaagcttcatctacttcaatggagaagcttactctctgtatcgctggggggctcaagcttcaaatctagcaacaaaaagcagaagaaagaagcccaaggaagggtgcaacatgtaggcgttcaaggaccctacaataggaccaagtggtcccacattcctattaccttctctcaggatgatc

SEQ ID NO: 81492 - DNA, 454 bp, Zea Mays
cgaagaaaaacgacatgactcgacaaaaaactagatacggcgttgttaacgaactcagtgccattgtcagcctgaaagcgagggaacagaaccaaactaagtctgaacataatcaacaaaaatgaccatagaactcggatttttgacaagcagaaaggtccagcaaaaatgaatgaaatcaccaagcataagcaaataatatttataacctgaagtgctaaagactagagatatccacacattacaataaactagggcaaaaggttctcaagtaatggaaaccgatctcgctaaggagatctcgctaaggagcctcctagcacagcccctgcctgtctccgctggtctgtcctgttcacacgccccagccagcctcccctgctagcggggtcgccccaggtgtcctctagccactcctgagcaatgcccatgcagagtttggcctcctcgaatc

SEQ ID NO: 81493 - DNA, 291 bp, Zea Mays
aaattagttgtagaatgtactgccctgttataagcaaactccacgtgtggcaaacattcctccaatccttcaagttcttctttaccattgttcgcagcagcattgacaatgtacgattcaccacttcagtttgtccatcagtttgagggtggcatgtggtggagaacaaaagtttagtcccgagctttgcccacaatgttttccaaaaatagctcacaaatttcacatcatggtaatatacgatggtcttgggtactccatatagcctcaagatttctctaaaaaacaaat

SEQ ID NO: 81494 - DNA, 369 bp, Zea Mays
atagagttcaaacccattgcttccttaacttcagccaaggcgatggagttcatacaagacataatattcagatttggaataccgaatagtatcataactgacttgggatccaacttcacaagttcagagttctttgatttctgtgagcggaaaagcattcagatcaaatacgcttcggtggcacacccaagagccaacgggcaggttgaaagagctaacgggatgatattggaggccctcaggaaaaaagtcttcgataaaaatgaaaagtttgcagggaaatggataagggagttgccctacgtcgtttggagcttaagaactcaacccagtcgagctctgcatggaaatacccctttcttcatggtc

SEQ ID NO: 81495 - DNA, 304 bp, Zea Mays
aattgaagtttagagattcaactaaaagtatatttgaaatggaatgataatttgaaatagaaattttacccaaacctttaacattgcctttgcggttatctccaaaagtgatactatcatagtttgagcaaccttgctcactcatttgggtgaacatcctcatatccctggtcatatgttgtgtacaaccattatccaacacccaatgatttcctctcgccttgtaatttaccttagcatcaccttttgccatgagactatgaggagatgagaaaagtgagggagcctccttgatagcaattcc

SEQ ID NO: 81496 - DNA, 474 bp, Zea Mays
aaagtgtgacaagttaggcagaaaatcaaacaagcctcagatctctactttgtttggttacagggaccttaaacacattaaatgcaacttacgaagtctaaaatgccccttccatctctcaactaccgaacacaatacatgtacacgtaatgggtggtgaaggaccggtgaggcgaccgatgactaaccccaccttggcctataaaaggaggttggtcacggtcacgaggatagaagacactcaacagaagtcgaacgcacacgcccagcgagatctgaagatctagaggccgaagctaaggcatagcataggactccagtttcgtagtctttaggtccatccgcgcataagagactttggagcccttcctctctctctctcccccacttgtaacccgcttgtaactcctactacgatcatcgagcaacaaaagtgccagtagcgtgagctgacaaagactggatgtagggaca

SEQ ID NO: 81497 - DNA, 392 bp, Zea Mays
gccaattccaaatcgtgggtgggataattctgctcatgcgacttgagtaagcgtgatgcataagcaataactttctcattttgcattaggacacaccctaagccttgccttgaagcgtcacagaagacgatgaaatcctggtgtatatccggtagtgttaaaacgggcgcggtcgtgagcttttcctttatgatctggaaactttcctcacactttggggtccacacaaacttattgtctttcttgaggagttcggtcataggtcttgctatgctggagaatcccttgataaagtggcggtaatatcctgccattcacagaaagcttcgaacttcactgacgttggatggctgcttccattttgatactgcttctaccttggacgggtctac

SEQ ID NO: 81498 - DNA, 935 bp, Zea Mays
aacaaatgctctgttatccaatcacttgcctccaaaggtatgcttatctgtttgatcaaaaatttttagttgttctgtattgtgaaagtttaacaaatatgcccaccatgcttttgattgaaaacaaaactgtatcatgtcctatttattttgtcaaaaatgattttccttataatctctgaagaatatttacagattattgaagtcgtttgctgcaagctgactcctttgcaaacaacactgtacaaccacttcatccattccaaaaacgtgaggacctaattttacattgcttggatttgaacattttttattagataaatgttacacagttagatttttttcatgcaacaacctaattatttatttatcctttcagattaaacgcttgatatctgaagaaacaaagcaatccaaaattctagcatatattaccgctcttaagaaattatgcaatcatccaaaggtaaataatttaatatttccaccggagatgcatttatccttcagctgaagtgtcttgattcttgaagggtatccttcctcaaaataatttgtaatttctactatgtaccttctcaaaagtaggattaggcaaggtcaatgtaaatttctcctgatttttaacaattctgttctgaaattcccagaattctagcctcatgatgatataaagctcttttctataaaagtgtgcactgtagcaattaatagtaataaaacttcacaaataagttataatgaatttctgggcgaagtgcttatattactatttctagtgatcatgaatttacattttgatttttttttgctataagagaaatctattatgtatttgtcatttggctttcttcatattgcagctgatctacgacaccataaaaagtaacaattcaggtgtatctggttttgatgactgtctacactttttcccg

SEQ ID NO: 81499 - DNA, 474 bp, Zea Mays
atttggctatgtgatcattttgagtttgaggacttccaggcttggtaggagatgaagaatatggtgatggacatcgttaagaaaagatacagccgggatgtccctcgcagagtttgagagagtggaagttcagcaaccaacactgagccactacgtcgatgaccttggaataatggcgaaacaactggatcaatttaaaggctaggtgagggcccacatcaagtttgagggacgataaatggtggctttctaggcagtcgagtatgctctcacttgcctcaagagatggaatgaaggcctctccctagaccccatctttgagaggccgaatgagacaacagagctagtcaccgcgaaggcggtccagagcaccacgaagcatgcaacccagcattggatgcgggactcagggcccgacttggagttggaggagtaggagctggtcgtggccaagtcccctagcttctagtgtcc

SEQ ID NO: 81500 - DNA, 836 bp, Zea Mays
ggctgttcggctgactcatttccccagcccctccccttctgttgattcagtatcagacaatagggatacaggtacaaatgaacacacatgttgctaggaaaacaaatgataagtgattctacagatgcttaaaggttgccaggaacacacaagtttccagggaacaccttatcaacagttctagctgacgttgagttagctctagctcatccttctatagaacttatatgcattttatctatcttcccctttgtgttgtaagggaaaaaagaactgttcttcccattaacgtaacaaaacaattctcagggcacgacttagttgaaggttgagataaagaactgcatactgttggctgtgtgctccattgctacagaagagaacacggaaaggtccagttagtttcgattcaaagacgacaattaggttttgggatgcattttggtcgcctcttggaggtgctcttaggagtctccagaacaggaacctgaagataaattgttagttcgtgaaccaaaagtattcaaagatcctaaaagaacttgctgattttaacgattcttagaaaaaactaatcagaattattatcaatatggttgctcagacagtccctaccgttgtcataatcaaccttctcacccttcatggttaaaaaatataaattcccccaaaacaaaaaatgtgcacatgaatccacacttttaccccacccgaaagaacccaaaagagcaaaactgaaaaaataataaccatagacatagcaatatgatgcctgtcttattattgttcatgatagcattcccgacgaggtccagaacctgttcacaaaaggaaac

SEQ ID NO: 81501 - DNA, 459 bp, Zea Mays
agttgtagcagatgacagatccatgagtagtgcttatgcattcacaagacgcatctatggtgattttggagcggttgacataactgtatcacgtcttgtttgcagttgaggcaaccatagaagttcacatatctgatgtagaaggcagttaatctgtatgtgggctgttttactagtggataatgtgaagaaatccagctctttaagggtgccattagtgagcgacatgccttatggagatatgttgttgctgtagtaataaattcttagatggatgtgaagctaaaggtaggatctacagggcattcctaacgcaatgacaatacgaaacattgttgtagcctcaaaaaaccaatcatggatggacctctcaacatataaaggtcgagttttgcctccatattggtgaaggtgacttggtcaacgtcgtctttcatgacaaacttctagaatttaacc

SEQ ID NO: 81502 - DNA, 292 bp, Zea Mays
ttccgggtatcatcagattagtttggcgaaggaagacgaggaaaaaacagcgttcatcactccgtttgctgctttctgttatacctccatgccgttcggcctcaaaaacgctggagcgacctatcagagagccattcaaacatgcttagccgatcactggggcaagcgtgtggaggcctacgtagatgatgtggtaatcaaaatggagaattcggaggatttcattgaagacttacagctggttttcaacagtctgagacggtatagatggaagcttaatcctgaaaaatgt

SEQ ID NO: 81503 - DNA, 574 bp, Zea Mays
agggtgccacctcccaccgtgtgaccggggcctcgtccctaagctccaagcacaacgtcaggagatctgccgcctcgacgctttttcaggcaagctgcttgtttgaacgatcaagcaagcctatctggcgcaatagcgcatcctagaccccacgctcgcgacggaggaagaaatacttggccatggactttgccatgagaccctgagaagaaagtggacaccatcaagacacgccctatgaaaaggagtatgtcgccatacaagatgctcgatcgtctatccagggccatgagctagaactcagaccacatttccagctcctccgtgtcattaaggacaaacattggctcgccatcttcgtctagccacgaaaggcatgggcctccccactcaaagggatccctcccaatgcggacgatgccattgctcacctcattgtcggggaagagcgtggtgcgctccatgaccaggacctggggccacctcaagggaccggcctcatcgacatcaatcgctctcttaccttgatcacaagccaaggagtcaaggaaggagatcattatatttgagggag

SEQ ID NO: 81504 - DNA, 471 bp, Zea Mays
atcgcgtaaagaatatacgtccgacagtatgattggactattcacgtgcaccaccaaactattcgaggtgtagacaaggcgacactcgatcgagcatcaatacgatattttctgggcgtaagcttaagaggttggaaagataacgtccgcaagggaagatttgaacatcacgaaagagaatgtacgaagcccgtagattcaggcatcaggatgtcctgcgccatcgttacgacagataggacgattagtcgattactcaaaaggagacactctgaccgcacccgtacaccgctaggcacacgaggctcgtggccgtttccgcatgtcgcttatgcacagcatcgctgaagtagtaccaaacagaaaaggctcggaccattcccaagacatccagacgacggtatcagaaattcagagagcaagagcaacaaagtggcccagcactgagcccataaacccagctttacccac

SEQ ID NO: 81505 - DNA, 740 bp, Zea Mays
ctatatgtcaaaagatctaaccaacaagacacacatgaagataaagttgtttactcacaagttgcaggaaggcgtctctgtgttgaatcacttagcagccttcaaggagatagtcactgatttgaagtccatgaaggtagagtatgatgatgaggatctaggtttaattatgttatgttcgctacctacatcttttgcaaatttccaagatacgattctataaagtcgtgatgaactaaccctataagaagtatgtgaggatcttgcgtagaaagagaagatgtaacatatagttcgctcgaaggaatcgagctccaagggcgaggcattggtagttcgagatagggatgagcatagaagtttgaagcctaaaaatagatggaaaagcaaagacactctaattccaaaggaaatgataagttctgcaagtactgcaagaagactaatcattttattgaggattgttggaagctgaagaacaatgaaaaaagaaatggtaaatcttcaaacaggaacacatctgaagatgatggtaaggtttctattgctagtgaaaattcaaactagggtgatgttttgattaattttactggttgtgtctcaataaaggatgaatggattcttgattatgcttgctcatatcatgtgtgcattaacagagattattttagtgcctatgagtctaaaaaatggaggagttgtgcggatgagagataacaccacatgtgaggtcattagct

SEQ ID NO: 81506 - DNA, 364 bp, Zea Mays
tgtgttggctgctactcagaagtcctatgtggcaaggagatattcctcagtaccttgtgagcattgcaagaagcacactcatcggtctgaaaattgttttgttaaatttccagagaagttggccgatttccgtacacgacaggcaggcagctcgtggtcgtggcaaaggttctgcacctagaggttcagttgctattgcatctacttcaccagctacagcctcgccatcgtcttgggctcttgactcaggggcctcctttcatgtgacatctgatcagacacaattagtctcttctacacctgtcacagaaaatgcctctattcagaccgcagatggtactttatgccatataacccacaaggg

SEQ ID NO: 81507 - DNA, 767 bp, Zea Mays
acaccttcagtgaggccgttagagatgctacctgggcagaattcgaaacagccttccgtgagcaccatgtaccccaggggatagttcaactcaaggaggaattctgggagctaactcaaggtgggagaacagtcagtgagtatgtgcacaagttcacagagttggcccgttacgcgcctgacgatgtcagcaccgagtccaggaagatcgcccgttttctgaaaggactaagacccgagcttaagaccatcctcgccagccaagacttcctcaacttttctcacctctccaacaaagccatccaagtggaaagggcaaaagaggaagaaaaagggcacctcaaaaggaaattccaagttctccgagctcaacagcaagaacgtcaccagagagctcgaccctttgggcttccacctaggggaccaagcttcaataaaccatctggacccactccatcgcgctacagtcagcagagtcagagctcccttcaggcaccctccgttgcaagcaaccaaccgccagcaaatgcctgttggcactgcggagaccccagtcacttcaagaataactgcccccagctgaaggcacccggacccacctactccaactcggtgaatgaccccaagattcccttggcacctacctccaaggcacctccttcaaacagtcaacaaagcaggactcagtaccagggcagagcacgggtcaaccacgtcgacgcttaagaagcccagcaagctccgggagtagtgctcagtgagttcctt

SEQ ID NO: 81508 - DNA, 877 bp, Zea Mays
gagcagcggtcggcaccgctcttccttgtgtcagctccaatttgccacctcacctagtaacctataaaaaggtgtccctgcatgtggccttattatggtgctcaacagtgtatctgtgggtcgttgttccgaacgttgtcaatcttttggattttgtttctgaacctcgctgagcagggtctcatgacctgtcccccggtcaggataaggcctaagcctttaggggctagtcctaggttctggaacaaccatcctaggatggtggagtgtgcggtcttagggtgctggaccaggctaagcggttacacggatccggattacctctgagaacgtgtccctctccccccggacctggcccttcatgatccaggccttatctgttatgagggaggatgagaaaccggatgacaaagtggaaacataatccaggtttcatgaatgtatttagaaatcagatcccacttcgagtgtgactataattaattaatcaactaatccttcaatagtagtgcttattctagccaaccctactttggagcatctcctgagtttggatgaggcctaggcctctaagtattcatttcgagatactcggttagctgttccaaggtgatggagtgtgttggcttagggtgcaggaccaagctaagcggctacgcggccccgaaccatccttgagaatgtggcccttttcctggactaaacattcggttgatccgatcctcattcatttgtcaaatgatattccaaactaggtgcaataataggcactattattcgatttttttgagtacaacagaagtttagatcctcgaaggggggataattaacatgcgtaaacagaaaaagaaaccgatggatgaggactatctcttcc

SEQ ID NO: 81509 - DNA, 462 bp, Zea Mays
ccaacatgatgcatgaaatgcaaaatcagatgaggcaacaatgccaggaaatgcatcaggaatgactggaaatgcgtcaagaaatgaggcaagaacggttggaacggcaacaacaaccacctccaccaccaccagatccaccaagggataagcaccggaagtttatgagtcacaaaccaccgacattctctaactccccagacccactacaagctgatgactggttaaagtctctagacaagatgctcaacatagctcagtgctcggacagagagaaggtgctaaatgcatcgggttgccataccggccccgccgcagattggtgggatgcatactgtgctgccaatgctgctgtaaacacaatcacctgggcagaattctccactcaattcaggaattaccatattccagctggactcaagaagataaaaaggaaggagtttctatccctcaagcagggaa

SEQ ID NO: 81510 - DNA, 649 bp, Zea Mays
gaaaagaatggctcaaaaatcattagaatcaaggcacgcgctcgcttctcatcaaagctaatctcttagggtatcatgcttcccttaatcatatcatcttctaaaaatacaaaacgacaaacttactattatctctttgatctttctagatagccaatgaaatgacagctttctgtgttagactccaacttttcaatatttaagttaaatatcttagctttcgttggacaacctcccacatacattcagaaacttgccataaaggtatgtttgccgtagtattcaccaccacggccggccggcaatactgtttggaaaacactacataactagtaccactcagctcagttgctccaatggatcataatataattagcaactttaaatgcaaccaggtaagtctatcagtcacaattacaaacactagtcactggagaacatggagtttcataaagctatgccgattgaatagatcgatagaaagaagcatctgtcgaccttcagaatatttgcaaaagcatgcgatgggaggcaaggagggaacagatatgtgaaactgatcattaaacagtatcaagactaaccattaaacagtacgcacacaaatcatatgtgaacaaggtcacaagggtacagaccctttctaaat

SEQ ID NO: 81511 - DNA, 304 bp, Zea Mays
ctcggttgtcttgcattaaagcacaacccagcccagtgctagaggcatcacaatatacatcaaacggcttgttgttgtcaggttgcgccaacacaggtgctgtggtcggatgttgcctcaaggtgtgaaaagcatcttcacatttttaaccccactcaaactttactcccttcttcaatagttctgtcatgggcttagcaactcgggagaaatccggaatgaatcgccgataataccctgccaaccctagaaaacaccgaatttgacggacaatggtgggtggcttccaattcatcacctcctg

SEQ ID NO: 81512 - DNA, 315 bp, Zea Mays
gtggaagtcctggctggcgaggatggtcttaagctcgggtcttaaccctctcagaaaacgagccatctttctagcctcggtgctgacatcctcgggcgcgtagcgggccaactctgtgaacttgtgcacatattcactgactgttcttccgccttgggttagctcccggaactcatcttccttgagttgcactatctcctggggtacgtggtgctcacggaaggctgcttcaaattctgcccaagtagcgtctctgatggcttcactgaaagtgtcccaccatgctaaagccattcctgaaagctgatgagctgc

SEQ ID NO: 81513 - DNA, 515 bp, Zea Mays
gcttggcgtaggcccgtgggaccgagcgcctagtcatgctctagcgcgccaggacaagtcgaacacatggaagtttgtttctgcccttgttcaaatgcctgctggtcgaccaaacgtgcaaatcttgccaaaaatcctgtgtaaagtctcttctctgtgccaagggctatctgtcttgtgtgagttccaagtgaagatatggtcggttgtgggagatatggtggcgccaagtcatgtctgtctggactgttcagcctaagatttgaccatgtcaatttatgtcaaacgattttctagagtgttccttgggtatttcggcgcccttttgtcaattggaccatgttgatttggagcttgcaactaagtgaacacatgtgatctttagaagagggctgaaattagacttagagaaaaagggatttttcttttgtgcttcccacttgagtgatcattttggggaatttgtggggtctttttgggaaaacttccttactatttcttgtaggtatttaaat

SEQ ID NO: 81514 - DNA, 488 bp, Zea Mays
cccattctgcccggtgtgctcctcgtctccccgacggttactgagttgaggtgatctccttcttcccgctcccctgccccctggtcttctcgcttccttcaggatggatctggcaaagctggattttcggctggggatcgcctttgaggattttcttcggctcagtctggcctctttggtgtgtcctgagcgcccaggcctccccttggctttctggttggtgatttcttttggacgatgcattttcaagcttgacacggattctgttggcttccttctccaagcctccctgggtagatttgcagttggcttcgatgtaactcagctttctgatcgggttttccgattttcagtattttccaaggccgtgggttttcatatctacaattcaaagtgtattgatcgcgcggagttcagagcctttttcaatctctggaatcatggtggcccaaattggattcatgagtacaagaactttattaacgaag

SEQ ID NO: 81515 - DNA, 1550 bp, Zea Mays
tttcccaggctggcagctcttactggatgtctagtgccataaaccagatatctaggttttattcaaaatattttttctaaacacaaataccttaacaggttgtccagtccggtttgcaaacccggatgcccgagaaatattcaaatgctattttttcctgatctcgagcacatggaccggatgtctgatttcccaaaccggatgcccgatttcccaaaccggatgtccagttctgcattagccgttttctcggaactctggttcccactggatgtctagtttttggcatgactgctctccaatggttgaatctaagagggcgagtatttatactcctttctccggccttatcttcttcaccaacctcaagccgaaagcaccatgtgccattatcctccctctctctcaaacacactaaactttgatttgaacacttcttcttgtgtggttttgagagagaacttgctcaagacttgagatttgatcccacgaccttcacatccatcctcttgagcaaaaaaattacaataatagcataaaacaataagaacaagtcgaacacaagagacacacgatttcacccgaggttttgccaaaccacaaagaaatgactgcgtcccattgttgaggtggccacaaaggtcagagtctatttcaccacagaggttggacattcaatccatgtgctcggattcagggaaaatagcttttgaatattcttggacatccggttttgcgaatcagacatccggtcaaggcgttctggttcaaaaaaatgttttgaataaaacctagatatccggtttagcgcacccgacattcggtaagagttgtcaatctgggtttgatgttcagcgccatggcaccacatgatttatgatgggtgtagtggtcgtgagaggatgctgaatccaacgtgaagccgagaaccgatggctttgataccaggattaatagcaacctcgcaggaagaacagaggaatagagatcagagttccggcagcagagtgtcagtgaggacatgttgcgtgttgggaaataagatagttcagtgttggttacattttgcgattcacggtctactcactctctttctgggttctggccgaccggtacatgttacacacccgctctgggcgcagtcctggtatgagcgcttctgcaggccttgtcatggttgggttgggctagagtgcaagaagtgatacagcaaacacactaaaatatgaataacgttatttttagggcatcgtatcctatgcccaaaggtgtatggtggtcatgtctacattttaaatctaggacattcatctcgtatccaatggtagcagatgtgaagggttctccataaaatttcatatgaataaggctatgagcagaacatagtgcaaaattggaacagaaaagacatactcataatccattgcaatcgtccctttctctttaaacagacatcaaaatcgtgtgtaccattgaaacgacccacgagctcacaggccgatcaaggctctgtttgagactgctctacctccagcaaatttagtggagtt

SEQ ID NO: 81516 - DNA, 723 bp, Zea Mays
gtctaatcgcggccgaccgttggccgatctacggaccagagcgcatcgtcatgcctccgccgccgtgctacgatgggaagcagagcgccgcccgagagttcaccagcgcaccccatcaggcgcccccacgcaccggttttgggctacgatcgcgtaaaaacaaagagctatccttcatgatcccgataggcaccataccaacctcatccagtagtacccaggttcccgaccacgacccacacggttccacggtggcgccatagctccgttgagccattgcccgattcgaatcacccccacgcactcaatactagctctatatgctgcggattgaacgaatgacttcatcggtcataccttacctccagccacggcccaagcgctgctggacacgtgatggcgcggcaccgcgacgacaccgaatcaatggcgataaattgtcactgccctggccaccatccttgcctggcaacggcacgagcacccttagcgcaaacaactgatgccccccggtctacaccaaggcaccagcgcgggcttgccagtgttcttctagtggcggcatccacccaacccaacagccaccggcagcggcgttcgatttccttgggatggattcggagccacgtctctatggtcagggggggtcgccatggcttcttttatacctttaggccaaagtccacggaggacaaccagtgccgtatcaatggccaatccaac

SEQ ID NO: 81517 - DNA, 965 bp, Zea Mays
ttgaaattcaactgagttgacacttcccttgtagatggttcgcactctccaaactacccgcatcaacaccagctacgcccctcagccccagcagatcccggtctacccagtggtagtcgaggaagttccgacggatctccctcccatccgagtggagaatgtagtcatcctggaggacagctcggaggaacagctgccgacccccaccccgttgccagagtccctggccttcgcagctgggtcatcaacgtcagcaccgtctgcaccagccttccaagcacctgcacccggaggcgacaaccccgacgactccggagacgacgatgacaaggatgatgacgacgacgaaggtggagacgaacacgtccacgaggaagctgactacgcccagcaggacaacttcatggggttcggtcctgttgtcgaacattacacatcaatgttcgaaacggggcacttccccaacctgctgcaagaagtgctgcatgcgctaggcacctacgtccgccccctgtacgaaacaaggcgagtgagcgagcctctccgggcttgctattacatcactcgcatccacgtcagggtgatggatgcaggtgacaggggattcaggactctgtctgctcatgagtccctgacaccactgtccacctacgctgcctcggtcagcgatgctgcccgttggaccctgtggtcgctcagccacacctaccagcagcagttgcagaacacaaggttcaggcatcttcctcagcgtctgcgtggaggaagccagaccagcatcgtcccaggtgaagctggtgaggatcgcctcaacaccctagcgggtgtagtggccgacctcaacaccgacctggacagtgccaccctggatctctctagggtgcacttggagctggagaatgcccatgccaggattgcagccctggaagcccaactgcaaggactggatccgcccgaagcccagg

SEQ ID NO: 81518 - DNA, 579 bp, Zea Mays
gcggatccaggataaaatatgactgatggtatatttgtaaggatgtgcatcaaaataccatattaaggacattaaaatttgactaagcagggacctcatggtaaaaatttagactatagtacttagaataaagaaacgagtggggtctatgccctcactatacttaggtccgcccttgtatataactgacaaaaaaatgagaagctaaaatatagtgagaagtgtcattgccttagattagacagctcgcatgcgctaacaaaccgtgtccttgagacaaggtacgactgctccctgcacctgctcaataagaaccagagtgctcgtcctttcgcgctgcctgcttcagctccctccctggcctctccctctcgttgccataaaagattccaagcttgcccggcccgccgatcctactgccattaaagtcggcaagcggcgtcggcggcagcagcctgaaaccaggggaaaccgaaccaccacggtcaactatctatctatctgcaatctccatccatctcctcccacacccactgaccaaccacagcacagcagcctcaagatgctttacatggtgta

SEQ ID NO: 81519 - DNA, 634 bp, Zea Mays
cggccgccgcgtgtctccatcaaattcactggccaccactcaagcacactataaattgagcacaccctcggctccgttaggtaatccagcatccaatccaaccgcttgtgcccttaattactcaccagagcccacgaattgctcttttcccccaaatcggtttccaccaccgtgaaagagtcctcaccgtggctagcttgttccaggtctgctcatactctctgttcttccgttttagtgtccttaggttctcctaatgctgctcgacccattcaattgagctagactgccctagatcaccgggaacacttctgttcatccgttgtctgcgctgtctccatggactggacgatttagagctccgctagtgaaattaattgaggggaaagcttgttaagtgttgaatcaggtctcagccaaattagagcaccgttcattaagtatcgtggccggtatgagttcgccggagcttggttctccgccgctccccgtcgtggacctcggggtgtgaaggaatagaagcgcaggggtttatatgcaagtgtcagtgacccattaaaaaccagtcgaggactccttctcagatgtttgaactgacaggggcttttgcgcaaagttcaccgcgcggtcgcgg

SEQ ID NO: 81520 - DNA, 346 bp, Zea Mays
ctgaaccaggtgaaagaagtttcttcagaccagatatggtaaaggaaacataagagaaagttcaacgaataattcataacttgaaggaagctcaagctcgtcaaaagaattacgcagacaaacgtcgaatacccttgtactttctagttggagattatgtctatctgaaagtttcaccaatgaagagtgtatcacgtttcagggtaaaagggaagcttgcaccccggtatattggtccttttcctgttcttgaacaatgtggaccagtggcataccgactccagttacccgaaacattgtctgcgtacataatgtgttccatgtatctcaattgaagaagtgtctt

SEQ ID NO: 81521 - DNA, 757 bp, Zea Mays
ttgggtcttgtagttagcttcatcccccttcatcttgtctaccaatgtaagcaaaattttatctttctctaaagcttcgttcctcagcttaataacctctgttcgaaggttgctgagggcaatagtgcaactctcatcttcggcattcctttgcgcccttaaggcgttgctcagtattaaaccctatatgaaaagaattagtataagagcagaaaaataattcaaagtccaaaaacttccaaatgtgcaatttttgtaccttcagactgttatatgcgagattatctacaagatcctcctttgtcatggcacaaaggccagcttcaagcttcggaaaccctatacttctggccatctcccggcagacagataattctttgttgtctgggaggcagtataagaaatcatcttcctctgtcccattgaacactaaggcatcctttggatacttcagttctcgggcatagtgtttagcttcaaaaatctcttcttcagtcaatcttttcccgaagcgtgtcgtacgatataatcaagaactttagaggacgcctcgggagtaggagtggcagttttttcaggcagaatctgttctgcagtatctttttccgttttcttctccccggtttccaagagtttctcctttgcaggctctaaaggcccaacttcggtctcaacctggctcttcgcaacttccgcttcggttactcttgtctcagactgcgtctttgaagcttcggcagttttctttggagtagag

SEQ ID NO: 81522 - DNA, 527 bp, Zea Mays
gacggccttcgcggggcagcgcagcaactagcccctttcccattggtactcggtaccctctgcgtgtagcaccagtctccatgggggattcaacgcttgggtgggtaatggctattctccggtggcgcgccgctgttgaccgtgcgcgtaccgccgctctgttggtcgtcgggaggaagaaacaccggagccgttggatcaagtcgtatgactcggattaggcgcagtataccaattcgttcatccgccctggaccgttggatcccagatggagagtagggatttaatcgcagccatattaaatctggtgcgtcgatcttagatccgagggcttgcgttccgtaccgattcatttaaagacatatttaatctgcaccgtgcgcctctgatcgtgcggctctaatcgctccatacccgttcggctgtgcaaatattcaaaagaaccccttatctctattgatataaacccgcggcccactgctgtgtataagtaattccacataggccctggattttgtagatttgac

SEQ ID NO: 81523 - DNA, 358 bp, Zea Mays
tcgggatagtgcaacaagagactttaacgaatttgaagcttgagttagttcttctgcaaagaattattgatgttcaaagaacagataagggtatgaagtatattcatgagaaaatggaggctggcaaggcaaattgttttaggaaagataataaaggggtaatatggtttaaggatcgcatagtagtgccaaaagatgctgaggtccgccaacaaatcctggacgaagctcatcttagtcgatattccattcatcctggaagcactaagatgtatcaagacttaaaacaacattataggtggactaaaatgaagattgaaatcgcacgctatgtggcaatgtgtgatacttgcagacg

SEQ ID NO: 81524 - DNA, 519 bp, Zea Mays
ccacgactaagccaccagtgaccttctttctctccggctgccagcgtgccattccaaaattgagtgccaccgcccttggacactataaattgatgcctcagcctgctccgctaagtaattgtgcacccagtgaaccagccctcacctccaatcgtcccccacagctccccaatttggaattttcgccaaatcagtcaagaaccccgccatgtgtgagctcgccgtggctagctctccacaggtccgatcacgccctcctcgttcttgtttcagcactcttgtgtgctcttgatgcttctcgacccgaccaattgagctagaacacgtaggatcaccgggaacgcctcggttcatccgtagttcacgctatcaccgtggacagagagattaggagctagaactttgcaattgtttgaggggtaatggtcgttaggggttgaattaggtgtcagccatacctgagcaccggtcgtggcattttccggccggtacaagctcgccggagccactgctccgccg

SEQ ID NO: 81525 - DNA, 451 bp, Zea Mays
atttcgtcctcttcttcatcatcctcatcaacaacacggacatcacacccattggggtcagtttcagtaaaatcaggcactgacacttcctcagcaacaggagcagaaggaccggcaccctgatccaagctggacacccgacgaagacgtctcttcttctttttctccccctcagcaggaaaagaggcttgatcgcctcggcgagaacgtttcgggcgaacattgacagacctctgagcatccaaagctttgtcagcctcagggatgggcgccaccaccaatgtttcagcaggagcggcatcagaagaatcctcagctaacatatccagcatggcacttatctctgcatcacttcgattcaaaggcacctcaaaatgaacctgcctctcgtcgtcaggaatttctccgagcgaggcaaccaaagtactaacttctttgggagagggccgca

SEQ ID NO: 81526 - DNA, 1338 bp, Zea Mays
gcgcctcgtgccctccgaatatgatgttaacttcctggtcgatgcgcgggaaggctccacctctacctccctcctgctgttgaggctgccctggctcggcaggctctcctcggggagggggaggtggtaccgattggaatggtcgaccatgcccgacagagtttttgaaatctctgcagtttcgtagggtgtgtcgcatgtccctatggtatgggcactaggagtcgaggatcacgtctagtgaccttactccaccatagggtgcgctacgggctcgagctgtaggtggcccggcggtgtgcacttcctcccagggcctctttcccagtgcttgtctggttgctggttcatgtcttttcgaggcgccgggggcacaagcttcatgcctccaatgaggtcttgcccactcatccacagtgatgtagatgtctgcctccctgaatggcaggtgccttttggaagatagctcggacgaaagccgagtcgttggatcactggtagaaatcttcgatcacggctgcctcgacaacctcgagaatgcagttcctcatcatttgaaatcttctgaagaacaagaagagagtttcatcgtattggcacttgattgatttgagatcccatggttgcgctggtttgtcggagagggattggaagttcgtgacaaaccggtggctgaaatctccccaatcgtcgatgtagtgtcgaggtagatgtcgaagccattgtagtgcttcctaccccaggacaaatgggcaggtacgttgtcatgatgtcttccgttgccccagtagccctggtggcggttgtgtagacgaccatcctagcccctgggtcttgcttgggctcgtatttgtcgatgttggagaccttgaagtaaggaggccattggatggcctggagttgggggtgagcatggagaccccgcaaatttcctcctgttgatgatcatgctgccggtcccagggaggggagcgagtctcatgtcgcctcgaccgtccttgaaccggactgttggtggaggctaccgccaactcgatcctggttgcacgtctgcgtgccggtgcaccatgatcccggtcatattcttctcggcgtcttatttcattttcatgtcggcaatcgcatgaagcactgatgttgctccccgcgtctcgtcggctgttgatggcatgccgcagatcgttcggtggatgggcgagacatagaagatgattggccgcctgagtgagcactcgccggtagcccttcgcatctagggttcgtgggaggccattggctatctgcgctaggacccctccaacctcgcttagcgtgttcaacgcccgagtgaagtcaggg

SEQ ID NO: 81527 - DNA, 734 bp, Zea Mays
tttgaagaagaatggggcaagtttgcaaaatctgggttgttgttaggcattagaccagtctggtggtgcaccggaccatctatgcagagaaggctgagactcaacttttaccagctggcgcgtcgaaccggtccggtggctatctggactggttatgctgagaggatgtaagaagacacttcggaggctggccatccagaccgatccggtggtacagcggaccgtcagggtccaatgactactttcagatctgaacgaccaaatctgacgtggcagggtttgttgtgctattggaccagttattgttccaaccacccattagaatagctacctagtgtagcaatctaataggggccagtggtgcaccgaaccgatattgttggaggtttcgtgtgccaccagactgtgcaattttctctactcatctccaatggctatttgggtggttggggctataaaaaccgccaaccagcacattgaagacgtaagagctccacctaacatccattcaacaagtgcaacaactcccacgcatttgaacctccaagtgccaaatcaaagcgatccgagcttgagtgaattagtgtcttgcgagattgatcttgatttgagttgttgacaagttcttgtgctcttgttctcgagttcattcttgttcccaaccttattctcaagttgtaaagctaagcaagagactctgtttctttgtgtggaggtctttgctggacttggtg

SEQ ID NO: 81528 - DNA, 928 bp, Zea Mays
gtaggccccggttaatcagcggccgccgtgccatcaccggaatctaccgcgcggtgagctcgccagcacgatcgggaatccgcactccttctccaactccggtcgacggcctataaattcagcccggactccgcttcttcatcacatcccgcacctcaacaactaagcacttgaatcgagtacgccgaagaactaacgcagtccacaaatcccctttctctctgctcttactccgccgcgaggaactctaccgtgatcagcacccctcaggttagtaattcccccaattgctccctgttatagcgcgtttatagtctcttatggctctcagaaccgaccaattgaagttcggccaaagtctttcaccggaacaggcacttgctctatagaacaccgtcgtgacaccctcttcgtagccccgcgtttctattcgtgcccagtccaaactttagtatgtgctcacctctggtaggcctgtgaagctttcccaagcttcaatttggtcgttcacgccgtcggttggtcggaacacttccatccatatgaccatccgccctgtcaccgtggaccggttgattcatagtcccaatggcgaaattgattgaggggaagtgttcggtaggggttcaattgtgtccctgtcgcccgggagctctagctgtggcgtcatctggccggaataggctcgccggagtgcggcgagggttgttcctcgtcgtgggctttggtttgtgaaagaatagaacgtggaggttctttttgtaaaccgtcagtgactcatctcaatagtgcgtcgaccttgcttttggatattcaaaaaggcggggatcttggtgcaaagttggcatgggcgcgggcgcgcttctgctgtagttgggccatcctgggctggaatcggcccagtactgttcaaatcttttcccttttc

SEQ ID NO: 81529 - DNA, 824 bp, Zea Mays
gccaccagaagttgcagagatgggagctggcgcagcaggagcacgtgaaggaggaccctatggggagctggacatctttggagccccttcttctatgaacatcgtggatgatcgcccttctgaagctaggagcggatctggagcgaccaagaatgtggaggactagtctagtatagtagtaggttgtttccttgtgtagtctaaataaggaaagtgagttgtacggcttgagtatgtataataagtacgagcttggaataatgtaacaaaggttgtgtaataatcaagtatattttcttctctagatgtcgacaaggacttgtggtcatgatggggcagggcttctcggggtagtggggaggagaccccaatcccaccacctgtacctccaactttggcagagggcattggtgccttgcttaatgttatggctgacaatacccggtttctctaggaaatgacgggaaatcaaatccatctgcaaggaggccgaggccaaaaccaagcccctcgagacactacttacatggaattctcggaaactcgttccccctgtttttgttaaagcagaggaacccttggaggcagatgaatggatccgcatgatggaacaaaagtttggattgatccgatgcatggagactcagaagccgatgtttgctactgaacaactgcgaggcttcaccagtacatggtgggcaaacttcatagctattcaacctgaaggtcatctcgttacatgggtagagtttaagcaagcgttcagggagcattatattccagatggtattctgcaaatgatgctggaagactttgttcgtcta

SEQ ID NO: 81530 - DNA, 473 bp, Zea Mays
cggcggaggtctgatcaccggcgaggatagaccggccggattacgcaaggactagcgctctcgagtggcagacaccaaatcagaccccctccgagcatttcccctaagttaattgcacgattggtgacccattccgctctgcccacgaggacagcgaaggttatggacacatgctcgtgttcccggcgatgggtggtgttctagttcaattgaaggggttgtagagcttgaggagggtctagggacactagaacaagcaatagagagactggaactaacctgagttgggctggtcgcggttgagctattcttcgcggtggcggagaccagtttgggggaaacaagaaattcttgagctctggcgaacgattgctaacgattctcggtggctgggtagttgatgaccttgtgggactggtgtagggctcaatttatagggagcaagagcggcggccgggaattttaacggcgac

SEQ ID NO: 81531 - DNA, 1188 bp, Zea Mays
attagatcaccgtgtatgggctcctgtacccggttaaaacagttttgagtcatatgcctcgcatgcaaattgagatatgtttggatgatggcacatggacgtgatggctcatatccatgcatgacctgcatgcatcatctcgtccattaacaaaaaaaatagttgtaactaatggatacttttttctcataaattcctgttgaattaatcaactttagtattttttgcatgctctatgttatttatactatttatttcttgttgcaaatagcaataagaataaagcatgtttaaagttgcagtttatacattaattaattatttcctgcagtaaataattagtagaaaaaatacatgctttaaaatgagtaaataccttttgcactcgatgtgtttatgttagtgtattaatttcagtattatttttctgctttatttcctgtagtaaatagcagaaaattatttgaaatacatgtgaaggttatactatgcataataaaattgctctaaatatttgtgtcgctttgatctttcggacccacgtcgagcgattaaattgtataatgggtactcagacacgccgatcaggctgcgttggtaatcggatgagttatagcattagttgaatattgactgcgccctggcaacacgacgtaatatttgtgccgttcgaacttggttgcgtcatgtgattgctatgtcgcgctctccattaatcggatcgctcctgttgagtcagaccgccatcgctgagtcgcgtatttttcgcatgccctgcaggcacgattcggccgccatgatcagcgagccacaattgcgccagttgcgcacgttgtgtggacttatcctgtaccccgactatcgagccacaattgcgcctgttgcgcttgttacagaggcttattcgttgtcgtagccttgatggccacacagacgttgatgccagatacgttggagcttgtactcgcgtggaatgtggtggattattcgagcccctgaagtcacagcatagcgcaaccttcgtaaacaatgttgtttaactctatattttctttgattgttttgtgtggcatcatatatttatttatactgccaagtggacataacaactatatcaagctctatagtgcttgaataatctgggaaattaaattgaaatacaataaaacacagataagttaattcttt

SEQ ID NO: 81532 - DNA, 664 bp, Zea Mays
ggacatcaacttcagcaacaaggcgtgagggtttatccgcagggaccccgcaaaacttcgtacctggatttctcggaaactcgtcccccactttttgtcaaagctgaagatcctctcgaagccgacgaatgggttcgggtcattgagcagaaatttggactcatccgatgcacggagacccagaagccattgtttgcgactcagcagttaagaggccctaccagcacctagtggggaaattatgtggccattcaacctgccggacattaggtcacttgggacgaatttaaattggcgtttcgtgagcactacattccagaaggagtgctgcacatgaagcaggaagaattcatgcgactcaagcaagggggagatactgttatgcagtatctccacaaattcaatcatttgtcccagtatgcaattgatccggtcaatactgacctgaaaaagaagaactgcttcatgcgaggcctcaatgaccggctacaaagaaagatggccacctgcctcgatctctcctacagtagggctgtcagcacaacgctggcagttgaagctaagcatgcaggcccaggcaaatcaaagggaattgaaggtgacatgtccaacctggggcctgaaaagcgacaaaggttggtaatccgacttttcaatcaaaact

SEQ ID NO: 81533 - DNA, 491 bp, Zea Mays
aaacatttggctactccagcccttatcttctctcgtatgtgcttcatacccagattatccttttgagcatcaattattctttgcaaaatgattgactcaagctttagctgatttagagtcccttgttggattatccctaggtttaacttttccatctcttgacacaaagtgttgtcagaggtcttcaccataagacagtggcaggaagccttacggctcagtgcatctgccaccacattggccttacctgggtgataatggatctctagttcatagtccttaataagctcaagccatcgtctttgcctcatatttaattctgactgggtgaaaatatacttcaaacttttatgatctgtatatatgtgacagatatttcccagcagatagtgacgccaaatttttagggcatgaaccacaacagctagctctagatcatgagttgggtaatgctcctcatgtcggcgcaactgccttgaagcatatgcaat

SEQ ID NO: 81534 - DNA, 444 bp, Zea Mays
agaagtgggagcttaattgctcgtcagtgcatgggcggcgtcaccaccccaccaccaaaagcttgttccgtgcagcaggcttgttccgtacagcacgtattcatacgcctctctctacctctgggaccgtagaggtgtcggtgcggtgatgagcttgagagtcggaggagctctctcatcgtacaacttgaaagccaacggtcatggctcatgggcatgtgcccgcccacggagagccacacacaacactcacagatcacacttggagatgagtggggcagagcatgagagcaacagcgtactgccctgcttgccctccacagtatctcacgccaatctttaaccacctcccaggctcccacttctgttggccgcacctccttgcttggaccttcaactgtttcagtgctataatatcaactgcttattttagggcaggttcac

SEQ ID NO: 81535 - DNA, 432 bp, Zea Mays
cgtgatagtcccgatgggcacatcgaggcatggagtatcttggttcggctgttttgttggcagacgtgtcttcctcattgcttgtattggccgatttaccaaaaatcataggcccttcattatttccctatacgatgatatctactgtgcctattttgatgatgtccccttttgtcgttctcttgacagctatagatatatgcttccctaccggattggttggcctttgcggccgagcagttcgacaatttttttggagttgtgcctggtgactggattgaggggcactcaatcggtcttgtaccgaaggtgacaacctgtcaaactctatcggcatcatgtaaaggggttgtgactggtcatgacaacctgtagccgatgaatcacacgtattttcccctgattcaacctcgtgcgagggaaagtttgcga

SEQ ID NO: 81536 - DNA, 715 bp, Zea Mays
ctgcaactcacttatgacctatgagtccctcaggctgtggcgcatttacgacccgcgtgccccctcgacctgtggcacacgcatgacctatcgggactaggcctgaatgcacagatcactggcagggcacaacacgacgagccacatcgagcctttggctacgaaggccaggggtcgacgtagcccaaatgatggcgctcgggacccacattgcccacgttggctgccataaagaatatgacccaaccaggtgatcccggggctcacgggcgcgcgtaacttcatcccgtgtagaatgcttggttttaccatcgccttgtggctccttctcgaggaagccaccgctggtcggccccttccttggccaataaaaggaagaggttggcccttagacgaacgtacagacacaagaacaagggggcgcacaaacgagcaacacacgaaccccagatgtgaatacaacggaccgacgaacaggaggaggatgcaccgacgaggacccagaggctggagctccgccgctatggcaagacttagttaggaccccactttgtaatccttagatctacctccaccacgataagagacctgggagcctctcctccctctctcgtccgcttgtacccctactacgagctttgataaaaaaatggtgccgatagcgcaagccagcgatgactggtagtaggaacgttttggccgaacgagtataaat

SEQ ID NO: 81537 - DNA, 508 bp, Zea Mays
ccacaaataacatagattggccacatctagatgtttatggttgggattttatctgtatgcttttagaacatctcggcattagggggaatgtccatctagtgtaatgcctcaatattctattaaacacacaaaagccaaactgaacctgtcgttcggtgtgaactcatatgtatttggagtttgctagaaatcgttgaggagtaaccatattggtttgaatgcttctacctgatgtagatgtggatatacttgggattaatatcatatccacaattgacttattggcatttgatctattcttggggacgcctgcgaatatgatccaccggctttagtcaaagcatatgttctgataacagatttatgtggtctgtgataactctcctctggttaattcaccctgatgatgatttgcctcagaaagaggttcatcttgctgatgaagttcctagcaatgcgcgcaatatcattgtgctgggaatatgggataatgaatctttcgtttttg

SEQ ID NO: 81538 - DNA, 1142 bp, Zea Mays
tatgaattttgcaacatctaaacaataattacaaccactagccgaatcgtgaagcacctccaagactgaaatcaataagtctcatgtcaacaatcaactaccttcgccgtcaaaaaaacaatcaactaccaaagaaaattagagcaacaaagcatttctttacagacagcaaagctaaaataaccttgcatagtttcatttatcttagcataaatcttatggttaactacgattgggcaactcgttgaaagtaagcaagacataatgcaatgtgccaacaaacaaatatgttaaaggaaagtttagagtaagaaccgcagttcatgagttttttttctctcaaagacgtgtaaatgcttgttcggatagaggtggattaagaaaaattaaaaagattaaaatctcttcctattcaattcaatctcctccaatccctatgcaaccgaactcatccaatttgcacccacgaactcgtcgattttttagaatcttctacaaaggtaagccgcttgaactcttcaggccattttctgatactcgcttaaatagtcagttactgcaataacaattttggaccatgtattaccttcgtgagatacttttggatcatgtattaccatcgtatgatactctggaatgttaaaagaaaggaatgttgatttacatggtttgagcatacaaccatttggaatgtacgatggagcatacagccaatatataacaagtttttgcatgatgttattttcagaatgttttttttttcagattgtactaagttcagcattatccatgtttccttccatcatgctggtggatgttacctgtacacagataggtttcataactatatactgctttgatatattctgaagaaaaacaagttgattgagtctatttgcttatttggcaattgaacattatctcttttgtgtctacatggggatgccctttttgtgttcagtaatagaagaaccatgagctgtttaacaaacagcatgctccaagttcaattaataatgcaaggcttatgtctagatgggatgaccttttgtgtttttgaatcggagtggttcagtgtcaggttattctaagtcatgcataaatcaaaatgaaaacagtggatcatattcagtgtgttgtaa

SEQ ID NO: 81539 - DNA, 364 bp, Zea Mays
taaggatctcttcaaaagcttcagcttcttcaccgatccattcaatgattccttcgggatcgcctctcataattttttgctcggatgagtaagcacccacctttgcaaaactatctttcagcttcttggcacaatccaaggatttttcgtaatatctttccttcgattaccaaagctcatctacattcttttgcaatcttgcgctagtccactcgcttatttcctgttttgctttagccacttcaaaatcttcattcttctcggcaagctttttccttaagttttcaattttgactcaatgagcttcagactgcgcggcaagattggcttcgctagccttgactctgtctactaaggaaagcat

SEQ ID NO: 81540 - DNA, 639 bp, Zea Mays
gtatctggaatgatgacacaaaatctgtaattcatattgcttcataccaaagaatgtaactgcattgctgtgggtcatgtaggatgtttgacctggtcagccttcaccaatagcaattaacctccacgcgaataacctaaaccaactcacatatttaatctagttctgcgaaccatgagaaaaaagaataatatggaaaacagaaaggagaagagggaatagaaaacaagagatgagttgctgaagcacgcgcctaaaacagaggaagtagttctctgaaatggttcaaacagtggttacatgtctcctaaatatgttatggaaggcaagaagctgtcaaaagtctcactaaaaagttctacacatgggggtcgaggaatttggaaatgaagtactctagttatgattgccaaactgcagcacataaacttagttagacgtcttggttgttgcattcacgaagatgagaagttactgatatatgaatacttaccaaacaaaagattggatgccttcctttttggtacgttctggtctcatttcacatattatgaaacaattttagactaattgtgactcacgatacatagtttttcacactaaccttggaagatcctgccttggttactgggagtaaag

SEQ ID NO: 81541 - DNA, 495 bp, Zea Mays
ctgccctccgcccctcccagtcccagccccagtgacccagaggcccgcaggcccctcctctcctctccattaaagacaaggccaagcccatccatcctcttcctccctcccacctccatccccatccccatcttccaccctcccttgctcactcatccacacaccccacgcttgcaatttgcaattcccttgtttggggtaacaagccaagcaagcaaacctcctgctggctgctgtccaacagcaacatgcaacaacccaagcaaatcaaagcttcaccatcaccatcaccgccgaggtcaggtcacctcagctttgctcagctccctagccagcagtaactgcccagtggaagtgcagagtggcctgtgagtactggcagtacaaatcacctcatctccagtcctgcccggctcgcctgccatgcagtccggctacggcggcgtgtccgagttccagcagttcatcatggacggcggctttgccatgtccgcg

SEQ ID NO: 81542 - DNA, 944 bp, Zea Mays
atcatgtggagagagatcacaacatttctgcacacgcactatccaatctaggttcaagccaggctcaggcatcgttggatgtttttgtccaggaggtacaacattccatcatttcactaggcctcaaagaagagttcaaggagataaaacaaatggcaccacctgtagaacaagacccgggcgactggtggacaccaatcattaagtacatcagaagtgaagaagagccagatgacagagcaactgccgagcgtgtcgcaagatagtcggcctattacacagttataggtgacgtcttgtacaggagaggagtcgcatgtgttttcatgaagtgcattgacacaaacgctggcaagcacttattggaagaaatccatgctgggcaatgtggagttcatgcagtgttaagaacattagttggaaaagcattcaaggcaggattctactggtcaaccaccaagaaggatgcagccgacctagttcataaatgtgaagtctgtcaattcttagacaagcaacagcaactaccagcacaacatctatagactattccagtcttttggccctttgcatgctagggatggatatggttggatcatataagaaggctcaaggaggatatacacatgtaccaatggccattgataaattcacaatgtggatagaatacaagcctataacctctttgacggcagccaaggcagtagacttcatctaggagatcatcttcagattcgggataccaaatagcaacatcacagatctaggatctaacttcacgagtgcagaattctttgacttttgcgagcagaagtgcataaagctcaagtacgcctcggtagcacacccgagagctaatggacaagtggaaagagcaaatggaatgatcctagaagcactcaagaagaaagtcttcgacaaaaatgataagcatgcaggaaaat

SEQ ID NO: 81543 - DNA, 543 bp, Zea Mays
ggtggaggtggtaggtatggctaaggtggtggatggcgtaggagtgactggagcgggcgaagtgggaggtggagtggtagcagtggcgggagtggtaggtgcggaggagcgaggccgagaggcgagacgacgaacgcgataagcaatctgatctgaagaaatccgtagctgatctcctctctctgtctgctcagcggctgctgcttcttgcgggcttcctgctgctccaagtagacagtcttccccttgacctgcctaaagcggcaaggagggtcctcgtcatttcctcccctggcgctaacacattcttcgtgcatggcatcttgacctgaagactgcatatgagagagataaactaagcacaagaagataacagccgataggatgacaaaagactggatagctacctagaaatctcacacgagagggagagaatccaggcagaacaggagacgactcacggacaggcgaggtcactaaaatgacaggagagatgagtacgtattagtcacatagtcataagtatatgaaatgtgaataaat

SEQ ID NO: 81544 - DNA, 576 bp, Zea Mays
gtcgactgcgcggcatagggcacacacggcacggagggagagggagcagcttcagttcagcggcacacaacacagagggagatggagagggcacacatggtgtggcgaacggcagcagcaacaccttgagatggcggcggcagagagcaaagagcagagcacatgccatgccactgctagccatcgggcttctaggagtagggtgagtgctgcgggtactggcctagcctgggcccaaaagtagctaacggactaggcccgaagtagctaaaggtctaaaacgcatgaaaaacgttgcgttttacagttttgacttttgaacgattaaatgcctataaaacgttgttttaggccaaattgtttaacgtttcagagtttcagtttctaattagcgttttaacgtttacagatatgtcgtggtgatgacttcaccttgttttgtttcagtttctggatccttcctggtgttttcataatcttcccatgttgataggcatgtgcttgcctatgacaagcaagaaagcttgtgttatgcacatgtacggatgtacccttgtttgctggattttttggttg

SEQ ID NO: 81545 - DNA, 978 bp, Zea Mays
gacgactaactcccttttgagcaaccctacgaggcagagtgatagaccaagtctctatcgagcaaccctacgaggcagagcggccgaccaggtcctcattgagcaactcagcgaggcgatccagtactattgacccatgtcagctatgtcagctacgacaagacgcgccataaccaaaccacgttcggacatgggtgcggcataccaaaggggcaccgagaagtccctatcaaaatgacggcacgccatcgcgtacggtctctagcatatccccactgccttgtggggccaatcaatcccaatcatgggggacctaagcaccggagtcgctacagtgaccctcatatctggaaggacgggacgatacaccatatttggtgtatgcctacgtaggacgaagggtgacacagggttcatgacgacaggtgaggttgtgccacgcacgaccacaacacaacactgccctaagggacccacaatgcactactacaaggacatcagcatcagactcgttggggacctttgtatgtcagacgaacggagcggtacgccatattgggagtacggctacgcatgaccctacggacgacgtcagaggcactacatcaaccgggggcaacatatcacgctcttaccattaggaaacaagactcctctataagatcctacccttaagctataaaagggaaggccccctccttctacccacacaatgcactagctataacacagtcctcaagcaatattacaaccagtgattcactattcggagtgagtccgcgctagcatcccctcctgaaaacaaattctattgtccctggtttctgaaaccacgacagttggcacgccaggtagggcacccttagggcgccaagtgacgtccttcactccgatggctcagccttcagcgttcaacgacagcaagaccttcgcacctggaagccacatcaccttcggctccctcgacttcctcaccac

SEQ ID NO: 81546 - DNA, 434 bp, Zea Mays
ctacaagtgactaggatgctcctcggacctaaagaggtgcacctagaagagtggggagagcctctaggattacatccggaggttttctcaaaagggaaacgaactccccgatgtccatgacgccgacatattcagtaccttcacctatgaaaccactaatgatgcgctcgtcaatgagctttgatgagggagacaaaggacaaccacagacctgttctgtaagggaaagggccctgcaatgcctgcgggcctaacggcgagaagagggagcgtcgggaacaccctgataggcatggaaggaaccatcgtgcccaactcaatgaagaggaagtcgccaccatgaaccgaccacccaggccaccgaccaagaacgacgacgaccatttccaaaagctgatggactcaccatgccaaaaccacggctttcgtgtctg

SEQ ID NO: 81547 - DNA, 661 bp, Zea Mays
cagctatacaaggagcaccgggtgacacgttgtagggtttggctgactctggaggctcaccctctgcagccgggttggcgttcccttgactccgagactattgggttcagggcagacgacaccaccgaggccacagctatgaagaccctgaccaccttctgcggatatcatcccctggagatcgtgatgcatccactgggactcttacccgctgagaagagggatgaccccatgtggtgcaaccaagtgagccacgtgaaggacgtgtgggccatgcatcccgaccaagttgggtggatcactgttcagtttatgagcgcactgtaccgcctacaggccctaccgagcgacgccatggcacacctcactaaccttgctcagaccactaagctcaccctcgacagtcgagtggacttcgtggtcgacttgtcttcggaattggtggagaaagacctacaggtggaacagttgagccagcgcatcgcaaacctggagcagcaggtggagatccaggataacaccattgatatcctagagatccagctccatgatgtgcaagaggagcttgaggaagcaatcataaggatgggcatctttgtgtgggccgtgaggagccaaggtttagaaccaaatgcaaaaagtttatgcaacatacatgagc

SEQ ID NO: 81548 - DNA, 879 bp, Zea Mays
tgaagaaaggagtatttccatgcagagctcgactaggttgagttcttaagctccaaactacatacgtcaactctctgatccattttcccgtgaacttttcattcttgtcgaagactttcttcttgagtgcttccagtatcattccattagccctttctacctgactgttggcccttggatgtgctactgatgcatatttgatctgaatgctttgttgttcgtagaaatcaaagaattcagagctagtgaaattggatcccaggtcggttatgatgctattcagtatcccaaatctgaatattatatcttgtatgaactccactgccttggctgaagtcagagaagcaatgggtttgtattctatccatttggtgaatttgtcaatggcgaccagcacgtgagtgtatcctacctgagctttcttgaagggtcctatcatgtccagtccctagcacgcaaatggccatgttacgggtatggtctgcagttgctgtgctggtaaatactgctgctttgataagaattggcaagcttcacacctctggactaactcgactgcatcactctttgccgtcggcatagaaaccagccctgaagaccttcccaactagggtcctggatgctgcgtgtatcccgcactattcggtgtggatctcatttaacagttgcttcctagtaaccgaaggaacacacttcatgaggactcctgttacgccacttctgtacagtgcatccccaatgagggtgtagtgggctgactgccttgcgatgcgttctgctgcggctttgtcatccggttcctcttcattctttatatgtttgatgatgggctccctccagtcattagagtatgactctagctggtttaaaacatggcgc

SEQ ID NO: 81549 - DNA, 331 bp, Zea Mays
cacgcacgaaatagccagcttatacattaattggacgttgcatatgagcagaatttttattgcttcattacgtttttatgtatatgtgttgtttgatttggcaggaacatcatacatgaagaacgtagaccgacctccatctaatccaaagcggattataattcagtctactcaagagtgctttagtgtcgacatacctcgtgttccggtgaaaactgttagacacaaaacaatgcagactgctgatgaggacgatgactttataccattatcgaagaagcgtaactttgatgacagtcctccaaaagtcttgaagaagatagttacaaag

SEQ ID NO: 81550 - DNA, 294 bp, Zea Mays
taaacaatgtcatctacactcccgtttcatctattttacgcgatccgctgaagatagccttagtaaggccaacaaggaagtggagttggcaacgggagtggtagaacggcaaagaggatatgtaggcttgatgagccacctaaaaaacactcgaagcatatttgagggttgaaattgaaatgtttttatagttgagttgtcaaaaatacccaaatttgcactttatcaatataataagagttgtggacataaaatagacttgttccatgtaatagctgaaaaagtttggacgac

SEQ ID NO: 81551 - DNA, 502 bp, Zea Mays
gtgacttgaacatacatgatacatgctgtgtggcgttaaattaagctagcatgtgcgtatggtaaacaaccaaacataaataataatgcaatccaagatacgatcggagaatggattatcactgtattaactaccagaatcgagtgttttcgagacttttggcaagtgctttagacactcagagaaagcagttgtgtcatgtaatgattcaacaaatgcataatcgtctcagttccttagccgcagattgatcgacctacgcaaattccaggaaccgaaacaagatgtgaagagacccgaggtgaaggtacccggacgacggagacgaataaaatgggtagtattattctatgctgtctctttgcctctatctccggggatgtgttgcctctcgggtggtcatatgtacaaggcggatgtgacaccggtaccaatcatgtgatcctgtaattgttttcgttcgtatgggcatgcacatgatgataaaaagattgtactactg

SEQ ID NO: 81552 - DNA, 639 bp, Zea Mays
gtgaattcgtttctcatcatcaggaagattccaaaggggagcaaccagagcctcaatgtcctcgagagagggtcgcactctaagacccagaccaccatcactagtaggagggttggacacaaaattggaaaatgacctatgaggtggcagattccaagcagaataggcaacaggagcaccaacatttgatatcttgcccctcaagatcatgtctagtcgactcaccagatcctcagtaggaattctcttgttgatgacccgggtagagtcattgataccactgtacaagtaagctggatacgccctgtctttcaaaggctgaatattcttgaaaatgaagtcagcaaccacagcttcggcagtcagacctctttccttcagcagacagatctcagcaagcagaactctagcctctgttacctccaagggagttggagactcaacccagctcggagtatgtacatctggctgtctccccgaccgaggggggagggactggcagtggttttccataataaaccactcaaggcgccaccctttaatgctatccttgaggggaatgtcgaggtattttgtcttcctctcgcgacgcatctccaaacttgcaccaccaacaagctggtgctgcctcccagccat

SEQ ID NO: 81553 - DNA, 719 bp, Zea Mays
agagggaaggatcccaagtttctatacgatgttggctctcaagatctatgtatcggatgcttactacatacctggctaagtcgtcgagtgttgttgctgtgtcttttgtcccctccggtgtaggccaaccctctccttttatagactaaggaggggccagttacaagtggctttcctcggaaggggtctctgcattgtggtaaaacgagtcattttacccttggtaaaggcccgtccgttagtattctcactcgtcgtctgagctctctaatcgtgcttattttaagtcagttgggacagcatgcacagcggcatggagtctgagtatcataagtactctctcatctccatgctaacccctggtcttcgtagcttgacccctggcttccctcgtcgtgttatgggctccgtaggggagtcaggcatatgccatgagtgtgacataggcctagggatcataggtcataagtggggctctagtctcggacgcgtaggatatgagtggaaggaggaccggctcctttgcgtgccacggcttggtaccatgcgctgtcaatacaattggtcattaatggcggggcagtccatcagtcagacatagaatccactcgagtggctccctgatagtccatctaacccatcctggtcctgcctcgtccggcccctgagctcggtgctccggggtcatctggggcgggtccttccgggccagacttctc

SEQ ID NO: 81554 - DNA, 443 bp, Zea Mays
ttcctttgatgttattgggtcacttacattggttttatcctcacctaaagaatacattttcatatactcttcgaacaactcatgaaggcaatagtaaattacttctgaaactatttgtcccctttccttgccaaatatctcttcaacaattatcttggtatacaaagatagcttatatcttggatcaagacaaccaacaataaaatttagtaaattcaagttctccttctcctttgccttccccctccccttctccatctccttgtcatgttcactgctagagttccaaagtctcgaatatttgtcaaatttttccttcattctgattcccatcagtgtttgcaaatcatatgtattgtccatccatgattgaatcaatgcatacacttctccaatctcatggaaaaatgtatgtgcagtgacatggagagtagtagagacac

SEQ ID NO: 81555 - DNA, 1402 bp, Zea Mays
aggagccgccacgctcttacctcggtagcgattcagagcccgttgatgagggcctcatattcggtgatgttattagtggcctcgaagtggaggaaaatggcgtagcagagattgtgtccttgaggttacatgaggaagacacctgtgtcgctttcggtcttcaagtaggagtcatcaaaatacaatattcagtactccaggtcctccatcgacggtgactcatgcgtatccatccattccgcaactgagtcggtgagggcctaggactggatcgtggttttggtgacgtagttgatatcgagtccgttgagctcgaggcaccactttgagatgcgcccgaacacgtcccgattctggacaatatcatcaaggggtgccgtagacaccaccgataaggggtgttggtcaaagtagtggatccacttccgcttggagatgtggaacgcatagagaagtttttgtatcagagggtatcgtgccttgcactccatcaacacctcactgacgaagtacacatgcttttgtaccttgagtacatgtccctcactttctctttccaccactagtgcagcgctaaccacctaggtggtggctgcaatgtaaaggagaaggtttcgcctagttcgggcgcaactaaaaccagcggtgaggtgaggaatactttgttcgaccgagggcctcctaggcttcggtcttccaagagaattggtcacttttcctcaagagcttgtagaggggcattcctttttccctgagtctggacaaaaaccgattgagcacggtgacgcacccaaccagttgttgtacccccatgaggttctagatggggcccatgtgtcagatgacctctattttttcttggtttgcttcgatccctcgatccgacaccatgaagcctagaagttttcccttggggaccccaaaaacacatttcttggggttcagtttgatttggaaccttaggaggttggcaaacgtctcttctaaatccacatagacatctaggttacacccgacttggtcggtgaaccagtggagcatgcacctctagtatgtagctctagcgttctgcagaccaaacagcgtcatgacctagcagaatgtgctgaagggggtaatgaaggtggtggcgtattggttagactccttcatgatgatttggtgatagcccgagtatgcatctagtaaggaaaggaactcacacccatcggtcgaatctacgacttgatcaatacgttgtacagaaaaagggtccttggggcaccgcttattgagccatgtgtagtcgacacacatcctccaactcccattcttcttcttgacaagcacgggatttgcgatccacactggttggtgtacttcccttacaaatcccatcgctaggagtcttgccacctcttca

SEQ ID NO: 81556 - DNA, 584 bp, Zea Mays
agcgcgtgtggttgctgatccgagcctgctctcgccttggtcagtgcacaaaacctcttctcctccctacaagctaccgatcttgtgtgggggtcataggattttgcctactggttgcagagatatggagccaggaaatccggtctgtctccctgctcaaacccgaggcaaatccagggttttgtcgtgtctagggctcgcgtcccaatgccatcttctggcacacgacagaggggttagttagacacaattttgttaatggggccattaggattcgagttagggatcaaggtgaacatccctgatctttggctcaaggtcttaatttcagaattctgaaattcaaaattcccattaagtccccacatgagaagcttgatttggggttttatttgagttattttggccaagctttctcaacctttcttgttgcttattaaatatacttcaatttttataattggctcaagtcacaatttcaaatttttcatacccttttccttattttctttaattttgctcatggggctcacttagggtttttattagggttgcacattcttacctttttaaaagactcaatt

SEQ ID NO: 81557 - DNA, 381 bp, Zea Mays
ccttgtttgatggtgtactctagaagaagagatgccacaccggttcactcccaggcagtgtcctcggcagcatcgccccccttgcaagaatttagtcagcacatttccaaggccattaatggtttgttgagcccaccgccagtccctaaacgcagaaagaagacccttacaagaaatttcaagcctaggagatccagaagggtggccaagtttccgcctgagttaggctctgaagcagcagcctctgtttgcaagaaattgggactctgtgatgatcatggcaatatctctctggaagatgctagcagatatgctgctctatacaattcacccctctccagagagcacatcgctgccttggcagctctgtttggatgggat

SEQ ID NO: 81558 - DNA, 382 bp, Zea Mays
agactgtgtttcatgtagccatggaatcggagaacgaaaagctccgtaaagctctggctactttgcttagagttgttcaaaagcgtagttgtgacatcgttgatgtcgtcaaatcagccttccagcctttcaactcacctttggtggattaaatgaaccgagcattagttgagattgacgacctcgccaaggatcttgaagacgtagcagtgcaaacccagtgggaggtagaaaatatgcctaactgtgaattaaacgaaaatcaacgagaagaggaaccaatagaggaccttctgatagaagatgcttcagaagacgagcttttgatagacgaagagtcaccaattaactatgacgaacttgtcggctacgacgatggtcg

SEQ ID NO: 81559 - DNA, 467 bp, Zea Mays
tgtggattgagttcgccagcgaaaagatctcgtcgcggatgggttcaagtactgcggccacgctgtcccttggttccctgcgctggcgacgtggccttacggccatcaccagaatccgtgatactcatcgcggttgcgccacgcctccagcctttaaccgtgccgtcgtgactcacgttagccatccgatcatcgccggtgagtccgccacggtatttgccacgaatcaactgcgccagtaaccccggttttctccggctgtcgcgcgtcttcatccaattccctggccaccgctcatgactgctataaattgagcccgccgtgagctccgtagggtaatcacccatccatagcacccacgcttgcctccagtcgttcaccagagaccgtgaattgctcagtgcccccaatcttcgtttccgccaccgtaaaaacacctcgccgaggccagcttgctccaggtcggt

SEQ ID NO: 81560 - DNA, 549 bp, Zea Mays
aggtgatggggaagactttggcgaggacatagttttattagtcaaaggtttagtgtcaaatgccaattgcccttctatcatacagagggggcctacatgattgcaacgccaggtggcaaggttgcggcacaccaaaccgatcacctagtgcaattaaattggggagcaaaattttcagaaccactctccttatcttaggattggaaaatgtggacatcatcttaggaaccaattggttgacccaacaccaatctgtggagagattaccatgtatctacgtacccatgggagtacacgttcttatgctttctccatgattgagttgcccttagagaaaattccagtggtttgtgagtatatcggtgttttttccgaatgagttgcccggaatgccaccagaccgatatagagctttctatagaattgcaaccaggcatcacacccatctctaagaggccttacaggatgccactagcagaactaggtaaattgaagaaacacctataagaaatgttggataaagatttcatctgcccaagtacttcacct

SEQ ID NO: 81561 - DNA, 311 bp, Zea Mays
tcgggttccactatttccttccgcaggtttaaaactgaaattattaagctttggtcctccaagcgtcgtcacaatggacctgtcgaccattgataatttagtctcttgcaaacaggcaagatggcaagtggtggtggagatcatcgcgtgcactgcatctcggcgcgcttgcaaatttaaaccccttacattccagcacaagatgctaaagtcagacatgaaggagaaaaggaccccgattaattaccgacagctggatgaaactgtagcactgcacattaacgatagtgaaacttaaaggggacaccagg

SEQ ID NO: 81562 - DNA, 738 bp, Zea Mays
ggaggttataactcttcggaatggggcacttgagaaagataaaatcctgctttctttggtcaaaaagttaaaggcaagcgaagctaatttggccaaactctctgaagtggaccaaaagattttaaaatttgaggaggaaaaataagcagatgcaaaacgtatagctgatctggaatatgctttatctattcaagtgggattacacagactggaaaagaagtagcaggactcgaaaagaagcttcatgaagttactgaaaacttcaacgttgagcaatcaaagcgtgagatatccgacactgaacggttgagggttcaaaagaatgttgaagagcttcgtcaagcaaaggagtagtgctataacattgctatgcaatgctcaaacaagttgaaaaatgcttttattagtgttggtgcattctcggccgagcaaaatttcattcgtggtgatcccgagggtgtgatcaaatggaatgggagcgaagtcgaagcatttgacgaagttctaactggtaggggagatttttgtgcatgtgtaggggcttggggggctatatcactacttgaaaaggctggttgtgaacatgctaaggctgtaaatcagccagacttctcagtttctataacaccctgaattcctagtttggtaatttagaagaattatccggatagaatcaaatgaaaatgtcttacaatgaatacctttcctacctttgaaattacccttcctaaaataaac

SEQ ID NO: 81563 - DNA, 568 bp, Zea Mays
gagatatggcacagaaaacaagacatgagacgatcgagaggtcaaacgacgtgaaaacgacgtttgaacgataaacagtgccattggaggtttggaatttgaattgaggcacgaaacgacatggaattgagccgatacttcacgaataggtttgtataggtgtatatgagtgaagtgtgtgcttggtttgaatttaggcgaagaaaaagagatttgggcactcggctcggaaacgatcgctcgaaacggggaatgtggtgaaatttaagcctggaatctcggattggcgtgaaatttggcaagtatgttactggaagtgttgtgaaggtgcctgaaaaatttgggttcaattggagcatttttggctggtttgggcatttcaccgaacacatggcgtgcggtgaattaggttttgggagattgaggcaaattaggttgtgaaaccctcccaaagggagctagaaacctgcagggatactcaatggggacaattgaacacattccaccttttggatttactggatttgacaggaattggaaaatttcacaaaaggggtggcacagcctc

SEQ ID NO: 81564 - DNA, 405 bp, Zea Mays
tattcatatgaccttggttttaatcccattattatttattataaaccaagtttgtgttgtttagacttgatttttataggatcacttattcaccccctctctaggtgctctcaaacctcctgattttgaggaccccaaaagacctaaccatgtgtacaagctttctaaagctctctatgggcttaagcaagctccacacacttggtttgaaaggcttagagatttctagctttctaaagacttcaaaattgggaaagttgacactactttattcactaaaagaattggtaatgatttatttgtttgtcaaatttatgttgatgatattatttttagatcaactaatgagtcattttgtgaggagtttggtaaaaatgatgtcaaagtaattcgaaatgtctatga

SEQ ID NO: 81565 - DNA, 300 bp, Zea Mays
gcgaggaccttttcacggtggcggaaacccgatttgggggaaatgagcaatttgttggctctggtgaacaattggaggcaagtgctggtgctatggatgggtaattaccctacggagctcatggcgtgctcaatttataggtcccttgagcgatggtcagtgaatttgagctcgcgtggtggcggtcggagagaagaaggtgcactgacgcacgcgattggtggcaattagcgtggcaagctcatcggcgatcaccggatgggctaacatgagtcacgacggtgtggttaaagtgcagag

SEQ ID NO: 81566 - DNA, 925 bp, Zea Mays
gtaattgaggagtgatgtagtggtaggcgagaagtaagtttagtttttcaaacggttagtggatagtatctatcggtgttgtcatgatctttgttgtatgacaatgtgatgcttcactttgtcaatcatcacattccatgcccatgggataaataaatgtcttgttgatcgattagaaatcttgtatgagtgttatcatagcccaataattattggaggcgagtagcgttcataagttggtccttgttaaaaattgaagaacaatccgataagatatgcacataagtgctttaggtccttcagtagcaaatgtagtcttatggagttttatgccatgtgttaatgcctctatgttagaccccctaaaatgtgctattttaggtgacttgtgggttaactaatttaagttgagcaatggttaagaaacactgattaatctgctccaacccatgtttttgagttgcgatgtctaaaatggttcgctaagtcttatactgtgattagcaaactcatgttaagtaggagtcgatttcgttaagtgattgttatatatatgttgtgtctcggattgcgataataataggcaagcggacgtgtatgatgtatagcggcctatattgttgctctagttagccgaattgttagatgacttggttaagcgcataatcacggtgaattgcttgttgtggtctaaatgcgtatggttatgatcgcgggcaaaaattagtagtgctcatgtggtgtctaagctaaaatgcgaactagtgggtgaaaagcgcttcgatatacatatatgtcgtgtttgatgattgtggtgaatacgtcgattaattgtgtatggtagttcacgcacacgaaataacttgtataaaaattagtaagtctacttgttagttctcatttgataaatttaactctaacaaac

SEQ ID NO: 81567 - DNA, 689 bp, Zea Mays
gtttcagtacacttagccacgtttctaggctaacaacacaattttgtcgactagttctgcaaagtgtagtcacggtggcatcatattttgtttgtaaaatgcgctaccatgttgtcctaagattgttatcacaccacatttgatgctttggtcatgttgtttggagaattttatgaattccttttggatggctaaccgttgtgctatatgaggttatgagtgccaccagtgccccattgattttaattcctggagcaacatggcttacgaatgttctattgttctactcctatatatgtggtggtagtgtcgtaacaggcttgcacatcacttgaaatgggcgtattatacgagcctcgcaggaaactgctccagttccatgcctaatagttagctctgtaccggcgtatatggcacttctgtcttatggttgtgtcgttgcatcctttgtctaatcctcaatgtgaatctggttatgctcttgttaactgggatttttaatctcattgctattgcagtacacttaatgtgaatgttatttgtcttttgtttaattagcgtttgaaatgtacggtgatcggagggtgatgtatgacgggtggagaaaggatggggcacattcgaatgaatggatggttgtaacaaaggcttttcttgagcacgctttcaaagatgcaactagtcgtcta

SEQ ID NO: 81568 - DNA, 692 bp, Zea Mays
gcttaggactaaacttttgttctccacaacatgccacccccaaactgaagtggtgaatcgtacattgtcaatgctgctgcaaacaatggtaaagaagaacttgaaggattgggaggaatgtttgccacacgtggagtttgcttataacagtgcagtacattctacaactaatttatgcccctttgaaattgtatatgggttcaaacctattgctcggatagatttgttgccccttccattgcaggaaagaacaaatatggaagcttccgagcgtgctgcatacataaaaaagatacatgagaagactaaggaagcaattgagctcaaagcagtgcgcaaggctacaagcatgaacaagcataggaagaaagtgttatttgaaccggggaacttggtttggattcacttgagcaaggagcgttttcctgagcagcgcaaatccaaattgatgccacgaggggatggtccatttcgtgttcttgccaagatcaatgataatgcatacaaaatagatcttccaccaagttatagcgtgagcaacacgttcaatgttgatgacctcttaccatatacaagtgaagacacttcagagtcgaggacgacttcttttcaaggggaggaggatgatacgaccacaccattaagcaacatgttacaacccctcagtcagactacatcaactcaagtacaac

SEQ ID NO: 81569 - DNA, 289 bp, Zea Mays
cggagagttgagttgctcttggagtgcttgggtgctgaacaaggtcgctaaggggggtcctattatagccccaaatgagccctagtcgttgctcctttcttgcaaaaacatgccaaagctggctgactgcgggtggaccggaccaatctggtgcagcaccagatcgggtccatgtgctcccaatccaggatctgattgggtgctatcctttagtagcgggcaccaaaccagtccagtgcgccattggaccgagcaccatgtcagctagacattggctcaccaacgcgcg

SEQ ID NO: 81570 - DNA, 487 bp, Zea Mays
tgaatctactatgttcactttagttgtatctaccagtgctactaaccagaattctgagtttattagtgtgtaggtgcagcatgtgggggatgttaatgatcatgctccaccatctactaaacatgctgaaaattcatctcctatcagtgcctcgtaacctgttgtggagtcacatcctcaatctcttgctgaaggctaagctaggaggaagatagttcagcccaaaagactgattcaagagtgcaatgttgcttttgctttggtggttgctgaagaggttgataacgttcaggaagcactaaattactcagaagctatattgtctattgatagtgaaaagtggattggtgctatgcatgaagggatggtgtctcttgagaagaatggcacttgggaactagttcgactgcctcctggcaaaaaggcagttaagtgcaaatggatcttcaaaagaaaagaaggtatgactccaaaagagcctctgcgc

SEQ ID NO: 81571 - DNA, 743 bp, Zea Mays
taatggcctcgctatagctccccactgtaagtaacccgtgtcatccgacattattcaatctcttaagaattctttagatggttggattgaatgtatagtagagactatagataagatgacacatgcactagaaaaaatcatgtgcctatttttctgttgcataaattgggcacttaaacagttgcgccaaatacatcgacaataaatgagctttctcagtcacagccatattatggtatgcagatgaattcatatccgagacaatcactgctaccacttgcagtgtacgatgagccagcactgagtacgaccggatggttcgagtataatctaggcccatccgggcctcccacggaccgtccggctccatatacaggaccattcggtgcagcgctaagcccgccacatggcacataggtggtgccaaacaatatcaaatagtccaaaaatataaccacgaaccgccccgttccatagcaaagtattatgtaccttacgccagacaatctggtgccacaccagactgtctaaccacctaggctagactgtccgggtacgcctacgcaggacaaggtgttgtacaaaacatagttttctactcggtgtagcagcactacctgctccaccttcgatgcaccaaagccgaagcatccctacacctagggtcgagcatcagccaacaaataggcaattagagggactcaggtcaccacacacggattgtcctcatattgataaacaac

SEQ ID NO: 81572 - DNA, 1192 bp, Zea Mays
aaagaacgtgagttttttataacccccaataaagaaacacagggcatggtgtcagcatgaaatatgtagcaattattttaaaaatatcaaatatttatgacgaacatgtactgtcacacaatgtcatcacatatgatgtagagcgatttatgacgattccctcatatgacgcactcatcttgtcatgacatatcgtcataaacatgatgacacacaaagttatgacattttttgtgacgagtctcaatttttcgtcatgaaattgttttggttcctagaaatcgtcataaacatagtcacctagtgacaaattctacaattgtcattgagcgtttgtcataaaaggccatatgtgttgtagtagatccatcccatcttaaaagattctatcctaacagattcatcctatcctaactaatccgacttaaacaagatccaatctaattagatctgatctcatgtaatccaatctaactaggatcccatctcatctaatgtaaactaatctgatctgaatctaatcttacctaatacaagtctgatctaatcaaaactaatcagatctaatctaataagacctagtcaatcggtttatatttcttgcaccaatttgaaggatagagcaaattaacctagattagttaatagattaaactctacacctagaaactcttttctcacctaattcacttaaacctaaaattgatgccctagactaactcggccatgaacagcaacttgacctacataataggttacataacctgatcctacctattctcaatatagcttaagccacctactaagtcatctgctctacataataagcaatttggtttacctacaaatctgttctaactacatgtccctaactcggacggcatcaccaagacctaagaaggaaggaagtcaacctcgtcaaggaagacaggagccaacccagatctctagatgattcaggacccaccatccggaatggaaactctctttgctataatcttttcccttacccaaacattctataaaactacctaatagctaaatatacccatgttttttttacctctagctaactagtattaagggctaaaaaacttttgatttttgaactaattaagaaactaaaagctaaactgcaaaccaaacttgttgcatcccttttcttagtaatctcgaggacgagattattttt

SEQ ID NO: 81573 - DNA, 947 bp, Zea Mays
tcctagaatatagcaggtaaccaagagtaagcatgtacttaaggggtctgccccttggttaccctataaataccccatccagacggggcgaggggatggttgacaatacatttgagagccattgttcctcatatgtcttgttactatcttgttcaattcccacctgtcagaacccaacaaagggttagttgaggaaggaccaccccctgaggcaatgaccggagtgcatgcaacatggttctcaatcttggcttaagtcttgctgtcgattttggtggacttgagcttgctaaaaagctcatccactgtgagggtctcatagttgggtagtccaataatcgttaagaccttcacctctcaaatcctcgactcaagttactacttactaatcacttactctcaccgagagaggggctagagaggattctcaactagctaggaatgtgttgcttgtcagtttggagccgtggaggggttgtttatagcccacaagccgattctagccatttccaagattctacactttgtgctcgcaccgaacctcacactgtagcaggtctgatgtgcataggacctctaactattcctgctccatcagtgaacattgtgtaaagatgtcagatgtcaggcctcatcgaactggtctagtgcacagcgaaccccatactgttcacctccatgtcatcagatatttgccccccaccgccacccctcgacagttgggttcattatcaggctatctccagtatcttactcatctcgcgtcatatttcatactccactttgtaaacagcttaaaacagtattttacacgaccacatgcatgatctactaaccacaaccttagtggggagcgagtagaagagataggagaggcagacaagaatgtggcaaaggaatttgcaatttcaccatcatcgatagtagactttgctaatatgacatca

SEQ ID NO: 81574 - DNA, 553 bp, Zea Mays
tgaatatcgttaatagcttatttcacatttggttcttgacatcatctcacttgtcttttcattgtcgaattgtgatgtcaagattatctctaaataagaacccaagtgtcttccgaaactttggtagtgcctcttctggagctaggggctgacatttcgggctcacatctgagattttataggtgttgtcgggaaacttgttcagtcctctgtcacctcttttccaatcgctctacatccttttccttgacctcttggtgtgttccggtgcgtcttgggtctgttccgatacgtctttgtattgtgtcacggcttcatcgagtatcgtacgaaattgagacaagaccttctattcatgtaataaaatgcacaagaaattatgcatgtgtaatagacattgtgaaatcaggtacacacatgaaattaaggatgtgtactttacctcagcgtcttgtggatcataattatggtcacgttgcaactcacggtgagtggccctatctatgctaggagcagggtcgttgggcgttccatatccttcatcactggattg

SEQ ID NO: 81575 - DNA, 303 bp, Zea Mays
aaactggtaaaaaccttggaaggaggcagattccaggctgaatatgcaataggagcaccgatgttcgacaccttgcccctgagtatcatctcgagccggctgaccaagtccacagcaggaattcttctgttggtaacccaggtcgaatcagcgaggcctcgatacagataagccgggtaggctctgtccttcaaaggctgaatgttcttaaaaatgaaatcggcgaccatagcttctgcagtcagacccctctctttcaacaatccaacctcagcaagtagagtccctgcctcggccacctcc

SEQ ID NO: 81576 - DNA, 1185 bp, Zea Mays
ggcgatggagggcccctacttataagaagtattgaagccccttcgcgaggaacatgcaactgcccctgagtgtgcccattgggtttcaaagcagcctcattgcggatagttcccatagtaacattccatcctttggggacctagcacaagcacacctaccggtcatggaggtccgacggaccaaaacgacccacatcgaacctaggcaagttgatttgggcctagtgggcttggggctcgctttcaccatcatcgtctaggcaaaggcctccgaaggaacaccccattcctttagaggctcagggactacacacggcgggtgcactcgcgcgcacccaccacaaaaatcgaaggccaccaaaaaggaaaggcgctaagcttctttagcctgatccagtgatagccattagagggagtttattctccccctaggggctcggggctactattggggcaaaaaaaccagacccctaggcccatgggccatagaaaataaaatcatagccaaccacatgggataatctccatcctgctagagagtcaagcctaagactgaagcggggacctcgagggtcggacgagacataagccatcattggatcagccaaatcgaatgtgtactcatggagccgggcgggacagaggccggtccaggggtcggctgaatcaaacgtagaccctaggggttgggcgagatggaggcatgctctcttaggtctcccgagtcggacgaaacgcacacggcccgagggacaatcgtgtgagatttgacctctccataccttgacaccactaccgcaacagtcatcacgatgtggcgtggaatggggttgtcctcatttcgtctaactctcatattgattacgtctaaatcaaatgtagaccccacatcccttgtacgaaaacgataaagacgctacggacgatctgtgaggtatgagagatcggcgagactagggtacgaatgtagtctacatcgtatgagcccactccagagacatgcaccatcactatgggcaactctgttttactaaccctggcatggtcccccatcagaaccaaagacattcaacgatacagatcaccgcgctcgcacacacgtcatgccttgaccaggataagtcaacaagtacaagattacgagatcaatgaacaacatgagaagatgttattgaccgaagtgaa

SEQ ID NO: 81577 - DNA, 455 bp, Zea Mays
caattaatgaacgatgtgcatttgtcaatgcagcactatcgaccacaatgaggttagctcgcgtacgacggttatttcgacgatggcggcggtgccttttcggtgacatggaaccttgcacagaagattttgaaaccataatttctgatgatatgggatcagaaagggttgcagttgggtcaacatgacctttcctgatgtcatcattggtgagaccaattccttgccacctaagcacacgtccatgttcaaccaaaccgagattatagaccggagatgggatgaactcaggagcctcaactcgtagctgagttctagtatgttactcattttcagaggatgatgtgttatattccatcaccacttctttccctttgtccctagactgttgatgaacctccttttccaccatggcggcctttcccttattacagaaatgtggatgttgatgttga

SEQ ID NO: 81578 - DNA, 278 bp, Zea Mays
gaatggcagaaggggggtacacctatttgtaacctgtatgaagcgttggaggggctattggtatgaatggcagaagggggcacacctatttgaagttcggtggacagaacaacaacagggcaatacaagttccaacctccaaagcacatgccattgcaatgaaggaaatggggccaaagtgatctggaatatgagtaaacagcaacccaacctcaaaaaatctaaacattgccacaagcaagttctttcaccaactgtaaaaccaaattagaaagact

SEQ ID NO: 81579 - DNA, 565 bp, Zea Mays
cgctgagggaggatgcccacgggcggtggtagtgatcgctggttcggttgccgacactgaagacgccgcccgggaggtcgaacaagatgtcgtagcgacggaggccacgcgcttccagcgcgaccctgctgatgtcgagtagctcatacctgtagaaatgaggctagggctccgcttgaaggcggatgtaataacttttgtttttgtaagttatttttgggaactatcaattaaacaactcttatctgtgcagtatttgttcttgccgtatgtggctttaccaactcctcgactggtacttggccaccctgggatgcaggctcaacgtgtcgaggctggataccagcatacctaagaaagagttttgtcccggcccccaggaggtagcctcaactaggacctaggcctgttcacagcttcatctaggaagtgttagtagtacacccatagggcccatcgtctagtatcagccatcctttgattcacgcaataggacctgcaggatttagcctggggagccaagccgtgtgcccggaccccctgaattacagctccaaataccagg

SEQ ID NO: 81580 - DNA, 977 bp, Zea Mays
cgagggtctcccaccttgagcaggcctgcgcttgcccgaagtcgacgccactcacttcgcttcacccgaggtcacctcagcgcagtccgtctcgcccaagtaggcctcgaccagaaagtacaagggcgctcaaaaacaggcagaggacaggtgcatttaatgcatgcgccaacccgcgctgtggcagcggagcatagtggtggacaagacagtgatcacgtctaagcgcagcggtatgattacgcctgtgccaaacagtgcacacacgccgcctggcaccctacggtgggacgcctaatacgacaagctgagcggacgagccttcaggtgcaacctctctgccttgctcgacccaagctcagccctcgggcaaattctctgcctcgcccgagctcggcctcagccaccgactacgtcgtgaatcctgcagacagccactccacccgactgtttgcgcacgtcaagggatagctgggctggcacctcgggaagacttctgcatcaactaagcgagggctctaatcacgatgagtgatgcagagaatctcgacgtcatcacacgccaggacgatgacacaccccgtaagcagcctttggcccataccccggtgctgttacaaccactacggcatgggcggcctctgcctcgggagcttggttgtacggacgacccctcggtctcggcctcggctcactatgggaagtcagcaggcacgaatctactgcatggttcaccatcacatcagatgccacgacatctctccttcaaatacaagactcaacttcaccatggacgctcccctggtgtataaatagggcagtggtccctccattgacaagaagggagacacacgtagacaagttcttgctctctcactttgtcttagatattggtacttgcctcaatcatctctaggaacttgggaacttcccctctcccgttgtgcttctaaacccctactacaggcaccacggtg

SEQ ID NO: 81581 - DNA, 340 bp, Zea Mays
cggtgaagggcggtagcgaaacggagagtgagtgaattgtcacgaagtggtaggtgtctttgtggtgagatggagagtggtcgtcttcgtgtggacgggactggtaaacgggaattgttgtcctcgccggctagggtgagtgtaggtgagggggagctgcgaaatctttttgagggtgaggaattgaggataatgttgttcaactacaaggagatgggtatcatcccgaaggttgagccaatgtaatatgtgatgccctcgctgtgtgtatgtaaccataatttgtatgataaggttgcgcgccttcattgatccggccacgcccataggcgacttgtgc

SEQ ID NO: 81582 - DNA, 634 bp, Zea Mays
tgaacagtggtccgatgagcaataggagcaaaggtctcctcatagtcacgcccatactcttgttgaaaatcacgtgcaacaaggtggtaggaggtggaaccaagtggaggaaatcaacagacttggaaggagaggaagaagaggacaaaccaggagtaaagaaaggacgtgactcatcaaaggtcacatcccgggatactcgaatgcggcgagcgacagggtcccaacaacgatatcacttacgctcagagtcacagccaaggaagacacactgaacggattgtgcagtgagcttggtcctctcacgaagttgaagaaggacaaaggcaatacaaccaaaagcacgaaggtgactatattgtggtggccgaccaaagaggcgcacaagaggagtgacaccatatagagcaactgaaggttgaatgttcacaaggtaaacagttgtaggcacagcttcagcccagaactgaggaggaacagaggatgttagaagtagaatcacgagtcatgtgaaaagaagctcctgagtcaagaatctagggcacgatagtacatgacgacgaggcaccacgcggctgccctagcgggggcacacgagcagcaaccaaggagaccacagaggaagctgacgaac

SEQ ID NO: 81583 - DNA, 629 bp, Zea Mays
caacgacgcaacaaaggggccaaagttgcattcattgtgcgctgaaatgttgctggtgcccctgtcaacccaaaagccatcacatggaattcataatgcccagaatgcgtttggaaggcggttttgtgagtatcatcagacttcaacaaaatttgatggtacccggcagttaagtccaaactggaaaaccaggaagcctgaccgagttcatccaacaactcttcaatcaccggaaccagaaatatggacttcactgttcgagcattcaagtgacgaaaatcaacacaaaaccgccatgaattgtcctttttcttgaccagcaatacagaggaagaaaatgggctcgaactcggttgaatcaacccggactacaacatctccagaatttggcgttcaatttcgtccttaatagccggaggatagcgatatggccgcacatgaactgtttgagcattcaaggcaacagaggaatgacgtgatcacaagccctcgaaggaggcagccctttcggtggtgcaaatacctcagcgaattttttcaacactgactgcactgacaccggcaaattcaagtcatccaaagaaggggttacaatactcaccatagccacttcaaccactgaccctggc

SEQ ID NO: 81584 - DNA, 367 bp, Zea Mays
cttatttcctattttcttcttttgccagtgcagacaatagttcttggcgaagacttccacagacggctgaccgccgtacgacacaaccgcccacacatacttcgccagggcaacaacgacgttgggtgtcaactggtggacctgcacaccaaatctctgcaaaacctccaccacgaaacgatgcaccgggaggcgaaggctggcaagaaaaaatgcctcgaacacaactaattcgccctcaggctcggggatctcttcgacacccggaacccgcccaacaccgtcaccaaaatatccaagctactgcatctcctgcacgcaaaccgaggaaattctcgaagtgccgatctccacggtgtggctcggc

SEQ ID NO: 81585 - DNA, 1300 bp, Zea Mays
agtagcttctccaagaaatgagggggtttcctggcgaagtactgagctactgtgccaggacagagtcctttaatcattgcctctatgatgatgttgtcttgtacggtttgtgcctgagctcggagccaaagaaaccttcagacataagtctggaggtattcatcttgctcttgtgtgctttggaacagggcttgtgtagtgatggcttcgtctggaaaccgtgaaaactggtgaggagcatgtctttgcgcttctaccatgatgtgatagttcccagttagagagatgaataccaagtctaagccatagtcttgactgccatgacaaaaagactttgtcatcaccgtcgtattgccaccataagatgatattgtagctctgaatctgataagccatcatacattggcagctggggtggcctatataatggtgaccatggtgtggcttgtaattctgctgccaagggagaagcaccatcatacataaaattatcaaaaccttgctcttcatggcaaaggttgttctgatgacatggttcctctggttgctttaacttgttgtgttatgttgcacaattgctctgacacttcatcaaattgcttctgtagttgagaaacccaaagcatcttctcatgacgcttctcagtctgttgatgaatggcttcgagattgcgaatttcttgatcaagctcatcctgatcattttgtgatggaggatccataacttttctcttctagctttgtgcatcgtgaagaagtacatcttcaacttgattatgatcaatgggagtgagaacagaaccaacagttctagtcttctttagaggcatgaaaaaggtgttgtttgtcgaggtcatgagttcaccggatgtggtcgccaatattggtcactttcttttgattcctgagagaagtaaaaaacaaggcaacacaaatgaaataattcttccttcacactttaattaatcttccatggggagattaatcaaagtatgaaggttaaaaggagaaataataatgaaacaccatgaagacataatgaaataattcatttttgcacattctgccattttgttttatattgtaaatgattacatgaatacgtttggctttacaaaggagagcacgaaggaggagcaaaatagcttcgaaggtggaaggatttagttctctcgcgttcgaaaatgtgagtttatgcatagaactgtgcctctatttatagtggtgaggtacaacttcgtataaattataatcatgcctacaaattcaatacatatgaactacaagtcttgtaagggta

SEQ ID NO: 81586 - DNA, 647 bp, Zea Mays
catgaatgatcaatcctaagaatttaccagccgacactccaaaagcacatttacgtgggttcatttttagactgtaccggtgcattttatcaaaggctttgcacaaatcggctatatgagaactaaactcagctgatttgactacaatatcatcgatgtaaacttccacattgtttcccaacagctcctgaaagatcaaattcatagccctttgagaagtcaagccatcattcttcagaccaaatgtcatgacaactcattcaaataaaccaatgaagcctggacatataaaggttgttttagacacatcttcttcggccataaaaatatgattatatctggcattaccatcaaggaagctaataattctatttcctgacgcattataatcaacatgtcgactataggcataggatattcatctttaggagttctctatttaaattgtggaaatcaatgcacactctaagcttacctgattctttcttctccaccggcacaatattggagactcactctgctatcagcaaggtctaataagattagcttcttaaaccagtgtatttcgtcctttatccgtaggagtaagtctaaacaaaatgatctgggtttctgcctaaaaggcctgaaaccggacttaataggca

SEQ ID NO: 81587 - DNA, 325 bp, Zea Mays
aagacactgattatgaactcattattcagattgtcagtctgttttacatgtttcacaaataaaagttcaactaaagcaccgaaacaacaggactatacgctatagcaagaacaaaataatacagacatgcaaaaacttcatttcctaccttgatgacctagttagaaatttggtaagtacttcacatactcagacaatgaataagcatgcttcatctttcagtaaaacatgatccaacttatagctgcagcagattattacatcacaagtaacaaatggggctaatttcgcaccgggttttaataaacccaatttgcaccaaaac

SEQ ID NO: 81588 - DNA, 723 bp, Zea Mays
gccgccagcactgctcggccaaattgagcgccaccgctcttccctcctataaattgaagccacgatgagctccataggatagttaagcatccagccaccaagaatcaccagcaatcgttcactgcagagcaccaattctggatttcccccaatttagttttccgccaccatgaaaacgacctcgccgcggccagctcagctcaggtcagttcaagtctcttcgtggcttgttctagcatccctaggtcctccttaagctcttcgaccccttcaattgaactggaccatcacctatcgccgggaacacgttcctttgtccgcatggtcttcggtcgccgtggccagggcaaattaggttaccaatcttcaaattaagttaggggaaacactcggggaatgttcaattcggtgatagccgctcgggagcaccggtcgttgtgtgaatccaccggcacaacctcaccggagttcatcccccacgctgcccgtcgtcgtggaccttgggcggtaaaggaatagaacctcaagggctttcctacaaactgtcaacgacttagggaaatagtgaaagaacctgcttcgagttaaccagaacaccgagggccttttcgcaaggctgccagcgcgcgcgcgtttctgtgtggccttgggccgtctgggctagaatcagcccagtactgttgaagcttttcctttttctttttcagtagaactttgaaaagc

SEQ ID NO: 81589 - DNA, 1317 bp, Zea Mays
ctgggccagtttggcccgtcgcctaaaggtcgtgctggattgtgtctgcgtgcgggcctaggtgacagccaaggcatggcctgctaccctgtgtcgggccagcctgagtccaatgacccttgagccgggttgggccgaaaatatgggcttctaccgagctatcgggccttaggcttcatggctttctatagtcctcgcgaagggaagacacgagtagagttgaaagtagtgaggagaccaaacggttcggtccaaactttcgggtctagacacgagtgaagcggcggcgtgatatgaggggactagtagagtgactgtagtaggtagacggtggcgagctagcacaggtctaatggcccgccaagccaatcgtcatggcacgacacacctaagcacatgtaagaccatgtgtggaccgagaggagagcttggtgatttgacgtaatataatataacatagctagaacatagtgtcacttagtatcgtggcaaatagtgttaggatcgagttagggtcgagggcacctgtatgactatgtatacataagaaggaaatatataatgcttaataaaaagcacctttttgatgttagttactctctctccacctacaaaagaatgtaattttcgctttccgagaagagaatcagtttaagcaaagaagtattaaccctcgtgatgcaaaataagcattagattaattattgaaaatatttttataataatttatttggaggtataaatgttaatattatttagtacaaatttgattaaagcgaggaccgaggtgcgcggatactaatagtataattgcattcatgcgtacacggacggaggagtgacgagcacatctctctctatctctcgctctctctgtgacgtcaccaggtttggtggtgatgtttcgtgtctgacatcatgaggagacaggataggcactttgcggttttgtttttccatcgacgcgcaaagagggttgaagattcctggtgtggaggtacacgtcggccggtcgccggtcaagattgtctggtttctccacgcccagcccaaccccaaactctgaccatcacttcacacacatgccttctctcgccacttcactgtagtattattatttaataataacgataaaaacatctcaccatcaccatcaatctaatcactaatcaggccgtagtagtactccacatcacatctcgatttatatcagaatcacattggtcaacggagaatttttttttgggttagactttcttcatcctggtgagtagaggcagcgaaacagattattaggtcatcatgaaaatcataaag

SEQ ID NO: 81590 - DNA, 284 bp, Zea Mays
ttatctaggatcgttgatgtcaacaacagatggttggccatgtaatgaacagggcattttattgaaaatgaccgtgcagattgaagattcagttcgtttatgacgtagccataagcgactactacgtatttcagtctgaaccctgggttttcttgcattctatatttcgagcaccgatagcctgcagcaggttttgaatattgtcgctctctctcgtccagtctctactccctaccttcagtcttcagtcttggcgacacgtgacatgtgccatctagttttgt

SEQ ID NO: 81591 - DNA, 400 bp, Zea Mays
ctaatcacggccgcccgtcatgaatcctacggccacgatctaatcacgcgaagggtatcctatcatctgatcgcgatcgccaacgtcggatctaacggccaaaaggccatcgtcttcctccaagccgcggcgtggagaaaaacccagcccccacggtagcgctcgccggtgagcaccaaccaaactccttcccagtgcccaaactaataaccagacgtggataattgaagggacatgctagacgagtggtttgcagggtttcttacctgctaccgtggagtaatggaagccgaccacgagcagtgacagacgtcgagtttcgacgtgaaattacgggccaccctgcggttcaccacctctgcgaaagaaattggcagctaccgtgaaattacgatgcttt

SEQ ID NO: 81592 - DNA, 284 bp, Zea Mays
cgaagcatgagatatgcgagatcgaaaggtcaacatcacaaaagaatgtcgatgagcttcgtgcttccaaagaaagatgttatgaaatatccttggaatgcgccaagaaattaaaggacaacttcgctagggttggggcatattcctctgagcagagattcatccgcggtgaccctgatggagttgtctagtggatcagcggggaagccaaagcttttgacgaaattctaagtgaccaaggagatttctgtgcctttgctagtgcgtggggggccacgtccata

SEQ ID NO: 81593 - DNA, 348 bp, Zea Mays
acggtgacaacggcggtccggccacgtcgcacggctacaggcgcggtgataagattctgccgcgatcaaatccgtgccccgcgagatctttttacctccccgtgaatatccactgtgtgccaagcacgaatcacggcgaccggggcgaatccgggagcaaggtcaccggcggcgagggggactgaaccctgagatctttctgtggcactgtaccatcagaaccccattcagtcagtctgagagggtcatttgcagggcattaatctctaatttctatgtagcaacttgttaatctctctataacaaagttctagctctataatctagctacaatcttactatagttgc

SEQ ID NO: 81594 - DNA, 643 bp, Zea Mays
atccttctctcgcccgagcccgaggcaagggcatttctcctctcccctctggttgtctctggtgctccctggcgattccccctctcctcgccgccgacaacttctccggtgagggtctccggtgagctgcctggccagtgctcgcgctctccctccctctctctggtgagctgcccctgtacttttctccctctctccccattctctctggtcagtgagttagaagttccacccctttgatcctcaaaccaaatctgtgtcatcttgtgaatccctatgcatggatgtgttccatagtgcctctgtgtttccccatgtaggttcctagctccataaggagggtttcaatccttaaaatggccatttcacctaaaccctaataccccgcacgccaagtgttcgataaaatgtccaaaccagccaaattttctccaatcgatcccagatttttcaggcacctttatatcatctctagtaactttttcgtcaaatttcacgtcaattcactcaaatccccatttctagcgattgattccgagccgagtgcccaaattccactttcttcgcctaaaatcaaaccaagcgcacacttcactcatagttacccatataaacctattcgtgaagtatcggctcaattcca

SEQ ID NO: 81595 - DNA, 865 bp, Zea Mays
cgactgctccgttggtagggtatagtggttaccctaagccgagtaagtgtgagcatgttgcaccgtcttaagtcgtcgctgacttaagccgattgctccgttagtagggtataatggtcacccctaagctgagtaagcgtgagcatgttgcaccgtcttaagtcgtcgccgacttaagtcgattgctccgttagtagggtatagtggtcaccctaagccgagtaagcgtgagcatgtcgcaccgtcttaagtcatcgccgacttaagccggttactccgttagtagggtatagtggtcaccctaagccgagtaagcgtgagcatgtcgcaccatcttaagtcgtcgctgacttaagctgattgctccgttagtagggtatagtggtcaccctaagtcgagtaagcgtgagcatgtcgcaccatcttaagtcgtcgttgacttaagttgattgctccgttagtagggtatagtggtcaccctaagccgagtaagcgtgagcatgtcgcaccgtcttaagtcgtcgctgaattaaaccgattgctctgttagtagggtatagtggtcaccctaagccgagtaagcgtgccgatttcaagtccaaccaaatcgaagtcagctgatagtcaatgagtctgaatgcctttgaaaatgaaaactttattgatgatgaagtcccccgattacagagtacaatgttgctttgagagcttttgaggctttgctaagggtaaaactttctaagatgctctatgttccatgcgttacccacttccatgccatccatttgagtaagtcggtatgatcctggccgagtaacctctaatacaatgaacgacccctcccatagtggtgacaacttgtgac

SEQ ID NO: 81596 - DNA, 412 bp, Zea Mays
acttatggacccacctacatgcccggttacctataaagaccttcgcattgtacacggatgggacactcatatcaagacgctacagttccctacaatctagttgtgtacctgagctctctcgctcccttagtgtttgggcccacctgcctacgtgtcagttggtcacaacatacatgcccttacatagggaagggacgtaatttaaattgtcagagtccaccttaatttatcacactctccaatcaggttctacccttttcatctgatcccaacacttttttcctttcaatctctttcagaagtcatgtcccacaccctttaagaggaagtctactagcacattgagcttgaaagcaccatgagtcttatcaagccatttttcaagttggaatataatcaactataggtaggt

SEQ ID NO: 81597 - DNA, 466 bp, Zea Mays
gagcagcaggagtcctcatgaaatgcatccatttggctatggggagacatctgctagaagaaagccatgtggggcaatgtggaatacacgcagcatcagggaccttggtagggaaggctttcccgatagatttatattggccgacgacaaagaaatatgcggcaagcttagtccataggtgcgaagcatgccagttcctatctaagcaacaacacctacccacccagcagctgcaaactatcgccataacctggccttttgcatgctgggggctgaacatgatcgggccattcaagaaagctcaaggaggatacacccatgtacttgttgccatcgacaaatttacaaagtggatagagtacaagctgattgcctctctgacctcagccaaggcagtggagttcatccaagaaatcatattcacattcgggatacccaacaacatcatcacagatctaggatctaa

SEQ ID NO: 81598 - DNA, 457 bp, Zea Mays
gctcacctcactaggttgatcttcagcttgttttttagttgcctctaccatgccaacagctagataaggtgatgtactccatcgttaagtcacctctgatgctcgggttcactttcatctatgcaagtgcctaagccccactaggccttttcattgaacgccacatcacatgttatatgaatgcattttgtgatagggtcgtaggtgcgataggccttggatttgctctcatagccaattaagatcatcttgcgcccatgatcctcaagattcaactagtgcaacatcatgttgcacttgtagatgatgaaatcaaatgtgtagaagtgatgtacatccatcttcttcccatgccacgccttaaaaagggtcataccatccacacacttcattgggaaccatttcaatagctacacagaagtgcatacaatctcaccattgagtcatacaagaaatc

SEQ ID NO: 81599 - DNA, 363 bp, Zea Mays
cgcctccttaacttcatattcttgtatccttcgtacaaaacccctgttgttgtcatcgaatggttcgtccaattctattgtagaactctcattccctccattgaacaatttgttgaagtactccttccatctgttcttgatctcttcattcttcactaatagttggtttgcttcatccttgatgcatttgacttggttgacatcccttgtcttcctttcacgaatcttggccatcctatagatatctttttctccctgctttgtgtccaaccgttgataaaggtcgtcataggcttgacctcgggctctactaaccgctcgctttgcagacttcttcgctatcctatacttctctatgttgtc

SEQ ID NO: 81600 - DNA, 549 bp, Zea Mays
aaagaatgcaaaatatagatggagtgttgtttttctgaattaatttggtgaaataagtgttgttctacgaactgttcgaaaacatatgctgttttgtgaacgtcatcttaaacaagtgatgtttcctggattctccctaggagtgccacatggcacccgttgccctctagaagattggaggagactgcgaacgcccacgaaacgaacaatcgcttctttctttctgagtgccactatgctgcccctgccacgaacggtcagtagcatgcaacagttgcttgataaaacaattgttggatccagactgatagacaggagattgctcctgtcattctaacaagatattgctccttccattcgtggcccatgtaattacggttgattgacttggttgatttgggtagtttgatttggttgcccaccatggtcttgttttctataaaccggaatgggactcgcctatatatttgtaaccatgtactcatgatcaatcaagttgtgtttaccccaattccatcttctttcatggtatcaatcgtgttttcttcc

SEQ ID NO: 81601 - DNA, 402 bp, Zea Mays
ctgaaggttgccaagaagatatgtcgtgttcctagttctgagatcctgtaataaaccacttgtgcacgacctctctctattatccctatggcttctagcttttgtcatcatcaccaccaaaggccggagaatgggccggctaccgaacagcgctgacgacttctacggactgtactagcaagcgatgccaaggggaccagagagagggctgctctgcttgggttccaaacaccagcatatcgacgaccagacagatacataacgacctcacgctccccttaaggacctgggcctgacagcggcaactatgcgtgaccatggaaagagaactacccatcatccaagcgagttggaggagggggagggatgtcagaaacaatcagacaaatcacttaccccgat

SEQ ID NO: 81602 - DNA, 306 bp, Zea Mays
gttcaaccaaagtcaacgcacacaataatttaggatggaatggtgcgggtagcggggtaaccaagtttttgccttaggttaggttggtcaaacggcaaaaacgaaacattaatttgacacagattctacaactcggacgcaaatcaggagaaaagaaggcagtacggagataactggatgaaggaaaagggtgcaagttgagtcctattgttaacctacgtaaccgtctccactagtagtagcattattcacactttgggacacttccttttcgtttgaatattaagattggttctttggtcaaag

SEQ ID NO: 81603 - DNA, 324 bp, Zea Mays
gaagtacagaagtttctcggcaaggtgaattatttatggaggtttatttataacctagccgggaagattgatgccttcaccctatccttcggcttaagaatgatgccgaattctcttgggggcagagcagcaggaagcatttgatctcattaaaaaatacttgtcttcggctcccgtattaaaagcaccacgaacaggagtaccattccgattatacattgtagccgaagataaggttattggggctgttctgacacaagaaactgaaggaaaggagcatgtggtgacatatctaagtcggaggttggtggatgctgaaacgag

SEQ ID NO: 81604 - DNA, 495 bp, Zea Mays
gttcgaatatggaacggtacgacgatgaatccagtgtacttgcaaagtccctttgactatgcacgcgcgggggcaccttcattatataccttttgatctattgatcagatggtcatggtcgataaagatgcaatctgaaacagcctttatgcattgaagcttaattgaacgatcaccctattagattgaaaagccgatgacttgcatcaggcttagtgcatatggttttggttcgtcaacctccacaagaagacaatagggcatatgttgaacatagaaaatgtccttgtggacgatccgacactgaggccagacggtccgcggtccactgtccgtcatagcggtgcgaaccgtccacgcgtgcgtagaatcaattagggttccagatttcttaccgaatttgttagctatatctgtgggattaacttgggaaccaacttgtaatgggtccagaccttcccctttatatagattaagagatacgaccgtttgaac

SEQ ID NO: 81605 - DNA, 860 bp, Zea Mays
gaaaattgctcatgagacgttagctgggatatctgagggttccagtgatggtgaaagttttgatgtagagagtggggatgaagatgccgaagatcaaccctggagaccaagccatgttgtcgtcgggaaatcaaccatcaagcaggggcaaattgatgcaatgagaggaaggtatttccgtgatatttcaattgtgagggctggaggagaaaataatgtccctctgcccgaagctgacgaggtggtagtttatagaagtttcatgaaggcggggctttggttcgctctagataaattgctagtcgaagttctaaagactttcgaaatttaccatcatcagcttacccccgaagctatcatcaagatggggatctttatttgggccatgaggagccagggattggaacaaatgcttctgcaatatccacgagctatcctatgaaacgaaggctactagcaaagagcaatatcacaacaattttggttgctacagctttgtgcctcgctctgaggtgagctacctagttccgacatttcggaagagatggccaggggcctgaatgcaagagtggttctatgtaaaaaatgacttggttgaaagggaagatattaaggggattatccaacaccctatctggtctcacttcggcattaggaggccatccactgcctttgggaacggcattctagcatgccaggctgcttttaatacagtatgcacttacataggcaccagggacttagtccaggagcatattacttatagagtgtggtcgctcgcaagtgggtgggagatgccgaaggaagctgctgctgggtccagcgaaggtggtttggtctatctgaagtacacattcaag

SEQ ID NO: 81606 - DNA, 356 bp, Zea Mays
aaaaggatgacttgctgcaatcagccaaaggaacgcttgccgaagcgcaagccaagaataagaaattgagcaaggaactgaaagaagctcagacacttttggaagaaaactctagccgattcaatcgtgtaactaaagctttgaatatgacactcaaggttgaggctgagaagaacctgaagctcaatgaaactctcagaactcttaaggagaaacgtttcaactttgcaagccaatgcactgctcgattgaagagtatattcagttcagctagagctgcatccgaggaagctagcctctctaccgaagatgtccctgaagtactagaatgtgtcgagaaagaggttgatgtcctc

SEQ ID NO: 81607 - DNA, 543 bp, Zea Mays
gatccctcacggcaccatcgacggtaggttttcgttccgtcaaattaccatcgtttccgcaccgtgtagaacattttatcgtgggggagagtcgtccaagcgggttggccgcacttcggcgggcgcgccaccgtgttgtgtcccggtccgccgtggctgtgtgataggttgaagaatgggtgtgggccattgatgttaggaggagcggccaggattagaagttggggccagatcctatctccaccgttggatctgctaccgatgcgtatgattagatggtagggtaaccattcgatgtgtttagcctgagacgctgatcaacggatcgacggtccaatacactcggtgttgttcggccctatatcctaaatctaacgaccaccgatggagtcctatttgcttttaattctcgtcgtgcatcgcggatccgatggcttcagtcatcatataccccttcagccggcaccatttgcaaaagagcccctccgtttttaatgaataaatctgcaatccagtttgactgttctctgagtcttaggatct

SEQ ID NO: 81608 - DNA, 660 bp, Zea Mays
ccaaaatctagacctaaattgaactaaggttttcactgtctatagattccatgtttagtgatgtctaccaatcaaaccactctgtgcaggtacaagatatgcctcaccgctgaagatgacactaacaccgccgagtttatcttctttggatggatggcgcagtgcctcattaaaaaaatgtggacaccctcatatcgactaatccgcctggtttcattccaaacgaaattacaaacctactggaaaagtcttttgagtggaatgttagcttcaccgaaagcacaattatttatagcagtgtttccttccaagtgaatgctataaatgcagaaatggatggtggcagcacacttccaactacaccggcctcacagccatcgtcgaccatactatctcaaggtaaagcttatcgtatttgtttagtcgagctatgtacattagtttgtgccaagttaggaatgaaaattatggctcattttctctgcttgtttatttgatgttccattccattctacttgtgtatgccgggtcacctagggcaaaaatgacacagactgcagcatctgcccaatagacacaggctacggaatgctcacctgaaactagcctgattgaaactcaaatgatcaaattgagaatgattaatacacatgaaaaaat

SEQ ID NO: 81609 - DNA, 526 bp, Zea Mays
gggaaataaaatggggacgggcgggcgggcggcgtggagcgttggatgcgccctaggtttgcagttataataatacacggctcgaatcaagtcctattatatattagcccagccgagtgcctgtgctcgcctgcggtgaacatgtcaccgtggttcaccactcacgcaagcggacaagccaaacgcagccggaaaaccgcagggaactgggaaggaggcctggccggccattaatggacatcggcaagctagggctgattggggtgaacaagtgaggtagtgccaccgctcccttgatagtccgtctacgccgtacgttggctgaagagatctgaaacatcactctaaaagatctgaaatctgtgtttggtgatccgattcaaatccaaacccctcgaagccttatcatataaaaaaaaagataaagtaaaatcgcaaccccctcatattaaaaaaaatgaaatcgagatcacaaaccaaaaccaaaccagcatgggaaaacacaccaaaacccacttggatctta

SEQ ID NO: 81610 - DNA, 646 bp, Zea Mays
cctgccttctcctgctcgagggcttgctggagttgtcgcaggcattcccgttcttcattgagcttggcctgaatctcgcggagttgttcgagttgtgtgtcctgactccccacgggggtccggtccacatcccgctcccttgggccttcgacgcacagagttggtgttggggtgttgttgttgctgggcatgtcgagttgattctatccttcgtgctcgtgctcgacatggaagcattcccgagttgggtcgtaaccctcgtcgtcagagccatagtcgtcagagccgtcggagaggtagtagtcgcatgcgaatagaaagtgccgcgtggagtcagcgttgcggagcccggaaaagtctagaccgaagtccatgctatcttcttcctcggagttcatatgctccgaggttggagatgtcgcgagcagatccagcgttgaccgtaggtgatgccctggaagatcggtgtatgcctccatatcgatacttaccgaaggagggtagcctgggggatcaaagctcatcctgaaggggatagggtgaaacaccgttcctacctctcagaccacgggaggaggagtcggtgggcttgtcgtggggcccacgcgtgcggccgtcgttgttctcggcgtgagggtgacaccag

SEQ ID NO: 81611 - DNA, 444 bp, Zea Mays
tttagttgtcctgcttatgctcatgtgaacaatgggaagctagtgcctagagctcaaaaattcacttttattggctattgttatggagtcaaaagatatcatttattgtgtgctcaatcaaagaaggtgattatcaatcgtgatgttacttttgatgaaaatacattttcttcctctggaggtgtttctgatagtggttcctcacccacatctatgcctgaaactactgatgagaatcttgatgtagttgtacctattaatgttgattctgttactcctattacacagtcagtttcagcttttgtacctcctgttagcaacaatcactccattgctcaagatagacctagaaggaatattgtttttccacatcgatatcgtgacactggtagtatggctcattatgctcccattgctgctcaagaaactaatgttgcatttgaa

SEQ ID NO: 81612 - DNA, 404 bp, Zea Mays
tttgggtattgcgtaagtgttactttgtgccaggtcatgtcttggatgggtcatactctgtacttgttgatagttgaggatcaatttgtttctggttttccactacccccttctgctattaaagaaaaactttggacactggcaatcttgtaaaatgcaatgtgggccactattgcacaacaacgacaacaagagactttagttgagttggttaggtagcttgagtaggtcctgaatttgactatatgtgggagtgaattttcagactagggttaaaaaatctcttcgtatgtctaggtctaaggtctggctttagttatagtcattctcacatagggctatcgtgccgctgtgtatgggtggggtaggggttcaaaggttttctcaacatatatgagaagtta

SEQ ID NO: 81613 - DNA, 514 bp, Zea Mays
agataaaatactattttccttagtggataagctgaagagcaacgaagcaaaacttaatgcacaatccgaagctcaccaagccaaagtcaaagaccttcggaaaaaacttgccgaaacgagcaaaaattttgaacttgcaaaggcaaaacaagagataagtgaatggacaagctccaggctggaaaagaatgttgaagaacttcggggttccgaagagaaatgctacgaagtatccatggactatgcaaagaaactaaaagacaattttgcaaaggtgggtgcatactcatcggagcaaaaaattattcgaggcgatcccaaaggagtcattcaatggatcagcgaagaagtcaaagattttgaggaaatacttagcgatcgtggggatttttgtgcccttcgcgggtgcccgaggggttgcagcagttttggagaaaactggctgagaacatgttaaagctgcagcacaggcagaagccgtcttctccatagacgacacaaaggagccatcgac

SEQ ID NO: 81614 - DNA, 858 bp, Zea Mays
cgtagatctaaccggcatatagaagggtcgacccaattctatgggcttacgtcagcgtgacaagacacgccatcaccaaaccatgtccgagtctcaagtacgacatcgaagggtccccatcaaacgtcaaatggtacgtcgtcatgtactatcccaggcaaaaaccccactgacgaatggggtcagtcaacctcggttgcagggaccttagtgtcggggtctctacagtgacccgcataccaggaaggatgcgatagatacaccatatcagtgtatgtctacgcacgacggtaagtgacgcaggtccatgatgatgagcaaggttgcgctacacacgacaacaacatgggggctaacccacgggccggccacgcactaccacaaaaatgtcagtgtaggactcgatataggggccatatgacgaatgaacgagacgatacaccatatcaggaatatggctacgcacgaccctacggactacgccagcagcactaagccaaaccagggcaacagatcaccctcatacctgtagagaacaagtcggctctgtaaggtcctgcccttgagctataaaaggacaggctctcatttttcttacacacaagcacacaagctataacacatttcattgcaatactacgatcagcattacaatggattagggctccggtctgaaccagtataaccccaatgtcccaagttcatcgttcgagtcctagagattcaccattcggagtgagtctgcggtagcatcccccaccaaacacaaatctattgccccccggtttctgaaaccacaacaccttagtaccacatcagttttttacaaagttttatttgaaataaaaatgatgtttt

SEQ ID NO: 81615 - DNA, 413 bp, Zea Mays
cttaaaagattctaccttatccttatggattcatcttgccctaaataacatatttatcccacactagtgtaacaaccatgatctaatccaaatttatttgatctgatataagcccaaatagtaataccaatctaacctagatctgatctaatgtgatagattaatctaacctaacaaaggctaaccttaagctaagctaatcgaatgtggattacttaaataggttagttaatactggtgaaatatattagaccttactccaaatttacttaagcctaaattggtgacctagatcaactcgaccatacccaacaacttgacctacataacagatctatcttagcctcttgtcctaaacccggatggagacaccaaagaccaagaaggaggagatcaacctcgacatggaagaa

SEQ ID NO: 81616 - DNA, 678 bp, Zea Mays
agccgaacaggctggagatgttagtggttgatgaactttctttggttaagtagggccatgtgggggtgaagattagagcatgtataacctaattaaatgaggtatctcttgagaggtctctagagagttaagtgaaaaaaaagagacgggctcttcgcgaagagcctatctctgcactactctttatatattgtgtattgaccctatttatgattttggggcttaggcttgtatcatgcagtttctttagttgtgccttacttggaaaactgagtcagagtctctaggttgtacatgcccttaaacctagatgtttggcttagatcaaaggaattgtggagatatttattgatgggcaaggctatctattaaagtttgtaccagagttacatcaggggaaacccaatattcagaaggaagaagcataaaataaacactagaatgacaaatctgatgaagaggaagagagtggttataacaatatgcctgaatgggagaggatgagaattgtatatgaggcttctgatcaccttatatattccattatagctagagtttccttccctataagagctctatcaggacaaaaactgactggttcagtgaccgttgggagggggatggttggaaaatcaacagaaaatcttttgcggagaaaatctggagagaatggaaaag

SEQ ID NO: 81617 - DNA, 377 bp, Zea Mays
aaaatgttgggttctaataggtggggaccgaacaactagaacagttagggcactataacaagataaatgtgaaacagtggctcttgaagtctctttgtaaaccgtgccttcaccctgttcgagtgggagtatttataggataaccaagcggtagccttctaaaatgcaggtttactcatggttacctgctacatcctaggaatatcatgtacaacagtgtaaatagagattgtgcacccatttttgtaccctctctagtgcaatagagtgtgtgatgatgactcatgggtctgccatagcggatggcccatcttgcctatatctctttagtgttatccctaagtgtggacaaccttcgcccgatgtcaaggccttgc

SEQ ID NO: 81618 - DNA, 293 bp, Zea Mays
ctgctccaagcgagcctgtgctgaagagtaaaaagttgaaagtcctcacccaccggccccgttatattgaaccggctgtggtgcccaagtttggtgggaaggcttcttcagctgttgatccaaaggagccaattcctcctacgcaaaaggctgaagaactggctaccatgccgaaggcaccctcagccgagcaagctgaggcaaagactggtaaagataaggccgaagagccaaagactgaaggaacaaaaatgttagaagttttaagcccttcagcggaagtaacagtgccg

SEQ ID NO: 81619 - DNA, 888 bp, Zea Mays
agacagaattggaaaaaacagtgctgctgccaaaaaatctgagcccaccgatagaggcagaattgttgaaggtgacaaaggctcccgccacaactcccaagagaaggagaatggccagcatgctagatgctgtcatagaaaccacaaaagcattaactccttgctcccacgaagagagttgccgaagctgctacggcccaggctgaagccgaagttgtaccttcagtgtctgttgaggcgaataccgctgcaactgaggaaggggctgaacaagaatctccaggttttggcataactatggagaaagagatagatgaagaagctaaattttctggtcccgaagctatttccgagaatcttgattttattgttcgtcgggaaagaggttatctgaaggagagattgcagaggccaatcattatgcccgaaaactgaaatacccaaaaggggccttggtgttcaatggtacagatgaagatgatttcttatactgtctccttgacaacaaagagatatctgtctaccgagagatggctaaaagtatgggatttccaaagctcgaggttggcctttccgccatgtcgaaggatgaccacgcggacaaccttgcatacaacagcctgaaggtaaagaatttgtaaacttaaagtttaagaatttgggaataaagtttttattctcatgttaaacctttatccttctttttcgcagggcttaattctgagcaatgtcctgagagctcaaaagaatgcggaggatgaaagctgcacgatagctcttggcaaccttcgatcagaggtaattcagttgagaaacgaagccctggagaaggacaaaattctaatttcattggtgagtaaagtgaaggaagatgaggcgaaatacaac

SEQ ID NO: 81620 - DNA, 793 bp, Zea Mays
agtgtgtgtagttgttctttattcagtcaattcaaccagaaaaaacgctgcttcttgtttgcagcacaaaactgactctgtgttctccgtgttggtgtatattgtgttcttgttcactgggtgatcgccgttcgccgacaagaagagttgtttctccggtgagctcagacaagtgacattggagctggttatgaacacggcttcggagtttgtcgcggcgcggtatgggtagggatggtagttcgtactttattttaatccagtacttgattttaatccccataaaggtactgaaactaaaaggcaacacaagttagatataaagatcttcatcctcttaaacttcaaagtattagaacataagaacaaaggtcttcgaagagagacgtattggaatagttcaagagtgacgaagtggaacttaatatctcacttttctcacatgccttaacattttattccatttcccttcgtaaataaatgtacaagcatgcctttgactcctgcacacacaaaatgacacgaaggctctttgtaggctaagcaatatgaagtgagaactcaccaaaatgtattttatgcagggcactgatcatcaatttatagggaagatgaaccacatttgtataaaattacaatcgcaccccttaaggctttacactcattgtttacaaatgtcgcagggatatcgttgtcttttccctttatttgcacttattgcacactcttcgacgtttttcattcgaggcctctttcacgtcgaggctgactgtctcgactcacgtcttcgttg

SEQ ID NO: 81621 - DNA, 1085 bp, Zea Mays
gagatccttaggaccatgcacgttcgtcactaccacattggccctttccatatcttgtccctcactatagagccaccataaaactagggacgaactcagaataaaatggtagtgaaggcacacttgtaacaatgaacgccaaaatatcaaagtgacgtcaactaagttggaccgagaagaggactttatagtgaaaatctagactctaccacttgcaacaaagaattgagcgggggcttaggccctcactcacaccaatgtaggtcctctcctgcgtcaaacgttgttcccaccacggtcgcaatcatcgttgttgacttgatcttatcgctagagccctccccgactccaatttttctccctcgataccataagactatctgcaacgctatcctctaaatttttcccctatactgcactatgtagccatgtcacccagatttcatctctacttttctcccttccgcagtggttccctctaaattttctctctatacgccactacaactataaaatatcatttttcattactattcatttgtctattaccattttcttcttctacaaaaacaaccccacgcgtgtaccgagggcaggggcctatagctgctcgctatagatctggaggaagtctgtgcattgcgctattactatagttactagagggcgtagtagagtcgagcgttacggcgatagagggaccctatacaccaacaatactagagaaggggacgactagcggatgccgctacgcatagcctaagctcaacttgcatacaatagactattccatgagaccaatccaccgctccatcgttgtcccttagagttcgacggagctccactaccacctaccctctatcctgccaccacaaccaacttgtctatgccacctagatcttcatcatcatgcttgtaaggctatatttggcctcctccatcacgtgctggtgatccttgtccatgggagcaccatatcggtggtctcccgtacacacacaccgaagtgtgagcactcccttaccgcgacggtggctaagaaagagatctatgggatggccttcgtatcagttcccaatgcccta

SEQ ID NO: 81622 - DNA, 523 bp, Zea Mays
taatcatgggaggctgaaccacttggaggctgaagcagttcaggagacccctggcatgatagtaggtatgtttccagtcgactcccatattgcagaactattatttgatactggagcaacgcattcttttataactgcatcatgggtaaaagcacatagtcttccaataactaccatgtcaacccccattcaaattgactcagctggtggtagaattcgagccgatagcatttgtttgaatgtaagtgtggaaataagggggatagcgtttcccgctaacctcatagtaatgggtacttagggaatagatgtcatcctagggatgaattggctagataagtatcaggcagttatcagttgtgataagaggacaatcaagttggtgtccccactaggagaggaagtggtgatagagttagtcccgcctgaaccaaagaaaggaagttgttatcagatggctgtcgatagcagtgaagcagacccaattgagagtatcaaggttgtgtctgagtttccagacgtg

SEQ ID NO: 81623 - DNA, 427 bp, Zea Mays
gagcgtgcgaacgcgaggggagagtagacgatgagatctacggggtgggccggcagaatctgagcgcgttttgtccgtggctcacgggtatcccctgttcatcttgccttttgttgtcagcgagctaataacccagggagatactaattaatgccgctaatcttctggtagcacgtgcacgtagcagtgggggactagggggatctctgcctgcccagagtgcgagcccaggcggccgtcaccggccgaaacgcccgccgcgacgtcgacctcacagtggcagccgcggagtggcgtgcggaccgcggaacgcaccgcgcgccagtggcaggcaggcaaattgcagccaagcgtttcgcttgcttctctgggcacgcaccaagactttattagcccgtcgaaattgcacgagacgtccgagcttctc

SEQ ID NO: 81624 - DNA, 509 bp, Zea Mays
accattcggagcatggttttttgaattgtttttcaaatttgaaacggaaggggagtcgaacaagttcatatttcttctcttttccttcttcttcggcatcccccaaccgctagaggttggaaaagttttgtttgccagatattcctgcactaagtccctagtgctaatttgagcagctaccaccctgaactcaacttcagccagctggcatggggagccgagttgcatgttgcacatggcctcgtcatgccgaagcttaatcttagaggactcattaccatagtcatgagtttttctctctttttctcatcagccttcacatagaaccattcgctagtccatccggtcggccatttagtgtggtagccaatcaccggggccttggtgtctttccggtatgcaaaataatgacacccgaagtttttgtgtagcccatcggctctggccttcgtctgatagtgcagctcatgcactcggcagaacccttcggcatttgcacttttaccctg

SEQ ID NO: 81625 - DNA, 435 bp, Zea Mays
ctcgcttaatatattgggggcagattgagcatcaggcacagttggcacgacctcgacaccacgatcatagttttcctctttagggtgagaggcaactaccaaccgtcgtaccaccacctccatgacttgcttttgggtcttcatagctgatttaacataattctcccattttagctgacattcaattacgatgataagtctttgcacgttgggtggaggacctacattttgcacaccatcaacgtcgatcttatcaatgtcattgccaatcgatcttctccttagccttagcaaacatctcactaaaagatgatctatcatcaaatatcactgccacccgttgcatgtcaacgaactcagcatttctataacgatctatttgaaacatgaatccaacgatgaataaccaattatgatggttagtgtctaacccca

SEQ ID NO: 81626 - DNA, 334 bp, Zea Mays
gcggcaacgatcacggggtgggatcaccggcggcgatacattgaatttggcgatcttcgtcaggtcactgtaccatgggaacttgattcaggcggctgacagagcaggtttcagggtcttgatctcaaatttttatgtgataacttgttaacccacctgtaacaaagttgttgatctatactccagctttaatcttgctatagcaatcataatcaaacaatcactagatcatggtcaaattcgatctcaaagttcacctaacctcaccgttagccaatatttagttcaaagactgtctgtcagcccgactttaagtccttttatttccaatttt

SEQ ID NO: 81627 - DNA, 349 bp, Zea Mays
taaatggaatatcatcggctgacctggcatcacctattgtaaggagctgttgcagcacggctgacatgtactcggcgtttatctccctctcttggacggtcttctggtggcaatctaccctgaagtgcgagaggaaccatttatccgccaccttgagcatctgatctttttgtcgttggacctcctcgtctattttcttcatgtcatcttttaatcttttatgctcagcggccgataaattagtcagccttgtgctgctgtttggagaagccctgttgagatctttagaatcggccatataagcctgattttgtagatcttcaacctcgttccccagcggagtcgccaa

SEQ ID NO: 81628 - DNA, 407 bp, Zea Mays
gtagacgataaaacagtgttatactataataataacaacaatgtgatggtgatgtttgatatgtttgagttggattttagtttgagtgcaatggtctgatggccataagagcaaaaaacataaacttaagaagttcccctctagaatcttttctactcctcacttctataagaatttcaatccctgaccaatcagatggtgaacgctcgccaaggacctaacaacaaccagaaccagcgtggtcaacagataccaccaccacccaatcccaacatggaacagctcatcgccacccagatgcagtttctgcaaggactcaccgcaactgttcaacagattcagcagaaccagctgaatcaacagcatcagcagcaacagcagaatgcacccccggccagagacaaaca

SEQ ID NO: 81629 - DNA, 380 bp, Zea Mays
ccgtcggcgagccgtagtctagtgcgctgcacctggtggggaaggtgggaaggtctccatcactgccttcattcgagatagagcgggcgccggatccggtggggaaggtgggaagggcgccgtctccggtgccataccgagggatccagtgttgaaggggcaagggagaggtctccggtgggcgccatggatccgcaccgccatgccggatccggtggggaaggtaggaagggcgcgatctccggcgacgtaccgagggatccggtgttgaagggggaaagggagaggtgcgccatggatccgggcttggacaggggaggaattggtgtggcgctggtgacgtctacggggatggggcgttgatggcggcctcggcaacc

SEQ ID NO: 81630 - DNA, 660 bp, Zea Mays
accccatgcttctagacatctcccggcagacggataattctttactgtctgggaggcagtataggaaatcctcttcgtccgtcccattgaatactagtgcccccctcggatattttaattctttggcatagtgattagcttcaaaaacttcttcttccgataactttttcctcgaagcatgacgcataatataatcgtatgttttggaagatgcttcggggacagcagtgtcaatttcttcgaccgaagctggctccgacattttcagttcttcggttgcctttgcaatttttacttcttctgcttccgaaggtattgccttgattggttctgaaggcccaaattcaactccagtttgttgctttggagcctcagcaacagacgcttcagcaagtgcctcacaagtttcagcagttttctttggagttttgcttggaagtttaattgtttccaaaacatctaacacattaaccattcttttcctttttggggttactgtcggcccctttttaacttttgctacttcaatttctactgaaggacttaaaatttctgatatttttgcttcctcagttgatgcttttgcttcttccatcttttctatcgatggtgcttcggccatctctttggtttctggtaacagactctctggctcctcca

SEQ ID NO: 81631 - DNA, 549 bp, Zea Mays
cagtctagctcatgtgtccttttgcattcctggtgttctgatactttctgtgctagattgtttctgtagaattttgtcctgcaccatctgcatcctatacaatcatcagattcatgttgcagattgttcctgtttctgttgaccaagacttgtgcacctgggatgattagcccaacttcttcgtgatgcaccagtaacagccgggcacagggaactcgaagtaggggtcagatacgatacgagaaatgctgggcaatgagttattgcgtgtgatccatatccatcagaatgaaacaggtatgcgaccatgtgattgtttcgatgttatttttattttttctagaactcgtaccatagcagtcattcttgaaaagtgaactttatcaccacatggttgtccatggaacctagcgatccaataatcaagattttggttaccatatgttgattctaccaactgtcaggctattccatggcaggcacgctgtgctattgtttctttttctggcgaggctttgtgtttgatacgcccagcagttatcaaataaa

SEQ ID NO: 81632 - DNA, 1116 bp, Zea Mays
gttacaccttccaccatactaggagatcaggcttcatttctgtgtcctcagtttcttcagaaaggtatttgtcaagttcatacttagtgttgtggcttgaaccaatgcctttgcctagcctcatcttcttagcaacaatttccttcagcttccctcctctaccactaccttcctttgatgttattgggtcacttacattggttgtatcctcacccgaagcatacattttcatatactctttgaataactcatgaagacatgtgttaattgcttccaaaactatttgtcccctttcctcgccaaatatctcttcaacgattatcttggtatacaaagatagcttgtatcttggatcaagacaaccagcaataaaaatttgtaaattcaagttctccttctccattgccttccccctccccttctccatctccttgtcatgttcactcgtagagttccaaagtccccaatatttgtcaaatttttctttcattctgattcccatcagtgtttgcaaatcatctgtactctccatccatgattgaatcagtgcatgcacttctccaatctcatggtaaaatgtttgtgcagtgaaatggagagtagtagagacacgaaagtaagatcataaaagtgctctaaaaattctgccatcttccttgcgttttcccactatctcatcaggatgaccaaaaccatcccttccttcagataggtccataacatacctcatgtcttcgtctgctaattttgtgaacaccttctcatacacaattgcagatttaagcataatatatgtggagttccgtctagttgggacatcagcctttagatatggattgttggttagcttctcttcctctataatttccttaaatttgaacattcttgaaccaccatttctaatgtacttcacagctgccctaacacgcttcactgataggttcacttcttttaggccatcatgcacaattagattaacaatgtgagctacacatctcatgtgcaagtacttgccactagctagattagtggtactcaattgcctcctcaaataactaatacaggtatgattggcacttgcattatcaaaagttattgtcatcactctctccaaac

SEQ ID NO: 81633 - DNA, 384 bp, Zea Mays
attcaaaggaaatctcaaaccagccttgaggaaactcttgaaaatcactatttcatctttctgtggcttcggagtagtttcttctccaccaaagcgaatcagccctttcttatcttcgctaaagtagcccgacttcaccatcttaggaaaatcagctttggagatggtcgactttccgaagtctaggtggctaggcttgctcggcgccgcgatattgtaatcatcttcagaatcggtctcttcaatatctgcttgctctgcttcagcagcagggacgtcttccggtgttaccaacccagatcgcttcattgcttccgagatagaaacagtttccgcagcttcggtttcgtctccctctcgatcgactcttgcagtagagcgaac

SEQ ID NO: 81634 - DNA, 429 bp, Zea Mays
ggaacagcagaattccctgaagtcttggctgtcgaactgtttgtcgttgtcgactgtgagttcggacgggactccgaaacggcagacaatgttttgccagaagaatttttgggcggtcttcgatgttattgtggagactgtcctagcctcaatccactttgtgacatattcaacggcgacgaaggtgaacttgagattccattgagctgtgggcagtggtccaacgatgtccaaccctagcgttgtagtggccatgtatgggcgatgagcttggttaattgcgaagggtggcctaagcgaggagagaacttctggcatgcttcgcatgaccttgtgactcgattggcagtgcaattattgcgggcagtaaaatccctgacgaatcaccttggcagcgagggccttgggtcctgagtgggagccgcaagt

SEQ ID NO: 81635 - DNA, 1078 bp, Zea Mays
gaacgcagccaaagtgtacaatgattcaacacatcttgtgttccagcttccagcatgatagagcctttttttttgtataactaaaacagcatgaatgaatgcccagaaaattgagaggctcacaacacagtattatatagtgacgcaaaagaaaaacaaagtacgaagagaactttcccagtatcgggggcagtggggcacaggtggtaaaaagaagtggagcaaggaggccagcaaatgtgccctacaccggattttaccacagatcttgttcccagcacttgacagcagctgcacataagtaagagccgaccatacctttgaatatggcgcatcccggtaatccttttgtggaacactgggcgccccaccaggttatatctttactcaaagcactcggcatcataataccgacaagtgtatatggccccaagaatgcccatacattgaactgatgccggcatccctttttatcgaaaggctaaaatcatcacagacatattatcaccaccattaacaaactgattcatactaaggcaaaaggaaaaggagtactttagtatagtggctgagctgttcagtcaggaactgggttgttgtggcaaaatttgggttacaaagcctggaaatcaaatggcagtacactaggaaatcaaattaaagtcgcttacctttcactcagtaaaggccccgcacaaaccagagggacaagtcaaaagccagaacataaatcaacagaatactggctctagctggtaaccagaaggtaactgaaaggtactgaccgtctgatggatttcgagtaaaatattacatgtttgagaatggtaagacacagttttcctgctccatttccagctattttcaaaagacacaggcttcaagttgacattactgatcagcgtgttttgtcaactaatggttgttaactggtacaactacgctcctatgtatcgtgcaagtgtagccatgccataagtgctaatttgaaataaggaccaccggtcaaaccctggctgacctagtagcttgtaaattgcactcaatggcaattggactattaaaagttgcatgtcta

SEQ ID NO: 81636 - DNA, 353 bp, Zea Mays
tggggtagtgggagtattattggggcggataatgataggctgtttgaagggaaatgagggtggacgagaaaaagtgtgattttggtttgagggtcgaatcacaaaccgtggtttcttcgcctggccctgattaggcctctcaccaccgaatcccttattcttcccagaagttgtgtatttggcttccacagataaggccgtgctgacagcctttccatatgtgaggtctatacatgtggccattttcctttgtagccgatcattcagtccccgcataaaacagttcttcttctttaaatccgtattcacctgatcgatagcatactgcgacaggtgattgaatttgttgagat

SEQ ID NO: 81637 - DNA, 1180 bp, Zea Mays
catagttgttaagaaaattcaggagataattaagcccaaagttggactgtcagactacttaaagtctgaaaacagactgacagtggactgacatgaacttcaggcttaatttcaagcaagatccattgactttttgtggcagcacaatatagcaatgttgtaggtgggatattgctctacaattttgctacagagtgttgatcatgttgccatatgaatctgggagaaaatcgagctccaagatgctttgtcaggtcgactgaatggagatcgccatggtacagtaccccatatggatcagatcgccagcgcgactgtcctcaccgccggtgacttgccgccgcgattcgtgtcgctgtcgccgcgatttgtgctcggctgggtcggatagcgcttagggtcacacaagtatcctcgccgtggataaactccaaccgataaagaattccagccaccataccgtgttcaccgcagtggaaccgataagaacgccggtgactaccatcgcacggccgtgcgccacgtatccaaacacccctgtcgcgtcaccgtgactctttatagccgttaaatcgtcgccggtgagctcgccacgactgaggacacgaacccactgcgccagggtccttccttgtttccggccgccagctctgcccggccaaattgagtgccaccgtcgaagccctctataaattgatggccggggcagctgcgctatgtcatcgtgaagccttagcacccgctcctacccttaatcgttcacccgagctctggaatttcaaactttccccaaatttgtcaccgccaccgcgaagaacacctccaccgtggccaaccctctctgctaaggccctgtccgattcaagcttcgttttagcagctctgtgtattcatgaagctcctcgtagtggccgtttgaccaattcgagcgtagattattgggaacacaggatcgacaccacgggttccaccctgatcgtggacagatagtttccagtggggtttgtgtcgattaaatggatgttcctaggtcgccttaagcctgtgatgcctccctggtcattagccatagcagtcgtcgccggccatggccggtacaggccatgccagggatgaacggcgagcgtgccgtgaccagggaggtgtttggagaagaaatagaagtctagggtcatctcgg

SEQ ID NO: 81638 - DNA, 712 bp, Zea Mays
tcttgttttggctttgatttgtattttcgaagcctcgacaattttccctgaaggaatagaacttgaagcctttatcgtctacaacacatctagcacattggccatcctttttctcttgggagtcgccgcaagacctttttgtgcctgcgacattgttacttctgccgaagggcttaaaacttctaatgtttttgtcccttcgactcttgtctcctcaatattatcagtcttcggctcagctaatttggctgagggtgccttcgacattgcaatcaactcttcaattttctacgtaggaggaacatgttcttttacttcagcaattgcagaagtttccccgccaaactcaggcgctgtggccgattcaatgtagcgcggtcggtgggtaaggaccttaaactttttcctcttcggcgcaggcttgcttggagcagccgaagcagcaacctttcaagaagttgcaccttttcttttctgcccccgcggcgggtagcgatagtcagggtacacaaatccaatagcatcaaaaaccctatttagacttttcttttttcggctcccaaaggccgcagatagtgcattatcttcagacttggagtatgctccaagtagctcatcactagtattttcaacacacttcagccagtcatcatctggttcgataaactggtctccaaacctgaaggtgtatttcaatcgaaccaaaccacct

SEQ ID NO: 81639 - DNA, 1326 bp, Zea Mays
ggagtaggtaagtgtaggaaatgcaggaggaatctcaataacctgctctaactttgtccaattcgtgaaggtaatcatgatatcatttggaactggcttgtacaagttgttcgatgctcgaactcgaaagtatgtcatgttgtacacgctgccttcttttatgagtggcctgaatttctctatgaagggtgggtatatcgtagcgtgtatgctatttccctggatatagaaagatgtagattcaactttagtaagagtagaaacaattcagctagtaaaaagaaggcacattaggctctctattatcatattaaggggaaaaataatgctgaagcaaactggtgaggatctagattcaactttagtaagagtagaaacaattcagctagtaaaaaaaggcacattaggctctctattatcatattaaggggaaaaaccgctgaagtaaactggtgagatgcaacaataagctagtagaggttgttgctactttacctcttcatcgagcagcaccatatcacagtgtagcagccttgcatcatcctgaggatcagaaaagtcccaaaaacgagaaacacggacgcatatcgtcacaaataagttcccacactgcaggcttggaatcaacacgtctcccatctgcagtgttgacaccaaaaatggcataaacattagagaatacaacagcagggaagtagataaggccagtatacgtactgcacattagtagaacaattttacctcaaagcaaaatatactgtacacgcagcaagaaaaaacaaagataacaagcatgagaagagacacaatcgtctgagtagcagcagcgttggagtatttacatatcattgctatgtacaacacaaaagatggatgaaaaattaggtggctagtatggctgccgcttcagcgacagcgaggacttcgtggtacaccacatttcgagtctgtaccccgcacgaaccgtcctcattctcaatcaggattctaaggccacctctggttgtagtcctagatacggccacataaagttgtccatgagtgaagaccggtttcttgaggtaaagcccaaccctggacagggtttgtccttggctcttattaattgtcattgcgtagcatactcgtactgggaattgccttctctggagtgtgaatggccattttacatcagtagtattgagggttattcttggtattaaaacaacagcacccacattagagcctgtgagagcaatatacgttgtccaggctcggtaacgagtagtcgtgtaccattgcagaggcccatgctttgattaaggtttctcaacaacataattatga

SEQ ID NO: 81640 - DNA, 305 bp, Zea Mays
gccaaagatctaaatttttatcttccgaagaggtctcttcggttctttttctcttatcagtagacgctttggctactttttttacaggaaccacatctgatataagtctgtcaatttctgacattgtggtagcaagattatcagttttaggtatagcttcattagcttcggcttcggtagtatcttcagcatctgcaggcacaatagtcttttctgccaaagccgggggcggggtctgttcaatggcttgcatcatgttcatcattcgctgtattttctgccccgcggcattcccccggtggctg

SEQ ID NO: 81641 - DNA, 467 bp, Zea Mays
aggtgttgtttctctgtttcttgcgtaatgaactcgtgtttatgttctaggtgcaccagatcaatcagcaacaactatgttattcttcttgttgtcatcataaatctttttcaccttcatcctaaccttgccttgcattgcgtatgtcctgtggttttattgtggacccttgggttatcatcagcccttgttgcacatttgacttcccttgaacatttcaaccacttgcagtatgacttcttcatgtatattttcgatagaaaaccaacttcttagatgtattgtttataaaatttgtgtgcctcgtccccattacaaaatgtcatgctcactctaggcaatattctcggatcacaatatcaacctacacatatataataacagtttacaattatgcacctccttttcattcagaattatatgaagtggaacaacatggggtctgcatggtattgtatatacatacc

SEQ ID NO: 81642 - DNA, 363 bp, Zea Mays
atcaaacttggagatttattgtggaggaatacttcttatgaagaaggatctccctattcttatttcgaattgggagaaaactttgttccaagtcgagctgttaggcaagtggtgaactgaacattgcttaggtgactgaaactggttcagtctttgagtgaagaaaggatctccacgcctgttgtgtttcacttgtgtcaattcgagttgtagtttgggtagagggttcaaaaggtgataaatggggaaaggttccagctgattcaaatatctgaggaaaggggactcgatggttatctacagctggtgaccactgtgtttgtttgcctctggttgagcgccatcggctaggttcactgcttt

SEQ ID NO: 81643 - DNA, 645 bp, Zea Mays
ggggatttaaaaagggcggtaaagagtagaagtgaagtagagcgcactccattttcagggaccatgcaatgctcttattccctgatggagtgacggtaaattggactgcaagtcacacagcgacactaggcctcgctaactgaggtaatggagcctaatgatgtagctaaatgtttgatcaggtttggattgcaagtttaacttagcatgggtcagtgaagttaaactagtaatgcagacaggtgctgcaggagggccgaacattagctatgttctgtacctgtgtatggctcagattgctacaatgtttacaagaatggtcgctggaaaggagaagcatacgcattcccagaagccagaaggtcctgtgatcctgttctatatctgctccgattctgagtggcagaaatgcagatcctacgctggtattagatgaagcaaatttataggaagtagtattctcaacaaatcctctggggcctgtctgaagtggtggctggctaggactgggaggcaactttgccttgctttgcttcaggggctggctgctctgatgattctcctctctgattgggatggtgcgcctgtacgcaaccgttcagggcccacgatactagatgtagctgctaaaatgtgcgtttttgc

SEQ ID NO: 81644 - DNA, 472 bp, Zea Mays
cggatgactacgcctgtccatttgactagatatgttgtaactggggatagaaggagcttacactcaacgaatctttcctatgtgcaccagatatggttacaaacacataatagagtgaaataactaatttaccaatcatcagaataaagccatttggggtgtatggtgcaccagtcccatgggcaccggacacgtttggtgcacccacagagattaagtggaaatggttccaattagattctcaactagggctataaataaatggtgtggcaagccttggccagcctcttagagcttccaactaatgtgcacacccctggagagctgatatacacactccactcacttgcatccattagttacacatttgggtaagattacagaggctctagagcatttatatcatccacttgcatctcatggcagcagttgagaatggaggctgatttcgtttattactcttggttattgc

SEQ ID NO: 81645 - DNA, 296 bp, Zea Mays
aacggtttctcctaaattttctgctctatatcccaaatttttttgtcatgtcaccaaaattctatcaccttctcttcttcctcccacaatggtttcctctaaattctcctcatataccatactacaaccataaaatattcttcaccatttatctatttttccccaactaaaaaatactgacaggcacgtaactctaggcaagagtgtcgactgtcgttcctctgaatccagtggaccaactctaggcaagagtgtcgactgtcgttcctctgaatccagcggtccactaattttgc

SEQ ID NO: 81646 - DNA, 380 bp, Zea Mays
gatccacaagaaaattgtcatcatcttgttaataggagggcaacgctagtggttgtggtgatagcctagatgttagtcaggtttaggtctcattgcctggcatgcttgttggagcgaaggccaaacccgaccttgattagccccacgcagaccagaactaaccacgtttgagtgcacgatcccacacgatgaaggatttcaccaggcccgcaccaccaaattgggcttcgtaggtcaaaattgacgataactatacaaaggcctacacaaacggtggctcatcggtgatgaagccgtcgatgggtaagggcgcttcaataagcgaagacatctgcaagcgagcccgcaccacgaagcgaaggccctgccctaaccctcaa

SEQ ID NO: 81647 - DNA, 1811 bp, Zea Mays
tgacagttaaccatacctccttggggatttcacaagggtccaagcaccaagcccaaatgtcaaaggacctagtgcgctccctgcgcctcgagcgctcctcgacatagtgaatagaacagctcctgcccaaagccctaacagccacatcctcaccccagcagtgaaccggaatcccctccaccctaaccttcactatgaactcaaagctagtcttcctggtgtaacagtcctctgaccagtccccaaagtgaaaaacccgaccacgataggagaccgacctcctatccagtgcccattgctcggttcttgaatcagagaaaatgatgaagaactactctagaaagtgtttgactagttggtactgaccgtgatgaagatcaaatgtctccctcagcatatcccctgctgtcaaaacgcccacctcatggctgttcccaccaaaggagcaaaccaccgccttactgattaactcatttctatgacgacagatcaatccggtcgccgagatagcatagacagctcttgcaggccgtgcccttaggtctccggggtagcgagcttccatgacctgaactccctgaatagcttggaggtaggacttccttcgctggaaagaagtaatgggggttgcttgcctaggttgcatctcctgccccttttgaagaggaccggggtgaggttgctgctgtggtagcacgaggagaacttactgcctctctggagtgaatgcttgagtgaaccaggcaggtcacgaattgaatgggctctcccatggtagatttttctaggacatgacctagccctatgacctgcttgtaggcattgccagcatcggacaggtgccgagcaaagataggcgtagtggtctgacgcatggcagttgaagcatttgccactaagctttctcctgaaaaaactggtgccattcatctcaatttgctgcttgagaaggtcagcctcatgggaatcaaattttttccgccaccagaattttggcttcaccactgaccaaccttcatcatcgaccgctgaagtgcctgacttccccttcgagacacacgacctttggataggacggtgagacatgtctctcggtactaatccaccgatccccccatgccgatgggacaagtcgcagcacacattcaagtcccccggagcattgaagactcgctgaaatcccggtgacccgtccagtccccatttcatcttcttagatgcggggatcctcttctgacaagtctgcttcacaagatctgcctttaggacatgctctgtacgttcaccctcgctgcaaactttgcctgaatccaaatccgcagacaccaccgaactgacacaacaatagtgggtaggacgaacaccatagggctgcaaatcttgaaccaacccgacagaacccaacttaatctgctcatgcaaagccgaatcgaacgccccaggacttaccgcaagaggggcatcaagttccttcccggcattaggtctcgccagcaccaagccctcatccgaagaggcagagtccctcccattgagatgaagccctccggtcgacaaacccaaaaccggagaccaaggcgcaatatgcaggacatttatgtctggatctagggtttggaggctggtgcgggtggctgggttgggggagagggagaggtccatccctcgtcttctggtcagtacatcccttccctcaattttatacacgcttttatgcctaataattatttagtgctaagtgtagaaaaaaataaaagttttagttagtataaagtcttgttctaaacctctaaaactaatagttagtggct

SEQ ID NO: 81648 - DNA, 1630 bp, Zea Mays
gatgaaggctatcatgactatggaatatccatggaatgatgaggttattgcttagttctatgcaactctttggataaagaaggtcgatgaggaagcggatgggtacgatcacccagtcatgtacttctacctccacagagtttggcacaaagtaattatcgaagatttgctcatatcctgggtttctctgacgaggacattagagggaggaaccttcgggttcatgatattcgtctatctaggcgtgaagagaaggaagtggtgcacatctcaaatgagagggaatactggattacttctaacatgcataagtactatcggtacatcaacttcttatctaggatgacaatccttcctaagagctgcaatcaaatgaatgtacttggagagagtcgtgtccttctcatgcttatgactcctacctgcactcgcaaaatcaactatttgatatgatttggaaagatattattcgggcatcttggtcacctttgaagggctaccttcatgcacccttcatcatgaagatgatcaaagtagtcacccaggtccgctatgaaaacccagtcaagaattatcgttatgttccttactggttgattccaacaatctagcagcaaggtccaagtgggctccagctggttcaggaggacctgcatcttctgatgagccaccacctcatcctccacttcttgagacctcctctagtgctgctgctggctctcgtccaatggaccatggcggtcgaggaagaggtcagggatgaggtttgtttgtgcatctgtttaagggcatcgtcgaggtttttgccatgtgtagaagctatgttgttgatgaggctgtgcactggcatgagacccaggcacttcatgatgatatgcgaagctttgcagcctccatgggacatcccatgccatagtgacctcctcctattccaattcctgcgtatctagaaaatctcaatgaatggtaccagcaggaatatggcgtgtcgtttattactgaggaagatgaggaagaggattatgatgattcatcttacttttagtctactcctactgctgctccaggacccattctaggtgatcccagaccatctagatctgctcatcctcctcctcatccaccttatcagggtccttcttctatctatcctccttctaacgaccctcctcaagactcgtagtatgaagaggagatggtccatgccttcttcgtggcttatcctccctatcctcctccacctggtccctatggtggtagtgaccccattggctagtgagtctgcgcgcctctctcttttttggtacttgttgccaaaagggggagaacttatggaaggagatgaagacaaagattgaagcccatagttggttggtcgtcggagtggccttctgtttttatgtaatatttatgtattgaactcctggtttgtaataagtacattatgttgagttatgatggtcatgggccacatacatcatttttataatcccatctattgtaatagctagatgaacatttgtgatggttgattctgctatttgctactattaatttctcttttatgatatgtgatgagattagtaaaattgttgtcatgtgcatcaaaatttttatatgacactatttg

SEQ ID NO: 81649 - DNA, 752 bp, Zea Mays
gtgaaggcatcaatcttcccagctaggttagaaataaaccttcgtaaataatttatcttgctaaggaacttctgcacttcgaccttacaggtcggaggtcccacattccgaatggatttaattcggtcaggttctacctctataccatgttcatgaatgatgaaccctaagaacttaccagctgacactccaaaagcacatttacgtgtgttcattttcagatcataccgacgaattttatcaaaggctttgcgcaaatcatctatatgagaactaaactcagccgatttgactacaatatcatcaatgtagacttccacagtgtttcccaatagctcgtgaaagatcaaattcatagccctctgataagtagcaccagcatttttcagaccaaatgtcatgacaacccactcaaataaaccaatgaagcctagacatataaaggtcgttttagacaaatcttcttcggccatgaaaatctgattatatctggcattaccatcaagaaagctaataattctattccctggcgcattattgattaatgtcggctatgggcatgggatattcatctttaggagttgctctatttaaattgcgaaaatcaatgcatactctaagcttacctgattctttcttttccattggcacaatattggagacccactctatgtatctgcaaggtctaataaaattagcttctagcagccagtgaatttcgtcctttattcatgggagaaggtctagatgaa

SEQ ID NO: 81650 - DNA, 328 bp, Zea Mays
caacatacttagcctctatggtagattgggcaactctaggcatacaagatgaccaacaaactagtgaagagtcctagaactaacaagtcctagaagttgacttgccaaacgacaacgtgcaaaatctacattggaatacccacacagtgatagggttgaagaagaggaaaaccaaagaccaaattacggagtgaaatgaaggtatctcatgatccttttgactgcctccttatgggatgtgtgcggggatgcctaaaatcgagcacacagacacacagtaaaatgtatgcttggtgtcatcgtcattaagtatagaagtgagccaatc

SEQ ID NO: 81651 - DNA, 512 bp, Zea Mays
ccatcgccggcgactctccagagccggccatctccacctccaaatggttatgcaggctttgtggtgttttttccgatgaaaggaaatcacggatactatacaagtaaccgcatccacgtttccagggtatttccattattttccgaaaccgtcccgatattctagcgatgtacatataaaactaattttcctaacacaatacttacgcacaatgactcaacattttacgccacaacgtatatactatttatgcactttttgtacattaccgattttatgccatatccttcaacatcttattctacattctatttacccgccaccatttcacctcatgcaagatccataaatttcgtgcccacgtaacagagtaatcacgtttgcatgtggaaattattccctataattccgcaccacttccaaatgtttaccgccttgccattgaatcaaccgcgtaacggcgtcgtcttccctgcatgccgtctatccgcgtaacacaggcgcgcttgtct

SEQ ID NO: 81652 - DNA, 553 bp, Zea Mays
agaccaccggagttactgccacggcgataaacacgtgttcaccgcaccgccgttcttcctcacttccgaccgccgcgcgtccttctcaaaattcacggccaccgccttaccctcctataaattgagggcggggatagttgcgccatgtaatcgtcaagctattgcacccactcccatctccactcgctcaccgtagctccgcaattcgggttttcccccaaattgatctccgccaccgtaaaacaccacctccccgtggactgtccgttctggtaaggcaccatccaattcgcgcattgttctagcaccctttcatgctggtgatgctccccgacccctttaatcgaaccaaaccgactgggaccgctgggaacacatcgatctagtcgccatgctctcggccaccatggccagagttccttagtcgatcattagccaaattaagttgggggaaaggtttagggcagatccaatttagtgtctgctgctcggagaacccagccatagccccaatcggccggtctagaacctcgccggagcctctccgcgtgtg

SEQ ID NO: 81653 - DNA, 820 bp, Zea Mays
cggaacttgtggctctcactcggggcctagggccctcgctgccaaggtgatccaccaagggttctactggcccgctataatctgcgtcgcgaatcgagtcatgaggtcgtgcgaagcctgccagaagttttctccccgatcaagcaacccttcgcaatacacaaagctgattgcccacacatggccacttcaacgctgggggctagatattgttgggccactgcccatggcccaagggaacctcaagttcaccttcgtcaccatcgagtattttaccaagtggatcgaggcaagggtagtatccacaataacatcgaagactgcccagaagttcttctggcaaaccattgtttgccgattcggagtcccgtccgagctcacagttgacaatggcaaacagtttgacagccaggatttcagggacttctgcttctccatcggcaccaagcttgccttcgcctcagtatatcacccggaatttaacggcgtcgtcgagcgcgccaacggcaagattttcactgccatcaagaagaggcttctcgatgacaggaagggtaaatgggccgaccagctacctgaagtagtctgggcactcaacacaaccgaatgtcgggcaactggattcactccttttcgactactatatggatcagaggccatgacctcgcaagaaataaaacacgggtcaccccgaacaagtgcatcagccgtccccaacgtcgacgaaccaacgtccaaagaccttatcgacggagaccgcgtcttcgccttgcagaccctcgacaaataccaagctcaaacgaaggcatggcgcgaccac

SEQ ID NO: 81654 - DNA, 451 bp, Zea Mays
ctggcaaaacattgtttgccgcttcggagtaccgtccgaactcacagttgacaacgacaagcagtttgatagccaagacttcaaggatttctgcttctccattggcaccaagcttgccttcgcctcagtatatcacccgcagtccaacggagttgtggaacgtgccaatggaaaaattttcacagctgtcaagaagatgctcctcgacaaaaaagggcaggtggaccgacttgttacctgaagcggtctgggcgctaaacacgactgagtgcagggcgactgggttcacccctttctgccttctatatggatcggaggccatgaccccacaagaaataaagcatgggtccccgcgaatagttgcatcagctgtccccgacgtggacgaacccacttcgaaggatcttatcgatggagaccgcgtcttcgctctacaggctctaaataaata

SEQ ID NO: 81655 - DNA, 447 bp, Zea Mays
ttgattttgttctaataatagtatgtctaaaaaggtgaagcagttcactaagggacttgcaaagagagcatcctttgttatgagaaaggaggacttagtgtttaagggcactagttccagctcgagtaggcatagagctttgttggagcatgttccagagttgcagggtcagacaatcggcgttcagaggaatgaggtaaccaatatttattttgcaatgtaatgtttgtatgagtttgtataactaaattattaatgtaatatttgttttgcaatgcaatgtaatgtttgtaggatgagtctgaagatgaggtagaaacagaggaggggagacaggtgggagatgttaaagatgaggtagagatagaggaggggagacaggttggagatgttgaagatgaggtaaagacaaaggaggcgcagacagggtggggatgccatgatact

SEQ ID NO: 81656 - DNA, 338 bp, Zea Mays
cttagaatacgttggatgatatctttaagaatttcaacaactttttaatctctagtctaggtcagatggagaatcaatacaacacactcaagtcccactcaaacatgaccaagctatttgagtcaccttccaattcataggataactttagtccaactctagttaaactccctattgaactcatgagtacaactttaatctactagatggcagtcacaagacttatcccatccactatcatgatataggaggagggatacgaggaaaaagtttgactgataggtgcccaacaacgccttttcctcaccatcacatcaaagaaaaattaggcattgacc

SEQ ID NO: 81657 - DNA, 894 bp, Zea Mays
cacgtgtagatggaggccatcacaatcaaaagaagaagaaatcaccatatgttacggaacaaaggcgttgcatcactcataactccatctcaagttcttggtgatagcaaaatcaatcaaggtatgtgagaacctacctttccactttattcgttccattccatgtttgcttgaatcataaatgtttagtgccttctttgggtagctcctggattttgagttgtagtcgggcactgtgcctagtctaagtagattgtaaatttcttttgtgatttatctatttgggttcttaatttagctttgtagtagacgtatgttaaatggggccaacagattcatatgttagctatgccattcggtatgatataggctgatggttcgtgctatgggagaaagctaaggcctaaatgtttatgctcatgcactcattcattgagaattcttgtttcaaaaccatagcattcatttagttagctttccttcctatagtatgcttgcttgattcaccattaatgttctcatctccacttgaatgaatcttaatatgctttcatgttttggtttggttgtcttgatcatacatcttttaaattaagcatggtgcttagtttgaagtttggatgtgttgatctgcttccataggattttttaaattaagcgtggtgcttaggttaaatagcctgccctaatcaaattagacaggttgtctagtttgatcattgaactaaaactacttgtatagatctttgttgcatgtaaaattgtaaatatgaatggataagttattgagattcaaatatgaagataatggcttcatgaaagcttttgcaagagcttggtgaacaataaacaagaactaaagaacatgggaaaaattatccatgctaacaaaac

SEQ ID NO: 81658 - DNA, 559 bp, Zea Mays
tgaagatataagcaaggttcaagacttagtgacttgccaaggatacatagcctagcttgggcgcatcgggatgaggacggtgtaattctccttccccaccgtccccttgacccgcttgaggacctcgtcgatggagagggtggccaacgtcatttgagaactctccacagaggcctcgggcatcatctcgtccaggcacatgtgccactccaccagcagtagcaccctcttatgatggaaggtggcgatgaccccggccgcggtaagcctctagtcgcagagcctacgcagggcgtccaggaggggctgcaacttggcctggtgctcccatggtgcgctccaccgttagtgctcccctaccgcattcacgaccctcttggtgtactccaaaaacctctcaccattgttgcggaggtagaaccagcgattatgccaccccttgttcgaagaggtaagggtggcagggatgtacagctgtgcccggtccgagagcgtgcagccaccagccctcaccatgtgatggaccttcttcacctcaaaagagagggagaacggctcc

SEQ ID NO: 81659 - DNA, 331 bp, Zea Mays
aaaacaaaaagtaactagagggtgtatgaaggttggtatggccagagaaggaaaccgacatagacacaatgttctcgactgtgacatgatgagggatagaaagaggacgagtagagggaaagataccgccatcgtcatcggaggacatgtggtggacgcatcagatttgacaacccgaccaccattcttggtgtggctgttcagcaccacaaccaacctaaaggtgtcccaggaaggtgaggatgatgtggaggtcgtcgaggctgagttgaacagtgacacaatggtggtcgtcaggggatgttggggcgccacaccgaggataccaggg

SEQ ID NO: 81660 - DNA, 1389 bp, Zea Mays
accaaatataagggatgtagtaactagagattcaaaatcgtaactcatatgtactatcactttactaagggctggggaaaataacagatatgtagaaagtacttatcagtaaaacatttgttggcagcaacaagtgttatgcatgaaacacaagatcaagtgttgaacattacaaatgtttgtgggtcaaggcaatgttgaggcacacctctgattaggcagctaatcatagtgaaaggtaaatgaacatgtcatgaattgtactgaataattaatgaaatccgtgtattcatgaagtaatcgggttgtcattcctcttacatttattggtcaagactacactggtttgatatggtaccattggtcataaacaccacaaatacaagttgttcacttaataaatatctgcttcattggattcatcttgactgggcaaaagcagtacagcggcatggcttatgttaggatacgaggttgcaaaccttgcttgcattggcaactaagagtgaactcgaaattatgagggggcgtctgcatcgactacaaatcgtaaaccgaaacaagggtacaaagtttgttgcagcaggtacctaaatgggaggatgaacaatgtaacaaggtgagagcttaaactacaagtgcggatctggtaaagtcgtaagggttggggaaaataaactaggattgttcaactaaaccattggtggtgtaaatcattgttcaatgatttattcatatgacggggtacaacatggtatacctcaacacgggcggatctcgcccggtacacggggaatcgaagaaaaaaacgagtgctgttcgaaatgattcgtaaaataagtatggatttgacgaggttcaacaaggtattaccttaagaaggggagatctcggccgcaccacgccgaatcgaagcgtctctgtgtggatctgatggagccgtccaaggtcggatacggaaggcaacgaatcgaaagcggcgtacctcgtgcgacgcggatttgaccccgctttgtcttcggtcgcgaacggaactgcgtggagacgaagtcgagttcgtcttctgcgcaactgagcggggccagggccgactccacagctcgacgggaggttcgccgccgcgtcgccgcgcaaaatctctcttccgcggacgattcgaggcgaagcgaggtggaccgggaagtttccgttgtcttccgcggtcggctccgtccgcgcgaagaaggcgagggggcggctacagtcatccgctgcatgtggcgtgagagagaagagtgcggcgaggtaggggagagggtggcgctcgccgctgcgggaggtaggggcacactgtagccgctataggatgcacagtaatagggtaggggaggtgtagggtgaagcgttgcg

SEQ ID NO: 81661 - DNA, 1142 bp, Zea Mays
agtctgctctcaatactgcttctgctagaaccccgtcgttcgatagcacgtcggcgcctccggctttgggatttcccttgttactttctaaccatcaggtgagctgacctttgtcctgctttacttttgttgacaaaagactcctttgctaattcttgtatttgcagaatgttctaatctctgtgtcggctcagttgaggtcttgcagtgcccctgttcccgatcaggtttcgtccatgctacaatggaatcctctcttgcttcagaaggaaataaatgatctaaaagccttacacattggttagtgggttggtagctttcttcgcttctcgttgctccctcgttttacctcttgtgcgctttccttcttgcccttgcagctctgactcgacggtgctccgacgctgaggagagttatgcttagagtcaagccgacctgaaccaggtttctgcattcttggatggtgcctgaaccctgaactcttctttgaacgctcagcttgattcagagaagagagcccatgaggtagatttttctgactgttcctgatgcctttgttccacgcctttgcttcgatgtttagtacacttcttgcctgtaggaggagatgcgaagacttcttgattcccatgacagtctagacaaactataccgtcatggtagtagctcccttactactttggataggaatcatcgctttactatgttggagcttgatcgtcatagggatgagttgagggtttctcagtctgaagtgtcccggcttaataagttactgtcttcaaaagagtccgtcatcaaagaattgtgtgcctcaaagaaacttgtttcgtaggagttggaaattgctcgtcatgacattaaggtcttagaggatgaccattgtatcatgaaagcaatgtgtgataaagcgatggacaaagctgttcgtgctggtcgaatcctgatgaaaagacctcgtgttgtggtgcctaaggacattgttgctgacgttcttgctgcgtccgctggtatgagtaaaccttctccctctggtgatcctactggcaaggtcccctgcgagaacgcttcagcatagtaattgtgtaatgaagacaaattttgattcgtttgaacagaaaatacttttcgttgaattggt

SEQ ID NO: 81662 - DNA, 338 bp, Zea Mays
ttaagatacctgagtggaaagggaagagattggcatggatttcattgtgggtctaccctgcacatctgctgggtatgactctatatgggttattgtggacaggctaactaaagtagcccactttattcaagtgaagaccacgtattcaggagccaaactagcagagttgtacatggcacagattgtctacttacatggtgtgcctaagaagattgtgtcagaccggggatcacagtttacatatcggtattggaagaatttgcacgagtgcttggatacaagattgaattttagtttggcttaccatcctcaaactgatgggcaaaccgagaggacta

SEQ ID NO: 81663 - DNA, 408 bp, Zea Mays
atgcaatcgatgctgcactggagcgcctccttcttcgatgttagtggcgtcatctagctatatggcccttgtttcggggatgatgaaggcacatgacccttggccccagccttgccccgcacggccaccgctacggggatagataacgttctcggcgttaggcaaaggttagttcatggctgcctccgctcggcacgagcatactagactcgtgtcggcgaaggcactgagaagtagggatggatcgtcgtagagtggaggacgcaagaatcgtattgtgagatggaagaagctgggagagacactggaggcgagcgcttttcactatagacgacaacacccactttccacgagaatgacacgcgaattcatctggaacacttgcgggtagtcgctgtgcgagaacct

SEQ ID NO: 81664 - DNA, 421 bp, Zea Mays
caaagttgccacaaatttctatagagagttatttggtccttctgatatatctcatataaacatgagaaactttaatatgaccaggcttgatgataatgacatatcatttctcactggctcttttttctgttgaagaggttaaaaatgtggttgataattttaagcacaatagtgccctgggtcctgatggtctccacattgtgtttttccaaactttctcggatgttattatgaaggacttgctaacactttttggggaggttgatgccttctaagatctttattctgacattttcatatgccctttcaagagtctccctatgaaatatcttgggatccccactgactgtaagaagttggggagttcccatcggctgaccaaagaagaaaaattggggaaaaatggagatgtggaaagcta

SEQ ID NO: 81665 - DNA, 356 bp, Zea Mays
aatgaaaactccaactttaatcaaagctttgggagtaagctgataaaggtatatctcaaatgttttcagcacttcgaccaacatcttatgcaagggaaaacgaagcacaaccttcataaaccttttaaataccaccacttcgtctgcttcaggaagaggaacagtattctctcctctagccctcactacggatatatcgtgacaatatttgcccttcatcgcttcaatgtgcccttgcttgacattagattttcgaaaaacaacatgacttggcctccatggccgatcttcgacatcttcgttctcactctcaacatcaaaactctcgctgtcgcttgagttcctagacagcctag

SEQ ID NO: 81666 - DNA, 385 bp, Zea Mays
aagaaattgggactcgatggcgagccacaggacgcgagcagatgcaccacgctcggagattgtgtcggcgaggttgtcggtgatggagccgttgatccaagacagaacaacggcgttcatgcgagtccagtcgggcgagtggtggacaacatcggaaagcacgtggcaatccagagagaatttggtgagggttaggaggaaggactcacgccaccgagagtagaaggtagagttgacgtcgaggaggagtgggacgagggcccggatgttctgcacggcgacggcttgagcgtgcagattgagaagagcagccgcttcgtgttggagaagagcggcagaaagctgggcgacggagtcagcaccagtgccgtcggaggtgatgaca

SEQ ID NO: 81667 - DNA, 1229 bp, Zea Mays
cgcaaaacatcgatggccaccagatcgtcaaccttataatggtcgaagactggtgggccccaataacactatacctccagggccattaccacccatccgatcgcaacgaggccaaaaggctaaaacacaggagcagggacttcgcaatagtcgagggccagctttacaaaaagggtatcagccagcctatgctgaaatgcataattgaaatcgaaggcctagagatcctccacgaaatccacggcggagcctgcgggtcacactcagggccaagggccctcgcagccaaggtaatttgttagggattctattggcccgcaataatatgcatggccaaccaagtcaccagatcatgcaaagcatgccagaaattctctcctcgctcaggcaccccttcgcagtttaccaagctcatagcccacacctggccactttagcgattggggctagacattgtcaaaccactgcctacggcacaagggaacctaaaattcaacttcatcgccgtcgaatattttacgaaatggatcgagggcagagcagtctccataataacagcaaagaccacgcagaaattcttctggcaaaacatcgtctgctagttcggagtcccatctgagctaacagtcgacatcggcaagcagtttgacaaccaagatttctgagaattctgtagttccattggcagcaaggcagtgttcgcctctatctaccacccacagtccaacggtgtcgtcgaacgcgccaacgtcaagatctttagcgctatcaagaaaaggctcctcgacgacaaaaagggcaaatgggcagaccaacaacccgaagtcatatgggcgctgaacacaacagaatgccgagcaaccgggttcacacccttccgcctgatgtacggatccgaggcaatgacaccacaagagttaaagcacagatccccatgaacaaaccaattagccatccctgacgtcgacgaatcaacttccaaagatcttatcgatagagaccatgtcctcgccttgcaggccctgaacatgtatcaagctcagactaaggcatggcatgacaacaatgtcatcccaagagaattcaacgaaggggacttagtactcacaaggaccatcagaatagagtcccggggcaagctagagccaaagtgggaagggccatacatagtcaagacaaaagcatcgcaaaacgcttacaggctagccacatcatttggcgaagactta

SEQ ID NO: 81668 - DNA, 665 bp, Zea Mays
gatcctaggcatctgcgacggttcccaagcgaatacgtcggcatttgcctggaggaaggcgacgagcgcgatttcctatttctcctccagattgcccgcaatacgagtggtctgggaggaatccacgccgacctagatggtcttgacgggaccgccgcctgctccagatggttgcaccttaggctccttggtacaggaagtcgaggggtccctccccccatcatccgggcgagcagtttctaccgccagggcgtgcaacttctcgacagatgcaagtgcagcagggcggtcgccctgcatggtgaggaccccagcaggggacgacatcttgaggaccaagtacccgtaatgggcaatggccatgaaccggtacagggccagcctgccaatgatggcattgaaagggaggttaacctccgcaacgtcgaactggacattctcagtgcgtaagttctcctcagtcccgaatgtaaccgagagtgtgatgctcccaaggggatacactggttgagggcccacttcggagaatgggcgagagggtcccaatcgggatcttgggatctacagctgcttgaacgcagcatgactgatgacattgagcccaaccccaccatcaatcaggacatgatgtagcttcatgtttgtgatgacaagggcggtgatga

SEQ ID NO: 81669 - DNA, 494 bp, Zea Mays
tttgaagttccctacatgtctattagtggggatgctccgatgaatgatgtgtttatcttgtttgatgccaccttagccaccaccatcagaccgatgtggctaggtctgatgctatccaaaatattactaaagagctattaagggctctacttcaatagttcgatgtcctgcgaacaattatggtctaacgcctctacaagatgaatagtaccattacatgtttgatgctttcactacttctcattcaatgttttggtctgatgcttcttttcattgccggttagggttggcttcaaccgtattgttcgacaactccctcaggatggtccgacgctttggtccaacgcccttcaaacttttctcctgcttcgtttctttatgatctttatcttcggcctggtttcatcgtgtgtcttgaacttttgcatatagttatagatctttattaagtctttaatgtcttgtttgaggtgttgatcatcttgaacaccact

SEQ ID NO: 81670 - DNA, 372 bp, Zea Mays
caagcataaggaccgtcatccactcactccaagaggcattcgtgttgcatatgccatggaattttggcttcaaacctagaatcagcgagtttcaaaaacataaaaggaaaatccagctttatcacaggaagcgccattgaaaggttagttgtctgaacaaagaacatatgttcaagcaatcaagcgctatctaaaagcggttgagattaacaaggtcaacatgagcacagtgcacataaaagcttgtacttctacggagtactaacaccatactaacactacctgtaatagccggccgaaatcttaactactcaccccatcctaaaatatagttctttttagccctattttttccgtccacattataatgaa

SEQ ID NO: 81671 - DNA, 476 bp, Zea Mays
cgagcaagacaaagaaagagaaattgagttaaagaggctagatatagaagcagagaaagtgaaaatttgattaaaggagttggagattgaagagaaaagggtagcacaagaaaatttggacaagctagttgcaactagattggacgacgttgatgaagatgtgaggcatgtcctattggagaggaggaagcagctgatggagtttttattcaaaatcgattagttgctggcgaggaacacttaactactatgtactatggcatttgagaatattgttaagtttgtgtcaaacatctttatcaggttttaagctttatcttgtcatggtttacatggaataagttgtatgcttcgaacacgtcatgcttgttgttttgtgctagtcgatatgaacatgttatcataatgcattgtgcttcatcatcaaatgttttcacataacataacatagtttagttgaacatctaagacatctt

SEQ ID NO: 81672 - DNA, 522 bp, Zea Mays
gagatgatggaggagcccgaggggatcaagtctccaacaatctccacaaagatttgatagtttgggagggatttggagtgtgggatgtgagagagagagaaaggtgagggcgtcggcggctgcaacaaatgagagagtgagtatagaaagtggggaggagaggagagaaaaaggggcggcggtggctggtcaaactaaccaaaattggttcaaccggttccggttcaaccagttttgctgcagcgcgcacagtaaatgcgcagaaaacgagtttgactgtgcagaaaacctggcgcactgatagcgcagactgcgagactgacggcacagactatggagctgacagactgcacagaatcagaggtgatgaaaaccggttcaaccggtttgaaaaccggttcaaccggttctcaccagagagaatccggttgagtggcttactcagccggtttactcaaccagttttcagaaaaagcccgataaggcctagaatacaagcaatatttatgacatgaataattt

SEQ ID NO: 81673 - DNA, 485 bp, Zea Mays
gatagattcgaaaatttcagatcattaatgaccatcagtaatgaattgtcatttccaactagttatggttggagtcaggaagttttgcacgctcctgacttgtgattaactgcatgtactacatgtacaagttcccctatggtttttagtacgtgggaatccatgaaagatttcccatgcgtacattgggtatgttcccaatctcaccaccgcagcgtacatatatgggcacacagaaaactggggatctatgtgagaattcattctccgtcgatcattaagttttagaatctcttcatgagaatctatttatggcccgtacgcttgcttgaaacatgagcttttccaggcattagggggagatttcaagtaccaaaaatgaatgccaggaaattataatgaatgcagtaagcattcaggctcaggatcacgtactaaaattgaacctttaggttcgaatgatttgcaagaagttgcaaattgac

SEQ ID NO: 81674 - DNA, 283 bp, Zea Mays
gttaggagcaacgggtcctgctatggtgcttgcttgcggaggtgcagttggtgcctatttagtttgctgccctgaaccgccacgagctggtgtacttggagtggtagtatagcgaggacgggaactacttccagcctgtccttggttaccagcccttcttttctctccaaactcacacctcttgttttccacagcaatagctttgtcaagtagtctttggatggacgggaatgtgtgcgataccagttgatattgtaggggtccaatcaaaccgtccaaaaag

SEQ ID NO: 81675 - DNA, 423 bp, Zea Mays
gcatcatcctcggctctggtatatgtcccaagcaactcgtcgctagtagcctcaatgcatttcaaccagtcatcatttggttcgtcaaaccagtccctgaatctgaaggtatatttcaatcgaactagtccaccttcgctggattcaacagtagtctccttcggcatctcccagctgtccacaagtggccatactctgtaggctatgtgctcttgaattatgtctcttgtgccaatgaaagcatagacattgctaaaagccttctgacacgcttcggcatcactttcaatagccaccttcggccttcgaaggccaaagcgagaccagatggggcgctggataatttccttaatatcctccctttcaatcagattattcttatcataaaaccattcctccatccatgccccgggccatcttttc

SEQ ID NO: 81676 - DNA, 972 bp, Zea Mays
gagagtatgaacaaacctggaacaagctagccacgacgaggactctttcaaggtgacagaaaccgatttagggaaaaagagcaattcgtgggctctagtgagtaatttagggcacaagcggttggattggatgctagattacctaacggagtcgagggtgtgctcaatttatagtgtgcttgagcggtggccagtgaattttatggagacgcacgacggccggagaggaggaggggcactggcgcaaacgattagtggctttcaccgtggcggactcaccggcgacgagccagtgatatagagcggcttacggcgacgtggtgaagcttcaaggcacgtggcatccgatcgacgggcggccaactccggtgaacttatctgagccggccgcaaagcaaaaggggtatggtggccagcctccggtgttatcctgtggcgaagatcttttacccaaaagcgttatctggtcatcggtgagcacgaatcacaacggtggcgtgaatccgggcgcacgactcaccagcagcgaggttctctgaacttgaccgtatccattcactgtaccattggaaacgtccaacagagtgcctgacagagcaacttgcaacgcctagatctcggatttttgtgccagaacataccaatccgtctacaacaaacttgtagccctttatttcaactataattctgctatagcaactaccctcaatcgagcaatgaatctaactctaaatcgagctctaagttcatcctactttactgctggtgaggattcagacttagggttgcctgactgcctgactttggatctaattatctcaaaatttctcatgacaccaaggcttaatccctatagaaaagttgtagtcctacaggagctttacaagtttgatatgttgaccctaggcaaattctttgtatttttaaaactacagagctccaaagtcagccttgttcaactgttttcagtct

SEQ ID NO: 81677 - DNA, 417 bp, Zea Mays
tgcaactgccatgtgggccccgatgctcggaatcgtcctccccacgccgcgtaacaaacctctaacttcgactctgcctctctctccgtcttgtgcgtgccggcctgaacgaacacgattcccaagacgatttcttcgccgagcaccccgcgatctctgtaacaaatcagcctgactcatcccaccgacttttctagcctatatgggcagatggaggccattgacccccatgtgcgtacctgactgctgcgcaccctagccgccgtgtgcgcctgggccagatcgccgccatcgccatacttgcactcgacggagtggtacgtgcgaaaattgggcaccgggcaattgcgtggtgactccgggcaggtgagcggatcatcgtttgggtgattagaccttcgtgccaccgaaaatcgt

SEQ ID NO: 81678 - DNA, 525 bp, Zea Mays
atgggtgtacttctaacgctccgtagccaaagctgtgttcaggttcaggtcccagtcgaggctgcctcctgtgggtcgttgccaactctcataggtatgctggtatccagtctcgacacatcgagcctacatcctaggggggtaggcaccagagaggagtcagcaacgccacacacaacaaggacaaatagtatgcagataagtgctaatactgctcgataaatagtactcaaaaagtaccttacaaaaacaaagttattacatccaccttcaagcagggccttagccttatgtctacaggtataacctactcgacatcagtagggtcgcgctggaagcacgcgaccgccatctccacggcgtacgatgtcttgtacgaccccccgggcggcgtcctcagcagctaggccagcggtcattgttggaggcagcaccgaagccatcaaagccaaagagatggagccgcagcacggctcgcttcccaccccaaagagttggggcacgagggatggagtcgcagctcag

SEQ ID NO: 81679 - DNA, 391 bp, Zea Mays
ggcaaggctaatatagtggcagatgcactaagtcgcaaggcttcctgttattgtcttacgataaagacttctgacattacattatgccaagaaatggagaaattgaacctgggaatgattcaacatggaacttcaaatcacttgaagcttgagtcagtcctcctgcaaaggataattgatgcacaaagaaatgatgagggtatgaaacacattcatgagaaaatggaggccggtaaagccaattgctttagaaaagatgatcaagacattgtgaggtttaacaaccgtatagttgtgcccaagaatgatgagatccgccagcaaattctagatgaagcacatcttagtcgctattctactcatctcggaagcactaagatgtatcatgatc

SEQ ID NO: 81680 - DNA, 310 bp, Zea Mays
gttgtgtgccctcgcgtgcctgcgcctgcgagggcgctgtgtactttgtctggtatggttgattatgctgtgccggtgtgattacagttggtcttgctgtcgtttctgctttcgttgtactaggtcggctgcgcccttgggcggctcttgtgcggagtctttgcgatagacatcggaatttttcgcgcttgttgtgctaagtccggctgcacccttaggcgacttctgcgcggatagtcttcgcgatagacatcggaatttctcgcacttgttgtgctaagtccggctgcacccttaggcgacttctgcg

SEQ ID NO: 81681 - DNA, 537 bp, Zea Mays
ataaacattaagtataagttggtccgagtaaaagccctcatttaatttaaacgatttgaccctaagtgaagcttgttcttggtcacggcagcagaacggccctggaggtcgtgttccggacgattaatgggatcgatgctaaaattaaagcttggggaagcttcacgggttcatcagggactaggtacacgattgaatttaggccgaacgaggatagggaagcgggtcgacagagagggtgtatacggcggcgttctatggaacaacggagtgttccggtggtgggactctggtaaacttcaattggttggcatcgagagcaacaggaagctaaggacatgctagaacaagaggcaattgggtgagtactaacccgagaagggctgcccacgaagaggtccttcacggcggcagaagagaccgatcccagggaaatccgatgatctccgatgatggtggacagaatagggtggctagtgagccgttagcttcgtaactaagggacaaagaacagtgctcggttgatttggatgacgg

SEQ ID NO: 81682 - DNA, 418 bp, Zea Mays
cggtgctcgtctggcttgggactggaggttgactctgttgccccgaaccctactgatgatgcggcggatgctgatctttaagatgacgtggagagttggggtcatgtgagggccagtagatatgttacagaagaggatgaggatgatggtgatgaagaggatgtgccttccctggttcgcagggatcgtcgtagtaaggctagcaatgatattctagaccttgctctctcacggttggttagcctctagggaatgacaatgtctgctattgatagcatgctggataaggttgttcctgaggaccttttgctcgagcttcgtgaagttgggggcatcgacgtccatgtagagtgcccggacggtgtgcccctgttggtctcctggctgggcgacaggcaaccccaccagcttgccatgt

SEQ ID NO: 81683 - DNA, 562 bp, Zea Mays
aacgagtaagaccttgataacgatttttagttgagcgcccagttccacaacccattcaactaggtgtaggacatattattttattccttgttctcttgtctttgcactaactatggcaggaccctcggggttaaagaggatgagaacaccatgccacaatcccctcgtaacaagggcatcatacaacattttgagcgacaaatgcgcctgtaacttgatggcctcgctgaagacattcacatcactaacgagcgccttggcccgcttgaaacgacacaattcgaagctggtacggtgctccaggaattacgaacagcccaagccaccaccaacaccaccctcgataccatcatgacacggctggagtagttttcccagcagcttggtgagctacagggtgacactgattatggtggcgacatcgagtacgacgatcagccccgtcgtcgctagcacagacctcgtcgtgttgtacgtaaccagaatgatttttcctctaagcttaaactcactatgcctaaattcaatggaacatataatcctgacgcgtatcttgagtggg

SEQ ID NO: 81684 - DNA, 505 bp, Zea Mays
aaaaatccttgtgttaggctcttgatgtaatagatatactctatggtgttaggactcatttcgtgctccctagcaatcctagtacctttggtaccctgatgtctttgctacgatatttggtgttgtcatctgggaccttggcacccgtagcagggttctgcctacatgacatcttctacctttccatcacccgaggtggagtttttagccaccaactagagctactcaaatagagtttcaacatcgatgtcataggggagctggctagaggcaaataaccaacataacatggcaccgggaaatactgctcgatacataggatgaatctccatggcttggttgaatgtaaacagtagggaaactgtctaggcacttccaagagtacttcgctgagcaccacctcaacagacaacacccttaatgatggtattaggataggcaacccaagggaagcgagagggggcccaaacactggtcaacaaagaagatagcctaaacttccaag

SEQ ID NO: 81685 - DNA, 731 bp, Zea Mays
ctcaggtctccgagcacggcacacgaccagtgaagccgcccgctccgcggcttgcgagcaaaaagcaggagctggtagcttcttgtagctcgtggccggtagcttcttttaacagctgcagcggcaaatggacgccggcgacgccatggaaaagggccagcgctcgtcatcgcggctgccagaggtacgccgtacgcgctagctccaggagctcctattcattttcattgtccagtgaagtaacatatacagaagcgtccccgcttccgtttgaccgtttgtacgcgcaacatattgcagaggggggctccaaagattcaggaggaaagcctcacggtgccactcattcagaacaagaaaaccgggagcaaagcaccggcggtggttctaggtgagctctccctcttcagagttcagacagagccaccgagactgctactctagtttcgacctttctctagctagtattaatactagctgacagactgaacaccgaacgtcttctccaggattcgagtgcctggagagcacggcgttcaatggcatcggcacgaacctggtggtgtacctagagaccgtcctgcacggcagcaacgtagccagtgcgtccagcgtcacctcgtggttcggcaccagctacctgaccccgatcttcgccgccatcgtcgcggacacgttttggggcaactacaacaccatcctcgtctcgctcctcgtctaccttcttgtga

SEQ ID NO: 81686 - DNA, 289 bp, Zea Mays
ggaagtccgcccgaggtcgcgactgaacccgttctaggattcaaagacatgcactataattgaaggagtggcctcctgcgggattcgcgggagcaggtagtcgaggttgagcccaggcgaggcagagtttgtcccgaggtcgagctctatttcgggtgaggcggagtttgcacctaaggattaacctgtaccgttgtcatattatacgtcacgtccggagttggcaggcggcgtgtaggaacagtggtcgcatgcgtaattatagttggtgaatctttgataggactgt

SEQ ID NO: 81687 - DNA, 422 bp, Zea Mays
cagacacggggccccttctttgctgccgcgttcttgctctcgcatgatttcgtcttcgccggaggaatctgcttgcaacgggagggctcgatctagctaggacgacctagctcctccccactctttatcgcttttatgcatgtgtggctggaggcagtcttcggcctcaaaacacactagcagcttttgtgcgatcaggttttgagcgagcatagtgtggtgtgttctgtgtgtgatagatgcacatttacttgcttttttcgcagtgcatgcttatagttcttttgctccccttcttcccctccctctctgtagccgccggccggcccctttttcagaaaggtttttgtgtctctctactttcatcctcgcctgtcgcgctcccctgccctcgatctcctttctgctcctccagattgatt

SEQ ID NO: 81688 - DNA, 612 bp, Zea Mays
ctatgaggagtcaagagggctatagccggatgctaagtgcttctgcaatattcacgagttatcctaacagacaaaggcagccgaaaaggaacaataccataacaacttcggctgctatagcttcgtgccccgctctgaggcaaactatcctgtaccaatattttggaagaagtggttgggttcttggatgaagcaatggttctacgtaaagaatgatctaaatcagagggaggatgtgaggggcatcattcaacgtcccatatggtcacgtttcggcattagaagaccataaatcgcaattgggaatgaagtacaagcgtgcctgatggctttcaacaccgtatgtacttacatcggtaccagagatttagttcaagaacatattgcgttcagagtatggcctcttgcgaatgaatgggaaatgccgaaggaggctgccgttggctctagtcaaggtggcttggtttatcttaagtacaccttccggtaaagaagccaatttgatgagccaaatgacgattggttagatgctatagaggcaaccagtgatgagctactatgagcctactcgagggtagaggacgaggccatgactattgccttcggcgctcg

SEQ ID NO: 81689 - DNA, 780 bp, Zea Mays
caatccatgccctaatatggtctacgcctaattctaaccttggcgatccactgggagtcactaatttaacctgaacactgccctagagctcagtccacgtgcaaccgtggagctcagtccccgatgacacagtacagcaacacacaaattgggagcacagtaagcttctgtaacgtacgagggctcaagaacggcaactaggaaggcgggtggagggacaggacagtgggtcgacggaggaggtgctcccggtggcgcggagagtggatttgggaaaaattccaaattagggcgctatggtggacgatcgggcgcgaggagtggttcactgggttcataacaagtagacggaataggtcgatgcatcaatttatagaggacggccgcgaggagggcgaatttggacgaggaagcgcttgcggtgagaacggtgagaagggggaagagtcaccggaggttgctaacgtggcgctcactggctaactatctacaatggtcactgccgagtccttacagcttgcgacgacgtggtgaatcaactacggcgtggcgcaatcgtggtgaacggtgatctgcacggtgatgaccgtccggccacgttgctgcgcaagtgggtacggcgactgggcggtaacagtgccccgacttcatcccctatgcgagatctttcacccaacgtagttatccgcacgccaccaagcacaaatcgcaaaaccggcaaggatcacggcgtgggatcaccggcggcgatgcactgaacctggcaatcttcgtcaggat

SEQ ID NO: 81690 - DNA, 327 bp, Zea Mays
ttgccttctaaaaccgggtgtgacaccttccccccataaaagaatctcgtcccgagattaaatgtcctagggtaagtaatggaaaaggaaatgtgtcacattcttatttccttatttctggtacaaggcaggggtggtttgaaactcactcctttattacaacagctatacatgctttacaaattacaagaggctaaacagcctgggaaattcttatctaaaaagtcttgagtttcccatgtagcctcatcttcggaatgttggttccactgtatcttataaaacttgagagtttttctttgggtaatcctatccttttgatccaag

SEQ ID NO: 81691 - DNA, 513 bp, Zea Mays
atttcttcgggggtctttctgcaaagtgggggtcgaaacggtatggtttagtttcggccgatggatcgcggatgaacgttcctgattagatcggcgtaactgcgaaccggtatgcgattgcaatcatcagatcaaagatcggcgaccagtattttacgaatcccgatcgaagcacgagcgttcgattcaaaacagacgtacccgatcaacaccgtgaatcggtacatccctgttctaatcgtagccgcctattggccatctaacggccgaacgatacacccttcccctcctaccccgcgatggcggcgccgccgcttctacggctgagaagtccggtgagttccgccaactcggcgttacgctactctgaatcactacggacaggtgcaatgcactcctaacaacacggtaaaagtggtcggggatcataccaagaggttggcgcgacgacgaggcccgaccacgtggaacaggggcttccatggcggagctttactacggcgaggaatccac

SEQ ID NO: 81692 - DNA, 441 bp, Zea Mays
aaagaatcctggttcggtctagcggggctgataagggcaaaggaaaggcgttcatcatcggcgatacacgagaggtctatgaaaacgtaaaagtttcttgcagaaaagaggtggcagaaaagaccctagatggaggggaaacattaaagatcactatcatggcttccaaagcttggggcaggcacaggtggacggctaggcgcgggcacatgttctgcgcaccatggacggtatgacacatagacgcggacagtccgggacaccgccggacagtctaggtgggtcaggcagatgatccggcagcacccaggagcaacgatgaccacgtacattcaaacctcgatgaccagaaatagctacatggaagacaaacatgtttaggcatccgggcgtctggtcaaagtcggcctaacacaccaagtaagagaccaaggattgcaa

SEQ ID NO: 81693 - DNA, 392 bp, Zea Mays
gtctgtccatgttatcacaacaagaacaagattgttaaacaaggcggtgaggtgcaatcacatttggtcaagtgggattttgtcaaggaatacatggtctagaggtttcatggcaaaggagattcgagtggagatccatcctgaggaaactcgtcatcatcactaataaaaatgcaggccatggtgaggaccctcatcatcatcaggcggcgaggcatgtctatgatgcatactatggaggtatcaccataggtaattgtccaaggcatagctaacgttgggggtgacagtgatgatgaggatcatgctgagccaaccttattggaccccaaggatagaagatttttgagaaaataattagccacctcaacaacattgaccttctatttggt

SEQ ID NO: 81694 - DNA, 622 bp, Zea Mays
ttgaatccatctgatgtggatttattaggtcgttagtataccagacatggggactatctacaaaaatttggcgtagtgacatgtcctgtgcctaggctgctaacaaaggagggtacaagtaccacaatttactaggcacgtgtctactaataaaagtactaacacactgtgaatggattacccaagaacgtgaacatatttgcaactcgatcttcgaatagatacacagcatgtaaagcagtaaaagggataaataaattgatgtgaacatcaccttcgtaggagtggagcttctgatgcaacagggaaaaacagctcactccccgaaatctgaacatcaaatgtcacaggataatcgttagtaagcagttgtcaaattgtcttgattatagggggaagtattaaccacagacgtcgatgcaacctaaaccctaattagtacatgggggatgaccggatccgtaacagcacatcggggaggagacagggtacacatggaagttacgaatgtacctgcgaagacgaggagttgggatacgggaggagtccaaccttgcagacgaactggcggcggcacgggcaaaaccctagcgacgtcaacgatcagggaagttttcgaaac

SEQ ID NO: 81695 - DNA, 867 bp, Zea Mays
catacgtaatcgaaattacgtaagatgaggcgtaggtgtttaaactagtgtataattaaagtggagggggtaacggcttgaattgattcagagataattataagttggaaacagttaatggctatatgcatggcctctctaccaggagagagaattaattaactgatgaagcatgtaggcacgggtagcagagacttttcttgccctgaataactaagcagcagtaggcatggtttcataaaatgagtaaccagtactctagaatcagattcatttttagcgctaactagatggtccttgggttgagtagaggctagagctagatttttttttgggtgcttttgttggatttgcagatcaaacctcttttctaatcagccgggagctgagagtgagtaagcaatcttctagaagctaatgaattattagctgccggagacatggatcctcttcctgacatcgaaatttttgtttgacgacataagcacaaaaagaaggtcgtctcagtgtggcgtgtcgtctgggcataaactaaagttaaatcctacatatctaaagaaataaaagtagtgtatatatacactatgtaggaggagagagcatgtggaagtatggctttttatatatatcattataaatacaggtatgctatatatatgctatcatacttggtgagatcgaatttgatgctcgaccggggcaagttgaagccagtcaacaatcatggatggatgcatgcatgcagcggactagtcatgggtgtacgacgtagggcatttgtctcttctctgaattattataacaaaggagacaattctatctcaaaagttgacgtgcatgcacgttgatacacacttagcttagtgt

SEQ ID NO: 81696 - DNA, 349 bp, Zea Mays
gctagctgaagatggatggatcagtcaagagctgtagatccaaaattgcagaaatatctaactgtgatctttttactccctaccgtgtccaactttgggataagctgaagattgagatgaggtagtagcaggacattcagattggtgcatcactgaaatatcacctgtgcaaatatcctgtacaatgcgcttcatccttaccccctcttttcttttgcccatggataatcttcaccctgcgtgactaggctctaagaatttacgtggatcttctggagggagccacgactacatctcgtgttcatagctatccttgtgcaagatcaaaaatccagccccctgatctttt

SEQ ID NO: 81697 - DNA, 584 bp, Zea Mays
tacagacttaacaagcattagtttccgtcttgttatctggagtgagtaaataacacgtcataaaacttgcatggtgaactcgtgtatgcccaattgcccataaacctgtatatatgactaccatactttaattctaacaagagggaggggcgtaccaacgtgaagatagtgtgactcctactgctgacaagattgaagttgtttgatccaacatgcctgtgctctgcaagaaagcaatggggtcttcagaacaaatactactttgattccatcatggaaaaagtaataaaggaactgccaaaacacattccctgacatactaggacacaggcacaagcactcttcaagttcacatatacaaaaatatcatagatatgtgaaatgaggtctcctacgaggctacaacctaggggaaacaccaacctccataattttacacctagaaagggacataatctgaaaaaaaaatacaacatagacacaaaacatctctactacatggttccacagtcgtcatgtgtcacctttacccttccagctttagcaaaaataaggtaaaaatgtgcacaagtgggggtttgaac

SEQ ID NO: 81698 - DNA, 433 bp, Zea Mays
ccagttcccgaattcaccctcccctaagacctcttcaccttggcgtagaattcgtccttagccatgtgcaaatcacgacaacgcttacaaatcacgacacaaggttcgccggtggtgggttcagtgaacctggtcttcttcagttgactgttcacgtctgaacaccactttggcttgtttgacagaccaagtttggaagcctttttctctacaattcacatgacactagatccaactgcttgttagaagtttgttcaccgatgtaagggcttcagctttgttataatgatcgtagtcattagctcaatggatcaagcacaaaatggctcgaaaattaaggaaatgtcactagattcctattttcactgaagcttctagtctgacaaccatactttggggatgttttactccataatccaaatggatttaggtc

SEQ ID NO: 81699 - DNA, 610 bp, Zea Mays
atgagtgggatagttttgctcatgaggcctgagtgctctcgaggcataagcaatgactcggttgtcttgcatcaagacacaacctagcccggtgctagaggcatcgcaatatacatcaaaaggcttgctgctgtcgggttgcgccaacactggtgctgtggtcagatgctgccttaatgcatggaaggcatcttcgcacttctgaccctaaacaaatttgacttctttcttcagcaactcagttataggcttcgcaattcgagagaagtccggaataaatcttcagtaataaccagctaatcccagaaaactccgaatctggcgaacagttgttggtggcttccagttcatcacctcttgcactttatcaggatcaacaactattccagcctgagagatagtgtgacccaagaatttgatttcctttagccaaaaatcacacttggataacttggcataaaggtggtgctctcgcagacgttgaagcactacatgcaaatgcccgacatgttcttcttcgttctttgagtacaccaaaatgtcatcgatgaaaaccaccatggacttgtccaattccgacatgaaaatagaattcatcagatacatgaaa

SEQ ID NO: 81700 - DNA, 417 bp, Zea Mays
gacacaacttgaaatcggcgcagcatacctacacgacttagggtgatcactattccctactaacgaagcaatcgacttacgtcggaaatgccttaagtaagtgcgacatgctcatgcttacgcgacttagggtgatcactataccctactaactgagcaatcgacttaagtcggaaatgccttaagtcggtgcgacatgctcacgcttacacgacttagggtgatcactataccctactaacggagcaatcggcttaagtcggaaacgccttaagtcagtgtgacatgctcacgcttacacgacttagggtgatcactataccctactaacggagcaatcaacttaagtcggaaacgccttaagtcggtgcgacatgctcactcttacatgacttagggtgatcactataccctact

SEQ ID NO: 81701 - DNA, 534 bp, Zea Mays
gccgtcgccccatcggaccgaggtggagacgaacctacatggacgtccaaggaggtgtgggaaggagagctcacatgaacaccctcgagggctgggttgcagcttgctctacccaccagagccggatcactaccgtcaacaccctcgggggctgggtaactgccagcaccaccctcgggggctaggttttctacagcagccacctctaaggctgagggctcccttgtcacctccatgggagtcgggcaactcggaccaacgtcttggcattgaagactgccctccaaagtcgacgatgcacgagacattgctcgggatacctccaatccaacgtctggaatttctgaacaaacagccatcatgtcatcagcagttggctctgatagcatatcctcggggacgacctcctcgagggcctgatcaaaatccaatattgacaatctttggagactgacaagagccgacagagctggagaaggaatatcacttcccccctcaataactttgtaatgtcagctgttcttgcggatcagc

SEQ ID NO: 81702 - DNA, 289 bp, Zea Mays
ttcgtcttcggttcgaagatcaagtgcaaccaaggtaatttcatacacaatttgttgcgcactttactgtccacatgggcagaaccaatttatatatgtgttgtcatttgtgcatgttacttggagagatgagagctgggatggtcatatgtttattgttacctagggataccattgttcttttggtataagtattatatgtgcagtgattacttctaagtttgtttgtcagaacctatatgttcacggttcagttcattctatgtttgttactacctgtatgttacta

SEQ ID NO: 81703 - DNA, 497 bp, Zea Mays
gatttatgaatataatttccgtatgcttatttggccaagtggtatgtctgataacaagtcccttgtagagcagtttagtgagtttcttttatgcgggcatgctattagtgaatctatcttgttacaatgtttcagatatttgtcaaaaggtcatgtaaatagtacacataaagttaagttgctggaaagaattcagtttcaagttcttcctagatgttaagaaacaaaatggacaatcaatcaatctggcatgttgacatgtgctgacagtatcactttggattttggaatctcaacattaaagatgaatttgagagtgatattttttgcaggtttaaatatttagctttgtgtactacatttacgattttgtaatgattgttaaaacattgcgacatgttgagttaactatatttcggctaaaggggacgcccgaaccccaggataccaatgaattattgttgtttcaatccagagggcgcagtgctctgttccag

SEQ ID NO: 81704 - DNA, 353 bp, Zea Mays
ggaaaccgtcgcggaccgttggatgtgatttgcgcggctccgattagattggggtaataccccttcgcgggttgtaatcagggacatcgattaggagatgagcggctcagatttgaaatcagtgtagcccttcgcgtgacccgccttgaccgtaggatccagatcctagggtcgacgatgaataccggcttgcgcagtttctggtttaatctgggcgctcggtgtctaatccaacggccaggatctgtccataccccttcgccgaactgtttttcacatgagtccctgtactttacaaaactcaacccgccatccatattcactatgcactgagtcttggacttcttaccccg

SEQ ID NO: 81705 - DNA, 481 bp, Zea Mays
ccttgggagccgttgttcagctccaggtaatcttgcgcctatattaagtgccacagcctcctccccagaggcctcttgctcagccgcctgtacacgccgagtcgcctccaatttccacccgcaagctgtgaagtagagaggcactgccgcccggattactcgcccacgttgactttctaagcgcgtggtcaggtcagggtgcgtcgcgggaggttggtgagatcgttcgtggactcggcggtaaggttcgaccatcggtgcggcggtgattgctcaccggaggcgctgcgccgccgtggagctattgtccatcgtgggcagaggagtctgctcctcagtgccaggtgaggtattattctgtagattcgtaggagtttctaccccgtatagcaccaatttatgtgggatttgagcccctgtacctcggattgcccgacaccggagccgctgcgcagccatggaaggacacagcgccgtcgtg

SEQ ID NO: 81706 - DNA, 670 bp, Zea Mays
cacattaatcaataatgcatcaggaaatagaattattagctttcttgatggtaatgccggatataatcagatttttatggccgaaaaggatgcgtctaaaacggcctttatatgtctaggcttcattggtttatttgaatgggttgtcatgacatttggtcttaaaaatgctggtgctacttatcagagggctatgaatttgatcttccatgagttattaggaaacactgtggaagtctacattgatgatattgtagtcaaatcggctgagtttagttctcatatagcagatttgcgcaaagcctttgataaaatgcgtcgttatggtttgaaaatgaacccacgtaaatgtgcttttggagtgtcggctggtaagtttttaggatttatcatccatgaacatggtatagaaatagacctggaccgaatcaagtctattcggaatgtgggacctccaacctgtaaggtcgaagtgcagaagtttctcggcaaggtaaattatttacgaaggtttatttccaacctagccgggaaaattgatgccttcacccctatccttcggcttaagaatgatgccgaattcgcttggggggcagagcagcaggaagcatttgatctcattaaaaaatacttgtcttcagctcccgtattaaaagcaccacgagcagga

SEQ ID NO: 81707 - DNA, 304 bp, Zea Mays
atttgcgtctgaaaatctaatttaggaggataactcaagaaaccaaccaggcctagtcttgcaagaaaatgtagacgataactatatgattttgatcctgatagatgtcgtgaagacttgtgaaacgagaactattacaattagttaacaaacaaatgaaattatgtttgttgagcaccagatctggtaggtcggacggtctggctccggtacgatggtcgtccgggaatagtttagtttaggatgtagtcctgatcttttgtggggttatcctaatatatcgtgtgattttgttagatttcgc

SEQ ID NO: 81708 - DNA, 579 bp, Zea Mays
gcggcactccgcactcgtgcaggctgcacaactctactcgagatttgcaagttctgctaaacttcttttaggtggcacgtcatgctcgtagcttgcttgttgctggtggccacaggcaagcgtgctattgaagtgcaagcaaagacacactcctcgcatggctgttggctacatatatttccccaaagagcttttgttgtttgtagttggctccatatattttcccttacaagcttgagatgttttgagtccggatgaactgatccttgtttcaaagttgtagtctgcccgctccggcgccatggctgcggcctccgaccgtggtgaggtcgacactgcacggcccttccggtccgtcaaggaggccgtagccgtgttcggacaccgcatacttgtcggcaacaaccattccagtcacagcagcactgcggccgccgccattgccagcccaagcgctagtgccaatgccactggcgttgctgccaccccgagtgccaagcatgaagcaagcagtagcagcagcaccatgaccttctctcccacaccaatggccgagagcgaggcggagattatacctgc

SEQ ID NO: 81709 - DNA, 533 bp, Zea Mays
ctcgccttctgcggagttgcgcgctttgcatgggaatccgcaagaaatcggaatacatctggaaagaataccgcgagaacgggattgagaaatgctccatggcagtctacctgggagaaagccgaaactacccaaatcaccctcctttccaaatcaccgccactggacaccgcttcctagacacttgccagaatgctgcccaaagagccctcctccagctatgccaaaactacagcagggaagtctctgagacaccccttcgctactttccacccagcaacaaaaatactcctgcctagaggaaaatacttcaggccttgtcagggagagatcctaatgaagatgaccctaccatagtctacatggccggatatctccatacacttgacaaccactatgacaaccttttctcccactgcacccacctaaattcccgggtagaaagcctagagcaacaaatcaaggaattaaaggaagaaaaggcgtcccttcaagacagtctcgagatggcggaaggcgaagaagccaacact

SEQ ID NO: 81710 - DNA, 359 bp, Zea Mays
cctgaacaaggattcaggtatccttgaaaaaggattcaccacgcgtgcaacagttaccttttcgcattctctcccaatcggttgcgcccctttgccttcgtgcttctctactccacacccgcgccaccgcactcgccatggctttgcttggtcatcccgaccactttcagtctgaggaagcgcttaacctggtgcgcgaccttcttaggtggagcacgccagggctcactggaagaatccatgctgtcgctgcccccttggtgatctcgccgtcgcagagtttgtgctgttcacctcctacatctcttgtgggttggtgctgccaattttgcccttctttctgctgctgctggaggagt

SEQ ID NO: 81711 - DNA, 1057 bp, Zea Mays
gccacaaaaaaaagtgggccccatttctttgaccgcatgcagcgttccttgattgccaagtaaaaaaaaagcagcccccatttgtttgaccatgcgtgcggctgaaaaaaaaccctaaaaaaacttgttttatattgcagtttcttccttaatcaattatttctcgcagtaaataattagtagaaaaatgcatgtgaaggctatgttgggtatttttaaatcgctctaaatatttgtggtgcgttgagtttctgattcacgccgagcgattaaatattatagtgggtactcggacacactgatcaagctatgttattatcgactgagttatgacattagctgaatattgactgcgacctggcaacacgacgcaatatttgtgtcgttcgaacttgactgcgtcatgtgattgctatgtcgcgctctcgcttaatcggatcgctcccgttgagtcggaccgccatcgccgagccacacatttttcgtgggccctgaaggcattgcatgtgtgtcgcaactattgagtcacagttgcgcttgttgtgcctcttgtgcctgttgcgcgtacttatcgtgtaccccaactaccaagccacgactgcgtttgttgcgctggttacgaaggtttaatgtgttatcgttgccctgatggccgcacacgcgttgacaccagacactagagcttgtactcgcgtggattgtggtgggttgttcaagcccctgaagtcacattatgcgcaaccttcgtaaacaatttttttttgattatatattttatttgattgtgttgtgtggcatcatatatttatatatatcgccaagtggccataacaactatattaaatctgggaaattaaatcgaaatacaatgaaacacagataagttaaatctctgctctcatctcatgcataaagttttacccgaagtaacccgaagatatataatataatgcatgaaagccttttcggcacagaagacatcacaaattgggattttattagtaagcaataagaccttaccaaatgatttaaggctataaatctcagttatacattg

SEQ ID NO: 81712 - DNA, 736 bp, Zea Mays
caaaaaccatttcctaaatcattttcctgaatttcctaagcttctggactgagcgcataattatgagaaactacaggggcactgttataaaattctgggcctttcttaaatacttctatcactgacggggatggcgggtttattctttaatacatcaggggctcttttacaaaatgggatcgacgaaggggtatggtcgcggctgagccgttggatcagaaatcatgggcacagattagatcatgaagcggtatgccccacggaccgctggatacatatctaacgatccagatcactctagccaaagtgttagccacaatttaatctgggccgccagcagtcagatcaacggtcgggatctaaacaccaaagaggtatgccccgttctaatctccatcgtttattttgtgatcgacgactacaggcccttcttcttcccttgccaacctgaggcagcgccgccgtaggccttggcggagccatgccggcgatgcgctcatcgtgaccacccggggatcctaccctgcccacgacacgcctacgcgcagagatgacttaggtgaactcaacggcggtctccttaccttcaatcggtatggccagatttgatcatggtcgttcaccagaatctgacggcccgcgcacatcttcctccccacagcagacaacgcggcagccaggactcctccatggcggcgccatcacccatccgcccagtgcaaaacgaagcagggac

SEQ ID NO: 81713 - DNA, 338 bp, Zea Mays
ggacaatccttgatgaaatgtccagacttcccacagttgaagcagctattagatgaactgggtaaggccgggaaacgagtactagaggcacttgactgattgttttgagtaagggtaggagtgggacagaagaaaactagttgcttgaagagacaagcgtgtggacgaggaaaagagcgatttgggttaaagggacggatcaccaaccttgaccgcttctcggatccttgagaggatccttcacccccttcacacccaaatctttttgtctttccctgccccgaattcttggcctccaccgaaagtgttgtgctcatggccctgatgtaagtgagatc

SEQ ID NO: 81714 - DNA, 799 bp, Zea Mays
atctcctcaatgtagggagggtagttttagactgatctccatccttatctagctgatggctagataacctttctataatcaattgtacctctttggactataaaaggggaatggtagctcctatctagcagagatcatctgatcacgttgtgtaggcaatagtcaccacaacacataagatgtagggtattatctcgcattgagagcctgatcctgtctaaatccgctcatgtcctttgtgtgcttacttttaattcttgatctcgtgatccacctcgtacaaactcactattgaaattttcacgaccgttggcgtgccaggtagatacgatgcgaggctacaccgagtactcattgatagcggaagtagcctcaacatgctcttcgtcaatactttcaggaagatggctctattagagaagtctctaaggccaagctcaatgcccttgtacgacatcatccttggcaagtctactatgcctctcgggtagataactctgtccgtcacctttggcaccgagttcctccacttcgtggtatagatgtggttgaagagggtaactaggttcggtggtggagttgcatgtggttgctatttagtcccaaaaggtcaatcctttttatcgttaccttcaacggggtcaatagagtgcattaaccatatgtgaacctataaatttacaaacataaaagttgttctcgtcttaaaaacctgtggagcatataaaggtatatgtgttcttacaattctttcatcctatgtcctaatctagtcccgtcgctaatggaattgcgatct

SEQ ID NO: 81715 - DNA, 491 bp, Zea Mays
agaaaagaaaaatgatgttagagggatcaagcatagttttattcccaaagcaccaatcatttctagtgcgccaaattgcccagaacatagctccacagccaaacaaaaccagattagcaatcttgtcttttggtctacataaccagttgtcataaaggttactaatactactcggaatcatcctcagattcaaggccacttgaattactctccacatatatctcgcaatgggacaatgaaagaataaatgatcaatggattcatccacgccacaaaagcaacattccaaagaaccattccagttccttttcttcagattgtctttagtaagaattttatttctcaccaccaaccacatgaaaatcttgattttctatggcaacttggatttccacaagaacttatatggaatcgaaacttgatctatcattttctttttgtaaacagaattaacagaaaagccttttctccccagactccacataattctg

SEQ ID NO: 81716 - DNA, 829 bp, Zea Mays
ctccctcactctcaagtctcaacttattaatttcttcatgctccctgcactactctcctctgccgcgtcctcttattggtggattagttgtgtgggaggactgtgggtcatcgtgatcgcgggtgctgggtttcagagtttcagatcagatcctttccttaacccggtgggtttggactttggaggcaggcaggtagccgactctgactcgctataactatgaaggttgtttgactcgtcacgctcggatggtgtgaggtagagatgttaatgggtaatttcttaggctttgttagggtatttactgacctcaattcacgtatgttgaggtagattagagtgtaaaatagtttatgttacacttcattccatcttaatacaaccactattagactaaccatgaccacatgtaactaagaaaataggagactccattgaattgatatgaagagaagatttgagcccatagttacttactagcaagtcatgcaagctatagaaaagagatgcatccatccggaacatcttgtggcttcctcttggattactcaatgtttccctcacccaagcatatccactttgtcttgtggtccttgtctcattcttgtcaatataagtgaaataatatttttcaagaacaagagttgtgcacattgtatttttctgagcagaccgcgctagtccaatagccttccttgtccattcctcatcattggatccactctcatcatcagatgcactcgcatcatcagttccacttctatcatcagagccactgtcatcaccagataataaatagagttcacatagcattacacaaattagtaaa

SEQ ID NO: 81717 - DNA, 276 bp, Zea Mays
taacgatcacatgaaaatgaacaacatatatatcatcaacctcaatatctcacaaattcacactaataacatgaaatgtgtgcgcaactcaaatagggataatttgtttcctaatatgccgccaatatttacaactgacaatggtgtcctccgcagagacaatgtttgagagagcccatgttgtcatatactaccgtcacaataaaaccagaaaagaaaaggtaagttttcatcataaaaaccaaataataaagtagaggtagtgcattttagatt

SEQ ID NO: 81718 - DNA, 349 bp, Zea Mays
taatatggctggatttggtgaaagtggatcgattagtaatataggcagagatagactggactcaccctctgaaaacggtcttagtttttatgtttatttctgcttaaaccaaatgaatctgccctactctgttacatagagtcagccctgacaagattgactaacatactgctgtttcttctcctctcaaataacttatgcgacttacagcaatgaattcaaacaaacttgaacaaactctcaactaggataagctaggccactggtggacgcctgatgctgcttgctgcttgcatcatgttatcatgaataggtcttgttgatgaagacatccacaacgtatatgttg

SEQ ID NO: 81719 - DNA, 1918 bp, Zea Mays
cttaggatggcttcaacgggctagccaaagcggcaaccaaagccaatatggttggcatagttgaaagctcccttgtgggttttggtgttttggatgacaccacaattaaaggtataaccagggtgttatgtattgagtaggtgctaagtgaaaagactaagaagttcaacacatggacacagatgtgatgatccacacaagttgagatgactatggtctatggacatcacaagtaaagttgaaggatggtcaatgactatgtggaactcaatgtgcataacttggagacgaccgatcgaactggggacgaaggcaagaacttcgaggaactgagtgcgcaggagaaggtcaagaagaccgaggtacctaaagacaagggtgaagaagatggcttgcaagaagtcaaggttggtaaagctgagaagagctgtcggagaaaagatccctaggcccctggggcccactagtcagcaaaaggacaagggaaaggtctaccccggtagcacccacccccagatagtcccgaggccccgagcctaggatcgagcgaggcagagccaaagggggcgagagaattgaggggaagccactagtgtggattccgcgccttatctaagactaaaccgtcgtaagtgaccgaccacattagctactccttgcactgagccaccatgggagagtcgatcctcttcccactcatgaactatgggtccttagacctacggccactcatgacctatcaaacctaggcctgggtgcactggctgtctataggatccgcaagatgatgagcatgctgagagcatgagacctaggctatggaggccaagggtcggcgtggtgcagaggcgataataatggtgccagagctcttcgccacccacaccactagtcttaaacagtgcgaccagagaagcctagacagccgaggcacatgccgacaagcctgactttaccgaggtagaatgctccgttttaccacgatgtagtagctccttctttaagaagctaccagtagatgacccccaccttggcctatagaagggggagggtcagccgagagagacaaccaacactcacacgagaggcggagatacgcacgcaacacacatagacggacaaacgaccacacgtcagagaactacagaggccaaaaccaaggagcacgccgcctcgacgcccaaggcttagtttggttgagagcacaagatttgtagtccttaggccataccatgaacaagagacttgggagcctcctccctctctcgctcacttgtaacacctactacgagcattgagcaacaaaggtgtcgatagcgtgagccgccaaagactggatgtagggacgttctgcctaaaccaataaaaatctcgtgcccactgagcacaccatccgaaccccgaaacacgcatagaacaaatattttttggagctcgttcaaaacaccgacaagtgtcctatgcatcgaggatcacaacataaggacatgacttggaaccatcaaggtatttcttaggatttatggttcaagtcataaggctcaagattctagctcaataagtaggacatggtcacaataaggtggagaagtatcaatgtcagaacctagaagtgaaccaaaagatctaagtacacttttccttttagtttgggtcatcttgtgtttggaaatgttctatgtgaccattgtagggtgttggagctcatgtattgctttagtgatcaagtcaagttgacttgaggctttgaagtccaatcctgacctcaaacatgccaaaaggagcaaaacatgaaaaatgttaagtatgcatgggttgagtgattgaatatgttgcatacaccttttactatgcatttggcacttttgtttgatctctaacttggtttgtggagaaagtgacattcggggctccgttt

SEQ ID NO: 81720 - DNA, 763 bp, Zea Mays
taaatccacttaacgtcggagacgtcctgttagccaactattcttgaactagatctctagtgctgatctgttcagccaccaccctgaattctgatacagacagttggcatgctgaccctggcttcatgttgcacaaaggtctggtcattccgaagctcaaagccagcaggcacatgaccatcgtcatcagtttcccccttttcttgtcatcggccttgatataaaaccattcgctcttccagccggttggccacttggtacgatagctgaggaccagagcctttgtatctttgcgatacgcgaagttatggtaaccaaaattttcatgcagcccaactgctctggccttcgtttgatagtgcaactcatgcactcggtagaatgcttcgacatttggatccatctcttggcttcgaaggggtcatctgatgaagataaatttcaaaattcttcaacacctctcctatcatatcgttaagaggaaaccgcagtccggctctgaaaaactcttgaaaacaattacttcatcatctttcggcgttggggtcgtctcttctccggcaaatcggatcagtttttgttcagcttctccgaagtaacccagcttcgtcatcatggcacgtcggctttagacacagtagatttctcaaaatccaagtggctggtttttgatgggatcagaatgctataatcttcctcttcttcatcagcattttcttcttcagcctgctcagcttcgacagcagaagtaccttcatcaacg

SEQ ID NO: 81721 - DNA, 589 bp, Zea Mays
caaagatctaagaacttaaatgtcctttgtgctatctcggtaaactcattacctttctagcataagttgcaaatttgggttgcttagtcacatatgaattaattgacaagcttgaagcggaatagttactaatgggacaatccttgcatagatgccccttccttcggcatatgtagcaaaggcgatcttcacattttgaagatttcttttttccttgtctcttgcttgctacatggttagtaaatattttcttttctaaaactatgcctttttgttttacatagggacatgacttaaccatatgtcccttctcagagcatctaaaacattttttatcatccttgttaataagcaagccattttctttaatatagggacatgacctaatcaagtgccccttttcaaagcattccctacacttcttatttttcttagtgtgaagtgtggcttgatcattaccttggatgttaccttgtatggaggcatggttgaggcttttggtagaggtattgattttcttcttttgttccttcctcctgacattcctcaagtccttgacattttcttcgagggattttgtgcatgctac

SEQ ID NO: 81722 - DNA, 1103 bp, Zea Mays
ggaataactttgcttaagtggatgagccttgatgctataaaaaaattggagaaaaatggacagaaagtttggctgttagtagagacagaagactgaattatggccaccagtgaacttggaagaacttggatataaaattgtgaggaattgagtgagtaactgagtaagatatttataacaaatttgtagttggtgctgtggacaacaatattgatgcaggcaagtgaccgagttgttacatgaaaaagagagaacgatgctctccaaatcgcgctgtcagaacgtttgatgaagatcgccatggtacagtgacaataaagatctccggtgccatgcgctcgacgccggtgatcctccaccacaattcgcgccggcctagttgattcgttccatgggaagagtagataacgtcagggcgaggtgaaaatatccagtgcagggtgaatccggtcgctggccagaccggccgtcgtgtcccgccgtggtcaatcacgctggcatcgccggagttcgccgttatccggctaggctacgtgcctcaaagccttaccacgtcacaatagaccactttaggtagcttgttcatcgcctaagacactgccccggtaaaagccatgataacgcttgcaccagtaacttcccctttctccggccgccagcacccttccttcaaattggacgccaccaccgtggaactctataaatttctgcccccgtgagttccgctaggtatttacgcatccaacgcaccagcccttgcctcggatcatccaccagagcctcccaatttcccacttcccccaaatcagttagaacgccgccgtgagagagctcgccgtggccagacatctacgggttagttcatactcttctatgtgatattctagccttcctcatgtcttctgttactcatagacccatttgattgaactagaccgctctagattgccctgaacaccatagtttcttctcggtttttgccgtcgccgtgagcaggcgtgcttcgggccggtttagtgcaattggttgagggattagtgttgccgagggtggaattaggtgtcgagccaaggaggggtctagccgttgcgttttccaatcag

SEQ ID NO: 81723 - DNA, 658 bp, Zea Mays
tatttgctttcagtgtagtggctagataattaatttttttctcattacttcccgtttcttcctagttgtttacgtgcatctattcgatccagggcgagaagaaacttaaactcatggaccttggcggcgagtgcaaccactgatcttaaaccattagcaagtgtggaaataaaggtacacagtagtgactattctgagatttatatggacttttgatgtatttttcttttttgtttgccttcatctgtatttctatagtacagtggaaaatgatcattatcatcagaatattatagcggttactttgctaataacggtgggattgtataactcgttagcagtcaccatgtatgaatgtaatcaatacggtatattgttggcctcagctacgtctggtgcttctttgctccatgtataccttttatcgtcactaaaaactactttgtttaactccatgatggttactatagcaaacaatgtagtgcttaatttagagtggtttctgtagtgagacatgtggtactgctattacatgatgttattctgaacagggttaatttagagtggcttctccatattttagatgtatttctgtgtttaataatcaaggggatttgttcgtgcttttgtttccttagttttggtcactttctaaaaa

SEQ ID NO: 81724 - DNA, 505 bp, Zea Mays
ggtaaattgtactcttttcccttatgtgagttttcatgaaagtttctcactaaggttttgatgaggcaattcgtgcgacacaacaagcatgggctatatactctttctccaattttcccactgggtttttatggatttttgggacacatgcatctcgtggcattgggccaagggggagtgttaagaaacctttcttgggacaggaaggcccatgtggcccatatgcatgaaaccctagtttttgtctataaatagagatgagatccccatatcatgtaaccttggacaacaacaccatacactaataaagaatcagtccctctctacactcttgtctccttgtgttctactattattgagttaaaaaacccttggactacactcggtagcaaggggttcttaacagtgtgaactaaatatagaagctacatggcagtctgtaaacaaagaactcggtgacccaaggctatggagatacttggtatgtagaagaaaataggcaaga

SEQ ID NO: 81725 - DNA, 488 bp, Zea Mays
caagattaagatatttcagatgactgcaattgaccaaaggggttagaaaatcccaatctttagtatccacgacttgaagctgattgttgcctaattcaagattagttaagctgccgtggacaccaatattaggtggaattcggccatgaaatctgttcccgtggaggatgagctgttggagcacagaaatattggacagggaggatggaactggaccctcaaatttgttatagcatacactaaatgctacaatatttggaagtgtaaatccaatatctggaggtagagaacctgaaagcttgttatagccgagatttaaattctcaagagatgaaatgttaaacagtgtaggagagattaaaccttccaattgattaccttgcatagtcaatctagcaaggttaggtagcttacctaaagcttgtgggatctgtccactgaagttattccatgccaagttcaaatctgtcagatctgtcaagttcccc

SEQ ID NO: 81726 - DNA, 703 bp, Zea Mays
caggggcaaatcgatgcgggcgagatcgacagcagcggcgtcaaatctcgctttcttcacctcctagctcacacgatgcactcggctttggcacaaacagatgagaagaggggtcgcggcttcaatatacatcccagcgcaagcaacgactggcaaggattacggcggcatcacggactccaggggatgaggaattagttgagggagcactggattccccagccaatttctacgcgctgctgcaatgactcggcaagaatcatgggaggaagacaactggttctgctccctcactgatgagaggaactcgaccactccttatacccgagtggaaccccggccaggtcatggcgtcttggattcacgcggtctgcaacagattctccatggtcacaactgaatttgcgtgaaggttgttgagaattgggacacaactgtcgtggcacacaagagaaagaagaagaatctggcgaactgggcccacgcgatagagagattaagggtttggtggtgtccaggtgaccaggtgggtcgtgggtctagcgtgccggtcccacggagcagtggtggcagcgcggtgaggagttgggccaagggagtttgcgcgtgactaggagtgggccaggtaggtttttctcttttgtttttttctgttttagattcctacttcaaatttaaattcaaatcagagtttcaaattcta

SEQ ID NO: 81727 - DNA, 872 bp, Zea Mays
cttcttttttggtgtagttccccaaaacttcattgcacatagtttcgatcatttccagccattcttggcaaggctccttgaactgtttctcaaatttaaagtgataaggcaatcgaacaagttcaagttttttctctgttccctttagcttcggcatgctccagtcacttgacgttggagatgttctattggtcaggaattcttgcaccagatctctagtgctaatttgtttagccaccaccctgaattctgctacagacagttggcatgctgaccctggcttcatgttacacaggggcctggtcattccgaagtttagagttatcgggcacataaccatcgtcatcagtttctctcttttcttctcatcagctttgatataaaaccattcacctttccagcctgttggccacttggtgcgatagctgagaaccacagccttcgtatccttgcgatacacaaaattgtagcaaccaaagttttcatttaagccatctgccctggccttcgtctggtaatgcaactcatgcactcggtagaatgcttcggcaatacgcaaaattgtagcaaccaaagttttcatgtaagccgtctgccctggccttcgtctggtaatgcaactcgtgcactcggcagaatgcttcggcatctgggtccaccccttggcttcgaagggcccaaatgaagatgttgagcctaacgatggcgttaggggtcagctgatgaagatagatctcaaaatttttcaggacttctgctatcatctcgttcagaggaaatcgcaatcctgctctgaaaaaactcttgaaaaccactatttcatcatccttcggcgttggagtggtttcttctccggcaaatcggacaagttt

SEQ ID NO: 81728 - DNA, 652 bp, Zea Mays
gaagacgcggtggggtgatcttagaccaccgcaaacagaaggccaaacacgacatgtagtctgataggggttctggtagccagctaaaagaaagaaggaagggatactaatggcggcaagacgatatgctggtggctgtgtcgggctaaagggggaggaggccccgaaccaaggaggccaccaaccctttcaagaaactcgtcgaaaccccatgtccgaaccatttgcacccagtctgacatgcctacaaggtttatgtgttgcttaggaagttcctaagcaaggagacaccgcccgagaaggggcccgagccccagaaggatgaagagtcaaggagaagaggccccgtttttcccgccaaaatcgactgtctgctgatcttttggaggtacgaccactacgcttcgaaaagacactagaaatacaattgcatctaggtccaggaaatacaatttcatcttggttgttgtggataaattctccaagtttgcttacttcctggcattgtctcacccatttactgcattgtgagtagcccatctgtttctagattttgtctatcggtagcatggtttaccataagctatcatttatgactgtgatcgcattttcaccaacactttttggcaagaactattccgcctgtcaggta

SEQ ID NO: 81729 - DNA, 617 bp, Zea Mays
gtttatgatacctcagagttgtttggacaatatataccatatgtgtttacgacaccacccaacgacacgtattacccggtgattcagtaccacaaagagtcaattaagttggtgatatatggccgagatctgtacatggttggatggagaggccctcacggaaactacgagataaaatctgactaccagagtgcaaactacatgataggtgatgtcacttgtaggggcaaagaggtgctatggtagcatatctcctggacgtgatgttgggaacacaagactaggcctatatgaactaaagagggcattctgagaattattcagatttaaaggagggagtgccggaaaaagtggaagacgcgatttgccggattgtcgtcttaatcagtgaggcaactcggctgcaaggtgcttatgatatcatttgcagctcctttgaatacaatcacgtcagccgactcaacaaaggaaatattaatacattgtggatccaggattatagtcacttctgcttacaagccatgaagaacattgaccggagaaagagaggactgatccttgaaccaatccatcctcgcaagtttagggtcgacacaatggaagaaattttgagacaa

SEQ ID NO: 81730 - DNA, 425 bp, Zea Mays
agcgcaacaaatactaaaacgtccgaggttagtatcgcaaaagtctcgtagactcaggttactgctactgtggacgacaggttgatttatccaaaccccaatgactctttaagaaaatgtgctgcgaaggggtatcagtggagatgagccgttggattagatctgtacggtccacaacagatcaagggaaggttgggttggtattagatctgagccgcaggatcaagatcaatggcttggatcatacaataccaggattcattcacatacatcggattataaatctacgaccaagatcctgttgaacgaagagttacgctggacttaatctgagtcgcccgatcccgatctaaccatccacactcgtttccagggaggactaatcgcagtcgcccaatgtcgatctaacggcccgagcgtgtctt

SEQ ID NO: 81731 - DNA, 936 bp, Zea Mays
cgacaccacatatcttgcacttgtagcacggaacacctagtctacttgtatggaatctatgatccttggtatctcgtctggagcagatgcgccgatttatatcactattaacaatatatcatgttctttggcacaactttgaagcagcctccattggtttctgcagccctaaatataaactagaactcgaggcgttacgggcaccatattaggacaacgcagaatctgtgttgaaaaaagtttttagtttgaataaatctatgttaaatctgaacaaaactatttgatgcagaagttgttgtctgaaccatgaaagatgctgtcagaaccttgtgcaaacacgggtttcaggttaaacatacaaaacatcaacttctttggtaaccttgtggaaccatgtgccatacaaaacagtaggttctttagtctgaaccatagaagcttttgtgggaccttgggcatgcaagcagcatacaaaacaacaccttctatggtttcaatctcgtaccagcatagaagctgctgtatacaaaacagatttcaggtttctacaaagtagtatgcacaacatacacaacaggtttcaggttaccaaaaagcaacatacacagcatagaaaataggtttcaggttgccaaaaataccacaaacagatctcacaccagcctacacaggtttcaggttcaaatacaagcatacacatgttacagattgtcatcataggacttgtgtaaccacacatagatataattcattgaattcctaaatcacatactaagaacagctgcttctttgagtgacattgccatctcttggatattgtggcttgggaaatggttgcaaggccttgaggggatcaaaataaaactgacaaggccactgatacattgtgaacatagcatgcccccatagggccaccgatgctacacaagcttc

SEQ ID NO: 81732 - DNA, 346 bp, Zea Mays
cttctttccacttgttgatggatagcttctagatccctgatctcttgatccaactcttcgtcctgtggtgttggactaatagctttcctcttctagcttcgggtctcccttagaaggagcccatcttgattggtgtccaaaggagcaagggaagcccctggcaccgcagtcttcctcggcggcatgacaaaggtggtcgttcgagttctcttaacgaaggtggtcgttcgagttcacaggaggtgggcgccaatgttggtcacttgttttttattgatgtgaaccaagaacaaggcaacacaattgttaaacgttaaagaccttcgttcttcgaagcattatctcc

SEQ ID NO: 81733 - DNA, 626 bp, Zea Mays
gttctatctccagttcattctattagtgtttaaattgggctcaccctgtcaaatcctgtcaatttaatcttcagatgtatgaagaagctgttatactatacgctgaacttgcagaagctgccctaacaagctccttgatatcaaaggagccaccagtgattgaaccaatccgtcttcacagtgggactgaagaaaataaagaggccttgaggaagtcccgaggtgaggacgatgaagatttccaaatcacagagtatcaggcacagcgaggcaacgctgccaacatgtacaaattagggcttctgtattactatggactacgtgggctccgccgtgattatggaaaagcatttcattggttttctaaggctgttgagaaaggcgagacacgggcattggagcttctgggtgagatctatgctagaggtgctggagtggaaaggaactatactgaagcgtacaagtggttggcacttgctgccaagcagcaacattactcagcttacaatggattgggttatctatatgttaaaggctatggggtggagaagaaaaacttgacaaaagtaagtatgctgcataagaacttccgatacaagtgcatgtgtatagcggaccgtaatagc

SEQ ID NO: 81734 - DNA, 537 bp, Zea Mays
gaaggattcaaaattttgggcattttcattaatttttcaatttttggctcttcaaccttcctctcaactggctcgactgtaagtaccttcggcactatagtcggctctttagtgctctgcacagttgggacaatttcttttgcttcggcagctgaacaggtccctttgccaaattcaggtatcgtgactggttcaatgtaaagcggtcggtgagtcagaaccttcatcttcttgcccttcggctcagctgtaatggccaaagcagcaacctttcccaaagcagaaatctttctttttaccccttgccctcgcagcgggtagcaatagttagggtatacgaagccaataacatcaaataccctgttcaatcttttcttatttcgacccccgaaagctacggacaaggcattgtcctcggccttggagtatgccccaagtagctcgtcactagtagcttcaatgcacttcagccagtcatcatttggctcatcaaacttatccccaaacctgaaggtatacttcagtcggactaaatta

SEQ ID NO: 81735 - DNA, 394 bp, Zea Mays
aatatagttaatattgatttggtctgtagagaggtggtgacatgccgaagtagtcatcgcttcctctacggttaagttgtggttatgtgtgatagtgttgtttatgtggtgaatgcgtagtgaaatttatttatgtcgtgcaatatgattagaaatgtgaagaatggatagggtgtttcggaacggttagccaataggttcagtcaagcatggtagaggttgaatcgcttatcttgtagaattaatgctcgacatgttagatctcataaaatgtggtgttttatgtgacttgtgcgttatccaatttaagttgagaaaaagttaagagaagctaattaatctgctcctacccatgttttgagtgtagtgtctaaaatggtttgttaagttttat

SEQ ID NO: 81736 - DNA, 307 bp, Zea Mays
attttttgcggctatttgtggactgtaggtatataaaaatctatcctaccaaaagcaagaatgatcctaccgagtcaaccgaggctttgataccagatgatgtgcgcacgcgtacaggttacgcgggagcaattgtttgtggcccgatcttctcgaaggattttcgaaacttgataaatatcgttgcgtgacctgacgaagaggctgcgcaccgcgagatcttgcacacacgacgaacaaccgagacaatcgcccttccacgtaccgatgaagctagcccacgcaatcacgccatatagacgtgaag

SEQ ID NO: 81737 - DNA, 778 bp, Zea Mays
ttcataactgcaagctgttagtgctgtttggctgagaatccggtggtaaactacaagcctcctgactatgccgggttactgccgtaactgttgagggtactggacattcgtcttgagcagcagtcacatcatagacttgctcggcatagatatcatttgattctacttggggctcgacaacttgaaacccctgctgcgactgctgatgcacgtccacatttgagatcttaggattcagagaattatggaggtttgagataggactgggaacaggcttactaggaagtggggctattgcagtatctgaagagagcttcgatattaccttgggagatgtagcagtttccatggcgaggtcgttctgtatgtcgaatgaattggctgcatcttaggcggggctttcgtcagcgaccatctcaacaacggctccaggggacgacccatcagtgcgaagagcacctgcagagaaacctgcaccagcaattaccttgggtgcaatcagctttgttggtgatccccctctggcatggaagccaagtgcctcttgcatgccagcttcagtgccaccattcagcaagagcctgtcagcaccagccgccccctcttcgccctcgaaaggccacacagcagaaatcagcggaacaacgaaagaaacagctttagcttttaatttaggaacccaacgctttgagtgtggcatccccatctcatggcgcctgaagggggtggaagctctaaattttccattcgagctgatgcagtcagcagtcccaccccg

SEQ ID NO: 81738 - DNA, 806 bp, Zea Mays
cttttgatgatccaaatgtcgaagaagctgcgaaaaacatatatgcaatggcagctaagcagagccaaggatcatttaagccacaaagggagagagacatcctaacggctagtctcggttaccctgagcatcatggccgtgtacgaggaatctcgtctaaggaaggatggaaggaaggattcggaccacagtgggaaggtttgtacaagaaatgtgattgatacaaagaagagttgtcggattattttaagcaggagggaaagaaagagttcaaagacctgatgtctcaaatgctataaaaatcctccaccagaattgatgcagcagttggcaagtgtgatgtgtgttcaacagatgaccactccacaactacaaataattccagcagttcatccgccggcttccaccgattgtacaaccgtcctaagctctgtcgtgtcaatgggaagtaagatccgttatccagttgatgacataacaaggccagtgacgtgccacactagttataagatatggtattaacaataatcgcacaaagaaagtaggaacatgcattgcgatcccaggacgcaagtttcatggaagcgacataccagatgattattgtagggtagaagtaacgacggtcgtccaaggatctgaggatgacatgctagacatccctgggcccgaaggaatcgagacacttggacaagccataaaaaatttcatcctttggcctcgaagggatgtcgaattggttgatccaccaacgctgtcgtcgtctcatccctaaccatctccgcctcctcaaactttagtacctt

SEQ ID NO: 81739 - DNA, 591 bp, Zea Mays
gagcttaggtgcataacaaagcaatagatagggaactgtagtgtcttgtaatgtgtgtcccatccatgtacagtgcgggggtatttataagtaactgggcaggtaggagggtccccaagtaccgctatacccctggttacctgctacattccacgaatattcccccctatggggtcattacagtggtgtgaggtacaatcaaactagacatactatagaacctaccccaaaaaggggcttacaaatgggccctaaaggtggcggggtgtagcatggaccccaccgtagaacggtgtagccttcctctgtgtgttgcgcctttcactctgtgaagtcgagccttcgacctcgtcgggactattttgctaagtggaagagtccgagccggcgggggcacgttcgcgaggctacagcaagcccccctcaagcagcatggcccttcgctccatcacctcagagagtcccggtccaagacctcgatgtcggtactggtcaaagtactcttcacttcttgtacctacaccaaaaacctgtttgattgtggttggattagtcgtaccgagggggcggtcggccttcgctccaacactc

SEQ ID NO: 81740 - DNA, 939 bp, Zea Mays
ggacttttgaggacactagagtattttgtgaaatctacatccaagaaatcaatgctaataatagggcgaatggcatcatgactacctgtgattacaacaacataactaaaaagtacaagacagtaatggggttgcatcattcaaaggcttgaactgtagaataaattggttttactgaaagggttgtatgtttttggttgcaattaaatggaaacacaaaatcatagaatattgcacaagaccgacacagacttatcagttattacaatcatagtgtcacaaacttatcattttatcacacggacacagtgtcacaaactcagacaacacaagcacacgcacacaggccacactgccattccaccacacttcagtatagtactccacataggcaaccagcgtatcagcaacccggtgcttagcacttagcaacaaagaaagtcacaactcaaacaaaccacacagacacacataccacgtaaggggcgaagctaggtaggaggtcgtggatgcatatgcacttacgaaaatttgtaaaactagtaatttagactatatttttattatatatgtaccacctgtaaggtacacagtattatttttattatatatgtaccacctgcaaggtacacagtatttacaccctcctctcattagctctaggttcgccactgtgcacgccacacagtcacacacgtccactgtccggtgtccactctactgtccacacaggcacacgtcctcagtcacaggagcacactcgcacagcacatgatgagcacacgtccagatagccgcaggcggggagccgaagtgccgaacaacgacgcagataccggcaggcgagtagcccgagaccgtctgggtccggtccgatcaaccgatactagggttagagagtcactcttcactcggttgtgaacctgtgcctgttcggcc

SEQ ID NO: 81741 - DNA, 1136 bp, Zea Mays
gttatttcacaggaaattgtaatggggtctaatacaaatgaatgcaatgctaacgatgatcaatgtaatatgccgatattaacattggaacataacactgatatgcgtctgattgatagtaatgctacaaatgtggaagctagaaaggtaataatattgctatagtatatgatgaatatgtgaatatgaaaactgacttaatatctttgatttgtagaaactggagtttcatatggaaggtgtaaacttagcaagaccagataaggccaagcctaagggaagaacgatcaaaagtagtgagcaataagttcttaaattgggtgcgaaaggagctaagaagatgagcagggagtgccagaaatgtggcatagctgatggtcacaacagccgtacgtgtttaactgtggaggataatagggttcgattggctaacctatctggacgtaagcgagacagcctcctggttcaaggaacaaaagcataggtgcagcaccacagtggaatgagacatcaacgttgaaaaaacgaactgtgtatgtcggagatgatgattcatctggtagagagtagaataccataagatttatgagaaaattatattctggatgtaaatgtgattcgtatgttaaattgtcaatgcacagacaacgtcatagatatgtttacatattgtcataaacgtatgtgaaagttatcataagcatttaacagttatgtagatttatgaatgtacaacgagtttttttatagcataggacgttgtcgtatgtagcataaatgtatgttcgaatatgcataacactgtcataaattgttcagattgtgaagcttataaagcatagaacgttgtcgtatgtagcataaatgtatgtgcaaatatgcataacacggggttgtttattgcataaactggtcagactgtgaagcttataactgtacaaagagatgtttccagcatagaatggtgataattatatcataaacttgagacaaaacaagcataacacgatgttgttgacaacataaaattgtacaggaaattggcagaatcaagtgcatgaaacacacatgaagatcaaacacatagggtacaatattccagtttagacatcactgatccccaagttgtcattgac

SEQ ID NO: 81742 - DNA, 392 bp, Zea Mays
gccgagccattgcgacgtggtaaaaagggtcatagcgtggcatgaccagggaaaacggtggtgcccgcggtaatggccgtgcgaccacgtcgccggcgcaagtgggaaaaaggtagagtgactacggtggcttgtgtttatccagggcaagatcttttcacgtcgagcataatccactagcccaggacatgaatcgcgacgaccggcgacgcgaatctggacgcgcagatcgtcggcggcgagagactgaagcctgagatatttagtgcactgtacaattggaaatgcaattcagagccccctgacagcccaacttgtaacgtccagaacaccgatttctacataaaaacttgctaattcgccaatagcaaacttgcagcccttcataccag

SEQ ID NO: 81743 - DNA, 1333 bp, Zea Mays
cccaaggcttgggctatcgccatgcaaccggaatgtggaggagaggaccctacgttaacatccatggaagtgtgggagggagaacccactcggacacccttgggggctgggtcacagctcacgctacccatccgagccggatcatccccgacaacaccctcgggggctgggtaagcgtcagtaccatccttgagggccgagttctctgcagcagccacctctaaggctgaaggtccctcagtcacttccatgggagcaggacaatccaaaccagcttcccgaccctcaagaccgtgctctaaagtcgacgaggtgcgggacgctgctcgggatgaccccaacccggcattaggcacatcagcacaaacatccatcgcgccaccatctgtcggttctgataacagatcctctggaaccatgtcttcaagagtttgatcaaagttcgccagagataattcttgtagaccaatgagggcagacaaagcaggagaaggaacaccactactttccccactggctatgtagcgccgactgttctttcgaatcagagggatttcatcctcatcttcatcagcaacacggacagtacacccattggggtcagtgtcagacgggtcacacccattgggatcagcttcagtaaatttcaggcacgggcacttcctcagcaacaggagcagaaggaccggcaccctgatctaagctagacacccgacgaagacgtctcttcttctttttctccccctcagcaggaaaagatgcttgatcggctcggcgagaacgttttggacgaacattgacagacttctgagcgtccaaagctttgtcagcctcagggatgggtaccaccaccaatgattcagcaggagcggcatcagaagaatcctcagctaacatatcaagcatggcacttatctctgcatcactgggatccaaaggcacctcaaagtgaacctgccgttcatcatcaggaatttcttcaagcgaagcaaccaaagcactaacttcttcggtagagggtcgcactctaaggtccaaaccgccatcaccagcaggaagatttgacacaaaatgggtaaaggccttagaaggaggcaagttccaggccaagtatgcaactggggcgccaacatttgataccttgcctctgagtatcattttgagccggctcaccaagtccacagcagggattcttctgttggttacccgggttgagtcagctaggcctcagtacagataggccgggtatgccctgtccttcagtggctgaatattcttgaagacaaagtcagcaaccacagcctctgcagtcagacccctctctttcaacaat

SEQ ID NO: 81744 - DNA, 373 bp, Zea Mays
ccgtaccaggaatcagatctatgtagaattccacttctctttctggcggcattcctggcaactcttctgggaatacatccatgaattcttctaccactgatatgctttctgttgctagattaaacatcattggatcattggcgggtggctgagctcgacaagagactgactttccttggtggtctgtgaggaggactgtcttgtttgtgcaacttatgatacctttgtgcttggttaaccaatccattcctaagatcacatcaatcccttgggatggcaagacggttaagtctgccaagaacactaccccacttaaaagaattctgacttgggagcatttgagctggcatagaaggtctgaccctggggttcg

SEQ ID NO: 81745 - DNA, 329 bp, Zea Mays
cagagataagtgctatgctggacatgctggctgaggattcttctgattcggtccctgctggaacaatagctgttgcaactatcctagagcctgaaaaaaccttgaatgctcagaaatctgatattacccgcccaaaacgccttcgccaagccagtcattcaactgcacctgccgagggaaagaagaagaaaaagagacggcttcggcgagtgtcgtgcttggaccaggatgctggcccttctgctcctgctgctgaagaagtaccaatggaactttttactggagctgaccccaatgggtgtgaccctgctaatgctgatctcaatggg

SEQ ID NO: 81746 - DNA, 733 bp, Zea Mays
ctcaaacggggacatcttcaaactggcctggtaactgttatggtaagagaactccgcatagggtaaactcttttcccatctgccaccatgtttaagagtacaagcccttaacatatcttctagtacttgattagttctctaggtctgcccatcagtttgaggattgtaggccaagctgaaattcaacttcgtgtccaagcactcgtgcaacttctgccagaaccaagaagtgaactagcatccttggtctgacacaatcttcttaggtactccgtgtagacaaactattcgggccatatactactctgctagcttggcccccgtgtaattagtcctcacagggatgaagtgagccacatttgttagtctgtccacgatcacccaaatagaatcatacccaacagaagtgtggggtagtccaacaatgaagtccataccaatttcttcccacttctactcgggtaccttcagtgggtgaagtaatccagctggtctctggtgttcagcttttaccctctcgcaaacatcacacactgccacatgtgaagcaacatcccttttcagaccataccactaatacttttgttttagatcttggtacatcttggtactgccaggatgaatggagtaggttgattcatgtgcttccttcaatatggtttcacgtagactatcaatctcagggacacaaaccctactcatcctccatgaagtctggacctctaccttccgc

SEQ ID NO: 81747 - DNA, 1828 bp, Zea Mays
ctgccaccaaacagtaccctaaagggtcgatgcttggatctggaatctcagcactgatgaaagaatcaataaagttggatgtagactccgaagtgccatttgatacccaaaatatgatatgcgagtgaggtaggcctcgtttttggaattcaattgtgtagagcactgcatggaaagggtgttagaattcatgttagattatgtaatacgtggggaataattgtctggttttttatgtacggtcgtatgtgtgttgtgggatgagaacagccatacctgcagtgcacgatccaaaaatagatccatttcttatgtcatgcatcaaatcatttaatttcatatgataaactcgaactataacatcagatctatcgggagggttctgtccattttcaaacatgctttccaaaatttcaggccagtttgcatttcatgtaaaggtgacaaaaaaatcaggtggaccatgaactcgacagatagctatgctgtcatggtaattttggatcatatatcttcttcctcctgtatgtgacgcaggaaggatgatagttttgccaacttcctcaccactaatacaaccacgactaatcacatctgtgattccctgtatgctttccatgtgtagatttttttgattgttaataacatagttcaacctattttcatcgatgcatgctctagcttccactttagcttgacttgataataaaccgtagcatagatatggatttggttggtttttcctgtaatgaaattggtagcaataatattcttgcatgctcatgtgtcttcatgcattgttgtcatttgcacataaaccattgtataagattccaacttggaagccacgttctccaaaaggaaaaagcaatggatactgtagagccatataagctgggtgaagtgaggatattcgtttgagttctttgcttttagtttcaataataatatcacgtttgaatgtgtccaaagagaaatccccaacaatcaacatagcaagctgatccgttgttggcaaattatattgtacaggatcaccctccttagcaccaatgagtctaataataaaatcttcactttcattatcagctagacgatctcttgccatacggaatttttttgcaaatggattgtgatcatcaagcatttttatcaacccattgactataacagggtccaaaccaccatcatttctatcgttattccccaaagagttcattctattttgaatctcatttgcagtatcgtagatgtacagttgaatgaatttaggtgaggatccatctggaggtaatagagatcctatacgatgatgaacctgtccacatattttgaatagcggtggaccacgaccatcattaacagaattatctatctgagcgcccattgatgtgaaagcaaataagcagttgtattgtcttatgtttctgataaatttttttgaggctatgtcaccatctaaccttgcaagagaagatagaggttcaggcctaggtctatacggaggtatgataatcttgccacctttacaacaattgttatatacaatagatgagtctcgttgccgattacgaactctttcagcataccaaaaaatagcatggcagtgagagcactcatactcaggttttccgaggtgcgatctgtttggatatgaggctgtgtttgattttggccgatcggttcgcacaatattatttgaagagaaaaattgtgaggaattgagacaaagttagtaaccaattttgagaaggaaaatatgatgttaaaaaaatctagtacgtaacagttgtagttagtaactatttgttttttatgtttaaggaca

SEQ ID NO: 81748 - DNA, 530 bp, Zea Mays
ttgtgctttaatgcttctattgattagacttgcacttcagcagctatatttgtctttcctctgatctccatcgatatctttcttctgtcttgatacattcattgcgtatactgtatggatgtgattgcttgggaaaatctattgaaaattcctcgacgtccccccaatgggtgtaaccaagggacgacttggtacgccgagcgtttagcaaactgcccttgagtagtaacttgacgtgaccgcggggtgtaatcatatcgtccaagtagttgacctcagtccaaatggtgtcgtgttacgtgaaacggtgtctgccgcctgacttgtttccaattgaattgcttattgaatacttgcgaccgtttggtgaccgtggtaggagatgagcggtttcctcccgcctctataaatagactgcctgccttgctggtgtcttcacacatctcctggccatttgttgcttattctcccacttttctcttctcttccaatcaaccatgggcaagaacaagaagggtggaagttcgtcg

SEQ ID NO: 81749 - DNA, 898 bp, Zea Mays
taaaaacagtcttttgaactcaacaagctagcccaaaaaaagaggcagaaaactgattacctggccgagcgaaagcgccgacgaggacccatacgccgcggcgctgttccggacgatcatcggcggcatgtgcctcgccgggatcatcatttctccctctcagaacctctcgaaccctaattcctgccgcctcagtagcttctttccatttgttcactggcacatgcgtagtatctatctcccgcctcacggacaaagaacaggcggcgccaatcctattcctatatggagatgtataccttgcctgccaagtaacaacacgaccaacaacagatctagcgatcgacaaggtagcccagacaaccttcgctgcgagctgacgactggcagtgagatctagcagaagagctacatatgttcgtgtgcctatgcaaaaatagaactccgatcgatctctggctgcatgcagctctcaaggcgtgcgtgcagcaaaaactttgcaagctcagaagggtagctagcaggaggtggcgagataagccgggaggagactagcttgagaagctataggcggccatggaaggggaggcgaggaggaggaggaagaggaggagaggaaaggggaacgggcggaggtggaagagaatgtggagaagggaggaaggagttattgcgaacgagttgaggtggtgcaatccacatttatgagagggcgtatcgtaattgctagccaggagagagagagagagagcgagcgagcgagcgagagagagcgagacgggtgcataatttccatttttttattatttctatttctacaacattggtatagtactacttggagaaacatgcacaatgtcaatacgtcatatgtgttttgtatttatcggacgtcgtc

SEQ ID NO: 81750 - DNA, 782 bp, Zea Mays
cagcccccgagcctttgcacggggcaagaggtcggttgaggggtgtttcgacttttggttcatacgccccttcgtcgcctctccatgaggaggaagggggaatgcgtcatgctaccctcgatgggcgacaagcatgatgtttctgttgagctcttatcgggtaatctgagcgggggtccatgctcctttcgataagagtcggctagtggtccggagacacaccccaaaagatacctacgggtgattcgcctggtcccaaacccatttgatggggttcgagggctcgatgcctccctacgtgggacaccatcacgaatcgctcccgggggtctcggatatgtcttaaggtaccttgtgtcgcaacccgagctagggccacgtacgggcgtacccacagtcatccctgactctggctctggggcggttatggagcccttccgagaggccaaccttcgaacccctgatcagtgatgggatgggagccctggcatcttgaggcggcttttccgaaccctgctgagggcctaaccttcgaacctctgaacaatattcctccttgcctttttccctcccgagtgaggcgcccgaggtagaagacgccttcttctggttaactgctgaggggataaaggggaagggaggcagagggtggagggtgtaccttttgagtcagaaagcgaaacggcgcttggcgtgttttttctcggagggggcacagtcatttaatgcgacaggacgtcctgtcggtcagccaaccatttgcggcggcatgcacgcgggat

SEQ ID NO: 81751 - DNA, 586 bp, Zea Mays
ctagaagaccttcaacttccaccatatcagctgaccacaacgggtctaggtacgccatgtgccccaggacctccacgcccccgatgggtccgagcgcactatgcatctgggctgtcaacaccgcaggctgtcaaggagttgatggtgtaaagtaatggttgtgcatagatgatgagacatgcatgatcgtgcccacatcccgcgccgtactggttgtcaggcccagacatcctgggtgtggcaatagtgcatcattgtggcacacacatggacgacgaccaccacatctggagagtacttcctccatccacgtgtaagagtggcgtttgaccatccacgacatgtgggcgaccttgccacaaaacttagatggacaattactccttcaatgagaggaggggtctggctaccaaaccgacccacatatcctgtaacaccctctcttttggacacgagcctagggtttaattggtcatcacaaaacttaatttcatctaagcttatctctcatattaaaagattcttatgctcatcttatccaatggagtctcactttcttattcttgttttaaagatggcatgtagc

SEQ ID NO: 81752 - DNA, 621 bp, Zea Mays
atcaagttcatcacagtgtgctgtactggagctttgccacattaccacgctgccagacaaagacactcagctcgttcaagaattaccggaacagctgcaacaactccttgcgcgtttctcccatgtgtttgctctgccgcaagggcttccacctgccagagactgtgatcaccacattcctcttgtgccaggtgtcagaccagtacaaatccgaccataccgttacgccccagccctcaaaacagaaatagaaaaacaggtagctgagatgctccaatctggtattattgaacgcagcaaaagtgaattttccagctcggtgatcctagtgaggaagaaagacgacacatatcggttctgcgtcgattataggcaccttaatgctatcacggcaaagacaaaatttccagttcccatcatcgatgaatttctggatgaactgcatggagcagcgtggttctccaccttagacctccgagctgggttccaccaaattcgactagccccggaggaccaacacaagtcagcgttccaaacccatcatggccactttgagttcaaggtgatggcatttggtctctccggagctccagctacctttcaaggcgctatgaaccgaac

SEQ ID NO: 81753 - DNA, 545 bp, Zea Mays
gagatggagaaggcgagccagttctgtcagggcctgaaaccttctatcaggcatgccctgggagcctttccgttggtggacttccgtactatagtggagcaggcactgggcgtggagatgcaacaccagtatacaatggagtcgtagaagtctttgggtgttgatcagcctcgtggccaggacacgaggaggggcaacactggaggtccagcccacaagaggggcaagtctcagcatcagcgccaccatccctaccatggcaaatcttctgactcgggtacttcgggaggaagtactcagaggtttcgggctgttcctaagcccgagctggggctggtgtgtttccgttgtggtgatgcgcatcgccgtgcagagtgccagtggagtggcaggtgttctatctgcagttaggaccacaaggatgtggtgtgtaggaggaatcccaatgggaagctcagatgggagccagtgacttcctcctcttcttagggcactgtcaacatgatgtcaagtgctgagcagcaattttcagttccacttcctcc

SEQ ID NO: 81754 - DNA, 541 bp, Zea Mays
ctaacggcactctagccgctctctcgctgcagttccgtgccgcggaggctcacaacacgtttgaagaaatgcgcaggagccatggggtcatcgtcccagtggtgatgggtcatgattcttgcggtaacctggctcactcaggctcttcatcggtgacgctcgtgcgatcccggcaatttgcaacggccgtggcctcgtcactgtcgccgcctgtcagtcgaagcactcctcgccgccacgcgcgcggaggggagcccgcgcggatatttgggttaaatagcacctcatacggcgggtttatcaagatagcggaagctccatcgcgaggtcgaggcagatggggtgcgccgaggggttgatgccttgaggggctgattgattgattcagattgaagttgtgggaatcaacgatgggtagagtgcgatggatgtctagtccatggacagtgtgatagtccggatgagtaaaggtgggcgccagagtcctgtggaggaaacattgaacatgtgttgagggatgaaggtttgttctcactgtttc

SEQ ID NO: 81755 - DNA, 694 bp, Zea Mays
aagttttttccattgcagaaaattgtccccactgcatcttcctcgtcggtgaacttggttgctatgtggagcaggtcgacagttgttcttggtctccctcgcccaagcttgtggacgagtgcctcgttggtagtgtcgtaggtgaaggcgcttgctacgtcagcgtctgtggcatcgaggagttcgtttctcttttgagaaaacctctagatgtaatctcgaatgacttctccactcttttaggtgcaccttatgaggtctcaagagcttcctgggagcttgtaggtgccttggatgttttcgacgaaggccttccagaggtcgacccaatcgtggatggtaccgccagttggtagatgcttgagccagcccctcagaacctccacaagatggttggagaggaattggatgatgaggtggtcgtctttgattcccaccatgcgacatgcgagacgataatcttccaaccatacgccagggtctgaggacctgtcgtatttgttaatcttccaatcatatgcctagcccaattcccaacactaatcctgtgccacctactagagaggaggagcaagacggcgttatcggtgacctgaggatagaggacaggggcaactcaatttgcgtaaatctacaggaggggatggagcaatggcggatggagcatcggcgagtagcctcccatgtctctgca

SEQ ID NO: 81756 - DNA, 347 bp, Zea Mays
aatttctcttgcaaaactattttacaatatgcttctaactccgatggtcaataccaggaagggaggactatcaggcaacaacaaacagaaatgaatcctccaaatactccaccggctcgaaccgatccagtgcttgccgcccaattgatggtactacaacaaatggcagaagtggttaacaaaatgcaaaatcagataagacaagaacgccaagaaatacgtcaggaccggccggagatgcgacaagcaataaggcaagcacagttggaaggacaacaacaacaacaacgcccactacatccaccaccaccaccagctccaccaaactatatatatactactatttg

SEQ ID NO: 81757 - DNA, 952 bp, Zea Mays
ggctttaagggctcaaaaagaagccgaggacgaaagctaccagattgcacttgggaaccttcggacagaggtcatcacattgaggaatgaagccctcgaaaaagataagattatgctctccttagtagataaactaaaagtcagtgaagccaggcttaatgcacaagccgaaactaataaagccaaagttgacgatctaaggaaaaaacttgctgaaatgaatgaaaattttgaagttgcgaaggcaaagcaagagataaatgaatggacgagctcaaggctagaaaagaacgttgaggagcttcgtgattccagggaaaggcgttatgaaaaatccttggactgcgcaaataagctaaaggatagctttgcgaaggtgggggcatattcttcagaacaaaaatttattcgcggcgatcccgaaggggttatccaatggataggtgaagaagccaaagctgtcgatgagatctttatcaatcgcagagacttttgtgctttttccggtgcccgagggattgagacaatcttaaaaaaggctaggtgtgaacatgtcaaggccgtggcacatccaaaatccattctctctgctgacaatactaaggacccttcagttgaagcttctaccctgggtggcaaattctactccgatgtgtggatgaagggcggatgtgagatggctgacgaagccattaaaaagaatgaaaaagaatctcacgacacccgtgaggaagctaagcaagctgaagaaactgccgaacgcgccatgattataggtacttttatttttaaacgttttgccttgttgttcgtttctacctttagaactcaccatcatatatttattacagccggcctctctccaccaccggagccatacaaaccagaagctgatccagttatgaaagaagctttggatgttatgcaaattgctaacgaagttgttgacgaa

SEQ ID NO: 81758 - DNA, 554 bp, Zea Mays
atgtttggcacatagaatagagctgatctgcttttttatttggttgaagtcatatatgtgttcaccatatttctttcttataaggctaccatttttccactttcaatcacttttgatttttttatgcaacattgaaatgtctctttgtacaaaatgaaattgggtatgtgacctttcatttgaatctgatatagtgttagatttattctatttgatctttcaaatatgcatttaaaaacttaaggaatcctgaaattctctaaaacaggctttgtttgtttcagcttttctctggtttctagccgccagaaggtgctctagactgatgtctaacttttcagcccgttttttttagaatcgctttagtgaaaaccatccaaattaatgtgaacacagaatcgatcaagtcgttacgacagtaggaatctattactttctagctcctaaaccccatcgatccattcatcttattacacacataatccacacaatatttagactatgttgagcaccatttgaggcactgtacaccggtcagacggtccaaccctaag

SEQ ID NO: 81759 - DNA, 785 bp, Zea Mays
agggaaggttatggtggtgcgggttgtgagggtgttgctgtggggggtatgcgctatggtggggttcggaaaagcctgggattggtgatggggggagtgtgggaagggtatccgattgatgggtatcggacacagagatgcccttcatggtgcatatcttcaggtgcgcccgtgagaacttcttagggcagttgaagcagggggctttgtgacggcgaatcatctcgtcgggcatcagcctggtcacgcgcttcccagcaagtggtcaggctatagtcggagcgtcaggggcagctgtcgtggtgggaagttctggaggggatggtgtagtcgtggtaatgctggtgtgacgcggtcgatgaatgatgtgcagatggtgctagtgccctagcagccacggtgttgtggtggatgtaggtgagccagggttgcttcctcctccagtttggcgagtgcgtcaagctcgacgtcggtcttcagtggttcgcccagacctacggtgaagatggagatctgttgctgctcggagaggtcatcgcagcgggtgaggcgctggtagaacacgtccatgtactcaatgagggacccctgaaggcagaggttacacaactcgctgaatgggttgttgcgtgtcgggggcgaagcttgcgtcggcgagcttcgtgaagcgtgtccaggacggggttccctggttctgctcctcctccatgtaggaggcgatcaggccttctctgtgtccgatgtatgtgctgcccggatgaactgcttgcagtggtggagccagg

SEQ ID NO: 81760 - DNA, 1382 bp, Zea Mays
gttcggttactgtttttctgagtcactgacgatttgcatataggtcccttaagttctaattcttcacagtggtacgcccccgatgtcgcacggcggaggtccgatcaccggcgaggttagaccagccggattacgcaaggactggtgctctagagcggcagacaccaaatcagaccccctccgagcatttcccctaagttaattgcacgattggtgacccattccgctctgcccacgaggacagcgaaggttatggacacatgctcgtgttcccggcgatgggtggtgttccagttcaattgaaggggttgtagagcttgaggagggtctagggacactagaacaagcaacagagagactggaacaaacctgagttgggctggtcgcggttgagctgttcttcgcggtggcggagaccagtttgggggaaacaagaaattcttgagctctggcaaacgatcgtggctaattagcggtggctggatacttcatgccctacagagcttgcggaggcttcaatttatagggatagcgaacggtggtgatcaattcggccgagccgtgctggcggccggagatgaagaagaacactggcgcaacaaatacgtgttcaacgccgtggcagctattccggtgagcaacggggagctaaagcgaatcgtggcggtgcggtggcaaggctcggacacgcggcgcaaggccgtgcgacggcggttcaccggcgagcttatctgcgcaagccacaaggcacatggggtacggcggtgagtcaatggaattatcctccggcgaagggttactatctagcaagcttatctgatcactggcagtgtaaatctcaacggcggtggcgcgaatcatggcggggaacggtcgtcgacggtgagagtcctgcgctggcgatgtaatctgatcctggtactgtaccatgggatatgttcagtcagatgaacctgacagccaaacttggagctaaactttctctcaattctcaatgacaactcacaccaagctctgcagcaaaattgtagagctacaaaccagcaatacttcgactatagggattgaactcatttgagcactggatcaaggttgaattcaaacccaaagatggctctgttacaatgaaagtctgaatttcagagtggaaccagcctgatagccagactttaggcttgattttctccaatttcttcttaacaactatgcttacactcttaagcaaagttgttctcctttgtttggtctacaactttgatgtggtgacctagggcaaaaaccctagaatttgaaagatacaaaggctcaaagttgaagcaatcacactgatttcagacttaggctatatagaggtcaagtggtactttttgcaaatagcccca

SEQ ID NO: 81761 - DNA, 806 bp, Zea Mays
tagctagcagttcaagctcgcgacctagaacagaaggaaccagatctacggaggtttgcatgtgatgtactgtggccgcgcgacatgtaacgttaacagattttgacatgagctgttggagcattgtttttttctggatttattatttttaagaagatctagatgtacatgttttgggagttatatttttgggaattgttgggcctttagccatatttacgtgataggtataatgatgcgtagcgtgcccgttctttctacagctggttggttatgtgccatgatggcatgatcagatagatcattgtaataagcatccgcgcgcatcaccatcacagcagcggcaggagggtagtagccgaaaggaaaaccaccaacagcgacggcgacggcgagaggtcaaaggaattcaggcgacaggatgaagggctggtttcaccaaccgcccgcctagctccttccggtgcgcatatgcaccacaccaatgtggacaaacgatgcatcgctcaggcgtcgtcgtctctcgcccgtcggccgtcgccaagtcgccatgctagcagagcgatcgagcgaggagaggcacgctaacgatggatcgtcgtccacagatgtgaagcggaggtgggaccgtgggagacgatcgacggcgacctcgctctcgtctccttcgtcggctgggcctacagggcaatctcggccacctgctacacacgcaatttttcttagaaaagggaatatataattacatccgctgcatgtaaaatgtatgaagctgtccaacaaacaacgattaaaaaagatactcc

SEQ ID NO: 81762 - DNA, 501 bp, Zea Mays
gcctacctcagaccgaaaggactaaccaagtatgggaagatatgttgagagcttgtgcccttcaacatggtggaagttgggacaaaagtctaccttatgctgagttctcatataataatagttaacaggccagtctgaagatgtcaccgttcgagactctgtatggcaggaaatgcaggattcctctatattggatcagactagaggaagacagctctttggacctgaacttattcaagaggcagaagaacaaattcgtataattcgagagaatttgagggtatctcagaccagacaaaagagctacgctgatgatagaagaagaccactggaatttgaggaaagaaatcatgtgtacctcaaggtgtcaccactccggggtatgaggagattcaaagtcaaaggaaagttgtcccctcgctttattggacccttcttaatcttaaagcgagtgggtgaggttgcatatcgattggagctaccggatcatcttgcggatgt

SEQ ID NO: 81763 - DNA, 490 bp, Zea Mays
gcggggatgagtaggcgggttgttgataataattcgcgctgcataccctatctcggaaggtttgatataatatccagacggtccagtggtatgctcggatggtccgtgtgtagggttggatagttcggactcaagacgggacggtctggccgtgcgtagggtgtagatttttcccacgcatgtggtggagaccgtggttgttcggtataggaattcatcggcattccataaagcggctaggactgtgcctatttgcagccgatgaatcctacgtagtgcctctaatatgaaaattgtgcgacaggaaatcggggataatagatttttcaaatacgcgtgtcgtccttttgaaatcattctgcatatcccctattaactactttacttgcacccgttgttcatctacataaaccctcagagattggacattgtctgtttcacttacattgcgtgcaggcgcaacgggtcaaagagatgccaggtcacactc

SEQ ID NO: 81764 - DNA, 636 bp, Zea Mays
ggtgatggccgagctattattgtcgatatttacgcatttgaaatagagtccgagtgatgacgaaaccatgtcagcgtcggaataactgttgaccacgtcggcgctcttagatgtgacagccgagtgacctgtgacaacgccagcgttttttagagataaccgccgagcgactgaggacatcgtcggcgctttagagatagctgccgagcgactaaagacatcgtcggcgctttagagatagccgccgagcgacttaagacatcgtcggcgctttagagatagccgccgagcgactggagacatcgtcggccctttagagataaatgccgagcgactggtgataacgttggtgttttaaaaatagccgccgagcgattgaagatatcgtcggcgctttagagataaatgtcgagcgactggtgataacgtcagcgtcttagatataacagccgagttaaaacgggccgtgtcggccactttgaggataatagccgagtgacgatgtggcacaccggggttttagaagtagccgccgggtgacgatgtggcacgccggtgttttagaagtaactgtcgggtgctgactgggcgcttttggagacggtatctgactcgggaatatcccgcatatactgc

SEQ ID NO: 81765 - DNA, 600 bp, Zea Mays
acaaaacatgatatatctaaagttgaacgatcaagggcacagaagaatgttgacgtgcttcgtgcgactaaagaaaaatgctacgatatagctatggaatgcgctaaaaatttgaacaacaacttttccaaagttggagcattttcttcagagcagaaattcgtccgcggtgaccccaatggagttatctaatggattaaaggcgaggccaaagcctttgaagagattcttagtgatagaagggatttttgcacctttgctagtgctcgtggggtcgtgtctattttggaaaaggccggctgtgatcatgccaaggctgtagttcagccagattttgccttctgagccaacgatgttcgaaaccctttggccgaagctactacactaggtccgaagttttattccaaagtatggctgaagggtggccgagaaatagttgttgaagccattagaaaaaataagaaagagtctcatgacgccttagaagaggctaaaagagctgaagaagctgctgaacatgccagacttataggtatatcctttatagcttagcttcgtaaatttttgtagcttgggaactaacagatatttgtattttaa

SEQ ID NO: 81766 - DNA, 1314 bp, Zea Mays
cacatcgaacacagaatgagatactagagcaccaaggagccaaagctgaatatgtgtggtagcctatctatatcccatcctcagtagcagggtgcgcctcatgagctcatataagaactttgtcgctggggtgaagtcagcaatagaacaccgagacctgtctatgaacgaaggtctgaacagagcggcgacgtgagcggtgtcgagagctactctactatgaggacaaggaggagggtctgaggtaccatagcacatgctgtgaagcctcatcgtcgactcaaggaatccaaataactcctggatctgagttgtatgcagagtgacgtcctcatgctcgaacaggaacctcctccactgatggtcagggtcgatccatactgtggcatagaacactcggacccactcctcaacatatcagccaccaaaagtcattaaagagtacaacccttgtaaatatgtgatgtgaccctctgactctgcatcggccgctgtacagaaagaagagagatccagatgctggtgagcccgcagagctatctgagctaacaactgagccctgaagaaggactcttgggtcctggtgttgaagagtggtgcaactgccggatcccgctgagcaggtagccaagagtccactagctcatgcctgaaccgacgcaccctgatagatgtggctctttgaaggtcaagcaggggcaggtccacagcaagaggatgcaccttagtcttgtcacgctccctgaagcaaggaggaggagtaggtggagcgaaagcgggagcgagagtagtggaagctggtgtggtggaggtagtgggtgcaacaggtgtggcggaaggctcaagagtggctgaagctgacatagtggaagatggagtggagactgggtctgagggagcggatcgagcaggggtggagcaagcccaagacgagaggcaacagacttggaaggcaatctggtcggaggtgatcctcaactaacctccctgctctacctgatctgctgctgcggcggcaactgctgcacggatggctttgtccaaccatctctttttcttgcccactgatgctcaaggtagactgccttgcccttgtcctttcggaaggggcgaggagggtcctggtcatctcctccccttgacggtgtgacattcttcatcagcaccatcctgcactgactactaacacgctgcatgataatgagaaaaggtaagcgagagcagtagagaagtaggtaagtaaatatatagaatggaatagctacctgggtatgtctcgagagagaagaaccaggcaggataggagtcgcgcag

SEQ ID NO: 81767 - DNA, 605 bp, Zea Mays
gcgcgagcctacccaagcatatgccctcacttaattggactggtccaaccctaattgatgcttgttcatggccacaacgacggtagagctccggtaagcgcgttccgaacaaccaaacacggtagtgtttaaattggagctagggcgagtttcactgattcaccagagggcgggtacacgcgtgaatttgaacgaagcgagtatgggaaagtgggtcgacgggagcgcgctctcagacgtgttctgcggcggcgaggtaaggttctcgatgtcctgtcgcggtaatattcaatcggttgggccgacaagctatgttaacattcaaggacgctagaacatggcacagaggggaaggaacgaacctgggaatggttggtcatggctgggtgcctcacgacggcgtaaatgacgacgatgggggaaaactggaatttgtgagctctggtgggtaattggaagcgaggaagggtgcgctaggcgcataaccagaaggcgtatcagggagagcctttaatttatagtaactacatgagtgcttcgcaaatttgggatgagaagatctcacgaccgaaagggaggtgagtcaccggagggcaactctcgtg

SEQ ID NO: 81768 - DNA, 1401 bp, Zea Mays
tgaatttcaacattatgccttcttataaaaggatcaaaccatgaggagaactcttcttaaaagttactgtcaccaaggactatatcctctttcatcctcaccatccaccaagaaatatttccatacaacaaaactacttccatccctaccatccatcaaacaatcttccatacaataaaccaagtttcgccaggtggcatagtagtttaggtcatgctttggtttttgtaattgaaaaatcattggtagattcaatattctatgtttggttgagttccatcaataatcagcatgtgatacttgctaagagcaaaaaaacacgccttataatgaatctaatagtgtgtcttatcatccgtttgagtttgccttctctaatgtttgatgttcttccccaacttagttactggatacaaatattatttgtcatttattaatgattatagtaaattcacatggatctgtcttctaaagtatgagccccaagtctttcagatatttcaagtactctaagacctaattgagcattaatttgttagaaaaattcttaccatacatattgattggggagtcaaatattagaaacacaaattctatattgtgctagctagcatatcaaatcatatctcatgtccctacgctcaccaacaaaatggctaagccggacgcaagcatcacaacatacttgaagttagccttgatgccattggtcatgcatccatacgaaggaccctcgtttggttctagtaatagagtgacaacttaggtggactaatacatgtttatattgatatacatagtatttaatccacaagtacactagtgtgaacaagtctaaccatggaagtgaaaatgacttgaaaagctcgactagtgcaatgaagaagcaaatgcatgagatatgataacttaggtagactaatacatgtttatgttgagatacacaagatttagtccataggtacattagtgtgagaaattctagccatggaagtggaaatggcttgagactcttccgtgagggctaatcacgttggcgattttcaaggagaaaaaatggggaaaggacttctttgacacaaacacaataatacatatttcatagcattatttcatactttttacctaacatagtaacatatttgcaagctttaacccacatacaatacacacatatgtagaggaggtaatactaccaaatcagattgtgaaacatatctaagtggttaaattacttgggcaagcaacataaatccaaaactaagctagtaacttgtacttgtgtgagatactagcttgtaaaatttacatctttgtatggttattgtcggtaccctgaaactagggtaccccttactacagtatgaagacacggtacccacgcgactatctctagtcgcg

SEQ ID NO: 81769 - DNA, 368 bp, Zea Mays
gaagtatatccattggattttaaacgtggattgtctctgagttgtactatagattgtccagaagtgcacaaattcctcaagaagtgcaacgatagctagttggtctatctcctctatgaagaggggtggtcgaccatttggaaaaagagcaccttggggatgtgttgcctaaagtgttgtgtttagctttgggcctgtactcacatatgatcgctagagatcacatcagaggaagtgagaatgattcctagtatattgcattgaacaattgcatcatggggcagtaggtggtcgagttgcaagctagtggtgcttattactcttagaagctgacacctcctagacgacttgaggttgtggctccatag

SEQ ID NO: 81770 - DNA, 600 bp, Zea Mays
tttggaaattacgaggatttcaaatgcggtgggaggtccaatctggtggaatcgacgggcaccgatcgagctcgattggggatttcggggctgggtcatcagagtgggcccaacggcttgatcttgatctgaggtggggcggaggcgagagaaaagttaagcgattcgggggagggagttcgtacctaggggcagggcgtcagagcttccttgtgtgcacggaggggtccaggaggaggtagcagggcatcgttgtgtgcacatcaacggtgcaggccgcggagaagcaaacaacacagagcatgaaaatggtacaatacgtaactacatatgttgtagtgtatgcccctgtattagtctatctttctcatgcatctattaaaagaatagttacacacttaaagaaaatggcacatctaactcacaatatccaacaattaaccctaatccacttcgtacgtaaatgacaggaaaaaaacaaaatgatgatttaggtctgttgtgtggcacattaatgatcgggtcgcatgtggatccattttaatatatatatcaagttgtacagataagttttacattttatatcaaatataccgccaa

SEQ ID NO: 81771 - DNA, 1263 bp, Zea Mays
cgagtctgacgggttgcatgggcctgagtctgcttctttctcaggtcggcccactccgccagtagttctgacccggcccatgaagggatggccttacaaggtaactgacccaaggccccgcgcaaggccttcttgccttctagtggacccgagggatatctgtcccccacatcggcctccccactaatccactgaataactccattagggtcactgcggatgaagttttgctcggaggagaaggctccaactttagaaaactgttttttagatttttagcgcactccatggacatctcatagcattttcctcgcccgcgccaagctcatcgatattcttttgcgctcttgatctttcgatttcgcatatctcatgcttcaccacttcaacttcaaacttttctgttgcttcagccaccttcctctttagttcttgtacttcggctttgtgagcttatgctgagcagacatcttggcttcactagacttcagcctctcgaccagagatagcaagatcttatctttagcgagagcttcatttctcaaagttataacctccgatcgaagattactaagtaccatttgaaagctctcgtcttcggcatccttttgggccttcaaagctttactcagtattagaccctgcaaaataaaacaagtgagcaaacaacaaatgtaagaactcctgaaaaatagttcggaaagtactaaaacatgaagccaaaatttgcaaaccttcaagctattggaagtaaggctgtccgcaagttgatcctttgacatagcagataaaccgagctcgagcttcgaaaatcccatgttgttcatcatttcgcggcagacgttgatttccttattgtcgggaaggcaatagaggaagtcatcttcgtcatcccctccgtataccaaggatcctcgggggtactttagatccctggcataatgttctacttcgacaatttgctctgaagatagctgctttcccgaagcatgtcgaataatgaagtctagctctttatgaggtacttcgggagcaggagatttagatttctcaggagcactcttgttcaccagtgctatcggtgcagtttccgaaggtgcagcttcggcaggagcgttggccgcgctcgtagcaacagcttctcttgcatcctcaatttgttcgctaggagcttcggcagaggaaggagctgatgtctttacggattccaaaacagcatctagcacgctaaccgttctcctttttcttgaagtcaccatggaa

SEQ ID NO: 81772 - DNA, 899 bp, Zea Mays
gccagcacccgttgctctctgtcccacggcgattccctctctcccaccggcgttctccgaccaccggcggccaccatctccgacggtgctccggctacctcgggcccctctccttccctcctcggtgagctgccctgttctcctccctctcggttctgtgagcagaggctttcctatcctccccgtttgcaccaattccaaattcttcaaattcttgtcaaatccaatgaatccagttggtggaatgtgttcaattgtccctattatgtatccctgcgggttcttggctccttcgggagggttttcactcctcatatggccatttctctaaaaccctaatatctcgcccaccacgtgttcggtaaaatgcccaaaccagccaaaaatgctccaattgaacccaaatttttcaggcaccttcacaacacttccaataacctacttgccaaatttcacgccaatccgagattctaggcttaaatttcaccaaatttcccgttttgagcgatcgtttccgagccgagtgcccaaattcctttttcttcgcctaaattcaaaccaagcacacacttcactcatattcacctatataaacctattcataaagtttcggctcaattccatgtcgttttgtgcctcaattcgaattccaaacctcctatgacactatttatcgtttgacctctcgattgtctcatcttgtgtctcctgtgccatatttctcttgtgtatgtatctattcacatttcatatacttatgactatgtgactaatacgtgctcacctcttctgtcatttcagtgaccttgattgcccgtgtgccgtctcccgtcctgcctggatcgtcacctctcgtgtgagctttccaggtagtcatctcatcctttgctaaaatctct

SEQ ID NO: 81773 - DNA, 573 bp, Zea Mays
ttccttgctcggggatgagcacgcactctctgtcagctagattgcagtctaatgaatgcaacgagtaagatatatgcatgatatgataagtgctttagtaattagacttgatggtgaacgattcacttaaattagatagggtttactctcgctactaaagattcttgtggtatatttagtaatttagatcacactcagttaaatgaagtggtaagtctatctcggtgttccactgaattctttttaagccttagtgagaatttaataggatttctagttgagcttattggagtgaggtttatttttcctttcttcttatttcctttatgcttttaagaaaggtttgaactacaagttatatcaataaatttccaaaaattctaaaaaacattcagtagctttttactggtgtataatcctctgtctcaaaatttgaggtttaaaaagtaagtagttctttctggataaaattattaaatattagggcagaaggggtggtttgaactacaactaccatttaacagaaggttattccttaaaacatatttttgctggcatctagatgttacaaca

SEQ ID NO: 81774 - DNA, 316 bp, Zea Mays
ataatcaaaatgtttgaggattaggctttggtcaatttgattgtgccttcctgagacaatcggtgctgccctcttttggcataggtttctggacctttgcagtcctaaaaaaattcaacctagcagtaatgcagtatatattctagcagttgtaccacaacaatttatccatggatcataagcaactgcactaatcaaactgagaccaagtcaccaagaacgatattgtctggtagctattgagactaaggatgatattaattggtagctgatgaagatataccataaacttatgggttcaatgaacataaatttt

SEQ ID NO: 81775 - DNA, 1003 bp, Zea Mays
aatattgtagctggatcttagagctaaaactttgctaaagggtgatgatcatgttactgcacaaaatcgggagtaaacagccctgcaaatcgctctgtcaggtgactgaatgggctttcccatggtaaagtaacctgaaacagatcagatcaagcgctcagctcactgccgatgatctccgccgcgattcgtgtcgccggcgtctcgattcgtgctcggggtaagtggataacgtcttggggtagaaagatcatcgccgttgttgagctggacaccaatccggctagccgccgtacctcccccttgttcaccgattgctcgggtaggatctcaccgccgttgatccctcactgccgtccgccgcatgtccaaacactttaccatgtcgcagctaactgtgctacgcacgtccgatgatcgccggaggagcagccacgttaatagccacgttgcgcggccaccagtgactcacccagttcatacctatcgcaatccaccgctcaaattcgctgtactcgtgatcgatctctataaattaaagccaccataagctccgcaagatcatcacacacccagccactaagaatcactagcaatcgttcgttagagagcttgaattttggttttcccctaaccaagtttccgccaccgcgaagaacacctcgccgtggccagccacttccaggtttgttcatgccctctgctaccttgtttcagcattagtgtgcttccttgatgctcatccatccacccaattgagctagaccgccaccaatcaccgggaacgcattgttctttgggttatccgcactgtcaccatggccagaggcaattaggtagccattcatgcaattgacttaggggaaacactggttagggcgtgaattcggtttcgaccgaagtagggcactagtctttgccccgtttggccggtccaggagctcgctggagctctgccgcgccgctcaccgtcggggacctcggtctgcgaagggatagaacc

SEQ ID NO: 81776 - DNA, 488 bp, Zea Mays
aaatatgataaaaacatacaaccatacagaatttgtccagcaaatgaaaactgatacatgtattaaggcatacagcgagcaatataaaattgtctcgcagggactgaggggaggtggtgggcgcagggtgcagccgcgcagtgactgaggagaggtggctggtgcgcagccggtagcagggactgtggtggcggactggagggcgcagcacaacacctggtagcagcggcggtaggagccggagtatcagactgcagcgggagtctgggagaggagagatagagtgggcgacgacggtaggagtggaagaagagagatggagagggtctggagcaagagcgactgagcgagggcttcgctggaagcctagaacggtggaacctaggcttgtggcctgttggacgggagtacatgatattttaacggatatttgggtatttgggtatggatactgatttttcatacccgttttaaaaatatccacggat

SEQ ID NO: 81777 - DNA, 586 bp, Zea Mays
cgagcccgaggccaggctctcatttcacccagccattatgccagtctctctgtgcctggggatttcttcaccccacctgaccgccggcgacctccggctactattcttcggcgaggtgttcctacctgtgctcatcttcccctcttcctcactggtgagctcccccactgcttccctctctctgtttctatccagtgaagctcagttcctcccacgtcttgaaaatcactcaaattcactccaaatctatgaatccaagtacacgtgtgtgtgccttgtgccctattatgttcccctacaggtttagagctccctagagagggtttcatccactaaaatagtcatttgaccctcaattcaaaaccccacacgccacgtgttcggtgaaatgcccaaaccagtcaaaattgctcaaatggaccccaactttttccaacacactcgtgccactaccagtacctcacacgttaattttcacgcctatctgatatcccagacacctgttattccaccacttcccatttatagcaatcctttttgagtcgagtgccaaaaattcgttttctccgccaaacctcaaaccaag

SEQ ID NO: 81778 - DNA, 500 bp, Zea Mays
gttcatcagctgatagtctccttttgtcccctttctgcccatatgctatagcttgctatctgatattagtttcctgtattgggaagcacagcggtgttataaattattggtccaaaaaaatatttcgttcatttgtcaaatggttatggtggtccctgttggctgtaggcacctacagtgaaagtgaaactggaatggcccatccacccactactactgtttgtctgcatatggatttatgttctgcctgctactttggatctgagagtcaggaaacagtgatgattgatgaactggtgcctcatctaggcatatgaacttcgtatgagctgggccattcaaaaccagatgattgtgaatatttgatgcttacacttacacccttacattttttcatttctcgtgcaaaacgttagtggttttcattttttagcagttggccaagaaatctgttcacatgatttcacttgaagttaacatttattctcggtgttggtgct

SEQ ID NO: 81779 - DNA, 618 bp, Zea Mays
tagttgcatcttcttcttcatccacattgatcaaaggaagagcccttgaattcattctaagataagcaagcatatcctttgacaccaattccggaactcttgcacatttagttgtgtcaccaaatccaccagcaaggtgctgtttgaaccgctttattcctacagggactatcttctgatagaaaatacattgcacaaaatatttctttgtgggatctggccaccatccataattccatccagggtcttgtgatcgggccttccttttagaatcaacagcttgtgcagccagagcagggggcagtgctgcaatagccttttcagtgagagaggcagcatctggagcaaccgatgaagcagtaccaccagcaccagtactaccaccagcagatgctatcgtggctaggatagcagccacatcaccaccaccagtgctctcttctctaatgtatgagtctcccatgatcacctcaacagctgctgcacgttcacggcgccaaccccctctacacattcagaaataacaaaagaaattgaaggaagatgagaggaattcaagagttccacatcgaaacacagtagacaacagatcaatgcatcaatgcatgtaccgacgga

SEQ ID NO: 81780 - DNA, 329 bp, Zea Mays
caggggagcagatatcctctcatcccagccagttcctttccagaaaacggtgagaaatccagattaccgtggcaggcgctactcgtgccgtcgtgcgctactcgtctcgtccctaaccgccgtccgtggaccgtggctaatggtgctcgctcgatcgcttccgtccctcgcgctcttttgggaacatctgtgttcgtcgttgtctactggatgcgcgtaacgccccacacgacggacaggcaacggcgagaactttgcgcaaggatatatgccgatggctctacaccggcggtgtatgggcgcagccggaccaaaagcgcacaaaattc

SEQ ID NO: 81781 - DNA, 962 bp, Zea Mays
tgaggattcttctgactccatccctgctgagaccatagctgttgcaactatccccgagcctaaaaaaccttgaatgctcaaaaatctgatggtgctcgcccaaagcgccttcgtccggccagtcatccaactgctcctgctgaggggaagaagaagaaaaagaggaggcttcggcgagtgtcatgtttgaatcaggatgctggcccttctgttcctgctactgaagaagtaccagtggaactttttactggggctggccccaatgggtgtgaccttgatgatgctgatcccaatgggtgtgaccctgctgatgctgaacccaatgggtgtgatccggccagagctgaccccaatgggtgtgttgttcgtattattgacaaggatgaggaagaagaggaggaaatccccttaattcggaaaaacagtcggcgctacctagtcagtggggagtgtagtgatattccttctccagctttgtctgctctcgttggtctgcaagagttgtccatagcaaattttgatcaggctctcgaggatatggttcctgaagatctgttgtccgagccaacagatggtggtatgatggacgtttgctctgacattccggatgtggggttagagttatcccgagcagcgtctcatgcctcgtcgaccttggagtgcggtcttcggagtcaagaaactggtctaggttgctccattctcatggaggtggctgagaatcctttagccttagaggtggctgctgcagagaaaccggtccccaaggatggcgccagcagttacccagcccctaagggtgttgtcggtaatgatccggctcgggtgggcagcgcgagctacaacccagcccccgagggtgctgccggtggtgatccggctcagatgggcagtgcgggctgcgacccagcccccgagggtgttcgagcgggctccacttctcatacctccatggatgtcca

SEQ ID NO: 81782 - DNA, 356 bp, Zea Mays
gaagatgtagcttgccttttgcgattgcctgctgtttggggaagaaggggtgtcggtttttttgaaaaaagaacaacacttagcgtggggagcgtgggtcgtggtagaccttatttgcaaaaagaccacaacaccgttggatactggacggatgggttggatgcattttgcgcatgagagcgctgccgttctttgcgtacaagatatgctgccgctgccataggccataggtgggcaggtttaatcctggttacctagtggttggtgatatgggtgaaccgtgagcgtaaatctagcatggccatgaggctgtgagggcatgtacgaccctattaattgagggtttcttgagaaat

SEQ ID NO: 81783 - DNA, 778 bp, Zea Mays
gaatggccccttgacgaaccaccctctgccgatccctagaatctgagaaaattaccaagtactgctccgggtgatgcttcaatacctgcagcctctccttgtgaatgcctaactggtcccagagagccgcctccacatggggcggagaggtgtcatggctattgccattaagctgacacaccgcagcccgccccaccagagagtcgcgactaagcttgatgtcgccggttgctgaaactgcacaggtctccaggtctggacgagccctcgggtccccagggtaagccatgggcggcgaccaccctgtgagcgcgcgaaggtaggaggtggtgttgagcttgcttgactgccgtgggaggggaggcactggccttggctgaaaggagcgtgaagaattgtgaggagaggatggccttttaagcttggggcacagacgagctcgatgcccaaccccaaagcaacgccagcatcttgttggattggtgcacaccgccactctatggtcttgggcaaaacaattaaggcacctcccatctgcatgcctgatgaatttccttctgctctcctccctgtcgaccgactggagctggcctgaatactgatttgatgacctatgcctacgccaccaatagggagggcggactacctcccagccatgagttaaatcctcgcgagcctgggcatcggagagatcttgttgctgctggatttgaatcgctggagaagatctcgctgacagcttggttggtgagcttgaatgctcttcacttgcctttcc

SEQ ID NO: 81784 - DNA, 1284 bp, Zea Mays
gttgtcacgaccatcacatcaggttgctgccagggacgccactagttgcagttcgaccctacagatacccccaattgttgaaaggcgagatcgagcgccagtgtgaagacatgttgcagcaaggcatcattcgggagtgcacatcggcctactcttccgcagcgttacttgtgaagaaagttgatgaatcctggcatttctgcattgactatcgggccctcaataccaaaatagtcaaggacaagtttcccatcctggtggtcaacgaactcttggatgagttacacggtgcctgtttcttcacaaagttggacctccacagtggatatcaccaagtatgcatgcaccagatgatattgaaaagacagtgttctgcactcatcgaggccacttcgagtttctagtcatgcccttcggcctcaccaacgcatcgtccacattttaggccctcatgaatgatgtcctgaaacccttcatccggaagtttgtcctggtcttcttcgatgatattttggtattcagctcttcctgggtagcccacttacataatgccagggaagtatttacagcactccgagcaaacaagttatcagtcaaacagtccaagtgttcgtttggaaaaacattagtcgcttacttgggccatgttatctcatcttagggcatttccatggattcagataaggtgacagcagtagaagtttggccgcgcccctcggtctatttgggtgcttcgaggtttcttaggtctcactggctattaccgcaagtttatagcggattatgggaccatagctgcacccctcatggctcttctcaagcgtgaggcattccgttggtctgaaagggcagaggaggcatttcttcaactcaagcaagccattatatcaacaccactgttacagatgtcggatttttctaaacagtttatagtggactgtgatgcattagggactaattttggagtagtccttcatcaaggagatggggccattgcatatttcagccctattgtagcaccacatcatcagaaattaccagtgtatgagcgggaattgattggtttagtcaaagcagtgaggaattggagaccatatttatggggaagaacttttctggtacggccagatcactatagccttaaattcctcctagatcaacgaatgtctacaataccacaacatacatgggtcagcatattgtttggatatgatctgttagtggagtataggccaggcaaattgaatagtgtagcagatgccttgtctcgacgcgacgaagaca

SEQ ID NO: 81785 - DNA, 586 bp, Zea Mays
cctagactaagcacactaatacagagaagactggggttaaacatgcaaaagtcaaccagacacagacaactcccgcgaggacggcgggttggtttcaaagaagttgagggactcgtttgcaaagttacctggccgaagtggtataactagatatcggccgttggatcaacagcccacggcacagattacaccggactcatcaatgaaccggtacgatgcacgggaccctcagatcctgatcctacggtcagggtttaacgagtcacagatctaatccggaccgagggatcagagatccacggcacagatctgttgtgacgaaggggtacgtcgggttcccatcaggaccgatcaaacgacatccaacggtgacggtaggatccaaggcgaaacgttttcttctttgatcacgaccatccaccaagtgatcaacgtgccctgcttcatcttcttccctggtggcagagcaccgcggcgcccttggcccgtgcggcggctcctcccatctggcgacgaaatccgcgcgcaccccggcgagctactcacgatggccccacgggttccctaacggcgccatcgagttctc

SEQ ID NO: 81786 - DNA, 1091 bp, Zea Mays
tgactgcgaagaatgatgctatcgagttagtccagaagtgtgaggcatgccaattcctatcaaaacaacagcacttacccgcacaacagatgcagactattcctgtgacttggtcgtttgcatgctggtggctggacatgatcggtcctttcaagaaagcttaaggagggtatactcacatattggttgccatcgacaaatttacgaagtggatagagtacaagccaatcgcttccttgccctcggcaaaggcagtggagttcattcaggagataatgtttaggtttggaatacctaacaacatcatcactgacctagggtctaacttcaccagctcggagttctttgatttctgcgagcaaaggagcattcagatcaagtacgcaccagtggcacacccaagagctaatgggcaggtggaaagagccaacgggatgatactggatgcacttagaaagaaggtgttcgataaaagcgagaagcttgcagggaagtggatcagggaactaccatatgtggtctggagcctgcgaacccaaccaagctgagctctgcatggaaacacaccattcttcatggtgtatgggtcggaggcagttctactagttgatctgatctttggggcgcccaggttaacctttgaaagcatagccgaagcagaagcaaccaggctagaggacatcgatttgctggaagaggaacggttaaacatggtaattcagtcggccagataccagcaaaccttgaggcgctaccacaacaaagatgtgcgacattgatccttcgcagtgggagattcaatcctcgccgagtactaacaggggagggacgacataaactgtcaccaccatgggaacgaccgttcgttgttgcagaggtcgcaaggccgggatcctatcggctcactcagatggacggcacctaagtgaggaattcatggaatattgagcacctcatgatattctacccctagcaatacctcaaaagtctcaggggcgagttgtactctgtaagcagaaggtttcatcatcaataaagctttcatcttccaaaggcattcaagttcttgattgacaactgactcatattag

SEQ ID NO: 81787 - DNA, 723 bp, Zea Mays
caattctcggtgaaatccttttatcaagccatgataagaacactggttccaaattcaaacaaaaatataaggaaactaagagcaccgctgaaaataaagattttcttatggtatttacgaaggggtgtgattctcaccaaggataatcttgcaaagtgaaactagcatggaaacaaaaccttcagtttttgtctccaggaggagacaattagacatatgttctttgattatcattttgctcgagcagtttggagtatagtcaaagtggcccttaatcttgacgtacctcatagcgtcaatcacatgtttggaggttagctagttaatgtggataaaactctaaatctttggcacttttgggggctagagctctatgttgtgccatatggtttaacagaaatgacattgtttttgaagaatcaaaatatttctcttgtgcaagttatcttctctactgtccattggttacataagtggactgggttgcagaaacaagactcgcaggctatggttgcagcagctttgcaatagttaatgcttgtggccaaggagtgttttgtccaagcacatgaatggcggtctaaccttaaaattgatagtcactagaactgagctaccaaagtttgttttcccttggctattggatgtctttgtagtttaagattgttagcctttagagctaagtttgttagcgccttagagttgtgcggtgcttctttttta

SEQ ID NO: 81788 - DNA, 549 bp, Zea Mays
ttctttataaagtatatttccctaaagtaaaataaaaatagaattgtcaaactagatccctcacctacgacgagagttcaaaccgaagcagaaatttgttgctactacctccgtgatacccgctgtgatccaccctaaacccccctctctatgcataaataataaacccaagcactcctagatcataaaccaaagctccttgaccataacacaaacatagaaggagagaggcggagatccgccatagccgcagggaaccagcggggccaaaagggcaccagaccattgttggggctttggagggcatcaagggacttcatcatgactcgtccctcgtgtatgtggtcctcccgatgaagaagagaaacttgggaattaagccagaatttctcaccggagtatagggattccgccaaacgtgccatgcaccatggatggagatcatcacgacacgaatagtcactgagttcaccaccacatgtcgttcgccttcgttcccacggcgtgtagcatcagtctactataggacatctcgttctcgggctcggg

SEQ ID NO: 81789 - DNA, 580 bp, Zea Mays
acagcccgcagtcctcgacggcgaacggcgatgaaccgagctccggcaaacctgtaccggccaagataagcaatggtcgatgctctaacttggttgtcacctaattcaacacctaataatcgtttcccctcactcaattgcaaaatccgagccctaaatcgccctgtccacggagatagtgcgaactacggatgaacagaagtgttcccggcgatctagcgcagtctagcttaattgaatgggtcgaggagcattagtggtatgtaagagtgctgaaacaagagaacagagggcaagatcggacctgaagtgcactggccacggtgagagcttgttcacggtggtggaaaactaatttgggggaactgagcaattcgggggctctggtgagtaattggaggcacgagtgggtgtgttgagtgcacaattacatagtggagtcgagggtgtgctcaatttatagggcccttgagcggtggcccgtgaatttgcgattgtgcggtggcgatcggagagaaggggatgcactggcgcaagcgattagtggctttcaccgtggcgagctcaccggcgatcaccg

SEQ ID NO: 81790 - DNA, 583 bp, Zea Mays
tggaggtactttgatcggttctgtttgtcctcctgaagaacaaaaaacaaaaatggttttgtagcattcacttggaaacataaaaaagtgcatcattatcaggcgtttttttgtgacagcaaaggttacactaaattcaccccaattttacgaatttctgcttgtaaaggccccccttgtttacagctctgcttatcatcattgtgtttgtctatctcagcaagccaccctttattccaggtaatattggtagaagctgctccacttgaaactgcttgcaattctattttgcaaaacctttccaaggcctcttaccgtttgccattctgaaggatctactggtaggattattttcaagctatttggcacggaacgcacaatgcctaggaaccttcgtgatgatgtatgaccattttcttattttagcaagacacattgcagatgcagccttgttttgccctgcattctatgcctttcttaagattatgcaccctagctctctacatagtgtttttcagtcctcaacatgtacttagcagtggtaacacatcatgatccaaatgtttcttcataatggagtagt

SEQ ID NO: 81791 - DNA, 543 bp, Zea Mays
ctcgtagctagataaagaagggccgccgctccttcctccgtccgcgacgtcttcggagagctcattgcaattcaccactagcgggttaaaagtttgggaagagagaaagagagagggtgagcacagaaagctgagtgtgcggttaggatctccaacgttgaggctggggcgggacccgatgcttccccgtgcagcgtggaagtcatccgtggcttcgccaagtcagagggccggtacctcaccatcggcgagcaagggaacaccgtcgcaccaacaccatccgtgggcagccctacttgtgcttctagcaccggtatggacgcgacctggtaactcttcatcgtatttgttttgcacaagttctatccgtgctccaaaccacgatctcgggtgactggtccgtcgctcgccggctttgcaccctcctgcaggtacaggcagccgtcgttcgggcgacggtgggaggaataagagtccagggccgtcgattttgtgataaacagccaccattagatgaagggttgtgatggtgggagccatggg

SEQ ID NO: 81792 - DNA, 369 bp, Zea Mays
gagaggtctagaaatggaggactcgagcagatggcacaccggcccagtccggtggtgcatcaaactagtcggatccaacggctatctgacacatggtaggttgggtggtgcaccgaactgggccgatgtcacgcgggagggtaggtttgaagcaggtttcgctgattatggttgaccgttggaggtctaatggtgtagcgaaccaggcatgtacatccacggaaagcagattttcagcaatttgctcaacgactctttgaggagatttgggctataaatacccctaaagagcctctactcgacaccaagaattacaagagttgttccttcatccccgtatgcttgtgtatcacctctaagacatcccga

SEQ ID NO: 81793 - DNA, 748 bp, Zea Mays
ggaaaggtcacctaagtatttcgctcttgttcgagcgatctccacgaattcggtagagacactactagagaaagactattttaaataaaccgaaccccaaaactaaataagaccaaattagttgctagccgattcagttccctattctagaatccgagaaaaataatatcgtatcctaacagcattttgatccaatctgtttgtatcctgtctagatctgaatccctaaacacggatatgtatgtattctttttagaagaaaaagaaagaaaagaaaaagtgggaaaatagaaaattgtttttctcaaatatttccaccgcatagggcatcttttcctatcctctgcgtacgtacgttcagcttccttttttccatttgatgcgctggctctctggaactctctcactcgcccagcttctagcttctgcacccgtcggcctcatcttgtccaggttgctagcatgcacacccttcctctctcactgcctttctcatacagacgtccaggccataattcatcataggccataattcatcatctacctcacgtttcactccctggtgtccatctccttactccttgtcgttcagctttgccaggagccaccgagccggtcctacgccatcgccatcgtggatgttgcctcagccttcagctgccctcgtgtgcccctcctctatatgcttttgctcatcaacatcggcatacacgtcaggctgctcgcctccctatgtctctcatcgttc

SEQ ID NO: 81794 - DNA, 377 bp, Zea Mays
aaacaataaggtctgaagtgaggatcttttttacagaattcaaaatgcagtctgtacagctttttaatatgaacagaggctcaaggtaagttagatgccactcagctggacttgataaagccataagccaaggacaaggaggacgctctggtcacagatcccttgaatgggggaaattttaggtatgtttcttgttaaaagaaagcaatgtgcctgcagccttctatataggccagccctaacaatctttactaattagcatagaagcttatcgtcatgcccacgccacctgggtaattggggccattgtttccttctgcgtgagaaggtgcaacccacaatggtattccacaagacttgtaactcttcaaaattca

SEQ ID NO: 81795 - DNA, 449 bp, Zea Mays
ccggtgcgaaaccaggaatcccaataactttcccgcagagacaccaaagacacacttttccgggttcagcttcgtgcgtgttgctcgcagcttgtcgaagaccagggttaagtcttccactagggttgaccctctctttgtcttgaccacgatgtcatcaacgtatacctctaccttgtccctaatcaggtcaccaaaggtcttactcattgcccgtacgaatgttggcaaggcatttttcagaccgtaaggcattacaacataacagtaaagaccatccaccgttacaaaagcggtatgcttcctatcttgcctagacatctgaatctgatggaaaccagagtaagcatctaggaaggtcagcaggtcgcacccggaggtagaatccacgatttgatctattcgcggaagtggatatggatccttgggacaggctttgttgaggttgg

SEQ ID NO: 81796 - DNA, 693 bp, Zea Mays
ctgccttgtgggcaggagattgattggctgattgggaacctaatttcctgccttgtggagaggctaggcacccacctcctcctctctatttagccagcggctgcgccccctcctagagttgggttttcttttatagttttagcaatcgtgcaaacttcttgtactgcagttgtgctcaacggccacaagtggacagcctagtgaaccgtaattcgtgagtgattgatattcagttttatttacatcttgttcttgcttgtttcttcgattgctcataggaatagaactttgtgttcagcatttttccaccagcaaggtcaataaccatttggagttggttctacgattgctaaggtgccacgatctgttcgttcgtagtcggatcgcgagagtcacctcctccaccaaatcgaaattatccacctcactgaaagatcgagcactccaattctatcaacttggaggctgaagcaatcaaggatgcagcaaacgtggcagtaggtatgttcccagtcgaatcccatccagcaaaattactatttgatactggtcccatgcattcttttgtttctacatcatgggtagaagcacataacatcctcgtagaaccaatgattccacctctaagggttaattcagttgggcgaaagttcagtcagataagatgtactcgaatctaaggattgaaataag

SEQ ID NO: 81797 - DNA, 456 bp, Zea Mays
ctgcttcattcaaaggaagggtggctagatccatccacagggttggttcgaatcttgtactcagtttatctccgctgaagttttgattcgattttgttctcacgttcttccattcgttctctctttggatttgtggaagatttatcgagtccttgtgttgtgtgtgctgttggggattgttaggtggtgagataaactctctggatcaatgcatatgccctatcggtacagtttatgttcgtgatccgagttgatctcagtttaagttcgtttatgaaaacacccaacgaaaccccaaccttctcaggaaatcagatctgtgcacggagttttgtcttgttctaggtgaaacttcatgaatcatcttatttccctctacgccagcttcctatgaagtttgtactgattttgaccatttttgcccgagcggcactaccgctactcggcattcccgac

SEQ ID NO: 81798 - DNA, 757 bp, Zea Mays
ctgcaccaaaatacaagtgtgtgttagtaccgaagctaaaacaatttacgaagctaagtcatgtaagatttacctataagtctagcgcgttcagcagctttttcagtttttctggcctcttccaaggcgtcataaatttctttctctttctttctaatagtttcatcaactatctctcgaccacccttcagtcatacttcggaataaaattttccacctagtgcagtggactcggccgaagggtttctaatatcgtcggatgagagcgaaaattctggctgaaccacagccttggcatgttcgcagccaaccttttcaaggaccgacatggccccatgagcaccagcgaaggcacacaaatctcctctgtcactgagaatctcttcaaaagctttggcttcactgttaatccatcagataaccctgtcaggatcaccgcggatgaagttctgctctgaggaaaatgcaccaattttagaaaagctattcttcaaattcttagcacattttgtagcattcctctttagcttcacgaagcacttcaacatttttctgtaccctcaatcgttctatatcagatatctcacgttttgttagctccacattgaaattttcaatcacttcgtcaagtttcttttctaattcttatacttcagatctatgcagttctgcttgagtatacagcctagcttcgctagattttagcctttcgaccaaacagagcagaatcttattcttttcaagagcttcgtttctt

SEQ ID NO: 81799 - DNA, 965 bp, Zea Mays
ttgctgctggtcatgtccttcctgccttccttctctaggtgcccctggaggccctcaaagcttggtatggggcatcccgaaggatcaggataaaaggacagtcggggtcattgctacagtgtcagttctccatgatcgtgggtcacgctggcgggtgtgatcgagaattacctctgccgggggtggctcctctcatggcccggcggctaccgctattcaggatgactgtcgaagcacttgactaaagccatctataaccccctagcgacgcggagaagccatctataaccccctccttggtctataaaaggagggaccaacctcgatagagacacgaggacacaaggataaagagaaccacagacacgccgcatagagatgtgggatcctcccctctccccccttcttgtaacccctactacaagcaaccaggtgctggtagcgcaagcaatcgaagactagagtagggacattctgctcgaacatgtataatccttgcgtccactaagcacaccatccgagcctaaaacgcgtatacacaaatttactcgtcactgctagtttgaaacattgataggggtgaatagatgaaacctaaaatttatcacttaagaacaaaacttgttcccgatattaaggtcagggcaaggtataagtcaatcggagtgagggtaagttcaacttgcaatatgttgctcttatgtatgtgagaaattaagtgtcagagcaacaatatatgattgagatgaagatcaatgtcagataacatagggaggaaaggaggaaacaaaacaacacaagaacacgacggtttgtttaccggagttcggtttcacaataaaacctacgtctctgttgaggggcccctaaggactgggtctctttcaaccctttcctcactcaagtgatcacaaagatcaaacttgagtcccttcgcttttctcaatcgagtgatcagagtctcc

SEQ ID NO: 81800 - DNA, 901 bp, Zea Mays
tgcagtgggagacttggtccttcgccgaattctaatgggggaagggcgacacaagctgtcaccactatgggaaggacagttcatcgtatcagaggtcacacggtcgggatcatattggcttactcagatggacggcacagaaatgggaaactcgtggaacatagaacaccttagaaaattctacccttagcaaggcctcaaaactcttgaaggaatattgtactttgtaatttgaagacttcatcatcaataaagctttcgttttccaaagacgttcagattcttggctcacagctgacttcgattgggcttgacttgaaatcggcacgcttacttgacttagggtgaccactataccctgctaacggagcaatcggcttaagtcggcgacgaattaagtcggtgcgacacgctcacgcttacttgacttagggtgaccactataccctgctaacggagcaatcgacttaagtcgacaatgacttaagttggtgcgacatgctgacgcttacttaacatagggtgaccactataccctgctaacggagaaatcggcttaagtcggcgacgacttaagtcggtacgacatgctcaagcttacttgacttagggtgaccactataccctgctaacggagcaatcggcttaattcggcaacgacttaagtcggtgcgacatactcacgcttacttgacttagggtgaccactataccctactaaccgggcaatcggcttaagtcggcgacgacttaagtcgatacaacatgctcacgcttacttgacttagggtgaccactataccctgctaacggagcaatcagcttaagtcagcaacgacttaagtcggtgcgacgtactcacacttacttcacttagggtgaccactatgccctaccagcg

SEQ ID NO: 81801 - DNA, 548 bp, Zea Mays
ttctgcttgtcaaggatgacttaggggtgattcaatggcggtactttgacaaccactccacctctgatagcataagacacccgtcttctcactgatggagtcagtctcaaatcgatcttcagcagccttcatgcatccaaccaagtcttccaccgccagtgtcttcagatccagtaacatctcaatcgagaccacgatctaggagtagtgcttcgggagcatgcgtaacatcttcttcacaacatgtgtcattgacatttccctgagcccacgcctccaccagcacattggtatgtagtgtgaagtcatctacaagctcgccatccttggaggagatattctcgaactcctgcaacaggcgttgggcatgggcttcctttacgtgaccaaccccacacatgttttttaccacctcccacacctctttaactgtcttcttactccccaatgtcacccacatctcccttggcacagaacgcaagagagcgcccaatgcttgtcgatcatgagcgcgcttcatgctagcgccaccgggctcgatgatctcc

SEQ ID NO: 81802 - DNA, 862 bp, Zea Mays
tgcaatccttatcaaaataagtatgagtcacaacttcaatcattttcatgatatagggtgcatgcacacaaatttgatggggtccaggaagcatgaacaatatcttcccaaataagatcaaagacattaatcttatccttcttgttgggcttcatgaagaagagaagcactttgctctcgccaagtaaattcatttgatttccccctttagggaggagggtcaatctgaacagagaattcaggtacttgtagtacatgtgcatattggtggtggtccaaaactcctcatcatttcaaatgtgcaactcttcttgctcctctcgccttgtaggcaataatcatgcacgtaaattttatcacgactgatgccagtattagaaaatccaagaatgtgagcgaatatgcgatatctcaccttgtgctaatgaccttcaataaagaaatacataatagggtgaaaatagccattagcttcctctataggtgtacatttgggccgggcctgatgggctagctagcccaaagcacaaaaaaagcatgacccaggcacagcatgacccgaaataatttagtgtcagaccgagtttgggccgaggtcgcggcccatgggcgggcacgagcacgacctgtttaaagacagacacgaaatggcccatatagaggcacaaaaaggcccatatattcattaaaatcacacttcattccacactttcatgtacttgataaagaacacaaagctagagatgatgctagttagatgttttttgtagctttgaattagagtatgtgatataattttacttttgttatgaacatagataatgaactgaacttacgaactttgtaaatagctgattataca

SEQ ID NO: 81803 - DNA, 781 bp, Zea Mays
ggaaaactcagccaaggaaagacacttgtcccaatccttcccatagtgtagtgcacatgctcgcaacatgtcttccaaaatctgatttaccctttctgtctggccatctgtttgaggatggtatgctgagcttcgtatgacatgggtcccgagtgattcctgcaattgctcccaaaatcgtgccacaaatggtgctcctctgtccgagactatagtccttggtatcccatgcagacgaactatttggtcaatgtagatctccgcatacttctctgtcctgtgggtggtgtgcactgataagaaatgagcagtcttcgtcaatctgtccacaataacccaaatagaatcatggtgcctggatgtattgggtaatcccactataaagtccatgcaaatgtcctcccatttccaagatggtatgggaaggggttgcaagggacctgctgccttcaagtgactagcttttatcctctagcaagtatcacactcggatatgtatttggcaatttccctcttcattctggtccaccaatataaagttctgagatcatggtacatcttgttgctacccgggtgcatggagaatttggaaaggtgagcttcatccagtatcttctttctgagctctgggtccttgggaacaaccaatcggtctccaaaccataaaattcccttgctgtcctaacggaagcacttgtatttctctgccttttgcttgaccatttccttaatcatttgaacacccttatcctcaatctgtgccctcactatttgctcctga

SEQ ID NO: 81804 - DNA, 312 bp, Zea Mays
gtcaaatttataaagccctcatagcgcatgcaagagttattagggtgcacccattgatctcatcaattttgttagagtcaagtgagagtttgtgtttattactcttggtgaccagcatcacctagatggtttagtggcgctcgatgtgtagtgattgtctatagaggttgcatgtgatccaactcaggaagtgtatatggttgtgagcggttccaccatgctagagtgccaaagaacaagcttgtagtgagcacttggtccttatgcagatcaagggtgtgtgacacccttgtgtgggtgctccaatgagga

SEQ ID NO: 81805 - DNA, 476 bp, Zea Mays
cttggccggatataatctttctctaacagctcatcaatctgcttcttaagctcaaccaactctggtccggatgttcggtaagctctcttaaagatgggggcggtgccaggaagaagctctatagcaaactcaactttccgctctggtggcatacctggtatgtcctttggaaacacatatgggaacttagacacaaccctgatactcttaattgggtctgcttcactgcctttgacagccatctgataacaacttcctttcttcggctcaggcgggactaactcggtcaccacttcctctcctagcggggacaccaacttgattgtcctcttatcacaactgataactgcgtgatacttatctagccaattcatccctaggatgacatctattccttgagtacccattactatgagattagcgggaaacactatcccccttatttccacacttacgttcaaacaaatgctatcagc

SEQ ID NO: 81806 - DNA, 309 bp, Zea Mays
tcttattataatctaatcgcaaccgtggcatacagatccaacggctgatgcgtatccgtaccccttcggccacgctagtttgctaaagagcccccgcagtttatgcaaaataacccgccgtcctgcagaatagttctgtgtcttggaaaaacttgcaccgaggcccccgagttactatgttttcatgcgcccagtccagataccttaggatatttataattaaattagaaaatgaatttttggtataaaagtaatgccaggaacttgtataactcaaatttaattcatatgaagtccaaattagtccat

SEQ ID NO: 81807 - DNA, 280 bp, Zea Mays
tctcaatctgctagagcacatatcccctatacattttaattcagttttctcaatccgctatatacatgattttaagggaaagagggaaacaaaacactgtgcatgtatgcactttcaactgaatttttggcttgctgtatggtatatgactagctcactgtaaggagacagcagcagtcctgaatatattgctgggtcacttgattttgtacagtcagtagatgagaattggcaagtaagagagtgcggccttgctgaccttttctattcggtactgtca

SEQ ID NO: 81808 - DNA, 554 bp, Zea Mays
atgcatttctccgggttcagtttggtgcgggttgcccgcagcttgtcgaagaccagggttagatcttctactacagtcgacccccttctagtcttgaccacgatgtcatcgacgtaaacttccaccttgtcccggatcaggtccccaaaggtcttactcatcgcccgaacaaatgttggcagggcatttttcagaccataaggcatcacaacataacagtacaacccatctaccgttacaaaagcagtgtgcttcctatcttccctagacatccggatttgatgaaaaccggagtaggcatctaggaaagacaaaaagtcacaccctgaggtagagtccacgatctgatctatacgtggaagtgggtacgggtccttggggcatgccttattcaggctggtgtagtcgatgcacatccgaagtttcccgtttgcttttggcacgatgactgggttggtcagccacacggggtggtgaacatcttcaatgaagccagcgtgcaacagtttttgaacctcctcacggatgaagtcatgtcgttccacggactgtct

SEQ ID NO: 81809 - DNA, 370 bp, Zea Mays
gtggtggcaagtatgcatactgatatggcacgcgtgggtatgggggtggaggtgtccgtgaaggtacattgggtcttgaatagatattgtgatgtgctaactcctccgattggtgagatgacctagttggtcgtacctgtcgtcgttcttgggtaggtgagcgaggtcgctttgctggccggtcacttgggagggccttctttttcacatatttagatactaattgatcaaaggtcatgcttgctttgaccagttgaccgtatgccttaaacgtgtttgtcttccatgaacctatttctggttgtcgagatgtgaaggtacgtggtcatcattgctcgtgggtgatgccggaccgtctgcctaacctacc

SEQ ID NO: 81810 - DNA, 533 bp, Zea Mays
accgtcctcagtatcagaaactggacaatccggtcagcaatgcagatagtctgaattcatcaggccacggaccgtccaccgcccctgcgcggaccgtccgcgacatgcagtaaagtcgggcagagacagcagacttgttatttctgctctttgcaactcctctctcgctctccactcgccaaaaaggtctcctttgtcgattgtgcgcggacggataagagaagttacgcacggacagtccgacagcttgtggaaaagttcaaccaacatgtcgtcatcacggtatttcataatcttatggatttcatcaaatctcttcaattttgggattattcggatttcctctctgatctagaattgagcaatagttttacaaatctgattggtgggactgttagtgctactcgctatgaatgttatgcaaaaatttgaacgtgtttggatggatattctctgcggaatcatcatttcaacgattgaggcgactagggttctagagagtcgcccctgcccggtcgcggaccgtccgcctg

SEQ ID NO: 81811 - DNA, 579 bp, Zea Mays
tagaactgcagcccggccacacagtcgagttcgggacctcgaggatatttttgggcctcgtgctggagatgcagcggctaggttattttgggaatggcgtcgggcgggctccaggggctgaagatgtccctgagccggagggtgaattggttgtttttaagctattttcgctgctggtcttcgcctgccggcacattggtttgtagtcgaggttcttcggagattcaaagtgcaaattcaccagttgactccaaatgctagggcgacgctcgcgaagtatgtctgggctattttctcatatggcaggcagccatctgtagaggtcttcgcgaagaattactgtctgcactggtagaaaaggaaaataggtgataagattgctcagtttggatcatgcactttcaccgaggactaggaagaccttggctaaagttatcgagattgtcccctatgctagaaatgagtgggaaattggtgggaattttggttttatgtggctccaggggatgtcgaagggttgccgagtttgcccctgccatcctgtgctcgcattgctatgtggcatttccacattttgag

SEQ ID NO: 81812 - DNA, 307 bp, Zea Mays
ggacgaacaaaaatcccaacggtaaggatcaaaggcatggaaaactcagcgtaaaacagaaggaggatcagacacttaccagggacacatacccacggtcgggacgcatcgcgggctggcaaagggcgccggcatccggcctccctaccgtatttgttacccgcttgaggaggtcgtaggtggagagggaggtcgaggacatccgcgagtcctccgaatcgacccccggcctcatctccgcgagccgcaaccgccgctcggccaaagggagcacccttcgacgatggatagcggcgatgacccccgc

SEQ ID NO: 81813 - DNA, 607 bp, Zea Mays
tccgccgctgaaccgcatagatgcgtgggcagcgttctgtgcatcgccatcaccggtaagaccttgacccctggactcaccccaacccccgctatgcgtagcaccgttgagatccaagtttgttgtgcgggtcgcgctatctaggcaccgcagcaatggcgctgccgtggtccgctcgggctttgtcgccgggcgctatcaggagatggaagatgggtcctacgccgttgatctaaccagggatggctaggattagatatgtgggggagtcatcctgtgtcgttgacttacgagcatgtggccaggatttgtgcgcggtgtaatccttgtgcaatcaaccctgaccagcggatctggatcgaacggttcggtgggaaggtagagattttagatccaggccgttgggatgtcatcggatggttgtgggtggttaccggttcataaagcgtgcgatgtgatctggtccacccaagtgtgatcggacggtggagatatgggcataccctttgaccctggttgtttttcaaaagaacccctccacttttcaataaccaacccgcagtccacactgtagggaagcctgagtcttagggtaattgtgattatg

SEQ ID NO: 81814 - DNA, 1072 bp, Zea Mays
gactgccgaagctgtggttgccgatttcgtcttcaacaatatccagcctttgaaggacagagcacaccctgcatatctgtacaacggcatcaatgatagcatccgggtgacaaacaagagaatccccactaccaatttgctgagccgactggatatgatcctgaggggcagagttttgaatgctagtgctcctgttgcttattctgcctggaacctgccatctcataggtcatttttcaagtttgtgtccaatccttctgcccgtgatggtggtctaggtcttagagtgcgaccctcccctgaggacattgaaggtttaattgccccactctggagtctcccaaagggtgagagacagactcatttcgagatgtcagctagcatggacggcgaggagatggatgttgtgctcaacttgttggctggggagtcatctgagtcgacacatgccgagccaatggctatcatggatgggcaagaacttgttggaatggagacgacccagaaacccgaagaggtccgtccaaagcgtccacgccgagtgagtcggcctaccgcacccgttgaagagaaaagtaagaagaggcggcttcggcgactgtcgagcttggatcatggcgcgggtccttcggtgccggtttgcgatgaagtgccggcagaggtccttcctgaggttgatcccaatggttgcgcccatgctgaagttgatcccaatgggtgtggccgccttgaagttgatcccaatgggtgtgactgtgcaccggctgttgtccgtatatatgatgaagatgaagaagagaaagaagaagaagtcccgctgattcgtaagaacagacggcattacagaggtagtaagggggatagtgacattccttctctagctctgtcagcccttgtcacccttcaggaactgtcaataacggattttgatcaggcccttgaggaggtcgtccctgaggatatgctatcggagccgactgctgatgacatgatggctatttgttcggaaattctagccacgggattggaggtatcccgagcagtgtctcgtgcgccatcgactttggagggc

SEQ ID NO: 81815 - DNA, 322 bp, Zea Mays
caatgcccaatctcaggtataaaccctcctattttgaacgcattgtccccctctgcgcgtaggtttatcgggttcggtgtgtggtgcgccggcatgacgaggcgattgtcgccggtggggcgtcacgaccgactagtgggcaccgctgtggtttgggtcggctggttagctagggaaagaagatgcgcccggtgccgtcagatcttggagagatggctaggattagaatgtgtgggcatcgatttagtggtgaatctgagccgttgattgagcagtgtgtggtcaggtttataacggtgacgacgatgtgacctgggtgctc

SEQ ID NO: 81816 - DNA, 456 bp, Zea Mays
ctgggtgcaagtggttgtgtgtgggtttcacttttttgactaacttcaagatcctgccacttgggggtaaagacatgatactaggcatggactggctggaggatcacatacctatgtctatgcactggacaaacaagtggatgaaaattgaatatggcaatcgacagatgatgctgcaaggggttctggctaaggttcagtcatgccatgtggtgactagctttcaactggagtccttaatcagacaagaggcagtggagcggttgttagagttgcagactgtccagctaagccaacagagtgagattcctgagttaatttagaaaatgatagacaagtgccaacatttgttctccaaatcccattgcttacccctagaagaaatattgatcatgtcattcctttaccccgtggggcaccaccatttcgcttaaggccatataggtataccccata

SEQ ID NO: 81817 - DNA, 509 bp, Zea Mays
ggaagctgctagacgctggcttcattgaagaggttcatcacccagtgtggctggccaacccaatcatcgtccccaaagcgaatgggaagcttcggatgtgcatcgactacactagcctgaacaaggcctgtcccaaggacccgtatccacttccgcgtatagaccaaatcatggattctacctccgggtgcgacctattgtcgttcctagatgcttactctggtttccatcaaatccagatgtctagggaagataggaagcataccgcttttgtaacagtggacgggcattactgctatgttgttatgccttacggtctgaaaacgccttgtcaacattcatgcgggcgatgagtaagactttcgaggacctaattagggacaaagtggaagtctacgtcgatgacatcgtggtcaagataaagagagggtcgaccctagtggaagacttaaccctggtgttcgacaagctgcgggcaacccgcacaaagctgaacccggataaatgcg

SEQ ID NO: 81818 - DNA, 608 bp, Zea Mays
ttacttaacggactagttaatactagtgaaatagattagaccctgttggccatgttttaacttaaattagtacatcagaccaaaccacccatgaacaaataacttaccagcatatttatggtgaccatccctcccatccttgatgttgccataatacacttatcttatgccaccagcctgttaaccatctatccttacctacaagttatcctaactacatgtccctaattcggataacaacttcaagaacgaagatcgaagatgagggacctcatcaaatcaaggaaggataagattcaagccagattcaaaggaatcaagatccacaatcttggatggagtatttccttaccctactctttcttgcccaaacctatctatgctttaaaggcatcttctatcctacataataaagtggacatacatacacccatgctttccaaaccaccaagagctctaccaagctacataaatatataaatatatacactactacttataagatctaagtgttaccttagttagtagctagtattttactatattgagaataatcataaggtctaattgaccctatgtgttgctaatgaattatgcatcatgctgag

SEQ ID NO: 81819 - DNA, 557 bp, Zea Mays
atgggggcggtgatggtcctaggcaccataattcgggctacaccgacccctggcttccgtagcctagagctcggcgtggccaatcatgtagttccttgcaggaggttgcgcactcaggcctagttcgatagaccataagtgtgtcgtaggccgaggggtgcgtaggccaataatatgtcgcagttcgggggctcgtaggtcatgagcattatgcgacctgatgagtccataggtcatgagtgggaagcggatcggcgcccacactgtggctcggtgccaggcgtgattaatgtggccagtcatttatggcgggtcagtctggggccgggtgtgggatccactcgagtggttcccttccgacacgcccatcctcccttgtcaggctccgccaagcccgacctcaagctcgatgccgcggggttcgaccgggggcagatccttctagggctggcacatgtgcctcttccgactgactaatgggccccaaggaacatgttctctttactcagtgcgctcactgaccggtggatcccagggaccggggatcatttcccgac

SEQ ID NO: 81820 - DNA, 597 bp, Zea Mays
ctttgtttgcccttacatcagtaagggcaaagagagaatactccctatcttatttgtattgctctattgtggttctttgtaagagctttaacaagtgaccaacaagttatttggtttcacaatgcaacacatgtttttaacttgtctgaatcaacagtggtacctttgaatttgaatcgaggcgtggtattatgctggaagagggttaaaatcccttttaagtcatgtcaaaatataacagaatcttaggtttggccaccaaaactggcttactatatttttacaaacattttttgtttgggtttaaaattgaacattccgtctatgtttttcgattgttttggcgagaggaacgcaatggtaaagcccattgtatattttaacataactggttcgagaaactagccaaacaaatttattctgtaaaatcaatgtcagcctcttatgacaagttgtgaagttaacaccgagataacgtcgagacattatagcacatagcacatcccctctagtagtcaaccttcaagttgcaccatggctagcccaatatagaccacccaactctccatgtatgatgtcttatcagatccgaagcaa

SEQ ID NO: 81821 - DNA, 398 bp, Zea Mays
gttgtatggaacagcaaagacgggccaacatgagtaggcaaccgtcggacataagctgaccgtcggatgtttgttattttactgtagtgaaagccaagaatttagattactgcccctataacctaagcggttactgaattgggaatgcaaatgcccttgtgaaactcaaagcaatcccaagatcggatccctactcatccactcacaatagttacaaatgctcaacaatcacacgaaccgatcaaaaactcactaaagattcatatctaaattcaacaatcaatataataaactagctcctccaaaaataaagacaagtgtccaaatgttaaacgtaagtagtaaaaggtaaatcagcatgcgagccctgtggaacatgaggagctcgaggacggcga

SEQ ID NO: 81822 - DNA, 567 bp, Zea Mays
aaacatactttgccagcgcaaccacgacgttaggcgtcaactggtggacctgcacttcgaacctccgcaaaacatccgccacgaagcgatgcgccgggagacgaaggccggcaatgaaaaatgcctcaaacacaaccaattcgctctcaggctcagggatctcctcagcccctggaacccaccgaacaccttcaccaaagtatccaagttgctgcatctcctgcacgtggaccgaggaaatccttgaagtgctgaactccacggtcactcaaggtatctttggacgacggatcggccgacgacgcacttgcaacagacgaggaagaacacattgctacgtaccatcggcggcggcgtgcggtctacttgatgcgggccagatttccgaagcggtatagcaaggagggcaggcgagcagtttgcaaaagttatggtttctatgatgcacgcaagggtaagaaacagtcccggccgcagccgcctttttatagacaggacgcagcgcttcgggaaacacgcagtccaacagtaacacgtccatcaacggtcacatttcaaaaacccctg

SEQ ID NO: 81823 - DNA, 924 bp, Zea Mays
ttaaacattattgacatacaaaaagtgtagataactagccctaaattctggatgttagacctccctgagactgaatactgactggcagtgagttctaaggaactttgggctcgattcttgctcaaggtaataagcaaatgagcaagatccctatagcagaattgtagccggtatatagggctacaagtttgttacagatggattagcaagttctcacacaaaaatccgagatctgggcactgcaattctggctgtcaggcgctctgaataagaattccgatggtacagtgctacacaaatatcccaggttcagagaacctcgccaccggcgaccgtgcgcccggattcgcccctgacgctacaattcgtgctcaacggagtacggatagttgctcggggtagtaaatattgtcttgtggatgaacttgagccactttttcactccggccgccatgtccgcctgactcacggccgattcggatgaactcaccagagttagccacctatcgtccatgcgccacgtgccttggtatcttaccacgtcgcagtagctcgtattactcatgtccggtgatcgccggtgagctcgccacggggaaagccacgaattccttgcgccagtaacctcccctctccccggtcgctagcgcttctcctccaaattgagcaccaccgccgttgcgtgctataaattgaagcctcaggaaactccgctaggtaattacgcacccaacgcaccagcacttgcctccaattttccactagtgctgcccaattgcccatttcccccaaatcggtctaaataccgccgtgtgagcacctcgccgtggccagcgtgctacaggtccattcatgtcctctgctctcttgtttcagtacccttttgtgtccttgatgcttctcgacccgaccgattaagctaga

SEQ ID NO: 81824 - DNA, 453 bp, Zea Mays
aagttcaagaaattcaatccagcaagataaaccacactgttgttatgatgcaccaacatggggtgcaagaaatttgccattgcaaatgaagtgaagacaagacagtttttggcattcggagttttgtttttcactaaaatatataatcaaaacaaagtatagtgcatccaactgggtttcctacaaagctttcctagaaaagtggcacaagagttaaaactgcagagggtggaaaactgacacatcaagcatatcgttgctaattaatttaccaagatgcgcttcggtttgaaaacttggctaaattgtagacaggaaccaagtctgcagtgcttttttggtggagaccatacaactacagaaacaggcttggagacagactttttactttactgtactagaatataggagagcttgtaccataagtaacccaaatcccaacagctgaacaag

SEQ ID NO: 81825 - DNA, 302 bp, Zea Mays
ttgaacatctactacatcaacaatgtgtatttttttgttctggttttagcttttcttttgagatgcacatgcactattgctgaaaactttctgatacgatctttaaagactggctggaaccaggattagaagattaggggggcataaagttaattcagagataaattactaacatgttaaagttcttttcaaatttcaacctcttaggcttttgtaggaaaattgggtcatggcccctgccagtcccctactggctccactgcttaaaaggcgtgttcattagtggaagatgatgatgtttt

SEQ ID NO: 81826 - DNA, 275 bp, Zea Mays
ggaagagcgagagaggctgctgacagcgctgcgtgctaggagtggcatcagacgatcacacacatacactgatgatatatatcagctggcatgcagcgtacacacacataaagatactaatcctaagatcaagtccagagtgttttccagtacgacatgatatgatgcaatacatagatacggtacaagaggttaactgatctgatcggatcggacatttatatcccagctgtggcagcatgcaatgggcattcttcagtttgttctgaacggcc

SEQ ID NO: 81827 - DNA, 495 bp, Zea Mays
tgcatatctagtccattggcaggactgtaacgctcttctgcattactgctagcttccgagatgattgaggaggcgcctgaagtgctattgttgttgccagcgtgttgagctgcaggcgcatgacaaatactaggtgataatgccggttcggcttccatcccatcagactgtcgggcgcgcggctccatactaggcatggcagctttctcagcccatttaatgtggcgaccacacttccattgtaagcaagatctcctcttgtgaccatatctagcacagaaccagcaaagtaactggtttctacagtcgctgaccagatggcccggggccaagcattgtgaacatgcaatatgctttacttcttgagtgctagattggttcttgacaattggcatgcattatacgactgttgcagcccctttcttgaaagcataaatgtcttcctttggcaaactgtagttgagaaacactactagttagaaaaggagtttgcaa

SEQ ID NO: 81828 - DNA, 439 bp, Zea Mays
gattgtagagcatcggctgcctattaagtccggttttagacctttgaagcagaaagctagaacatttcgtacataccttctcccacggatcaaggacgaaatccaccggctgctagaagctgattttattagaccttgcagatacgcagaatgggtctccaatattgtgccggtggagaaggagttaggtaagcttagagtatgcattgattttcgcaatttaaatagagcaactcctaaagatgagtatcacatgcccatagccgacacattaatcaataatgcatcaggaaatagaattattagctttcttgatggtaatgccggatataatcagatttttatggccgaagaggatgcatctaaaatgaccttcatatgtccaagcttcattggtttatttgaatgggttgtcatgacatttggtcttaaaaatgct

SEQ ID NO: 81829 - DNA, 561 bp, Zea Mays
aatagtgcctatgcattgttagtattatccacaaaaggacagcaaaaggaactcaaatggaagagaaaaaaacactacaaattgtctatttaatttaaaagaagatccctttcggagtgtacataaccagttgaattgggtagtaccaaattatctagaaagtcatactatagaaatgggaccagaaaaggagcaaaaaggaaagatctggtggatctgaattcttggtgatctaagaaccctaaagaagcagccgcaacaaaccctagtgttcacaccatgtagtagggctagatctaacacactggaagagaagcactccggaccccataaaataaccgggagaacatcatgtagtagcagaaaaccaggatatacacaaccacaactaccaattgtactcaagattctcagatctagacgaagagctcgtgtccagggggagagggcaagagagagtgtcaaaccttcttacctttgacgaaactggaaggagcaagcctcaacagcgaagggagagctcgagggagagagggagagctcgacagcagcaactgagac

SEQ ID NO: 81830 - DNA, 349 bp, Zea Mays
ttgtctacaattgtaacatctttggtttagtcaggtggactaaccggagcatgaggttgttggagtaacatatttcttggcttgtggtacataggtgtggagtccgatgacagtggtcgacaacgaaggtgaaggtcatgatggttcttactgatggactaggaacggtgaaagacgagtgctgattcttgaccgagtgattgaagaagttgagtgactatggctgatatctagggacactaacaggcgcaaggagatggtggagcggatcgtgtcgccgacgtggttgcgggctggtggcacacatgtccaggacgtggggcgtgtatggaatatggtatgcacgggg

SEQ ID NO: 81831 - DNA, 324 bp, Zea Mays
agcatggaaaaggttcttgtaccacgttggaccagggtttatggtgtgtttggcctaccttgatcccggaaactgtacgctccgtaccattctctctctttttgctctatgtatcgcacactattgatgcttgtcaagtttgaacagtggggacagatttgcaagctggcgcagatcatagatatgaggtacacattcagatatttgttaaatcacgccattcaccctagcaagtaacattccttgcataatacaagccaaaactaactactttgctcattttcatcatttgtttttaattccctcatctgtagctcctctggg

SEQ ID NO: 81832 - DNA, 482 bp, Zea Mays
gcaatcttaagcaagagagtaactcattcataacagtttccattccatcaccaacaagtaaaaaggcagatcatcaaaagattccatcaccattcatcaaaagaccaagtttaacccaacactaaacactatttctagtacttccagcatctagaaactttcactagacaaatttttcactagataaacactaaacaaatggccaaggttcccatacattcagtagacaaaattttcactagacaaacaataaacacaattttattcactggtctgaaccataacttgctgaaccaatgatgcatcacacttgagttgtaaaggaagatgcccttgcctttcaagcatctcttttttatgtgtgggatgttatatccatttcgacctccaatttccatcacttccttcatgcatccatgtagagtcaggagatggtaaaagagtggtaaaagggtattactgtattgacgacaactacaagc

SEQ ID NO: 81833 - DNA, 419 bp, Zea Mays
gctcattccaacgtgtgcgagccttctatgccataaccatccaagtgatgctttggtaaagaggcaagttcttaagtttgcatcttcagaggtgaaatccactaagtagagattgttgtatctaaatcctttgaacaccattgactcatcgtccatttttgacacaacaacctctgtaggagtgaataagcattaaaggccaagatcatagagttgacccactgatagtaagttgaagttcaaaggtgcaaccaagagaacatttgaaattgaaatatcatttgaaatagccaccttgccatgtcctcgaacttttccctttgaattatccccaaaagtgattttatcttgtccatcaacattctcatcaagtgaggtgaacatccgtgggttgccagtcatatgttgagtgcatccac

SEQ ID NO: 81834 - DNA, 1249 bp, Zea Mays
ggccttcggattgctcctgtattcttcaatggacaatccttaacacggtcacataagcacaacaagaggagaaccctgaccacagttcctagtccaagggcgacgatggcggatttgcttttattgctgaacaatgggaaccctctgtgggtgactgcttgctcgagccattatttgaattcaagctcctcatctgtgtgaagctgacaggtagcttaccgctgaaagaattgtttgagaggtcaatgttgaagcagttgtctagcttccccagccatggcgggatattcccatctaacttgttacatgaaatttccagcacattgaggcttcccaagctctgcagccacgggggaattacgccgatgagtagacagtttgtcaggatgagcacctgcattgtctcaccgccgcggaaattcttggtcagcaccaagcttgtcaggttgggcaggtgttgcaagacctgcaatgtctatgccaggttgtgaaactattcctggtcagcgagaggtacgacagggatctcaactccttgaagctctccggtatccccccccacgagcttgttccttgtaagattcagtgtcctcaacttggtgcacacactgatgccaggagctatagcgccactcagatagttggttccaacatcaaaagtattaagcttcggcagcaagctggagtcgatagcaatctcaccagagagcgagtagttcctcaagctgattaccctcagcagtggacaactttacagggaagcgggcaactcaccgtccagcctattggtggccaggtttacggactctagcctcctcatctctccaaagacatcagggatggagcctgtgaacttgttataggacaagtcaagttgcatgatctgagagaggttaccaaggtcactgccgaggttgccagtgaacagattttcatgtaagctcactctcctcaggttgggcaacgtgtacaggtcgtcgggatcccggtgaaatagttgtcgtcgagggagagctctgtgagcaccctgcaccgacatcagagatgcaggatgtacatcggtacatgtgtgttggttttttgtttaaccttctttataatatttgcaagttgctttaaaattgagtgctcataagatgcatcaaaatgtttcctatccaaagctcgtatactataattgtttcatgaacttaatttgttgacacatgactactataaagttctagatacaacttaattttggttaata

SEQ ID NO: 81835 - DNA, 272 bp, Zea Mays
atgacataactactacaaagcttggacaacatagcagggctgggatgaccgagacaccaatgccaagtgttggaagtagtggatgtagtcagggtgtgtgactgtggcgagggcgaagatgatgatgtagcggaagcaggtggtggagaggtaaatgcaggaaaccgcaacatgtacaagggccagagctatctcaacgggcgagaagactctaggtagcgagatccttcacgaacaagtcaaaatgatcaaagctcaatggaataggagtt

SEQ ID NO: 81836 - DNA, 803 bp, Zea Mays
aagatattgaagataattaatcctgaagtcaggctgtcaggctgatacagtctgaacttcagattgacagtgatctagatcccagtttgagagccattccgactatgatccaatgagaatttacctagggttgctataacaaagttctagagctattatagaggaacagctttgctgcagatgttaagtagtggtaccatataaaaattggagttattttgatctaaagttgggctgtttgacacagttgtactgaatccaaacactgaaattaccaaatcagcctcaccggagataaggacgccaccgcggcgtgggatgggtcgctggcgtccgcgataaaggatcctcggcgacgtggcagaaagttactgaggtggcgctacccggttaatcggcggccaccggactttcaccgtggccgtgccgcgcgggtatgctcgccagcgcagtcacatcttggggatctcatccatctccggctggctaactataaattgagtcgaggcactgcttcttcgttgcatcacgcgcacaagctcttaggcaattgactcaattccaccgaagaacccataaatccctcgtttcctgttcttagctccgccgcaaggactccaccgtggtcatcgctccacgggtcagtatctaccaaattacttcctgttctagtttgtctttgatctcctattgctctcaatactgaccaattgaagcctgaccaaagcccttcaccggaacgcgcacctgctctgtaagcgccaccgtgacaccctctccggagccccgcgtttctattcacg

SEQ ID NO: 81837 - DNA, 472 bp, Zea Mays
ctgaggatgaggctatcggacagttcgaggctcagggtgccattgaagattcttcttccgatgatgatgaggacctggggatcccgccaccgcctcatgttccacctcattcccatgatcacgaggccgacagttccaatgctgctcctgctgcccctccagctattgaccctgatgtagatgctattcttcaatctcttactcagcagcaggcctgacatgcagctatttagtagcagatgtccgaatggatgcaatcaatgttttagactatttaggaccgccaggacaccctccagtagtagctccttgcagacagggcagagcaccgggcattcatgacgcagattcttcagcacattggtgtttagcttccaccagtgcagtttgctcctcctccagttcttcaggctgttgttccgctcttcagttaggacccctgctccacttgtttggtccttctatctctccg

SEQ ID NO: 81838 - DNA, 714 bp, Zea Mays
tttgtattctattttttcctgcctcgtctctgtttgattaccgcttatatcttcaccctccctgggctagcccatctacagttccacacaaaaatacggcccatggcccattcgaaatacaactcaacacccacacaacgacgtcctccttctctgttaggtacccgtgcgttgcgacggtttctattacataataggtattgtgtcaacatcttttaatcctttccaacaatgtctacatttgttaacacaatctggagaagaaaggaaaggaggaataagatagaaaaggagaaagaagatgacatgtaggggccacacattagtgataggaagaggatggagaacatagagatacctggacaatacgaaaatgcagtggtcttcaaatgggttcaacaaaacattcatattggcaggttcaaatacagtagcaaagaatccatgagaaatcttagtgggatcattgcacatgctacacctcatggggaacagaaaagagaaataaggagatcaaactgcatctttgccaagccccatctgaagcgaagcttcaacactatctccttgtctcttgcctgtacatggatataatatgaggtatatgtgtgagtttatcagcatatatcttattccacacggttaagttacaacaaatgttgtggtgcaagattggcttacaaagatggaacaataatcaacattagtgtaaca

SEQ ID NO: 81839 - DNA, 577 bp, Zea Mays
gaagaacttcatcaagcgaaggaggaatgctataacattgccttgcagtgctcaaacaaactaaaaaatgcttttactagtgttggcgtgttctcagctgagcggaatttcattcgtggtgacctcgagggcgtgatcaaatagattaagggcgaaatcgaagcatttgacgaagatctcactggcatagtggtagggggatttctgtgcctgtgttggtgctcggggagctatatctttgcttgaaaaagtcggctgtgatcatgcgaaggctgtaattcagctagacttctcagttttagcgactgacatcaaagagccttcagctgaagctactgtccttagtgggaaattcttttttgaagtgtggatgaacggtggccgagagatagcagacgaagctaacaggcagagcgaaaaagagtctcatcttgcctcagaggaagcaagaaaagctgaagaggtcgtttagcgcgaaagacgtaaatttgtcatattttagcttcgtaagtgttttagcttcgtatttgacaaaagcttatattttgatgaagctgaattgtctcctcctccggag

SEQ ID NO: 81840 - DNA, 758 bp, Zea Mays
catcgcatcatgaccaagcgccatgttgcaaagaccgcttacggtggcagtgaggaagcagagtccgttcagcttgtcctcgactcacttgttggtctcctcatcgctcgagaaagacgttgcatcgtcggagtcttggttgaggtcactgaaaggggcaaggaaggcatgctccttgatattggccttctagtggtacttcttcttgagcgcttccttgttgaatcctcccttggacttgtgcttgcctgaggtgtactcctgcttgcccttgcgccgaccagagtggtggtcgcgtgggccacctcctgcttgcccttcttggggcaactagcgacaaagtggtcggtatcgccacagctgtagcatccatccttcgacccgccatgtcgtcggcttatacggttgttgtggaaccacatgaaccaactggccacaagcgccagctcctcatccctaggctctccacatgctctctgtggtggtcaacaaagaagacaaagtaaacatagcatgtgaagggttagaagcagaaccacatctagagaccagggccatggttggtgcaccagcgttctcaatcttggcctgggtctggtggtcaatctcgatggacttgagcttgctgaatagctcatccatagtgagagtctcatagttgggcgactcaatgatcactgataccttcacctcccaaaccctccgatccagagcatgaagtagattgagcgctctctcatgattatcatagggtaact

SEQ ID NO: 81841 - DNA, 604 bp, Zea Mays
gtggtggtaaccaggagggtaatcaagaagtacctcttcctccacctttgccatacacacccgagcagtttttcgtgcaaattttgagagctcaaaggaatatggagaacttgcagcggaacatggaagcggagcttcgaacattgctgacaacacttgccatggcaacctcaagaagcacatggggtcaatcagtatagcagttttaaggatttcatggacaccagaccgcctatattcaaagaggcaacagaacctttagaggcagatgagtggatcaacactatggagcagaagtttgtttgacgatactttcagatgatctcaagacagagtatgcagcacatcagttgtaggacctgcatggatgtggtggtctcatttccataccgcctaccctgaaaatgctccctttgcttggcatcaattcactgcaactttaagaggaaactacattccacctggtctaatggcaatgaaggtgtctgaattcatgagattaactcagggcactcaatcagtgatagagtatctgcatgctttcaacagcttgtctcgctacgtgcctgactacatggacactgagaccaaaaagattgctcgc

SEQ ID NO: 81842 - DNA, 520 bp, Zea Mays
cattttccttttttttctttctattttccttcttctttttccttatctattcacgtacgctatctctcactcatgcaagccctccctaatggagggccctatcaatcaccgcccctacacaatcgcatatgccgccccaccatctgcctcacccctctcgctaagagccctgccatggtcgtgcacgtcaccccttctaatgggagcccaatccctctccgatcctgcacgctacccctcccaccactccgtgacaaccatttccctcctcaacctttatggcccacacccctctcttctctatctcggcactgccacccacttcctcaacatcaatgttagctccactaaactttatctctgagcattgccacatcgccatggggagggtcagtttagggtaggactactacaatatcctagtcaagttttagcaattgagtgacaacttaggtggactaataatatgtatttgatatgagatatatatgtaattagtctacatgtacactagtttgag

SEQ ID NO: 81843 - DNA, 377 bp, Zea Mays
cggggagtatcttgggcgatccgtaagatttgacaggttctgccccggaaccacggatagcttaatgggctgaagcgacctgtcgtaccacaccatcggtcttggttgtgcactgctgctgcaggtgtgtttggatttggaccaaactacaccgagtgggcttggaatggaggccttgcgatatctctggacccaagcaagaattttgtggacggaggagctaggacggctgaatggttgacagtttccgtcgtcggcagtccggcaggaatcgaccttttttgggtgcgttaaactgacgaaatcgaccttatcgttccacatccgtactgtacatttgacttgtgcttctgtgcagtcatgtgagatgatttagc

SEQ ID NO: 81844 - DNA, 517 bp, Zea Mays
gccaacaatttctttatgtttttctgttttcttgttcagagaacacgcatgttccatccatgcccacttgcgcgttttttttgttgttgcagttcttcctcgtttgcagttcttcctcgggatttgatttgattgattggattgggttggtgcgggggcatgctgggggcagatgacgacatgcttacgaagcagaagctgctgcctccgtgacgaggcacgccgtgttgctcgtcttccatgactctgatgcctgcctgcttcgctcccaccaccccacaccttaatcgatggattaggaattaacctgcagcgcccgtccaggtctcgtgagagatttatatgtttggatcagattttagtttcttgaggcagatgacgacatgtgcatcctgcttgagatgcagaagctgcctcccagaggcttagccatgttgctcctcttccatgactctgatgcctcctcgtcctctcccatcatttgtgttttgttttgtattggtttttttttgctgtc

SEQ ID NO: 81845 - DNA, 493 bp, Zea Mays
ctggtacgttgctaaagcttaccgtgctcccaatttgtatgttactgcactgtgtcatccggaacacgtcgggaaagtctcaagctccgcgggtgtgcgtggactgagctctagagctgcgttcgggttaaattagtgattactagtggattgccaagggtagaattaggtgttgactaaattagagcatgaatggttgggtattacggccggtacatgttcgccggagcgtgcacgccgtcgtccatcgtaggggacctgatcttgcgaagaaaagaaaagggaagggcctcggtgcaattgtcagagacacaagggaatagtgactaaggattcttttcgtgtttttcgaattgccagggacctctacacaaaatcttcagcgtgggcgtgtttcgcctggtcatgggccggatcgggttagattgagcccagtactattcctagtttttcctttttctttttttgccagacttggaaaattgtaggaaat

SEQ ID NO: 81846 - DNA, 721 bp, Zea Mays
ataaatacatacacagagagatatggcacgagacgggacgttcaagaggtcaaatgacgtgaaaacgacgtttgacgggcaaatagtgtcataggatgtttggaattcgaattgaggcacgaaatgatatggaattgagccgatacttcacgaataggttcatataggtgaatatgagtgaagtgtgtgcttggtttgaatttaggcgaagaaaaaggaatttgggcactcggctcggaaacgatcgctcaaaacgggaaatttggtgaaatttaagcctgggatctcggattggcgtgaaatttggcaaggaggttactggaagtgttgtgaaggtgcctgaaaaatttgggttcaattggagcaagtttggctggtttgggcatttcaccgagcacgtggtgtgcggggatttagggtttcggtgaaacggttatttgaggtgggaaaaccctcccgaaggagctaggaacctgcagggaggcttaaggcacacaggggaacacatttcacaaggggaaatcaccagaattcacaggatttagagttgttgcacaaagggaagaggtgggaggctctgctcaccagaacagagaagaactgagggagtgagagagcaagagttgctcaccgaggagaggagaggaggggagccctaggtcaccggagcaccgccggagagggtggccgccagaggagatcgccggcgggggggaaatcg

SEQ ID NO: 81847 - DNA, 525 bp, Zea Mays
caacatttcaaacaacacaacaagaggcaagtatatttagttcactccttagggcataaaacattgactcatcaaaatgctttgcgaagatatcaactagttgttttcagtgatcacatggtgaataacgatatctccttttgttttgtggtctctcatcaagaatttccttcatcattgcttccatatttgcaaggtcagtggtatatatagatcaatattgcgatattttttcacgactttaaccatttaaagaaataaatacttctattgtcttggaaagttgtggattgttactacaaagaatactatattgttcctcaagttacttgtgctttgtatctaagttataatagtgtcaccgacgccacgttctttggcatgttcctcattgggaccgtcatctccatggggagctaaagcgtcctcattggctcatgtaccgagacactcaaggacagggccccttgatcaccgagaagctcacgtggaccacgtcgttgctggccatgtctatggggcttt

SEQ ID NO: 81848 - DNA, 739 bp, Zea Mays
tgaacatatgaatcatacgtgcacaatccccctagttgttgtttggttctcatgaaggtaaggattggtgtaaatcctgttaaatcaacaaaatatcacaattcacaagggatacttggttaataaatagcatatcacctaaaaagataataatttcttttagattaactttcactttctagtacctaccgcgatgcgattggagttcgatattaaaatctttgagcattttgactccaaatgattaagtagatgtacctatacataaaagaacaatcaaacactggaaaaggcaaattagtttggcatgtgagcaagacttggaagaaaaataacaattaatataccataattttattttcctgagcattgagagaaagagtgtgcgccataatattgagagaaacaattatcttctcagaaaagttggttgacaagctctgccctcgaagcatattaagaaaaaccaaacaggaagggagagctagaagactaaccgtggaagaaatatctaacgatagaacagatacgattttacccattttgtttccaattaaattcccaaatctagaagctgagtgttttattcagcaatactataaggtcaaagaatgcttcagctactcacactgaaacctgcaagtgcagaaggataccaagttcccaagtaaaatcatgcagtaatgccattgcgagttgtgatggttctgatgtatttcatctcaaaagacaattccta

SEQ ID NO: 81849 - DNA, 672 bp, Zea Mays
ggggtggtcgctggtggcggggacctcatctttgacgcactcgcacggactcagatctgagtccccctgagagcaacgaggaagaaccctctggcggcaaggagaacaaataccacttggccgctgcgtccccatcgacaagacaaacaaagtagggcgctatgcatggtaggacacgaaaggaccgtcaatcgtaatgctttcgacgagagtccatggtaggtgcccgatcgaagaggatccgtggcctgcttgtaaaaccctcaaacagttatgaataaatcacacttttggaactgcacctgacggaaagcacgataattaaggagagaacctcgacaaacaccctagtcctttctctccctcatatccctcttttctccctccctttctcgttttccctcggtgactttcaggataggaagcatgctaggagctcaacgagagaagacaaacgaacaacgaacttagcagagtaacgagcgagaacccccatcgcatgtaaaactagctttcactcttttcccttctgaaattaagtgctttgagtttttcttgccttttgttggaggggtctttggcgaaacacaatgctgcaccactattttttcctagggcaccctcgactagcagggggtcttaggacaccgtaactagggacgtccgtgatcg

SEQ ID NO: 81850 - DNA, 530 bp, Zea Mays
aatcaaagcaccgcgcctgtgacgattcccttctagatttcccctgtctcttcccctctcgtccttgcctataaatggagtcacaatgcagttgctcctcctcccccagctgctctcttcctgctctgctctgacgcccatcttcgtgctactcgcccggagcagcgccaccgctcaccactgagccttcctctccagcagctccctcctctatttggcttcctgctcacgacgtcaagactccgttgctatcatcacatgctccttggcgccatcgctcatcgagccgcgccatgctgcatcatcgctgggacttcctactacgtcgacttgtttgctggtgccatcctcattgccgctataaatccatccccatcgccgaaacaaggtataggaagacgaacattttactagctacccccttcatatgtatgtttaattgcgtgtagacgcatgcgataggttccatattttaaatacgtatttaaaacccacataaagtaaatgttgatttattagcttcataaatt

SEQ ID NO: 81851 - DNA, 469 bp, Zea Mays
ccgaaaagcccttcgacagctatgccaaaactacagcagagaggtatttgaaaccccccttcgttacatcccacctagcaacaaaaatacccccacccggaggaaaagacttcagaccttgttagggagagatcctaccgaggatgaccccaccatcgtctacatggtcggatatctccacactctcgataaccactacgatgacctttcctcccactgcacccacctaaactcctgggtggaaagcttagagcagcaggtcaaggaacttaaaaaggagaaggcatccctccaagagtgtctcgatatagcagaaggcgaggaggccaacactcgtgaagcctaccgaaccctgaagatggattacgataagaagctaaagaagctcgcccccacgaagaaaatccaaaagaagaccaagagccaaggatgccagactgagcggaagaagaaagcccctctagcacca

SEQ ID NO: 81852 - DNA, 580 bp, Zea Mays
cacccttcaccttcccctccactgcaggcgtctccgtcaacttccgcgtccatttcccttccatcaccttctgcttagcgtgcggttccggccatgtcgagagggaggtccaagtttgaacgttgacgaggtgacagccccgctggtggcagctcgcttggtcccgccggtggtgttacatccaggccctccttccgcgatgtggtgcagctgctaggccttaatcgccggacggtttggctatcactctatcaggtctaggactcagacgcggctgtccagtgtcatttcggcaagattccattcgtcgaccgtgggtcagagtctcgcgaaggctgatgttgatgctgatgggtggcggaaggtcgagtctcggtgctcgatgaggctacgtctgaaggcagccaggttccaacgtcaagcgtctggtgatttctctggcaggtgcttcaattgcctttccccgaatcactgggttcgacattgccaattgaagacaagttgcttctcattcctttggcttggacatagggcgtccctctgcccagaagctcctgatcacgctcttgcgattgctcct

SEQ ID NO: 81853 - DNA, 896 bp, Zea Mays
gtggtttatttatttatttattttgtcgcacgcgatagcgagtctttctttcagacaaccagtccctgtctcgtgggaggtgagaaagaaaaatctgacctgctgatgcattcctctctagctagatgattatatatggctagatgattatatatatttctttcagattggttaatacgatggatagacgatacattaccaacttgtggaggtgagggcgcggaaggagacttttagggaggaacaggaacagccacgaccacgatgagtccttggcagtgcatgccgtcgactgcaacactactacacgtccatcaggtaacagatgcaacaaggcgtctgccgcccatcaggttcagtcacctaaatgctccaaatccaagaccacgtccaggtgtgtgatccatcaactattttttcaaacaaagatgcagagaattagcctgtcctgtccaactgttggtaaaaatgtttgttactatccacatctctgtcctgtccgcaacgaaccaaataatcatcgtgggaagaacccccaaacctattgtggcccttgtaatttcttctgtagctagtccatatataggatctaaattatgactgatcatggcggcatatcctactctcatagctggatcaatgtatacttgtatagtccaacacataatgacccaaattatgactgatcatgggtcatacttatttgagctgacactaaaaacagtattcaatgttgattgtacgtggccactatatatgccccctaggctttgaaaccaatgattgtacactgtgtttgagtgtagaggctagcggaacagtgtttatttgagtggacaggacataaaaatatgtcatgttcaaacaaggctgactttttaaaaaaaataaaaaac

SEQ ID NO: 81854 - DNA, 348 bp, Zea Mays
aattatttccccttctccaatagtgaggtcattgtctttgctattttggagaatccctcgatgaatcgccggtaatatctcgagagtcccaggaaactctggatttcagtgaccgatcccggtatcgtccatcccactatctctcttactttgtgagagcacgtagagagggggtgaataggtgatcctgtaaaaatcaatactaaacaacacagacttggtttatgaaatgttagtgaagtcaaaaccaagatgctatgtttatcgagggagacgacttcttcacttaattgctcttcacaagatgagtattaaatttagagcaattatagagtgagtagaagtaaa

SEQ ID NO: 81855 - DNA, 1312 bp, Zea Mays
attttagaagtctaacaaaattggtctcatatttttaccattttctattattttctacaaatttccaagtctagcagtaaaaataaaaggaaaaactatgaatagtgttgggctcaatttagcccaaaacagcccgcgaacggggaaacacgccctcgctggcgactttccgcagaggcccccagccttttaaataactgctaaagaatctgcggcactattcatgtgtctccctgacattcgcgcaaaacccctcgcacttctatctcttcatgactcaagtccccgaccacgcacaggtcgaacacctggccggaactgagtgcacttgccagtggggacccattccgatgacatcaagcgtacgagatcaatcatagatgctaatcgaacccctttctatacttaatttggttagtccgtcacttaatcaggtctgtccgcgataaccgcgacgcaaatgcttcggcgagctcgtcctaggttacaagagtcagtagtgttcaatcaagtgactagggaagaatcagtggacaactaggactaccaagcttccgtaaacttggatgaagaccacctagaacgaccggtctacggaagccatgtccgcggcggcgttcccggacaataccgtaatgttcacaatgctacgaacgatgagccgatgagcatcacaaacgcaagagggtgtagaaacacgaacgagaaggactcaaacggatctatgggtggctggccacggcgcggtgtctcacggcggcgcaactgaccaatttggggtaaatccgatgactggggctacggtgcacgagagtggctaactggggtggaatgaaggcttaacagagaggtggagcgagggcagcactcaatttaaagggatcggctacgcgtcacgccaattttggccgaagatgaacacgatggcggtgggatatttcacttgcaagttcgtcgtggcgcctgccggtgcaagggctcaaagatggtaattccagtcatgccatggttatagctatgtggtgaaagggtcacggcatggcgcaatcgcaaggaacaacatccacctcggtgatggccactgggccatgtggccggcaagtgggtacggcgactgagcaagatcagtaccccaagttcatcctccgcgcgagatctttcacctcacgtagatatccgcgcaccactgggcacgaatcacagcaccggcgtggatcgcggcgcaggttcaccggcggcgagatgcgctgatcctagatccttgttcagttcacagcaccatcgcaattccatttagttgttttgatagagc

SEQ ID NO: 81856 - DNA, 480 bp, Zea Mays
ctaaattaaggctagattactcctcttccgaaggaatggaaagaatagtgcaaataagaaaaaaattataagtagatttaattggatcgattgtggggggttcaatcacccgtaccacttcatctatataagggggaggcctggacccattacaagtcgattcccgagttaatcacataggttttgctaacaaatctcacaagaaacgaggaactgtaactgattctagacacgcacagactgtccacgttgctaaggcaaacagtctagaccgtgaaccatccggcgttagggctggaccgtccgcacgataaaaaatggtgcttaacatatgcccctacctttcggtggagttaggtgagccaaaagcacatgtactatcaagaaacaatagattttacaagtcattttgttaccgaagtaagaactatgcctgatgcaagtcaccggcttttcaatctaatagggtgatcattcaat

SEQ ID NO: 81857 - DNA, 628 bp, Zea Mays
gatgagtatgttgtatagcggcctaggttgttgctcaggttaatcaacttgttagatgactttagttcagttcgtggtcacgatgaattgcgtgttgtagcccaattgcgcatggttatgattgcgggtaaaaagtagtagtgctcatgtgatgtttaatttaaaacacaaattgttgggtgattatcgtggagaatgcgttgttaattggttgtagtaattttagtgcactaaatgacttgaataaaatttgcaagttgacttggtggtcctcattgattgttttaactctaacaaatgataaagtgttagattaattgcagtctctagaacacggcaatttttgaagtaaatagaagctgaattttattaattgttgttttggactgcacgtactgttttagttgtgttgtatgtttgatgaactaaattgtgttttctatagatatgtgctgtagaaaaatggtagataactttattatctttctggtgttaaaatttgacagctataaacctgatcgtttaggagttgtgcttttcacaagcccagcacctgaatctgtcgaatttcagagcagatttcagaaattgcaatggttgcttaagttaatattgaaatcagttattg

SEQ ID NO: 81858 - DNA, 367 bp, Zea Mays
aggacgcttggagttctttctttctactagagatggcactttggccggcagatctggtggcgggtccaagttcagagcatcgtccctattccccctttgtgtggaccgtcaagttagttaattacggaacgacgaactactagggttatcgttgcaaaactaataaaaaagtgctcactacgacactgcctcatattcatcaatcaatatttgtttagttgttctcaccttgcttgttctccatcggagttcatggcattgggagactgagaccagcagcgatggtgattgatgagcttcctgggtgacggtgaccagttctcagcgagaggggttcgactctcggcttgagctcacgtgcctcgcg

SEQ ID NO: 81859 - DNA, 464 bp, Zea Mays
cgcacacacgggatggtgtgttactctgttaagtcccatctcaagaactctattcctgatgcaggctctggtgggtctcatatcgtagtgtaggggatgtccaaggccgtacacgggcgtgccccgtcccgtttatgctcacttctcgatgtctgcttggtcgtgtcgtcgtgtcaactgggatggcattagatggcggcgcccccatcgtggctggcgtaggtcatgagtgccccctcatttccacgctcgacgggtacatgcgtgcgtctgcctgacacatgttagggagtcatggaactaaggcccacaagcgtactagcctccctcgtggtcccttgcgtctctacctcgctgagttgatcgacgggagttggtcggtttcactcttgtggccctttgcctttgttgggccgccatgggtgatgggctcatttgaggtatcctatttccgaggaccaatc

SEQ ID NO: 81860 - DNA, 583 bp, Zea Mays
gacgaccacaaagtcataatagtcactggtttttcgataggggatattattcacaacaaagaagccattggtagaatagccaagtgggcctgcgagctgggatctcatgacattgaatttcgaccttgcactgccatcaaaactcaagcactggttgatttcgtatcagagtggactgaacaacaagtgtcagataatccagaaattgcagaagtatggcgaatgtattttaatggctcgttaaagctgcagggattaacaccccgaatttcgagttgaatttttttcttttctctagcgctcgctaaattcgggcgttacccctcttctccatttcttttcgctaaaacctcacctgtcttcaaaactttaggtcatgtgacaatagtaaatcctagagttattttctttggattgctgcaccatgccgaaccatgcatttctttgattgtttgaaagtgtgaaagcattcatatagaaaatagatatcaaaaaaaggaaaatcttttcttctctcccctccctctccccccctttttcggcccagccgcccccccttggcgcgcggcccagccggccttgc

SEQ ID NO: 81861 - DNA, 864 bp, Zea Mays
cttttgaacaaatatttatctatgtttcttgggtgtcaaaaatattctatgtgaggtgctactaacaaccatggtgtacgcatatgatgaatgagatgtcttatgaggtgggggccttaggagataattaagggggggtttagaagttttagggtttctaaccttgggattaaatttgggatgttacaaaccaaccccacttaaaggaatctcgccctcgatatttagagtgggtttgagaaaaggtaagggtattccctcctcaaagagtcctcactctcccaggtaggttcttcttctccttccctgctccactaaactttacatagtcttgcttctgagtttcgggtccttcggatggctgagtcaagaatctttactggcttttctcggtactgcagatccttctgaatctgaatcgcctcttattcgatgtgactttctggcactttcaggcatttgcggagctgggagacgtgaaacacattatggatatctgacatggattctggcaattcaaggcggtagcttacgggtcctattctgccaatgataggataggggccaatgaatcgcggggctagcttccctttcacttgaaatcttttgactccgcgcattggggagaccttgagatagacaaagtctccttcctcgaacctgagttctctccgcctgttgtctgcgtaactcttctgccgactctgagcttcgagtagtcttttgcggattagggcaactttcccttctgcctccttaacgaaggtaggcccttccagtgccttttcccctatgttggaccacatcagaggggtctggcactttcgtccatacaaggcttcaaacagtgacatctcaatactg

SEQ ID NO: 81862 - DNA, 313 bp, Zea Mays
tatgaatggcccttcccatagtggcgacaatttgtgctgtccctcctccgttagaattcggcggaggacgaggtctcccactgcgaaggatcgatgtcgtatggccttgtcatgatagtgcctcagagtttgctgataccgggctgactgaatcaccgtattcaatcgttcttcttctagtatatcaacatcatccagtctagtagcctcagcttctgctatgttttcaaagattaacctcggtgccccaaacttgagatcagcgggtagcactgcctccgaaccatagaccataaagaaaggagtgttttca

SEQ ID NO: 81863 - DNA, 324 bp, Zea Mays
accattgatacgatctccaagcatggatttgatcgatgaactgatgtcggcgttctgtactctctgatcggccttttaccccatggcgccgccatcttccagcttcggttacttccttctgccagtcgcaccctaacacacgattcttaccgtctaactttcctggaaacgtgggattctttcctttacccatgcacatatccatcatcgtgggcatgaaattcacagcgagtttgtgtgtgtatctgctacattataggatcgtgggcgcgctgatcgtgggcgtaacagcaatttatgcaagttcgacgtaggtcgtatgct

SEQ ID NO: 81864 - DNA, 535 bp, Zea Mays
gtcgcgttcgcggcgctaggccggcggtcgtagtactgctatcttagcaggcgcggtgtctctcttgtggggtccgctggtcacaggtcgtcttcttcgttgagctgagcagccacgtaccgtacgaacttcttcggcgatagagagatggactgttcggagaaagctgctcggcacctggaagccccatgacacgaccacacggaggttcttcatggggtactgggcagcttgacatcagcggcgcgagtgtagctgctactagtgctagtgctagtgctactgctacctccatctttgaccccccctagctctcgagatttcttgccgtgtgcaggcacgccggccatacgcaaccacaggcctggacgcggcgccgctgccaccgtgaactgccgcacagagtgcctatacgacgatgtgacgaaagcggatacgacgggtcagggcagcgggaaggagaggggcatcgggccagcggcatgctactagctagcacctagcacgatactctagcggaggatcgcatagtgga

SEQ ID NO: 81865 - DNA, 776 bp, Zea Mays
ttagcttggtatccatggactcatgtagtcttttccaaaagcgtgaggtaaattgggttcctcgatccgatacgatcttctttggtaatccatgcagacaaacaattcttgacatgtataactctgctaactgggctcctgagtaagttgtcttcacaggtataaagtgtgccactttagtcaacatgtccactataacccatattgaatcgtagccatctcgagtacggggtagtccaactatgaaatccatactgatttcttcccatttccatgctggtactttgagaggttgtagcaatcctgctggtctttgatgtttggctttaactcgctgacacacgtcacatagtgcaacatgagtagccacatctcttttcaaatcgtacctccaatacttttccttgaggtcctggtacatcttagtacttcatgggagaataggataagctgaatcatgggcttctcttaagataagttggcgtaggtgctcgatttctagtacacaaattctctttttaaaccatattgtgccttgatcatcttctgtgaaatctggggcttttcccaaactaatttgtgtcttaatttccttgattttctcatcagtctcctgtcctttacgaatctcttcttctaaagtagattcaacttccatacctgttgcttccatattatttgagcattccaagattgagttgttccatctcccagcacaattcctgtgccatcaaatgagtagtgatgttgttcacttgacctttacggctcaaagc

SEQ ID NO: 81866 - DNA, 675 bp, Zea Mays
catgagactgatccatgggatccaccacgcactacaaagacatcagcgatggactcgctacaggagccagagtaacaaacaatgccatatcgggagtacgacaacacatgaccgtacagatgacccacgatgacaacccgggaagagatctccctctctttctctttttctagaagaatacaagtcccattataaggtcctacccctgaggtataaaaggcagggccccccctccttcaggggggcacagaggcacatgagtacactagcacacccattgtaacacaccctactgcaatactatgatcatcactacactagactagggcttcggccaaaaccaatattacctagtgtctcagttctctgcatggatctctgtgatccaccattcggagtgagtctgcacttgcatccccactgaacacaaatcttattgtcatccggtttctgaaaccacaacagttggtgagcaggttggggaccgcaagcgtgccaagcggcgtttttttcactccgatggccagttcaacagcttctgctgggtgtgaaatctttgcccctcagagccgcatcaagtttggctctctcaacctcctcgacaccgccaccagcaaacctgaggttgtcatcgtcggccaccagccaagctctaccctcgacaccaacgacgat

SEQ ID NO: 81867 - DNA, 710 bp, Zea Mays
aactcatgaccttgttgtcattacttaatttgttggaacatgcttgttgttatttgattattgtgtctagtacctcctgtcattacttaatgtgagtgtgcctgatctgttcttctctgtgatgaactcatgaccttgctgtcattacttaatttgttggaacatgcttattgttatttgattattgtgtctaatacctcctgtcattacttaatgtgagtgtgcctgatctgttcttctctgtgatgaactcatgaccttgctgtcattacttaatttgttggaacatgcttgttgttatttgattattgtgtctagtacctctgtcattgcttaatgtgagtgtggctgatatgctattctctgtgatggactcatgaccttgttgtattttggtaggtcgtgagggaacggtgtgcgccaccttgatggtgacgaaaccggtgctccgaccctactgcttacgccattaacgagccgcgtcaagcacagaggtgagatgttcttgatctggctcctcgtacacgatatgctcctgatctattcttctctgtgatgaactcatgaccttgctgtcattacttaatttgttggaacatgcttgttgttatttgattattgtgtctagtacctgttgtcattacttagtatgagtgtgcctgatctgttcttttctgtgatgaactcatgaccttgctgttatttggtag

SEQ ID NO: 81868 - DNA, 606 bp, Zea Mays
ttggctcctagacatgaagggagcagtagtggaagcaatgatccaataggggatctacaggccagggtggaatgactcatgtcagaactacgccatggaaatagggagcgtgcgcgagatggccgccgcattgttgagctgtcagcggaggttaatcgcttgcagtaggaaattgcggaacgagatacgactattgattgggccatgaattctcggtctttcgcctgggattgtgaggcaaatgctctagcccaggtagcagaactaagcgcatccttgcaaaatatgcaagcatattgtaataccctgcttgaagaggtgcacgtgttatatgaccgtctgcatccgaatgtgccaccagaggttgcagcaatgggagccagaccatctagagcagctaatggaggacctgatggggagttggacctttttggagcccttccttccatgaacctcgcagatgaacgttctcctgaggctgacagtggagcatgagcggccaaggacgaagataattagattagtgtagtttaagtagtgtccttatgtaaagtaaataaggaagtggagttgtactaatgagtatgtataattagtactggtttg

SEQ ID NO: 81869 - DNA, 404 bp, Zea Mays
ctattagttatcatgtcgtgtcgtactgccactagtgtctagctagcggtccaggcactacactatagtgtcggcactattaggcactatagtggcaccggacacgaccggactgtccgctataggcgcggacggtccgcgatcagatcagaacatgcgtgattaagctcttttccgtgcgcgtttatcccttttatctcgcggattctattggtgatgcctaggaacgggtctagacctcccccattgtatatataaaggggtacgaccgattgcgcacattaacaattgaatcaaatcaatatatccttcgttcctttacttttgccctgggagtaaacagtaacgtagccttcttcacctctcttcgactcgacgtcgcctaaaagagtcttggatgactg

SEQ ID NO: 81870 - DNA, 357 bp, Zea Mays
tgaaaattttggctgctacaattttgcgtatcgcaaggatacgaaggctccggttcttagctaccgcaccaaatggccaactgactggaaaagtgaatggatttatattaaggccgatgagaagaattgggggaaattgatgacgatggtcatgtgcccgctgattttaagcttcagaatgaccagacccctgtgcaacatgcagatagggtcagcatgccagttggccgaggtagaattcagggtggtggctgaacagatcagcaccagggacttggtgcaggaatacttagccaaccggacgtacccaacgtccagtgattgggtgatgccgaagatgaagggaacaaagaaaaa

SEQ ID NO: 81871 - DNA, 889 bp, Zea Mays
ctgaattagtaaagaacgtatcgacgacgatgtcagagccattagcagcagtctccacattgacaagattaactcgaccaagtgtatagttccgacggccgcagttgctggatggagcttgactcccacctcagaagactagttttgcctgacaggatcattgcctcgagttcgagtggtatttgcatgcctcttagggcagacgttagcatagtgcctagattcgccacatttgaaacatgtgttctggccagtaggttttgcggaggtgtttgttggggtggcttcgtgagtttgtggagtatgggttgtggtttgcgaagcagggcatggatatgattgctacccaccacccgagtgaactggggttccctgtggtggagcatagcgagggcggctgctacttcctacttaaccctaagtgatagctttcctcttcatctcgcctagctgaatacgcttgtgttcaagggctatggccttatctagaagtttctggaaatatgggaatgagtaagacataagcttgtactgtagtggcccaatgagtcctgccagaaatagcttctgcttcttctcatcatctgcaaactcttctagagcatatttggacaactggatgaatttgtctttgtactttctcactgacatccctccttgtttgagtgaaaaaactcctttttaatcttcatcggctcgacaggaatgcggtagcttctgaagttggttgagaattctgcccaagtgatggtgtctacgacagcttgtgctacgcaataagcatgccacgaatccactgcggggcctgtgaggcaacccaatgcatacaacaccttctccctgtcggtgcatttggcaatgttgagcatcttctctacatattttagct

SEQ ID NO: 81872 - DNA, 450 bp, Zea Mays
cttgacacatagaccacgacgcactgagacagtcaatgtaccagagcttattgaacgtgcaggggttgctcctgccacaaaactaggtcatgatgtgctagtcaaggctagtacaaactcggccaaagagccaaaattacagaagacagcagaccgattgaaggtgttgagtccaccaggtgcgataggattaccgaagccatcaagcattcccgcagtgactccaaggaaaaggagaatagttagcatgctagacgctgttctggagtccgtaaagacatcagatcctgcctctgccaaagctcatagcgcgcagactaaagatgcaaggaaaattgttgttgccaacgtagccaatgctcctgctgaagttggaccttcggaagccctgccgaagctagaccttcagaaattgcaccgatagcactggagaaagagagtgttcatgag

SEQ ID NO: 81873 - DNA, 317 bp, Zea Mays
gagcggatctaatcgtagccgtccgatccagatccaaccgtctctcctctctccccctcacccgcgtctctacccctgggcccgtctggtcagtccgccctggctcgctgatgccccgaccccgcttgtcagtcgcgcccgcgtgatctaatctgggtcgtcggtttctgatccgatggctgagattaccccgtaccccttcgcgtggttattttgcttaagaacccccctggttttaggaaatcaacccgtcgtcctctgttttagcgcataggtccctggtttctttagaatagcccctggacttttatttaatt

SEQ ID NO: 81874 - DNA, 762 bp, Zea Mays
aagagtttgtcatacgtccttaaaggttgaggagatcgcttaagaagaggtaaccatcaaatttggcttcttactttctccttcattccaattctatcttacttatttgccggaggaccttaaataaggcggagaacatcggagaagaagaggtaactatcagatctcgcttcttacttcctccttccttccttccttccttccttccaactatatcatacttatttcctttttggttttggttatgtgagacatcaaatttatttccatttttggggatctcgatttaagctaggtctattcgattctagaatgaggtatgggttagcggggatgggatggttctatcttttgtgtttggttgaggggataataatgtccatgttctgtgtttggtttgaggaatgtggatgaagagaatatatcactgtttgtgatccattaaacatctgttaggtgacatctgtgtgtcatcctcaattaccctgttcttctcactttctccacacaatcagcggttcgtagccccgaccccaaccatggaagtcctattcgccaccacctttaccctagcctatgttgcccccattttgttgtgtcgctcgacctagcccatgttggctcgtccaccctgtccgatagggttgggctaagagaggtcgcactgccatgagccaagactagtcgcacgtgtcaaaggtcgtccaccatctctcgtaccacctttccttttgaggtcaggcgtaacatagctatcgagcc

SEQ ID NO: 81875 - DNA, 664 bp, Zea Mays
caatactctcttttaaagcttcggaggcaggagtggcaaccttttcaggcgaaatttgctctgtggtcttttcttctattgccttttcttcaatctccgcaagttttttctcagagggctctgaaggcccaacttcggtactagcttggattactgcaacatcaatttcggctggctttgtttcagcttcggtttgcgctttcgaggcttcggcagttttccttgaaggagaagagttcaaagtttttaccatttctaacacatctagtatattagccatccttctcctattgggagttgcggcaaaacttttttgtaccttcggcgctgttatttctgatgaagggcttaaaatttctaacacttttgtttctccaatatttgactcttcagccttatccttatcagtcttcgactcagctagatcaaccgaaggtgccttcgacattatagctggctcttcagccttctgcgtagaaggaatgggttctcttggttcaacagctgaagaagcctccccgccaaactcaggcaccacggtcggttcaatatagcgtggccggtgggtaaggaccatcaattttttgcccttcggtgcatgctcgtctggagtggccgaagtagcagttttcctcttctttccctgacctcgcagtggatagcg

SEQ ID NO: 81876 - DNA, 497 bp, Zea Mays
gtaaattggcatttcctctataccatgatggaaaaaaaggttttgggagcacttggtgtgattgggtaatgagaattgtgcgtggtgacaaagtagccattaaaactaatgatactttggggccttacttcactactcataaaggggttaggcaaggggatcctttttctcctcttctgttcaatttggttgctgatggtttagcgagcatgattcataaagctcaaattgagggtctgattgtgggtctgattcctcatatcattcacaatgggtgttgctgcttacaatatgctgatgataccatttttcttattcaagattgcttagaaggtgccagaaatcttaaattcatattgtgtttgtttgaaagcatgtcgggtttgaaaattaactttcacaagagtgaaatcttgtgttttggaaatgctaaggagattgactatttgtatgctgatatcttcacttgtcctattggtaatcttcctatgaaatat

SEQ ID NO: 81877 - DNA, 765 bp, Zea Mays
taacaccattgtctgaccttggtaaggaagggacaaccacttgtgcttccaatcaacaaacatagggctaaattgctccaaccagtccatacctaatataaggtcataaaatggaattcgaaggactttgaaagtagaatggaatttgaatccttgtaataaccattcaacgtcaggtagttcagtggtacaatgtaactgtgtgccattggctactttcacacacatgggctgctccatttgaactagtcctgaaattgtagatgcatgaatctcattcaaggagtgagagctgccagagtcgagcaagataaacatttcaatcccttgtaagctgccttggaaccgaaatgatttggaatgtttctgaggggatacaacttctcttgataacaagatggcaaattgttccgcagaatcttcaaattcaccttcggaatcctggtgatcaggactgcccaacatatcccatagttcctgaacagcatgaagttgcacactagtagcacatttgtgaccttttacccatttctctgcgcagtactggcataagccccgagcacggcgataagcacgtagtgaggccatcttgctgtcagatgagagcgttgaagtcttggcagtgggggccaatgatttgtccggcctgttggaagagtgcagaaaggtccgatcataccgggacacgtctccacgaacagggtcccgtctccgcgaggagtccgcctcttcctgcaataatgccagagcacaagcagtatcgag

SEQ ID NO: 81878 - DNA, 708 bp, Zea Mays
cagggtctagcttaatgggttgaaccgatgagcatcaccagtgaatagaggtgttgaaacgtgaacaaagagaacaagaacgaacctagagttggtggtccacggcgcgatggttcacggcagcgtggagaagtgaattgggggaaatgcaaaattggggcacggtggtgcacgataggagttagctaggaatgggttggacacgtaactaagaagcgaagcagagggcatcctcaatttataggtcccgatcaaactggacaagaattttgggattgagatcacggttatccggctaggatatttcacagtggcttgatcaccgtggcgcacataagggaattggtccgtggtcgattaccgatggcttgccacgacccatacgatgcggaggcatggttattatatgtcacggccgaaaaaatgacaagctccggtgatgccagtgtgctgtccgcggcgggacatgaaggccggtccggccagtgactggattcaccccccctaccggatattttaaccccgccccgacgttatctactcctcccgtggcacgaatctcccaagcgagcgcgaattgtggcggtagatcactggcattgagctcacagcaccggagatcttttctggtcaccgtagcattgtaatcctcatcagaagttctgacagcatgacttggagagcttcattctctaatttgtatgtgat

SEQ ID NO: 81879 - DNA, 483 bp, Zea Mays
gcacacatatgctatgcatccgactctgcccctagaaccgggtgtgacaggtacgcatccgagcccccgacccaacctcggctctctaccaggtcaaagcacaagcaacagaggccggacatccttctcctaatcaaaagcgacatccaggacaagggtcatactgctacaggggcttgggcctcctcctacaagcagcccgacgacccttgtactcttgggctcccccttgcggctataaaacggggagtctagggtcccgaggagactgaggacaacacttcactgttttgctctccactttcgatattggcatttacctcaattactcacatagacttgggattcacctccctctctcgaccagcttataccctctactacgagcacttaggtgcaagataataaatctcatccttcctccttggaagtagggttttctcttgcccgaaccagaataaatcttttgtcttcttgcatcac

SEQ ID NO: 81880 - DNA, 319 bp, Zea Mays
ggatctttttcaatcatttcctcacttaattgatcaccaagatcaaacttgaacattccctttcttaaataggtaacaccgacatctcgtaaaagcgacacacttggtcatcctttgtgccaaacaccattttttcatggttaccaacctttggatgtgtggtcttaaacctatagcattcacaatacttgagtagaggttagtctctccccctcgcgccgacgttgccataataaggctctgcacacacttagtcatcctttgtgccaccacgtcgctcccttctccgtgagatcgtatcgttagtataggctatatg

SEQ ID NO: 81881 - DNA, 304 bp, Zea Mays
cgacctcctctggccggctagcagcctccgtccatgcgtgaaattcttggatgaggaaaaaccgttctcctgcatgcatgcgattagtggaagacgaaacctttactagtgggctccactgcatgccgtgggaaacctccagcacacatgcgtggaaaatgcccccttccaaacatggccacgtgttagtcatccattagctcttcccttgtgcaagatcttctgtggcaagattctctaccgccctatgtgcggccaaatcctcagccagtcaatttgcgccacctctcgtagtttgttaaac

SEQ ID NO: 81882 - DNA, 312 bp, Zea Mays
cagccggtcattaaggcccctcataaaacaatttctcttcttcagatcagtgttgacctgatcaatgacatactgggacaagtggttgaacttgttgagatactgtgtaccttgtttaagcttcataaattcttcctgcttcatatggagcaccccttcgggaatgtagtgctcccaaaatgccagtttaaactcgtcccaggtaacttgatgaccagcaggctagatagccacataatttccccacaaggtgttggcagggcctcacaactgctgcgccacaaataagggcttctgagtctccatgcatcg

SEQ ID NO: 81883 - DNA, 544 bp, Zea Mays
atgtttagtgcaggaacatgtggtgtgtctgatgcccccaatttctatgttttaagaggtagtagttagattcctctgtgagattataaacaaaccccttggacgaccttgactgtatctcttgatcactaacacttgcatacacctcttgatgttagagaaaaacactccactcacttgcaacttgttgtacatcatttgggcgatattggagcactcctagtgtattgcatagagttcttgcatcttgttgcagtagttggatgactttggatggttacactcctattactcttggtgattatcgttacctaaatagcctagagtttgtgggatcattgaatgactattcgagattgttgttgccttcgatcatcatcgtgaggggaccttgtactcattcctcatggaagtttcatgaagagcaactataatgaaattgtggcttgttggagtgcctctttatagtgattcttactgcgtccttgttatgggcttcacatgtatgccaatgagcatgtgaatcatcgagcttagactctcc

SEQ ID NO: 81884 - DNA, 281 bp, Zea Mays
caaaaacccaggaagtttaggccaaaaactctcgaagtgaaaccgtttcttcctcatgcagctatctctgactttgagggtgaagggacaatgatctgatgatgtggtagcattactatgaagaaatgcgtccggaaataaatcttcccaactgcttgtgcaaaatacatggtccagcttaacaagagtgggatcattcctctgattggaccaagtataccttcttcccttcaaaggaacttccttcagatccaaggaattaataagaccatgtaagttac

SEQ ID NO: 81885 - DNA, 404 bp, Zea Mays
aacatcttcactgtttgaaaaagctggatgtgagcatgttgagactgttattcaaccagggtttgaactctttgttgatgatattagacacccctcagccaaagctatcgatcttggaagaagattttatatagatgtgtggcattttggtgggaggaatgtagcagatgaggctgtaaaagaaaatgcggaaaggtttctctttaacatttcgtttttaccttcagcttttgcagtttagcacttacgcgatctgcttttgtagattcataaagttgtaaagaaagttgaaacaataaagaaagccttgaggctaaaggaacttgaaggtattttacatacatactttgcatagcttcaaataattccgtctatgcttccttgagaacaaaagtgcatatctc

SEQ ID NO: 81886 - DNA, 513 bp, Zea Mays
ccagccgacgatcgactatctccaatggaaccagttcatacttgctgagccaataaaggtagatccaaacgataagcaacaggtgttccagcactttgtatgggccaaaaaatttgaacgcgagcttgggacagggtcggttcaccaccgaatgctgagcatatggttgcaacttgagcaaaaccaaatcccccacttggaactaccgctcagaccgcaatcgatccgctttgagtttcatcctgttctgagcaacagccaactggtctttcaacatctcagtaaagtgagcacgctcaaccaacacctgggccactgaattatcagtatcagatggaataagaggggcaacaacaaatggtggatcatagccgtacaaggccttgaatggagaccaatccagggaagtatggtatgatgtattgtaccagaattcagccagcgataaccatgccttccacttgtgaggttgagcatagacaacacatctcaagtacatctctacacattgat

SEQ ID NO: 81887 - DNA, 417 bp, Zea Mays
gctgatctcatctttgttggttgatggataagatggaccacaaggatatgacaattcgccccggtcaaggcaaggaactaaagattacgaaagaaactgtccatcttatactaggcttaccgaatgctgacggtggtaagccactaggaatcgatgaagcagtggcgggcaataacttgagggctgaacttggattgtctaaggatgagttcgttgttgcatctcttcaggaccgattgagaaaaggagacgatgatgacctgtctatcagatgcttctttttgatattgttcaatagattgttgttccccacttccagctggggcatatctaaccatgaggtgttattgacggaagaaatggactgtttccatgagacagactggtgccacttaattgttaatgacctctgcgaag

SEQ ID NO: 81888 - DNA, 1373 bp, Zea Mays
ccggatcatacggttgagtttgggacctcaaggatttactcgggtcgcatccatgagatgcaacacttgggctattttgggaatggtgtaggacgggctccgggggctgaagatgtcctcgagccagagggtgaattagtagtttttgaggcgttttttactgctggacttcgttaggctgcacactggtttatagttgaagtgctgcgaaggctccagattcaaattcgtcagttgacactaaataccatggtggcactggcgaagtttttttgggcggtgacatcgtacattggggagccgtcggtcgaggttttcgccaagaattacagtcttcgctggcagaagaagatgattggagggttgattccgcagtttgggtcatgctcatttactctaaggaccaaaaagacttcgggcgaggttgttgagattgtgtcgtgcgccaaaaataagtggggtaattggtgggacttgtaacaccccagatgttacccaaggcctggctcaacacattcacttgtgacccattatcacatgtggtttagtgtggggatgaagcaccaaaatttagaggcaatgtcttaatcaagtgttggatatgctagaaggagtatcttagccttttcatgcacctcaaattgggaaaattgctcaaaaccctagaaacccccctcttgagccattagacccccaagcattggattagtgggaaaactatgtaaatgaccaattcatgacttaaaccttttacaaaagttgaagtacatttatatgtatacaagaaaaagtcagggagttatttcaaaaaggtcccacaaaaaccccaaattaagcccccaagtggagagcactctagagcaacccaatttttctctaagtcaaaaatcagccctcttctaaagatcaaaggtgttcacttagttgctggcgccaaatccacatggtccaattgacaaaagggagccaaattacccaaggcacgcccctgaaaaatttgaaaccaatccagaaccgtttgacacggcttgacacaagttttgtctcgggttgaacagtgccgagaaccctgacttggcaccaccatatctcccaaactataccagatcttcacttggaactcacataaactaggtagccctaggtgcagagaagatatcttacacaagtcatatggcgagattcgcacgtttggctgctcagcaagcgctagaacttgggcagaaagaaacgaacacgtgttcgaccttccctggcaatgctagagcatgccccgacgctcggccccgcgcgcccgtgcccgtgcctataaaaccgaccgaggccttgaccatacgccctcagtcgctctcagccccgcccaagcgcaaaag

SEQ ID NO: 81889 - DNA, 346 bp, Zea Mays
ataaggacacactgtgcatgccacccaacccacaccggatctgtcatcccaagcatcgcagctcgagacccagctgggtggtactcagtttgaagaaattcatgaaaggcaacaacatattcgtagagtactggagacttgtcctgacgaagcggatgttgttacaggacatcaggtaatatatccaacgccaatagcttttttactcatcatacgtacattgtttgcatattactttttagctggatatgaaccacactattttgtcaacaggatttctgttttgatgttcgaaacaacatgttgaggaacacaaatatcacacctcaaaccacaccagcttgca

SEQ ID NO: 81890 - DNA, 1031 bp, Zea Mays
ctaatccctttatgggttcttaaatcgggttgggaaggcaaggacaaagactctgagccctcccattcttgatttgagacactttcttgacactaaacatcagattatgtgaactagggttcttagggtggctcggattccattgatagaaattgagaccctctagatcgtcataaaatcctagaatgtcaattcaagctctacctcgatgatggtccattgatagaaattgagaccctctagatcgtcataaaatcctagaatgtcaattcaagctctacctcgatgatggtagaagtcctaaacctaatatgaagggtatgatttgccatgtaccttcttgcctggtgctgatgaccgcgttggtgagcgtcgccctgtcctacactacccctcctcctcctccatcttatcatcctccacatctagtgttaccttatgcatgattagtgggaataatgggggctcctcgaatcccagagccatggggggaggggatccatggtggccatggctatggcgtttctggtcattgggaggcgcaaggtgactaggaccttatggaattgtggtggctaggttttctcgggtcttagatcgcgttggcgtctgtgctagcctagctctcattttatagcaccatcacatgatcaagggccacaaccaagacgtggtttgtgcccctaattagggcacatgttaccgcacactagggatgtttgagtctatcctccttgattcaattgccgagtcaattgacacttataacacacatatcaaacgacttgaaggtttgcctcacttagattttaatctgaacaagagcaagtacgaaggtaagcttggttttgttgctagcctctctcacctagcaagggtaggtgggtgaaaatcgctcgtccaggctaccaagagtaatcttgcctagtacgaataacttgactggtagcggtagagaagatccaaatgcatcacttgttaaaatttcttatatcaggaaaagtatctggaagatatgagttgttagaact

SEQ ID NO: 81891 - DNA, 659 bp, Zea Mays
aatcttgttatgaactttgagagagaaagaccctcaaaccctaataaaccctaagtaagccaagttaagcataaagggtaattgggagaagtcatgggggaaaatgcaaaattttagatatgatcaaattacaaagttttagttcatcaaataactaacaaatcatagtaagagagtttggccatttggtgtttttaaaattcccaaatcagcccttgaaccatgaacccttggagaaattcagatttctgaatttctgaaattcagacctcttttcaatgatcaactgcgttctctatttttcgaaactcaaaaccaggagatccaaatatcaaagttgtgccaaattcccttgaacatgtcctggaaaagttggaactcaaacctaattcgtttgacacagttttggcacagattgacctcgggaccagacattctgacactggcaccttggtgacgctacaactccctgtccctagcctaaaaccgcgcgacgtccatacacaaaagacaaagcaaggtcaggtgaacaaatccttcacagcgatcttgcccaaattcacgaagatttgcacccagccagcgcttgaacttgggcagaggcaatgggcacacatgttcgaccgtggctgacacctccggttcacgcccgttcgcgc

SEQ ID NO: 81892 - DNA, 458 bp, Zea Mays
gaggaggaggaagagtttgccctgaccatttgattcgaatgagcagtggagatcaaatcgccgtctctaatgatctggagggaatcggtggcgtcggatgaatagcgggttgtccagattagaaaggccataccccttcgtataatgagacctagaccgtcgatcacagatcagatggttgtaatcacgcgctagttcataataacgtggttagatctgggacgtcgtttccagatcctatggttgaggggagagcgggtgacttgtccagggctaatctaattagggcgcctcatttccgatcggacgaccgagggatcaagataccccttcgtcgagcctgttttgctaaatagaccctaggaatagtagtattcaacccgtcgtccgctgttgctattcactgagtcctgggaaaactaaggattagcccctacgatttcttgaaattatgcgcc

SEQ ID NO: 81893 - DNA, 874 bp, Zea Mays
gtcaagggtggggaaggaataagccatgactctcctgcacaggataacacaacccatgcctaaccagccttatggtcgggagggggtgaccgatcacatttggattggagagctagacacattaccccacgggggggggggtcatacgtagcccacggggtacgtgccctagacccttccattgctcgcaatgatcgagttgtagggtcgtctagagacgtcgcatgcggtcttgcggacttctaacgttcgtattgcaggccttcaagcgcgtctggctccatggaggcctgtgtgtcaagtaagtcgtagctctcgctccctgcctcctttagcaccataggattgttcaggccttgttcttatctcttagcagggtgggaggcagagctgatggagctccatcgatagattgacatggtgccccgaagcatccacgctcatggggtgactcaggcacagcgtatgctggatgtcccaagccatatccggaacatcgtggagcaccacatccatcgaggtgtcgccattgccctcgccgtcacctagcaccacaatggggccgacctacgcatctcagtaaagcttccccaaggcactttatctgtggccttcaagaatctgatccagggatacgacgaggccatcgctagaattacatgtgtcgtgtcttcggaggacttgttgcgttgggctccttagggccctttcgatgatcgtcttttgggttcccttgcacgggttttgttctcgcagcctcgctaggtgccacaattggaagggggtcattgtgaccttccttcttttagttgtagtcatagatcccccttttatcttttgcttggactgtcacacccggatttaaaggataaag

SEQ ID NO: 81894 - DNA, 576 bp, Zea Mays
tggaagagcaacgaagtaaagcttaatgcacaatccgaagctcataaagccgaagttgaagaccttcagaaaaagcttgccgaagctaatgaaaattttgaacatgcaacgactaagcaagagataagtgaatggacaagcacgaggctagaaaagaatgtggaagagcttcgtgaatccaaggaaagatgttatgagaaatcgttgaattgcgtcaagaaattgaaagacagctttgcaaaggtgggtgcatactcatcggagcaaaaatttattcgaggcgatcctgaaggagttattgaatggatcggtgaagaaggtgaagcttttgaagaaattcttagcgaccgcgtagatttttgcgccttcgccggtgcccgaggggttgcagcattctggagaaaaatggttgtgaacacgttaaggctgcagccaaggcagaaaccgtcttctccatagacaacgctatggagccttcgaccgaagctactttgataggcagaaaattctattccgatgtttggatgaagggcggccacgagatagccgaagaggctataaagaaaaatgaaaaag

SEQ ID NO: 81895 - DNA, 583 bp, Zea Mays
cctcttcccccaaatacagtttcaaatctgcaatgttaaatgtaggactaacccggaactcgggaggcaactcaagtttatatgcattatcatttattttctccaaaatcttatatggaccagcaacacgtggcatcaatttagactttcttaacactggaaatctatcttttctcaagtgcaaccacactaaatcacccacttcaagcttaattggttttctacattgactaccagcaattctatatttttcagtcttcttttcaatgttggctttagttgaagcatgaagtttcaaaataaagtcagcatgctccttagcatcactatgtacttgctcggtagtaggtagaggcaaaagatcaataggagcacgagggttaaaaccatacactacctgaaaaggacttaccttggtggtggagtgttccacccgattatatgcaaactccacatgcggcaaacactcttctcacattttcaagtttttcttcaatattgctcgcagcattgcagacaatgttctattcacaacttccgtttgtccatcagtttggggatgacaagtactagaaaacagcaa

SEQ ID NO: 81896 - DNA, 667 bp, Zea Mays
tacacatagaatacatgagtccctggtcacggatagttcgacttctgaggctggatggtccggtctttcacaaaacagttcggtctttaagaccgaacatctaccacagcgtaaggacagtatcacggatgatatggccctcgagaccgaagagtccgccatcacacaaagatcatctggttcctctatgggggacacgatagaggaattcagagatctcgataaattaggacaggggtttacatcggccgatcctttggaggagatcgacataggagatggtaaaactccaaggccaacttttgtgaacaaaaccctggagaccgatcctagaaataaaatgatcggtctattgaaggaatattcggattgctttgcttggaattacactgagatgtcgggattaagccgagagatcgtagagcatcgactgcccattaagtctggtttcagacctttcaagcagaaagctagaacatttcgtccagaccttctcccacgaatcaaggatgaaatccaccggctgctagaagctaattttattaaaccttgcagatacgcagagtgggtctccaatattgtgccggtggagaaggagtcaggtaagcttagagtatgcattgatttttgtaatttaaatagagcaactcataaagatgaatatccc

SEQ ID NO: 81897 - DNA, 302 bp, Zea Mays
ctttgctgttgccgaagctgcacccgccgaagccgaaagtgccaaagctgaaaccgctaaagatgtggatctagatgtcgcgctctctaaaattgatacaatgcttctagatgcggccgcggaagaagctgctgcagccgctgaagcgatcccgggcatagtggctggaaaaggaaaggagaaagccgaggatatttcagaagaagaggacttcaacttccaagatatacttgggcaagaattgtcgaaagctgaaaaagaagaactgaaagagtatgttatatcttgcggatacagaccag

SEQ ID NO: 81898 - DNA, 744 bp, Zea Mays
gacagatccactttgtggttgaatcaagcttgttctagcgatacaaaagacaagataattgtgcttaacaaaaaagttgttgctcaattaagcactggccaactatattattctaattttcagtgttaatattctcaagaggttgtctctaatgttcataattattgtcgtggtacgacatcggggtaggtaaagtatctaaaagttgaaatacgaaatgtatagagcggggcatatgttggatatgcattgaacttgggggcagtcgagtacagcataaggatagttttgagaggttagagccacaatatgtgtaataccctattgtctttttgtgagtgctggattgataaacacaaagatgaaaaagattacaagctctactatcaactttgatcatggttgtcgagtcatacgcattgccatgcttttaggcatgccactgtgtcaaggataccctacttctctggtagaccgtacctttcacatggataggtatgtcacattgtatcaatggacaccagattccacgcctttggtatggtgcaattggtaactgatgtagcaatctttagtttataatactctcttagaactttttaagcaatactattaagcacttcatcaacaacttaatctactatcttatacaacacttcaagcttggacagccagtccctcagctctggatcattctctagaacatattcttcgggttctagtgggagagtagttgtgtgaaat

SEQ ID NO: 81899 - DNA, 447 bp, Zea Mays
ggaaaatatcaaggtagtgtgtgaatacctagatgtatttccggaggaattaccaggtacgccacctgatcatgatatagagttttctattgaattattactcggaactgcacctatctcaaaaagaccttatagaatggatgtcaaagatttagttgaactgaagaaacaaatataggaattactagaaaaaggtttcattcgcccaagttcatccccttggggagccccagttctatttgtgagcaagaaagatggttcgagaagaatgtgtgttgattatagaagtttgaatgaagtaacaattaagaataaatacccattacctcggatgaagatttatttgatcagatgaagggagctaatatattctcgaagatagatctaaggtcgggatatcatcagctaaagattcgagcagaagatgtacccaagacaaccttcacc

SEQ ID NO: 81900 - DNA, 969 bp, Zea Mays
gaaggtggttgttcccctcggctaaagtatttctagagacgaaggccagaagctgataaaggaaattcactttagcttatgtggatcacatattggccctagagctttactgggaaaaatctttcgccaaggcttctactggctaaaggcagcttcggacacatcgtagtttgtgcagaagtgtgacaactgtcaaaggtgttcaagggaccaaaaaacaactttcgtccctaacccagctgatacaaccaacgtggcccctacaaagatggggaatggatataataggcccaatgccagtagcacatggaaatctaaaatatgtagtggtgcagtatagtatttctccaaatggatcaaagctaaggccttggcaacaataacttcggctactatcaaaaggttttcctagtagagcaatatttgccgcttcggagtcctaaaatccatcattgttgataacgacactcaatttgattttgaagtgttcaaagcattctgtgaccaagtgggaacaaacatacattttgctttggtcagacatccagagtctaacggattggttgaaacagcaaatggcataattttactaggaatcacgaagtctctagttggattgctgaagggcaaatggatagaagagctcataaaagttgtgtggaatcataacacatcaatatcaagatccactggctttacgccgttcaagattctcttcggggccgaagttgtacccccaaacaagtcaagatgggttctacaagagctacagccttgtcataggatcatgaaaatgagaaagtttccaaggatgcaatcgaggagtcaagactcgaagcagtcgatcacataaggaaatatctagcagaaacactgaggtggcgagacaaaaagtaaaactcaagaacataacactaggccatcttgtcctccgaagggtagctaacccagacatagtgggaaaattgc

SEQ ID NO: 81901 - DNA, 1154 bp, Zea Mays
cagtacaggaaatcatcttcgtctgtactgttaaacactaaggcccccttcgggtacttcagttctcgggcatagtgcttggcttcaaaaacttcttcttcagataaactttttctcgaagcatgtcgaacggtataatcaagaccttcggacggtgcttcgggagcaggggatctggcttctttggccatacttttctctagagctacgccagtatctggagattcttcttcggccctttgctcggttgcggcgagcttcgtttcagcgggcactgagggcccagcttcggtttccatatgtgttgtagcagcttcggcaaccttcttcactgaagcaggagtcagtgctcttgttgtttccacaacagcgtctagcacgcttgccattcttctcttgggagttgtggcgggagcccttgtcaccttcagcagttctacctctgccggaggactcagaatttttggcatcatcactgttttttccaattctggctctctggccgcatcatctttggctggcccgactataggcaccttcggcactacaatagatccttcagcgctccgagcggcgggagcagcttgttttgcttcggcagcgaaggaggtcccttcaccaaattcaggcactacggtcgtttcaatatatcgtggccggtgggtcaaaacctttattttcttgcccttcagcacaacagtggtggccgaagaggcagtttttctctttttccttgccttcgcaaggggtagcagtaatcagggtatatgaagccaattgcatcaaaaaccctgttcaatcttttcttgccccaaccaccgaaggctgaggacaaggcatcatcttcggctctagtatatgtcccaagcaacttgtcgctagtagcctcaacacatttcaaccagtcatcatttggttcgtcgaacttctctctgtatctgaaggtatatttcaatcgaaccaattcgccttcactggatccagcaacagtctccttcgacatctcccagctatccacaagtggccacactctgtaggctatgtgctcttggattatgtctcttgtgccaatgaaagcatagacattgctgaaagccttttgacacgcttcgacatcattttcaatcgccaccctcggcctctgaaggtcaaag

SEQ ID NO: 81902 - DNA, 486 bp, Zea Mays
tctatctggggcttcagttctgccaattctgtgggagccatgcggtatggtctctttacgattggtgcggtgcctgggatgagatcaatgtagaattctacctctctttccggaggcattcctggcaattcttccgagaacacatccatgacttctaccatagatatactttctgctgctaggctaaacaccattggatcttgggttggtggctgagccttacacaaaactaattttccttggtagtcaatgagaagaataatcttatctgcgcaacttatgatgccattgtgcttggtcaaccaatccatccctaggatcacatcaattccgtgggatgggagtacggctaagtccgccaagaatactaccccacttaaaagaattctgacttgggagcttttgaggtggcatagaaggtctgaccctggggttcaggtgaccaaaggaatttctaaagatgcagtgggaatgccatgcttttcc

SEQ ID NO: 81903 - DNA, 533 bp, Zea Mays
catcttgatcaaggctcataaaatttgcaataaacaacttaagcccggtgttcttcactatgaaaggatttagaatcctcacaaccttaccattgattgttttgaagatcttattgtccaagtaggtgttgttgtacttgatgtcttctctttcatgtgagtgtcctccctttgtagttgtttctttttcctgccaaacttattgaaaatactcaagaaagatgttaatagcacaagggagtatatgatgaaggatgatttctttagttaagaaatataaacaattcatcattcataagtcacatagacatgaagtaaaatccttaacattagtgcatttcattgagaaagagaaatatgcaccttttaaacattttgatcaatcattggaattttacttcttcatattgaatttagtaatcattacttagaagcaaatcaatatgagaacatatatatatagcaaaggcatgaattggattctaatggacaagtgtatttttgaaaatgagattgaatgcacatctagttaa

SEQ ID NO: 81904 - DNA, 925 bp, Zea Mays
gtgaggcaaattctcgtccataaaggcccacaacaatagaacggtgatagcctagacccgcagtctcgatctcggtcagcgcaagaggcttggaggaatggcggccggggttgtcgacgctagagtacttgtacaacgggttttagcaggccatctgaggcttaacccggcgttgcattaaaacacgcataagccacacgctggtaagaccgtgctgcttcaacgtggtgatcgcctttagaagctgctccacttagctcttggaacgtgcatccgtgccatggtgccacttattcgtcgaaagcggctcccatccgatgtacggtacagcactgccgggcagattcttggcgtagaaccactcaccctcgtaccgaatgatggagggaagcaagatcttgaaatactctgccttccagctagagaggagttggatggaggctgagccaccaaacgattgaccgccacgacccaaagtcacccacgcgctaaagagatactgccacaacttccaatagggatcgatgcccataaaagcctcatatagcgtaataaaacacgctatatggaggacggtgttggggtggagattctggatctccagctaatagtagtggagtatcccccatacgaagggacgaaggggcaggccaaacccatgcttgtagcaggacgcaagcacgacacctcgtcgtcccttggatacaacacctcaccctcattttccaatctccaccccgagaccttcgttaaggggatgaaccccatcttctctagaccaagaaggtagctctacgaattgagcaggatgggaaggaggccatgggcgcgaggagcaagcaggacggacacacgagcaaggaggcgcgacggcagaaaagctcctagggaaaggaaagacggaggctggagcatgagaaagcaa

SEQ ID NO: 81905 - DNA, 590 bp, Zea Mays
attttgttgggttgtgacacaaatgtagatttagccttggctcctgtgattgaggttggacataatgtggaacataaagagaacagtacaaagatgcactgaacacctccttcggctaggaaggttgagcatctgatgaaacaagctctttctgcttgttgattgtatggtggtatgttcttgtggtgtggcctttgtcctcaccacgaaacaaggagaatggcttccttgtaggtgtactgaatctgccatcgaaactttggcctctctttcgcctctcgaagaaggtggatgaaacgtgttatgcaaaggctgctgctgagacctagcttgttgatgggagcttgcttgctactgacccgaaagaccctaagacagggccatcttttcttcaccctacatcgggttgtaaatgcttcgaacatgccttggttggaaccttccctcgaagcccctatcatctttggtgtatctgtgtaactcctcgcttctttggcagaaatcattttaagtccttatgtattcatccatcttttgcagcaaattctcaagggaatggggaaatttccttgcaaaatattgggctactg

SEQ ID NO: 81906 - DNA, 341 bp, Zea Mays
atcgtgtaaatgttcaccattctcccacacccgagagtagtaggagaggtacaaatagaaatagccatgctccaagtggtcaggtcatgttaatatcctccttgggtcatttcgaacaacaaacttagtgatccttcatctttatacccagagatcactatgttctatgatgtctcatctttctctagcatgctcctaaactaggtggttgcactatccatgtcctcttgttgaacgtatccttgtaagattgtattccatggcaccagatctctatcaggcatgtcatcaaacaatcttaattcataatccaactttcactcaccacaaaaccacccatc

SEQ ID NO: 81907 - DNA, 480 bp, Zea Mays
cttcttcctatttcgcggggcatagagatcgccctaagatgagcaatcgcaaacgtgcttatgctgaatcgagtagtcgcaaacatgtcgtgccgatttaagtcactatcaacttaaaccggatgctccgttggtagggtctagtggtcaccctgagttaagtaaacgtgagcatgtcacaccgccttaagtctttgttgacttaagtcaattgctccgttagcagggtatagtggtcaccctgagttaagtaagcgtgagcatgtcacaccgccttaagtcattgccgacttaagccgattgctccgttaatagggcatagtggtcaccctgggttaagtaagcgtgagcatgttacaccgccttaagtcattgccgacttaagcctattgctccgttaatagggcatagtggtcaccctaggttaagtaagcgtgagcatgtcacaccgccttaagtcattgtcgacttttgctgatt

SEQ ID NO: 81908 - DNA, 549 bp, Zea Mays
gtgaccctcgcgtgccaaatctatcacctcatgtcttggttcgcccatgttcggccgataaaggcaaatgaaaaaatattatcgttggtgaccctcgcgtgccaaatctatcacatgaggtggttaatcggaaggctccggatagaagtaaggctaataagaccgaaggctcgagggggcatggtgaactaggtatgcccaaatgtaaaagttttggaggtgaaggtcatcataaataaaaggataaaaggtcgaaggttacttttgagcaacttctggctaaatatcacaagcaaatcaagggaaaggatgtcgatcaaactggcaatgctaagtcatctagagcacctttgaagacatcaaaatcacctccaaagcataaatctagagatcagggttggcgaggagaagagtttcatgcatcagcaacatatcctctatttgggccgccaataccaatgcaatatgattcagctctttcgtactttcatccttatccatcttggggctggtatgattcaaatgcttattcttcttcatattttggac

SEQ ID NO: 81909 - DNA, 498 bp, Zea Mays
gggaaattcattggcgaggaagggaagaccccgagatctccggcgacggccatggcggcaatcattctcaccctcacagtttctccgttcgttctcagctatcagcatggggggcggattcgtggcttgagtcctgtttattctgtgaaggaatccggatgcgggcggcgcaagtggagggaatcccgatttcatcggggttgttgcgccatcggaggggagcccactgcggtgacggcgagatgtccggcaacaaagtccagaacgtctatgggataaagtcggggctgtacacagggtcccatgtgttagtgaggtgatccctgagcgcgactggagaccgagccgtgggcccgtgtgtcagtgagcgcaataacctcacgcgagaaggggaggccagtgagcaggagcgggacccaccggtcagagacccgcacccagggtagcgtggtggatctgggctggttgcagggaactgggccaaaagtgaggtagccg

SEQ ID NO: 81910 - DNA, 758 bp, Zea Mays
gctttattcttaacaagaaagtcaagagctcaaagtttgctcctagagtggacaagggcttcttgcttgtttatgcatcaaatgcgcatggatatcgtgttttcaacaataccaccggtcttgttgaaatagcgatagacgtgacatttgatgagtctaatggctcgcatgggcatgtttctaatggcactgcaggaaatgaagaaccaccttgtgaggtcataaagaaacttgcaataggtgaagtgagacctcaagaaaaggatgatgaggaaggaacgttgtggatgaccaatgaggtttttgatgtgggtgcaaaggtggtgggtgacaaatcttccacccaagcaaacccatcaacctcaagtcatccaagtcttgaagaaaatcatcaaccccaaaggatgccaactgtggtagaagatgaacacgaaagtgttaatggtgaagtgcctcttgatcaagtggatggtgaggaggagcaaattcaaagacaaccatcagtgccccatcctcgagtccatcataccattcaaagagatcatccggtggacaacatcttgggtagcagcaggagaggggtaacaactcgatcctgtttagcaaatttttgtgaattttactcgtttgtttcctctcttgagccacttaaggttgaagaagcgttgggtgatccggattggataattgccatgcaagaggaattgaacaacttcacccggaatgaagtctggtccttggttcaaagacccaagcaa

SEQ ID NO: 81911 - DNA, 770 bp, Zea Mays
ctagtcaatgccaccgctgataatacacgcttcttgcacgaaatggcgggcaaccaattccaacagcacggaggcagagttcttccacaaggaccgcgtgatactacttatttggaattctctgagactcgaccaccgctcttcattgaagcagaggaacccttagaagccgacgaatgggtgagagtgatggaatagaagtttgggttaattcgatgcacagagacgcaaaagcccatgttcgccgcacaacaagggcctaccagtaccaggtgggcaaatttctcagcaatctagcctgttggacatcagattacctaggaggagttcaagttggcattccgggagcattatgttccagagggagtacttaagatgaaactataagagtttatccggttaaggcaaggaggagatacgatgatgcaatatctcaacaaattcaaccacctctctcagtatgccattaaccaggtggatacagacttgaagaaaaagaattgttttatgagggggcttaatgacaggcttcagcggaaaaaggcaacatgcttggacctcacctacaataaggctgtcagtacagcactggcagtggaagccaaaaatgtgggacatggaaaatcaaaggggtttggaggtgaaaggtcaaatcaagggcctgaaaagagaaccaggttggtgatccgaccttttaatcaaaatcgttcttcgcctcgcccaccttcatatccattcaagcatcccgtctttattcgtcccactactgc

SEQ ID NO: 81912 - DNA, 909 bp, Zea Mays
caagcaaacaacaagatgagacattagcgctataatgcctacaagaggcaagctatcttactttttctagcccccgttgttcccaaccctagtcactgttgtctcaaggtcgggtacagtactttgggtcggccacggatgtggagtctttgctaggggtagaagcatcatagctcctcgatgttccatgcattggcaagcatccttccttccttcctttcccttcagtttgtaggtgtccggccgtagtacctctccgatcacaaacggtccctcctaggttggagacaacttatgtcaatctttgttgctttgtacttatcggagcagcagatctcccacttccaaagttctttctagtacggaacggtcatgatacctttgtagtgtttattggtaccttgctaaccgtaggagcgatatgtcatgggctttgttgagctgaaccagtgcatcttggaggcctagcttgttcctcttgtccgcgtatgcctttacctttggggcctcgtactcgagatcagtggggagcaccgccttagctccattagacatgaagtaaggcatgtacccagtcgaacgattcaggtagtccttagactctagaggacaatggttagctcctggggccattgctgattttgtcgcttgaggtgggaaggatcatgttgttagctcgttccacctgttcattcgtgcgggggtgggccacggcagcctagtcagcacatatttggtattcatcgcaaaaatctaggaatctatttctagtgaactgtgtgtcgttatccgtgaaatcgagtttgataccacaatgcgatggatgatgttgttgacgaacttgaaggattgatcagaggtgattctcgtgataggccaggcttcaatccacttggtgaattagtcaac

SEQ ID NO: 81913 - DNA, 435 bp, Zea Mays
gttcactaatattaccatttaagcaggaacttttcacatccatttgatatagctcgatgttttgggcacaagcaaaagcaagaagattttgaattgcttctaatctagccaccagtgcaaatgtttcaccaaaatccaatcatgtcacttgagtatatccttgtgccagtaatcttgcttttttataaccaccaaaccatcttcatgatgtttgttgcgaaaaacccaatttgtgccaataacattgtaattcttgggtccttccactagcaaccaaacttcattccaggtgaagttttttagctcttcatgcatagcattcgctgaatccacttcttgtaatgcttcatctacatggttaggttaaatacaagatacaaagaaataatgttcacaaaatgaagaattacgagaacaagtttgaatgcccttact

SEQ ID NO: 81914 - DNA, 742 bp, Zea Mays
gtttatatgaactagatggtttgctcatgcttgcactgtaatgaagcttattttaaaaaaatcaggcaaatatggatagatgtatgaatttgcaactaacagagtgcagaatttctggttaccatacagatgatggtggaggcatggatcctgattctttgaggcggtgtatgagctttggattttcagagaaacaatcaggatcttcgattggacaatgtattgccaacttttgttctataatcagcaagtcatatcctgaaacccattgtctaacgttttggcatttatcactttgatcagatggaaatggttttaagactagcacaatgcggcttggggcagatgttattgttttcagtcgctgcactaagagcaggtaccatatacctcacttaaatttctttcctttgtgaaccacttttcttttatcaattgaaataatgccaagttattacttgttttcagtgggcctacacaatccattggtctcctctcttacactttcttggtggaaactggacatacagatgttgtagttcctgtggtacgctgtgtgattttattttttaaactgcacttccataatttctggtgatatattttctcttcctaggtggattataaatgcaatctaatgaaaggacaaactcaacgactggagcgtcatggttcggaacaattcttctcaaatttgtcagcattgttgaaatggtccccttttgcaacagaagaagagctg

SEQ ID NO: 81915 - DNA, 337 bp, Zea Mays
cctttataataactccaagggctcttatgcaaaacctatgcaacgaaggggtatggataaacctcggtcgtccgatcaagggcaaacaacgccgattagaactgatttcaaatgaaacggtacggatctgcggtcctccgatctaacttctacggttacgatttaaaatgactgagcccagattctggccatgcgattaagatccaatgcatcagattaatccttgaaccggtatgtcaccacgaccacgaaccaaccgccccgattttatactgcagtgacccgctccggcccacccgatgcagatccaacggccaacatcactcgaatgaactgt

SEQ ID NO: 81916 - DNA, 634 bp, Zea Mays
gccaggggctcttttgcaaatcggtcaggccgaaggggtattggtcactactggccgcccgatcaaatatcgaaggccagtattagatcttggctttatcgaaccggtacgcaatcgtacccgttggatcagcgatcagctctctagattttatgaagtccagacagttcctagcccagggatttagatccaacggccccaacgcgaccccgaaccggtacgctctatcaatcgttggatcaaaatccgttggcctagattttaatgtgccacgatcagtttaactcgtgtgatctcgatccaacggccacgcgcccatcgcccttagactcaatcgtgaccgttgcggattaatccaatggctagggcagacgctaccttccttctaatttcaaccgttctcatccgatccaatggatgaccgacatctccttcctccggtgtccgaacggcggtgcgctgcctagcgcggtggtgccattgcagagccgccctattctacgatcacgagcccaaaactcggagtaaactggcaatgaatgttacagtggttattgtgaaactgggagtgggttcataccggagggaatgatgctctgaagatccggctcacggcgcagagcggaccgcggcg

SEQ ID NO: 81917 - DNA, 463 bp, Zea Mays
gttaccacatcattcattgctattgcatagttttgctgccaaaatattgaccaaagccgaagcttgctcactgcttccgcaaccgaagctatttattttgctcaagcttcgtaacgagaaagagcttcagcaaagtaaagaaaaattttcaacattcaaaaaacaagaaattcaatcatcagatggccagagtgcgtttcacagctaaggttactcgcgacggggaggaagccgaaggtgctgaaactgccccaatctccgaagtgatgaagcgctcagggctggtagcatcggaggatgcacctgccgctgaagcagagcaagctgatgttgaggagactgagtctgaagatgattacagcgcagtgccaagtaaacccagccacctggattttgggaaatccaccatctccgaaggtgatttgcctaagctgttgaatttgggctattttagtgaagcgaa

SEQ ID NO: 81918 - DNA, 625 bp, Zea Mays
gccgcggccgggacttcgcgccggacctcggcgccattgccgagtaaccaaccgtccgtggcagccagctaggagaacgggggaacctaattaacagcagtcgcgtcggcagcccgcggcgacatgaaaatgaaaaaaaaaaacacatccatctgtagctacgcgtaaaaactgatctactggacgctttgactaatgctagtgtagtgtaggtgtagtagccgtgtaggaaaagaaatgcagtccatcttgcatctggtgtgtacgtagaatactagtacgcgacaggctgtgcgtgtagattacgcacgcgagcatgcaccgcgatccggacgcccaggaggccaggacccgggtgtgtgtctgactctgactcccggggcccgcattgtgatgagctgagctgtaagccgctgggcctgggattcgtgtatgccaatcagccgatgtggcgagccaatgaacggcaaacgagtcaacgactcggatttgccagcctgaggagcagattttgctatgcaaaaaaatttgcgtttgtcttgtgctgcaatatttcgtatttcctcttccggtcggctgtatgtagaaggcgtacgtagagctgtatacctgtatagtatggctt

SEQ ID NO: 81919 - DNA, 509 bp, Zea Mays
gtggcatacctggtaaatcttccagaaacacatctagaaattctgacacaacctcgataatctcgagtggatctgcttcacttctatcaacagccatctgataacaacttcctttctttggctcaagcgggactaactcggtcaccacttcctctcctagtggggacatcaacttgattgtcctcttatcacaactgataactgcctggtacttatctagccagttcatccctaggatgacatctattccctgagtacccattactatgagattagcggggaacgctatcccccttatttccacacttacattcaagaaaattctatcgattcgaattctaccaccggctgagtcaatttgaatgggggttgacatggtagtgattggaagattatgtgcttctacccatgatgcagcaataaatgaatgcgttgctccagtgtcaaataacacttctgcaatatgggagtcaactggaaacatacctactatcatgccgggggtttcc

SEQ ID NO: 81920 - DNA, 275 bp, Zea Mays
aaaacgcagcatgtgtttggacaacagacatattgttacaaaagaatctgttgaacacagaaaatgcagcacggacggtctggtcccaaagccggatggtccgcaatccgaacggtctgcggtagtaacgtggacggtccacacgtacgcagagtcagttaggatttctaatgcttatcgaattcaactccgagggcctgatgcaatacataaattctaaccttgacgacctagtctattattacccatcatctgcaaaagaaaatggtttctgg

SEQ ID NO: 81921 - DNA, 1032 bp, Zea Mays
ctgaagatcgaaccctgacaaatatctgaagaacaccaaaagatccacggcactattgatttggatgaacttggatggatcagtgaggatttgatcgcctgggagtagctcgatacgtggcatcgttccgcgggccgagccacgtgtggccggagttggtcaccggcgaccaccgtgactcgattaacttttgtcgtggtgtcacccgtgcctcgatctacctcactgtacttctcctctacgtggtatacatgcgctagcaaggttatccgcggccgctgatcgcttgtcggtccgccgtggctttaaatagcgtcatgaaccacggcgaggcacacaccgcctcaaccgcaagcttgagaagaacccaaaattcgcactgccttctccacctcctcccaaattgattgtgcacggtgaaactacagtctcttacgaccgtatagccccaatcccatcccccaatttcacccagagccggcgcgacatcattttccccttttctctgtcaccggtgagcacaagactccgcgctccttggccggaccactctggtaaggctctgcctctctcgagtgttgttctagcagctctgtaggcacgtaaagctcaccgtagcatccgtttgaccaattcgggcgtaagtgattgggaacacgggaccaacatcatggtttccgccatgcacgtgggcagaccattctcaaagtgttcaagccaaagtgaagctcgttcctaggtcgccttgggtaggttatgctccccctgtcgctcgactgagcattcgccgccggccagggccagtccgtgcggcgtcggtgatgaacggcgaacgcgtcgtggtcggggacttatttggagaagaaacgaagtttcagggacctcggtgtaagatgtcagtgactcttagaaaattctgtagaacgttttgcaaattagttaaaacctcgggggcgttttcgtaaagtctacaggtgcgcgcgcgtgggcagtttccttcgggcctgcactgtactgggccagtttaagccc

SEQ ID NO: 81922 - DNA, 648 bp, Zea Mays
cgtcgcggttagtcgtgttaggcatatcaggtgatcgccggagggaccgccacggtgaaagccatttagcgcttgcgccagtggcttcctctccggccgccgcacgtctcaatccaaattcatcggccaccgctctttcctgctataaattgagcctgccgtgagcttcgtagggtagtcaagcaccaagccaccaaactgtgccctcaatcgatcaccagagctcgctaatttctcattccccccaaatctgttctccgccaccgtaaaagagcctcaccgtggttagcgtgttccaggtctgttcgtactccatactttcttgttctaacatccttaagtcctcctgaagctgctcgaccaattcaattgggttaggttgcctggatcgccgggaacacgttagttcctttgactgtctgcattgtctctgtggacaggatgatttagagtctcattagtgaaattgagtgaggggaaatggttaggagggattcgatttggttaggatggtttagagtatcatcagctaatgttggaggcattcattattatacttggctatatttagaaaacgaggaggaagtagaggttgaagagacaaggacttcatcaccaccaccacctcaagaacatcaggcagacaac

SEQ ID NO: 81923 - DNA, 549 bp, Zea Mays
cttcttggccacagaactcagagacatttttagcaacagagttaaggtggatttccttaaaacccttgtcagtcttaaccccatttcctatcaagtcaacaaaacgacggagaacaaacccagacattacaacagtccacctaagagcaggcctagtcccctgaccagcaacctcagagaccatgtcagccatagctagaacaagtaaaagattaggggggaagatagtataagtagaagaaaatagcagaagtagcatagaagtaatatagatagtaatgacataggtaagttcatcattgctagtcgacaatggtatcaggatgtaagtaatgtcatcattgcaactgagcacatcacataaaggaacttagcacaaagaaagtgagttcaaaattgcaaatagttcatcattgctaatagacaatgttctcagccaacaacttagcacaatactaacgacaactatcccctatgtgaggccctattctgccacatttgttgagcccaattgtccctggtagcagaccaggcagcattgtccatgac

SEQ ID NO: 81924 - DNA, 373 bp, Zea Mays
gatatacttgagggcgatccaaaaattatgctcacaccggcatacacaccttccactcttccggcgcagccgagtcgcttcatgttagtcgtttgagtgagagcagttggatcaggtcatcctgatcaaccgtgcaaggagtgtcggctggacgcttgcagaccaaataaagagagggcagtattccaaaggcatcccattccgactattcagcgctagaagctaatatcccgttacatgggcagctactgatgtttagccttagccttgtctgaggtgatttatatccacttgggtagtgttcggtagttgggcgccaattaaggcagtagttgaggcaggtcataaaataattgggatcggaagcgtccac

SEQ ID NO: 81925 - DNA, 638 bp, Zea Mays
ctttagagtatcatcaataaagcgcgacaacaagacctgctctagttgcctctcgctgcgaactatggtcaagattttccgattgttcaatatgctgatgacacattattgataatggaagcttgccctagacaattattttttctcagagctgttcataactcttttgcaacctcgacagggctcaaggtgaactataataaatcaagtatgtaccccatcaatgtttgctgagctaaaatggaaatactagccagaacattcaactgtcagacgggttcaatgcccttcacctaccttggtgtccctcttggtctgtcaaagcctagaatctgccactttttaccgctcattcatcggattgagaagagattgtcctgtacttctgcactcctctcccaggctggtaggttagagcttgttaactcggttttctcagctctcccgacctttctgatgtgcaccctgaaaatttcggttgccacagtcaagaagattgatacttatcggaaacattgtctttggagaggaaatgacgtcaactcgaagaaaccagctctggctgcttggagcatgattactcagactaaaagcaatgggggccttggagtggtcagattggagacgcacaacaaggc

SEQ ID NO: 81926 - DNA, 426 bp, Zea Mays
tagtacagaacaaaaatcaatcagtgcatattaggagattatgaaacatctggcattcaatttgcttgcatccctggcgtctgtctatccttctctacattaaagaaaccaagagccaaaactaaagcaggttaatgaacagattaacaaaaagtagatacggatttggatttttatatgtacaacgagtaaagctgttttcatggggccgtggccgactggccgtgagtgcatgagatcagaggctaggtagcttagattaacttgatggcacctttattccgttctcactagctcttttttttttgttttgcactcaccttttacggtgttgtcagtgtagatcagatcaaggagctacccgccggcagcttttctacggtttgcatgcatgcagcatgcgtgcagctgccagttcactgttca

SEQ ID NO: 81927 - DNA, 355 bp, Zea Mays
acacacggattggatccccgggctaaatcctgcaggtcctgttgcacgaatcaaacgatggctgataccagacgatggatcctacgggtgcgctactaacgctccttagccgaagctgtgtacaggtccaagtcccagtcgtggctacctcctgggggccgagtcaccaactctttcttaggtatgctggtatccagcctcgacatgtcgagcctacatcccaggggggcaggtaccaggagaggagttggtaacgccacacacagcaagagcaaataccatacagataagagttgtttaattgatagttcccaaaaatatcttacaaggacaaaagttattacatccgccttca

SEQ ID NO: 81928 - DNA, 1080 bp, Zea Mays
tcgctgtatgccttaatgcatgtgttagatttgatttgttggacaaattttgtatggttgtatgtttttatcatatttaaatttggtggacaattttgctggacaaatatttgaatttggcggatttaaaaattatgtatgtgtagtggatatccgttacctgcgagtaatggatgtggatactgtttttttatccatagcgggtaacgggttcggatatcggaaataagtcacggatatagatgtccataggcacttttctctgatagtccagaggcacttttctctgatagtccagaggcacttttctctgatagtttatttgttgccatctctagtcttacggatgatttggatggggttatcaggcagatagatgaccaatgtatagaattttggagtgctaggatctaagtgggaggttagaacttcgttatcccttttacccatcttttcatttgactgaatggtaaatctgattgttttatgtgtaaagagcaattgaggttgtgttttcaagattgcaatggtttaggtgagattttctgtacaatgtgatgaaaattcatttaacaaataacaaatagcttgagatatgttttttggacctatcacttgaattgtcacaacaaactggaatagtttgaactgcccagcaaaaatttattatagacagaaaagtttctaaaataatgcatgtattgttaagaaggaagaatctaactgttaggtgcacattaaaatcgagcaccattgtctagaattttggagtgctgcgatgcgaatggaaagtcataattctatcatcccttttagacaacttttcatttaactaaatgataaatcaagggaatttcaaacttcacttggtctgcaaagatcatatctaaggtatgagatgctcaaccgcttataagttcattaatataatgaattgtaccttatatttacttgctaaataaaatgtgacagttatttgtccaaaacaatgaataaaggactttagatagcatgactcgtgtcacaatcaccattatgtatatgcaaatcaaaatttgagcagattagctgatattttct

SEQ ID NO: 81929 - DNA, 608 bp, Zea Mays
agttatacatttctttgtggatgacgatcgtgtagagaagacaacgacgacgttcaacactgtctcgttgttgtcaatgacatgaaagacctgcacggcgaggaggaaaacaagctatggcaacgaagttgaagacgacaagttgaggaagcgatcgagcagtcgcgtagagtgcttcccaaaaatcttattcgtcctctcctgatgcagaatcagggacgtacctacatagatgcatgggtatgcagctgcatacccagtttttttgccaaaaaataaatatacatgtatatagtatatgtacgtatgcaacactatctctactcttgaaaacttcttccatgatcttgtcagacccattagtttttgtcttccgcggctatcctcctggcccactagaccactatgggcgacattccgcggctatcctcctggcccactagcccactacgacaatgttcctaggacatctcttcatctcgcatacccagtaaagaaattttgggcccgccactgtgcaaaatcactgagacaagaagagataaaacctagatgtattggtgtgttgtgtttttcaatgatagcatgcacacatatttataggaaga

SEQ ID NO: 81930 - DNA, 410 bp, Zea Mays
gcacaagtgagcagagggggaagggaagggaagggatgagggatgattcaaataaagtagttcatggggaagggagatgagttatccaactatctggaccgttgattttgatagtgtgttaagtttgagtacattatgtttggtgaatttagtgggataatgagtatggggtgatttggttgtgtgacttttgcaaagtttaaactgatggattatatagtggtaagagcataactcttttctattatataaatatatgtaactttctctctttaacgtatacaaccttatatctaactttctatctttaacgtacataccattctatatttaacgcaagttttttattattattattttcccggatggtcccccctcccctcatcacctgtgcttccgcgaaacaacgc

SEQ ID NO: 81931 - DNA, 1251 bp, Zea Mays
acaattttagcatttttctacatttttctataattgttttaactctggagtaaaaagaaaaagaaaaacagatgaatagtattggaccaaaaccagcccaggtcggcccactaccagcagaaacacgtccacgcgcgcgcgcccgcgcccgccgtggagtttttgcaacagggtccttgcagtttcggttatccgttaagaaccccaggcgactgtttaacgtctcactgacagtttgcagaaacatccccgtgcttctaacctttctcagtctgagtccacagcggcgaaccgtgctgggagctgagctccggcgagctagaccggccggatgacgcgacggctggagctcccgaaagacaggaacacaattgaactcctaccgatcatttcccccaaatcaattttattgttggcactacaaatcaatcggtccacggtgaccgagcggaggggtaagaggatgaacacattccgagcaaacgacggcgaggacgaccgaattaaggctggggaaaggttcacgggtgcaccagggtctacgaacattctttgatttaggtagaacaacacccgaagagcgggtcgacggtgagggggggggttacggcggcgttttacagagcaaccgcacgttccggtgaaaggtttcggcttaagttcgattggttggtactgggagcaatagggggctaatagcaagcaagaacatgaaacaattgggtaagtactcactcgaggaaagctggccacggagatgttcttcgcggcggagttaagaacaagggagcgagggatttggggactgcgtgggttttctggtgatcttgagtcgggcgcttagttgctgagatgtgggatacagtgaagaagcaacgctcgccctcaatttatagtctaccggccggaatcggatgagcttcaccggcggtaatcgtgctggcgagctcacccgcacggcagagccacggcacaagtccggtggccgccgtttaaccgggttgcgccacctcagtaacttttggccacgtcaccaggaatcctttaccgcacacgccggcgacccatcccacgccgcggtggcgtccttatcgctggcgaggggctgatctttatcccccccccaagtactgtaccatggccagtttcattcagatgaacctgatagtgcaactttaggtcctattttctccagatttcctattgtaccaagcccaaacatctatagcaaagttgttctattataaagga

SEQ ID NO: 81932 - DNA, 331 bp, Zea Mays
atggaaccttcatagataaatattaatcgattcattgcccccttgctggagtgacaccagatcaactaaatctaattcgtaatccctagagcaaaagtgttcatgacaccatgacacttatgctctagatcaccctaggaactaatcgagtttgagggcaaggtaacgtaccatgcaaaaagcagtattagtaagggacaaagaaaataagtgaatgcggaaggcttccctgtgaacgtgaaaagcagtaccaatgaagattatagcaagaatatagagtgaaagagaagaagaacaaattgtagaaaaataaggacacaagacacaataa

SEQ ID NO: 81933 - DNA, 488 bp, Zea Mays
ggatgctcacgatatttggaacattctcaaaatgtcacatgaaggcgatccaaaagcaaatagacatagggtcgaggccttggaagtgagctcgcaaggtatggttgcataaatggtgagtcacttcaatcactctttgatcggttgatggtgttggtcaacaaaataagagttcttggtagagaagattggagtgattctaaggtcactaggctattcatgagagcctacaaggaaaaggataagagcttagcaagaatgataagagaccatgatgattatgaggagatgactcctcatcaattattcgccaagattcaataacatgaatcaatggaggcaccaactgtaacacccctggtgtttagcatactcattcatggcatgtgcatcatgaaggcattatcatgagcatcatcaatcatatgatcacttacatcaaaatcttaaattgccactaatggttgtgaagtgaacccttgcttgca

SEQ ID NO: 81934 - DNA, 536 bp, Zea Mays
ggaaaatcaatggttttatctcctctatgggtctatatgcgcatccacagagccccctctcatttgcgcgctcacattcgacatgtagctgctcaaaatgcgcatttgtgtccactctctactggatattgcctaaacctaagtcctcaggggtctcccatggcctatgataataaggtaacatgtgcttgggtcagtccatccctcgagcactaacaacacttaacgacttaagtccatctgctagccctaggatacctaaagagtcaccaacctcatattctaattgcggttaagacctaggaccttaaggccacaaggcccttgaagaagaaaaaggacttaggacacctaagtgtaattctattacaatgatgtgaggatgtgttgggggcccaccaaaggcagtatgttggtaggagatggaccccacatctagggtcctgaggacaagtccagagtgatagcttaatagataagtctcgagtacaacacattaaatgcatgatggatgatattaataggtctgacaaata

SEQ ID NO: 81935 - DNA, 673 bp, Zea Mays
gaaatctcaagacaaggctataagtttggctaagaaagtgaagatctatagatctcaaagccaaagcatccaaggctatggaaatggaagaaagtgaggatggagagagtggaagtgatagtgatggagaattggctcttattgtaaagagattcaacaagttcatgaagaagaagggtcaaccaagaagaggacaatcttcaaggaaaatgtcttcaatgatagaaagtgttttgagtgtggggagtcgggtcatattgcaatgaattgcccaagtaagaaaaagaagaacaaggatggagaagacaacaagaagaagaaattttaccacatcaagaaggatggcaaagcctatctagtggaatgggattcagatacaagttcggatgatgatgatgatacctcattccttttgaattcttgagctcttcttgcatggcaaccacccaatctaaatccttcaaggcatcttcaatcccaaatggcttaaagttggactcaaaagagtaattctcacaaaaaatagccaaatgaaatgtgcttcttcgtgttcttactccgccacaggtgatgagttttgacagcggtctgcacacatgtgctaatctcggccgtctaacatcggtcgcacacacccccaaagacatcgattgtgccattccacaccaatgac

SEQ ID NO: 81936 - DNA, 1086 bp, Zea Mays
tggggggtcctcaggttggcttgggatgctcggatttggatttctccgacggtcttcgctttcaggattggatttccagcaagtttaatcgctcgatcaacctcctcccgggtaacttcgaccgccatgagtttttttagtcgtctcctttggcagatgctccttgcgattgtgctcagagtctgtggggcttctccttcaatctttcattggtggctcggcggacttattcagggtctcgcccctttctgatcgggtctttcgtttctcgctttcttgcaagaatgttggtttcgcggtttatcggcttcgttcttactcctgctctgtgttcaaagcgtatctgcacctatggaactctggcggtccaaattggatcattgaatggcagcgttattcagaggaagaatcgaagtcttggaaattggtttctcatcgccgttcttcaccggtctcgttcgctgatatcgttcgtaagccagctctgtcaggtggaaacttggttcctttgggttggccgggaaggcccggacgttcttccttaagattaaagcagcggcattcggttttcgatcggatttccttcccactccgccccgccattgatcaaggatatgttgttcgttcgcaatttcaaaaatattcaaattacaacatcggccgcgttgctagctccggatttcggtcatcattgaggacctctcgcgttctcccttgggccccgcggaagttgatttggtggcccaagaagattatggaacagtgcccggggaatttggggcaggattctgtccccagacttaatggctctgcagacccagcggcgacgggccaccgtcatatttgggacctttctctctcaggaaaaaattcacaaatatttggtctttcggggcagaagtgcaaacggccttttggctctttccccaataagttcgagaaagcctcctgggtgtatcccccgcgtttatggttcaggccccctctgctgtcgcttacaggtgggcctccttcgccgccctttttaacaattttgctgagttcactcaggcggttctatcgagtagaaactcttcgccttccatg

SEQ ID NO: 81937 - DNA, 550 bp, Zea Mays
ctgcgcattcggatttgcgctggtcgccgtgattcgtgatgggcacgcagtggatatcctcggggaggtaaaagatcttgcggggaagcagatgtggtcgcaggggaagcttatcaccgtgcctgtagtcgttgcgacgtggccaaaccgacagtgtcgttgtggacactccggcgacctcaattatgccatgtcgtgactcttcactacgcggtaataaccgtggcacacttaggcttaccctctctgaaccactgcaacggtgaacgccacgattgcgccaccagtgatcttcctctccgaccgccagcgcgccattccaaaattgaaggtcaccgctcttgaacactataaattaagcacactgctagctccgttaggtaatcacgaagccagagcacccgctcctgccttcgattagccaccatagctccctaatttctctttctccccaaatctgttttccgccaccgtgaaagaaccctcgtcgtggctagcttgttccaggtctgttcgtgctctctgctctcccatttcagtatcctttggt

SEQ ID NO: 81938 - DNA, 483 bp, Zea Mays
tcggcagcaaaaagtcctgtgaagccgaaaaaacggagaattattcaagtgacggatgtgatccatcagacaccgccaccggcgtcggtgtcacaaattgcccttgccgaaactgccgaagccgaaggcgccgcagccgaagctattggaatggaaactattgaagctgagatcggcgaagccaaagataccggggccgaagccgggaccactgaagagtcgaacctggaaaccacacttgaggttattgacaatatactcttgaaaatggctgaagaggaaactgctgcagctgcggtgaatacggcaactgaaaaggggaaagagcaaattgatgaaatttctgaaggagaagattttaattttcaagatctacttggacaagagttaacagacgctgagaaagaggagttgaaaaaatatgccatatcttgcggatataaatcaggcgctatgctatttggtggggtgaacgaagggaaa

SEQ ID NO: 81939 - DNA, 366 bp, Zea Mays
gacccctagtccaattggatggtccagtaagcatcgcagacatgtgagagagctcaaacgaggaagagggagggttggactgaccgaaaaaagggctggcgacggtgaggtgaactttgcggtggcggaaaccagttttggggagaactaggaattctcgagctctggtgaggaactgctaacaattaacggtggctgagtgcgtgaggatggggtgaagctcactgcggggtcaatttatagaagggtaagacgatggccgcgaattttgaggaggacgcgcggcggccggaggtggaagaaagtactggtgcacgcgaattcgtggccaacggcgtggcaacctccccggcgatgatgggatgg

SEQ ID NO: 81940 - DNA, 495 bp, Zea Mays
caccgagagaaagaaccagggaggaggaagaggatcggtgacgcccgccgttgtgttctagggtccaaaccggcgattggtggccaaaaacggacagtgggtgctcggcatcgtgcacggtacgtgtgcgcagagaatcactcccggggatcgatccgggtgcccggaatttctcgccgacgtgtgcgcctccgcgggagatccggtgtgccgtggtctgctcggacgcgtcatcctcctcggtgagttccgtgtcccggtgattcgcctcgctattctatgcgcatagcacctttcgggtcgaggtttggggtcgtggctcgctgaattgtccttcccggccaaggtctccgccgggttgggcagcggcaccgccatggctggtagtagcgggagtagaagatgtggtgttgaccgttgatcagccaacggacgcgcgagatctgaagccacgccttccttcgcgggtgtggtagatgtaccgtccgatcgaaa

SEQ ID NO: 81941 - DNA, 475 bp, Zea Mays
ttgggcgagcggacaaagtgactcgatgtcatgaatgcggcgaagagaatgaaggagatggcggtggaggactgatcggtgtgtggaggagaatgaggactggccgatttccggtctctctgcggtggagaagatgaaagcgacaatgggtatgtctagggttccgccgccgcgtgcgttgcaggtgaggtgagctagataactgcgagctcgtgggtgggatcgtgggcccgatacatgtaatatgcgggacgaaatctacgcgatggcccatagactgacacgtgcattactgtttcgtaaactgaaacatataacatcataataccaatatttgtgtggggactagtacggctacccagattgcgggagcacaatcttctcgtgggccaggatacccggattgtgcgcagactatacttgcataaactgatatacatatcagcataactctcattataatttggcgtaagaa

SEQ ID NO: 81942 - DNA, 537 bp, Zea Mays
gagggaactcatgtcgagtcttttattatgcaatgaaaaccagaaaaggtgttgcaccacttagcaaacaaatcccaattttggtttcttactattcatcgtcctcgcggtgaccgtgctgcttgatcatgttccaacgatggtcgctgttgagcggctgcgccaacaatctggtataggagctggttggatgcactatggtggatcatttagtctgctaaggagaccatcaaggaagaagtgagtcataccacgccaacaaccggtgaacgccatgagcgactcgtcgagctcctgcgacggtgttaggcagagttcgctactgtggcccatgctcatgcacgacaactacttcttgtgggcgatggtgatgcaatgcaacttcgaggaattgggtagcgggggtgatcaacccagggaccggtgccaagcggacgcaagactgtcaagcaatgagtgtgctcctgcgctctgtgcctaaggagatgtggcagtctcttagcgaacgcaagactgtgaaggaggcatgggatgcgg

SEQ ID NO: 81943 - DNA, 711 bp, Zea Mays
gttcttcaagctccaaatggatagtaatgacagcggtgcagtttggaccctagaacgaccatccattttggatgtctcgattttgtcatcagcggtgggggtataatggacagggccacgaatgcccaggttcccccgacgagcgactcgctcgacattaccgaaggccttggtagcctctagcttggccacccaagaggagttgaggggcaacaacgtgtgccacaacccactttcgtcgagatcgtgggaacgctagaccccgttcgaggcttgttccatgacgtcctcctatcgtggttagaatgtggacttggttccccttcgagcgagaccaaccacaacctagcccaggaatgcctcatgactgactcagtaggggacccctctccactcgaggagagccctaaggggatcctcgtagatgccatgatatatgccacgacatctgccaggcctcgatttagcatgccttcctagaaatcgccgctggtgcaaagcccctcccggggcggttgaggtcccaccgccgagaggcggggattgtcgcgatggtgaacaaggcggttacgccgaggcgcttggcaaacacatgttgtaatcactagtgtccaccaccgcctgatctacggtggggctgacccaccatgattctcttaggcaagccacaacgtcgcagccactattgcgctcctggacaaactccccgag

SEQ ID NO: 81944 - DNA, 404 bp, Zea Mays
ggtaatcagcggagcagagcaccttccacaagatggagggaaagccctcatgggaaaggtagtcaaaactaaagcgagtgtatcctccattgctggggtgggtgaagtcatctaggaaatagggttagatgtaagtgctaaagtaccggtaaggagaaacgtgtgctcaagtttcaaaggaggtgggttaacttagatttatctattccaacccatttcttgtcatccattattaacaatgcttgtcaggttcatagtttgatgtattttttccttaacttttaatttcttcatgttttataattcatgcatgctggaaagaacgtcttctcacctttcagaggggtgcttctagggcatccctacactctaaggttggcctatatggcctacttatgtagcca

SEQ ID NO: 81945 - DNA, 363 bp, Zea Mays
ggctcaggaccgtttgtttctgcaaattggtagcgtggaccaactccgttacagctagaaccgttgctcactcaattttgtattatttcttttgtgcgagggaggttgaattcatcgtcacacaagggcactaatgaccattccagtattatgaggtccaatttaactgattgagtgatcggtagaaagtcaaggtggcttgagcccatcttcatgagccgaaatgtagagttgatgacttgatgagccgaaatttgcatattttatttttcttttcagttagtgggagggcgccaaacttaatatattgctcagaccttaagaggtgtacatagttcagagagttaagttatcagtacttcc

SEQ ID NO: 81946 - DNA, 547 bp, Zea Mays
gtcttgtgttaccttccgacgatcaccagtgactctcacgtcgacggcgacgcgacgttggccacgaccatcacaaaggaagttcagcctcgtccctacaaaatccggcgcgacgacggcatcatatctggcggggagccccaaaaatggccatgcatcggcctccccacatttggcagcgagggacgctcgaacaaagcaagcgagggtgggtagcggattgcggtgaaatggcgagggaaaccgagaaaacgggtaataggaggaagcaattttgaaactgatgacagaacagaataggagagggtggctttgcgactcgctggaaaaaaaatggcggcctaagggagatggcacctctgtgccgcagtataagcgataagagagaagtagagggggtgagggagagagagagattgaatgctaccttcacagaggaccaaagtaggaaacactcatagaaagtgatgatgacgtcgaggccgcctgcctccgtcgaccgtctagactctggaaaacattgccttctaatctcctgacacttccc

SEQ ID NO: 81947 - DNA, 272 bp, Zea Mays
aaggacctttaactttttgcccttcggcgcaggctcgactggagaggccgaagcagcagttttcctcttctttccctgacatcgcagtggatagcgatagtcggggtagataaaaccaatggcatcaaaaactctattcaatctcttttttcccctacctcctaaggctgtggatagtgcattgtcttccgccttggaatatgatccaagcagttcatcactggtaacttcgatgcattttagccagtcatcgtttggttcatcgaatttat

SEQ ID NO: 81948 - DNA, 336 bp, Zea Mays
gatttctgaagcgatgaagcagtctgggctagtaacatcggaggatgcacctgccgctgaggcagagcaggctgatattgaggagactgagtccgaagatgattatagcagagcagtgccaagtaaacccagccatctggatttcggaaaatccaccatctctaaaggtgacttacctaagatgttgaacctgggctatttaagtgaagcaaagaaagagttgatttgttttggcggagaagaaactactctgaaaccaggaaaagatgaagtagtgatcttcaaaagtttctttaaagctggtttaagattccctttgaacaagatgatcgctga

SEQ ID NO: 81949 - DNA, 508 bp, Zea Mays
atttttaggaaagtccagggctctaactacaaaaactaggacctatttgtattgatctactcactagacttgactgcgggttgatttaatggaaaaccgagggctcttttgtaactgtttcacggctgaaagggtgtccttaattcccagccgcccgatctaaaaccaacgacacagattagatccccaagactctgaatcggtatgcatccctatccacaggatctgaaagcaacggtcctgattctattacggctacacctcatcacgcccacccgatctcacatcaacgcacagatctgagcaccgcagagatgcaacaagttttaatctcagccctacgctagtcattcaatccagcgaacaagtatgctggatttgatctcatccaccggtcatgcatccgacgactattctacccatcaccctcatctccctcatcttccggactgaagccactacaacgacgcccagctccagtacggacgtgccatggccgagacctagc

SEQ ID NO: 81950 - DNA, 567 bp, Zea Mays
cacgaaatcagctctaaggatgaggagaaaagtcgtcttttgcactgctgctgcctgctgcttcaattatcttaaatatatgcatgtacaaattcagaagtaaaaaggaagtctatgttatgtgtgagcattgcatattgtatatataccatgtgtactgagaaggaaggcaaagaaggcgatgagatggagatcagacacagctccctccatggccatcgacgctgctctgctgccctccctgcctcagagagaagagaagagcagaaaccgtcctatatataggatgcggctccgtgcgttcactcgtccattccgtggagacgctccatgtcttaacgtacacgcatgttgttgttgaagctaaacaatgcttgtatccagtagcatggtgccatggacgtcaccctctctttgtcgccaaacctgcactgagagagggtgcagcctaagttcctgtggcctggtgagtgtgcatgacccatacaatacaacaaactaaccagcccgagttttcatcttcacgccgagagcagctggttgacaacttcatggtcagaatgacct

SEQ ID NO: 81951 - DNA, 363 bp, Zea Mays
agcgttccactcgaacttggtagaaatttttagcagactcttgatgcgtggaccctttgatgaccctacaactaccaccccttccaaccgcacaaccacatctccttcagtccaacccaaccttctttccggtcaaagagggtgagtccacaaaaaactacacatcctccaacatgtcctaaaattcaacactatcatcccttgtcctaagcacatgtcatccgtgatgcaacctcactaatttatccatctacaataataatgcagcaaacatagtcacataccatgctcatatcattcaacgcaatcaaaattattaactaaacatatataccggataattcaatatctattgtacctaag

SEQ ID NO: 81952 - DNA, 653 bp, Zea Mays
aagttccaggctgcactgccaacaagttgatgctgtcctccagccatctcgggccgacaatggtagaggtacttacaaaacccaaaatgaggaagaattccaaggaaagcttcacaaagatgaatacacacaacaatttgaagaacaaaactagggtttaaatgggtaagattcagagaataaaagtcgagaaggccgcggaagaaaggagaagctggcagggctagtccccggatgagaaatggcatgaatataacagtctcgtgggtatcctctgtcgaaacagcaaccccgtgccagatttgccaggagcacaatttttttggcggaagaacaacaatttcaacgaggtgtagaaggtcagcttcgcaaataatagacatgtgattaccagtgaatgggagttggctgttgggatcgtggtctctcaaacgatgcgggcgattcaggaactcaggaaattgggaaacggcggaggaaaaagtgagaactagggttcagaactcaaggggggacatcagcagaagtatgggttggcgtgttaagtcgggcgcaaagcagcaggccgataactcaggaaaagttaggatcgcaggaaagcaaacatcactcgagcattacctccaaaatgctattgagccatcaaatgcatg

SEQ ID NO: 81953 - DNA, 592 bp, Zea Mays
ttccttcgtttctgggtcggccagggggtcgaacggttccgttggcggagataattcagctgcagtggaaaaaattaattagtccgaagccacaaaaaaaacaaaattcaaagctgaacatcaaaagatattacctatacgtttttcgcgctctacagcttcttcggcttgccttgctgctactcgagcatcatggttgtctttttcacttttcttcataatttcgtgagccatctctcgtccaccatttacctagatgtcattgtaaaatttcccgcccattgaacttgcttcagctgagggatcctttgtatcatccatagagaaggtagcttcgccccgggccatggtcttgatatggtcgcatcccgccttctccaagatggctgaaattcgcgtgaaccgaagaatgcgcagacatccccacgatcacttaaaatttcttcgaaggcttcggcctccccacttatccattcaataacgccttcggggtcgcctcgtatgaagttttcttcggaagagtaggcgcccacgttggcgaaactagtttttattttcttcacacaatccaaggacttttcaaagcatcttt

SEQ ID NO: 81954 - DNA, 405 bp, Zea Mays
gataagcatacataaaaatacgagagtatgcaagacttcaaggatacgagcataccaagacaagggaatagaaaaagccaaaagataacgacttaacatcggaataggaagggatctcagaagacaagaaggtcatggacatataaaatggaatgtttaaataggaaatagagttttcagaggtaagtatttgaaacaagagtattgaagaatctaggggtacaagcatgtcaataccaagggaatagagatggtcaaatggtagcaatttaatgctggaagaggaaagaatcccaaaagacaagaaggttatggtcagggggcatctacaaacatgtcgcgagcacaagagatcagatctaatagaatgaacaagtaaagcatagacaatactagaataaaata

SEQ ID NO: 81955 - DNA, 443 bp, Zea Mays
gtatcgagtgagatggggtccgtcctcggccttatatacacgaccaaagagttatccctttacaagttgtgatcactatccactctactaatctcctcctttatcgcagtttgcgaccctacatattcggatttcgatcaccttctcagtcgagtcatcgtcgaatgtttagctcctaaggtgtgcgcaactgcatcacccgagatatcaatgcttctgtagcatataactcggacgccggtcttcgtcttcttgtatcaagttcacacgacctgattataacctgctggcccatcctacaggacaaaccattgggaagcccattaggcggcccatgatacgttttagtgtttgtgagaacccagtggatatctatcccccacaaaattctcaccgaaatcgcgacgtgagagttccaagccacaacgtgaagcggctcagct

SEQ ID NO: 81956 - DNA, 425 bp, Zea Mays
tgacaatctagttcggtttgctggggaagaggcgattccagagccgaaagatgacgaagttgtggtttttagaagcttcttcagggcaggacttcagttccccctataagaaatgattggcgaggttctaaagaagtttgagatttacctttatcaacttacccccaacgccattgtcagactcagcgtgtgcatattggctctccgaagccaagggaaaagtgcgaatgctgaagggttttgccgggtgcacgaactccactatcagacgaaggctagagctgatggtctgcacaagaacttcggatgctacaacttcgcataccgaaaggatactaaagatcctgtgattggttatcgcacaaaatggccaactggctggaccaatgaatggttttatgtgaaagctgacgagaagaaaagga

SEQ ID NO: 81957 - DNA, 422 bp, Zea Mays
ccgtcagtatctccttcccctcgctcgacgcggacagcccttcttcctcgcaaggatcggatcgcgctgaccggctcggccgtgatcccaggaacgcgcctacttgcttggactctacggattggtccgcgtctctgcatagctgatctcccggttgtcatcgcgttcctcaacggtctacccaaccgcgcggttcgcgcggaggtcctcccgggcggagctgaccaaacccgttccctatcgcctcggcccttatatgggaagaattgacgtcaccacctccttcccttgccctctcgtttagcactagccgcgcagtcgtgccctccatagccgcctcggagaagacttcggctgccgccatggccacttgttccgccaacgccgcaacacacaaccaccaccgacggggcctcgacggg

SEQ ID NO: 81958 - DNA, 338 bp, Zea Mays
gtgctattataattttgcgtatcggaaggatacgaaggcccgggttattggctatcgcaccaagtagccaaccgggtagactaatgaatggttttacatgaaagctgatgagaagaagagggaaaaactcatgagtatggtgatgagtcccttgaagccgatcttcggcatgacccgacccttgtgtaacatgcagttaggggccccttgccaattggctgaagtagaatttagagtggtggctgagcacatcagtactagggacttagtgcaagagtacttatcaaacagaacatatccaacttctagtggttggggaatgccgaagagaaaggaag

SEQ ID NO: 81959 - DNA, 529 bp, Zea Mays
aaagaggaggcctttaggtattctgagatgactaggggctttgtcagacgtttcaacccaaggcatgtcaggaccatagataatccaaattagagtgaagacaaaaacaatcacactcagggacaacaaagtcactctcaatccacaggaacctagcaaagcaccttcagaccaccggccccaagaggtggaagaggaggtagtagtttcggaggaagattcaataatcaaccaaggaaactattcaaccttttctgtggatagtacaaggagcatacaacaagaacctgtcaagtcacgatatagaaacagaaggaaatcaccgaagctaaagcacaacagaatcagtcgaggcaggtcctccacaccgcctcatactattctacatacattcaagagtatgttcgcgaccaatagccaagtccacaaccatcagcttcagttgcttcagcaagtcactcttcaccttgatggatcctgccttagccgttcacacaagcacccctcatcatatgagcaacaacatcca

SEQ ID NO: 81960 - DNA, 1488 bp, Zea Mays
ctagtggatgaagaagttagtgggctagctaatgaccttttgtgataacatgtttcatgtaatcctctctattcaaggcatacttaaacggtgtttatgtccactcaagtaaaacaccacacatcaatttgccacatcgtttctcaaaaacaaataaagaccatgcaaaattttgccaaattgcgtgatagaagtgtccaatcataggttaaggttgtaaggcacgtttttccaccatatagttgctaaaacttggaatataaagaattcaatacaatagatcaccttttaaaccacaaacgacgtttacctgatgtcaagggcattgcattcacacgagagggttttagtgtacaactagtggatgaagtcgttattgggctagctactgaccttttgccttacaaccttaacctatgtttggacagttctctcactcaattttgctaaattttccatggtctttattattttttgagaaacgatgtggcaaattgatgtatggtgttttacttgagtggacataaacaccatctaagtatgccatgaatagaggggattataggaaacttgttataacaaaaggtcattagctagcccactaacgtcttcatccactagttgtactctaataccctctcgtgcgaatacaatgccctcaatatcatagaaacactatttttagtttcaaaggggatctattgttttgaattctttatattccaactttttagcaactgtatggtggaaaaatggtgtcttacaaccttaacctatgtttggacagttctcttactcaatttggctaaatttcctgtggtattttttgagaaacaatgtggcataatgatttgtggtgttttacttgagtggacataaacaccatctaggtatgccttaaatagcagggattataggaaacctggtgtcacaaaaggtcattagctagcccaataacgtcttcatccactagttgtactctaataccctctcgtgcgaatacaatgcccttgacattagggaaacatcatttttagtttaaaaggtgatctattgctttgaattctttacatttctactttctagcaaccgtatggtggaaaaaggtgccttaaagccttaacttatgtttggacagttctctcacgcaatttggctaaatttcccatggtctttattttatttatagaaacgatgtggaataatgatgtgcgatgttttacttgagtggacataaacaccatctaggtatgccttgaatagaggggattataggaaacttggtatcacaaaaggtcattagctagcccaataacgtcttcatccactagttgttctctaatacccactcgtgtgaatataatgccctcaatatcatagaaacgtcatttatgtttaaaaggtgaactattgttttgaattctttatatttcaaccttttagcaattgtatggtggaaaaaggtgccatacaaccataacctatgtt

SEQ ID NO: 81961 - DNA, 424 bp, Zea Mays
ggaaagtggacgaactggaagccaaaacatctgtcctaagtatttagagggcagaattgaaaaccaatgatgagagcattgtagtgccaaaaattcaacttctgaaaccttggtactcaaatttgaaaactccagtgatccatgcctgcagcagaacaagaaaattccaccaacactaatccatcagatagcaaccagcaggattagagcgttgtagtggaagcaaaaaacgataatgaagcctatgaccatgtggtactttacaaatatgaaaacaccaatgtttctatcatagcagaagaacaaaattcgtacaacaccactgcatgggagagcaaccaacaagataacatatcctcacaagaatagttcttaaagttaacaaccaacaaagaaaatggtcatcttcaagagaacaaaggcg

SEQ ID NO: 81962 - DNA, 595 bp, Zea Mays
aaggcctaaaggcgattaaatccctctctagtcaaaattaaatagaataggatttaatccctctcaggaacggtggcctcgagtgatttcagaccggattgcttgcctaattaatataagcattgatgaattggaatgaatcctggttgaattccggaacaaccgaataggctctcaatccattccaatccagacacagctgaacaaggccttaagtgagacttagagatgtcagtgggaaaatttctaccgggtttggacatcccatacccatccctataaagctatatttctctccatccccatacccatcatgggtataaggtttacctcgtactcatacccattcatccatataaaactatattcattcccatctccatacccatcatgggtataagattcatctcatactcatacccatttggttatcagatcctcaatgggtccccatcctctaaaaaacattgccacattatattttatatgacattaacaaccatatgacatccaacaacaatacatcaccaataaatctgacatgtaacaagaaaaacattgttttaactatacaaaacagcaaaaacaaagtgac

SEQ ID NO: 81963 - DNA, 574 bp, Zea Mays
cccaccgcgcctgagacaacaggcaatgtgaaccgcacgattcacgctctacgctccagattcaaaaccctaaaatgaactctcatctgtccgatctatattggacggctctcatctccccaacctgaatcgatgcgcccggagtaatctgatccgccgaacggtcatccaacggctaggagtatacgcccccaaaccaacacgagttgcggcggcgccgcccagagatgcggccgcgctcctcaccggtggtagctctccgatgatctgaggcccaattctagtgtatagctagcgcaacgcaaataggggaacttagcggaccgattgacgcattccataccgtgggtcgaagctccgctgttgatggtcacggtgaagcaacaacacggcggaaatcccaagtccgacgaggaattccgcaaccccgatggtactttctcctccgcaggcgccgcgtatacttccgccgccccgagacggttgtcccgcaccactcaattggctcctaacgacagtgaggaagcaaaccgacgacgacggccgccggctgtggcgtaactctcggtgaggg

SEQ ID NO: 81964 - DNA, 417 bp, Zea Mays
gtcgccgaccttgatggcggcgcaaagaagacgaggagcagcaagaagaagaaaggcatgtcgctctacgtcgagcagatcggtgacccgtttgcccgggtgcgccatgcgacggacaacgtgatgctggtaattttactataccacacaccacagaatgcaccccagccgccgccattgacgctccagtttgatctcgtgtgcctgcggcatgacagtgatgctcatgagtgtgcttgatttgtgcaggttgctgagtatggggagaaagacgaggtcgtcggagtgatcaaggcgtgcaccaggatggtgagcagagggaagaagcagcaaagcttcagcggcagctcaaagcagtttgtcaaggtggcatgccttcttggcctcagggtgtccccctcccacaggtgattaaac

SEQ ID NO: 81965 - DNA, 928 bp, Zea Mays
ggtgggtgggtccgataacatgttatttaaaggttactgacaagaaatataacatgttagcatgattttcgagttgataacttaaaaaacaactgacatcaatataatcttcagcatgtgtaactatatctttcataaatctaaaggcaccaatcttggatggtggatatgggaagtttaatttgcttgcaccctcaaaaacatccatcaaaattggtacgaaggacaggtctgagtgccaagtcgatggacaaatagcatcatttattgctctattccaaatagaaatctcgtctctgcttgcaccttcatacttccgatatagtttgaatattaaattctctctagcatagctagtcataaagcaaacatgtgtaccaagaaataatttatcctcatttggtaagaaaattttcacatcaagagcgtcccgaagattacgccaatatcttatatacgaatccagatacggtggacgacttgtattggcactacaaaggatcgtttctaggagactaagaaattcatctacatatttcccattgaaccatttcctgctttctttggctttttaacatgtaaaacttggtgttcaataaatttgaaaccatccagtgtaaaggcaccattccaactatagcccttagcaaatgctgttgtaaggcacttcatccatgatgagatgaattgacaccctattagtgtcatctgtagggaaacttgtccatctgggaggacaaccctttctgtgaagttgttgctgctatgggagacataatctgctaggctaatagccatgaaataaacatacaagtaatcatgttcttacaaatcatttactaaattgcagaattcggcgctccttgatccaaaatccaaagacttatttaatcaacagattcctagagaggagatcggcttacttggc

SEQ ID NO: 81966 - DNA, 723 bp, Zea Mays
cggaggataggatgtgtagtcgggaaagaaggtctgcatcatgtcttcctcgagtgaggagtccctaggaggctcatcacccgcagaaaaaccagatgcagaagacgtacgatgaggaggaggaggtggaggaggagggtggtgatggtaaccagagccagaaggccacgggtcaccaggaatgggtccctgacccgggtagggaggaggagaatagtgaccagtgccggatggcctggggtcaccgggagttggtccctgacccgaatagggaggaggaggatgaggaggatctgaggtgtagtaggggtcatcaaactcctcggcctcatcctccggggtaatgaatggcacaccaaactcctgttggtgcccctcattaaggtccatgggggaagataggggttggatgtggaggggacccgggagggagaggataacctgtctccgctgcataacaaagaaaatcctcattcagccggtcagtcctgcgacgacatacagactcctcgaccgcccgagtgcggcacatggcgaagacgccaagaaggcccttggccagacgaatgaaaagtccccgacctcgaccccgtccctggtccggaccacttcctctcccgctgtggtccatcagacgtgaggcagcggcgacgcgagaggaggatgggtgatgtggaggctgaggaggtggctcatcagaagaagcagggcctccggaccctg

SEQ ID NO: 81967 - DNA, 888 bp, Zea Mays
aggcgtggctcaatcttgaagacccacgccagtttctagagcacatcaaggcaaggggaagtttatccatggcaaggggggtagggagataagatggcactatagtagatatttcggacttggtgatatttcaatgatgaccaaagttataaacatccttgccatcttgtcatctctatcttcactctattccaaagtaagacacggcaagggaaaaatcagggatagatatttctgcagttttgaatctacagcacttgactgatcttcccctcttcagtcatccctttctccttattctgattaagaacaggtcagtctccattaacagaacttgttcactaatcaaggatctgcaaaggtactataggtttcttggatgcaaacctcatagattacaagttatagtacccaaaaatcagctacatcacactggtaccatttcaattttctgaacttcaatcttcagtcttcatctgattcctcccttttcgacagagatagtttgggcacccttatcttctaaatctgtatgacatcaagctagcgtctcctaataaaacttgctcaagaatactagctctccaactttgctttaaccaacctggcaccaagtcacatagaatagcttctacaaggcctcaaagttgatcagacaggcagaaattcagagtagatctgcctgatcgtcagtcagaatccataagcctgacagcccgactttgagcatcattttccctaatttttgcacaggataaagcccacttgtcttaaaaacacttaatcaccatccgatggtctctattttgtctacataactcacaaccttaaacaccctagattggtcacaaaaggacttcaaacctagctcgacatactgcattacag

SEQ ID NO: 81968 - DNA, 381 bp, Zea Mays
ggagctattggtgcctttgagggtttgggctaaatattaggaatcaagccaagattgcttcaacaaaacaattttattggctcccattcaccccacctctggtcacctattcaatccttcaagatgcaatattgtctttatggttgtgtattttgaggatatcttcctccgaagtcccggtctcctcttcctcctcttggcgttggtctgtatcgaaagttgtttttttatttgtgtatgattgcttgaggattgagttagcccttgaggttgcatatggtttcctcgagttgttgtggattcttgatattccttgcatgccttggctctagccaaagcttctcgacacattggcatattttttgatttcttcccaacatt

SEQ ID NO: 81969 - DNA, 271 bp, Zea Mays
cttctagcatccgggcagatgcttcctgtagagcgagcgaagacatgacctctctcggctcagcgcacgtttcggccagctcatcaatagagccttcttcaggatacggtccgtactagaggttgttcagctcaaaaacacgattcagtttaacatttgaattgcgtatatcccagcttttcggtgtctcagtcttcatcaagtatttaccaacaattttcaccgcctcagcctccatctctctaacgaaggccgcaccattccgtccgcg

SEQ ID NO: 81970 - DNA, 523 bp, Zea Mays
ctcagatcaactagcccaggactgcaggttgttttctgtaatcaacaagggtttatttgcaaaatggccaagccaaaggggtatcgggtgttaggagcctttagatctaagacctgcggctgggattggatccagatgtttcatgatgcggtatacgattgccaccgctggattaaaattcaagggttcaggttttatgaagctggcgctactctgatccattcgatcctacggcccagattcacccaacccgagatctaatcgccgctattggattcaaggccaacggtccggatctcactgaatgaaagggtacatcacttctaatcgcggccctcaatcatagatccaacagtccccgcgaccttctaatcctggccctacatcccccatcccacgctgcacgcgagtcttctctagccaacacccaatcccggcgacgtgccacacatggcggaactccctagccggagcgcgcacgaatcaatacctagagctccgatcttcccatttgatccccgac

SEQ ID NO: 81971 - DNA, 839 bp, Zea Mays
aggtggatattgatagcgatgttgaagcatgccagaaggcctttagtactgtttgcgcctttattggcacgagggatttaattcaagagcacatatccttcagggtgtggccacttgtggagagctgggatatgccgaaggaaactactgccgaatccagtgaaggtggcctggtttgattgaaatataccttcaggtttagagagaagtttgacaaaccaaatgatgaatggttgaaatgtattgaagctaccattgacgagctgcttgggacatattccaaggccgaagatgatgccttgtccgcagccttcgggggccgggggaagaaaaggttgaacagggtatttgatgcaattggcttcgtataccctgactatcactacccgctgtgaaggcaagggaagaagagaaaaagtgtcggttcgaccaccactgctatgccgaaaggcaagaaaatgaaggttctgacccaccggccgcgatatattgaaccggccatagtgcctgaatttagcgaaggaacctcttcaactgccaaagcaaaacaagctgctccgattgtgcagagcgctgaagagccgattgtagtgccgaaggtgcctacagtcaggccagccgaagctaaggatgataaggccgaagagcccaggtggaaaaaacagtgaaaatgccagaaattctgagcccaccagcagaggcaaaattgccgaaggtgcaaaaggctcctgtcgcaactcccaagaggaggaggatggccagcgtgctggacgctgtcttggagaccacaaaggccttgagccctcgtcctgctatgaaaatagctgaagctgccaaag

SEQ ID NO: 81972 - DNA, 292 bp, Zea Mays
agcaggcggcgcaccgagtcgagcgcctcctcggtctggtaatgatcgaggtgaaccagcatggccatggcaaccacggcggcggaaaactggggagcacgaacgcggagaggcgtggaaggcttggaggcgaaagggcggagcagttggggataatgggaaagcaaaaccactgcgcgcggaaaaaccctttttcaagaaaaggcgccccgtgcaccctggaaaaatctgcctgacgcacacctagcgcccgaacaactcagtcactgacagaggggccaggacccacaag

SEQ ID NO: 81973 - DNA, 435 bp, Zea Mays
ggggaaatgagaaattagtgagctctagtggatgattcgaggcacggtttgcttcactggttgcacaattacatagcggagcaggcgaggtcggcaacttatagcaggcttgagcagtggccggtgaatttggattgagacgcgcggcggccggagagcaagaaggctactgacacagttggttcgtggagaataccgtggcggactcaccggcgatgatcggatggctaacatgagtcacggtggtgcggttaaaggctggaggcgtggcgcaaccgcggtgaatatcgcggttccggtgacggccgtaaggccacgtcaccggcgcggggaaccgagggacagcatggccacagtagcttgaacccatccgcgacgagatcttttcacggcgaactcaattcacagcccagacgcacgaatcatggcgagcag

SEQ ID NO: 81974 - DNA, 406 bp, Zea Mays
ccagcaagccgagtacactgattttggtgatgcagttacctttgatactacacataagactaatctgtatgataagccattaggcatgtttttggctcgaaccaccacctacagtgcacaatatttgcgtttgctttactaggacacgagacagttgatacattcgagtgggtcttcaatacgttcaaaacatgcatgggatgtgacggaccacgagtaatgttgacaggtatgttgtaataaatggttcgtattgattaaacacgtactatatgatataataatgacttgcacaatgttatgtaaatgtttcgatttcagatcaagaccctgcgatgccaatcgcactaggcagagtattcccaaacacaatacatcgattgtgtttgtggcatgtgcaaaacag

SEQ ID NO: 81975 - DNA, 398 bp, Zea Mays
gcatcccaaactctcttcggcaacaccaccgaagagcaatgctcctggttgatagccgcatgatattgcgtaatccctcagctcttctttcttagccttagacatcttttggccaagtatgttttgaaaattaaaatccttttcctctgaagtctcttcgacaacctccttctctttcccaggcactggggccaaggtctcttcggcagctgtagcagcttcttccacagccatgttcaagatcatctcgtatcttcgaccgtctcagcttcgacagttgcagcttcggcgggggcagcctcggttgctacggtagcttcggcagccggtgtttttgacaccgaggccgacggtggcgtttcttcaatagcatcaaaaacagtaatgatccttcgcct

SEQ ID NO: 81976 - DNA, 797 bp, Zea Mays
cgagtttggagatgattgaaccgttctttcttctgattcattgattcaaagctggcatccaacctggactctgcaggacttttggtcttcaaaaccatgttccaacatgatgctgcaggcaagaaatacttgccttcaaaagcaattatcttctcctgtgattctgacagcacagacttaaggacagtgatgtcttcctgaagacgctgtgcgcctagatactgaagctcaattcttgaataaagttctgtggccttaccactagccatttctagtagcttaaaatattttactgcatcctgagtagacacaaccttatcttggacaagctccagcttactccgaacaatctgcagcacatctttcaaagctacaattatggagtcatgaacatgtttcacttcaggattctcagctgcttcactcatttcagcatctttctcgcccaataaaatatcttttacagcttcagagtcgctttgctctaaaatcttccgtttgaatacatctctttcctgcatagttttctcatgcaaacccataagtccttcattttcctcatccatctcctccagctgaagacacaattcaacggatgtaactcttgagaaattgtcctcatttgtgcatttttcatctactatcttaggctcttcttccacattggatgagttatgtgcatgcaaatctgatgttgctgctggttgggcattgagcagatcttcgttcacagggtttccatcttggtttgcctcgacattgacaaaagcgtgttgatagagctcaatcaatctctt

SEQ ID NO: 81977 - DNA, 592 bp, Zea Mays
gcgggttagtttaggacttctcaagggactcttttgcaataagggctggctgaaggggtatcggcattcgtgatccacacgatcaaaggtctacaggccatcggattatcatctaacggtatacactcacccggaccaaccgatatctaggcttctaatcatggtcgtacccaaccattggctagggatccaatggccaccagacttcttccccaccagcaacgccgtacccagcccatggcggcgttcaccaccgcggcgagcaacgccagtgaggaggcgacctagtaacccaactgtagcatgggtaagacctacatggagaggaaaaaggattgaattgatcaagggggctcttaccgctaatcagcatcacgatgacttccgtccatgcgtagtggtggaagaccgaccatggtgagcaattggcagtgcaccacccaaagatcctctcgggcgcggtcaccaagaccttcctagggacgcagcgtcgcgcctaggactgatgctgaggaccagatggccacggtatcccatcttctacaaccatgacaccatctttctttctctgttacctggccgcatcttcaat

SEQ ID NO: 81978 - DNA, 536 bp, Zea Mays
ggcattatataggttcttgtaaaatagtcactcaatggaggtaaatatgagactgtgattgctctgtccctacttgcttcagtctcggtaggttcaggcactgaatgaaaagtggaaataatggcataccaagaatagtctgaattacttgatttgtaaaacatgatctccaaacaggcaaatcacaagcacaacagatagtagcaaagtggatataatggcatatcaaaaagcttctatagaccaaaacagcattaccaagtgacaaaaaacttctatagaccaaaacaacagtattttgttgagtggaggtaaatatgatactgtgattgcaacacaaacaaatttagaaataattttgcttggtaaccaaactgtacaaagaccaggttaacatataggcaagtgatggagataggattaaatcaacacaggagtttctacaagccaacaatgtgatagtggcacagacaattgcatccaaaaataaataaataaaaagacaatgtttctaggaatgaagtagtaaaaagttc

SEQ ID NO: 81979 - DNA, 511 bp, Zea Mays
tcccttggcttttctgtaagctttcagcgcagccatcttgctgtcctcccctttgataggaaagcctgctgaacgattgcctagaccaggaggcaaaggtagtggtaatggtcccgatttggaggaagcacgattgaacaatccggcgtcaaacttcctttgatctttgcgtactgtactggtcatcactttctcctgcaacagtgctagtgaacaagttgtatccaagtccacaggacgttgtatgatcaccaccattttaatctcatctctcaacccatccacaaatcgtgttgttaccatggtcggtgtcagttggttctcatgtgccaatagctgatgcagtaatatatcaaactgctctatataatcataaacagatccagtttgatgtatatgatagaactgtcgaatcaacagattatgctgatcacgaccaaaccgagtaattagtgccaaacacaattctccccagttcatttctctagttctagcttccatggactgcaac

SEQ ID NO: 81980 - DNA, 682 bp, Zea Mays
caacttcatccaagtttcttcctgggccggatgacctcgtccggaagcaagaggaactttcttgggcctttctacttcattacggtttcggccttgagtaggttagtagtactcggcccttaaggtcaatactttgggtctagcctgttatacaaggcagcggccgttgcctgatatatactggtatacagctgtagcacacgataatacagtagtggtagtactgaacaatggagttttattcaacaatttcctcatgtgattctttttgttgactatatgtctgttttgttttggaagccgtaacaagggaccgcacagaacgatacgactagtaggaactaggaagagaacagggaagggggtgggaaagtgatgacaagttcggaattcctgcagccaaattccggtcctaggcctcactaatttggaccgagagaaaaagcagacacatatctcttccgtcttagcagtcaaacgaaacacctagcagaaccttctctgtgcgccgttatccgtatccagttcgcttccgttctcgcgtgagatcagcaaaagaagctagccttgggtttggactgaccagctggcctgcaaccgagcggatggatgcgcgccgggggtggctccaaaagtcagcatcttgtcgcgtggcaacggtcagcgctggcctcaattttct

SEQ ID NO: 81981 - DNA, 370 bp, Zea Mays
actaagcgcatatttggaaaacctgcaagcgtattgtaacaccctgcatgcagaggtgcacgtcttgtacgaccggctgcatccgaacatgcaaccagaagttgtagcaatggaagctagaccatctagaacagctaatggaggacctaatggggagttggacctttttgaagcccctccttccatgaaccttgcagatgaacggtctcctgaagctggcagtggtgcgaccaaggatgaggataattagagtagtatagtttaagtagtgtccttatgtaaaataaataaggatgtataattattacaattcagcacaatgtaataaagatggtgttcgtttggcatataataattcaggatgtttttt

SEQ ID NO: 81982 - DNA, 407 bp, Zea Mays
tgctccttcccatgtatactgtcttcctggagaggaatggtgagctgtaccatgctcccctcggtggttgagatcatggcactcagtgagcctcgatcggctgatccgaacgaaccctttgttttgcgaagcgagctcttgagtgccccatttgctacaggggatccttttaggggtgtgcctcagctttttaatactccttcccatgcattttgtttgccagaaggggaagggtgagccgtaccgtgcttccctcgatggtcaaaatcatggcactcggtgagcttcaaacaggtgatcctagtgaggccacaactcctttcgcaggatcctggtgcgaggtccactagtgaccatcctcatactctcaggttccgaaggtaatgggcatagctagctttcctagt

SEQ ID NO: 81983 - DNA, 563 bp, Zea Mays
cacaaacgtagccgacaatgagtattatcaggaaggttggagataacgattccttcagtcgaaacccccgtggaggagggatcacaagtcctgtgacagcaagcaaggatgtcagcctccgaaaggccaaacaagtaacccaacaaacacagagggagaggggcatcacactatgcctcctccggcctcacggtgggctgcactccttgtcctaggaggcatctctaggcaatcgcttgggagaggtcctccgttaccaaaggcacgggagaaccaaaacattctgctatagatcgtagaataggaagggtcgggcactttgccacataagctgagacaagatagtggtgatcataagatagggccgtctccctgaacgaagaatgaaggcactccatgtttctaggacgaaacacgctcgccccctcatgacctatgtaggagaagaagagaacgatttcgctaaaccacatgggaggattcaatgaacaagggatccctcgcaaggggagcaccgaccatggtagcacctcgctttttgtcttttccttttcttcacactt

SEQ ID NO: 81984 - DNA, 622 bp, Zea Mays
aactcatttgtaatacagaggatttgcaacatcatcttcatgataaacacaaagctaaaagactccattatttgcaccaaaccacccaccttagatggattgcgctcatcttgtttcaaaatttctaggacttctattactgaatcccgcattgactcaatactaagtaaagtcttgtagtgagatccccatcttgtatctcccgctcttgccaatgatgttccttgttgtttacctctccccgatacaatttgtccactctctaacttagacaaaagatttaagtgatgcttatgaaccaacacatctttccttttgcaagaagcactagtgctattcacaatcaatgaaacacactcaaagaaatcttcaatagatgagcaacattttgagaccgcaacaactaccgattgcaattgatgagcaaagcaatgaatataatgagcatgcgggttctcatctcgaattattttttgaagaccattaaattcttctctcatattagaagcaccatcgtacccttgccctcaaagttttgcaacacataaaccatggtcgcttaatgcctcaaccagtgttctcttcaatgcttccaatgttgtgtccttgacatgcttgatac

SEQ ID NO: 81985 - DNA, 440 bp, Zea Mays
cgagcaccggcgagtctagactggccggaccacgcaaagaccggcgctctccgtcgactggcaccaaattcaagccttaaccaaagtttcccctaaactaatttcactaatggcacactaaaacaccctgaccacggtgaccgtatggacaatggccaacagaacgcgttccctgcgatctatggtagctcagctcaattgaacgggtcggtgagtatcaagagcaagcaagggtgttgaaacaagaaagcagagggcgagatcagacctgaattgggctggccacggcgaggacacaaggcacggtattcttggttggtttggggaaaatcccaaattggagctctctggtggaggatctgaggtacgggtgggtacgctagatgcctgaatacataacgaagccgatggtgcacttaatttataggctctaggggcgg

SEQ ID NO: 81986 - DNA, 670 bp, Zea Mays
tgacgatccttctccatcactgccgatacaacagcaccaacattccgtctgtaagggaaaattttcatctcacgagctaatcgagatgtaaacatgtcttcgccgcccacccggggaatcgtaacattcctaggccagtggcccccgataacctttagcattcacgcggaagattcccagagctcaggcgaagacatcatctcctcgggaaccgcgtaggtctccagcaaatccatagcaaaacgatcggaagccctccaccccttagttgctgtacctaatttcctcttcttggcggccgctctcggcgtagtttcccgtgaagggccctcgtcggccgttgtcatcacctttttcccctggcggacagcagcatcggcatcatcgtcccccgggtagccagcatacggcagacggttcaactcaaagacgcggttcaacctaacatttgaaccgcggatatcccaactcctcagagtctccgtcttcggcacatactttcctacaatcttcgtggcctcggcctccacttcacgcacaaacgcggccgggttgcgacctcgtaaatccaccacaaaggcaggacttcacactagctggccgcccagggtttgcatccgacggggggtcaattcgcccaatacccagccgtgcgccaagggccacactc

SEQ ID NO: 81987 - DNA, 468 bp, Zea Mays
cgattgatcacaccgtcaaaggtaataaatctatcattcagttcatcgcgcagtaccggtcgatttgcatatctcgggcagagcaatgttagactaggaagcgggatggcttgccgccggcgggtgcgtcatcgggcaaacggaaggagcagggctggttctatcccgaggttgaggacggctccccttgcgttggatcggaaacgggtggccaagatccgttcacggttgagcgcatggaagaaatccaatcgtgaccggttagtggtgatcggagggctgggaattttgcgcatgcgtggttagatctcgggcatcaaactcggatccatcggccgggattggcccgtaccccttcgcgggtacgttttacaaaagaaacctcgccaaactttgaaaccaacccgccatccatggctgatgtgggctgagtcttaggaatcttgcggcttagcccctgaacttctc

SEQ ID NO: 81988 - DNA, 619 bp, Zea Mays
ctttaggagtctctctatttaaattgcgaaaatcaatgcatactctaagcttacctgactccttcttcccgaccggcacaatattggagacccactctatgtatctgcaaggtctaataaaattagcttctagctgccggtggatttcgtcctttattcgtgggagaagatcgggacgaaatgttctagctctctgcttgaaaggtttgaaaccgaacttaatgggtagccgatgctctatgatctctctgcttaatcccggcatctcagtgtaattccaagcaaagcaatctgaatattccttcaatagaccgatcatctcatttctaggatcggtctccagggtcttgtttacaaaagttggccttagagttttatcatctcctatgtcgatctcctccaaaggatcggccgatgtaaacccctgccctagtttatcgagatctctgaattcctctatcatgtctcccacagaggaatcagatgatctttgtgtgatggcggactctccggtctcgggggctggatcatccgtaatattgtctttacgttgtggtagatgttcggtcttaaagtccgaactgttttgtgaaagaatagaccatccagccttagaagc

SEQ ID NO: 81989 - DNA, 466 bp, Zea Mays
gttgaattcagtgaagtcaagggactcttttagaaagtgcgcgcagcgaaggggtatggcgcgatactggccgcacgatccattatggatggcacagattagactttatccctagcacaatcagaccacgccctgatccgatggatcaaggatcaatggcacatagtggcccgcgtctactcctaactcaagcccacagatctcgatcggacggccacgcttatgagatctgatgcttgcctagaaccgcacgattatcatccgaccgctctgatttcccaaatcgaatcattgcacgatacctaatcctaggcgttggctaatgaatcaacggtccaggacattttccccaactccccagctcgggacggcggtgccacccaagaaccacggcggtccatcaccggagttcagtcaatactcgagctctggtttccagttcccaaatcccatcaatcctatgaac

SEQ ID NO: 81990 - DNA, 309 bp, Zea Mays
gtttcgcttcggcagcggaggaggtcccttcacaaaattcaggcactacgaccgtttcaatatatcgtggccagtgggtcaaaacctttattttcttgcccttcgacacaacagtggtggccggagcggtagtttttctcttttttccttgccttcgctaggggtagcagtaatcagggtatatgaagccaattgcatcaaaaaccctgtttaatcttttcttgcttcgacccccgaaggctgaggacaaagcattatcttcggccctggtatatgtcccaagcaactcgtcgctagtagcctcaatgc

SEQ ID NO: 81991 - DNA, 607 bp, Zea Mays
gttgcgatcctccttgtaaccctccttcatgaccttatccacgaccaccatctccttatccccttccttctccacttcacgctattcacaccctcctcactcgcacccccatcgtggtagatgtacgagaccaagcatgggacatcatgaggcaacaacaggttgataggttgcaggagagcaagttgagcatgctgatgagcgtcctgtcctgctcaaccatgtcgcctgcctcctccacagttggggcgccatcgccaccgtcgctgcaacatccacagacgccaccagtgtcattgctgcaacatccacaacccccatcgccgctgcaacatccccgacgagttctaattgacacgtgaaaaaggtctatggggtttgtttgtgggagcgtttttgcgccgaccttgttagatgaagcctcgatcgatcgggggcagcggacaggcatcgcggatgcctagctggcacaacggacaatggacgtggatttgtcatggcgacccttcgtggaagagaggagagagatgggatggggaggtttggaccgtgaattgattacaagaaaatataagatgcttttgtaaaagtgcaatacccaagttgt

SEQ ID NO: 81992 - DNA, 485 bp, Zea Mays
caatttgggagggaatatgagaatgatagagtttctttgggttgggaatttgtaatggaaacatgatggatatggtaggaaaaatagtattggctcattggattttaggatacctaataagtacctataggtgaagatgcatacctgcccctaacccaaatcatttgtagatagctgacttgatagtactcatatgtgtagttttcacatgtacctacactcattatgtacaaactctacaagttattgcacccattggtttggttgtcatcccatccatcaataaacaacgtggggctaaaaacctcataatatcacataaacacttaacatggctcacattgtgctaaattcaaactggactaaatgctagatggatctgttgtacacttgatttcaatccccttgggcattaaatttcaaggcaacacagttagatcgggcttcatctttaccctatcattccttcggtctcaaagagaagg

SEQ ID NO: 81993 - DNA, 438 bp, Zea Mays
ctcgttgcctgcccaggagggatgaacctctactggtacttttattctctgaaacgaacaactaaaccttactctctttgaccatgcatcacattaccaccatcgcattagaactttccttctacatgcatatctaatgctctacagacgcctagtttgcagtgcatgcaattgtagacctgtaggaaagacacatgcatgcaccagccgccattgacatcgagcattgacctgtttctccttgcagttcgcaaacaaagaatgacttggcctcaatccgtgcatgcagacaacttcgtcagttctccacatcacaattgactcggttaatggcccagattattttacacttacattatcctggacatccaaaaccaaagcctagcaaagagtaatgcatgtgactatgtgagatataggaatatagctacctcgtcc

SEQ ID NO: 81994 - DNA, 789 bp, Zea Mays
gtggcgattcgctgatgaattttctttgaagtagttggcccttcaatattgatgtcaacctttgcttcctttctgatgtccgcatcgacattctgaggaacaattttgtctacgtccccctcgtcgagttcctttgcaagaggtgatatgattgtttcaacggtttttgtggaggtcggtgctatattttcctgcaccatggggtatggaatgatcgaactatctttctgttgcattggtgttgaattcggcggtggtgacttatgacacgattaacggcttaagatcggctcatcacccaacttaatgtcgcgtcgatgccaaaggaccaactcgttcatttcctcctgcaaagttatgatcccctcaactggaaagtctatctcccaatcttcacaaccactgtctgtgatctctagaacttggaccacaacatagtgtggcgagacaggattatcatggtagttaacaagtcctggttttaccaaaccagtagcagcctgtttagtttttgtcctagatctattcattggaatatgaagacaacaaggcttgtcctcaacaatatcgtctacagcgtacttggtgcccgatacgaagtcttgcacagatcctacgctgctagggactagaggtggactcatgtggcctgacttgagttcacatgatatgcatcctgtttttttcattttcttcatcacgtcattaatagccttttgtaccctttcatcaatagtctcttcaagggtccttttcgagttctcatgtttcctatatgacgctgcatac

SEQ ID NO: 81995 - DNA, 669 bp, Zea Mays
attccccgacatgtttcctgaggatttaccaggcatgccacacgagcgtaatgtagagtttgccatagagcttgcacctagcaccacccctatttccaagagagcccactgattgtccggaccagaattggtggaactcaagaagtagatcgacgagctgttagagaaaggctatacaagaccaagtactttgccttgggccacaccagttttgttcgtggagaagaaagatgggacaaagaggatgtgcattgattaccgagctctgaatgaagtcaccatcaagaacaagtatcccttgccaagaatagaagatctgttcgatcaattgagaggagccggagtgttctcaaagatagagctgaggtcaggttaccattagcttagaatctgaccttcggatatatcgaccacaacatttatcaccaagtatgggctatatgagtacatagttatgtcattcgaattaacgaatgcgccagctttatttatgtacttcatgaatagtgtgttcatggactacctcgacaagttggtagtggtattcatcgatgatattttcatatattctcagaatgaggaggagcatgaggagcatttgaagatggaattgcaacggttacaggagcataagttgtatgtcaagttgagcaagtgtgagttctagat

SEQ ID NO: 81996 - DNA, 486 bp, Zea Mays
ctcgctggcattttagaggaaatggccgagtgatgcatgtgatctccgcttttccgagttatgatctggcacttttgcgcctgacttatcgagccaactcatatttatgctgacatatccccttgagttccaaaccctaattctcgctttttcctccgccgcttcttgatttcctgagttcttgagcccgtccgcttcgcttgagagattgcaatggctcctaagaggaagagacagagtgatgatgttccaattatcccgccaatcgatcctaatagccaacttccatttgttggcaaccacatgtccattgtctctgagtctgacctcttacacctcgttgaaactagtgttcttccgccaaaggagatgtgttcatggcgaatctggcgtggggttacagttttgacagaggatacccacgaagctgtcgtcttcatgccctttctcatccgaggactagccctgccggcctctccctttttc

SEQ ID NO: 81997 - DNA, 341 bp, Zea Mays
gtgccctttcagtatcagggcatttactcacggtacgaagatattcagatcgaagatctcaacatcgaggaggatgaagtgcttataatcaactgcatgtaccggatgaagaacctcggcgatgagacagtagccatggatagcgcaagggatagggtactgaagataatgaggaggatgaacccgaaggtgtctattttcggcattctgaatggatcatacagttcccccttcttcgtgacacgtttcaaagagcttctgttccattactcctcgctgttcgacatgcttaataccaatgtttcacgggataatgaagcgagaaagctgttagagggtgg

SEQ ID NO: 81998 - DNA, 519 bp, Zea Mays
ccaggctcctcttgaggcctcgagacttcagtttggtttctaccgcccagctcctgaggacactgctccagctctagttgatccactagcaccgaatttcagggttgaggacaaggccatcagacagtttgaggatcagggtgcaactgcagagacttcttccgatgatgatgaggatccgaggattccgctgccacctcccgtgccacctcgttcccatgatcacgaggctggtggctctagtgctactccttcggctactcctccaatgattgaccctactttggctaagatccttcagtcacttactcagcagcaggctcacatggcagtagagcaggcccgtcaggcagccgagcaggccagacgggcagctattcaacatcagttatctgagcagatgttatctatgttttagactattcaggaccgctaggacactcttcagcggcagctccttgcagacagggaagagcaccgagctttcatgactcatattcttcagcacactagtgttcc

SEQ ID NO: 81999 - DNA, 664 bp, Zea Mays
tagtagggtatagtggtcaccctaagtcgagtaagtgtgttgattccaagtctaatcaaatcgaagtcaattgataaccaatagtttgaatgcctttgagaatgaaatcttttattgatgacgtattttccaattacagagtacaacattgctccgatagcttttgaagtcttgctaaggataaaacttcctgagatgctctatattccatgaattccacactttcgtgccatccatttgagtaagacgatatgattctggccgagtgacctccgataccatgaatggcccttcccatagcggtgacaatttgtgtcgtccttctcccgttagaattcagtgaaggaccaagtctcccactacaaaggatcaatgtcgtatagccttatcatgatagcgcctcagggtctgctggtatctagctgactgaattactgtattcaatcgctcttcttccagcacgtcaatatcttctagcctggtagcttatgcttcagctatgctttcaaagaccagccttggcgccccaaacctgaggtcgacaggtagcactgcctccaaaccatagaccatgaagaagggggtgttcccatgcagagctcggctgggttgagttcttaggctccaaaccacataaggtaactctctgatccacttccctgcg

SEQ ID NO: 82000 - DNA, 620 bp, Zea Mays
gttgattctggcagcaccaattcatttattagtgaacagttggtgactaaattggataatactatcttggtgccggtccgtattccagttaaggtggcagatgggactattatccagtgttcttcgctgttgtctcaagccacttggagtgtccagcaatgctctttcactcaggatttgaaggtgctacccttgtcgtcttacgacgtgattctaggcatggattggttggagcagtttagtccaatggaagtggattggaagtttaagtggttggtgataccttatcaaggaacatcagttttgttgcaaggcacatctcagaacgtccctggtgacttattcatccatgttgctgtgttgcaagaatctgtacaggcttcccttcatcctgctgttgctgaactgctggatcagttttcagtgattttctcggtacctacttcattacctcctgttcgaaattgtgaccattctatacctcttgttcctggggcaagacctgtcagtatcaggccatataggtacccacctgctctaaaagatgagatcgagtctcaggtagctgaaatgctcaagtctggcatcattagacccagttactcggcgttttcttctcc

SEQ ID NO: 82001 - DNA, 622 bp, Zea Mays
gggcaatattgtgtcatggtgtagtgaaattgcatagatgtatgatgaattctccttttaacttagtgcacatcaagagagatatcgattgatagtatataaggcactaagaaacataagtgttaattgaagttattcaatgatcaaacaaataacagatgtgatcaaaagaacaacatatgcatttgataagataggagaatctagtagatatgctactttagcaatgaaactacaatccttgataaagatgacattactctaacaagatggattgatttgtagtagcatacttcatgagaatcttattctcatacttgagactaaatgagattaccaagataaagtgttagtctcaacatgatcaagatatagaaatagactccccctaaagatatgcatcaagaatttgaatgagatgaatagatgcattcattttagagacgtgtagggagaagcattatacatcttgatcaaggcttataagatttgcaataaacaccttatgcccgatattctcacaatgaaaaggatttagaatactcacaaccacaccattgattgttttgtagaagtaggtggtgttgtccttgatgtcctcctctttcatttgagagtcctc

SEQ ID NO: 82002 - DNA, 769 bp, Zea Mays
tcgcgaccgaagacgaagaggccgcaaatccgagtccgtcgaggttcgtcgcgaccgcttccttcgtttcccgctccgagcatcgacgccttcctcggatccggacatcttcgcttcgattcctcttctttcggccgaaatcttcggatcttgaggtacgcccttcgtctcctatggtttctgtacttcatgcggccctgtttgatgaactaattagtacacgaatcgactaatcctgttaaccgtacttcattacatccgagaacaaatgatttatccccggtgcaaacaagtccacggatctggtgtgccttttagggttaaatttatatagtactcttaatcccgctgaatatccttgatatatagtggaacaaatggtactgcaaactattacggcctaatggtctgcagaatgccatatttttgaaaccctacactacggcttcacttcaaatctgccttaaactgtcatgtcttgtgccaaatatttttgctccccactgtccagaacaatagaccattttagtaaactagcagcatgattcatcctagggtaagccaaaatgtgttaccttacccgagccaaagtaatggtcattgttttattacagtagctaaaagtgtcattaacatttcagagggtcctttacttccttagttactatgaatgatgttcagtaaaatttttaggtctatgtcgtaccttattgtattgctctacttcatcacaaattttttgtcacccttggatacgactggaggatag

SEQ ID NO: 82003 - DNA, 301 bp, Zea Mays
gcttggcgatggtgcctggggcgcgtatgcggaactgcaggtgcataaggtgccgttggggtggggtggtcttcgcgctgccttttgctattgacagcgtcatcttcgaaggcctcttggggggtggcgtccacgagggccttgcctttcttgtccgccagaagcgctgccttccctacatcgtcgatggatggggcagccttcgaaatagctcgcttgggagccatcgcgggttgtttttcatagcacgaacggtgggcgccaaatgttgggaacctttccgtccgggcaggttaatcca

SEQ ID NO: 82004 - DNA, 588 bp, Zea Mays
tggtaatttttttaacatgcaatatgtaatagtaattctttgtgttaggaaattgtctgcaatgaatataactaattatgtaaatgaccttattggttctataagagtaagaaaagtatttaccgtaaaagcgaagatgtcaatagtagtcgcatgtaatgtagtatgcatatgtagaagtatatatacatgtatctatacatatatgtatatatatatatacgtctatagttgttaatgtagttttttaatattgaaacgggggaatatttcttgataaacaatatttttttgtttcagtcactgccttcccattttcatcttccaccaacacatgtaaaccctttttggatgtaactcgagagaaagcaacatataattggccatgtgtaaacactggttttttcaaatagattccaacattggataatgtttgtccttggctcttattaatcgtcatagcatagcatactttaattggatattgtcttctttcaaggatgaatgacagtcttggagtctttaagcagagagtaacacgtggaataataattttttttcctttgtgttgaccaaccattatttcgg

SEQ ID NO: 82005 - DNA, 927 bp, Zea Mays
gatttggttaacgtgactgaaaccaaaattgttccaaattgtgtaatttgtacataaaaccaaaattgttgtaatggagaacacatgtgatacgctcgaattacatggtcatacgacaatgaatttttaagcagagctaatttcaaaaagtattcctttcgaaatctggtcgtccaaacacctagattccaaccaccagccagattatccaacacctagattcttatcgaccaacttctctgcacagtcagcttctcaccatagccaacttctcaaaaaagctcgtaagaaaaaagccgatccaaacaggcccatagtacatctgaccagccttactgttgcatttaatcatcaaaaccttacacttgcaatcaattatgggaatgagactcctcatccaacctaaacttgagctcgctgctatggtcacataggaaaacatggtggatgccaccatagtgataaggatggtgaaggttgtagtgacaaaggtggattgaaggtgacgtccgaggatgccgaatacagtggcaacaacctaaccctattattctaatggacgacgtcagatagaggaggaagagaatgagcccacgtcagatagatagaggaggaagttaatgagcccatgccgcaagtggatatcatactcgaaaaggtggacatcaggcctagcttgcctcctctcaggccaactgtatgcttctctctcggcggacttcgatcgctccaagttcgaggccaccgagctcaccacctttgttgagcgtcgcgctgccaagctttcctcctctcaaccgaagatacatcaggcctagcttgcctcctctcaggccgagccgagcttcgcatacaggtcacgcaaaggctggattgcgagctcacgttctataatacccaatttgtaaataaaaagaaagagttgat

SEQ ID NO: 82006 - DNA, 764 bp, Zea Mays
tcattacatcaagccattacataatacagcacactgctaccataagctcatcacacacgagtgctatctagggtactcccgaactccttctctaaagtgtccccaaattccttgagaaggtcatcaaggctggccagggacatctcctcggtatcggacgagttccttaacccgggagggggtagggttggagggttttcttccttctgctcagtctgacatccttggcttttggtcttcttgcgtatttttcttacgggggtgagcttcttcagtttcttgtcatagtccatcttcagggtgcggtaagcttcacgggtattggtttcctcgccttcagctattgcaaggctctcttgaagggacgccttttcccctgaaagttccctaactttttgctccaggctttccacccgggaggttaggtaggtgcagtggagggtgaggtcatcatattggttatcaagggtgtgaaggtatccagccatgtagacgatggtgggatcatcctcaataggatctcatcctgccagggcctaaagtcttttcctccaggtgggggtattcttgttgctgggtggaaagtagcgaaggggagtttcaaagatcaccttgttgtagttctggcatagttgtcggagggctgttcgggcaacattctggcaagtatctagaaagcggtatccgctaaaagtgacttggaaggaaggatggttcggatagtttcggctttctcccaggtagactgccatagagcatttctc

SEQ ID NO: 82007 - DNA, 380 bp, Zea Mays
gccgcaacgggtccaagcggaattaggaggtgaggttggggctacacggtcgcaaaggactatggtttcaccatgcactaccaattttgggagaggtggagaggattccatgaatttgggcttcaaccgagctcactggtgaagatgtgaatacctcgtcgtgggtggtggggctatttaaaggcgcggtggtccggctagtgatccacggccgtggattacatcgttcgtgcatggttaccacgcaaagaagggacaaagtgagggaggagcgaggcatgggtgacacggtggcggaaatgaccgagccacggtggccaccggtgaattatctccgactaggctcgggctaggtccgcgagatcgcgaaacgtccaaag

SEQ ID NO: 82008 - DNA, 480 bp, Zea Mays
cagccattctgttgcattgtgataatcaaagtgtgatcacaattgtaggcaatgcaaaggaaaatgcaaagttctcaagacatgtgaaacggtgtatcaaatcagtaaggcatttgagaaatactggagagatcatcgtagagtatattaattctgctcgaaacttggcggacccttttacacagggattagcatgtgttgtaattgatggagcatcaagggagatgggattgaagcccatgtgatgttatcatacagtggtaacccaatctatgtgatcaaagatcccgtgaattagtaattgggaagaacaaattgttttgtataacaagagaggacattatttaactcgtttccagctagaagatgcgtactcttagtactgcaagggaggttgacttttgtcttaatgtattctaaggcctctaacaggcaaggtactgccctgcagggtacacttgtaagaatacacatatgtga

SEQ ID NO: 82009 - DNA, 698 bp, Zea Mays
tttagcttcaaaaatctcttcctcagataatctttttcccgaagcgtgacgtataatataatcaagaacttcggaaggcgcttcgggagtaggagtagcagcttttttaggcagaatttgttctacagcttctttttccgctgccttttctccggtttccaaggatttctccttggcgggctctgaaggcccagcttcggtctcgacctggctctttgtagcttcggcttcggtcagctttgtctcagtccgcgtttttgaagccttggcagttttccctggagtagagcttgaagtttttatcgtctccagcacatctagtacactggccatccttttcctcttggggtcgctgtaagacctttttgtgccttcggcactgtcacttttgccgaagggcttagaacttctaatatttttgtcccctcgactcttgtctcttcaatattatcggccttcggctcagctaatttggctgaggatgccttcggcattgcagctggctcttcaatcttttgcgtgggaggagcaggttctttcgcttcagtagctgaagaggtctcaccgccaaattcgggcacggtggccggttcaatgtagcgcggtcggtgggtaaggaccttcagctttttcctcttcggcgcaggctcacttggagtagccgaagcagcagtcttcccagaagttgtaccctttct

SEQ ID NO: 82010 - DNA, 337 bp, Zea Mays
gtagggtaaccagcggagttgagcacctcccacaagatggaaggggaaaccctcgtgggaaaggaaatcgaaactgaaatgagcgtctcctccattggcaggggtgggtgaagtcatctgtggaagaggatcagatgtaaaggttatggtagcaaaaaggaaaaacgtgtgcccgggtgattaaaagaaagtggattagctttgattttactccttatgttacctattattatccctaattgccatattcgtacttagatgcatttttcctttaatttctaatcctttcatgtttttataatgcatgcatgttgaaaagaacgtctcctcaccgatc

SEQ ID NO: 82011 - DNA, 513 bp, Zea Mays
aaaagttggtgccaaaagctaagcttacgtggtctttccattcttgtaacatgtttaattctaacccatctaaccctaagtggtagaggcaacactggccccaggtgtaaggggggtactccggagtaggccgtgtccagaatggaagctggctcaatctcctcgggatcctcctcctcatcactgcctgcctccattgcgttcatgtcttggtgatgcatttctatgtgagcgttggcctcctccagttcctcttgcacatcatggagctgattttccaggatctcgatggtgttgtcccggatttccacctgctgttccaacgcctggatgcggttgctcatatgttcagcctgtagatcctgctccaccaattttgaagacaggtcgaccacgaagtcctccctatcgccgagtgtgatctttgtagttcgagcgagcctagtgaggtgcgtcatggcatcactttgtagggcctgcaggcggtacagtgcactcatgcactggacagtg

SEQ ID NO: 82012 - DNA, 617 bp, Zea Mays
gaggtattgggcaatcccacgataaaattcatacaaatatcctcccatttccaagatggtctgggaaggggctgcaaggtgcctgctaccttcagatagctagccttgactctctggcaggtgtcacattcggatatatacttagcaatttccctcttcattctggtccaccagtacaaggatctgagatcatgatacatcttgttactaccggggtgcatggaaaattttgaaaggtgagcttcatccaatatcttctttctgagctctgggttcttggggacaaccagtcggtctccaaaccatagaattcctttgctgtcctgacggaaacatttgtatttttctgccttctgttcgatcatttccttgataacctggacacccttgtcaccaatctgtgccatgactatttgttcttgtaaggtgggctccactgaaatataactcaaggcaccggaggaaacaacttctattttcaactagcataattcatcacatagggtggtgagtcttgcatccatattcatacaattgcactgggccttcctgcttagagcatctgccataacattggctttgccaggatggtaatgcacctccaaatcatagtcctt

SEQ ID NO: 82013 - DNA, 437 bp, Zea Mays
gttcgcccgcacccacgctagatgtcaccatgtcgtgccgcccatgccacgtcgactcctgtcgatttgttgccttagccggagcactctggaaacctctttcctttccccgtgattccatagcaatctcttccctccccgacacatatttctttcctgtctacatcaccatcaaaggaaagtcagctaaatcttcgatctctcggatccgcgccgattcagagtccaatttgtccttgtttctcccctataagaatcgccctgagctccgccattgattcgacgcaatcatgccttaaaccactctcttctgctccctacccatgctcgtcgtcgcacccgcacctttgtcgctcatggccaggcacctccagctcttccccatcgatgcagaggccacctacatgatcatcatagcacactgccacttccctgag

SEQ ID NO: 82014 - DNA, 392 bp, Zea Mays
tttccttgtcataggaatgggtaggtccacaagtatcagcttgaagatcaaagcttagctcttcatgcgcctttttaggccctgagtatccaccaccttgggtattttttttcttttgtctttctcctcctctggcaatgaagccccaaaggcagcctccataagagactcaattcatgggttcttcccttctgatggggattcctctgcctccgtgggtgtcaaagcttgaccaccttcgcacatgcccttcgcaattaataataggctggtcaacgctggtcctagagggcttagagtggaaaagggcaaaagtccaatgattaccccaagaatacaagtacaatccagcgacaaagtggaagcacttcccttcccctgctcttgtgcag

SEQ ID NO: 82015 - DNA, 1448 bp, Zea Mays
ccttgactcgggcggggggcctcatcgcttcgatcgccctgatcttctctggattcgcttcaatgccccggtacgaaaccaggaacccaagcagcttcccggtggagatgccaaaaacgcatttgtccgggtttagcttcttgcgggttgctcgtagcttgtcgaaaaccagggttaagtcttccactagggtcgaccctttcttagtcttgaccacgatgttgtcgacgtagacctctactttgtccctgatcaggtccccgaaagtcttactcatcgcccgcacaaatgttggcagggtgtttttcagaccatacggcattacaacatagcagtacagtccatccactattacaaaagcagtatgcttcctatcttccctagacatttggatttgatgaaaaccagagtaagcgtctaggaatgataacagatcgcacccggaggtagaatccacgatcaggtctattcgtggcagtggatacgggtccttgggacaggccttattcaggctggtgtagtcgatacacatccgaagtttcccattcgctttggggacaatgactgggttggccagccatatcgggtgatggacctcttcgatgaagccagcgtttagcagcttgtggacctcctctcggatgaaatcctgacgctcaacagactgtctgcgaggcttctagcttactggcctggcattggggttaatcttcaggcagtgctcgatcacctccctggggatcccaggcatctgcgacggctcccatgcgaacacgtcagcatttgcctggaggaaagcgacgagcgcgagttcctatttctcatccagatcactcgcaatgcgagtggtctgggtggagtccgcagcgagtcggatggctttgacggggacgccatccgctccggatggttgcacctttggcgccttgaggggtgccttggtaccagaggttgaggggttcctccctccgtcgtctgggcgagcagtctctgccgccagggcgtgtagcttctctatggctgcaagtgcggcggcacggtcaccttgcacggtgaggaccccagctggggatggcatcttgaggcccaaatacccgtaatgggcaatggccatgaaccggtacagggtcggcctgccaatgatggcgttgaaggggaggttgacttctgcaacgtcaaagacgacgttctccatgcggaagttttcctcagttccaaatgtaactgggagtgtgatactcccaaggggatacaccggctgtgggcccactctggagaatgggcgcgagggtcccagacgggactctgggatttgcagctgcttgaacacaacatggctgatgacgttgaggcctgccccgctgtcaatcagcacatggtgcagtcacatgttggcgatgacaggggcggtgacgagtggcagtatgccggcccctgccatgttgtcg

SEQ ID NO: 82016 - DNA, 575 bp, Zea Mays
cgacggcgagcggcgccagaccaaactccggcgaacctgtactggccaaactacgcaatggctagccctcccctttgctagacaccaaattcaaccttatacgactatttcccctcaatcaatttcactagcgaagctctaaatcatccagtccacggggacagcgcaggcaacaagtgaacaagcgtgttcccggtgatctagggtagtctagctcaatcgagtgagtcgagcagcattaggagatcataaggacactaaaatgaatgatcagagagtatgaacaaacctggaacaagctggccacggcgagggctctttcacggtggcggaaaacagatttggggagaaagagaaattggagagctgtggtggctaatcggaggcaggagcgggtgctctgacttcgtgattatctaacggagctagcgatatgcttaatttatagtgttcaagagcggtggcctccaattttggattggcgcgctggcagtcggagaggaagaggggcactggcgcacacgattggtggccacaaccgtggcaacctcaccggcgatcactggataggttag

SEQ ID NO: 82017 - DNA, 466 bp, Zea Mays
caaatctagtggtagttccggaggtgcggggaggtgggtctcactcccttctcctctagcttctcctcctactcctaggggaaaccctgctccaatcccggaggcggtagacatggttttatccgaagccatctgccaggggaaaagagttactaccatgcacatgccaaatttttttaacaagttactttattcattacacaagttcattacagcatacaactaccataagttcattacacgtgagtgctatctagggtactcccgaactccttctctaaagtgtccccaaattccttgagaaggtcatcaaggctagctagggacatttcctcggtgtcggacgagttccctattctggtaggaggtagggctggaggggcttcttccttctgctcagtctggcatccttggcttctggtcttcttgcggatttttcttgcgggggcgagcttctttagcttct

SEQ ID NO: 82018 - DNA, 564 bp, Zea Mays
ctggttcacccgatccagtttctacaaaccagattagaacggtgtttcattacttaggaggcaatcggtgccatcgatcatgaaattgacgactgaggaacaaccacgccttaccactactctacgccacccattactaatcctacgactgagattaattccgcaaaggcggtatgcgtagcctaatcctgcctgcacaacgtggaatcgatggccatgattatatttgcgtgaatgggtatatgggaacctaatcccactcgctggatcacaatcggtcggtcctggctcgtcttccccctgatgccctcctaccgtgatgaacagggtcggtgcggcagtgccatggctgcaataccccatcccgcattctagtggctgattcctcatgattatcggtgtaacacatagcagatgcttagagggatggcacctaggcggcttaccggtggtctggatgatggcgaggcccgaccacagagcagggcgtaaccgtgacggaggtataactctgacgacaaattcttgctcttccgccctcccccacacgaagtcgagccaacc

SEQ ID NO: 82019 - DNA, 1338 bp, Zea Mays
gttgagaaacaatacaatctatctgatgtttttggcgagttaattgatgaggtcctccgtgctgagtcagaggacaatgaagatggttatgatgtggagaaaccaactaaaaaatcagatgatattcttcaccattcggcaggttagtcagttttatggtctttacgttactgtaaacagttatacaaacattttcaatatcgttatgatgccattattatataatttattttttgattaaattttacgtaaagaaggatgtacgagtccggccactcaaactgtaccggatatgtctactctagcatcccagcatgagacgcagttgacagacacacaggtacatgaattactgttaaggcaacaacatatttgtgtactgttacaaagttgccctgatgaatttgacattgatccactagttcatacaaatataactaaacagaccaaaacacctacaaccccagtggtaatgttttttattacttgtattttccttaaaggtttgtattcatcgttttctttaaatagcatataaccattacatttttttcatggtcaacatggtgacgctggcaagaacatgccgaccaacacaaacgtcactcctcaagcaacaccagaatgcacattcaacataccacatatggaatcttgctcgtcgatatatgatgcgacgccgcaaataaatgtatgtttactccccctcgctgttttctgtataattattagtagtgtactaaacatctaatccatttataccataattgttagtctcccggcagtgtccacccggtggcacaaacagatctccccgatagtggcccatgttttgatcagaccccatctgaacatgtcagctcagtaatatacattttcattataattgccaaaaatgtgcagagattgaaatctatatttcatataccttttttaggtttccgttgaaaccgatccagatataaacacatctcaggttgaccaggtttcacatgattcggatatgcaatgtgtgttagctctacgcgactacttgtgtggtacgcaatctgacaccagcaggtataaagtccacacaaaattaaaatttgtttatatcctggtagttgcacgcgacctcactaattgttatcaaaatttccacaggaacataatagattatggtgaatattgtgcgacatgttcggatatatatgaatctttcgccgatgggaagtgcctcgacaatgtgttcatgcagtgcttcattcaatgtgttgatgatgatggcaaaaatcagtagccttccatgagttccaacagattaattctcgacgttaatgttggggtaaattatcg

SEQ ID NO: 82020 - DNA, 344 bp, Zea Mays
caaaatgtatagcagtctaaacagtgcacccccttgtattactcttgagtattcttgtccttggagaagccttcttaggagacagagctcctttctccattgaatggacgcctcttggcagtgctatccctgctttgcttgatgctgattcagttaacagaatacatccatacatttcctccactgataagtatctgtcaacaacacagggatcaggtctgcagatcatgtgtatgtcagtgtcaagaagctgataatgaagagaaaccacataatcctgcggttgttgtgtataatgccgatgcaataacggtaccactctctttgtatagctaccaaaccca

SEQ ID NO: 82021 - DNA, 488 bp, Zea Mays
ccactaactccccataactctgtagtagtgtagcgcgcgtaaactcgagggagctcgacttgaatcatgaaatggtgtttctccgacgatggcgctgccgtgcagggactctgcgccgcctcattcaggcatcgtgggggatgggcgtgcgtgggtcgttgatctgcgaacgtgcgtataggattagatcttcgaataccctttcgcgcatttgatctgacccatcggatcaggatcgggcggtgaggggtagtcatcggtgtggatgcctcgcggccatcggatctcgatctggcggttgtcgttggttactggtttaagttttataaaaatctaatcgcaaccattagtaattaatccaacggcctgaatcgcctcataacccttcgccctgcgcttcattcaaatgagcccctcggctttcgacaaataaacccgccgtccaccgaggcactctctgagtcttaagtagttttatagcaaacccc

SEQ ID NO: 82022 - DNA, 622 bp, Zea Mays
gaaagtatcatcacatggtacttaaaatgaatcgtctaaaaatggtattacaaaccaaagtcatagaggaagcgaaacaattttagcgaataatgtaactttaaacctactaactccataggcatttgactagtgacacatctgcttagtagtcatcatactcttggaactccaccatgtacttctggtcatttccatatccatctgagtagggattgcattggatgcaaaatagttgtcgtagaaaataacaaggataagcacttgtcatactcaacaagtgccactaaaacaaggcatatgaaagccatattacgtgaaactctaatatgtgaggatccccatgtttgctcttaacgacgagcacaattgatatcaaatagtaagactcaaaaagtttgtatactttacctataagacaagatttttgctttgtctaggttgatctgacccttacacacttcctaagtatatgacatgtattttcactgttaggtcgcttcttatagagtctcggatgtcttctacccactataggtttcaacccagtttatcaatgtagaccctcaatctaaggggtggctgataaaatagcaataaaacattgcacctctcttggtac

SEQ ID NO: 82023 - DNA, 475 bp, Zea Mays
aggtttagaaatggagccttccaaccgggcagccgattagctatcttgtccacccactacaagaggtccctcctccccaacttcttatcagaaacagacaaccccaaatagttgcatggaaaagaagctggattgcactgcaaaatgttacaactgtcctgaacagtctgatcatcacaactgagagggatagcacaactttttcgcaaattcacaactaagcctgaggcctctccaaagcaatccaggatcattttgacacaaataagatcttcaactgcaggcttgacaaaaagaaccacatcatctgcgtaaatggagagcctaaatttcacgtttctgatggccaggtcatgcagcaatcctctttcctcagcatgcttgaataagctactaagcacatccatcacaattatgaaaagcataggagataaggggtcgccttggcgcagccccctccgatgtcgaatataat

SEQ ID NO: 82024 - DNA, 768 bp, Zea Mays
ggtaaagtatagctatcagaataagacggaagagaggtgattttaaagggtaggtatgagacaaacatcatgtaagatatagaggtgtctaaggtgaaggtgataataacaaaaggcatgacaaaggatagagttaaggcaagactcgcggagtggcgaagtggagaaaacaatcaagggtaagataggtaaggttccaatagaagggttgaagtaaaaattcattacccaaggaagttataaggaaacaacgagatcaccaaggatctgcaaaataaaatgaccgctcatggatcatcgataaagaagggtggtcaagggcatgtaaaatgaaatatcttaaacagaccttgggatgtaaaggtaagtataaaaaggataatagtatgaaagatttcaaggagatgagcataccaataccaagagacaataaattgctgaaaggtaacgacttaacaacaaaagaggaaagggtctcaaaagacaggaaggtcatgaacatgtaaatgaaatgtttaagtaggtagtagaaatttagaggcaagtatttgaaacaagagtatggaagggatacgagcatgtcaataccaaaggactagagttcgccagatggtagcaacttaatgacgaaaaaggaaagaatcccaaaaagacaagaatattatggtcagtgggcatctacaaggatgtcgcaagcacaagagtgagatcagatctaatagattaagagaagtatagaccatactagaataaaatacttttggcaag

SEQ ID NO: 82025 - DNA, 315 bp, Zea Mays
gtcgaggactataggttagtccctaagttcttcggggtctcttttataaaaggaggcagccgaagtgcatcggcccatgatcaccgttggatcaacaattgatggctcagattagatcaccgctctatgcgaaccggtacataatacagatcacgggatcacgatccaacggctgaaacaccatcgacccccagacctaaccagatccacacgatccccgactgatggcttggatttaatcactacgaagggttatcatgggatctaatcagggtcgtccgagagtcgatcgatggcatatgagctgtcttcttc

SEQ ID NO: 82026 - DNA, 513 bp, Zea Mays
ggaatgtgctgagttaccaaaagatcacaaggccataggcttcaagtgggtatttaaagtcaagaaggatctagcaggcaacattgtgaaacacaaggccagactagtagcaaaagggtatgcacaaatccagggggtggactatgatgaagtttttgctccagtggctagattggaaacagtgagggtgttaatagttttggcagctcaaagggattgggagatacaccacatggatgtgaagtctgcctttctaaatggagaactaatagaggaggtttatgtaaatcaaccaccaggtttcaccagctcattcactgtgaaaagagtgctcaagttgaaaaaggccctatatggcctcaaacagacccccagagcctggaatgtcaggcttgatatggaacttaccaagctaggattcagaaggagcacagaagaatgtgtagtgtatagaaaggggattggtggatcactgctgctagtaggagtatatgtggatcatctcataatttg

SEQ ID NO: 82027 - DNA, 293 bp, Zea Mays
gttaaatatggaaattcaggacatccttgcttataaagattatgctaacgtaacccgattgtttcatcttgcttgcaaagctgaaagagaagtgcagggacgacgtgctagtgcaaggtctaatgtttttgcaggaaaatctacaccatggcagcagcgcatgactacgtccatgaccgaccgtacaccagcaccaactccctcgccgagtcgaccagcaccaccaccttcctccggcgacaaaccacgtgcatcttccacaaattcagcaaccaaatctgcccagaaaccag

SEQ ID NO: 82028 - DNA, 733 bp, Zea Mays
tactcttgatgcctcagccatgttgaggatggccgtgcgtttccattctctacggccagcgtcatctacacctgggtcaccggtaagaatgcctatttctttcgccaagctccttgcatgtgtggaattgggtacagcaggtgatggggcataggttgcccggggcatcgcgccttcagagcgccgtcgagggctggcgaacgccatggcggacggtcggtcagaggtagaagaaagggtaggagccgttgatctggaaattcacggtcgcgattagaagattgcaaaccgcttcgccatgggtgctcgggcaccgttggattctgtttggacggacgaaattagaagcagagatcccttaacgttcgttgattttataccgtccatcggaagatcagcgatatatgttagatcagagcatattaaatgtcgacccttggatcgggatcgggcgggtcatagcgtacacctgttcggacttatgctagatctaatctgggccgtggcttttggatccagcggctgatgccgtcccatagcccttcggccttggcaaagtgcaaaagagcccctgggtttcaccgaaatgaacccgccgtccagcttgtgtttgcactgagtcttaggaaatttacgtgttagccccttttattctttgaattcatgcgctcagtccagaaaactagaaaatcaggggaaaatgaaatagaaattgaatttggatgcaaaaata

SEQ ID NO: 82029 - DNA, 909 bp, Zea Mays
cttggtcttccttgacaaaccggatagcttggctactcagaatactgacaaccctttttcttttggctcctccggccccttcatcaagcctttcatagtcagtatactcaaagttaagagcatccattacatggtttaaccttcattttagccgggtgctgaaggcagcagtcatcatccgatcttctttcttcgtgtatttcccgataatctcattgcacatttttctatcagctccaaccattcagtgcatggtttgctgaatcttttttttggaatttgaaccgatatggaaggcgtacaagttcatacttttttccttcttcctttttcttcggcattccccatccactagaggttgggaaagttctgtttgctaagtactcgtgcaccaagtccctagtgctaatgtgctcagccaccaccctaaattccagttcggccagttggcagggggactctagctgcatattgcacaaaggtcgagtcatgccgaagctcatctttaagggactcattaccatggtcatgagcttctccctcttcttctcatcaaccttcatgtaaaaccattcattagtccacccagttggccatttagtgcgataaccaatcacgggggccttggtatccttccagtatgcaaagttatagcacctgaagttcttgtgcagaccatcggctctagcctttgtctgataatgaagttcgtgcacgcgatagaacccttccgcattggcactttttccttggctttgaagagcccatatgtaaacgctaagcctaacaatagcgttcgaggtcagctgatggagatatatctcaaatctcttcaaaacttcccctatcatatagtaaagagggaaccgaagccctgccctgaagaagctcttaaacacaacaacctca

SEQ ID NO: 82030 - DNA, 663 bp, Zea Mays
cttggtcccatccttcttctctacgaacaacactggagcggcccaaggcgaggtacttggcctgatgtaacccttctccaacagttcatctatctgcttcttgagttccaccagttctggtccagatactctgtaggctcttttagagatgggggttgtaccagggataagctctatatcaaactcgaccttcctctcaggtggcatgcccggtagctcctcggggaacacgtctggaaactcttatactactctaatggtctcaagcgggttggcctcctcgttatcaacagtcatctggtggcaatctcttatttctgactcaggcattcttagctcagccactacctcctctctagatggggatatcaacctcacggtcctcttatcacagctgatgtccgcttgatacctcatcaaccagttcatccctaggatgacatctatcccatacgtacccaatactattaggttagcggggaactctatcccccttatttccactcctacattcaaacatatcttatctgcctgaacctttccaccaactgagttaatttgcattgaggttgtcatgggactagttggaaggtcatgtgttcctacccattttgcagtgataaatgaatgcattgcaccagtatcaaatagcacttttgctgg

SEQ ID NO: 82031 - DNA, 285 bp, Zea Mays
gacagtcctaacaaaaggctagcatgatgattaatttcacttggcagtatttataggggctgggcccatgtttgttttcttaaccacaagcacaaacagaaaaatccccccttctgattatcatcctttaaagcaaaatcaacatgacacttgaatgccagcaaacatttgtttcagtgccataaatatactctaggcatcattgtcatgttccttctaaaccattgttgaattaaacaaccacataactccaacactgtttcaactatccaactcaacactacg

SEQ ID NO: 82032 - DNA, 523 bp, Zea Mays
aatggttttaacaattaatgttgaaaattagacctttaaacattctattcatatgtcggcagacggaaataagcttattaaattctctaatcacttatggccatcagaaataacaacacttaatcatgaaaaagatggtgagttggtccaataccaacaatcaaaattagtcaatgctaaatttaacaagtgaacatgcttgagattgaggaaggcaaggtggacgagctcgatggtcggttaaggtgtgcgagcagcgcggtgggcaattgaaaataaacgtatgttctaataacaaccagaaattgatttagctgtcagaaactgatacatttcctatagctcacttcaatgagtagcgcctacgtagtgtatggcaacaaaaagtatctccaagttattaggactccatcatcatattgtgtataaaaaagggttcgacaaatttttggcattcgaaatctttgggcccttccatatggttgattcagtgggtgttgtcgcctcgttccatctgatcttc

SEQ ID NO: 82033 - DNA, 510 bp, Zea Mays
aaaacacggacaaaaagagcgagggcggacctggaagcagctagccgcgatgaggcggttcacggcggcacagtcgaccgaattgggggaagagggaaattctccggctatggtggctaattaaaggcgggaatgggtgctttggcttcgggataacatggcgcaacagatccggccaacaatttataggagcgctaagcggtggtgtccaattttgaaaggggagaccggcgtccgagaggagaggtgagtcaccggcgtaaactattgtggcgcttcccggggtaatgcctccggtgacgaactgacctcctacggatatctactgcgatgtggtacatcttctaagcacgtggcgcagttacaagccagcaaactccgactaggacaccactgtccactgcacggcaagtgtcacggtgaacagtccggcgataagcctctctcccttccccgagttgcgatctttccttgcccacggttatccgcaagtcacgacgcatgaatcac

SEQ ID NO: 82034 - DNA, 732 bp, Zea Mays
ctctgatagagaccgggtgaccttcaagaatctggggatcttcaactctcatgggttgaactgggttggatgaagcgggctattggatccacagggctctacgttggttatgggttaccaagtaggcctccatcaacttctgaacatgctcatccttggctcgcttcagggcttcaacagcaatgacttcacgactttccaaggctgctacacgggattgagccatggtgagatccacatggagcttacggttgtgcttctctgcatcttctgctcgagcaatcatataacggtggtgccgagccaagaaatcatactgcgcatcgagggtgagcaggtatgcggtgaggtacacgactgaggggtcgtcctcaagcagctgctgccctaccaatgcacgcatcctagccatccaaacgggacagtttctctgaaagggcggaaagaatctgagcagtgtgttggccacttcttcttcaaagatctgacacagggccctcaatgccttgcgagcgacgacttgacaggtgtctctgaatctctacccaacagcagtgacactccattccacatggtgcggactagatccaatgtatacagtcacgacacacttctctatgccatgctcgacaaattcacgaccatcatactctggctggctcctgattctgaggcggaccgtgcatgctctcagcaatttggggaaaccatcttcattctggcaaaagctgg

SEQ ID NO: 82035 - DNA, 805 bp, Zea Mays
tttcttgaagaagaagaagaagtgttcctttgtccaaccagagctgcagtaccttggtcatgtaatatccagagaaggggtagttactgacttttccaaaactgcagctatgttggcttagcctatacctcagaatattactgaactaaggggatttctgggtctcactggttattacagaaagtttgtgaaaggttatggagttttagccaaacctttaaccaagttattgcaaaagcaaaacaagttcagttggggagaagaagcacaacaggcatttgaggctctgaaacaagcaatgactactactccagtgttggctctgcccagatttgatattccttttattgtggagactgatgcttgtgatataggaatggggaccgttttgatgcaagaagggagacctattgttttttctaagcaaagctttaggtgaaaagaacaagcacttgtctatatatgagaaggagttcttggctttgattttggctgtggacaaatggagaccctatcttcagagagatcctttcatcatcaggactgaccaccagtcccttacttttctgggagaacaacaattacactctgaacttcagaaaaagggctatggctaaaatgatggggttgcagtttcagatagtatacaaaaggggtggaaaatattgtggcagatgctctatccagagtgagttatctcatggccttatcccaagtgtatgaggtacaacctatttgggttcaggaggttttaaattcatatgaaactaatatggaggctcaagagttgaagactcaacttttg

SEQ ID NO: 82036 - DNA, 1418 bp, Zea Mays
gttctttcgccaaaagagttgtgttcctggcgaatctggcatggggttaccgttctgatagaggacacccacaaagctgtcgtcttcataccctttctcacctgtggactggccctgctagcttctcccttttcccacgacatcctcgatttttatgctctgaatcttacacacttaacccccaatcctattcttcaatttgccatgtttgttcacctctgtgaagcttttcttggaattcttcctcaattcgggctttggaagtacctctaccactgtcggcccgggatggctggaggacaacatcagcttgttggtggtgccagcttggaacttcgtcggggcaggaaagttgaatatcttgatatccctttgaaggacagtattaagggatggcgccttgagtggtttaccatggagaaccacaacaagtccctccctcctcgattggggagatagcctgacgtccgcacgcccagctggacagagtcccccacaacttcagagctagccaagtccagggtgctgcttcccgaaatatgtgcgctgaaagacaggggcccgtttgccgaagctgttattgctgattttgtcttcaaaaacatccatcctctgaaagatggagtttatatggattatctgtacactggggtcaattaccctacccgaattaccaatagacggattcctaacgaggacctactgagccggattgacatgatgctaagaggaaaggtttcgaatgttggtgctcccttatcttattctgcctggaatctacctccacagagtcccttttctgaattcatttccaaccctcctatccaagatggcagtccgggtcatagaatgcgaccctccttagatgacatcgaagttttcattgctccgttctagaatcttcctgaagtggagagacagacccatttccagatgccgaccagcgctgatgaggctcaggtgaacgatattctcagtatgctggctggagaatcgtttgactctgcccgtactgagtcgatggctgttgcgattgggcaggaccttggtgaggatgaaggagttcagaatcctaaaagtgtttgttgtaagcgatcacgccggacgagctatctagtcgcgcctgatgaggagaagaagagaaagaaaagacttcgatggttatcatgcttagaacaagatgttgatcccttgacatcactcggttgtggcccgacgggcaccaccatcgaggacaatatcggaggttgtgatgatgccagagttggcggtcgcgtgattgatgaggatgaagaggaggaagaagaagaaattcccttgattcgcaagaacagtcgcagcaacaggagaagtgatatccctatgctggctttatcaggacttgttagcctccaggggttgacaatggctgccattga

SEQ ID NO: 82037 - DNA, 858 bp, Zea Mays
ggtttaccttgacttgcacttagttgatttccagcttactatatgcctacttttgtctttagtggtgaacttctcttttgaattgcttaaaactgaatcaaaatgcttacacttcacatatcttgtgcatatgattagtttgaatgtttgttagtgtaaaccctaaaatatggttttaaggaagtcaagtaagttcctttgatattgatgagttaacattagaatttatgctagtatgtgagttattattaaagcacattcttctaaataaataaatgaataaatattatttgcatatcatgttgggtctccttgattgtttcattttgaactaaactagaagtttgagattaaaactggatgtaaaaagttaaacttgaaattcaaattgaaatcagaaaatgaaaatagaaaaagaaagaatgaacaaacctactcctaggtcgtttctcaagccagcccaaacttcttactatcccctcacgtatccacggcctagcctacctccatgctagtcggcgcactaccgcaatcccatagcctagccacaccccggctccaactcttatggcccgcttccggtttcatcctgcatgggccctctaccactatagtgtggacccattgcatagcgacattcccttggcgctcctaatcgctctggccaacatgtgggacctccctgtcttgcatatctttttcgtgtgatcataaccaaatgtcggggtatccacccaggatcttggtctcatgcttcaacgtcagtgtagcaaactctaaccacgctggcatacaaatgcgagcctaccccgtgccctcgaccatccagccatgaacccaaattactgtgagccccac

SEQ ID NO: 82038 - DNA, 274 bp, Zea Mays
ctgaactttacagagcttcacctctgaggtgcgggtctttctgactgctgaatcaagaatcttcactggcttctcacggtattgaaggtctttctgaatctgcactgtctcttcttcgaggtgactttctggtgcttgtaggcatttgcggagctgggatacgtgaaacacattgtggatgtcggacatggattccagtaattctagacggtatgctgcgggtcctaccctgccaatgatgggatagggacctatgaatcgcggtgctagcttt

SEQ ID NO: 82039 - DNA, 682 bp, Zea Mays
tggatatcgtgttttcaacaataccaccggtcttgttgaaattgcgatagacgtgacatttgatgagtctaatggctcgcaagggcatgtttctaatgacattgtaggaaatgaagaaccaccttgtaaggccataaagaagcttgcaataggtgaagtgagacctcaagaaaaggatgatgaggaaggaactttgtggatgaccaatgaggtttttgatgtgggcgtaaaggtggtgggtgataaatcctccacccaagcaaacccatcaacctcaagtcatccaagtcttgatgaagttcatctaccccaaaggatgccaaccgtggtagaagatgaacatgaaagtgttgatggtgaagtgcctcttgatcaagtggatgatgaggaggagcaaattcaaagacaaccatcagtgccccatcctcgagtccatcataccattcaaagagatcatctggtggacaacatcctgggtagcatcaggagaggggtaacaactcgatcccgtttagcaaatttttgtgaattttactcgtttgtctcctctcttgagccacttaaggttgaagaagcgttggatgatccggattggataattgccatgcaagaggagttgaacaacttcacccggaatgaagtctggtccctggttcaaagacccaagcaaaatgtgattggg

SEQ ID NO: 82040 - DNA, 346 bp, Zea Mays
gcgcccaactgacccgagcacctccgtgatgaccatgccctttgtcatagcccccttgatgctatattgctatctgcaacaacatgaaccacgcagagaccatcacaactccatcatcagctgccacgagatcccaatgcgagacatgggtaactcaaatcatcatagaagaaaactctaactccataaatcatgtgagattgtctagaaactaatctatccttttttcttctagaaccgagcgacaactctactaaaagtgtagcctaacatttaagggatcaaactggatttatgtgaagttttaaaacaattttcaaaaatgttgttacagaattttactatc

SEQ ID NO: 82041 - DNA, 347 bp, Zea Mays
cttcaaggtactagtgcaagggagaaggtcaagaagactgaggtaccaaaagccaagagtggagaagatggtcttgtaagaagtcaaggttggtcaagctgagaagagtcccaatgcgttcaagaccgcgatatatggatgtgacttacaaccattgaggtaatgcttatgatttaatggtttaagtcaagtggagtaatggtcacaagaaaaaactaagtatcaaagtcagaacatggaaggtcccaaagatctaagtgtacttgaatatggagtttgggtcactcttgagtttagaaatattcttagtgatcattagaaggtgttggaactcaagtgatggctag

SEQ ID NO: 82042 - DNA, 1221 bp, Zea Mays
caaagaaactcccatacggtccagatctgcaatcaaaggcatggtcactttcaggacaccggtcctgctaagtgcatcagccaccacatttgtctttcctgggtgatattgtattgacagatcataatcctttatcaactcaagccaccgacactgcctcaaattcagctctttctgagtgaaaatgtacttgagactcttatgatcggtgtaaatgtcacaagattcaccataaatataatgcctccacgatttcagggcaaacataaaagcgtccaacttgaggtcatgggtatgataatttccctcatgtttcttcaattgcctagagccataagcaatcaccctgccttcctacatcaacacacaactaaggccaatacgagaagcatctgtataaactgtgaaacacttaccactctcaggcaaggctaagataggagcattcaccaacttgttcttcaatgcctgataactgacctcgcaatcattggtccagactaaaggaacacccttctctaagagtttagtcaatggcttagtaatgctggaaaagtttggcacgaaacaccgataatatccagcaagccccaagaaacttcggatttctgagacgctaggtctcttccactccaccacaacagcgacattcatggggtcatgggtatgataatttccctcatgtttcttcaactgcctagagccataagaaatcaccctgccttcctacatcaacacacaactaaggccaatacgagaagcatctgtataaactgtgaaatgcttaccactcttaggcaaggctaagataggagcatttcaccaacttgttcttcaatgcctgataactgacctcgcaatcattggtccagacaaaaggaacacccttctctaggagtttagtcaaatgtcttagtaatgctggaaaagtttggcacgaaacaccgataatatccagcaagccccaagaaacttcggatttctgagacgctagaaggtctcttccactccaccacaacttcgaattaatcacatgacccagaaaagcaacttcagaaagccaaaaggcacactttttcaacttgtcatagaattgattcttcctaagagcatccagaacgagatgaagatgtcgctcatgctcttcctccgtcttcgagtaaatcagaatatcatccagaaacacaaccacaaagtcatccaagaactcatgcaacatct

SEQ ID NO: 82043 - DNA, 759 bp, Zea Mays
tcatccctcaaattgctctatcagatgctctgatggagatcgccatggtacagtacctgcaaaagatcgttggtgcactgaacctcgccgccggtgactcccacgctcggattcgcgtcagtgctgcgattcgtgcccagtggcgcgcagatatcttcgcagggtgaaagatctttggcaagagatgaagatgggacactgtggtcgctctgtcaccgtgcccacttgcgccgcgacgtggccgcgcgaacatcaccgtcgtgccgccgttcctcgcggtcatgccacaccgtcagccattttaccatgtcgcaatagaccatagttgatagccagtctatcacctaagtcattacctcagtgaaagccacgacagcttgcgctagtgaactccctccctcctcggccgccagcgcatcttctcaaaattgggtgccaccactgataaccactataaattgagcgttcggctagctctgttaggttgttacgtgtccagtacaccagccctcgcctccgattagccaccgtagctcgcgaatttcaaactcccccaattcggttctcggcaccgccgtaaaccaccgcgccgtggaccaccgtctctaggtccgtttacacccttgtgtgctagggatccttatcggcccaaccaattgaactagaccacgctagatcgtcgggaacacctcgatttcccctcgggtttcaccgctgtcatgggcagaaacactctgggccgtaattgtgcaattaatg

SEQ ID NO: 82044 - DNA, 308 bp, Zea Mays
ctgcccacttgggccaagatagtgaacggtccaatgtatcttggtctaagctttccggagacatcgatccgaacaactcctttagtaggtgataccctgagaaggacttggtcacccactgcaaattccaagtcccgcctcctcacatcagcataactcttctgacggctctgagcggccaaaatattctaacgaattttccgaaccttctcagatgtctgctgaacccaatcaggaccaaccagagatctctctcccatggtctcccagcacagaggggagatacaccgcctgccatataaagcctc

SEQ ID NO: 82045 - DNA, 779 bp, Zea Mays
tataagacttatgttggtctgtagggatggtctatgatcctagaaggctgctaggagtaagtacaataggtccagaagttgatggggtgttacaccattcctttcactcttttctccctgatgtccgcgccatttaccccgagcgccccaccggcccttaagatttaaatggatgcgctacccttgtcgtcgatgcctcgcctggtctatgatcctagaaggctgctaggagtaagtacaataggtctagaagttgatggggtgttacaccattcctttcactcttttctccctgatgtccgcgccatttaccccgagcgccccaccggcccttaagatttaaatggatgcgctacccttgtcgtcgatgcctcgccttaaccaatggcaacccttataaaaggaacacccctgcatccccaactccccttagatcgcactccttgcaacttgagcaccgcttcctcgctaccagcgctgccaccattgttccgagcatcggagatgcatttcaccctcactagagacacctagtcctctccactggcattaccaggacctctcgagcacgaggaagttgcgacgcttcttcctcgaagctctactatccgcaactaaccagaccacaaagatccgagccccacctgtgacctaaagatctatataaggctaggaaatcaaaggtggttagttctactttacatcttaagagagatcctaacaaatttataaggtgaaccctatacacaccatctctgaattttagaggagaaacttgt

SEQ ID NO: 82046 - DNA, 609 bp, Zea Mays
gtagactctatccttcaaaggctgaatattcttaaaaacaaagtcaacagcaacaacttcagcagtcaagcctctgttcttcaatgcacatatctcagcaagcaacactctggactcagcaagctctaaatctatggggacctctgtccctaggtgttcagacgtcgggttgtctcctcgatcgagcgggaagcgatttgttatgattctccatagtgaaccacttgaagcgccatcccttaataatatctttcaaaggaatgtcatgatactcggtcttcctgtctcggcgaagttccaagctagcgcctccaacaagctaatgctgccctccagccatcctgggccagcaatggtaaagataattccaaagcccaaagtgtggaagaattccaaggaaagcttcgcaaaggtgaacaaacgcagcaacttgaagcacggagttgggattcagatgcgtaaggttcagagagtaaaaatcgaggagaccacgaaaaagggagaaacaggcaaggccagtccccggatgagaaaaggcacgaaaataaccgcctcgtgggtatccttaggcggtagaacaccaatttcaacaagatgcaaaaggtcaac

SEQ ID NO: 82047 - DNA, 508 bp, Zea Mays
ccaagcattagtggatttcattgccaattggattcttggcccacgggatgaagctacctcgttatacgatgttatcgggacagttttctgtgatggatcatggagatccttcggagccggtgttgcagcaattattgtttcaccatctaaagtgagaatctcatatgctgccaagctacaatttcaatgcacaaataatatagcagaatacgaaactctattcctggggctaaggaagccaaaagcaatgggcgtaagaagggcagtactgaaatcagactctcaagtcatcataggccaggtagacaagtcaagcaaagtaaaaaaacccaggcctagagaagtaccttaacatggtccaaaggatggaatcttccttcgagggatttcagtaaaaaacatcccaagactggacaatgagcatgctaatatgttggccaaatctaccgctaaagggctccccttgcacccccgaagtgtttttttgaagtactaagggcaccttcgg

SEQ ID NO: 82048 - DNA, 494 bp, Zea Mays
tttattttgtgttgagatattgtctcaagtcctatttttctgagatgtaaaacttttttaatgtaaactcatgaccttttcgtgatgacatgtgaactcaccacatttttatggttatttacggctactgttcatgctactgttcgtgacctgttcatgctactgttcatgctacgtgacgaatccatcctgctgtctgtgacctgttcatgctactgtttgtcctactcttcatgtcatgttcgtgtcctgctcctatccgtgaccatccctgttggtgagctgatcggcgagcagcagtgcagcacctgtttggcgatgttcggcgagcagcaccgcgacctgttcagcgagtagcagcagctggcgagccgttcgtgtgacctagggcgtataattacataggggtaaaagtgtcttgtcaggaacaaaatacatgggatttgattagaaaaggaaaagaataggctaaatggcaacttaatcaattagaa

SEQ ID NO: 82049 - DNA, 523 bp, Zea Mays
catctcaatctcgccggtgaactgagcggaagcgagatcaaagggaaacagaggaggtctagaagcggaaagtaaggctagggctcagaaagcagagacgtgcgatgacgtggtacaaatggggttttcccgggccaagtaccaattctaaaagtgcccagtcatcactcggctgttacttctaaaatgccgacgtggctcgatataactcagctgttatttctaaaacgctgacgtcaccggtcttcactcggctgttacttccaaaacgccgacgtggctcgatataactcagttgttatctctaaaatgctgacgtcaccggtcttcactcggctattacttctaaaacgccgatatggctcgatataactcagctgttatttctaaaacgctgacatcgctggtcttcactcggctattatttctaaaacgccgacatggcttagtataactcggtcgttacttctaaaacgccgacgtcacccgttatcactcggctgttatatctaaaacgccgagg

SEQ ID NO: 82050 - DNA, 817 bp, Zea Mays
agagtttgtggctattggatgcacataacttgagttggaccattttgcccctatattaagtggttcaaccaaaatatctaaggacatgttaagaatttgtaacaactctaataagagaggatgatgctccaaccatctatctatttacaaaaaattgagtttttcacctttcgagtttagattttttgtcctctagtctttctgctaagtgagatgtggagactgagacctaaaatttgcggtgttgttatttgtgcaaactctagcaaagtgtctgaccttgagtcaaagcaatatttgctctaaaatgcatggatcatgtgctttctttgattttacttttgttttttttcctctctcaaatccacttttagtttttgggtgattttggttttctacatatttgagactggtcgggatggctacataagtgccaagaccttggaataacatatctaccaactcatttggttaggtacttcacgaactcgatttaatgggtttttttgagaatttttttgataaaaaccattatgtaaagaatggtttggttaatccatgcagtttgaataaatgggatggactgaaactccacaaatatcttcctaacctccttttgaagctctgtgccaagtttcatcacaatcgaactttgattatacaaggatttggagaatttttaggggggaaattcaagatacagtcgtgaaacctgacctgaccgcctttggaacgtagcaaggatggcatgacagttaggttacctttgcatctcgggctctaggcaaggccggattatcctggtaccgtagcaacc

SEQ ID NO: 82051 - DNA, 473 bp, Zea Mays
cacgagtcagtgtatcaagaatcttgatagggtactcagcataagtcaggtcatcttgaacactaaggtcctccattggtagctgctccttaggtacccttaggcacttcttgagttgggacacgtgaaagacattatgtacatttgcaagatgaccgggtaattctagttgatatgccacttctcccactcgctttaagatcaagaaaggtccaatgaagcgaggggacaactttactttaactttaaatctcctcataccccggattggtgacaccttcagatacacgtgatcacccaccttaaactccagtagtcttctcctattatcagcatagctcttttgccttgattgtgcaattctcaaattctctcttatcattcgcacttgttcttctgcctcttgtataagttcaggcccaaagaatagtctttgttcagtctgatcccaatacagtggtgtcctgcatgtc

SEQ ID NO: 82052 - DNA, 529 bp, Zea Mays
cgaagctttgattaaagttggagtttttatttgggcgatgtggagccaagggctggagcgagacgccgactgcttctacaatattcacaaattatcctaccaggcgaaggcggttgggaaggagcaatatcataacaactttggttgttactccttcgtatatcgttctgatacgagacaccctgttccaacatttcggaaaaagtggccagggtcctggatgaagtagtggttctatgttaagaatgatttgatttggttgagagggatgatgtgaaggatgtaattcaacgacccatacaatcacgcttcggcattaggaggccttcgatcgtgaatagcaaaaaggctcaagcatgcctggtggctttcaacactgtgttcagctatattggtaccatagacttggtttaggagcacatagccttcaaagtgtggccccttgttaatgaatgggagatgcccaaggagaccgctgctagttcaagcaaaggtggtctggtttacctgaaatacacctaccgctata

SEQ ID NO: 82053 - DNA, 483 bp, Zea Mays
ccccggtgcaagataatataagcctcattccccccgcttgtgttccatcttgcatcaacccatctgggcagggacacgcaacaacaaattcactagttggttgagggtcctcgcgggtccaaaacaccgacattattataagaaggatagcttacatccctatgattaaagagaggacgtataggttaagcaccatgcatcattatataatgaaaatcagatgtaaacaagagtagaggtatctcaaacacataaagtgaacatatggaaaggggtaaccgggtcctaaatgagtaaggaaaattttagtgaaagtcatggctaccccaaatctttatgagttttaccttttatttttccacctccgtgttttgttttccaccttacttacactcaccttcgcacatatggcctcacccacacccatcgagggaggagacacaccttaccacactgacagccttgctcaagagggttttcccc

SEQ ID NO: 82054 - DNA, 397 bp, Zea Mays
gtgactttggagggaagtttggtgacaacgccattgggccgagatcagagaccatagccatgacaccagcgatgatggcggcgagcccgcgatcgctaacccctgttccggcgctcgacccctcccctgctccgcccttgtgtgcctcctagaattctttgttggacgcttgttggcttagatgaagggtcccgatgaccaaatgaggtggtgagatgaagctaagacaccatgggcctcaggcacaaggaacaacaacaactgaggcaggggcacgacaggagggggatggcatgagagggagagaaacacgacgaccgctcatagctcggtcgaatgtcaggtccagagctccagtggctacaaaatacttcatctatcccaaaacggtattcgt

SEQ ID NO: 82055 - DNA, 770 bp, Zea Mays
ttcgcctcattccagcctccgcatagttgacttgatgcggagcatcgcatcgagccccattggaggggtcttcgatcgattgtcatcgacctcgagacaaagaagcctctggcgattggttgtcatcgaccccgaaacatcgaagtctctagagatcggttgtcatcgacccagagccaatgaagtctctggttgcgcccgtccatgcactgagacatggttagttatggttctaggaacacaatcaacgaagggtcgattgaggtctggtttaggctccgtcccaataacactgtagacttcactgtttatagagtataatttgaaatgggagatagagatgagtaagatgcttgagatagtgtttgcactatagactgcattatttacatagtatagttttaaacaggagatgtggatgagtaagctaccagagatgccctaacccctcctacgcactagtgacaactacgcccccatccgcgacatataccaccaaagaccactctggctctagtgtccacctctccttccattagcccattactaccctagatggcatggaggtttctccatttgagggctttggggaggacctcactcgctctaccgccctcctaccacaggtgatatcctttgtccctaagcttgatgctgcatcggggtggcgatgcttaggccaccattcatcgcatgatacgcttgacgtcgatagctcagcctaggtgacacatgtgatactcttgtccattactgtaactcatcctctg

SEQ ID NO: 82056 - DNA, 1167 bp, Zea Mays
caagtatccagttcctgtgatagatgaatttttggatgaattacatggagctgcttggttctctactcttgatttgcgtgctggatttcatcagattcgtatgagtcctaaagatcaacacaagacgacattccaaactcatcacgaccatttcgagttcagagttatgtcttttgggctttcgggtgcaccaacaacattccaaagtgctatgaacactacacttgctcctctactaaggaaatgtgtacttgtgttttttttatgatattttgatctatagcaaaacatggccagatcatatacatcatcttcaacaagtactttctattcttcatgaagatcagtggtacatcaaactttctaagtgtgcttttggacaacaacacatctcttatctgggacatgttattagccaacaaggggtggctactgacccaactaaagtggaagcggtatcttcttggcccaccccgactaattgcaaagaccttcgaggatttctgggtcttgcagggtattatagaaagtttgtcaggaattttggcgtcattgcccgaccccttaatgatttgctgaaaaaaggagcgttgtttgtgtggacgcaagtacaagaagaagcctttcaggttctcaaacagtccctcgtttctgctccagtattggtcctaccagatttttccaaaacctttacggttgaaactgatgcttctggtaaaggtataggtgcagttttattgcagggcggtcatccactagcatttgttagtaaggccttgggtgttaaaaatcagggactgtccacatatgaaaaagagtatctggcaatattgttggcagtagacaaatggcgtcagtatctccaacactctgagtttgtgatctattctgaccatagaagcctttctcatctgactgagcaaaaattgactacaccgtggcagcaacgagtattttctaaacttttggggctccaatatcgtattgtctttaagaaaggagctgacaatggagcagctgatgccctttctcgacgtccacatcctcaaccaacatgcttcagcattacttcagtggtacctcagtggatgcatcaggtcattgacaattatgttgatgatgcctattcacagaaacttcttgctgccttgactgtggatgtttcgg

SEQ ID NO: 82057 - DNA, 398 bp, Zea Mays
aaaacaatcaaggaaaagataagtgagattctgacataagagttgaagtaaaagttcattatcgaaggaagttacaaggaattaacgagatcaccaaggatgtgcaaaataaaaatgaccgctcatggattattaggaaacaagggtgatcaagggcacgttaactgaaatgtcttgaatagtcattggggtatgaaggtaagcatacatgaaaatatgagagtacgcaagactccaaggatacgagcataccaataccaagagaatagaaattgccaaaagataacgacttaacaacgaaatgggaaaggatctcaaaagacaggaaggtcatggtcatataaactcaactgtttaaataggcagcagaggtacaagggtaagtactttgaattaag

SEQ ID NO: 82058 - DNA, 570 bp, Zea Mays
tttttcagcaattattctctgccataaaccattagcattttccagattccaaagccatttggaaagcagagcatcattcatagaacccaaattcaacacacctaaaccacctaaacttttgggggagcaaactgtcttctagttaaccaaatgcatcttttttgtctggtaaccaccttgccaaaggagactttttctgaataaatccaactttctaataaccgatttaggagccggataaatcgataacatgtacagaggtacattagaaagagaactgttcaaaagggtcaatctacctcccagactcaagaatctccctttccaaccagccagccttttgtccattttttccagcatagggcaccaaagagatttactaatcttcttattgtcaatttgcacaccaaggtatttcattggaaggctaccaacaggacaagtgaaaatgtcagcatataattcagtgaattctttagcatcacccaaacaaaaaatttcacttttgtgaaaattaattttcagtccagacatatgttcaaaaagacaaagaatgaatttaagatttct

SEQ ID NO: 82059 - DNA, 447 bp, Zea Mays
acggtcgggaggcggttagggagcggtctgaccgggcgagggatcaggtaaagtttgtcttttgtttcgtgtcgttgaatgtgggtatacgtgggttcgctgaattggtgtgctgtgttgtagatggcgcgtgccgaggacgtggaggacttcggacatctaaacagcgcgcagcccgaggcggaggtcaacccggtggtggccgaggctgaggttgacccgacaccgcccccggaaaccgatgaaggctcccttgctgcccctgcgcctactatgtctggtggaggctcgtcgccggccactgtgccgatggtggaggatcccccaaaggcggcgacggagctggcagcagaggatcccatggcggcggctgggtcttcgcaggtggcttagtgggtgtggggtagttagagaattttgtctatgttactgaaccttggttgctgc

SEQ ID NO: 82060 - DNA, 484 bp, Zea Mays
gttacgccggctgtccgccgatgccagcgtatatatgcatgcaccctgctcttccctgagacaacgtcgctgagatagatggcaggcagagcgagaaactaagagagaggaggaaaggactgggtcaccgtctcgctcgaaatcaggaggcatcaggataaaactcgagcttagtagttgtctaatttccacggactcgctggtcggttccgagtaggttcggggcgatggtgggcgtggaaggtagctgacgtaggaattaggcccatttgtgtgtggctcaatttaataaagaagctaaggtggtgtgtaggatggcacgggactttagtcccatatcgtccatttaaatagaagagaactatcttatatatgggtgttccctactcttcacataagacaaataaagggctatgaaggctgtcacatgcgcgctcacttgtgttttgtgttttttcgcattatttattgcgtgatttgtgac

SEQ ID NO: 82061 - DNA, 454 bp, Zea Mays
aactcaatcttatctaatctaatcccaagtaactaactcaatcttatctaatctttatccactaatcctaactctgagcctattcctatggcctccacgccctgggctaccgccccatgacatttccccacccttcaaagacagctcgtcctcgagttgtaatggggtgtatggcaacacccttgctatctaacttgatctacatgtgaaagtgcaaccctaactagaagccttttacatctcggctttaatttatttgcaaataaaataatgaacctaacatatgccaaggttggttcccctggatcccatgagaataacttcatccaggttgcaaaggccaagacatggcagctcaccagtcctacggcctgagctgccgtgagttctagtggagacagtgccacccaactagacgtgttcttgctgcccacatggctatggatcaagacgg

SEQ ID NO: 82062 - DNA, 635 bp, Zea Mays
aaaacacttgtctccatctatctatccataacgtgaccaatcaagttaatggaaaaaattcctagaaacatccaaccacaaatacgaatttcagagaaacgtgtaaagattagttaatggaaaaatactacacacatgcatccccggagtagggcatctacgaatttcagagagagaccgaagcaactagggatggagagagcaggtgacctgatgattaccttggagaaggcacggaaaattcttttggctggtaccgcgaggagacgagatactcgaccagatctacttgggcagcgaggagatgggttcctctcccaaaattttgttgccagagagtgcttgtggtagtgacatgaaggcacgcggatcagttgcggtctagtgtggtgcgcggaatgcggtcgatttggtgggaaaaacgacgcgagacagcaaaatttacgcgccaattctcaggttgggaatgcggaagaggagagcaagtttggggagaagaaacgatggttttggatatgcgtaattatcagaattaatttagaaaacagttggatcgtagtttttcttaaagatatcctaaattaaagtttaggggatgcttttagataagttagagatgctcttatgacataact

SEQ ID NO: 82063 - DNA, 492 bp, Zea Mays
gttagacattgttgctaaggctgggagtgatgcttgttttgggaaggttggttagtgcagtgggttgacatcctaaaaaacatccaaccacctccaagcttgtcaaaatccctccacataaatctgccatccctattgtgagagatggtgtgtttgtggagcctattagagccccacctcagaaataggtgtggtttccaaaacctaaccatcataggaacacacttgacaccctacctgacatctctagtgatccctttcctaaagctccacagccacacaaaagacccactcccacaaacaaattccacccattagagaggtgaggttccattgtgagtattgtcagggggtggacatttggctgccttttgctttcggaggaagagagatgagtggcggagttctaagatgagtagagagaacatgaaccgcccctctcatggtgaacatgagcttcctgttctgagacgtcctggtaggccgataggg

SEQ ID NO: 82064 - DNA, 781 bp, Zea Mays
atcaaatcgactatcatagggttttcgatacgactgccctctggggatcatgctaactctgagcttatctcggaatgccccacctatctcttcccttactatgtcaatagagactggtggtagtccaccagtgctttggtctagcataggtgtgggtgtttgggtattatgtcatcttcctgcccacgggtttcggatatgtggggcattaatgcttgcccctggtggctcatatggctggtcgtctctttttgacctttttggggccaaaaagtactcgcccccacgtgtttgggctcgtattatggtattggggtgtcgtggggtgtaacggaaggtttggctgggtcgggtgtaaagatgaggaatgataattaatattatgttatgtatacttcgcgtcagactgtctgctctaatacacggacagtccagctgtgagcgtggactatccgaacgtatagtcggaccgtccggtgatgtatttggactgtctggccatatgcgcggtcgggtcgaaaaagtttgttaaggtttgcgtaaaattcagtggcctaacgtagatttcgctatcttggtttggaaatggggctggtcactgctggtctagatggtccacattcaggcatggacagtccagtcgtgcacggatcagtggatttaccctcgatctctgtaggaggttgtggttgtccaggatatgtgtccatcggaatcccatgtagaggttgggattggtcatgtcaatttgcggttgatggatcacttgtattttccctag

SEQ ID NO: 82065 - DNA, 550 bp, Zea Mays
agagggaatgcatgggaagctacgtcgttacgggcttacggctgccgccgggtccgggggccagctgcggcctaacttccaaccagacgtacgtactacgacgacgtggctgattgatcatgatcatgatctgttcgaccggtgcacgtcactattggtggttgttaaatactacactactcgtatacttagctagccacttgcatatatgctgtgtgcgcggttgttggggtgtgctgtcaagtcatgtgtgtgcatgtctccatgcaacggggaacgccccgcgcgcgcgagagaagagatgccgatcgatctcgggggcggggatatgcatgcatgggtggcggaaccgatccccttttttcttctcctgcaacttttaattgctctcgaccatgcatcgtcgctctagctacctgatgcatggttacacgcgagtacgcgacgcgacactctctctagcggccgcctgtgtgtgtgactgtgtgtgcgtcgtcgcagcgcggtgtggaaataaagggcgccacgctaggccagatgccggccttct

SEQ ID NO: 82066 - DNA, 542 bp, Zea Mays
atctcgggacgagattcctttaaggggggaaggttgtgacaccccagtgtcacctagggttcttccctaagctaaccccaacctattataatgaatcttcttaaactctccttaatcttgtcatgaaccttgagagaggaagactctcaaaccttaataaatcctaagtgagccaatttaagcataaagggtaattgggagaagtcatgggggaaaatgcaaattttagatttgaccaaattacaaagttttagttcatcaaataactaacaaatcatagtaagagagtttggccatttggtttctttaaaattcccaaattagcccttgaaccatgatcccttggagaaattcagatttctgaattctgaatttcagacccctttccaaggatcaactgcgttctctgtttttcaaaactcaaaaccaggagatccaaatatcaaagttgtgccaaatacccttgaacacgccctagaaaagtttgaactcaaaccaaattcatttgacacagttttggtgcagtttgacctcgggaccag

SEQ ID NO: 82067 - DNA, 530 bp, Zea Mays
ttgctattgtactgttttgctgccaaatttttagtcatagccgaagcttgatcatcgtgctcagacgaaaccttgcttgtgaatctgcttcggcacaagtgtaagagcttcggaaaagacaaaaaaaacaacaccaaaaatttcaagtaagtcataatcaaatggccagagttcgctctactgcaagagtcgatcgtgagggagacgagaccgaagctgttgaaactgttcctatttcggaagcaatgaagcgatctaggttggtaacaccggaagacgtccctgctgccgaagcagagcaagcagatattgaagagaccgattctgaagatgattacaacatcgcagtgccgagcaagcctagccacctggacttcggaaagttgaccatctctaaagctgattttcttaagatggtgaagtcgggctactttagcgaagataaaaaagagttgattcgcttcggtggagaagaaactactccgaagccacataaagatgaaatagtgattttcaagagtttcctcaaa

SEQ ID NO: 82068 - DNA, 477 bp, Zea Mays
ctctgaatcgacgccctgctgggagccaggcgccaaaccaacggtaaaccgcccgaaacggcgattaaccacaactgacataaggtaaaccgtgttttgactcggtaaactagatttagtacatatatttagttctacactacacatttattgttcagatttagtttcgtgatgtttagggtttcagatttagtctcaataatatgttttagatttagtgcttcaaatttgtgtatgttagatgcagcacaaacccattttggtgaatcaaatgacgatcaatatgaggatgaacttcaagcggctctgcgtcagtcacatgtggagcatggatttggtcaaggggctggtgcaaggtatgacaggggtggtggatcctacagctagagggtatctcaagggccacttggtaggatgatgggaaggagtagggaacaagtacctgagcatgttagagactacaatcttgctcaagca

SEQ ID NO: 82069 - DNA, 526 bp, Zea Mays
taaatttggttcttgacatcgctaaacatcttttctttgttgcctttgcaggcggaagaagctttgtcaaagcagtctaaagtgtttgcctggtagtattctagcactattttttcgacaagcttcaatttcttttaaaaaataatctgatataaggcttgtgttctgattcgaacatcagttccaagaaggcaaccaagaggaacaaacctgataagtgaagaaaacaggttctcgaagaacattgaccttagtttcataatatatcgaggtaagccattgaatctcaacatttccttctctaatccaggcaattgattaaagtttccgttagatttagtgcgcatacaaatctatgaagaatccaaaacacacataggtgcatatattgtatattgaaattcatgtccagttctaaaattacttgcatgctggatgttgtccagtgttgaaaataacatcacacattcatcgatatattaatatagcaataaggaggtctatattaaataataaactgaacaag

SEQ ID NO: 82070 - DNA, 554 bp, Zea Mays
tcctcctcctcctccgctgccgccgctgacaccaccaccaccattgagacgagtgcgcaactgctcgacctgccacgtacgtacgtgacgagctcgctggccaggtactctctctgtcactcgtgtctctgactctctgtatatatatataggtgcgaatctggcggcgggcggttcagctcctcctccggagtgggggtagtggagtgagtgccaggtaattataccgaggtcgaggagaaactgcgccggagcaggaggaaggaaagaaactgatggattggaattggaacagagagagaggcaggcggggaaacgagacgacgcctcccgttgcttgatggagacgaggctatagtgtactagtgcctctatcctctagctgagtgggggttgtgccatagcccatagcataggattgctacgttacgtaccagctagcggtagtgcagtgcggtactttggtggcaatggcaacgcacaacctcgaggtgggctccacaggaagtggtcgcccgggcccagcgcccccgcttgtgcgtgcttgtctcttc

SEQ ID NO: 82071 - DNA, 354 bp, Zea Mays
actatttaaatatctctcactatttcattacaacattcactcccaccgaaatactcttatatgcatgatattatatacatggtagttcatgtttttccccacccactggaatactcagtctgcaccgaaatactcctatatgcaatgtcaatccatattgcaaccaccggttttatagtttgataagatattggaggcaaacaaatcatgttgtcgtaaaaaataaaatgttaatcaattgttcatatgtaagaaacgacaagatgtcgttcctattatgatcgtttgtaacccggggtcaccccctgtgatgagtaagtcaacctccatatcatcacggtagtgtattgtaac

SEQ ID NO: 82072 - DNA, 502 bp, Zea Mays
aagttcgataaaatattggagaaggatttgatatgatgactaatctggagtcagatgaattcgtatctgttatttacacttaaggatttagatcgagacgagatacacatgaatcgaaccaaacaagatttgatcttgtttaaaatcagataaacatacgtctaacatctgaacacctagttccacagctagagtaatttatcagtgaatcgatgcacaatttttggatcctcgtactcgatttcacggttgacgagtgtgagccgaattgtttgcaccgaaaaccgtagtcgacgagttctgactaattctcgttcggatagttttcgtgactgtttcgggcaacacggaaacgaactagatatcgtatacattattctgagacaatactggtttagtcgaactcggataaaaatttacccgatgcctaaacacagttgattttattattttacagagtgtgccgaagaataaagtggatcaaaacctcgcgcaagatttc

SEQ ID NO: 82073 - DNA, 786 bp, Zea Mays
gggattctagttacctagtgagggtaccccctagagtttaggcaatgtgtcttacaatggaagaggcgcaagtttgtcgagccttggtgcgtgggtcgttgccattttggggagatgtgcatcatgtgatcctttgggaaatgagccaaagcacattaaaaacaaggtagaggtggaggattgctggttacttggtagtggtgagcctatggggtggaaggagtgcttaacattgtgggtgttggtgcactttataaaatgcgttcctctggttccattgcttgtagtttgctgccaaacttttgaccctcttgccatcctcttcttgtgcatgcgtttccctttgcccttctagccttcttcttctttgctatccccaactagtgagatggagaaataggctactgctattgcttagtcatggttgttcccacgctgcacggctaccatatttgttcattagtagtgaagtgccttttgctagaggcattcacatggatgatgattctcagggtggatgaagcgaagccgaaggcaagggaggtggtggcaatggccaacacttcgagcgtgggctcgagttaccactacatctctttgttttgggaacattgtggtactatgggattgagattaaccccaacaatgttcttcacatagccatcgttatgacgctatgtgagtgaggcattctttggggtggagccccactaggaaatttggaaatatttatttgccccactcaccccaacatcgaccaccaagtcatcgacaatgtctccttcc

SEQ ID NO: 82074 - DNA, 357 bp, Zea Mays
gtattgttaacatctgaacatgaggttttaaggtacacttaacaactgcaatggcagcagcgcatggatatactgttccaaacatgagttaaaccttcatcagaaacatgtgtaattgcaacgctatagaaaataaatgaaatatcaattgtcatggatatactgaagcctaaatttttttacacgctcgacagcataattgcaactggaaaatcaatttggcactgtagaaaataaatgaaatatcaattgccacatgcaaacaaaagctacggacatgcaaaaaagctacggacaggcacagtcagtcagtcgcaggggtgcgcgcgagctaggaattgagcgacttctgccaga

SEQ ID NO: 82075 - DNA, 1184 bp, Zea Mays
ttccttgatactggttcttgttctgctggctgatggaggagggcgtcttgggggcaggtgcggaggtattcttggggccattcaccgagttggagtaagcaggtcctgatggcttcagctggggacagttgttcttgaagtgactgggatctccgcagtgccaacatgcatttgctggtggttggttgcttgcaactaagggggcataaaaggagctctgactctgctgactgaaccgtgatgaggtgggtccagctggtctactgaaacttggtcccttgggtggaaatccaaaggatcgagttttctggtgccggtcttgctactgagctcagaggacttggaatttcctcttgagatggcctttctcttcttcctttgccctttctacttgtatggctttgctggagaggtgcgagaaactgaggaagtcttggctggctaggatggtcttgagttctggtctgagccccttcaggaagcggggcatcttattgacttcggtgctgacgtcatccggcgcgtagcgggccaactctgtgaatttgtgcacgtactcactgacagatcttccgtcttgagtcagttcccggaattcatcttccttgagctgaacgatcccttggggcacatggtgctcccggaaagccgtttcaaactctgcccaggtagcatctctgatggtaacattgaaggtatcccaccaggctaaggccattccggaaagttgatgagcagccaattgaacacgctgattttctgggcatccgattgcttctagtttcctcttaatcatgtgcagccaatcgtcagcatcgaggggattgctagatccggcaaacatgggaagcttgagcctcaggaaatctcccatcctgtcttgtggtcttccaccattcgggcgttgattttccagacttcgagtgaggacctcgatgagtcgggtttggttggctagaacttgggctaaatctaggggtagttctggaggtgcggggaggtgggtctcacttccttctctaccggcttctcttttagctcttaggggaaaccctgctccaatcccggaggcggtaggcatggttttatccgaagccatctgccatgggaagagagtcactattatgcacatgccattttttcaaccaagttattttattcattacaccaatacattacaagcg

SEQ ID NO: 82076 - DNA, 346 bp, Zea Mays
tgggctctaaacgtagcggggacaagagtgaacttaaagagggttacttacccagaatgatgaagcgcagtcgatcgaccaaagccaaaggcagatatgcgacgaagcactggcaacggcgagaaatcaccggttctccgcccaccgaacccggacgaggacaccacgggaacgacgctgaaagccccgacgaacttccgcgccgaagctacaccaccccgctgtatttttcctctcggtggctgcgtgcctatggcgctccctccaggctatcttcctggtcgaccgagacggcgagccccgacgaacttccgcgccgaagctacaccaccccgctgtatttttc

SEQ ID NO: 82077 - DNA, 571 bp, Zea Mays
agcacgggtcatggtgcacggcaacccacggcctcagctggacaccggcgcgaagctggtcgattctccccaccgccgcacagatgcactatcaaacaggacccccggccccggttgagccccacaccagtgatgtcaaggcacgaacgtcgagaaggcagccgcggtgctcaaactcacgcgctaattctctctcttctcaactgcactcgtcgctaggcaacctatgctctcgctgctccccttctctttctctcgacggagcgaacacgacggcactgcgcgatagatcactctattcggccgagacgattcccccggagctccagttatatcgcgagttcggaaggtagtgccgatttctccggcaacggctttgaccagcgccagcgttgtagatgcacgcgaatcacgcgtggttcgcccgggtcagttcgagcgtagaagaggaacagtgccagcacgagggcccacatggcggcgaccggggcgagtccgtgctgcgcgcctgagaaaactgagctagggcccaccgatcagtgagaaaccggaagcaggcgtgtgtgtggcg

SEQ ID NO: 82078 - DNA, 1194 bp, Zea Mays
aagatcttcaactttattcgaccctacatcatataaaggtatcaagtactgtcagacagttcattatagtgtttggtgaccacatcggcaccaaccgtatccttatagtttggatttgtgacgagtgattaccaacaagagcatcattttaggttgagatgtatggactaaccgaggtgtgagtgtacgtataacaagtgtcttgactcgtggtgtgtagatgtggagtcccgaggcggtgagtgatagtgaaggtgaagatcatacatgttcgtgctaatagaccaaaaagcgttgaaggaagcgctgagccttgactgaaggattcgaaaagctagatgactagtcgtggtggctgacacctggaacactaacaagcgcaaaaacatggcggaacggatcgtgttgccgacacgattgaagatcgacgagacacgtgctcaagatgcgggagatgcctatgaagtacgctgtctatggaggtttggtggttgagccttaactatccagcaaaagtttcgcacgcttgacaccgagtttgggcctgaaaacttgacagcacgttctggagagaaccaaagacggcacatgatatcatcacggagaatatgtcaaggcagagtaacttcaagaagagagtatggatgtcagctcaatatcttaagagttggttcattttgtccccgactgagtggataaactctatgtatctatgtatagtttagagaagacaaaattctttataaataggggggttgcacaaccagctatctctcggactatatctatagtcttctacatatggtttcgctctgtaatttatcttgttaggcgatccttatttgcttttggacttattgcatctatgattttatgaatcaagaagtgtgggtcgtgacttctatggtaaatccctacacaaaatggtttgcttgaagttcttcctttaagttttcttcctgagctcttcgtttcgattttttgtgggattcaataaatatgagttcttggggtcatttggaagggatggaaatatgctatgacctcataggattactgtcaccaaatggtatgcactggaccacctagagcacgattttccaatctcttgtgtcattttgagaaaactctcgttcgaattcatatttttcgatctaactttgaagttcaaatcttttttgagcttaaactttg

SEQ ID NO: 82079 - DNA, 328 bp, Zea Mays
gccaaagctgcaggctgatgcgatccggctctgagagcgctggtgctcttctgctcgtgcacagaatggtaataaacaaattaacaaaaatgttcgggagagggctatcgtatccgttgtaattgccaattaataacatagtaattaattatccccgagaggaggtgatgccgtcgatcattcgtgactgatctaatcgcagggattgtttagtttatctgcgttcgcatgtgaggtgacaactgggtgaagccgggttcagttcagctagcgtgtcatttttccaaagccttgtcaacttcgatcgtgtcgatgtatcaagagcctg

SEQ ID NO: 82080 - DNA, 390 bp, Zea Mays
aatgaaattaagattttgtctttttcaagaccttcgtttcttaattcgattacctctgaacgaaggttgttcaaagccatcgtatagcctttatcttcaatatttttctgagcactgagcgcattgctaagaattaagccctgcaagaggaggacagaattgagtatagcaaataaaatatttcattttcaaatacaaaattagcttttatacctttatgttattgtatgctaggctgtcagcaagttcgtccttcgataaaatcgaaagaccgtcttctagcttcgagaatccgatgcttttacctatctcccggcaaacggatatttctttgttatccgggagacagtacaaaaaatcttcttcgccactaccattgaacactaacgc

SEQ ID NO: 82081 - DNA, 731 bp, Zea Mays
gattcccttcggggaattcttccattagagaatgaattcttccattagagaatggggataaagatggataagtttctttccacaccccacctccgtgtaaacaggacgaggaagcattttctatccccgttcttcgtagggactcgtcaaacttacatgtaacgatttttttttcatgtgatagttatgtataaaaacaaataattaccttgccaagagatttctcatggtacaaatgtctttattttgatgtacatataatgatttttttatatctgacaatgtatataagtaaaaatattttgcattaataacatatgaattatgtactaattataatttaagcggagacagagatccttgacggggatttatctttgccaggaacggggatctatgatagggatttatttccgcggggaacggagatgagaaagaaatgttaaaaaatagttgttaatggggattctagcgagtaaattttttcgcagtgggaatggaaatgaggagctaaaacccaataaaaaattcctagctgccatccctgtctaccacgctggcacttggcggggtcccgcgttcgttccagagctgccacacttttgcattgtgacctagattctcctcgggggacgtgacatggaatctgcaaagtgaccagaaacagctaacgcggtgataccatttcgatcgtgcatgagcaggaacatgcatggaaccaagcaaccagc

SEQ ID NO: 82082 - DNA, 459 bp, Zea Mays
gtactagactcaggccacatttatagtgggctgcgggtttatttcctaaaactagaggggttcatgcgcaaaaatggatctgcgaaggggtatggatcaactctggccctcagattagagttctactgcttagacacctgcccgtgaccaaaccggtacgcaaccagagcggttggatcagtgatccacggttcaacttcactgatcccgtgatctaatcgccaccattggatccaacgctaacggcccggatcccactgaacgaagggatacacgatctctaatcctaaccgcgaatggcgcatccgacggtcgcgaaccatccaagccaaaacgctatgccaggttaattacggccgtaggatcaagaaccaacagttgtggcgccttcctactacctccctgcgctcgacacggtggcacttgaccagccacgacagaccatcaccggagaaatgc

SEQ ID NO: 82083 - DNA, 710 bp, Zea Mays
ccgtgcaccgtgttttggagctactgatgcgccactgtcggtgagaattcctcctctggtctctccttcgcccccgtatcatgtaggatcggtctagtgtatatttggggtcatggggtgctggggattcatcgtcagacatcaccactatcgtggccccgccagccatcgtgagtagacctggcggcccaacggtccaccaattttgtgtcgctagtgggtttgccttgacccctcttcacgtagccttaggctgggatgggttggtgcactgttaggtgatgaagttcaccgctggcgcaatcaccaccatggtttgacatcgcgccatcgtctcgctcggtgagaagaagacgacaggccaggaccgtttgatcctttcacgacggctataattagattgggaacgtaccccttcgggccaataaatctggatcgtagcttcgggatcgtgcgggcgggggatgatcataattagaattgatccggggtgccgagatttgatccgacgatcgctgtggcatgccggtgagggcatggttaggtctaatctagaccgctgaagtctaatcggtcggtcaagagtcacaataccccttcagcccttgtagttcaaaatcacctagaggggcggtgaataggcggaatctgaaatttatgaactgaagcacacactacaagccggggttagcgttagcacttaaataaag

SEQ ID NO: 82084 - DNA, 312 bp, Zea Mays
gagctggtgtcagagaggacgttcccggagagggtaccatcggtgctagagtacgtggtggcgaagagctcgttgtagccagagtcgtggttggagtgcgtggtgttgaagagctcgttgtagccggagctggagagcgtggcgctggagtcggtggagacttgggggctggggtagacctgctcggagaagagttgcctactcccccagctccctcaaagtggacgtactcgatggtgaagtcgtcgtacgtcggagtcgtgccgtcgtccaccgctttgtcccacgcccatcctcgcccttcgtcgaaca

SEQ ID NO: 82085 - DNA, 577 bp, Zea Mays
atgaactgggatgaactttgagatcgattttgcataggattcattggatgtttgatcgaggttgctataacaaaagtaaagacggtttatagaagaacaactttgctacagacagattagtgggttgtcacacgaaaattagagaatgaggccttgcaagttgctctgtcagaacgactgagttagatcgcgatggtacagtagactgaacaagatcacgggttcggtgcatctgtcgccgccggtgatctccgcgccacgattcacactggccgccgcgattcgtgcctgtgtgaagtggataaccgtggcaggtgaaaagatctggggtgaggagaacgtaggcctgagctggatcatcgtcgtgcccacttgccgtgtggtcagtgaaatatcgtcgtcggtgttcaccgtgatcgcagtgagagacacgtagtcgcctatttcaccgtactatcgtggtcgtggcaagcaatcagttaccatccctgaaccattcccctctcgcgcgccacggtgagcaggccaccgtagaaatatccaggacacggtgaactcgatcccaatccaaaatttg

SEQ ID NO: 82086 - DNA, 626 bp, Zea Mays
cccgagttaagtaagaatgcaagtcaatcgtaaacaaaccgagtatctttgaaacctcttttttattgatgacatatttccactttacagagtacatcgttgtcctggcagtttttgaaatacagctagggataaaactttctgaggtgttctatgttccaggagttcacgacttctgtgccatccatctgagtgagacgatacgatccaggccgagtggcttctgctaccatgaagggtccttcccataagggcgataacttgtgccgtccctcccccgttagaattcggcggaggacgagatctcctatttagaaggatcgttgtcgcacagccttgtcgtgatagcgccttagagtctgctggtaccgtgctgattggattactgtatttagccgttcttcttcaagtacatcaatgtcctccagcctggtggcctcagcttctgctatgtttttgaagatcaaccttggcgccccaaacttgaaatcggcgggtagcactgcctccgacccatagaccatgaagaaaggagtgtttccatgcagggctcggctaggttgggttcttaggctccaaacgacataaggcagttcccttatccactttcctgcgaacttttcatt

SEQ ID NO: 82087 - DNA, 343 bp, Zea Mays
gaggttggtatttagtaatactcagattagcagcacaattattagaaataataacatctcattaattttgtttttcgtccatatagtgacacttgctaaattgatgttgattgaagctgattacttactagacttcaacaatttaatttactacttaggaacatgcactagttacttacatataacctaattatattagttactatcattgttattctttcacttaacaccaaaacaagcaagcagtcactcaagacaaacacaacagagtagagtaatcaatcacaatcaacatgattaagagagcagcacaacagttacttgtttcagtcataactcaaaa

SEQ ID NO: 82088 - DNA, 315 bp, Zea Mays
gcaattgccgctggagatccagctgatgttgctccagcccgacgtcatggacgccgtcggtatgctcgagctctgaggcgtgagtgcattgaactacgtatactgttatcatgtgtcgtcgttggtgtgcagtttgctattatataaatgctcgcgcttagtttgctatcatgtgttgtactgctgtatcatctgaacaagttactgtaaacgtgatgtgttaatgtcgtcggtgaggtgatcgaagaataaagaatgtgtgtaatggtatgtataagtaaggcttgcagaaagctcgaaagtgaagtgtaaaac

SEQ ID NO: 82089 - DNA, 350 bp, Zea Mays
attcgatcgatttgagagattagagacttagcccttgtgctattgagtgttgcaacctcttgtgttcttgatttgagcttttgcattctcactcgcattctcattctcttgattgtaaagcgagacaagagactctcaatactttgtatagaaatccttgcgggacttagtgtcactgtgatagtgaagcaagctcaaccgatctctgtgaccatttgagagagggaaatagttgaaagaaacttgtccttagtggactcctcaatggggatgtaaactctttggagttgaacctcgggaaacaaatcgctgtaactttgtgttgatcactcttggcgatttgattcttc

SEQ ID NO: 82090 - DNA, 768 bp, Zea Mays
caccctgctaggcgaactgcccggggcttatcaggcagcccatggagcgtatctatgcttatagggacccatgggatatctatttcccacacctattgacaccgacaatagtcattgtttgccttaatgtacccatccatctttccaagcaacttttcaagagtgtgaatcaatttcctagcaaagtattgtgatgctggtcctggacaaagccccttgattattgccctcaataacaatgttatctgggacaccaggtgcttgggcatgaatccaaataaatctttagtcatatcattacaagtactcttcaggttcttaagcacaatgaaatagagtttgggtagttattagattggtctaaaaattaggaaagcttgtgagcagtaattccttgagcttctgccacatggtgattgattctagtcgaatagaggaataccatgtcaatgcaatgcccttactaccatgatgaaaacttagctagcactactgtatttccaccgaaggaagcaatggttgcttcataactcctcatcaattacttagtgacagattgaccttcatatttgggtagttgaggatgcctatacgaaacccgctgcaatgctgcttgtagattagctgacagtggagatgttgtcgaacatgaaggccacatgattttgctcttctaggtgaaggtcccttgcatcatggcagccttggcgttgcattttcttttcctcttttctcatgcgatgcaactcttctataacttcatcaatt

SEQ ID NO: 82091 - DNA, 771 bp, Zea Mays
cagaattgcaaggtactctttctcgtaagtcgacggaccttgtagtttgggtcccaaggccttgctcaagtatgcaacaggataacccgcctacatgagtacaacaccgacacccacatcactacatctatctccaaataaaatggtatgcaaaagttttgtaaagctaacaccggcgttgttatcagtgcctctttagtgcttggaaagatgactcatgtgctggagtccaaatgaatatggttctttcttgagcaagttggtgagaggtttggcaataactccaaaatgacgcagaaatcgacggtagtacccagccaatcccaagaaactatgcagttcctttacattggcaggactatcccatgtagccacaacttagattttctccggatccatagcaatacccttggctgaaatcacatgccccaattatgacaactctgagcgagaaaaataacacttggaccatttcaccttccagtgatcccggagcaacaactgcaatacctacctaaggtgcaacaaatgatcttcaaatgatgagctatagaccaaagtattgtcaaaaaattccaacacacatcgacataactagggagctaaagtagcattcatgccttcatggcattctaaaaagtggtcggggctcccgtcaacccaaaagctatcactctaacctcataatgccctgagtctgtttgaaatgttgttttgtgagtatatgtgagcttcaagagaatctgttgttactcggatgtgaggtccaaa

SEQ ID NO: 82092 - DNA, 508 bp, Zea Mays
gagctcaagcagggtcgtgtgggtgcctagactatgtgcaagtcgtcggtgggggaaacccagatcgtgcttgggtggaaatagctgaagctttagaggcagaggaggaagaagctctagaggaaggttcagctcccaacctagaatgttgttctgcttattttgcggggaggataaaggacatacaacaaggacatgccaagtcatgatctagaagcaaaaagaaatagctgaagtcgaagcgcggcagaatcaaccgaagcaggtcctgcataccgctttgtgctattctctgtatattccagagtatgtgcacaaccagcagcccacgacatcagttgcttcaacaagtcattctcaagctgcacgggctccgctgccaccaccagcacctatggcaacaaccttgacccacaatcagcaactagaagggcaccgtcaggcacagcaacagcgcgacgcacgtgaataatctaaagctcgcacagtcaacaacattatgctcgag

SEQ ID NO: 82093 - DNA, 425 bp, Zea Mays
caagattacccaaacaagccctgagtaagttagcctttttatttttatagtatgagctatatccgcatctcacgagacaatctagtcttttgtcatctttacgagatggacgtgagttgtcgtctataaagatggcaaagattaaatgttttcatacgacacacgcataccataacaccgatctcgttcgagtctgtgttgacaatcgcactcacgaccgatctagatcagcagataatagtggctaatcagccaagttacacagtataagataccaatcacctgtctctagatcagcagatgatagtggctaatcggccaagttgcacagtataagataccaatcacctgtctagcgccacagttggccagcttaattactcgctcttccctttagacacagatgcaacacgctcttcctctcg

SEQ ID NO: 82094 - DNA, 380 bp, Zea Mays
aaccggcccagaggacgcctgctcatgacgacggtgaaaaccgagaagaaactatggttttcagggcaatctagtgcggtctagttcaatcgaatgggtctgtgagctacaggggacatgagggaggctagaacaccaattaaggaagcttgaactgacctgcagaaggctggccacagtgaggcgttcacggtggcgcggaaagcagatttgggggaagaaagaaattagggcgctgtggtggctaatcagaggcaggggcgagtgctctggcttcgtgatgacctggcggagttctctgaggcttcaatttatagagctcaacgccggtggcgcccaatttgaaagaagtgtcctagaggccggagagagggactgag

SEQ ID NO: 82095 - DNA, 1655 bp, Zea Mays
gttaatcgaagtcttttatttaaaaggcactccacgcaaaagtcgcctaagggtgcagccggaatagcacaacaagtgtgttaatcgaagtcttttatttaaaagacacttcgtgcaaaagtcgcctaggggtgcagccggaatagcacaacaagtgcgttaatcgaagtctctcattaaaaagacactccgcgcaaagtcaaccacgggcgcagccgaatcaacacaggcgtacgaatacggcgaacaggccacattaccatacaaattacagttacatacacacgacgagggcatcacatattacatcagctcaaccttcgggatgatacccatctccctgtaattgaacagcattatcctcaattcctcaccctcaaaaagattccgaagatccccctcgcctttgctcgccccaatcggcgaggacaacaattctcgtttaccaacccggtctactcggagatgaccacgatccatccccatacaacggtgcctaccacttcgcaaaattcacccacactacgttttcccaccacccttcaccgcctatacctagtactcgcactagcaagatccccggcaccctccatactcggcgaagtctccgccgcagccacatccaacacaacaaaataatccaaaccttcatccgaggactcctccgtccaaggaaacgaactcccatattcaccatcagactcaaaacactcagacacagagccaaacaaactatcatcggcaggcactacggttgaggccgccacaaaatcaatattgccagcagcggttgcttgagaaggcccaaacgtcggaacctgcgcagcaaccgaggttcagtatcacagaaacaaaagtttacacttaaatccctaacccctagtccaccacctgcgaaggcccagccgccgctgctagttcacccaccgccttcgaggcgtcctcacccgtcagcacaggggctggcgcggggtcttcatcagctccagtcggcgcggggatcgccgaggggccctcgcccgcatcggatggcgacgctagctccacccccgatgcctcgggcagcgtgctgtccagatcatcaagatcctcaacctcttcgtgatgcgccatctgcagggaatatcacattcattcagcaaaccacacatacccaaacatacccacacatataaccacacaaataagcctttagctgatctatcgcccgatcggacctctcccggaccgtctctcgaccgtgagggccccacatcctatcgaagagcgaccccgccgaccgctttagcaccgggtcctctacttggaagattttgtgctcgaagccttcgtccgactggttgaagacctcgaagtgcccgcacccctcacgggacaaagcattcacggccccctcgcaggtgacgagggaggcaaaggacatgaggcccatcacgattgatgggagtacccccagctcctcctgtagccactcaaggaagcggaggcccacctcttggtcgggcgcttcgaaggcggcggtccgcacacccagctcccgttacgcgtccacgaactacgcatgcgtccgctagacctccacacgcgtcgaggcctcagttttgtccacgcggttgtgcaggccgctgagcctcgcttctagctcctcggcgcgt

SEQ ID NO: 82096 - DNA, 446 bp, Zea Mays
gcattgtgctcactcaaggagatgactctactagattgggatgttattggaccatctagtttacattctcactctagaagatgattggaggcttgggaatattgatgctattgccaaccaggaggatgatgttcctcccaatggtaaccctcaccccttatagaagaagataatgatgaggacttcgttcaagttgagggagatttcatggatcatgcagctaatcacaacttgggtggtgttcagggtcctgctctgggtgatcctgtctgggagaacacggttctgaacatgggaattgctactgactggcagccttggccacagcagccccacattcctccctaggttcatggcaatcatgagcaggttctgatggatcccaatcataggctgaatgacggggctgactctacctcctcctctagcaattcagctgcaagatg

SEQ ID NO: 82097 - DNA, 491 bp, Zea Mays
ataatacagaaagcatctcaactcacctcctcataccagcaagtgttggcaagtcgaaaagtcactagaaatgaaacaactaatgaacagacacaaaaggatgcacaccaacagacaaatgatcttggaacatgttgttgttgtgagtactatggaattccttgtcgccagatcagtacaaacgaaagtgaaactacaaaacagaagaaccggattttattttctggtataaaaagtcaatggtcttcccaaaaacaactaatagcaaatgcactgtcagacgatgaattgccaggttttccaaaaaggaagcatcacaaggatgcccagctccaaaaagaagcacatgagtgttacattgatggatggactatcacctgcacacaattttagccccgtcgtcgcaccaggtgtaagaaacaaaaatggaaacatggaaaaagtcaagaaataacttcaagaaaagcttgttatctatgtggacgtgaaaa

SEQ ID NO: 82098 - DNA, 413 bp, Zea Mays
tcttcttagtttgaccgatagtgcaacttatgtttatttttgtgcctgtgtgccgatagaatattggtgacttgtttgcataaacccaaaatttggccatgtcttcatctaggagccatgacccaaattgatgttaatttcccgaagtttttccccagtttccaaaagtggacgagtttaaatttccatcgttactttaggaccaagtttatctaaattggtgtttaggtaatcttctcgtagaaaataaatgcacctgagcttaagacaaggatctcgagtacgtgttctcgttgtttaaaatgtgactcttttgtagtcatttttttcatccaaaatcatgcctttactcgcttggtgcaagctgatgtttctattccactctgtatcttcttggggaccatgtcgttatt

SEQ ID NO: 82099 - DNA, 431 bp, Zea Mays
gatgaccgagcagtcgcctattgaggagataggcgacagtgggtagccgataaaaacacaggtcgtggaacagggcaccaactgatgagatgtggtggttgtgaggtttgggtagcataagcagccaaacacctatagtaaggggaacattgaaagaggagctcaaatggaacagagttgctgatgattgagcaagggcgcctattgtggagataggcatcggtgaggacaacctcgacctagtatgggggtggtctatgagtgtgtatcaggagtggacgacagactttgttcaggatgcgaatgggcgaatggcacggtctgccttaccgttatgtggtgatgtataagggtagaaaaaatggaggatgcctaaggaatctagaatagagctgagggcattgttaatgaacttgtgctcattatcaact

SEQ ID NO: 82100 - DNA, 584 bp, Zea Mays
gtcccattcgatcaggctgcgcggcctgcgtcctgctgctgcgtgttcagttgctctgatctttcacgtacgtacgtacgcactgctggagacttgtgcttgtgcagagatcgatggtgatgttgatttgctacgggaaggggatatgacagggggagacgaaacgggatggagatcggtcgttcaagggccggagtggcccggccggtcgaacggtcactgtcgtgcgctagctgctcatgcgtggtcgagggagtaaccgcatatgtatggcttgtgaggaacgcgtgctgcttgctgatcatgtacattgctttccccattgatcacctcatcggcgtgttaatcactccaagtaaaaacacggtataattgtcagaataattgtcttgggcgcatgcatgtcaacgtcttcaggaaactagaatggaccagcacggttagcttcttgggcaatcctctcctggcatctggggatccaaggctgctggcttggataagtacttttacagttttacctatggatagatcaacctatggaaaaaactgaaacaactaacattttagaataggaagcagaaatc

SEQ ID NO: 82101 - DNA, 564 bp, Zea Mays
ttgggctactcgggccctgatggcttctccttcgctggtgaaggggaagataaggcttcttaaaatggatcacctacctagataaggtgtaaaattgtcatcacagcttgccatccggagcttggatgatctcgtcgcgggacacgccagtcccctacctggcgtgccaactatcagtgtttcgtgcctcgctccgacaagtaaatttattgtgtgtgttctgagctccgaaggctatgcgtggagggcgtaagatttatactggttcatgcagaacgtacctacatatagtcatcggtggcttgcactaccgacaccattgctgatcaaacttgtagtcggggttacaagcaatcaagagagcgaggagagggtcccagatctcatatcagggtgtaagtggagcttagaagatgtaaggtggagtcctagctaagtcttggcttggcggagctccgaccacctgattctcgccggcgctcctccacctgttcgtccttgtgggttcgtccccatttgaaggcctccagtcattcctcagcacgtccttctgttccttgattc

SEQ ID NO: 82102 - DNA, 450 bp, Zea Mays
tgaacttcaagctcgtgactttcactttgcgattattggttcagcctcgattgcatttatcaatgacccgataagagagcttaaagcactcatgcctaggactttgttttggatccattttgcaatctagggaggcaatataggtgtcgacatatttgtctcccacatttaataatgatcttcgttatttcccaaaacgaaagattcattgttccatattcctagcacaatgatattgcgcgcattgctaggaatttcatcatcaagatgaacctcttcgtgaagcaaatcaccatcaggatgaattaatcggaggagggttatcacagaccacgtgaatctacaaccagaacatatgctttgactaaggttgatggatcatattcgcaggcgtccccgagaatagatcaaataccaataagtcaaatgtggatatgatattaatcccgg

SEQ ID NO: 82103 - DNA, 1784 bp, Zea Mays
ggtcgaggtaggggatggactgggtggccgccagcgacggatctgggcccggtcgccgtgggggaggcgcagagtgcggacgggggtggaggggctaacggctccatcgttaagctatatattccagttctgtaaggaaattgcaggcactaagttacaatctttattaaaatatttctacataatggggtgttatatgtttgactcaaaaaatgaattccaaacttactatggatcaacaagaattaacagtgatgtacatgtcgactgaaagtgtgtggccgacaccagcggtgttctcatctcttactatatacataaattcactaatgactcccattgaacctattattttgtcttggtttagaatttatgtcaaatcacttcagaatcttttaattcactgctaactaaagcagataactatggggaattatcatgaaacgagattgggaataacttgcatgtctctcgtcatttcagaatgaagtatatactaaataatgtcccatctcatttatcccaaaagagcgcaaaaatacaaaagaggaaatgcacatgaaacattgattgcattgtgttatcaaaaatagagcaagcagaaattacaacttgttgtaactatgcattccaatgttggtacccttggtgtatagcagtttaaatagtataagtacagtaaggacttgagaaaaagaaaactacagtttatgctgaccaacccacaaattgcttgtagtgaaacatagttctattcctaaaaaggaaagcaaacaaattaatgcaaaaggatattggtaacaaaagaagttatttcatatcaatagattattctggtaggagcatttacagagacacattttagttcccagcaatgtaaagttatgtgaccagaaaaactacagtaaaatataaattcctgaaatgataccgagagaaatagagcagcataaatggttgatatcattaacaccacagaagcacaataaaagtatcagagattcagaggcataactttttttacttacatgatgaaaaatatagcataagcattctggcattaaccgtaagtttgatgcttctccccatataagaagataaagagctatgtatagaagtttatgctgctgaatttcttgcttcacagagggcaacctgaaggtgcaacataagcagttgcagtgcaagcaagacagtacatccaattatttgaagtcaagtctaagaaattaaaaaatgctttatttttaccatatgttgcttcttctccccaaaaatttgcaccaggtcaaatagttctcaaatgtctttgccaacaattcatctactgctctgtcatcaagctgaaaggagatatgtgaaaatggcattctcattaaattaaagatagataaagaaaactaatcatgtgtgggtaccatttgagcggaggatgacttgggattcaatctagcatgcatatttgcaagcaatagaattagatgctccctttggttggcgacatttcctttctaatcaaagaaatgaaaggcattatctagctgcagtgccaaaaaaacatccgtatcaatctaagcattttgcatgaaacaaaataagtcatttacctggaatccaaaccaactttgcagccaccgaagaatatctgtatgatttttttcatccttcatgttgactgatggaagactgcgaacactaaacacagcagcgactgcaactttgatctgtataggagaatattgtgccatctttatgcaaggcagacttatataatataataaaaa

SEQ ID NO: 82104 - DNA, 528 bp, Zea Mays
gttgagcaccaaatgttagagcagggatatctaatttaggttgagtcatgatgaaaatctgagatctactacttgcaacatagaaatgagctcggacctaagagtctgtttggtttcctgactaagacggcacaacttattaaacttttctgtttaagattagttcttcaatacgagcaactaagcttaaacatattatggcatcttacgtagaaaatcaaatagaccctaaaatcctcactcaggcctatgtaggttcaccatgaccatgtgatcacaataaaatacttttctccctcaccacacactcaccacacactgatcagaagtaacgataacacctacaatcgtcgtgtatccgaagggactatgcatgtgttgctttactttttatcttctattatggtgatctcccaccacacactggttggcactgacggcggtgaccacacatcgatcagaagtaacgataacacctacaattaccaggtatccgaagggaccatgcatatgttgctttactttttt

SEQ ID NO: 82105 - DNA, 507 bp, Zea Mays
caaaatatcagagatgcaacgcatctcaccgccgctgactctccgccgcgatcaacgctgatcatcgcgattcgtgcgctgggactcacggataatcacgggcagagaaagatctcaaatcggggaaaggagagcagcttatcaccggactattcactgtgacacctgccgcgcagtggacggtcgtgtcctcgtcggagttcgccggcaattataaccacgccacgtgcttagaagatgtaccacgtcgccgtatatatcggtaggaggtcagttcctcgccggagtagttaccccaggaagcgccacgacagttcacgccgatgactcttctcggccgccggtctctcctttcaaaattggacgccaccgcttagcaattctataaattcaaggtcgggtcagttgcgccatgttatcacgaagccgaagcacccgttctcaccctcaattagccaccgtagctggagaattcccttcttcccccaattcggtcgactgcgccgc

SEQ ID NO: 82106 - DNA, 1182 bp, Zea Mays
gcaggatgcaaccgaagccgagcaaagtggtcacgcgccaagccaaggggatctccgaaggcacgtttcatacacgcaaaccatgcataagcctcgcgagaagccaactgaacaccaaaagatgcgacacgtctatagcagaagtagttagacgcatatagggttctggtctgtacagggtcactattcagtcgaccatataaggtcgaagaggtacccctacaaaaaccttggactccattagattccactagactggtaggtcactttcatcttctgccttcagcaattgcctgtaatcctcaaactcagagcaatataaccactagaaactcacaggatgtagggtgttacgcatcttggtggcccaaacctatataatccattgtgttccatcgtgctttgcacgaaccatcgagttgcgatcaacgtcatcatcctcccaaaagcattgagtagtatacctcgtagtgtgtcgtcggtaccaaacaccgatagctagtgcgctaggtagggggtgcgacgtctattcacgacagctccatggtcgtcatctttaacaccgtcttcaactttgccgctggtgaggtcttccactttggatccctcttctgcgtcggtgaccaaaggggcgctctacaccgtgtagcgaacgtgcagaaggatgccccgaggtcccacattgccaccttcatggaagggaggccctcgccaagatccaagacagcccggtgatggccacggttaaacctaggttggtcgtggctcagcccgcactggtacatccccggaccctagggcctcaactcaaccgtgcgctctgttaggccgctgaaagttgcctagagggggggggggtgaataggcaagttaaaactttttaacaaaaaactagaaacaaactaggtaaaatcgtccggtgtcaaaaccggtgcaattggtttgaacgagctcaactaaagaatgagatataaaactgaattgatctcgaaattcacctagttaactttggaaatgagatgttctaaatgatccacagggttcaaagtagtagatctgagaagggcacttctcaaaatccacacaccaaaaagatatgaacaaatctttcacggaagggtgagagaacgaagaacatgaacaaacacaatgagcaagaacacaagacacaagatttatccc

SEQ ID NO: 82107 - DNA, 351 bp, Zea Mays
tgtctatgtcccttttcttatccgtggccttgctcttcccatttctcccttcttccgtggtctcctcgacttttaccatctgaacttgactcatctgaatcccaattccattttgcaaatttctatctttgttcatctgtgtgaggcctacctcagaattcttccccactttggtttatggaagtatttgtatcactatcggtctagggtggctgggggcagcaccagcttgtgggtggagcgagtctggagatgcgccgcggaaggaaaatggaataccttgatattccgcttaaggacaacattaaagggtggcgccttgagtggtttattgtggaaaaccacggcaag

SEQ ID NO: 82108 - DNA, 762 bp, Zea Mays
aaatatttcacggctatccctaaaaatttcctttgaatcgctttgccacgggaaacagtccgaattgaattccttgaatcggcagggccacaagtcgtttatgaaggcactttgcattgatgcaagctctccaataacaccacatatcacccaaggtcctctcctagttttttgaggtccaaatccagtaaacttgtcgcttatggtttagaggatcctttgaccacccgatgtacaaccaccttgacttggttcgagcactgtctgacttcggttaaaaccatcttcaccaccatcatcgcatgtacacttgtttgtcaacatgtccaagtgatagtcatccatggtccatcctctaacccttggtcccttgacccaagcctttacatatgtccttcaccacttttaatccatcacgcatagactcgattggccttctccattgttatcgtccacctcaacactcaacacctacacattagaagacaagagacatgttgtacatgcataactgatgtcatgattagtcttaacacactaattctcggatcacctcttgagaatcactcatcatgcatactagaatattgttatgaaggacctatttctattctcatgggacacacttgagaaagagttaaaccttacacatgacaatcaagtgatgttagaacactacatttgttttgatcaacttataatgcacaaggaagcatattttcctaaaatttaattttccacataaatgtggttcaaacatac

SEQ ID NO: 82109 - DNA, 593 bp, Zea Mays
cccttggtaatgacatacaagcatgccagatggccttcaatacaatatgtacttacataggcacaagggacttaatccaggagcatattgcttatagggtgtggccactcacaaatggatgggagatgccaaaggaagctcctcctgagtccagccaaggcgatttagtttaactgaagtacaccttcaggtacaggaaccaattcgatgagccgaatgatgattggtcggatgccattgaagaaactagtgatgaattgcttgaggcatatatgaaggctgaagatgacgccatgacgactgccttcggggctcgtggcaaaaagaggctgaacagggtatttgatgttattggatttgtatatccagattatagttatccttcacggaaacaaggaaagaagaggaagattgctacttcggtgacttccagcacgccaaagttgaaaaagtaaagttttaacacaccgacctaggcgcattgaaacggccgaagtaccgaagctaattgaagggtctgcttctatatctgagactagtcgctctatgcctgacgaagctaagtcaagcccggctgaagagctgaaactgaa

SEQ ID NO: 82110 - DNA, 375 bp, Zea Mays
aagttatgtaggtcctggtttagtttgctaattcgaaacaaataaaactcacttgttttaatttcttaatcatttgaattatacttacaatgtagttatggattggctaagtgtcgattcataaccacactagttatggatttgtgaactattttttgtgtggttgtgaattgtgagaacaaagatgtatatgtggttatcgaggcattgatttatatgtgtagatgtcagccatcgtgctgctacttttatttgtaggttttagaaacctccctgtgcaggggaggtgctgtcgaattatttgttgataggcttgtgttaatttgttttgcagaggtattccttgccgctgcatgagaacctgcaccgcgacat

SEQ ID NO: 82111 - DNA, 581 bp, Zea Mays
gtcctctatatcagatttcgcactgggcccctgaaaagtcacgaacggccctggtaaatagtctcgccccacgaggccaacagttgattagcgtgatgctactgaaaatttcgcaacctcaaaactcaaagcgagaagagaaacggaagagccatcggtgaggaacagacagagacagggagacgaacgagaagtgcgtgagagatcaaagaggaaggaacgggcgagaaatgtgtgagagaagataatgtatgcacggacaacgcaaagagagagagagtctgtgtgcgtgagacgaaagaggataatgtagagtacgtgggagctttgtttgttgtatccattgctctacagtgtttgttctcggcgtaacgaaacagctagctgcaggttgtgtcgtcggtcttaagctacagcaacaacatcacatgattattgcaggctgcatacgggcgacgacaagtttcgtaacctggaatgtgcttcgtcaacatgacactctgtgtacactgtttctttttaaacgttttggagctttcaaaattagggcaccaaactcatagggagactgtcgacactgc

SEQ ID NO: 82112 - DNA, 423 bp, Zea Mays
agttcagatattctgtaagctctcttaaagataggggaggttccaggaagaagctctatggcaaactcaactttccgctctggtggcatgctcggtaagtcctttgggaacacatctggaaactcagacacaatcttgatcctctcaattgggtctgcttcattgctatcgacaaccatctgataacaacttcctttcttcggctcaggcgggactaactcggtcaccacttcctctcctagtggagacaccaacttgattgtcctcttatcacaactgataactgcctgatacttatctagccaattcatccctaggatgacatctattccctgagtacccattactatgaggttggcgggaaacgctatcccccttatttccacacttacattcaaacaaatgctatcggctcgaattcta

SEQ ID NO: 82113 - DNA, 274 bp, Zea Mays
gtacgaatgaggtcaagccaacattctcccctttgatctcatgcttactcgcttatatttaaaacgtagttccttaattgcttaatatcttagcttacaatctctactccttaataggttagcacagtaaaacttaagtgtcatgacaatcaggtatggtcagctgattatttgtaactaagagtttttggttgtactgtttatactcacattgataatggtaaaattgcagcctaaaactatcaagtgcatatttcttggctatcaacctgac

SEQ ID NO: 82114 - DNA, 388 bp, Zea Mays
actcttgagtcttgctgtccaaattgtaagtgtgttggatgtcagtcagccattgaggaataatagcagaaaccacattgatttcagcaggaccatagcgcgagagagcatcagttgcccggttttctgcccctggacgatactgcactctatattgaagccctaataacttggtgaacactttgtgctgctaaggagtatggatacattgctcatttaattgtgacagacttttgtgatcagttagaatcacgaattcctggtgttgaaggtaagcacgccactgttggacagctagaataacagcgagatactctttttcataagtcgaaagaccacgagatttaactccaagggccttgctcaggaatgcaagaggatgaccacg

SEQ ID NO: 82115 - DNA, 634 bp, Zea Mays
gcgggaaatcgctgcctccggcgccattaatcgctcaccaaaatctcctcctccgccgtggaacaccgtctgccgtggccagggggtttcgcgccgtgcctgccggtactaatccctccccttgattcgcctttcacctgacatcatgtagaggggtgttaattgaactttggagggtcggggatgagattttggtgcactccggcgagggcgccaccgtgctcaggtagctgtgccgccgcgggatatctcaggggaagtggatgagcgcctgccgtcgatctaaattgaatggccaggatcatatgcagtgtaccgattcgtgggaattcatcgtggccattgatcggtcgatcgacgatcggcgattgatctggttctcttttaatccagagcgctgatctcagatcgggcggtgctgggcgcgtaacggttcgatgaagtggactttggatctggaccgtagatcgtagattgcgcggctgaaatcgcataccggttcgctgtttaaatctgggccctagatctttaaatggatggcccaggcgcacctgagttcgctcagtcgtggcattttcgtcaagtgccccctaggttttcaccaaaacaacccgccgtccagctgggttgcggc

SEQ ID NO: 82116 - DNA, 579 bp, Zea Mays
gagagagagagccgtgttcggcgccatgtttagcgctacaaggcatgtggtatttagtatgcgcgacagaaacacgccaacgctaactaatcatgtctgatccagacgtccatccgtccgcgcgccgaacgctctatgctgatcgaaaagttgactgaacatggcgatggtgcttgcattgggcgaagcactcacagagatccgatccagcggggacgacaagaacaaacaacactgaaatcagtgaaatgctatttgggctatctcttagttatatacgttacatatatttgtgcacccccgtttttgtataacacaaaaaaatctccaccatcacattgaaccgtcgagatctcttcccccgttatcctttctttcaatcattcacatctaacggctaaggtcccatcaccacgcacgcacgttccaacacgtacgcccacagttggctagcaagcacacacgttcaaatagtccgagaattctggaaggacgtagggcagccgtcacgaaagaagaagaaaaaaagagctagaaattatgaaaggaattagtttcaagcaggagtgatgcaatcct

SEQ ID NO: 82117 - DNA, 502 bp, Zea Mays
ctggcaatgagccagttactgattttactgccagcgggggttctacacttctccaggacatccgctttcagaatcctgcattgcgcattcgtgatgccaggattgttgggaaccggttctggactctccagcatgtggacttttacaactcggtaattcttcccaagaaacatcagcccattctacatcagcggtacatcaactgggaaggctgtgaagctatcggagatccggagatgacacaggcgttgagggcctgtgagagaaagaagatgaagaatataatgacattccaatatgattggaatgatgaggtcattgctcagttttattctactctttggatcaagctggccgatgaggaaagtccctacaactttccttatcttaatttctacatcgaaggcagctggtacaaggtgagctaccgtcagttcgctcacattcttggattcactgataatgacatttctggtgataagatcaaaattcataattttcg

SEQ ID NO: 82118 - DNA, 430 bp, Zea Mays
actcccttttattttgttaaccagagtgatcagaatcttatctttctctttggcttgatgccgaagatcgataacctccgaccataaatttttgaaggctatctgagtaatttcgtcttcggtgtccttttgggcctataaagctttacttagaatcagtccttgatgaagtcaaaccaagagaaaaaaataaataacatatgagccatctgaatcatcatgaaaaacacggaagagagatgtaagctaaccttcagattgttgtatgttatgcagtccgcaagttggtccttcggcatagcagataacccgatttttagcttcgggtaacccattttatccatcatttcacggcatacttcaatttccctgctatctaaaaggcactagagataatcgtcttcatcattgccaccacatacaagtgagc

SEQ ID NO: 82119 - DNA, 433 bp, Zea Mays
taatttaacgaacgcataatacgcatcgtcatgacttgacctataaatatagagaaagcgatgactactctggcatgtcaccacctctctatttaagccaagacaatttctaccatcgactaagagtcgtaagcattaaataccttactactttatatgcacaaataaacctcaacttaacccaagtgacaccgatggaatttttactaaactcatcatgcgcataacctcgtctcgcatacaaccatatggtggcgtgcactcgagacacttcgatcaatgtgacgcgactactaatatatgaactccgacactcatgtcttaataatacatcctccacgcaaactagcatcttctaaactactcgtcacatcaataaatatacccctatataatcacgaaccccatcacattgcataaaacaaatacactt

SEQ ID NO: 82120 - DNA, 585 bp, Zea Mays
atactttgtacctagtggcgacgactgatgtacagactgcaatagcggtggtggggacgagaactagtggcgactgatactatggggggaacacagaagtagaagatgtgggtggcgaatgtcctcacgatgactgatactatggggagaaccgacgtcggtgagggagaactagtggcgtcggggaggcggggcctagtagcacggggaggggaggacgtcacgatggccatggcggcagggggaatgagagccctagtgacagaggaggggaagatggccttgctggcatcgaggagggagagccctagcagctaggggagcagtgtccttggcgacgtctaggactactctagcggcgacatgagcgagaaaaccaattcacgcgtatttttatgtgtctagaatacgtggcgaaggcaaaatttggtgccagattgatgttcgggagctatgtggatttggaataatctagctaaatgtattgataaaatgaggtaggatagaaacttgataaatttattaagttcatttcaggagctgttggagagacgttttactactattcatctaaatcatcaattt

SEQ ID NO: 82121 - DNA, 369 bp, Zea Mays
aaatgtgaataaatacatacacagagaattatgacacagaaaacgagtgatttggcgatatagaggtcaaacgacgcgaaaacggcgtttgaacgatgaatagtgccacaggaggtttgaaattagaattcaggcatgaaatgacatggaattgagtcgatacttcacaaatgggtttatatgagtaaatatgagtgaagtgtgcgcttggtttgattttaggcgaagaaagtggaatttgggcacccggctcggaatcgatcgctagatatggggatttgtggaaatttggagcctgggatatcagattggcgtgaaatttggcgaatatgttactggaggtatcatgaaggtgcctgaaaaatttag

SEQ ID NO: 82122 - DNA, 540 bp, Zea Mays
tgaataagtatcggcgcccgcgaccgtagggatttttggagcgaaaaataaggggaggtctagccgccggttagtgagcgacacctcggtgggcgaaagagggtgtgccaccgccacaccattgcgcctctcgacatcgctctgcccccgatattgcgtctaggagtgcggcagggatcctgattgcgtgtgcgtcgagaatcaggatggttgggcgctccgggacttggcgattgctcgtcggaattcgtctccccttgtcaaactgtggcaaccgtggatgcctcaggccaacaccctaattcatggtaatgatagcctctttggatttcccatacttccctcactgtttttcattccgccacatccgcgtaagagctccgaaacgggcaaattgcatgcgcgggggtcacacctgccgctgaccacaatgggcgccgccgtggtgtgctcgattggggaaggggatgttagggtcgggtcatgcactgtcggatcgggcatcgatggctcggattagaaaggtgttaccgattcagt

SEQ ID NO: 82123 - DNA, 1118 bp, Zea Mays
gttcgacgcttgagcccctagtgatggggagcacaagcttcttcaatgttgataccgaagcttgatgccttgccatcctcagtcgcggttgggttgtggttgttgtggaatcaccggaggtgggcaccaatgttgagtacttgatttcaatccctcgaaggcattgaaaaccatggcaacacaagttaagtgtgtgggccttcatccttgacttaacactttcaaagtgttagtgtaaagggtgaaggtcttcaaagggacatgtaagtgaaacaatatagaatggaataacaatgtgcaatggaatatgaaactcatcttgcatgacttagtatttttattcaatcttcctttgtgtcaaataaatttacaaacatgcattcgactccataacacaaggtgacatgaaggttcttcgaagtcttagcaacacgaagctatggcccttgaaaggtgaatctatgcagggtactatacatatatttacagggaacatgaacaacttcgtggaaaattacaatcatgcccataaagtttacacacatgttttacaaatgacatagggacattaatgacttttctctttctttcatgctgcacaagtcttgaacttggcaacttcgtgtccgaagtctcactcgtgccaaagttagcggcttcggctcacaccttcgccattcacacacttggtcgaagctcttttttacgctactttggattttcttggagttgttctggtcggaggccaacttcgtccactattggctatgtacctgaagcacatttgtttatgctgaagtgaaggttttgtgaggatcttcggtagagtaggcccccaacgcactagtaggtgaatttttacatgccttgcaaacttatattttcatttaatggtagttttttaggtcttgccagctaatgctcatatgcattcttgttgatattttttacatgcatttccaactcatgttataatgggaattagctagtggttgttgatgtgacatcaatttagtttttagtggatactagttggtcaattctcgcacacaatttagaatcatgttttagttgatgccagttaatgtattattgtataccttgccaactcatggtat

SEQ ID NO: 82124 - DNA, 475 bp, Zea Mays
ggcgacaccgtcagtgcggcggccgtgatcgcgtccgacccgaacttccccgcggtgctcgctgcggctatcaagtcgtacataggcggcagcggcggtgccggcgtgatcagcgggacgatcgtgctgccgcctgcgccgtcgagcagcgccggcgatagcaccagagaggacagggtgggcgagcaggggagatgacgtgatcgcctttcacctagcgatacgatcgtttgtttgcttgcttgcttttcctcgattccaattttgatagttaatttgcttctgttgggtttttgtctcttgcgtaggatacgaaaattttgcctacttttccctccagaatccaatctcctcagctcgaggtaggatacgaaaactttgctgtaaattttgttttcctagaatttttatttacagttttccatagaagaaaaagtaggtgctgccaggcagtaacaattttgttctttcggtg

SEQ ID NO: 82125 - DNA, 1020 bp, Zea Mays
acaggatgcagagggattgaagggaccttaccagtgtcgattccatcttgagttccttccgcggagggtgcaatcaagcggcaccaacttcatcaattacagcttagattcaagcaccggctgcaccatggccaccactacttcatccaccccgccgtcacgtatgagcccagctgttcacggtgaaaacgcgaccacaacgaccccgcggcatccgcggccgccgcgcggatcttggtgctctgttgggcagagtcggctaccgcggaagcaggagatgaagaggggaggtcacggctagattatataggcagaggcgggcggagacaggcttgaccgcataacgaatcgctacaaatttgcacaaatcgtaacaacccaggcggcccagtggatacggtggttgcagaagtgtccgtgcgattcgagcaccaggatcagattcacccgatgcaggaccatgagttgtaacgcagggttgagatgcacttgagtttaggcggtagtgcaagatcccattgatttcatgctcaagcccccgacagcctagaggtagaagaggtacctgacaacggtgtcccacccatagtgaaacatctcaagccagtacgtgtaccagggcgtcggtgaccatctgagtggctgctcacgatggatctaatctcaactccggctccgtttgttacgcaggtgctgctggaagttagcttgcttatgtcacccatgatgatacgatgatgtcattttcggcaagggaataaagaaaggggaaaaataatgcatggcaaggacgtgtgggctggtttgccaaagagatggcccaacggatggagatttttttctttttctcatttctattatagttgctaattctattttcagatttgaactcaaaagttaaatcacttttaatctaagttggagttttaacttcaatccatatgcacaaacaaaaaccctagcatgatataaaaggtctaactttattatttatcattttattcatgtatataaatgctt

SEQ ID NO: 82126 - DNA, 543 bp, Zea Mays
cggggatttacattgtacataacccgccatgcagacatttgttttgcatggatatgtcgagaaataaacctggttggcttgatgggtaaggatgtatgtgtcgtgcccatgaaccaattttttaggttggacctgtgttatcctaaattcggtcttataatagttcgggtcataccatttacactaaaaaactagcgctaaaggcttatttccagcaaatgtaatctcgattatatttttttatcatcccataatagcaggctttgtgtctttccatgccggatgccatagtaatgactccgctattttgagtggtatccattagatgactttattcaaataggcttgaacgaaagcggtgtccattgacgtcataacgttcaaagcttttgacagattcacttccaatagatagctaacgtaagtcatcattcatattcatttcctccccaaactgtcaattattccacaaagcattagcaaattgtgtaatgcagttagctaaaataatgaaattaggtctccgagccacataaataagac

SEQ ID NO: 82127 - DNA, 897 bp, Zea Mays
gattaagcaagtattgtgttgttgttgtgctgtcaatgctctttgtggagttttggcatttcttcgatgaactgtgccttgtagaatgttattggctacttgtcggctttattgctccattagttctgtagactttctcccttttgtggggtgcaaagaatgtgaggttacatgattatcttttcatgatggcaagaacaaggtttaggaagattaggagttttgtttcaatagaaccacttgttttgtggtgctttgaggtgaggtgtttgatcttcttatacattcatctggtgtggatgtttcaccattgaattaaaatgaattgttgaagctgttaagcgttgtgcttagtgcatattaccccttcataaaagagtgttgtttgaagaaattgatgttgatgtatagctgcatccaaattcgatggtgtgaaatcgtagtgttgattgcatctatgacttgctttgagcttcattgcatgttgattcatgctggatatcaggttgtgtagtttcgttagacaattagtccgaggtagaagttattgtgttaattaagaccaataatagactcatgttttaaatggtggtgctatatggggtaccttggatgctttgcttggagtggtcaaattttaggacgaattctttttaaggtgggtagagtgtgacatcccaattttctgaaaagaagttaaatttctttttctccttttttcatgttctgtggcattagggcttggagtttcgggaggcattcctcagagaaacagtagatcttttggcatttttttcgctagggtcgggagctcagatgggagagcgtgttcgggcctttgatctcgatccgatagataggagtcccccttccttcccaaccctagccgaccccctc

SEQ ID NO: 82128 - DNA, 418 bp, Zea Mays
ggagaggtagcgcccgaagactcgtccgctcggcttgtcgtattaggtgtcccatcggagggcgtcaggcggcgtgcgcgcactgtttggcacaggcataatcataccgctgtgttagatgtgatcgctgtcttgtccaccactgtgcttcactaccacgacgcgggttggcacacgcattaaatgcgcatgtccccttcctgttttcgagtgcccttgtcctatctacttgaggtcggctcgggcgagacggactgggctgaggtggcctcgggcgaggcggagtgagtggtgtcgacctcgggtgaggtggagccctgctcgaggtgggagaccctcgggggacgtctcagttttttataggtggctcagctgtcacccttcaggagtttagtccttatttctctgagtgcatttg

SEQ ID NO: 82129 - DNA, 362 bp, Zea Mays
gctggtcctccttcttcgtataattgccaagaatctcattgcacatggtctcgatcatttctagccattcattgcaaggcttcttgaactgtttctcaaatttgaagcgataggggagccgaacaagttcatacttttttccaccttcctttttcttcggcatcccccagccgctagaagttggaaatgttctatttgccaaatattcctgcactaggtccctagtgctaatctcggtagctaccactctaaattcaacttcggccagctagcacggggagccaagttgcatgtggcacaagggccttgtcattccgaagcttaatctcatcagactcatgaccatagtcatcaatttttcc

SEQ ID NO: 82130 - DNA, 638 bp, Zea Mays
ctcatgaggagttaatggatgatgtataatagattggaatgttgttttaaaatccttatcagcaaaccttgcatatatctcatttaataatggcataaatctgttctggacatgccataaacacagtctgtgaactgtttttggaaatacagttcttagagcaattgacattgcaggatcttgatctgcaattgctcacaaactattaatttactttcacaataaattaattcaattttttgcataacaaattgacatacatcatacctgttagcataactctcggaccctcgcatcccatacatgttttgaatgaattgaaagcccattcaaaagtctgcactgtttcatctcccaacaaaacaaatccaaacactgtacactgcagatggctgttagctccaacaaacatgcccagtggtttatcatatatatttgtcttgtgtgttgtatcaaatgtcacagcatcaccataatctgcatatccccctgcatacttgcgtgtgaccaaaaaatactcactatttttccatcattgtctagctgaaaatcacaaaaaaattgtggattctatttcttgcattctgtaaagaaagctaaaagtttggctacatcatttacgcagttttctcgtctcc

SEQ ID NO: 82131 - DNA, 709 bp, Zea Mays
aattgttgcccaaagtgcctcaacaacattcttttcagtgtgcatcacgtcaatgttgtgtggaaggaacaggtcatcataataggggagccgagtcaagcccgacttatgtgtccacatatgctactcaccatatcccacaaaaccatcttctgtattggccacgagcccatctatctgttgacgaatttcggcaccagtcatcgttgtaggtaggcggtctgtcactacgacacctttcgtaaagttcttgatgtctaggcggaatggatggtcaggagggagaaattgtcgatgtttatcgaaggacgaatatttgccaccctttttcaaccaaatgaacctaagagcttccttgcaaactgggcatgggaacttaccgtgaacacatcaggcgtagaatagcccatacactggtaagtcatgcatagagtactgctaccaaacatgcattttgaagtttgtctttgtagctcggtcatacgtccataccctttcttcccaagcacgtaccaattcatatatgaaaggctccatgtacacacccatttttattccctggggtgtccgggaattatcaacgacacgaatatattctgcctttgaaagcacacacgggggggagattgattgggataacaaacacaggctaacatgtgtacgtggcagcgctcattccatagggattttacccatctgtggccagcgc

SEQ ID NO: 82132 - DNA, 663 bp, Zea Mays
aacaacacttagtcaaagctatagttacacataagatagcttctaagatgataagttttgacaaattaagagaaatatagaggccacaaattagaaaaaaaattggattgcgtaattcacccctcaccctcttaggtatcacctttccctacaaacatagaagtgacagaaatgtgatttattaaggttcaaagacaagaaactaatccaagcagatttaaacccgatcatttttatttctacaagtgtttacacaataaaaggacaaatgaattgaactattgaagtaaaaagttatacacacatgcatggaggaaaacaaccagattaaattaaaaggcaacaaagaaattgaataacttgtatgaaatgaagttatatggagtatatagctaggtttctgctcatgccaaccggtactcgacagggtccagagtggttggtgcgagcccagggtctgtgagtatggccttgagatcaccatcctcctcgcccatgacggccttcaagaaggccaccatgataccggcgacggtcctcctcatcacgtccttgcagctgttcccttccttgcagaggcaggtgacaagcttgggagcgtcgtcgtccaacatgtcgaggtggccatagtttttggtcaccaggtggtagcacggagccctg

SEQ ID NO: 82133 - DNA, 304 bp, Zea Mays
gttcaaccgttcttcctcgagtacatcaatgtcctccagcctggtggcttcgacttctgctatgctttcgaagatcaaccttggcgctccgaacttgaggtcggctggtaatactgcctctaacccatagaccatgaagaaaggagtgtttccatgcagagctcggctaggctgggttcttaggctccagacgacatagggcaattctcttatccattttcctgcgaacttttcattcttatcgaagacctttttcctgagtgcttccagtatcatcccgttggctcactcaacctgcccgttg

SEQ ID NO: 82134 - DNA, 705 bp, Zea Mays
gaaatgtgaataaatacatacacagagagatatggcacgggacgggacgatcaagaagtcaaacgacgtgaaaacgacgtttgacagacaaatagtgacataggaggtttggaatttgaaatgaggcacggaatgatatggaattgagccgatacttcacgaataggtttatataggtgaatatgagtgaagtgtgtgcttggtttgaatttaggcgaagaaaaaggaattagggcactcggctcggaaacgatcgctcaaaacggaattttggtgaaatttaagcctgggatctcggattggcgtgaaatttggcaagtaggttactggaagtgtggtgaaggtgcctgaaaaatttgggttcaatttgagcaagtttgggtggtttgggcatttcaccgaacacgtgaagggcgagggattagggttttagggaaatggccatttgaggtgggaatgccctcccgaaggagctaaaagtttgcagggatacataatagggataatgaaatgcattccaccaactggattcatgggatttcacagaattttgaaagatttgcaaaagggagagaaaggggggagctctactgtctgacaggcagagaacaggagagaaggggagaggagaagagcagctcaccgagggggaagaggaggggagcccaaggtcaccggagcacggccggagaagatggccgccgg

SEQ ID NO: 82135 - DNA, 306 bp, Zea Mays
gatgaaggtaaatttcaaaagtcttcagaacttcaactaagaatttaatcaagggaaactgaagccctgccttcatgaaactcctgtatacaaccacttcgtcatcttcgggcacaggggcattgctatctgctccagccctcacgatagaaatattgcggaagtatcttcctttcattgcatcaatttgactctgcttgatggttgattttctgaagatggtatgacttggccgctagggccgaccttcggcacctttgtttccacttttcaagtcaaaactttcactatcgccagaatcctcag

SEQ ID NO: 82136 - DNA, 555 bp, Zea Mays
attttgggctccgtttgctgttacaaaacagatataggatttacgataaatttcgtactcatttacgttattttatatcacgttttacgctggaatccgcccgagccagaacacgcgtacagtcggttgcacgcgattttcacgccgtaattttgggccccgtttgctgttacaaaacagatataggatttacgataaatttcgtactcatttacgctattttatatcacgttttacgctggaatccgcccgagccagaacacgcgtacggtcggttgcacgcgattttcgcgccgtaattttgggcctcgtttgctattacaaatcagatataggatttacgctaaatttcatactcatttacgttgttttagctcacgttttacgctagaatctgcccgagccagaacccgcgcacgatcggctgcacgcgattttcacgccgtaattttgggctccgtttgctgttacaaacagatataggatttacgctaaattccgtactcatttacgctgtttttggtcatgttttacgctggaatctgcccaagccag

SEQ ID NO: 82137 - DNA, 744 bp, Zea Mays
ccccttacaaagaatctcatcctcgagattaggaaggactaggaaagaggtggggaaaaatctactcgcagctcttcttctctttcccaagtagcctcatcttcaccatggtaactccattgcacttgacacattttaatcactttactccttgtgacacgagtcaaagtatcaagaatcttgataggatagtcagtataagtctggtcgtcttgaacactaagattctccataggtagctgctcctcgggtatcctaaggcacttcttcagttgagacacgtggaagacatcatgtacatccgcaagatggtcgggtaattctagttgataggcaacttctcccactcgctttaggatcaagaagggtccaataaagcgagtggacaaattccctttaaccttaaatcttcgcataccccggattggtgacaccttaaaatacacgtgatcaccctccttaaactctagcagccttctccgggtatcctcataacttttctgccttgactgggcagttctcaagttctcccttatcaatcgtacttgttcttctgcctcgtgtataatttctggcccaaagaactgcctttcaccagtttgatcccaatacagtggagacctgcactttctgccatatagagcctcaaacggggacattttcaaactggcctggtagctattattgtaagacaactttgcatagggcaaactcttatcccaactgccacaatgtttaagagca

SEQ ID NO: 82138 - DNA, 573 bp, Zea Mays
cgcttgagcagcctgcgccacccggaatcggcggacctactcctccagttcccgctccttcccctccaatcgcttctctttctcctccgcctcgagctcaaactcgaccagcaacttgttccgcctttcccacatctcctccctgaaggcgaggtccttctcctgccaggcgagatcagtcgcttgtttctctagggaggcatccttcgccatgtggctttcctcaatgcgagcaatgttgctagccttgtcgtcaagttcctgctgcagcttcgcctcaaccgcagcctgctcgtgccgctgtttctccagcatcatattataggcttttagcttattatggaacgccgagatgacctcctccctttggtccaagtgctccttcttcttgaccagccctttctccttccgggtcatctcctgctctctatcagacacctttcggaggtcctccttgaaggcctcttgctcctactcaagctcgatccgctctgaggaattagcaggacgccgccttagtgcgctcctccagttgggtgcaccagtcgccaaggcgctagtgctcggtctcga

SEQ ID NO: 82139 - DNA, 650 bp, Zea Mays
catttgcgtgttggggactggacatgattggacccttcaagaaagctcagggaggctacactcacgtgttgatcgccattgataaattcaccaaatggatagaatacaaactctatgcttctctaactttagccaaggcagtggaattcatacaagatataatattcaggtttgggataccgaatagcatcataaccgacctggggtccaattttactagctctgaattctttgatttctgcgaacaacggagcatccagatcaaatatgcatcggtagcacatccaagagcctggttaggtggaaagggctaatgaaatgatactggaagcactcaggaagaaagtgttcgacaagaatgaaaagttcgcaggaaagtggatcagagaattaccttatgtggtttggagcctaagaactcaacccagtcgagctctgcatggaaacacccccttcttcatggtctatggttcggaggcagtgctacctgccaacctcaggtttggggcaccaagactggtcttcgaaagtatagctgaagcagaagctaccaggctagaagatattgacgtactggaagaagagcgattgaatacaataattcagacagctagataccagcagaccctgaggcgctatcatgataagac

SEQ ID NO: 82140 - DNA, 384 bp, Zea Mays
tttggttaagctcgtaattacgataaaatgcttgttgtagtctagatgcgcatggttatggtcgtgagtaaaaattagtagtgctcatgtggtgtctaagctaaaatgcgaactagtgggtgaaaagcgtttcgatatacatatatgccggatttgatgattgtggtgaatgcgttgattaattgtgtatggtagttctagcgcacgaaataacttgtataaaaatttgtaagtctacttgttagtcctcattttattaatttaactctaacgaatggtaaagtgttaaaataattcaagtctctaaagcgcggcaattcttgaattatatagaagctgaaaatttattaattgcagttttgggctgcacgcgctgtttttgtc

SEQ ID NO: 82141 - DNA, 371 bp, Zea Mays
tccacgaagtggtgacatcttgaggtacacatgatcaccttcctcaaactccagtggtcttattctattatcagcgtagctcttttgcctggtctgagctaccctcaagttctccgtgattacacagacttgttcttctgcctcttgaataagttcaggttcaaagaactgacttcctccagtctggtcctaatatagaggagtcctacacttcttgccatatagagcctcgaatggtgacattttcagcctggcctggtaactattattatatgagaactcagcataaggtagactcttgtcccaactactaccatgctgaaggtcacaagctctcaacatgtcctccaatacttgattagtcctttcag

SEQ ID NO: 82142 - DNA, 387 bp, Zea Mays
cctaattaccaaacctatcttcctctctctctctccatacaaacacatgtgccattcattaaacaactaaatatatcatggataaactgatttgagaactaaacatgaaaaggagagaggggagagacaatatctaaccattttaagcaacctcatttgaggaaatagagacaaaaaacctagctactcttctctctaacacatggtgaaagactagttccaaaatatggctaaaattgaacaagaatgaataaaaattggcaagagaaacataaccaacctttcctagcaactaataaaaatcctaattaccaaacctatcttcctctctctctctctccatacaaacacatgtgccattcattaaacaactaaatatatcacaga

SEQ ID NO: 82143 - DNA, 685 bp, Zea Mays
tataataagagttaccaggccagtctgaagatgtcactgttcgaggctctatatggcaggaagtgcaggaatcctctataggaccagactggagaaagacagttctttggatctgaacttattcaagaggcagaagaacaagtctgtataatcatggagaacttgagggtagctcaaaccaggcaaaagagctacgctgataatagaagaagaccactggagtttgaggaaggtgatcatgtgtacctcaaggtgtcaccactttgtggaatgaggagatttaaagtcaagggcaaattgtcccctcacttcattggaccatttagagtttttaggcgagttggagagatggcctatcaactcgagctacctgataatctatctgatgtgcataatgtattccacgtgtcataactgaagaagtgtctcaggatacctgaagagcagctaccactggaggatcttagtgttcaagatgatctgacttatacagaatatcctatcaagcttctcgatacattgactcgagttacaagaaataaggtcataaagatgtgcaaagtacaatggagtcaccatggagaagatgaagcaacttgggagagagaagaagaactacgcatagactttccccacctctttcctagtccttcctaaatctcgaggacaagattctttgtaaggg

SEQ ID NO: 82144 - DNA, 411 bp, Zea Mays
aacactttctcccctcttgaaaggaaaagggtgccataggaaaaagaaaattacatgaccgttacacatagtatctctgaagatcgtctgcattccaagatcttggaatatcattcccatccatgtctcttaacctgtatgatccttatcttgacgaagataccaccaagaaggggccctcccacttgagttgtagcttctcctctgtttctgggttggctattcttagaagcaccaaatgccctgtcttaatattctttaatctcactttactgtcccgccactttgttgttttggcttgttatttattgatatgatctattgcttgaagtatgatcccttctatggagtcttttgatactctgcaagtgtcttcatcctcagccgaagctagagttcttatcgatcctg

SEQ ID NO: 82145 - DNA, 653 bp, Zea Mays
ggaatctttaggactaagttacaatttcacagattaaatacaatagactggtgggacattcaattttcaaaattttaagtagatcagacttaggaataagtacatgagtatcattagactagtaactggctcgtgtcctgcgtgaatgtttagccgatgtgtttatacaattaaatgagtgttgctttagacatatagaagcggcaatatatggatacatacacataaaagtgacatggttatctttgtacatacaattatatgtggtagtaatggtagtaaaatagttcagcataatgagtccttttttcaccccattctcgggtttcgtctggaagcattttaggttttgtctgcaagtgttgtggtgtttagagtcatcgaaaggttaacccggctcatgtccattcaatctggatcagatggctgaaaataaaccggcagtcaagtaccagaaggaaatagtaatattgaaacaacatcagttatcaatatgacatccataaatagaaaatgtcttgattaagtacttgtttgaagttatgctcagtaaaactgggacaaataaggctagcttacaaatgatagtttagaaataagtttggaattgatatgtttaattaggaggggtcatctcccttcctgaaagattc

SEQ ID NO: 82146 - DNA, 1394 bp, Zea Mays
gcaatcatcacatcacccgctggactcaaatacagatacgccgtgcatctcagctttgcactcgagtcagacaaatgcacaaacaacatcgctgagtatgaagcggttgtcttaggactttgcaagctgtgagctcttggagtgaccacctgcattatcaaaactgattccaaggtcgtcgccgaccagaatgaaaaaagattactccaccaaagagcctatattaatgcaatatatggccgctattcgaagcctagaaaaacaattcaaaggcttcacattacaacatattgagcggaacaagaatgaagaggctgacatactagctaaagcagcagcgaagggtgaacccttgtcatcctatgtattttatcacatagtcggcacaccagccataagaaacctaagggtctgcaaataacacaagacgaagacgggcatcagatagtcaacctgataatggccgaagactggcgggcaccaatcaccctatatcttcagggccactaccacccctctgaccatatcgaagctaaaagattaaaacacagaagcatagactttgctatagtcaacggacatctctacaaattggggataagtcaacccatgttgaaatgcataactgaagccaaaggaaaagaacttctccgtgaagtccacaggggtatacgtggatcacattcgggaccaagggcccttgctgctaaagtcatacgtcaaggcttctattggtcagcaattgtgtgcacgaccaaccgggtaacccattcgtgcgaagcatgccggaaattatcacctcgaacaagcgccccttcgcaactcacaaagcttattgcacgtacctgtccactacaacgttggggactagacatcgtcggaccactgcccacagtacaaggcaacctaaaaatcaccttcgttgtcgttgaatacttcaccaactggatcgaggacagagctatatcaataataacctccaaaactacgcaaaaattattctggcagaatattgtgtgtcggttcagagtcccatcagagctaattgtccacaacgaaaacagttcaacaaccaagactttcgggaattctgcaactctatcggcacgaaggccgtgttcgcttgtctaccatctgcaatccaacagagtagttgaacgtgccaacgacaagattttcagtgccatcaagaaaaggctactcgacgtcaagaaaggcaaatgggcagtccagctccccaaagtcatatgggcactaaacacaacaaaatctagagtgaccaaatttacacctttttgtttgatgtatggatctgaagcaatgatgtcgcaagagctgaagcacgaatctccacgagcgagctccactcctgatgtcgatgagtcaacctccaa

SEQ ID NO: 82147 - DNA, 387 bp, Zea Mays
gaagctccctagggaaaatctgaatttcagccttcacctagaacttgagcacgttcaccttgatcctagctcaaatccttaagtccccattgacaaaattgttctaaactaacccctctacaacgtgtgtgaagatggcattgagattcatgccttagacacgtcaaacccaggatttcctctcggagttcagcagtgagacaaacccaacttcatccctccatatcttttgatccagtcagcaaaacccataagcctccacacacaaatgacaaaggaatgttaggggaagagatctctcaacgggatcatggccataatcgcaaagatttggagccaatccacgcttgaacttgacctctctctgcgctgcctcgtgctcgacgc

SEQ ID NO: 82148 - DNA, 807 bp, Zea Mays
gctaggccagctacgtcgctaggtgagtagggagtttggtgcgagctccttggccaccatgatgtttgcgtagtgacgaggaagaaggaggcaaagaagagggagaaggagaggatttgtcacctacacatgaagaacagccgagcaggcacgcaatgaagaggaagacgacgcgaggaagacgatggggctgctcctctgacgacgcgaggaagacgacgaggcggccccttagaccacgaaggcacaatgcatagagaggaaaatgcgtgggctgctcatgtgtgagaaggaagagggaaggggttcatggcaggcgtgtacgattgtatagaaaggagagggcgtgagaggtggttgtcaatttcacggcggctcttgtcctggccgagcgagagagacagctgcgcggcgagttgcacgagacagggttagacagagttagatgggtggtagacatggttagaaaaaattagacgaagacggtcagatccggcccgtgggcccaagatgacgaggtggacgccgaagggaaagacgaggatataggaggatcgccgacacaagcagcatgtcgttcgcgagaagacgcggttcagtaatctcgcgaaaaggggcacgagatctggtataggttcgacgtgaggaagaaatatatatatttatattatcgagttccaaaaattttatagttttcacaactaccacattttaggtatttaattaatattggaaaaccgaaattcatatttcatacccgaagaaaccttccgaagattccaaaaactcttgggaacatcctcgata

SEQ ID NO: 82149 - DNA, 544 bp, Zea Mays
gcaaaatttagggcccatgtgtaattacttttaccctattgtggaccgcgggtcaattgagtagaagttcggggtctcttaagtaaaattccctggctgaaagggtatcagcagatcctattcatcatatcctctacggacgatccagattaaaacccatccatgctgaaccggtatggagcctcaaccgttggatcccatctggatgacctagatcaaatcataccgcttaatgtattggcaagcactcgaggccctcggatacgagatcaatggtcatgggagttccacgccttcgactagacctagcccttagatcaacaatctatggcacagattttatttcgcgaagcggtatgcggccctctaatctcagccacacatccacctcccaatggcaccagactcatctacctttttcctcccttttcctcacttcatccccagccagcaacgcgtcgacgccagcatccatcctcgacggatcctcatcagcgcacagccagccaccataccagtgctctaaccatatcgttaaatagtc

SEQ ID NO: 82150 - DNA, 376 bp, Zea Mays
ataccaatctaatctagatcccatctaatctattatgatctaatctaaagtaagttacttaatgctggtacaaaagataaggccatacccctcatgcacttaaaactaaactagtgccttaaaccaactcagtcacatgcatgaggtctaacccaaccaatagagtcatgatggattgcataatctatcaacccccacctaaaacaaacttttgacctacatcatgtagtttatctcacccatatctatcttaaccatatcacccaatcccgatgatataccctaacctcgactcaatgagaccaagaccagaaaaggaaaatatcaaccttgtcaaggaaggagagaagttaaactggatcttcagatgctttac

SEQ ID NO: 82151 - DNA, 1027 bp, Zea Mays
tctcgttcttgagcctgtcgacgatcgcggcggcgggagttgcgtctttcttggtgtactcgttcaccaggagtctctcccacttccgaggcttcgtctcgagatacgggttgcgctgggtcccgttctccggcttcgtgatgtcgccgcacattccggcatctgtttctccgtcgccgggcatcatgctgggaggttcctccccctgcatggtaggttcatcgtcggagatgggcaatgactcaaatgtcccctgaatgaagaggacgtcggggtagaaaggagcaggtatggtggtgtgtttcttcccatcctcctttgagggtggaggtaccgggaggatggctcgctgtgttttcattccccggtatgggatatttgcttccttcctccgagtgatccgtgtccacaccttagtgggcgaggtggacaatggagttgttcgggtcggagaggccccgactgactagccctccatcttccgagggcttttgagccctggcttgtgagggaccatcctcccccgagctgtgagcaggggcgtggcttgcagactcgcttcagcttctctctggattcccgagaagggtctcttctcgggtggatttgctatgcggtgcagatttccctctatgtccgctatgcacgagatggttccgaagcagaacatggctcctaggctgagagtgatcttgttcttgaagatgatggccatggtgttagctttgatcaacgacacacccccacctggcgcaccagctattggtgtttagtgtctgaccgcacacccggggtaccctcgtggtgcttttgggtaggacgatgtcgtagattgtaactcgatggttcgtgccaggggcacgaggaagagagagtcatgccattttctgtaggtttgagccgcttgaggagcgtaataccctacttcctagggtggttttgtatgtgtggggtgtttacaagtggtgtctcccgagtggagaggtgctaatgagatgaaattgatggggatccccctaggcatttt

SEQ ID NO: 82152 - DNA, 919 bp, Zea Mays
cggtacgcagccagtcttcggcatccatggggttagcagaatgggcaaagacaggggaatgacccctcatgaattctgcctgcttgtccctgggcatctgtggcatctaaacttgcatctgaggttgaggtgggggttgctgctgctgcacttgctgcattgctgctaaagtctagccaatcgcttgtactgcttgggtttgcatcaggaacatctgcttcgggggtggctagacatctgtaaaagtcttcagacaacacatcagatctattttcagacatctgtagaaagcacacacacattagatctaactctgcagtatttcagcataagaaaagatatataaaagtcttcatagcactgaacaattgatcatcttcactgactctcaacacagccaacacagcttctcagataaagagaaaagtggaaataaatgggttgcccaactaaataactgactttattaataactacaccaagttgtaggggatgcccacaccttggtgacaatcattacaaagatccaacttcatcacgagttcatcacgacagacatagaaaaacatgataaacaaactaacactaaccaagattgactaagacaaagacactgaattaagcattattacagactccgactctatcaatctatgactccaaatctatctgggtcctacagtcacgggtgccataagaaaagagaccatggggcggtgagcgataagggtgctgaatcccgatgggagcgggggaaccaccatcctgatagtggcgcgctgcgcgctcagcatgcagttccgcaatctccgcccgagccttgcccaactcgtcaagggagtggtccagtttagtgttaagcacgacgaccaggttgaccatgctgttcagcctgggattgccctcactgacgggcgag

SEQ ID NO: 82153 - DNA, 427 bp, Zea Mays
ctaaaaagcaagtgccacattcgtcgttttaaaacagatcattgatttacgctaaaattcgtatccatttacgctgtttcggatcacgtcttacgcttaaatccacctgacctagaacccgagcacgatcggagcgcgatttttacgtcgtaatttaggtcacattcgttgttacgaaatagattgatgatgtacgataaaatttgtacccatttacgctgtttggttcacgttttacgctgaaatttgaccaagccaaaatccgtgcacgatcgaatgtgatcaatctacgctgttttagctaatataggatttacgctaaatttcgtattcatttacgatgttttagctcaggttttacgccgaaatctgccctagccagaacccgcgcacgattgggtgcacgcgattttcacgccgtaatttt

SEQ ID NO: 82154 - DNA, 384 bp, Zea Mays
acggctggccggggtggcatccagctcaccggcggcgaggatttttactgggctatgcttatctgatggccacggcgcacgaatcacggcgagccacaatcaatggcgatgggccaccggcgtcgagcagggggtgggatcggcatcttcttcagtttaatatttactgtaccatggcgatgatcattctgatgaattgacagagcaagtttaggtcacattttctcttaatttcaaatggcaacacatccagtgacctgcagcaaagttgtagagctatataccacctatatttcgactatagtgactgagctcatttgatcactagatcatggttgaattcacactcaaagctgactctgttacactgaatatctgaatttc

SEQ ID NO: 82155 - DNA, 551 bp, Zea Mays
cagaatttgaagccaccttccgagaacatcatgtgccccaagggatcgtcgagctcaaagaagatgaatttcgggaattaactcaaggaggaagatctgttagtgagtacgtgcacaaattcacagaattgactcgctatgcgcctgacgatgttagcacagaagccacgaagatggcccgtttcttgaaggggctaagaccagaactcaagactatcctcgctagccaagacttcatcagcttctcgcatctctcaaacaaggccatacaagtagaaagggctaaagaagaagaaaagggtcacctcaagagaaagttacaggtcctccgagctcagcagcaggacaggcaccagagaattcgatcctttgggtttccacccaagggaccaaacttcaacaagccagctagacccactccatcatgtttcagtcagcagggccaaagctcccttcaggccccctccgttgcaagcaaccaacctccagccaatgcctgttggcactgcggagaccccagtcactacaagaataattgtcctcagttgaag

SEQ ID NO: 82156 - DNA, 490 bp, Zea Mays
cccagatgaaaatgttgagcctaacgatggcgttaggagtcagctgatgaagaaatatttcataattatccaaaatttctccaattatttcattcagcgaaaactgtaaccctgctctgaaaaaacttttgaaaactaccacctcaccatttttcggtgtcggagtggtttcttctccggcaaaacgaatcagcttctctgaagtagcccagcttcatcatcatgggcatatcagcttcagaaatggtagattttccaaaatccaagtggctgggttttgacgggatcagaatgctataatcttcttcttcttcatcagcgatttcttcctcaacatcttgttcagttttggcagcaggtgcaccttgttcaatggctccctctgtcacaactagtcctgattgtctcatcacttcggagatcggggcagtctcggtggcttcggcctcctctccatcatgggtcaccctcgcagttgaccatactctgg

SEQ ID NO: 82157 - DNA, 346 bp, Zea Mays
cttttttgtaactaggtaacgcatacgtgtacgaaaatccggtgggatctgtcctcgtaagcccggtctattggtctgcacacatgcatgacgagttataaagaaaaactgccccctcagttgtgcccctatgatagatccacctcactgcctcatggtcttaccttgcagtttttcagataatactttttatctaacccacccgtgtggttcctatctgtcctaacgttacgacgtctgaattgaacatccaggcttgcaagttaggacctccttgcgaaagcaggagggcccgatagcctgggggtcggttctaaagaatgggaacccgttccatggggcggtt

SEQ ID NO: 82158 - DNA, 646 bp, Zea Mays
tagcaaccaaaaccatcacatggttgttattattatgaagataacttaaaacatagttttcatcgtctaacgtgagagctaacttattacaacaaaacttaaaatttctagagcagcctggtgatggatccgggctccccatagcgaagcctcttgcggggaggggacaacgccatggcggggacctgggcttcaggcggatgccgtccttgaagttgggcttccagggctgcaatcctggcatgggcatcctccagctccaagtgcaccctagagagatccagggtggcactatccaggtcagtgttgagaccggccactacaccagctagggtattgaggcgatcctcgccagctccacctggaacgatgctagtctggcttcctccacttagacacagagggagatgcctgaacctcgtgtcatgcagctactgccggtaggtgtggctgagagaccacagagtacgtctggcagcatcgctgaccgaagcagcgtaggtggatagcggtgtcagagactcatgagctgacagagtcctgaaccctctatcccctgcatccatcaccctgacgtggatgcgagtgatgtagtagcaagcccggggagactcgctcactcgccttgtttcatacaaggggcgga

SEQ ID NO: 82159 - DNA, 1025 bp, Zea Mays
gtcgtcgccaacttaagccgattgctctattggtagggtatagtggtcaccctaagttgggtaagcgtgagcatgtcgcaccgtcttaagtcgttgccaacttaagctgattgctccgttggtagggtatagtggtcaccctaagttgggtaagcgtgagcatgtcgcatcgtcttaagtcgtcgccgacttaagccggttgctccgttagtagggtatagtggtcaccctaagtcgagtaagcgcgagcacgttgcaccgtcttaagtcgtcgctgacctaagccaattgctccgttagtagggtatagtggtcaccctaagtcgagtaagcgtgttgattacgagtccagtcgaatcgaagtcagttgatagtcagtagtttgaatgcctttgaaaatgaaaactttattgatgacgtatcctccaattacagagtacaatgttgctccaatagcttttgaggccttgctaagggtaaaattttctaagatgctctatgtcccatgaattccccacttctgtaccatccatttgagtaagccggtatgatcccggtcgagtgacctctgacacaatgaatggcccttcccatagtggtgacaacttgtgccgtccttcccccattagaacttggcgaaggaccaagtctcccattacaaaggatcggtgtcgtatggctttatcatgatagcgcctcaagttctgctggcatctggctgactaaattactatgttcaattgctcttcctccaacacatcaatatcctctagcctggtagcttctgcttctgcttcagctatgctttcgaataccagccttggtgccccgaacctgaggtcggcgggtagcactgcctccgaaccatagatcatgaagaacggggtatttccatgcagagctcgactaggttgagttctcaagctccaaaccacatacggcagctctctgatccactttcctgcaaaattttaatttttgtcgaacactttctttctgagtgcttccagtatcattcattggcc

SEQ ID NO: 82160 - DNA, 1216 bp, Zea Mays
attaatcactacacattgaacacattacataatttttaataaatacatgtgtagattacatataggaggtcaacgtaaaacacaatttagaggcactaatttgaactagctatacatatttacatagtaaataaaatgacatacacacattgatttatttattatgaacttgattgctcatcaaggttttgcctactcagtggggtacgaaggttccatggctagaccacacatgcccctcttatctgaaatatccttctccattctgaggtatccattctcgccccaagtcgtgccccatgagttcttcatcagccagtacttagtaccatcactggtctttccataaccaatggctgcaatcccatggtccaagtcagtgccacatgagccagtcatcacaccaccagagtagaactggaacgtcatgtctccgccatccactgccaccgagacaggctggtttgccacggccttcatcaaggcagcctcatcatttgccggcacatcctcgtagccctttatggttgcagcactatttgatccactcttgcacttgccatctgcagcagtgtaaggatagctggactccgtggttaggccgccgttcttgatgatgaacttgaaagcatcgtccatcaaaccaccctcacaaccttgatcctcgccatggacatcgcaatccactaactcttgttctgcaagagagacgagcttgcccgtgctgattttcacaatgccttctgtggcggccacggctgagaacgcccagcagcaacctgcaattgattattatgtctcgacttatgtcatcacactctagtttttatttccaccataatagagttgtcggaagtgttcgtgctactaaatatacataccacattgaccttgatccttgatgggagtgacggcacccttggtcctccaatcgatggtcgtcggaagcgcatcggcactaacattctcatacctaaatcctgtagggatcttcatattgctagatttgagacccttattagtcttggtagacctgaactcgtcgttggtgagatcggcgaactggttaaccccgagccagaacttattattcccaccagcgttgaacgactcgatgaactgaacgttagccttgaacacctcgaaccgccgagccttctcggaggcgtctttgtagacgcggctgtactgcgccatccactgctcatgcctcgcc

SEQ ID NO: 82161 - DNA, 990 bp, Zea Mays
aaaaataaaaaccattagataattaatttttaccactaatagatgcaatcagatcccaattgttcccagaagcggccatagtagttatttgttcaccaaactaattgcaaacgtcatcctaggcaatcataacgtgttcattctacgcaatcataacgtggtcaatacgcataggagtagcgtagcaaattatggagatactcccagcttcagtcaaaccttcggtgatgcagtaagaccttcacggtagcatataacgcaaccgtgttggaaacttgtactagtgcttttgtaatgctgcttttgaaccaagctcgtgcaacgatagatagccagacaaatggaatccagaatcacgtggtcaaacggtaccaaatcccaactggtatagggtccccaggtcagccttagtcagcattacatcgttcacggttctgtgtcaaagcagagcggttgtaagcgtagcgtgacacgccgctgagggaaaacacgaaaaaggccatatacaataggaaactgcaagatacgtgtgccgtgcttgtgtcgtgcacttttgctgcaaatgtaaaggttagaaggtacatgaagccattccattgatcaggttagcggtcgtaagagaacaaagaattaccccaccattgctccagcagaaaatataaaaacagaagtccaaataaaataccaatgtaatatcgtaatttcattccgagacatgccaaccaccaaagctcatatagaaacaaaggaagcgaacaactgcattccaaacctgaagtcgttttagattttctagattcataagtgtgtgtgtctatcaatctatctatctatctacacacgcatacatctgcatgcttgcgcatctgtgcgtgtagacgtggtgtacatatctaaatacatagctttgctatgcacttaaaaaaaggtcaaaacaacttacaattcaggatggaggaaatattttttgaaagcagcacatcatctttt

SEQ ID NO: 82162 - DNA, 605 bp, Zea Mays
gtgggaagttgtctttgtcctagctgtccaaaccgagacaaaacttttcccaagtcgtgtcaaacgacttaggtttgggttcaaacttttccacggtgttctagaggtattttggcgccactttgtcaattgggacaaatggttttaagtttgggatcaaggtgaacatgtttgatctttggaaaaaggggtggttttggacttagaagaattctgttttttcttttgtgctcaaccctttggtgaaccttttggggtttttctaaattctttttggggtcactttcttactatcatttgtagggtattaagtgtactacatcttttataattggcccaagtcatgatcatgtggttttcatacccttttgttcatgcttacttctagtgctccacttgtccaaaggggtttgaattagggtttgggcaattctccccattatatgtgcatgataagttaaggcattacatctaagatgggttgcacttacttagggtcttgagttccaagtttggtgtactttgctccagttaagccacatgtgatgatgggcttggcttgtgtagtcttgagtgaaaaccctaagtaacacctcgggtgttac

SEQ ID NO: 82163 - DNA, 717 bp, Zea Mays
tggaaattggcccaaaggcacatttccctttcagtcagtcctgttgatcagtcgtcgccactagccccgagcctgggcctcaggggtgacttggtcgtcgactgccttgcgtgcttattcctctagttgcttgactttcatcaagggttcatagaggtcaaaggcaaaaaccccatccggaacaggctttctaaccaacttgatggtcgagagctcgtcggcctcagcattgaagtgtctatagctatggtgtagcttgaagcctttgaacttctcttccaacttacttaccttgctatagtacactcacatccgcgggtcacatggttccattgccttcatcacctggtcgacaaccagctttgagtcgcccctaaccaagtgccattgcacccccacctcggctgcaacccggatcccattgatgagggccttgtatttggcgacattgttcatggcgttaaagtggagacagagggtgtagcggagcttatgcccctagggtgatacgaggacaatgcttgcacctcttccaatcttgaggtaggacccattgaagtacatggtccagtagtccgggtcctcaaccaggggaggttcttgcgtctcagtccactctacgatgaagtcgacaagagcttgggacttgatcgcattcctggggacatagctgatatcgagcctgttgagctcaagggaccatttggcgatgcatct

SEQ ID NO: 82164 - DNA, 697 bp, Zea Mays
cttgtagctgcgtggtagggctgggcagtactttgccgccgtcgccgccgcggatgcccggcgtgccactacctcgggtgggctggaggagagggacacgctgtgatcatcggatctttatcggacggtcacgattagaactttggacgttagctgctagggtaatcgagggccatcgatttcggatccgtctgccttgtgcgcttggtgggtatgatgaatcctgggtgttagatggggatccgacggtcgcgatctgatcacgagtaattaaatttccttcgctgattcatcctccggtggccggatctgcgtaccgtttcgattggggttagatctaatccgagcggtcgaggagggatccaacgatcagaggtcgccaataacctttcgccgtcgatctcggatcaggtggacactagtgcatattgatttgttataagctagatctaatctgggccctctgttgttgatcgatcggcccagagcaaaggataccccctttggttgggaaaatatgaaaaagagcccccactgttatgcagaatcaactcgcaatccagggcagtgaaaagataattacgcagaggccctgaattttgcagaataaaccttaaacttctcaaaaataatgcgcgcaatccagaaacctaataaattaggtaaattaatatagaaaatgttttttagtgtaaaa

SEQ ID NO: 82165 - DNA, 437 bp, Zea Mays
gacctaggcccgattggatctcagcttcgacaacgcgtctgctgccgcgttgcagtctctttccacgtgatggaactccaacccttcgaatttgtcctctagttttcggacagctgcatagtacttgcccatggaatcagtcgagcaatcccagtctttatttatctggcttatgacacactagcgaatatccgtataccatcagcttcttgacgctcagtgatacggcgatgttcaatccgtggatcagtgcttcatattctgccgcattatttgatgctggaaataatagttggagcacatacttgagttgttctcctctaggagcaatgaagaggattcctgcacctgctccctacaacttcagcgagccatcaaagtacattctccatacttcggtagtctctgggttgtctgggacctcatgctcagtccac

SEQ ID NO: 82166 - DNA, 451 bp, Zea Mays
tttatagcctagggagaagggttgggtgaaacatttttggaacataaactaatttggtagctgcacatgaatccaccacaacaaagaaagaatggaccggttggagagcccatctcagaaagagaggtctagatttagccttatcaagaacaacgaaagccaagaccaagaaaacagattcttggagcaatccatccaattacaattacagaacaagttgtgcaagcaaagataataggttcttaccagcaaagaaagaaatcaacccgaactcaatgaatcttcctccacgcatgtccagcaccaccaaggcgaaaacttccctgccacatgagcagcagtgcagcacgctagcagcaggagcaaatcgtgagggggttcttacaaggaaaggaaaaatcaatccaaactcgatgaatctgccactcttcctcctctgtctctgtggtgg

SEQ ID NO: 82167 - DNA, 686 bp, Zea Mays
ttcataacaagtttggatgctataatttcgcttacgaaaaggaagcatagttcccgacccttgcatatcgtagcaaatggccaaattcatggatgaaggagtagttctatataaagaatgacttgaaagagggatgatatcaagggcataatccaaaggcctatcaatcctagcttcgggttcaagagaccgacaagttacatgaactttgaggctcaggctgctatggttgctttcaacactgtttgcacctatattgggaattgggatcttattcaagagcacttgtcatttaacatctggtctatgagggtcgaatggtccatgccagagccgaaggatgatagttcttcggagcaagaactaggcctcgttaggttgatgtatatgtacaaatttgagagtgtgttcaaagagccatgcgatgaatggctagaggtcgttgaagataaatgcaatgaagtccttcagaaatttaacaagaaaggagatgaagcattagatgttgccttcagggctcggcacaagcgccgcttgaactgcgtgtttgacacgatcgggtttgtatatcctgactacccccagctagctcaaggtggtggaaagaagagaaaacaaaaacagatgaaggttaccaccaaacaccgaaggatttttgtggttgaatgtgttcacgctaggacgga

SEQ ID NO: 82168 - DNA, 546 bp, Zea Mays
tgaatgtttaccattggcagagttttcgtataacaatagttatcaagaaagtattaagatggcaccatttgaagcattgtatggacgacggtgccgtacccccttgaattggtttgaaccaggagaaaggtggtttttcaggcctaacatggtgaaatagatggaagaaaaggttcaacgaatcatacataacttgaaagaggcacaagctcgacaaaagagttatgcagacaaacgacgctaacccttgtactttcaagtcaaagattatgtgtacctaaaagtatcaccaatgaagggtgtaacccattttggtgtaaaaggaaagcttgcaccccgatacattggtctgcttcctattcttgaaagatatggaccattggcgtaccgactccaactacccgaaacattgtctgcagtgcacaatgtgttcgatgtatcccaattgaagaagtgtcttcaagttcctgatcgaaccattgatgtggtggatgttaccttggaaccagacttaacatattcagaacatcccatttgagtcctgga

SEQ ID NO: 82169 - DNA, 596 bp, Zea Mays
ctgggcgtcaatatctgaagaactcaggggctcaggcgcaagattaccgagactcagtgaatagttccactggacggcgggttgattcctagattttctagggtctcttctgcaaaccggtaaagtgaaggggtacgggcgaaactgagccgcccgatcagaaacggagggctcagattagatctgggttccgcaagaaccggtacgcaatgcaggccctcggagccaagatccatggccagggaacacacaccctcacatccatccgatcccgatcggatggctcttgcgaatttggccgaatcgttatctcacttctaatcaggaccgttcgccgtgcatccaacggcgcccggacaccccccttctcctcctaccccgcgacggcggcgcataccacccactcggcggagcatcgccggaggaacacaatccccggcaatatcgtaccaaattcccgaacccgagtttctaagcgtaactaaattgatgatgaatcgaagggagcaattcttacaggcgcggacaactcacactgatcgataggcgttgtggtgcggacgaacggctgtgctcccgctccggtgagagattcc

SEQ ID NO: 82170 - DNA, 703 bp, Zea Mays
tggaatcatccgagtcctcggatgacgccgggggagaagccagagcgggcgagcggtccgactcggaggatgcctcctccgagtactccgagtccccaaagtcctccgaggggggactcggggcacgcttgcgcttgttgtcgccacgatgaggccagccacgacccctcctgcctctacccatggttggttggagaaggagagaaagaaagaagaaatcaacagatgatcgaaggatgagtgaagagaacaacggtgcaagcaggctatttatataggccgggggtgaccgtccacttcctaccacgctcgccgaacactcgcaagtattcaataagcaattcaagccacctgaaaatgagtcaggcaacaggcgccgctttcgcgtaacaacacaccgtttggaccaaggtcaactgatcaagcaatatgattacaccccgcggtcacatcaagttactactccaggacagtgggctaaacgctttgcgtaccaagacacctcttgggcacaccattgggtgtgttgtcaagaattttcaaaagattttctaaaaagtcatatccacacagtatgcgcaatgaatgtactgcgacaaaaggaagagatcgtctgagatgagaggaagtccaaatatagctactgaaccgcaagtctaaacagcagaagcattgaagcgcagagcggggtgatgagagtcat

SEQ ID NO: 82171 - DNA, 500 bp, Zea Mays
ggaggtgtcttactacccctcccggagcactgccaggaacggtgtccgttgcgcaggcaatttatgcacctcaccgggtctctgcaatcaatggcgaagtggcctctgcccagacagcgggcgcatttaccttgcagacttaccagcagacggcgaggagtcggggtcgagcgaggcacccatgtcgtgcggtctggttccgcacaggcagcgcgtcggcgcctgcgccgaatcgtcgtccagctgccaggagcttcgtcttcaatgcggtcgcagccatgagttgtcggaggatcggtggagacatcaaagcgactggatttgctggtggatttgggggaggagaggtaagtgacgtctggcgcgccgctcgcagtcaatgcaaagcgaacgcgcttggaggagtgaaggacctggggtaggctggcaggtggaggcggcggcagcgggggcaggggcatgggaggccgagctagcggtgctaggggagtacgctgggt

SEQ ID NO: 82172 - DNA, 305 bp, Zea Mays
gcccgaaaccagaaaaggaaggccatcaacccagcaccataggaagaggagctagatcaagagatcagagatctagaaaccatccaccaacaagtggagagaataagggagaaaatgcttcggctttctgaactccagaagaaggttgatgaagctgccgaagagatgcgccatatcacacaagacaacgagcaaggacgaaggccacagtagagagaactttgtcaggaaagcccaagttatgatgatgtatggtatgatgatttcaatcatggtaactttgcttttgatgatgcttcccccta

SEQ ID NO: 82173 - DNA, 571 bp, Zea Mays
tgggcatggtgcagcttggagctttcttgatggagataagacaagaccatctataagaatgtcaattccaacagggggcccttctatgacaataatagctttggtaaagggagcatgaaggatgaactttcctttcaaatgtgttcattgcttatcacaagtctgattttttggttatagaaaggaaagtaaggaataatgtcattggctcctaaaaagggcattatcaacagagaacaagaaacaagaataacttacttggcaagtcccacatatcgaaattgcctatcaggtgtttgttaatatcatcttacttaccgttatgtgtttactggcgctaatgtttttgggtttctgcgatctctcatttttgtttgttacctctatgcattatgattatgaagcttcaaccaccttacatgtgtcgattagagcaatcctagccaacactgtctcataagtcttgtgtcgtttagttgtataaactatgagtatggattttctttagattaaaagaaaggtaaaacatttcttagtccactgtctgtcataaacagtgctagagagtata

SEQ ID NO: 82174 - DNA, 463 bp, Zea Mays
atcagctcctcaagttcccaagtagcctcgcgctcagactgattagtccacaagaccttaacatatttaattgatctccttctcatgacacgctttgaggactccaaaatacgcaccagacgacactccaaagtcagatcctgctgcacagcaatcggttccatctcgatttgatggtccggatctcgcaaaaacttcctcaacatagagacatgaaataccgggtgtacccctgccatggaatccggcaattgcaagcgataagccaagctgcccacccgggccaagatagggaacggtccaatgtatctcgggctaagcttttcggagacaccgaaccgaacaactcctttagtaggtgataccctcagaaggacttgatcacccactgtaaattccgagtctcgcctcctcacatcagcataactcttctgatagctctgagcggccaaaatattttgac

SEQ ID NO: 82175 - DNA, 445 bp, Zea Mays
atttagtccaggagcacattgcttatagagtgtggccactcacaagtgggtgggaaatgctgaaggaagctgctgctgggtctagccaaggtggtttggtctacctgaagtacatgttcaaatataggagccagtttgatgagccaaatgatgactggttagatgccattgaagcaaccaatgttgaattgcttggtgcctactcgaaggctgaagatgatgctatgacaatggccttcagggctcgaggcaaaaagaggctgaatagagtatttgatgtcatcgggtttgtatacccagattactgttatccttcacgaaagcaaggaaagaaaagaaagactgctgctttggcgatttctagcacgccgaggttgaagaaaattaaggttttaacacatcgcccaagcgcattgaaacggccgaagtgtcaaggcatattgag

SEQ ID NO: 82176 - DNA, 639 bp, Zea Mays
cagccccagtaggtctccactctccaggatcgttcgcccggaaacctccctccgcgtctttgaacctcacgaacacatctgcatgcatgctggttttgtttgagattctatggccggtggttaattagtgtgtgtatatatatatatcaaggtaatggaagttctgggtttcgattagtaaggggagcctcagccaggacgcagatagagccacgatccatatgattgcgtcgatatttatgacggtataactcaattatacaatttgcatagaccatgcaacgaatctggtgggccatttcccctatgattgcgtcagccggcctttataccagataaacagatagcataatgtgcataactcatgcaaaaagaaatctgtctgacgcgcaaatcacgtgggacgactttaaaatttgttcggtgtttaagactgcatacgcacatgaagaataagagcataaatcatgcagtattacgacgtcagaacatttatgctattgtagatatgtgactagtgtgtgcgtagatctgagtgggtttgagatttggaaagttttgctggaaaatcgcattgaatgtggaaagacacaaagaaatacgccgtaaaaattacattatgtgcgctttgtgggaaac

SEQ ID NO: 82177 - DNA, 459 bp, Zea Mays
tagggttcggccgccgcggtggagaagaacaagcagacggcggcgataatgctagggttcggccgccgcatgagttacgggtgaggtgagctaaataactgcgtgctcgtgggttgattcgtgggcccgatacacgtactctgctgggcgaaatctatgtgaaggcccatggaccgacacgtggattactgtttcgtaaatggaaacataagacatcgtaatatcaatatttgtgtggagactagtacgactgcccagattgcgggaacacaatcttctcgtgggcccggatgcccgaaacatgcgcataccagaagtgtataaactcatacacaaattagcataacacgtaataatatttggcgtaagcaggtgggtacaataagccaaaaagtgtacggagcggtctgcgcacctggtcggtgggtggtcggggcttccaatagttatacacagccc

SEQ ID NO: 82178 - DNA, 483 bp, Zea Mays
ggacacagtggacacaggcccggcggaggagccctcaacggtttccaggcgcagggccgggtcgacctcagcctcgggcagcaccgggttgacctcggccatgggccgcacgccgttcagatccccaaggtcttcgacatcctcggcacacgccatctgcagcaacaacacactcattcagcaaacccacacgtacccacattcaaccacaccaaacaaaaaacaagccttacctgctccctcgcccgatcagaccgctccctaaccgcctcccggccatgaggaccccacatccgatcgaagagtgcccccgcggaatcctttatcacagggtcttcaaccttaaaaatttcgcgctcaaagttttcatcggaccggtcgaagacctcatagtatttgcacccctcgtgggacagcgcattcatggccccttcgcaggtgacgagggaggcaaaggacataaaaccctccatgatggtaggg

SEQ ID NO: 82179 - DNA, 770 bp, Zea Mays
ggatcctctaaaaacaaggtttccttacatagaccatgaggcaaccatgtaatttgtattggagagcagctgacaatatttagagaaataaatacataatgtgttgggtatagctagttaaatggttaggatgacatttcactattaaaaccaacaaccagtgccatgaatttacctgtgaggttccccaactatatagtttcgtggactggcgacatgctcggttgggcgaaccatcgtgctaacattgatgccggaggaattcacaagagcttagctgacagaagagataaagtacaatcccagtcaagcacgcgagtcaactcatcagagaatattttgctgccagtgaggccatcttgaggagcgactggcaaactgaggctactggcacctccggtacgacgctgctagtaaaacttatttcaccctcctataggaacgggaagagacaacattctttcgtataagcagacatagagccaacattctttcgcataaagttctgaaccgatggctatgaactattctaaaaattgagttgctaatttgcatatagatatataattcattatgatgcgaaaacaatttgcaagtatgtgtgatatgttgttttactaaacgacttgaccaatctatattttcggtacaaaacaactaaaaattagttagcgtagttataattgatattaaacacaaagaaaatcatacagagcatcgaggtagcaaactcacgtaaaaagtaacatggttggccggaacacgatccg

SEQ ID NO: 82180 - DNA, 644 bp, Zea Mays
ctgaatcattaggctacatctttgctacagaatgttggtctagttgccatgtgaaatcaggagaaaatttgtcctcaacttggtctgtcaggccgactgaatgaacttcgcgatggtacagtgatcgtattgggccgccagctcaaagacctcgccgctggtgatctcgcgctcaaatctgcatcggcgttgcgattcacgcccgaccaaactcggataagcgctcctcggtaagaaatatcacgctggagataaactccggccactgttctcaccgccgtcgtgtctcaccatggttagtcgcgttggcatcaccgatgttcgctgttatctggcctggctacatgcctcaacgtttcaccacgtcgtagtgaatcactgtaagccactggttcgtcgccggtgaggccgccacggtgaaggccacgaatcaccacaccagtgactcattccttctccgaccgccaccgtgcccaatccaaattcactggccaccgctcatgcctgctataaattgagcatgtcgtgagctccgtaggataattatgcatccaaagcaccagtaattgcctccaatcgttcaccagagaccgcgaattgctcatctcccccaattctgtttccgccgccgtggtagaaccctc

SEQ ID NO: 82181 - DNA, 705 bp, Zea Mays
agaaactccacccatgtagcatgtctacgattcagatttgtttggctacgaagatgcttaattgattcatgatccgaatgaataacaaattccttagaccataaataatgtttccacatatgtaaagaacgaatgagagcatacaattctttgtcatatgtagaataattaagaacatgtccatgcagtttctcactaaagtaagcaacgggtttacctccttgcaacaaaacagcaccaataccaactccacttgcatcacattcaagctcaaaagtcttaccaaaatcaggaagttggagtagcggtgcgtgagtaagcttctctttcaaaagtgcaaaggaatcctcttgtggctgcccccaatggaacgaaatgcccttcttggtcagctcatgtaaaggggcagcgatggtgctgaaatccttcacaaaacgacgataaaagtctgcaagtccaagaaaactccgcacttgtgtcaccgtcgaaggtgttggccaactctgaatggcatacaccttggcctcatccacctcaatgccctgtggagtcacaacatagccaagaaacgaaactcgttcggtgcaaaaggtgcacttctcgaggttagcaaataaacgcgcagctcgcaaagcgctaaaaacagcacgtaagtgatccatatgcgcctctaatgacttgttgtaaatcaagatatcatcaaag

SEQ ID NO: 82182 - DNA, 452 bp, Zea Mays
atatccgcgacttatatctcatatccaaactcgtatccgttatccgctacgaataaaaaaaacagtattcatatccgttacccgcgggtaacagatatctacggatatatccgtttgcccactacacatacaacatatttaaatccagcaaattcaaatatgataacatatttgtccagcaaatttaaatatgataaaaacatacaaccatatagaatttgtccaacaaatcaaatctgatacatgtattaaggcatacagcgagcaatataaaattgtctagcaaaatcaaatctaaattgttcaaattgataaaattacaaacacacaagccacaagaatcaacaccaaagaccagctggttattcagaattagcagccaacacacaagattcttctttcatgtcttcttcattatcttcaaggcaagaccaaaaactattgaatcttcc

SEQ ID NO: 82183 - DNA, 305 bp, Zea Mays
cgacactgctatctcatatgtatctgtcaccccgtgtttgccatggttgttttcagcctgtcttgctcgttcagtcgttctagattagtgtttcgttgttcacttcttttgttctagttggattgctcactctacagactagtttttcttgtagagcctttgtagttttgttgctaacatggcgaattaattttcgtatcaggatttgggggattgtgctgccacttacctgaaagagaaatctttaaatgacttaatcttcggaaaattaaaaagacatttcaaattagaaattgtattaacat

SEQ ID NO: 82184 - DNA, 707 bp, Zea Mays
aaaaactccaccttctcatctggtctcgaaaagcttctctatcattgttcagctgtagtcagcgcctctattccagcacttgcacgtataggttctggaagagcaggcttctgaaacgctcacatccaggtgctcacctgcttagggagggacgaacaatcacgcttttaaggagttgtctcctttttgtgtgcttgtcgtcctggctatattttttttgcactgcatcgagctagagctggacgctggacgactacttcaaccggtagtatgtttgctcctcaatatggttcctcctttcaaatatactgagtatacgcttctacatattatcaccaacttatgtatatcatttttctggattaaaatacaaccgagaatgcccaatttcttaacactattaacaactattagtaattctagacctgctaatgaaactaatagttagccattccttaccctgtttccattctcggtgctagttttaccagatatatttcgatccactggtactaatttttttatagtgttcaaacacatctctaactccattataatgcaaagcacatagaccggcaaaaattcccttgtccgtattcctaccgtgtctccacttaccaccggctgtcatcatccctgcctcctcatcgatcctctcgcgccaaagacgcttttgctgcatcgctttgctcctcttttcattcgcc

SEQ ID NO: 82185 - DNA, 490 bp, Zea Mays
gttcgcgctatcgcttgccaggctcaaggaacagaggcatcccttgtgggcccatgcggccgccgctggcgatggtcaaagcggcagggagtgtggagttaagaggttgacggccgcgccggcggtgagggatcacagggcggtactgagcgcactggcccgggcgctagctacgacggagtcggcgtacctggacaagaccagtcactcaatgggatcccacctagagctggcagtgaccggagcttgtctggtcgtggttctgttgagggatgacgacgtgtatgtaatgaaccttggggatagccgtgccattgtggcgcagcgatgggacgacgaagattgcttgattggaagcatgtgggtggaggacattggtgtgggcttggagaccgagacaaggatccctgggtattcggcaattgggctcgaggcattgcagctgtcgactgatcatagcacgagcattgaagaggtaatctttttgcag

SEQ ID NO: 82186 - DNA, 398 bp, Zea Mays
ggtgctaccacggcttcatcctccccacgcccggtgcacgcaaaaaatagtgcagaacgaacactctcgaactcacacccctctactctagaaatttggggctaaccaacagaccacatatatgtgtttacaaataaacaaatcacttggtactatcatggcttcaccctccccacgcccagcgcccgcaaaaaatagtgcagaacgagcactcgaacccacacccctctgttccgaaaaattgaggctaaccaccagaccactcgtaccttagtgttaagaacctaatgtgggctaccatggcttcaccctccccacgcctagcgctcgcaaaaaatagtgcagaaagagcactcgaacccacacccctctactctagaaacttggggctaacaaac

SEQ ID NO: 82187 - DNA, 352 bp, Zea Mays
tatctttaaagcatttataggtttgggtaagaaagagtaggataagaaaagactccatccaagattgtggctcttgattcttttgaagatctggcttgaatcttatccttccatgcttgatttgatgttgatcttttcttcttcagtcttggtcttactgattcgacattagtgtatattatcggagtggggagtatggttaaggtagatataggtgagatagactacatgatgttggtcaaaaacttgtttgatgttaggtggggtagacagattatgcaatccaccatgacactattggttgggttacctcttatgctcacggttgaattggtctaatgcactaatttag

SEQ ID NO: 82188 - DNA, 340 bp, Zea Mays
caacgacctccccactccgcgcggtcccgagcgcacctataaagcgtggtcgcagcgttccctgcgtgcggtcctacctgagccgtattgatccaaacccttagaaaatttggtcgcccaccattgaaagagagagaaaggggtgagtgggccgtcgcgccatcggtgggttagcagcatcgttggcacactgaaaacggattgggaagcatcgcggggacgtgggaatgatacttgcaggcgtggttggaggaatcgtgtctcagggcggctggaattgctcatcacacttcgtcaccgccgcggattcgcaccaccacgtggacagagttgtcaccac

SEQ ID NO: 82189 - DNA, 539 bp, Zea Mays
ctaaaaactaacttctaaataatctccctgattttatcaattatttggaccgcgccaaattccagagacaacaggggcctcagcgcaagaaatccgaggcacagagcacagtagcgatggactgcgggttaattcaaacatttgccaagatctctttagcaattaagtcaagcgaagaggtatcggtgaacccaggccgttggatctaaaccacacggcccagattagagggttataaatctgaaccggtattcaacaatagccgctggatcctatatctacggctcggatccaaaataaccgagatcgaatcgtatccataggattgcagatctacggtccacgcgtaagggtacccctgatctaatcatggccgttcgtgaacagatcagcggcacaaacaccatctccctcccccgcggcgaacaacggcgaacagagccgcggcgcccgaccaccctccggcgaggacaaccaccgaccccagagcgccatcctcaatcataaccgcatacacgtacagggaaatgtactttaac

SEQ ID NO: 82190 - DNA, 400 bp, Zea Mays
gcccggtgccagagaagacgacgagcacaccaagaacaagaagcaagaaccactagagaagatgacactcgattagcaaggacgatgactggcggaggagggacacacatcaacagactcacataatcactgattcaccggtggaaaagagggaggtagagatatggacaagggaaaggcagagagggaagcgcagtcgctgattgtaagtatttcaagttcgaggtcactgcattcggtggagaagccaaaaaggtagtcaggcagaagtttgatcacggaggcgccgaggcggaggcagagcgccaaggccagaccgccggaaaggcagtcaggcagaggccgaaggcgccaagggggaggcgctgatttagagttaggtttacacagtggagcgtca

SEQ ID NO: 82191 - DNA, 372 bp, Zea Mays
gacatggtgacgatcctccctgtccttgtccttagtgaagggaatagaagaagtgagggatgtaaggactaatgggttggtgagtctggtggcattagcaattgaaatgaggccaggagggcatgaggtcggaatggcctcatcagtgttttctgccaaaaactgattagatggagctgcctgctttgtcactctattctttaatggtttcttttcgtgcaggtatccgttggcttttcagtaagaattttttcataagactgagatactgtatatcagtatatgctcggacttagagctaaagatccagaaatgaggaagcaattcttcaagctttaccatgatacagttttgtaaacattcttaatcttt

SEQ ID NO: 82192 - DNA, 502 bp, Zea Mays
caaggtcactgcccttagcaagcgagaccttgcctaatgtattacgtatagcccaaaggtttgtatttgttctactttgtttctacattctttgtgcaagctttagtagataaatagttctttcttttctcctttttagggcatgaccctaagcaaagctcataggacctagagtgatctagaagagaaaagccatgccatgtccatatctgagcttcacgaagatatcattgtgttatggaaaaacgatggggagaagactaaaatgttgaatacctagctaaaggccttcgaaaatgttatggcactatcaaggctttgacccaagagaaggccacccttcaagctacgctagagacaaggaacaaggagttgcagatcttcaatccaaagtctctaagaaacaagaaaaaacatgatgcagaggttctggtgcttatatagtagcttgttgatgcctagaagaagaatcaaaatgtctccaaggagcttaaagaggaaa

SEQ ID NO: 82193 - DNA, 402 bp, Zea Mays
ataaaaaagaacaaaagtaatgtggctcgttgtccgcatgaactttgcccttgccagctaggctagtacacctgccacccgaacctcagctgcattgaaggcagccaggaccgctgccaagggaccctgcaatttggcgatcgtaagaagtggaagggtatgagactcgccccatagcctatcgaacgaaggggggcagcagggggaggagcaccagcagccccctcccaaagttcggcatgggtcacattaggatgtggttcgatcgacgatccatcaggcaaggagctactagcaaatgaaggaagggtcacaaccctcccctagagaatgatgcaagccaccctaggtcatggtccaaagtctgaacaatgattcaccgagcagtgatctaccgtggcg

SEQ ID NO: 82194 - DNA, 1149 bp, Zea Mays
atccgggcgaaggcccaagcgtgggacaagcaccaagacaaaggacttcactagccacgaatcaagggccctcggcacaaactatcctactagggagagcgaagggcactaggacatgaaggatccataggcgacaactagggctatatgaagcatgactagcctgggtcatcagtccaccagggtgctccccaagggcccacctatcagtgtaactagtgggtgtaattgtaagtgcacgatgctagaggacgttgcagtgttgtaattactccattatatggaatattccaaggatgtagttggtaaccgggggtatgaatgtactttgggccacctacccctagacaaccctataaatatgatatccctcgtcctgtagctggacaggaaactcataacgagatgctacaattccacaccaaacattttgttgtgcactgtgctccctttttgtctctgagtgtcttggtccacctaacggtacccaacatttggcgcccaccatttgtgcgatgaatactaatcccatgatgcctcccaagaagacaaccgagccagctcaccagccgtcgttgacatagcgagggcgaccctcatctctaaaaaggccaaagttgccttcgcttacaatgtctcaccaaccgatccaaaaaccaccatcgagccacaaggcgagggtcatgccacgaaacaaaagcagttaccaaccaccaccgagccagaagaaaaagtccatacctctagcttagacaccccaagtgacacccacccaatccaaaaagccatccctacgaagccataatctggccagacctaaccaagaacatgtcattagtccccctaggcttcctgctaggaatgcccctcctacataacggtcagtggctccctctaggaatgcccctctagacgacgactacgaagacctacataacggtctagaccttgacatcaacaccaaaaaacaacttttagtcaggagccttcgcatgcacaacagtaatctacagaagcaaagagatgtcctcatagccaagagacaattcaacgaagtctaggccaggatacataaccttatccaacaaaagaaagagcgcctccaggctctcgagcaagaaatctcataactacaggcccaacaataac

SEQ ID NO: 82195 - DNA, 597 bp, Zea Mays
gtttaaagtaaaagggaagttgtaccctcgctttattggagccttcaagatcctaaagcgagtgggggaagttgcctaccaactggaactacctgtccatctagcggatgtgcatgatgtcttcgatgtatcccagttgaagaagtgcctcagggtaccaaaagagcaactcccaatggaggaacttagtgttcaaggtgatctgacttatattgagtaccctatcaagatcattgatactttgactcgtgttacgagaaataaagtgaacagaatgtgcaaagtgcaatggagtcatcacagtgaagatgaagctacttgggagcgagaagacaaattaataatagattttccccacctctttcctagttcatcttaatctcgaggtcgagattccttttaagggggtaggatttgtaaagcccaaaatttgtaccagagaaaaataatgatataaataaataaatatactgatatgttaatgttttgggagttttggaacctatgtaattaattatcttcttttctcttttgcatatgcaaataaagagatcaagttgaacgaattaaaagtgcattcatgctgatgtttatatt

SEQ ID NO: 82196 - DNA, 726 bp, Zea Mays
ctcattcagagtggtgcatgacttttgcatcatcattgcccttacaacctagcttccctttccataccaagaagaagaggaacaatagatgagataacagatcaaacttcaaacagtcaacacatgatgacaatcaaaatacagaacatagaagagaaaacaaattcaaatcaaacaataaaaataaaaacagaagaaatgacgacttggctggctccaacggacaaatgtggtgatgtcccaaggcaactccttagctgttgtgacagcatcgacagggtaggactggataaccactaagacaatacatgtgtattgactacctagtaaagcacaatttacgacaagacaaaccagggtatagaatgtagttttctagctcagaccaatgtgtcaacagattcttaagtctgcaacatagtgtactattcaacaacctagtgaaagatagatacataatcacctaaatagaaaggcatataatgcagggctaagaaacaatatgattacacaataatcaaatagaactatcttgagctccaaacatgttgccaagcaaggtgatgtcggaatcggtgccgcgggaattagacgatgaagcttgggtggttgttagatgaaagtagaaacatttctttaaaatgtgaaattgaaatatgtccaatgtttagacatacaaaattatcactagcacatgatagttccaaaagaaagataatcctgctg

SEQ ID NO: 82197 - DNA, 454 bp, Zea Mays
agcttctaagacggtccctatctcagaaattatgaaacgttctcgttagttgtacaagaagaaaaagagtcagttccaacagaagatgttgctgctgccaaagctgaaccaactactatcgaagctgacagtgataacgaagatggtgatggcattttaagtccggcaaacccaaccatattgagtttggaaaatccacggttaaagcggaagatctggttttaatggagaaattaggatattttggaaagcatgataacaaactagttcggtttgctggggaagaagtgattccggaaccaaggaacgacgaagtcgtagtttttaagagcttctttagagcaggtctttgattccctctatacgagatgattggtgaagttttaaagaagtttgagatctaccttcatcaactcatcccaaatgtcatagttagacttagtgtgtatatatg

SEQ ID NO: 82198 - DNA, 573 bp, Zea Mays
cagctgagcatatatttctgttgcgttaagacgtttaggcggtcctttggtgaccacggtgttctttataaagttttttatcgctcctaaaggggtgtttcctaggcaaccagcgtcgatgacaatcgaagtaagtgatctgtccaccatgagcaagacggaagcaatctgtatctgaaccgcaatatggacatgccaatctaacatgtgtactccaaccggtaaaaatagcatacgccatgaagtcatgcaccgaccacaaatacgcaactcgaagtttgaatatctattttttaaaaacattgtatgcttcaacacctttccaaagctccttcaactcttcaatcaagggttttaacatgacattgaggttctttctaggatagtctgggccaggaatgattaagcaaagaaatatgaattcatatttcatacaaagagaaggtggaaggttgtatggaataacaaagacgggccaacatgagtatgatgatgccatttgaccaaaaggtgtgaagccatcggtcgcgaggccgattcgaacattcctcggatcagctgcaaagtcgggat

SEQ ID NO: 82199 - DNA, 717 bp, Zea Mays
ggttggggcaaggcatcgaccagcttggactgaggaagaagaatagagcttggccgttggatttggaatctgtgaccacagttagatatgcggcttgagtagatctgagccgtgggataggaatcaaccgtcacaattagatctagataagtcatgggtttcggccttcggatcgaatctcggcggccaagatctgtttgcatgcaccgctttggtgtgtgcgtggtgagccatctggtgcagatcggacgtgggagaattgatcaccctgttttaagtcctgtccgtccatcatggatcctatggcttatactgtgtaccggttcatatcgggccgatctaatctggtcggtcagattgtgatcggatggctcacgtggctagatacccccttcatcgatcccgttttgtaaaagagaccctgtactttcacaaaatcaacccgccatccaactcggagtagtgtgagtcttgagaatttttgtgcaggggtccctgcactttccaatatttatcacgcagtccagatattaaagaaaacaggaaaagagatttagaaaccgattttgagtatacaaataattccagaacttgtataattcatataaaattcatattaagtccaaattgatccaattctgttcctataattttgtaatattattgtttatcattttgtgtaactattttgacatgaaaaccatattaaaattggta

SEQ ID NO: 82200 - DNA, 934 bp, Zea Mays
cggggcttatcaacggcgagatagctccggcaaggtggtcaatgacgtagggaaggtcacggcggtcacgtcggtgtgcggtttatcatcggggtgggtcggagtcggtcgggcctcgtgcgcaggcaggggagctcgtcggtggcgagtgttccggcctaactagggcggtagggtccaatcaaaccagtcagcgagcttcactaggtgtcagagaaggcgtgggcacgagtaattgaactacggcttaccggttagtcgtggccacacgcgccgacggggaaacaactccggtgagggtggaacggcttctctggtgaggtagcgcctggtttcttgcttcgaggagctctacggggctctagggaagctagccgaggcacgagatcgagtggagatggatgggagtggtctggccgcggtggccgagtgctcgggtggctcggcaggcggcgtagagctcgctggagctaagtgctgggtctggggagtcaggtgaggtgtggagggagtatggccgaggctgcattgctcttataggtgcgggcgtggtgcatgggtgggcgtggattggtgcgagcacgtggcatggtttcttctactcctgttctaacgccgatagggcgcatatcttcgcgaatttgggcaagatcgcagtgtaagaattgttccctgatgcaagctttgtcatttatgtgtgggagccaaggggtttccggtagtgtacagtgagtagtcgtgtcagcaagtttccagtgtcaatctgctgcgtcctgaggcaaaactatgtcagaccatgtcaaacggttgagatttgcccccaaacttttccaggacgtgcctaaggtaatttggccaatttggtatttggactttatggatttgagttttggaaaatagagaacacggctgaactttgtgaaggggtcaaaat

SEQ ID NO: 82201 - DNA, 998 bp, Zea Mays
gtcattagaccggtccggtggtgcaatagatcgcatctgtacgaactcgccactctcaggtttttatttataaaaatcacaacagatgaggagagcaatgcatctattgtggtggagtctcaagcatctaaggtgcagcttaaacctagttctggtacatcagccccaaaaggcaatcaaccttgcagttcaaggcaagtagtaaagcacaaccaaggacaaacaagtctgtagttgtgatgttgtggagaacaccaggaggggtggtggatgagagactttcaggttcttatcagcctacaatcttggctagtgcaaaaactaaggaggacaaatactatgtggatatgcagtgggctttgttcttctatgaatgtggtgtgcctttcaatgctacagcagctaaacaatttcagattgcgattgaggccacaacatagtttgttttagggtataagcctctaacaccttactaactaggcgagccattgctacaagagattgtgaagtcgacaaatacaatgagggaggaacatgagcgtgcatgaaaatactatggttgtacactcatgtccgatggatggtttgatagaaagggatgtcatctgattaacttcttagtgaaacagtctggaagacacttactttttagagtctattgatgcatcaaatgaagtacatgatgcatacatgcttactgatttgctagagaaaaaagtcgatgagactggtagaggaaaggtggtacaagttgttactgataatggtgccaattacaaggttgtaggcaatcttctaatggagaggattcctacattattttgaagttcatgtgctgtacattacttggatctaatgttggaggacatatgaaacttgaatgattccaagaaaccaatcgcacttgcgatgcgtgtgtcaatttttatatatagacatgggagaatccttgctaccatgagggagaaaactggtggggatgatcttgtgaggtccgc

SEQ ID NO: 82202 - DNA, 2246 bp, Zea Mays
accgagcactactcctggagcttgctgggccccttgagcgtcgacgtggttaactcgtgctctgccctggtactgggtcctgctctgctgactgttggaggggggtgccttggaggcaggtgccgagggaatcttggggccattcaccgagttggagtaggtaggtccaggtgcctttaattgggggcagttattcttgaagtgactggggtctccacagtgccaacaggcatttgctggcggttggttgcttgcaaccgagggggcctgaaaggagctctgactctgctgactgtaacgtgatggagtgggtccagctggtctattgaagcttggtcccttgggtggaagcccaaaggatcgagctctctggtgacggtcttgctgctgagctcagagaacctggaatttcctcttaaggtgccctttttcttcctcttttgccctttccacttggatggctttgttggagaggtgcgagaagttgaggaaatcttggctggcgaggatggtcttaagctctggtcttagccctttcagaaaacgggccaccttcctggtctcggtgctgacatcgtcaggcgcgtaacgagccaattctgtgaacttgtgcacgtactcactgacagatcttccaccttgagttagttctcggaattcatcttccttgagttgaacgatcccctggggtacatggtgctcgcagaaagcagtttcgaattctacccaggtagcatccctgacggcctcgctgaaggtatcccaccatgctagggccatcccagaaagctgatgagcagccaattgaacacgctgattttcggggcatccgatggcttccagtttcctcttgatcatgcgcagccagtcatctgcatcgaggggattgctagaccccgcgaacgtgggaggcttgagtctcagaaattctcccatcctgtcctgtggtctcccaccacctgggtgctggttttccagacttctagtgaggatttcaatgagttgggactgattggctagaacttgggccaaatctagtggtagtttcggaggtgtggggaggtgggtctcactctcttctccgccagcttctccttctgctcttaggggaaaacctgctccaatcccggaggcggtaggcatggttttatccgaagccatctgccaggggaaaagagttactactatgcacatgccaaaattttttttcaaccagttactttattcattacacaagttcattacagcatacaactaccataagttcattacacgcgagtgctatctagggtactcccgaactccttctctaaagtgtccccaaattccttgagaaggtcatcaaggctggctagggacatttcctcggtgtcggacgagtttcttattctggtagggggtagggctggaggggcttcttccttctgctcagtctgacatccttggcttttggtcttcttgcggatttttcttgcgggggcgagcttcttcagcttcttgtcgtaatccatcttcagagtgcggtaggcctcacgggtgtcggtttcctcgccttctgctatctcgaggctctcttgaagggacaccttttcccttgtaagttccctgacttgttgctccaggctttccacccgggagtttaggtgagtgcagtgggaggcaaggtcatcatattggttatcaagggtgtggaggtatccagccatgtagacaatggtggggtcatcctcgatagggtctccccctgacagggcctgaagtcttttcctccaggcgggggtatttttgttgctgggtgggaagtagcggaggggggtttcaaagattactctgctgtagctttggcatagttgtcggagggctttttgggcaacattctggcaagtatctaggaagcggtatccggtgaaagtgacttggaaagaaggatggttcgggtagtttcggctttctcccaggtaaactgccatagagcacttctccattccattctcgagatactccttccagtcatattctggcttcttgcggattcccatgcgaagcgcacaacttcgcaatagatgtgggaacccctccatctctgagcagtaggatgtcctaatgaccagagagtcttccatctggaataggaaaagaagggtctgtcaatatcggggaaaaggagagaagatttttcttggggtaagaggtattttcttttaaggcaagttttaaggtcagggctacgacctacggccagtcct

SEQ ID NO: 82203 - DNA, 1249 bp, Zea Mays
agagtagaataaaattgtgcaatgacttcatcattccaatcgtattggaatgtcatgatggtcttcatcctttttctctcataggccctcaatgcctgtgtcatcccaggatcaccaatggcttcgcatccatcccaattaataaaacgctgatgcaggattggctggtgcttctttggaaggataactgaattatagaaatcaacatgaaggagggtccagaagcgattaccatcaatcctaacatcacgaacacggaatgtaggattttggaagcgcatgtcctgaagaagggcgaacccttcgctggcagtgaaatcaatgacctgttcattggcggaacgacgggcttgtgctctgtgaagcactaacccctggataatgggtgcattagcaggagggagatcaacatcatcatcttttcctccctcgtcatcgctggtagcctcccaggcctgtggattcgcagtgggacgagaccgaccggagggattccgtgtcgttcgtccatgggctccatgagacctagaggtctcaccacctggcaggacattgccagatccgcgccctcgcttggatctagaccgaggaggagtgtcttcattaatttctagggcgtcgtcgtctgagtcggactcaaccatagatggatttctatgacgcaccatccttaagattaaacagagaagaacacatggtgagagagatatttgatgtccaaggagtttaacgaacatgtttgaggaaagatacgtatgatattgagcatgcacttcaaccgttcatatgagcggtttagctacaatgaacaataccaacctacttaactcaaacaatgctcgagacaatgataacagtttaattgtgccatacacctaaactacacaatattcttgaaaggatactcaagataatcaagaacggtattggatcgagtcaaaaatagggaaaatgagacaatacctcgatctgtgaaatcgaccatgaaaatcccaatgaagagtggagagatgatggaggagcccgagggggtcaaatctccaacaatctccacaatgatttgatagtttgggagggatttggagtgtaggatgtgagagagggagagagaaaggtgagggcgtcggcggctgcaacaaatgagagagtgaagatagaaagtggggaggagaggagagaaaaggggcggcggcggctggtcaaactgaccaaaactggttcaaccggttcagaagccggttcaaccggt

SEQ ID NO: 82204 - DNA, 1402 bp, Zea Mays
gaaaatttagccaaattgcatgagtgaattgtccaaacataggttatggttgtaaggcacgtttttccaccatacagttgctaaaaagttggaatataaagaattcaaaacaatagatcaccttttaaacctcaaatgatgtttccatgatattgagggcattgtattcacatgagagggtattagagtacaactagtggatgaagacattgttgggctagctactgaccttttgtgataccaagtttcctataatcctctctattcaaggcatacctagatgttgtttatgtccactcaagtaaaacactgcacatcattatgccacgtcgtttctcaaaataaaataaaataaagaccatgggaaatttagaaaaattacgtgagagatctgtccaaacttaggttatagttgtatggcaccttttttccaccatacagttattaaaaggtttgaaatataaagattacaaaacaatagatcaccttttaaacctcaaatgacgattctatgatattgagggcattgtattcagacgagtgggtattagagtacaactagtggatgaagacgttattgggctagctaatgaccttttgtgatagcaggattcctataatcccctctatttaatgcatacctagatggtatttgtgtccactcaagtaaaacaccgcacgtcattatgccacatcgtttctcaaaataaaataaaggccatgggaaatttagcgaaattgcgtgagagaactttcctaacataggttaaggttgtaaggcacttttttccaccatacagttgcgaaaaagttggaatataaagaattcaaaaaatagatcaccttttaaacctcaaatgacgtttctatgatatttagggcattgtattcacatgagacggtattagagtacaactagtggatgaagacgttattgggctagcaaatgaccttttgtgaaagcaggattcctataatcccctctatttaacgcatacctagatggtatttgtgtccactcaagtaaaacaccgcacatcattatgccacatcgtttctcaaaataaaataaagaccatgggaaatttagccaaattgtgtgagagaactttccaaacatagattaaggttgtaaggcactttttcccaccatacgattgctaaaaagcaggaatataaaaaattcaaaacaatagatcaccttttaaactaaaaatgatgtttctgagatgtcaagggcactgtattcgtacgagagggtattagagtacaactagtggatgaagatgttattgggctagctaatgaccttttgtaatacccggtttcctataatcccctctattcaaggcatacctaaatggtgtttatgtccactcaagtataacaccatacatcatta

SEQ ID NO: 82205 - DNA, 544 bp, Zea Mays
ggaaacaattttcagttcatgttcaaatgcacagaatacagtcattttcacagaactgaccatctgaaaatctgaaaaatgaactgaaaactgaccatctgaaaatgaactgactgtattttcacaagttcatttacagtcattttcagttcattttcagactgactgtttctaatagaaatgacagttcatgttcagatggtcatgttcagatggtctagaactgatacatgaactagaaatgacagtaaatgaaaatgaccatctttacatgttcagatgtttagaattcagatttcagattacattttgtgtagaacatgaactaggcagttaacactattatgctagcagctaaagtagaatggagtaagctaaaccatagtcgaaattgtcaaatcgatctactattagtctactgcttgtctgtgcagatgtcaggaccaaatgcgcttggttacatctgaactgagagcattcagaactctgaactttagactcctggacagaggacagttgatgcttaaatacaaatgcactctgt

SEQ ID NO: 82206 - DNA, 583 bp, Zea Mays
ctcctccggcaagaacaagtccaagggaggatttgacaaggaggcgtttaagaaatatctccagaaggcaaagatcaagaagcgtgccttccttgcctcctcatcgacctcgaccatgactccgatgacgttgcttcttcctcgagcgatgaggagactgagaggtgggttgaggacaagctaaatgggttgtgcttcatcttcgacaccgtaggaggcctttgcaccatggcccttggtgatgatgtcatggacagcgacggttaggacattggtgacgactctgcttttgaggtatcacattctaccgatgatctcgccgctgagatagaagagctaaatgctacttttggcgaattaggacaagttgcttaggctttctgctagagagaggaaataatttaaattcgagtatgagagcacgcttagggagctcgagtcttctagagcttcagtagtggtatccgacgagactgaatgtgatgggtgcaccctacacatgtcaaacatcaccactttacaaaccaagtacgacaccttgctagatgagcatgacgagttgagatctaggtctagcttgtta

SEQ ID NO: 82207 - DNA, 781 bp, Zea Mays
atcatcaacttcactcgttcaggtcatgtacaagcggtcgtagatgccgatgaagagggtgatcttttggttgtttgtcgactatcgatccttcaactccttggggatatggtggctaggagcttatgtgatggagttgtacgtgttggctatttgcgtgcagaatgtcgatccccttttatcattggcatcaatgaggaccatttagtacattagcaccaacaaatatggacttaaaaaaactattttggatctagaaaagtgtggactttgaaaaaatatttgttcttatcagccttccatccactatcttggtctgatccttcaccgttggaattataaagcatgggagtaagcaaactggtttgaagcagaatcgctaccactagttgggggcactgtcgtggctgcatgagcatgaaatggggggtgaggaccatatgaaggaggatcaccatattcgggaggagcacaaaataggggaagaaatagaggaggagcaccataacatgaagaagtgccatatgggtatcgaggagggtatggataagtgagtggtggaagggagctttggtggtaggagcttcaataggaggatgaaaatcgtcggtggtaggatcatcattgggaggagaatgggcatctatgaaaggtgggtagagaaacataggaggatatggataaggaaacaagggtcgtcgagtgtggagatcgacgaagggcagaaacactctcctgacaattatgtacgagagaaagattgttggagaagacctccccg

SEQ ID NO: 82208 - DNA, 839 bp, Zea Mays
tcaatgggtttatatttgcaaaattttgttaagctgcagggagttatgatattttgaatttatgtgtcatgtttcgtcagtttctggtggcagatcatgtatgtcgccttacaagtcaaattaaaaatggtagatgaaaaaaaattgtttatcctttgaatacgaaagttgtagatcatgaagtttagatgattttacaatatttcattgttaccattgcttttatagtgagaggtagaaaaaaatgaacatttgtgctattgattgtcaattttctacttagtgattttttttcatggaagtttggtttagttgtggtgagctttgtcgcaatccatgttaattaagttgtatggtgggagggaatagtcgtagtggctgggatggttatcttgtttatgtatatgtggagcgtgggctggaacacagagatagcaaggaatgtttgaataggccagtatgtattgttgtgaagccacgttttcttgtattgacgtgattgcgtaagtatgaaatagttacgtcatgtgaagtctaggttgagatgcaatttgtctaagttattcgatagatatatgtatagtataattaaaaaaaagagagttcctatatgggatgatataatgtatagaatgtgcttggatgaatatgtgggcaggcctagcatgcttaaacagattcctgtttgcatgatgtgagattaggcttaaatggtttaaaaagttatcatattgcttctatacttatatttgttctaagtatctcgtaatgaagaacctaaagttattagtctttcgatgaacgcttaatcttagaagagtaatgaacctgaataaaat

SEQ ID NO: 82209 - DNA, 791 bp, Zea Mays
ggcgtatgtaacaccccaggtgttacttagagttttcactcaaggctacacaagtaaaacccatcattacatgtgacttaactggagtaaaggactccaaacatggaaatcaagaccctaagtaagtgcaacccatcttaaatgtcatgccttggcttatcatgcacatataatggggagaattgcccaaaccctaatgcaaacccctttggacaattggagcactataagtgagtatgaccaaaaggctataaaaaccacatgatcatgacttgggccaattataaaaattgtagtacacctaataccctactaaaaatagtaagaatgtgaccccaaaaaggttttagaaaaaccctaaaaggttcaccaaagggagaaacctaagagaaaaatcagaattcttctaagtccaaaaccaacccttttccaaagatcaaacatgttcaccccttttcaaacttcaaaactacttggctcaattgacaaagtggcacctaaagacctctagaacaccctggaaaagtttgaacccaaccctaagtcgtttgacatgacttggcacaagttttgtctcggtgtggacagctaggacaaagacaacttcccacccccatatctctcaaaccccgaccacatctacccttggaactcacatgaactaggtagccctaggtgcagggaagagatctctcacaggtcttagggcaagattcgcacgttttggccgctcagcagaggatagaacaagagcaaaaacaaacctacacgtgttcgacgtgcactgagct

SEQ ID NO: 82210 - DNA, 429 bp, Zea Mays
ttagagtctatctattcgccctttaatggtaaggctcgcgccctgatcaagggcgtaaacagactcatggttgtggcccccccgatcacgagaagcactatattaagagtatttaggggctagcaagaaggcaacggtttatgccttcatcaaaccctagccgccacagttccaaagaacttgatcccatttgtgcttctctagtgaccggaattgccctaatcatggacaggatggacacattcaagatgacaacgcgtcaatgtaggatgcaaccatgatggccaacatagtgctcagtattagactagaaggtgcgaatgttgccctagtaattcttagtcatttggggcaaatagaaccgttgaatgggggtaactacctcgtttggcgagaaaagatagacatggtgttagctctaactaagtg

SEQ ID NO: 82211 - DNA, 363 bp, Zea Mays
ttgccggctggggcgagtgtaggtgagggagagctgcgaagtctgtttgagggcgatgaattgaggataatgctgttcaactatagggagatgggtatcatcccgaaggttgagccgatgtaatgtgtgatgccctcgctgcatgtatgtaactataatttgtatgataaggctgcgtgccttcgctgatccggccgcgcccgtaggcgacttgtgcacttgatcttgagcatttattgtgttggtccggctgcacccgtagtcgatttttgcacggaggatccgtctgcacccttaggcgacttttgcacggatggtcttttgaagatgacttcgattttgcgcacttgttgtgctagtccg

SEQ ID NO: 82212 - DNA, 296 bp, Zea Mays
ggctgtaatgatggtatactggtctgtagcaaagtagtattatgtctgttgggtttgattatttacagtttgcaatttatcagcacacatgatgctagtaatagtagtattctggtaatatggaattatttcatctgtttcagtgaccgctgcactgtaccccattaatttatgcatgttcccttatgaaggacttatgttttaattcatgccgtcatggagttccaagtgctgcttaacatcaactagaattatccacatatgatagcttgttatgtttacatgttctttgtcgt

SEQ ID NO: 82213 - DNA, 528 bp, Zea Mays
cggggagcgggcgaggatggatgggagctgtgcggaggaaggggactgcgggcgcggattgaggcggcagaggcgtggatgcgaggtgggggcagagctgcggacgcgcggtgggaggaggcagaacatggcgcacggactgtgaacacctacactactgtcttaagaagtagtagagattattgtttattttcaaacactaagatacatatcatctagtggttagatctaaatttttagaggagtgcacgtgggttcgaatactctcttcggtgtggtagctgagtggacgggatcaggtgctgggcaggtgcagtagctggctgcgcggaccttgatgggtcgcacggtagtagctgagaggtgtggtaggtgcatgggtgggatcagatgctgggcaggtgcagtagctggctgcacgaactcttagggttcatggggtagtaactgaaaaagcgttgcgcgggcgctgtgcatggggcccatagggcacgacgtcgatgcataaggtgagttagtctaatcaaa

SEQ ID NO: 82214 - DNA, 683 bp, Zea Mays
tgacaatcctttttcttttcacccttcggtccctttgtcaagcttctcgtaatccgggtattcgaagtttaatgcatccatcacccggttcagtcttcgtttcggccgggtgccaaaggcagtagtcattaatttgtcttccttcttggtatagttgtcaagaatttcgttactcatggtttcgatcatatctagccactctttgcatggtttcttgagctgtttctcaaatttaaatcgataagggagccgaacaagttcgtacttctttccccctcctttttcttaggcattccttagccactagaggtcggaaatgttctatttgccaagtactcttgtacaagatctctagtgctgatttcggcagctaccactctgaattccacctcggctagctggcatggggagccaagttgcatgtggcacaagggccttgccatcccgaagcttaatttcattggactcatgatcatagtcatcaatttctcccttttcttctcgtccgcttttatgtagaaccattcacttgtccaatctgttggccacttagtacgatagccaattaccggggccttcgtatcttttcgatatgcgaatttgtagcaaccaaagttcttatgaagaccatccgctctggccttcgtctggtagtgcagctcgtgcacccggcagaaagcttc

SEQ ID NO: 82215 - DNA, 726 bp, Zea Mays
gtccaaattcatgcccatccactgcatcagagaaagaccaatgacgggaaggggcacctcagccccaccaccttgagcagcacccatagggacagcgccccgggaacacctccaatatcggcacctgagcacccgtggcctgagcagcaccagtaggagcaacgggaatggcttgcctcagaatggccaactcctgctgcatggcctgcatcgcggctaacattgccaccggactcatagcatccccactatgatcttgcaggctgccatgagcccttcgaggcggcatagctgcagccataggagtaaataaaaaatagcacaacatcaacttcaagtaaatcaaacgagcactaacaattcatagtatagcaatattaaagcaagcaacccatcctatatgtgcagtgtgccaatttatcaccattttcttgctaggacatacaacctatccctctaataccaactataacaccccaaggtccacaaacactatgggtgtcaccaaaattacccttcccacaaactgctataaaaaattcggcagcatctcccttgaaagttgcataaacgaggaaaccacggtgtataaacataatgcatgataagaataaacatacaaaacattattaattcagctagcaaaggaacgaccaccataatgaccagaacagattaaaccacttgcacacacttattaaaagagaccaacatcattgacccgaa

SEQ ID NO: 82216 - DNA, 464 bp, Zea Mays
cacccaccatgtctacttccacaaccaatcccataatgcctaccaagaagatcaacagtaggtccagctcctcccccactgacgaggctgtgaaggcaagttgaccttcacttgccaaatcccacatgaccctgcaaaggctgcttccatcaccatcaacaaaccaatcaccaacaaccaatcttcccctcgccacaaagatccactcaccccaagggaagtgttcacacatacagtttggagacccaagactccatgagcatccccattcaacccccagagccacccctactaggtcaaagtttggcccaacatatctaggaacctgccatcccattcccacgaacctgaagatacctttaggtcttcattcattccactagcccccattctagagcaccacaaatggttgcttccacctaagcccaccactcaggaagacaaagaaatcctccacaatagcg

SEQ ID NO: 82217 - DNA, 328 bp, Zea Mays
gcatcatgggttcatgagagtactcaaaagagagagcatagaggatgagctgacctgtatcgcgctggccacggcgaggtcgttttcacggtggcggaaacccggtttggggaaaatccgaaattggagctccctggtgaacgattgagggtgattcttggtggccgggtacttgactaccctacggagctcacggtggtttcaatttatactgatcgatcgcgagcacagcgaattcgagcggtggaatgtgatcggtatgaactgggtgagtcactggtggccgcgcaacacaacttttaccgtggcggcacctccgacggtcatc

SEQ ID NO: 82218 - DNA, 701 bp, Zea Mays
aagaaaaaggatggcaagtgtactagatgtgctagagtcagtaaaggcttcaagttctatttcttcagggaagattgccgaggctttgaaaatgcaaatcgaagccaaaacaaaactgaccgaagctgggccaggctagtgccgaagctgggccttcagagcctggtaagaaaataccctcagaaattggagaggaggtggcagaggaagaggctatagaacagtctttgcctgaaaaagctgtcgttcctactcccgaagcaccttccgaagaccttgattatgttattcgacatgcttcgggaaaaagattatctgaggaagaaatttttgaagctaaacactatgcctgagaactgaagtacccgaaaggggccttagtgtttaatggtacggatgaggatgacttcttgtattgcctcccagacaacaaagaattatccatctgccgggagatggccaggagtatgggttttccgaagctcgaagctggcctctgtgccatgacgaaggacaatcttgcggatagtcttgcatacaatagtctgaaggtacaaaagatgtgaattttaaagtttatggatcctgcattagagtcttttgttctcatgctagtccattcattctttcttgtagggcttaatacttagcaatgctttaagggcgcaaaagaatgctgaagacgagagctgcactattgc

SEQ ID NO: 82219 - DNA, 930 bp, Zea Mays
aagatggtaatggttccactcatagccatcatactcacgatccaaacgtctgggagtatcactgctcaacttctggtagtgccactatggctctgcatgaggatctctcacccgaagaggggtccgagttcggttagaccaagattgttgttgaatccatcacgatgattatgaggggagggactctaggacccatcatgtcgccgaccctaattctcctaagagtgttcgccgaccagggccatgtcatcggatgactcaacatcttgatccatcgacggagctgtaggagcatcagcactaacggccacatagggcatcatgttgttgattctcctcgcgtcttcatgcgcttgtacattatcctaaggaaatagtgggatgcatttgtctagaaggagtttgatcattatgatgttttcagacggggtggcatagacttggccaacgtggaaatcgaccaccttgatctggtcatgtgcatctcgaccatgtcattgtaactcttcatggttcttctatcttgttgtcactatatctgtgtcatcattggcatgttctgagggttgattgaaagggaaatggccttaaaccattttttatattgatttttgtgcttgatgactatcacaaccatttggactaactagtttgtctagtctttgattcacacgttcataagttcaacaatttattctctaattcgtaatcagctcagatccaaccaaataggggtaaaacatggaatagatggactatcaattgttctactctttggataagttttaaatgccccaaggaacttattcaacacttctagagaggttggaaagcttgaaatcaacatctcactattttggagctagtttgagcaaaagaaaaaatatgagttaaagaatcaaaatattcatggtccatgacttagactag

SEQ ID NO: 82220 - DNA, 417 bp, Zea Mays
tgaaaattgggtgtgagattcagtcagcaaagcacacggaggcgaggtcaacagcaagttgcagctggtccagttggattgctttacagttagttgttggggagatgaggaacagaagaaactattcattattcaagattcgacgaggaagcacaaggggttcacaaatgctatgctctctagctgtagctcattgctgcatacagctatgctcttcagcatccacaagaatcaaattaatacgcacacatactaatccaacaagatgttagttctttttttttttacatacagcaggctcatcatctacagggcatgagaagcaagagaggcgttgttttactggcagtggcagggtagcagtacaaatcaaagaatggtacagtacagggcaatggggggagagaataatttgtg

SEQ ID NO: 82221 - DNA, 399 bp, Zea Mays
gaatgaccaaaacacccccgctcgtggatctgcatagaacacgactccacagaaccaaagtagaggaagggtcaatcacgtcactgcaaaaatagtgcctgaggatgccgacgtagtgtatggtatgttccttgttaactccatacctgcatcagttttatttgactctagagcatcgcattcatttataactgagtcattcatggaaaagcataacttaccaaagcaccatcttaaggacgtgttacacattagttcaccaggaggtgacatgatgaaggatctaggacaccggcgagagagggtgaatagaaggttttgactaaaatcaaaaatactagggaaatttaatcaatataacaagagatataaattctctagtgataacaagtaaacaat

SEQ ID NO: 82222 - DNA, 402 bp, Zea Mays
aaagtatatcctcaggcaagaccaatctgacagaagctacgtcgtttcacgcctgacaagagagaagccattcatgcagaattagctcgcctagtgtcggcagggttcattagagaagtactgcatccagagtggctggcaaaccccgttcttgtactcaaaaagaataaaatcgattggcgcatgtgcgtcgactatactgatctcaataagcactgcccgaaggattccttcggactccctaggatagatcaggtagttgacttgactgtcggctgctctatgctctccttcctagattgctactccagatatcatcagattagtctggcgaaggaagacgaagagaagactgcattcatcacactgttcggagccttttgctatacctccatgtcattc

SEQ ID NO: 82223 - DNA, 520 bp, Zea Mays
catgtttgggcttattacatgaaacaacaacaatactagaaagcttagcaagcacgtcagggccaggatgaccaagacgttggtgccatagggacgcaggagtagtaacagcagcaaggccgtagtgtgtagtggctggaggagcacgcgcagtaggaagactgatggtgtacagggacccagagctgttgcacctaaggattgtgttcctagaactgagatccttcacagaaaggccaaacgggtcaaattccatggaacaattattatcagtcgtaaactgacggacagaaagaagatttttaatgatatcaggtgtaacaagaacattattaagataaaactggccagaaagcaccgtatctcctacagaggtgaccggcagactagacccgtttccaacaactatggatgaaggaatattagaagttggagaacgaaaacgggagatgttaccagagtccagggtcgtatggttggaggccccggagtcagcaatccactcggtgatggattgggg

SEQ ID NO: 82224 - DNA, 651 bp, Zea Mays
attgattcatgtttttaaagatcacattcatgttggcttaaacatgactaggtgctctataagtcatatcttttgaatcgttcattgggtagcctatcatttgagatatttaccatgattaatcctgtatgtgttcatgaataaacatgtttttctttgtaaatcatgctatacgtgtgtaatgagtaacctatgtgtgcaagcatgaaattttgtttagtttatgttcacatgattactctagtctggtattgtgtgaataccaaaatccatgttgtgcctctaatgcacccttttgagctataaggtgcatgatcaaaaggagccctcaattagtgacaactggtgctctcatggcaattcaggaaaaggcaaaggtatggagaatggaactatgcaatttcattgaatatcttgaagttccattgattgtgatcacaactatgttcttgcccctgaattggtagtatcttagcttaggtgctccttactttaaaatgttgtttcttctggtgtacctaaagaacctttttaattatgatgtgcttagacattgcgctttatatgcatgatcgtgttgtctttcaattagtatatgtggtgcaatgattgtcaagcatgaagcatgtctaggttgcttgtaaaatatta

SEQ ID NO: 82225 - DNA, 1354 bp, Zea Mays
gtaagtcaactctaatgctgaaatttgactgtcagtgaactgggatgaactatgaaatcgattttgcataggatccagtggatgtttgatcgaggttgttataaaaaaattaaagctggtttatagaagaacaactttgctacagacagattagtgggttgtcacacgaaaattagataatgaggccctgcaatttgctctgtcagaacgactaaattggatcgcgatggtacagtagactgaacaagatcatgggttcagtaaatctatcgttgtcagagatctccgcaccgtgattcacgctggccaccgcgattcatgcctgtgtgaagtggacaaccatggcgggtgaaaagatctagggtgaggagaaagtgggtctgagatggatcatcgtcttgcccacttgccacgcggtcagtgaaatatcaccacctatgttcgttgtgatcgcagtgagagacacgtagtcgcctgtatcaccgtactgtcgtgttcgtggcaagcaaccagttaccatccctaaaccattcccctctcgcgtgccacggtgagcaggccaccgtaggaatatccaggccacggtgaactcgatcccaatccaaaattcgtgataagctcagccgggatctataaattggaggcaccccctgctccccctccttgttacatgtccaacccacccccagctagcctctctcgtgcaccgtagcccctggtcaccggatttcccccaaattagtcatctgtgccgccgtgagacaccgtgtcgtggccagccacccacagatccgtcctcgtccttcttgtccgtgtttcaacaccctcgtgcgcttgtgatgctcatcggctcagccgattgaactctatcgcgctgtgtcattggcaacgggcccgggaaggtttcaaatccacgggtgctcgtaaaccgagctctaggatggagttcgtgcttaattttttatccccagtggagcaccaagagtggaattagatgtaagaacaaatttgagcagatattataagatagtgcgaccggtataggttcgtcggaccaaatcgtgctgtcgtccggggtcggggacctagtcatgcgaaggagaaagaaggggagggtttaagtgaacatgtcagtgagacatgtgaataggatgtggggattctttactggtttttcaaaaagccaaagggcctctgcacaaggtcgccagtgcgggcacgcgcacggacgtgtttccccgttcgcgggctattttgggccagatttgagcccatcactgttcatttcttttccttttctttttactgcaacattagaaaatttgtagaaaatagtagcaaattggtaaaatca

SEQ ID NO: 82226 - DNA, 649 bp, Zea Mays
ctaagatgtccatggctcggtcgagcgagaaaggtgactagagagcaagaaaaattcatcgccggagttggacgtcaccgtgaagccgccttgtgttgtggcccggtcttaccacaccaccatcctctgcaaggttagtcccaaagagttcgccatcatccccgcatttgtctgtgccgcatagtgttagaggtagatcaccaaggcgcgttggcgggagctccggccatggcgccgtcgcgacgagcaaggtcgtcgttgtcccggagtcatcgagtagggggggaggctctcgacgtcgatctggtattggacgactccgattagaagtcgtgtacccgcttcggtgggattgactggagccctcggaccaagttcatccagttaggattagatctcatctatttaaaatatgcatcatataatttggtggccataaacgtgtaccctttcgcgcgtttaatcgcaaccgtggatctaagatcttgccgccacatcgtttcataacccttctgccatggcttttatctaaaagagtccctcataaaacaataaaacaacccatagtcgggtgtagtagtaaagtattttacttaggtcccgaattcttgcgaatcagaccctgaagttacaagaaattctagtcgca

SEQ ID NO: 82227 - DNA, 316 bp, Zea Mays
gtccatcgctggaggccttgccatagtgaaggccacgatcacccgcgccagtgcacttctcctctctccggccgccagcacaacttctcaaaaattagccgccacctctctcggacactacaaattgaaggtgtcgctagctctgttaggttgtcatgaagccagagcacccgcccctgcctccgattagccaccatagcgccctaatttctttcttcccccaattcggttcttcgtgccaccgtgagccgtcgcgtcgtggaccgccatttccaggtccgttcataccctccttgctctcgtttcagcaccttgg

SEQ ID NO: 82228 - DNA, 529 bp, Zea Mays
ggtcgtagcgcctgccactggagtgggcaggtatacatctcgttcgcagttaatgcagaggtgcactatactccggaggtcgacattaggtttccccggtggtccatgttatgtgtcgtaggatatgtggcaggctgggccttgtcttgtgaggggagcagtggctggcaccagtcttccttgtgacagctccaatctgcccctcacctagtgacctacaaaaaaggtgtccctacacacagtcttgttatggtgctcaacgacatatctacaggttgccgttttcgaacgctttcaatcttctgaatttcgggaccttgccgatcagggtctcaggacctgttccttggtcaggataaggtttaggcctctaagggccaagccctaggttcaggaacaattgtcctagggtggcagagtgtcaggcttaagacataggatcaggctaagcagacatatggcttcggaccacccctgagaacgtgtacctttccccttggatctagccctacgcgacccgatccttacc

SEQ ID NO: 82229 - DNA, 405 bp, Zea Mays
cttggtgccatgaaatgttttgagataattaagcccaaagatgggctgtcagactacttaagtctaaattcagactgacagtgtgattgagcaatctttgagctaggaatcgagcatgatttagtgagtgtttgactatgattgctataacaagattgtagccggtttattaggctataactttgatacagagagttgattcagtcattacataaaatctggagaaaatcgatgccaaacatgctctgacaggctgactgaattagctacgtgatggtacagtgtactgatcaggacgccaactcagagatctcactgtcggcgagccgtgcgttcagattcgcgctcggatcagttcgatagcaccgggggtaagaaaatatcacgccgtggatacactccgac

SEQ ID NO: 82230 - DNA, 500 bp, Zea Mays
tcaggccttacctactgctatattgctttcgcttaccttttctccttatcttacagcatgtcagtagccagttcaggatggtgcgaatgaataatgtcacaccgtcagggggaggagatgaccaggaccccccttgcccctttagacagtacaagggaaagactgtctaccttgagcagcaagggggcaagaagaagcgacggttggacagagccacccctgcagcgattgtcgccatggcggcagcagattaggcagagcaggtaagtcaattgaggatttcttctgattagatcgccttccaagtctgtcgcctctcgtctcagactcgctcctccactgctcagtccactccgtcagacccagtctctactcctcctcccacctcgccagctcctgcagctcttgagccttccaccacacccgctgctaccaccacctccaccactccagcttccattgctcctgctcccgcttccgctccacctattcctccacct

SEQ ID NO: 82231 - DNA, 533 bp, Zea Mays
atcggggctcgggacagtgcggtttcgcggtgaatcgctcgccgtagcctgcgagccaccattcgccgtggcctcttcgtcccgttgacctccatcagcagtacgtgctctaatcaaattcgccatcaccccctctaggtttatcaccgaccaattttaggttaggggcgtccgggcatcggattgcgcgtccgccggcgaagctccgccgtgggtgggcggcactgctgtccaaaccgccgtggggagggagaagatctctggatcgtccatctgctgatggatggtcgcgattagaatagggaaaggaagcgtggtagccgtcgatcgtgtgtcggatggcggagattaggttcagtttaataaaatctgagctgttgcttccagatcgggcggtgtccggtgcgtaccgtttcggtgttggctcgttgtaatctgggccgtgagatttggatcgcatggcctagatatcaccataccccttcgaccgtgtgaaagttgcagaaaggcccccgatctttatccaaaccaac

SEQ ID NO: 82232 - DNA, 280 bp, Zea Mays
ctcacggaagctttgcgcgatcaacacagcgtgtgattgttcagagtttgatggtatgtatgagcaaatcatcatcgtccaacgcacagcagagggctccacagaatgaaacaagagtaggaaaagaaaatcagagtagagagagaaatctaaactagccggagaaccaatgcggcggcggcgggggcacggtggatcggggtggagatcgcgttatatatagagagcgcctcaggaggcgccgagggggcattcaagcccaagcaactgtggaacttcg

SEQ ID NO: 82233 - DNA, 416 bp, Zea Mays
tgatgatgtttaagatcatgtcatgatcgggtaccaaaaacttggaaatcctggttatctctctagcgggcctgtggtacactttagcttttcatagctctgtcggctgctctccagtcaaagcctctacggctatgtgttgaattgatctccaccggttggcccaacggctaactggatctgtctaacccaaagcaaggttggtaggctcagcctataaataaaatagagaggtgggggttgacggctcagacagtagtcatctacgtttcatcacctcaaaccctaaacggatctagaggaaggctgtcagcaacatgaagctcaccaccgacgaaatcgcttcaccgaccgtcgctaccctagcgcagaccttgacccacgaacgtgacagtgggagatcaagttccgctgcg

SEQ ID NO: 82234 - DNA, 277 bp, Zea Mays
gaaaaggatggtcaacgtactggatgtgctagagacgataaaaacttcaagctctactccagggaaaactgccgaagctttaaaaacgcagactgagacaaaactaacgaaagccgaagctgcaaagagccaggccgagaccgaagctggaccttcagagcccgccaaggaaaaatccttagaaatcagagaaaaggaggcggaaaaagaagctacaaaacaaattctgcctgaaaaaactgccactcctactctcgaagcatcttccgaagttctc

SEQ ID NO: 82235 - DNA, 298 bp, Zea Mays
tctattgctatctctttggtaggaacaacatcacaagattccaaagaaataatctgcaattttaaggtactattctaaaaaacagaatatatgtaaagaggtaaaacttacaagttaactaattattactcttaccttccaactaaatggtgcacaagcaaaattggacaggtagtctcagtacataaccaactaccaacaaaatttcaagtgctaatacttgtgaacaaagcaggaaaatatgcgtttatagcttaaactacatagcttggcagggtagccagccactgacctggtt

SEQ ID NO: 82236 - DNA, 943 bp, Zea Mays
cttggttaaaaatgagttcaaacacaagcaatttcatcttgataatatatttatccattatcacattacccgtgtgttcatggaccgggctcttgactgcgacgcgtatggttgggcatttttcaccgaaatcggacaaccgaaccaaacttttggtgtttggtttcggtttgatttttgtgaacttaggtatacggtatcaattttaccctaaaaccgaaccgaactaccgaaaaacccaatcaaatctagctttaggttgatcaactatgaatattgaactatcgaaaaactgaaccgaatctagcttcaggttgatcaactacgaatattgatgtaatgttatgtttgaactcataactatgtcatttgttgcttgcctgtatattcgttttttcggtttaaaccaaaaaccgaaccgaaaaaacgaacaccgaacagctcggtttttatttccgcaacataccgtttgttcgaagattttgaaaatcgaagtttataaaaccgaaaaaaactgccgaactttcaggttaaccgaatgcttagccctacgcgtaggtcttctgcattgctgaccagacatagggtgtttcgtagatggctacctgacacatgacttcttgagtcatggacgtcataaggaagcgaaggacttgctactgaagcgcgaatatcagatgcatcaaagatgatgtcgtcgatcatctttccattctgcttgaaggagatctcgtcgggcgctatagccgtgtcatctaggtagccttgtagctgcacacctctaaggatgggcagaacttgtgctttccagagcgcgaagttggtcttattgagctttacaatgacgcttttccctaggagaggtatcggtagtgcagagctggatgacaccatgggaacttgtcgctggtaaggttgatgttgacttgttcttgattaaaag

SEQ ID NO: 82237 - DNA, 379 bp, Zea Mays
gcccgctcgggcggatcattccatctgttacgttctgagacccctctaatttccgcaccgagcagatgcagttcgaggtgatgaacttccctggagccgacttgcaggctggatcggacgctcctaaggctggttccgatacattcaaatccgcaacgttttcgcttgtcgacgacgctcctaagggtcccaatcgacgacgctgacccctccaagcacgttcgaattggggcaacactccccgacaaacaagaaagcacccttgtcgatttccttcgggctaatcgcgacgttttcgcttgtaagcccgcggatatgccggggatccctagggaggtcgccgaacactccctgaatatccaacctatggccaggccag

SEQ ID NO: 82238 - DNA, 448 bp, Zea Mays
ccctttcacttatgtcagtagatggtggagttgtacatattggttgtttgttcctagaatgttgattccttattactattgctatcaatagggtccactgaatgtagtagccacgtgtggacctaaaaatatgaagttaaaaattgtcacggtctcatggacctaaaaatatgtgaactttgagaaaaaatgtgtacttactagcctttcatcatgtatcttcatccatttccttcaccattggaattgtggagcatcggagtaagtagattgattcaaagtggcatcgttgtcgttgcttgggggcattgtcgtggttgcatgaggacgaaatatatgaggaacactatatgaaggaggagcactaaacgaggcacataatggtggaggagcactatacgatccatatgaaagagcaccatatggatatctatatgggtatggaggt

SEQ ID NO: 82239 - DNA, 375 bp, Zea Mays
gagtaagatcctctgactttttgtgggtgcacaatgtaacaaaattaaagctggttaattaagcttcaactttgatacagggtgatggttgggtcaccacataaaatatggagcaaattgaccccaaacatgctctgtcacgctcttcaaacagagattccaatggtacagtagactgaacgagatcgcaggttcagtgcaccttgccgccagcgatccctaagcctggattcacgccagtgaggtgatttgtgctcaccggtgccccaataatgtctcgcggtgaaaagatttccaccacggatgagcataagacactgttccgtccagccgccgtgtccgctctgccccgatcgctttaaatcaaccctcacc

SEQ ID NO: 82240 - DNA, 945 bp, Zea Mays
gacgcattgggtgccactccaaacgccattactgcggccgcgtcgattccacagaagccgagggggtggtcgcatcgggtgtcacaccaaccaccggttccacgccagccaccgggaccacaacattagtttggcacgatccaaggcgcgtatgcactggcccgcgaaaggcgacgacagccgcattggaaccggacgccactggggtcgaagaagatggatgatccggcagcctacacctctgccgcctatggaggtcatgatcacgatcatcatcagcagggctgtccggcgggggcggtggaggggcttgctctgcaggggaaaatctgccatggacaccgaaatagcaatgagatagatcaaggtgcggattgtcaccgtatcatcaccattagctaacaacggttcaacgatgtggaggtccatggacatcggaatgagctcaggccgagcgcaccaggcagacagcttgaaggagtggaaatcaaggtgttcttccgtatcacggtgcagttcctgtaacatgcaaaattcaccgaggagctgttccgccgtcgcagcctcccaggtgtggcccgatattccatgcagctccacgtcgatcaggaatgggagggcgccaccgccgccgatgagagcttgacgagtccaccttctgatgtgtaagcgaatggaaggggcgatgaaaggccacccgtcgttatagacacgacatgccagttctttcgtaggaagaaggacaatgaagctattcaaagtcggcgcaacacgtcaaatgtcgagcgcctcccccttgagattaaatcgtagagagagcgcgtcggagacttccgcggcgcagccgacttcattctggccaacaacggagacgataagggcacgccgaagctcatctgccgaacgagtgatactagccgaccgtctgatgacccgcattggcct

SEQ ID NO: 82241 - DNA, 569 bp, Zea Mays
ttaaagtcttaccacaatatttatcaaactacatcgtaatatgggttgttggggactgagaatagtagacccaagcactcaggagcagggtgacaagtggcaaacagatgacacaacaaaacggatgcctgggagcgcaaatgtcttatcaagcatgtcccgtccaactacagaacgaggtatttatagggcaactagggggttggtggcctaagtacgtctgtgccctgttacctgatacattctttgaatatgttgtacaacggggtaattacaaggcaggataccttctaccttagttacaccagattttctaccttgccgaaggctgataggcgagcccattctgatttgcctgagagtgggctcaccttgactgggtcatggacgacgctcccatgtcatcactcccgtcgatgagggagcaaggttaatgcatccttcttccagagaagacccccatgaagcctttgcatgagggacccttcgctggatgattcattcgtagcccttgcccggccagggtgcaggtgggtcagcccttcacaggaggaggcccttgtccttct

SEQ ID NO: 82242 - DNA, 768 bp, Zea Mays
cagaaaaatgcatttttggtgtccgccaaggcaagatacttggctacctcgtatcgcatagaggaacttaagacaaccctagcaaaatccaggctatcatggacatggcaccgtcacaatcaacaaaagacatacattggctgacaggcagattggttgcactgaacagattcatctcgcgattcgccgagtgaagccttcctttccttaaaacgttgtgcggtgcaaaggacttcacctggggcctagaacaagtcgcagccttcgagtctttgaaataatatctgtctgatctggcaacattaactagcctagacccagtcttacccctgctactctacattgcaacatcactcagcgcagtcagcgtagccttggtccaagaaaggagcagagagggcaagacacaccaatgcctggtatattttgtctccgaagtacttaccacctccaaatgcaacatgacagagttagaaaaatagcgtacaccgtcatcatggcttctcgtaagctaagacattattttgtggcacacaaagtacgaagtcacttcagattggggtcttggagagttattcagaaaaccagaggcgtctgccagaatagctaaatgggccactgaactctctggttacaacatcacctccgaacccaggacaacaatcaaatcccaggtttcatgcagaaactatctggaccatccactgcgatggagcatggtgtcacgttggcaccggcgctatagcaatcattacatcgcccaccgaa

SEQ ID NO: 82243 - DNA, 419 bp, Zea Mays
cctcgattctgggatgtcggcggcgatcaacctccttccaagccatggccttgccatccctcactgcacctctaccatccatgagagcttgggcgtagcttctgctgggagacgtaaaaatctggaatggcggctggtgcaggtgtagctgggaggaatgaacagaggatttaggtcggacgtatacacgcagacgaagcgcgtacatccccgggttacgagcagaccacgttttagaaagaaggcctctagaatgatagcccggcccattctggttaagccccttccgtaattgtgccaattcaaattgagtaaattttggaaaaggcggaagtgtaggatctgactgcgaagaaggaagaaccgtcaccttgcttgcccgattctccaaatctccagcccgctcaatgatgtcgcca

SEQ ID NO: 82244 - DNA, 836 bp, Zea Mays
ggaattattactggcatcaattaaagccaaaccagcaccaccaccactaagtggctttgatgcagcctgggtctgcaaactgtcatcagccaaattcagcccgccagcaccatccgtcataccagcaagtatcgaacagcttggaaccagatcgtaaaggctgctaagattcgcatcctcgccaacattttctggtgtctgatcaagatcaccaggtgagagatcggtaaggccaatttttggttccagaacgagtgcttcggcagacttaggtactagcagagcatactgagcagaacaagaggaggaagttggcatcaaagttgtcggctcattgaaagtcgaatcttcagactcaacacctgttcctatcgttgagccataattgttctgattcccttgcagaaccaccatccccatgactaaagctccatcgtttggcttattatgatcactctgtaaggaattatcccgcatgaccgtgtcttctgctacctcctccattggaaaagaatcatttccatgcttttcagaataatcttcattctctccttgttccttatcatctccgtcccgataatccatgttatccttgtcaatccatctcccatctttgagaaccttatcaactttgaagaagatctcgtaaagcccttcaccaactattatttctgcagactccggaatatgattcacatccgtcactgccaccaaaatacggaccacccccattttccgagtgtatcgcatatccactttctgtgttgcacccaaaatagatcctactgcccacaaaggaagaaaggagcggatctcaaaaggaaccccataaacat

SEQ ID NO: 82245 - DNA, 386 bp, Zea Mays
gtcagaacatggtgagttggatccgtgtgaagtgcctggtaatgacgagagagttgtcggaattttagataaagttgatggtaaaatggattatgtgcatgccaatcaagattttgaagaatttgattgcgaagagatgttgcgccatatggaaccagaaatgttgagttttgtgggatcgccgaaagggctatctaaaatggagggaccggaaagtgcctcaaaagaacctttatatgatgaatcaaagggttgtgacaaagagtttactgcactacgtacagttctagaacttcttaagttgaaggctagcgctggatggtctgatactagcttcacagatcttttgaattttctgtcccaattactaccaaaacccaacaaac

SEQ ID NO: 82246 - DNA, 596 bp, Zea Mays
gggatattgaagccaataatatatatggtgttttttatgtaatcgttgtgcactaataatttgtcaaatattttgtatgccgttgcaacacacgggcccctaactagtcacatttagggctggtcggtttagggtagacgattagcgaacctgacccgatcaagtgatatggtcgacctagtcatccgactagtcgacgactagacccgataaatcgctcgactagggtttgtacgctgtaaaaaattgtgggccttttttggcgggcggtccggctacaggagctgaactgtcagaggcaccgttgtgatatacccttgcacacgacggtttgtttccaatctcctcgatttctggcgtcttcatctccttctttcttcaattttggttctctatctctaatttcttctcttctcctgttaccgttctttgtcctcctggctcctgggttttgatcactagcgtcgacgcattgcacaaggctcctgcctcctggtaagttgatcaccacacatggattcagggacagtcgacgtattcaaaaaccttggccccagttcgtcttcctcgacacgcaacgcaaggccccagatcac

SEQ ID NO: 82247 - DNA, 288 bp, Zea Mays
tgaaaacacgagctcgatggtctggtccttgtgaaagtgtgtaaagcaggtcacttgtcttcccttgttgatttagtttgctgatctgcagccaggaaaatatgtttaagttatttgcaaatataatactaagcagtagtttgtggatgccattacaaaaaacaaattactcacaacccaccttacgctcgaaccagcctacaaattgttccttgtgccttcgatcaacattctgtgtacttaaattttttagttcgtccatatgctcgctacaatattttaaaagag

SEQ ID NO: 82248 - DNA, 538 bp, Zea Mays
gttcctaagtctctatgtgcgagagtgtgcatccatactagtgttcgaatgctagaactagcggtgtgggtgttccattgctcatccccctgattgtgggttgctctcgtccttgtatagactaaggcaggagtggccctattacaagtgtctgaggtcgggtgaagcagatgaggatcaggtgttgttatatagttagttgtccatcggggtttctgtcagtcaagcgaagtcgtggataacatctactccttatgtaaggataatgtagccatgcgtggggcatcttgaagcctttcgttacactttgtcacgtcctgcaaagggttgtccatcatcctttgttgatttctcagtgagggagtggttgagatggtgccagtatccatatcttgatggacagtctccatgacctaacatacttgctcccgtgccatcattcgggttccacactgtgtcagagtttgactcgcacgttcccacgtccatagtagctgaaacggtacgaacctgagaatctcacgcctgagtggtcgag

SEQ ID NO: 82249 - DNA, 720 bp, Zea Mays
agcggggcggctggcaatggcgtggctcatgcatcaccaccacctcgagctccagcgtcgatggttcttaatcatcaagtgttatggttagggttaagggttaaggttttgggtttagggttatgcttaagagttatggttaagggttaagggttagggttagggttagggttagtgtatttgttaatatgaatttaattattgcttatgttaatatgtgttaatatgtatttaattattgcttatgtatatatatagctcaatgagttctccgatcaaggaccaaggattagggcccaaccacatggataagagtgttgctcaagaacaatccagtgatgaaggatatgaaacgcctaacaacctttgtcctaccatagatagggtcgcttgccatgagttgcaacgtgaccctacttatgatccacgagagtgtgaggtaaagtacacatccttaatttcatgtgtgtacctagctgatttcgcaatgtctattacacatgcatgattcttgtgcattttattacatgaatatgatcggaggccttgtctcaatattatgcgatactcgatgaagccgcgataggataccaagacgtaatggaacaaacccaagatgcactagaacaggccgagacaaccaccaagagatcaaggaaaaggaagtaaaggatcggaaaactggtgacagaggactgaacaagtttcctaacaacacct

SEQ ID NO: 82250 - DNA, 485 bp, Zea Mays
atttattcacaggccctgccggtggggcgccgtgtcgctgacaaaactgtttacagattacagtgcgcttgctgcaccggcttactagactaccccacacctaataaccgtcagtgacagcctgataggtgggcgcagccttgtgggtccaggatgtcagtgacgttacccggtagtggtggcctggtgggagttactctggttttacacggcgggtttgtgctggatttggatgtgagttggttaacctttttgaattgcggctccatttggaatcatgatttgttagggtcccatttggggggtggagaggttgagatcaggggtgggggagccctgctctgccctcctcgtcccccaccactttcgctgctgagttttgtctctctttcgtagcctttcctttaccccttatatgacttctgctcttttttagatgagctgtggtgcagcatcgaccagtgagtgccttctctcccaccccc

SEQ ID NO: 82251 - DNA, 1283 bp, Zea Mays
atcctatttatagcctcaagaggggctgcctggagtattggagttggctacgtactgtgaggatgcgtcgtcgtgccctgtagaccgtatggtctggagtatggtcttgtacttgttgttgacttgtgcccacttgatttctgctaagagctgaggccagggccgagggctcggtcacgtacccgagcccccctggcgagggggatgcccaaatcgtagtggttgactcagtactaagtatgggaaaatcccttaagtagtctgtcagctctgcggtatccgatgacgttgggcgccttttcgttgcggatatcaaggtcggggccaggctcgggtgaggtagaggtcacgaccgagcccgttctgggattcgaagacgtgcacgccatagttgaaggagtggcctcctgtgggatttgtggggagcaggtagccgaggtcgggcttgggcgaggcagagtttatcccaaggccgagttttacttcgggtgaggtagagtttgcgcccgagggcttgcctatactcttgtcgtattgtacgtcccatcgggagttggtagacggcatgtgggaacagtggtcacatgcgtaaacatagttggtgaagcttgacatgaccacgatcttgttgctcctgtacacctacaaccctgcgtggggtaggtatgcacattgaatgctactgtcctcggagaacttcggctgagtcttgccctcagtttgtcttgcttacccgagatgggctcgggcgaggaggagacctccattctggggagaggggacctcggtcgggacaaggattctgccgagagcacatcctgtccgagggcaagctcaggcgaggcagagttataatgacctctgtggggggcctcaggctaagcgtgacttatgatccattttctttggggaacgtgctttgatggtggtctatgggtcaagcgtgctttatgggtgtaatctaggtacccctaattactatacctaacagtagcccctgagtttgttttgtcacttgtttggaggctcttctattctccatgcgggtatgctacttaaccctaagaagtggaagatttgttttcgatgggtgcgcgtggaccctaccgtgggcttaatcttcgaacccctgaacagtatgtgacctctcccttcttccttcgcgaggaaggaagtccgagggggcgtcctcttcctgctgactgtggattaatggaaaaagggagagagaaacacacacaccttttgacggccatacccggggaggggaagcgacgcttgct

SEQ ID NO: 82252 - DNA, 788 bp, Zea Mays
cgcgttgacgccagatacgctagagcttgtactcacgtggattgtggtgagttgttcaaggccctgaagtcatattatgcacaaccttcctaaaaagttttgtttggctttatattttatttgattgtgttgtgtggcatcatatatttatatatatcgccaagtgaccatacacaactgtatcaagctctattagtgcttggaaatctgggaaattaaattgacatacaattaaacacaaataagttatttttctgctctctcctcatgcataaagttttacccgaagtaacccgaagatatataatataatgcatgaaagcctttttggcatagaagacatcacaaattaggattctattagtaagcaaaaggctttaccaaataatttaagactataaatctcagccatatattgctcaaccagatgttagcacattgctctctttgtcgctaaatgacatgaagcaaactatgagataaaaaaggacatgtaatcgccagcaacacgaagttgcgagtatactgagatgttattttgagaaaattttcactatgttggtgtgaaaaccatagtgtgttcccgtcgaaccattttactcgttctatctagaacctctatgcttgtgtcgcatacatctctcggaattgtaaatacttatagtcactgaattgactcgggatagtcctttgacaagtttggtatacactgtaagctaaatggtaaaggtcggtcctgaatggacacatacctggggtttatgtagccgaactacaccgaattccac

SEQ ID NO: 82253 - DNA, 457 bp, Zea Mays
gtgaatggactaggccacataaaagatccaaacatccatagtgtacccaaccaattcaaaggatacatatcatccactttctcacgtaaactccatcattcttctaaatccatcgcatcctcttcatcacaaaacaaaaaaagtaggcctagatatcaaaaccccactattggttggtcacttgccccaaatattatcacacacaatccactgacaccatgccctagagtttgtctttgatgagtacatgggctgatgagcacattgcccactggtttcatcatggatggtaaaactggcccccctcccttgagcatggatggaccaagccaactggtccctcatctacttgatgtacaaggcatagatcaacacatgtgtaagctaatgagttagaccttgttgttaccaaataggaaacatattggtaaactgatcatgatatgatatggtgttc

SEQ ID NO: 82254 - DNA, 533 bp, Zea Mays
aaaaaaaagagccggtagtatgggcggatctagaaaaaaaacgtgtagaagatctgaccgagaaaaagaagatgagaagacagcacagcgattcacaaccatacggagcaacaagacaaatgcaccggccctagctaggctcgaacccactcataccaaaaggaagaaaaagaaaaaggaaaagatggcagaaccataaaaaacctgtgtagaatatctggctgaaaaagatggtgaaatcacaattctcaataccgcgagccacagccacacgaagcaacgagacaaatccaccagctcctcgttcggtcgttccaacacacgtactaacatgaaaacgaagaaaaaagagagagaagacgatgcgttttgacttgtgctccaaaggccccacacaccgcttgacaacgagaaaatgaaggcagatggggtatgtccgagcacaatgtaccactcactgctgaggaataaatagctcattagtacgtatcgattgagaaccgacaacaatatcaggttcctaactgataccg

SEQ ID NO: 82255 - DNA, 443 bp, Zea Mays
gtaagcaccatctggcgatcaccgatgggatcaccgaattcggcgagagacgcagccatggtctccaacttgcggcaaaagtcggtgatcgtcatggagtcttggcggaggttgcggaactgtgtttccaggagaagggcacgagactccttctggccgaggaattcgtcctcaaggtagcaccacgcctcgcgtgcggggcgcgggcggatcatgagagactgctggaggtcaccggagaccgtggagaaaatccatgaaaagacgacgcaatccgtctggacccaaacagggcgatcgggatgtgtcgcgtcgtcgaggacgtgcggggtaagagcgtacttgccgagcacggtgaggaacatgccgcgccatttggtgtaggtgttggtagccttgtcgaggatgatggggatcagcgccttgacgttgacgacggcggt

SEQ ID NO: 82256 - DNA, 368 bp, Zea Mays
acggtttagtgcaattggttgagggattagtgtcgccgagggtggaattaggtgtcagccaagctagagcgccggtcattgcgtatcttggccggtacaggctcgccggagacttgctcgtcgccatccacattcgtggacccggcgctgtgaagaaagagaaatgcaggggcctaactgcgaatgtcagagacacatgggaatagtgcgtagggttctttaccggttatttgaatgaccagcgtcctctgcgcgaaatggacatcgagggcgcgggcgcgcgcgtggttctcccgtctgcaggctgacttgggctgaattgagcccaacactattcattgtttctctttttctttttgctgactgat

SEQ ID NO: 82257 - DNA, 1027 bp, Zea Mays
gtcaccgcaagaggcagcctagactgccctcgcgtgcgacatgtccaagcaaaatccgcctaagggtgcagccgggcatgcacaataagtgagcaacatcacccatagggtgcaaagtccgagcaaaagccgcctaagggtgcagccgggcatgcacaataagtgtgcgacatcacctatagggtgcgaagtcttttctataagacacgtccgagcaaaagccacctaagggtgtagccgggcatgcacaataagtgcgcgacatcacccacagggtgcaaagtcttttctataagacacgtccgagcaaaagcagcctaagggtacagccgggcaagcacaataagtgtgcgacatcacccacagggtgcgaagttttttctataagacacgtccaagcaaaagtcacctaagggtgcagccaagcatgcacaataagtgtgcgacatcacccacatggtgcaaagtcttttctataagacacgtccgagcgaaagccgtctaagggtacagccgggcatgcataataagtgcacgacatcacccatagggtgcgaagtatttgctataagacacgtccgagcaaaaggcgcctaagggtgcagccgggcacgcgccagaagcgcacgacatcaaccgcgggaagcgaagtcctcatcctaagtgccgcgccaacacgattacaaaccgagacaatcttataataaatgcagcacgcgatatgccatcgtattttagatacataaaacaaagggcccatcggccacatcatacaagtaatacaaatcatattttgccgccctccctctctactgcgaagcgggggagggcaacgttttcactcactatcgcaacacgagagcgaggccagcaaaaatgctacatcggctccaccttcggaataagacccgcctctaggaaattaaacaacatcatcttcaactcttcgccctcaaatagattccacaagtccccctccccaatacacgtcctagccatcgaagacagtagatcgcgttgggtatcc

SEQ ID NO: 82258 - DNA, 655 bp, Zea Mays
ctccggccactgttctcaccggccgtcgtgtcccgccgtggtcaatcgcgctggcatcaccggcgttcgccgttatctagcctggctacattcctcaacgctttacctcgtcgcggtgagtcaccataaaccgctttatagtcctggctcgtcgtcggtgagtctgccacggtgaaggccacgactcacagcgccagtgactcagtccccctctcgaccgccagtgcaatttgtacaaattgaacaccaccgctcaagcacactataaattgagcacaccgacgggtccgtagggtaatcaagcaccaagccaccaagccgtgcctctaattgatcaccagagctcgccaattccagatttcccccaaatctgttctccgccaccgtgaaagaggccttgccttggctagcttgtctcaggtctgctcatgccatctgctctttcgtttcagtgtccttgtgtgtccctgatgctccccgaccccgccaattaggctaggaccccttagatcgctgggaacacgtcgtgctgtccattgtgcccgctgtcaccgtggatagagcgagttagagctccgctagtgaaattaattgaggggaaactcttgttagggcttgaattaggtctcagccgaagtagagcaccggtcatcga

SEQ ID NO: 82259 - DNA, 314 bp, Zea Mays
gccgagtcgagcaaattaacgagatacgaatttttcatccagccttaaacgtaactagcagcagctcgtaggcgatggctggttgggagtttttgccagccctaaacgtaactagcagcagctcgtaggcgatggctggttgggagtttttgccgcccctggtgcactcgagctgccctaatcggaagcataccgcagacctgcaggccgcagtgctgaatctacatgtatgtagccatgattacggattcttgtgagaatgtgagtagagtactctattactctacctaactaatctttggaggttgttgttc

SEQ ID NO: 82260 - DNA, 411 bp, Zea Mays
agaccgccctcttcctcggcgagacgacgacgacgacgagtgccgtggaaccaaaacgtgctgcgcttgcctgcttgtcggacgacggaaaggcgaggaaggcaatggtcgtcatcctcagtggagggggaggtggaggctgcgtcgtcccgtcccatggatcctccattcctccgtgatcctgcctttttgacctttgtttattcaccctgaatgaaatggatgggctcacaggagtgcgtcgtccgtggacggaatagaccagcatgtgctagataggtgattacctgtgttgtttaatgcgtaattaagctcgtggaaaccggtctgacttgactttggggagctagctgggctcctccgtcgtcatcgacatcagacggcggaaattttttggaaaggggctacgtg

SEQ ID NO: 82261 - DNA, 593 bp, Zea Mays
gaaaaatcatagggagacagagcggcgtgattttctttccaagagctaagccaggcacgcacagcagaggaaaaaaaaccagggctgcggcagtagatagagttgagaagattttttattaaagtttctttttctcttttttttaccgaaaagcacagatatttttgaatccagatttttagcgatataatcaacgggtcgaataattaggatcgacagcaacaattggacaggatttaatttgacgaatactctgaaatatgaatttttaccagttacctattatccgaagatttggatctggacgagaaacgacagaccgaaataagctgatttcggcatccttaatttgctctgcgtaatttgactaaaattagccgaaacaatatcggctagtgtatattcggatcaggaacaaaagcaaacagaccgaatcaagcaacatcagctttgatattataggtcgtgtttgagtcgatcgaaatcagaccaaccttcgtccgttaatgacctgaatgctttagtactctgcccggcacaaccggctggggaccaaactccatcatccctttcgcgcatgatttcacagttac

SEQ ID NO: 82262 - DNA, 439 bp, Zea Mays
gccgaagcttttgaggagattttgagtgatcaaggggacgtctgcgcattctcgggcgcaagaggagttgcagctgtcctggagaaggcggggtgcgatcatgttaaaacttggcccttgctgaagctgatttctccgtggacgacacgaaggatccctcggccgaggcaagttttatgggcagaaagttcttcactgatatctgggaaaacggcagccgagaaatgactcataaaataatgaagaagagcgaaaaagatatccacgactctcgagaagtagcgaagaaagctgagaaagctgtagaacttgagaaacggataggtattgcttattggcttgtagcttcgtcgtttgtttttcgagacttcgaactaattgattttttctatcgcagctgagctacctcctccactggagccgttcgaccctctagccg

SEQ ID NO: 82263 - DNA, 935 bp, Zea Mays
atcggagcgcgattttcacgtcgtaatttaggccacattcgtcgttacgaaatagattgatgatgtacgataaaatttgtacccatttacaatgtttggttcacgttttacgctgaaatttgaccaagccaaaatccatgcacgatcgaacatgatcaattttcacgccgtaattttcggaccccattcgctgttacgaaacaggtttataatttacgtaaatttcgtattcatttacgctgttttagctcacgttttacgccggaatctgccctagccagaacctgcgcacaattgggtgcacgcgattttcacgccgtaattttgggcttcgtttgctgttacaaaacagatatatgatttacgctaaatttcgtacttatttacgttgttttagctcacgttttatgctgcaatccgcccgagcagaacccgtgaactgcgactgtaaattaaaatttatttccttctactaatgctctcaaaccgtaactgtccctttatttacgcgattatgcagcacatctttccttatatcaaaccggtcaagatttatataatgcatggtttatgctatcatattacacatcgttatgcagtcgtaaacggtttatttacacatcattatgcagtcattaaccgccgccaatatcacagatacgaacgtggacgagcggctgtaaatgagaatttgtttcctcccgtaactgtgcctttatttacatgaacgtggagcacgtctttccttatctcaaaccggtggatatttaaatgttgcatggtttacactatcatgttacacaacgttatgcagtcataaacggtgtacacatggtaatattcgttctcatgattcgtggcccaaaagattccttctatgcatgatttatgcacatttctacatatatttatacgtgtgtatatcgcatgtcacg

SEQ ID NO: 82264 - DNA, 512 bp, Zea Mays
cccaaatctccctctcctccgttcttgttccaccgcgaagaaccccccctgtggccagcagtcctcgggtgagtacctattcaattgttccatgtttttgcttgctgttagcctcctattgcccccagtatcaaccaatcgaattgcggccgaagcctttcaccagaacgcgtgcttgctctgaagaacaccgccgtgaccccccccctcaccgtcgacccgctcttcgggtcttgttctacccaaatcaaagaatgtccgtagaccatggttcacctgtgaacctttccccagcctcaattcggtcgtcctccccgtcggttagtcggaacacgctcatcctcctgcccatccgcccggtcaccgtaaaccgattgattcaacgtccactaggtgaaattgatagaggggaaatggtcggggtagctccaaggttgtgtccgccgctcgggagcgccggtcttggccccctccggctggtttagctcgctggagctaagctttccgcacgg

SEQ ID NO: 82265 - DNA, 1189 bp, Zea Mays
gcagagatttaacttatctgtgtttcattgtattttgatttaatttcccagatttaatatagttgttatggccacttggcgtcatatataaatatacgatgccacacaacacaatcaaacaaaatatagagtgaaaacaaaattatttacgaaggttgcgcataatgtgactttagaggcttgaacgacacaccacaatctacgcgagtacaaactctagcgttctggcgtcaacgtgtgtgtggccatcagggcaacaacaatacaacaagcctttataacaagcgcaattgtggctcggtagtcggggtacacaataagtccacacaacgtgcacaacaggtgcaactgtggcttgatgatcacgacagacggacagtgcctgcagggcatacgaaaaatgtgtgactcgacgatggcggtccgactcaacaggagcggtccaattaagcgagactgcgacatagccatcacatgacgcagtcaatgcttagccaatgccataactcagtcaattaacaacgcagtctgttcggcatgtctgagtacccattatacaatttaatcgttcaacgtgagtccgaaagctcaaagcgacacaaatacttagagcaatttgatttatgcgtagtataaccttcacatgtatttcaaataattttctgctatttactacaggaaataaagcagaaaataataccgtaattaatacacgaacataaacacatcgagtgcaaaaaggtatttcctcattttaaagcatgtattattttttgctaattatttactacaggaaataattaaataaggtagaaattataacataaaacatgctctattctatttgttatttataacagtaagtaaatagaatagataaattataccaaacttgattaatccaaaaaggttttttttggaaaatcgtaaggccctgagttataaacctattattttacttttctcaaccaacaagctgccatagctctttttatttctttgaaccgctctgcatgcacgcacgtctgttcacggccatgcagcctcgcgaccagggagaagccccatggaaaatcggtctcgatcttatctagccaaattgcagaggaaagaaatggtccacgcggaggacccgctcgtgggaaacgcccacgccgtctccatctctcgttggctaacggtacagcag

SEQ ID NO: 82266 - DNA, 1586 bp, Zea Mays
tgatggttttgaaacttctttctattttgcgaggcatagagatcgccctaagatgagtagtcgtaagcatgcttatgctggatcgagtgattgtgagcatgtcgcaccgccttaagtcattgccgacttaagtcgattgctccgttagtagggtatagtgatcaccctgagttaagtaagcgtgagcatgttgcaccgtcttaagtcatcgccgacttaagccgattgctccgttagtagggtatagtggtcgccctgagttaagtaagcgtgagcatgttgcactgtcttaagtcatcgccgacttaagtcgattgctccgttagtagggtatagtggtcaccctgagttaagtaagcgtgagcatgttgcaccgtcttaagtcatctccgacttaagtcgattgctccgttagtagggtatagtggtcaccctgagttaagtaagcgtgagcatgttgcaccgccttaagtcatttgccgacttaagccgattgctccgttagtaggttatagtggtcaccctgagtcgagtaagcatgcagattgacaataaacagttcgagtgcctttgagaatgaagtctttttattgatgatgtattttccaattacagaatacaatgctgccccgatagcttttgaaatctagctaggggtaaaacttcctgagatgctctatattccatgaattccctatttctgtgccatccatttgagtaagtcgatatgaaccaggccgcgtgacttctgctactatgaatggtccttcccatagtggcgacaatttgtgtcgtccttcccctgttagaattcggcgaaggaccaagtctcccactgtgaaagatcgatgtcatatggctttatcatgatagcgcctcagagtttgctggtacctagctgactgaattactgtactcaatcgttcttcttccaatatatcaatatccccagtctagtggcttctgcttcggctatgttttcaaaaatcagcctcggtgccccaaacttgagatcagctggtagcactgcctccgaaccatagaccataaagaagggagtgtttccatgcaaagctcggctaggttgagttattaggctccagaccacatacgacaactctctgatccagtttcctgcgaacttttcattcttgtcgaagactttctttctgagtgcttccaatatcattccattagctctttctacctgaccgttggctcttgggtgtgctactgatgcatatttgatctggatgcttctttgttcgcagaaatcaaagaactctgaactagtgaaattggatctcaggttagttatgatgctattcggtattccgaacctgaatattatatcttgtatgaattccactgccttagctgaagtcagggaagcaatgggtttgtactctatccatttagtgaatttgtcaatagcaactagtacatgagtgtatcctccttgagctttcttgaagggtccaatcatgtccagtccccagcatgcaaatggccatgttacgggtatggtttgcagttgctgtgctggtaaatgctgctgttttgataagtatttgcaagcttcacac

SEQ ID NO: 82267 - DNA, 716 bp, Zea Mays
aaaaaattgagataaagtacgatcttgatcttgttgatgctttgagtggcctctcttaatattgaagcccttctttctgacatagtattgtacatctcataagctttatccggcatagtattgtgcataggatggaatgaaaaccttcctcacgagtgtccatcgagatgagtaacctttctctcgatgaggggatgatgatggtgagctatcccttgatggaaaattttcctttgatatccctagtgtgaacgagatcaaagtgacataatctataccactatataatcagtggcagagcatgaccaggaaataaggcatggcagtggagtcgctcatgtcatctctccgtcagcttctagctcgttcctggcccaagagctcgtccacggacatggctaccgcaagcatcaacgccgccgccacctcccaacctgccctccatgacctgcaccctgtatttgtcctatgctaatcgcctaatcgtccatggaccaatagcacacatgggatggcgtggacgtgtggtgccatggcggacaacagcatacatgttgccgctcgagacactctgactagagtcggagatgccgaaacgaactagggttgtgttgatgtgtcgaattcaggtactgcgagtgccacatctcgccataccgagcgttaccccactgtatataatccactagtttaaattgtgcaaaaccctcccaaac

SEQ ID NO: 82268 - DNA, 526 bp, Zea Mays
ctcgaagggacgggcacactcggggaggccatggcagtcgatcaggtcggcagtggcggcgaaataagcgcaggtacaggtcaccatcgttggtgaaagggtcgatgctgcgttgtgagatggtgttggcaccgaggtgggcgagtacgccggtgaggagggcgccgatgaagagccaaaaggcatcagtgttgtcggagaagaaactcttgcactatgaaaacataggtcactagaacaggatcgccgttgaggaggatgtggtacatgctttgataccacttgttatggcccttggccaccggcataggaggcaggagcaccaggacatgagcgctcaggcctcgccgatgctagagaaaacaacgactcaaggactattatgtttctattctattcttttctcctcttctgttacaaccgacaccctcaagtactctggataacaggttggccaacatatgcccacacacatccatatgctggcccaacatatggcccacacacacatctctatctagccgaa

SEQ ID NO: 82269 - DNA, 556 bp, Zea Mays
cttagggtgactactataccctactaacgaaacaattagcttaagtcagaaacgccttaagtcggtgcgacatgcccatacttgcatacttgagagtgactacaataccctattaagagagtaattagcttaagtcggaaaaactttaagtcgacacagcatgctcacgcttacatgaactctataatgcatcgtcttgattagaaataccaactcaatgaaaagtgtttttccgttcgaatggataaaaatccgtcttcattacacaatcactgtgcagaagcgttctcgcaggagaccttgccagaaggatcattagagggagaaggtttactcacaccagcggacgcagcaagaatgtcagcaacaatgtcctcaagcaccacaacaccaggtcttttcatcaggattcgaccagctcggatagctttgtccatcgctttatcacacattgctttcatgataccacgatcatcctccaaaaccctaatgttgcgatgagaaattttcgactcctgtgaaacaagtttcttcgaggcacgcaactctccgatgg

SEQ ID NO: 82270 - DNA, 893 bp, Zea Mays
tggtacgttgcatgctttaataaattaattttaaacatgtcactcaatttttataaaattagatagctaatttatgtagatgtcaccatataacatgtaaataaattagctatttaattgtgcaaaaagatgaatgatatattcctagttgacccttttgttgttagtatgattgttatgtcaagagatgagcaaacaggaagaccaaccaatttgcttgtccaccaaaagccagtggagaaattttccatacggttcagcccaagaaacatacaataccgatgacaggagaatcgctaagaggactaaactctaatttagcaagttgttaaatatatattaggaacaaaaataatcttagtctacaacaattttcaatttttaggttattaaatatttttaaattaaatttatcatttttagtttaaatcatttttgtgcacgagtgctttaatggcaaacaaagagattttcatggtgtgattggtgagcaaaacaggctattgggagtgcgaaacaactccctaagtttatggactaaatagggatatttagtaagttagtacatttagggacctcattcaaaaaactattggagcatgattttttgttactaagcctatctgtagtacaaatttctccacatcattactctataccactatttacagtctagtcaacaatattccttactctatatcacggtcctctgcattcatattcctttatatattccttctatatcaactaccacatattatattcatcttagtctatctatcatattctttttcaagctaccatatataaattgtgtgtgaacaaagccggtagcgaaggaaatagcttacgctttgtatgggagccataccggaacaggtagcacacaccac

SEQ ID NO: 82271 - DNA, 596 bp, Zea Mays
agtgactcttgcagctgctcccagaaacatgctacgaacggtgctcctctgtctgacacaatagtccttggtattccatgcaaacgaactatctagtcaacatagatctcagcatacttctctgccctgtgggtggtatgtactggcaagaaatgagctatcttggtcaacctatccacaatgacccaaatagaatcgtggtgtcgggatgtgttgggtaaacccacaataaaatccatgcaaatatcctcccatttccaatgtggtacgggaagaggctgtaaggtaccggctaccttcaaatgactagctttgactcttcggtaagcgtcacattcagatacatacttagcaatttccctcttcattctggtccaccagtacaaggatctgagatcatgatacatcttgttactgccggggtgcatggaaaatttggaaagatgagcttcatccaatatttttcttttgagttcggaatttttaggaacaaccaatcggtcttcaaaccatagaactcccctgctgtcctatcgaaagcattggtacttatccaccttttgcttgagcttatccttgatgacttgaacaccctt

SEQ ID NO: 82272 - DNA, 281 bp, Zea Mays
tgctaacctagcgcatagccctgtgtcatgcttgggcatggacctcgacagtaggttctagcacgagaatgacttgataaggaggtcggcaccaaaaaagacatgctactctagtaacacgtaaagatctcattccaaaactcacaaaccctataagacaactccaaacccccctcgaccgtgtttcacacgactcttgttctctcccactccaattctaaatcccataagcactcaatgttcccctctcattcattatgcaccgcttctatcatcctcac

SEQ ID NO: 82273 - DNA, 650 bp, Zea Mays
ggcaaagacaagtttaataacacccttcggcacatactgctttgtgcgaatgcccgaaggcttaaaaacgtcggctccaccttctcaaggctaccaaaagcattctagagagcaagatgggtcgcaacaatttcacctacgtcgatgacatagtcatcgcaagcaagaataaagaagacaatctctaagacctcacagaaacattcgccaacatgcgtgaagccagactttgcttaaacccccaaaagtgcatattcgacattcggcaaggcaagatacttggctatctagtatcccatagaggcatagaagcaaacccaagtaagatatagaccataatggacatggctccacctcagtcgacccgagatgtccaatgattgacaggaagactcgcagcgttcaacagatttatctcacggtccaccgagcggtgtctccctttcatgaaaatgttgcgcggagccaaggactttgcctggggccgtaagcaggctgcagccttcgaatcactaatgcagtacttgtatgaactcataactctaactagctcagaccctgcattacaactcatgctttacgttgcagcatcgcccaacgcggtcagcgcaactctggtacaagaaaggtgcaaaaatggcaggccccag

SEQ ID NO: 82274 - DNA, 354 bp, Zea Mays
gataatacgaacagcattgggattttattgaacgaactcaaaacaagatcagctaagatcgcaacaacaaactacaccaatagtgcgtaagaagtgatcctaagagtatatctcacccaccaacaaatctcaacaaccgaaacacaagaactcaatggttcttctcaaattttcaagagaagggaaggaaaggactcaagaacacaagacttaaaaaaattcagcatgggaacaaactgagattgaagccaatcgaaagttttgggtcgtactggcgacacttcctcggattaaacttgcagatcgcaagcacagtcgactgttataaaatcactgcggatccctcggctcaac

SEQ ID NO: 82275 - DNA, 545 bp, Zea Mays
gaaaaatctgcaggaaagcaattacttaagagatgttctacataaagaactgactgcacatatgtttttatcaacaaagatgttgtacagtaactgagtattcacaatatcaatagataagaaaggataataaagagtagagacaaaaaaggattataggcagtcattgaaatagaaaagggaggatgatgaataagggggaaatgtgttataggtagatcaatctctaatccttagaaagtggtattgacagaagttacctactgaagtgcatattacaagcatgaattggcaagatgtaatgttaagagaagatacatgatcctattctccttcaaatggatattatacttgtataataaatacgatccagatacaagtgttcgccatggattaaaaaacaagaaatatgtgtgcttatgtagtgacaatatatcatatatcaaagaggtaaggacactcaaagggagtatcgcaaaccatagttttagttattctaaaatgcttgcaagttattttaaataaccagttctacctactcaaac

SEQ ID NO: 82276 - DNA, 766 bp, Zea Mays
gtagctgcttgaatacatggcggagccgagggggtgctcaatttatagttaccatcgtcggtggtgtccaattttacgaggttgtgctggtggccggagggaaacagggatactggtgcatgggatgggtggctttcaccgtggcgcttccttcggcgatcaccggatcccataacacaactaattgcgacgtggtacagagtctggacacgcggcgcacgacagtgatcaaccaatggcagcgagctcttatccgatcgaccgatgatcaagggggtacgacgggcttagccgcaaccgagctcgagtcgatcctatgccaagatttttacttgcccgtgcctatctgctgaccacggtgcatgaatcgcgacgagcaatcaaccatcccagcgacggatcactggcgacgaggaggggggggggtgaaccgcgatctgtttcaatttggggtgcactgtaccatggaatgcttcgtcagtgcgcctgacagccaggttttagggtcaatttttctctaaattttctatagcaactcacctaaagctctgcagcaaagttgtagaccaatgattcagctacaatcttgccataacaactatagccaaattcccaatcgatcatgcttgatttcctatccaaagatgactcagtaccactgatagtctgaatttcagacatcaaataacctgacagcccaattttggttttaattatctcccaattcttcataacaacaatgcttaacctcttaaacaaagttgtt

SEQ ID NO: 82277 - DNA, 539 bp, Zea Mays
catggaaggtgatgcaccttactgtctctctagagggcatgacaaccatcggtgtagctagtggctgtaaatctgatttagaaggcaattgcaactgtaaatacttgtatcctgcagtttcttcacttctcctacatttatcccccgaaaaatcactgcaccaaacagatacatgtgccacaaattagtttgaacacaagaattatatatcctgaaaactcaaattaatagcattgcatgacacaaatggaaaataaaacaatgtggatactgcttcctaaaaaatacaaaacagtagcacataatgattaaaacggtctaaccgcgcaacagtcgtcgtggaagccatgacggctgccagtccccacttcatctctccccccctgcggcgtgtagtggttggcaaagtcgattgaagcgtatcatgtgtcgtcgatgactggcagactcccaagctaaaatagaaccatgttcaattcgtgccccagacctgccctgtgttcggatttgggcaagctgaaggggacgcctagtgggag

SEQ ID NO: 82278 - DNA, 604 bp, Zea Mays
aggataaacatgcatgcgttcatgatttgggaagtaaatgcgtggtgattgcgatttggagattagtggtttacgattcatatgagttggtcggtgtgcgaatatacttgtgaatctgtgtgtttataaaaatgttgtagtatatgttgtatctcggattgcggcgataataggcaagctgacgtgtatgttatttagcggctatgtcgttgctctagttagccgaattgttcgatgacttggttaagctcgtaatcacagtgaattgcttgttgtggtctaaatgtgtatggttatggtcgcgtatgaaaagtagtagtgttcatgtgatgtctaagttaaaatgcaaattagtgtgtgaagggcgcatcgatacatgtatatgtaccgggttcgattattgtggtggatgtgtttgttaattgtgtgtggtgattctagcgtacaaaataactcggataaaaattggtaagttgtcttgttggttctcacttggttattttaactctaacaaatgtcaaagtgttagaataattcaagtctctagaacgcgacaatttttgaagtaaatagaagctgaattttattagttgctgttttgggc

SEQ ID NO: 82279 - DNA, 623 bp, Zea Mays
tttccgccattgctatcattttccccccaattttgatctttagtattttctgaggagatatgatctttagtattttctgaactcgaaaaacttgcctggctcttagggttgatgcatatacatgtgttgctattgcttgcttgctccttgtcgacgatggtacagatagcagtagcactgctgtacacaagcagcaagcaacacccacctccttgcattgactattgcatttttatgaaacctaaagtcgtgtttccatctaattgtaggcccatttggctctagtctccggtctctctctccactctaactgcaggccggcccgcgtctcctcgaccatcaccaccttgacggtctccgtgaaggtatttttcttctttctttgatgcatattattagaattagtttgttagttaaaatttgatgcatgattttgggtagttgttacaattgatgcataatttcttgttcattgtaaattaatcgatgttaggttaaatattttttatgtctagtgatatttcctaaaagaagaagggttaatgatgtttatttacacattttttatttatgtttgtatgcttaatgatgtttatttacacatttttatttatgtttgtatg

SEQ ID NO: 82280 - DNA, 778 bp, Zea Mays
taggggcctatgtgcaaaaattgtgcacatttggactaaagtgtaaaaactataatgttaaagcatataaaatcacatggttcacatttgggaagatttacaagccaaaccctaagttttgggtttatttgcaaaaaataccaagtgaactttatattaactaagtctgaaatcagagttttggctcaactttggagctctgtagttttcaaatttgtgagaatttgccctaggtcaccacatcaaatttgtagaccaaacaaaggagaacaactttgcttaagagtgtaagcatagttgttaagaagaaattggagaaaatcatgcctaaagtatggttgtcaggctagttccactctgaaattcagactttcagtgtaacagagccatctttgggtttgaattcaaccttgatctagtgctcaaatgagttcaatccctatagtcgaagtattgttggtttgtagctctacaattttgctgcagagatctggatgtgttgccacagaaatttggaagaaatctggccctaaactatggctgtcaggcttactgaaggagcactcgccatggtacaatgtcgtgtatggatcagaccgccagcgcggcaacctcaccgccaacgacctatccgcgctgcgatttgcgccggggtcaggatgatcgggcggcgagcatctccgtgcgaagatctttttgctccgggtaagaccgccgtggtggagggcactaactctggctgccacgcggccatccctcctcccggccgtgtccgatc

SEQ ID NO: 82281 - DNA, 624 bp, Zea Mays
ccaccgtgattcgcgttcggatcaactggataacgctcagggttgagaaagtatcatcgccgtggatatactccgaccattaaactactccggccaccgtaccgagcttgccacggtcgcttcagatgagctcgctggtgacagctgcttcacggccttgcgccatgtacctgggcacattcaccgcatcaccgtgactcactttgggcgtctgatcatcgccggtgagggctgtcacggtagatgccacgaattccttgcgccagtgacctcccactcctccgaccgccgcgcgtcatcgtcgtccgattcaatggccaccgctcttgcctactataaattgaggccaccgtgagctccgtagggtagccaagcaccaagccacccaaattgtgccctcaatcgatcatcagagagcttcaatattgaatttcccccaaatctctcaagaacgccgcagaaaagacctcgccgtggccagcccaattcaggtccaatctcgcccgctgcattcttgttttagcacccttgcttgctcttgatgctcaccgacctgtccaattgagctagaacctcatagatcaccgggaacgcgctggattgcccgtggtgcttgcgatcacc

SEQ ID NO: 82282 - DNA, 506 bp, Zea Mays
aaagcttgtgccggcagatgagaagggcaaaaggtgccatggaaactaaggagacaaagaaagttaaaaaagattacatgacattgggagaaggtccttttgagtcagaaattgggggtagacgatacggagttcaccactggaccggaaaagcaatgactacaaaagaaatagctgaagcccttgggttcactgaacaactaggataccctttgggatcaatgatttttggtggagggccaaatgattatttgtattgctgtctggtagcctacagaccgatgtgtgccgctatatggtggacaacataggtttccctaaactcgaagttatgttatcaacgatgcctttcgaacacttttcagactgccttgcttgtacagatttgaaggtatagtttacggtgcttatactacttcgggttgttaaattattcactggtttgaagattatttccttttgactttacatgggctaatattgagcaaggcattaaagaatcaaaa

SEQ ID NO: 82283 - DNA, 865 bp, Zea Mays
atcaattcgatgagctaaatgatgattggctagattgcattgaggcaactagggacgacttgcttggtgcctacacaagggccgaggatgatgccctgacagtggcctttggagggcgaggcaagaagagattgaacagagtctttgatgttattggtttcgtgtacccagactattgttatccctcacgaaagcagggaaagaagagaaaggttgttgcttcggctatttctaccacgccgaagggaaaaaggttaaagttttgacgcaccggcccaggtacattgaaacggccaaagtgtcgaagcttgctgaggggccttcttttgctgttgagccagagtaccccgctcttgttgaagccaagggagaatcggccaaagtaccaaaaccgatggtgatagcagaacaggagaaaacggagacggccaaagtgccgaagcgacctgccgaaactaaggagaaaacagccgaaaaaccagaaccaaggaggtcggcagagcaaccaaaaaccctgagcccgccacaagagccggagctaccgaaggtgtccaaaattcctgcaataactccaaaaaggaggagaatggacagcgtagtagacgttgttatggaatcttcaaaaatacaaacccctgcttcagcgcctgatagaaagggtgaaatcccaaagaaatctagcgaagctggtttgtcactagatactgccgaagctgggccatcaactcccatcaaggcatatgcttcagaacctactcctttgaccttggaagaagaaaatgcacccaagaaagctaagcctcctgctcccgaagtgcttgctgaagagctagactttatcgtgcgacatgcttctgggaagcag

SEQ ID NO: 82284 - DNA, 730 bp, Zea Mays
caacactatcatagcaacacaaattctaagaattacacacattcaccacaaatatcacaatccactacaattccttacaaatacatcacaatccaccacaatacctcacaaatccattataatacatcacaatataccacatacataataatccatcatagttcatagcaaatctattgcaacacgccaaattcaccacaagagtcaaatcatcacatataggagtcgtttgagttgtgaccactatctccagaagcaaacaaattgtttacgaagtcgtctatcaggtttggtgtctgaaagaaagaagaatacatcaataacaacaatgttaagttggcaaatattcaaatgaattgtttatcaaactaacctcccgtgtattagctccctcccatccaaaagttcctcctagtgttggtaccaccggtggttacgtgttgtgatccacaaccatcgatccctaccaaatcaagttaagccaagatttgaaggttaatacaaacaacaagtctagactaaattgaaattgaacgatgcaccggagttggttcatagtaaattctagttcataatacatccgagtagagatacttatcgatgcacctgagctgaaggaggtgttggagcatgtaatccccaccgaggtgtcgatggctgaaattgagggaaaacgaatgcttgcggcggggcggcaacagacttggcagcctcctatggcggcggctcg

SEQ ID NO: 82285 - DNA, 344 bp, Zea Mays
ggagtattctcagtgaagcgaaacaagtgcataagtcgtctcagttttttgttggtgccaaattgtaaactgaaagtgcaaatatttagaatgatcaaatattacttgtttcaagtatgactgtaatgcagtacagtacatgtttggatcattctttttacataatataacatgactaccgtgatttatttggacaattccgtgcatcatgatgtcctgtttgcttgcaactgctgcagacgcgagtagtcctaccagccttcatctccttgtttttcttgattcttttgcatctcccttttgcctttagatcattaggtggatgtatgctaacttcattagga

SEQ ID NO: 82286 - DNA, 1044 bp, Zea Mays
ttgtcccaacatgggtgcacacgacgttaaaagcaatgatagaagcttgagcttcgaaatttatataacaagtcagtctcttatacccgaagctggtgtggatgggagtctaaattatatctttaatattctctctcagtttcaaatcgttcttcatgtagaaccattccttcgcccatgtgtttggccatttgctttagtatgcaagggccgagaacatagcacctttctggtaagcaaagttatagcacccaaagttgttatgaagacccctagttaccttcgtctggaaatgtaactcatggatttggcaaaaagcttcggtattgggttcaataccctggcttcaaacaacctaaataaaaattcctagcttcactatggcatttggggtaagttgatgaaggtatatgtcaaatcttttcaaaatagccactatcaccttgtgcaagggaaatctaagcccgacctttaaaaagctttgaaatacaacgactccatcttccttaggcttcggcactaaatcttctccccttagctgaacccaatcaacattgccaatataatcaaacttagtaagtacctcaatgtgccctcctttgatcttggattttccgaagtccatgtgactcggcattgcagagtgaataaccaaaacaagggacatttcagtagacatagtcgtcttctagctctaaaactctctgtaatcaggaacactgagcaatacaatcacgcaagcacataggacatagggtattacgtgtttcagtggatcgaacatttataactctctgtgtttcgtcgtgccctacacaaactatcgagttgcaatctactccaccatccacctcgaaagcattatgtggtatatcccatagtgcgtcatcagtaccaaacctcgacagtggtctcctggcccaataaccaggatgggagccatggacactctactcccatggtaggcacacgatctgctaccataggacccaaggtagttgttgaggtttcactttatggtgtggctttgacgttctgaagtag

SEQ ID NO: 82287 - DNA, 868 bp, Zea Mays
tagggaagccatcaatggtcggccgctctcccggcctataaaagggagggtttggcccaggttgaggggttgtttcttttctgatggacgcacccacaaggacgaccccagacgaggggacgcccagaaggaccgacgaacatgaggaggacctagaagccgaagactcgccgctgagccgagacttagctagggctccactttgaaaccaggagggtttggcccaggttgaggggttgtttcttttctgatggacgcacccacaaggacgaccccagacgaggggacgcccagaaggaccgacgaacaggaggaggacctagaagccggagactcgccgctgagccgagacttagctagggctccactttgaaaccagctccaccacgaataagagacttgggaacctttcctctctctcgcccgtttgtaactcctactacgagctttgatcatcaatggtgccggtagcgtaagccaccatccgaagcccgaaacatgcacaataaatttacttgtcgaagtaagattcgaaacaccgataatagtgtatagaaattacatttttctagacacagtatatttctatacgttaattgcccggtactatatactgaggtacgctggtgacatgtctcaagttagggcggtagtgcatactccatccatttcattattctaaaagaaaataacaacctaaattctgacaagttaagttattaaagttcgatcaaatttaatatttttctctaaataaatttattatttgataacatttatttgatatcataaatttgctatctttacagatttaattaaaactaaagttgtttgatttctcttgaggcgagaatatgctacccctctg

SEQ ID NO: 82288 - DNA, 614 bp, Zea Mays
gatggtgaaaattagttgagatactgcccttcttgtccatttcacactcttgctttctggctcacaggtggccatgctactccattttccatggaccttttgtgacctcctactagaaaatgaatagcttccataaaaaagaatagcatgtaattgtgttgttccaacctccacgcttatctacgaagaaagtgagatagccaatttctgtaggatatgttctcgcaatcagtcaaggacctagcttggaacgaactcgcgcactaatcaaaggcgtaaacttttcgtggttgtggccctcgattgtaggcactataaaaaccaaggcgggggacactgaagcaaatgcttatgtgcttctgctaaaccctagctgccacataccagaaaggatctaatcttctatatagcacttcaaaggacaaaagtgcctaatttatccatggcgcctatagatcctaacagttctatgttgtcgaccatcgatgctccaccccaaggttcaaatgctcaaggaggaggaggagagacggctcaggacggaggcactcaactcctagacctgtctatgaccccgactgccactgtgaccgctctccacctcgatcccaaag

SEQ ID NO: 82289 - DNA, 280 bp, Zea Mays
ttgccacttccattctcaactacaaagcttggagtttgttgtacatatacttcttctatcaaatctccatttaggaaagctgatttaacatcaatgtgatgcactttccatccacttttagctgctagagctatgatcaaccttactgtctcaattctagctactggagcaaaaacttcctcaaagtccacccctcacgttgggcatatcccttggccaccagccttgctttgtgcttgacaatgttgccttcagggtccttctttaccttgaaaaccca

SEQ ID NO: 82290 - DNA, 829 bp, Zea Mays
cgagtaccctcaggctttcgggtgtccactattttgttaacctcttgtccaatcgtaacagccatcggttcagcatgggccgagtcagaagattctccagccaacatattgagtacaacatctatttctgcatcatccggacttgccagcatcgaaaagtgaacttgcctctcatcattgggaagatcacgaagaggagcaaccagagcttcaacgtcttcaggagagggtcgcactctaagacccaaaccactatcactagcaggagggttgaacacaaaattgaaaaatgacctaggaggtggcagattccaagcagaataagcaacatgagcaccaacatttgatacctttcccctcagaatcatatctagtcggctcaccagatcctcagtaggaattttcctgttggtgacccgagttgagtcagtaataccactgtacaagtaatctggatacgccctgtctttcgaaggctgaatattcttgaaaacaaagtcagcaaccacagcttcggcagtcagacctctctccttcagcagacagatttcagccagcagaaccctagcttccgtcacctccaaggcagtgggagactcaacccaactcggagtgcgtacatctggctatctccccgaccgagggggaggaacttgccgtggttttccataataaaccattcaaggcgccaccctttaatgctgtccttgagaggaatgtcaaggtattccatcttcctcctgcggcgcatctctagacttgcaccaccaacgagctggtgctacccccagccatcccaggccgacagtgatacaaatacttccataat

SEQ ID NO: 82291 - DNA, 550 bp, Zea Mays
tcaacgcgtgggcagggccgtcaccgcttcataccgaggtaatgcgcccaccaacggattcgccttgacctcctctacgcgtagctcggtccaatttaggtttggcgctcgggaacgggcgattggcagcctcgccggcgtgctccgccgagcgtgcggggcggcgccgccgtgttttttctgtgaggtgggaagacacgtgaggactgttggatgtgttagtgacgatccagattagatcgggcgtaccgtttccacacgttagatccaaaccgtagagctataatctaatgggtgagaatcgacctcggctatttagaatttggaccgtagatctctaatccagtggcctgcgcggcataccgcttcgcccatttggcgatctaatctgtaccatccatcgtggatcggacggtgcagatccactgaaacccgtcagccgcgtcagttttgcacatgagtccttcagttatttaagaatcaacccgccatccacaggaactattcactgtgtctggggaattcttacccgagaccccctgcacttccc

SEQ ID NO: 82292 - DNA, 806 bp, Zea Mays
cccaagcagcccttgctgaccgtcccctccagcgcgtggtgctcctgccagccggcgggcgtagcaagcccccgtccctccgagcgtgaagatcaggccgaactagccccggcagtccccatggcaacctatgttcctgtgttcgtgggcatatgcagagaggaggaataaatgccacgctcgatcccacctctttccaattctccgtggctaagttttgtgtggcctagtgtgtgacttgtttgcaaccaataggaatccgccacatcactttaaatccgtgaatcgctaattacatgttagctcttgcgttataaatatgttttgttttgttccggttgcgttagaattgtaacgacgttgcccacaacttttagttgattaattaattgttggtttgttcgagggttattaaaataacaatttgattagaacgagtctataattttaacttgtgcttttataaatataaatgttaattagcttgattattactagcttaaatacttttcattaattatttgtttgttgttcgcgtgatttgcgcgtcatcgtgctgttcgcgcgtgtagtcgcgttggctcgcgcgtatcgtgcgctatcacgcgtgttggttcgcatgtcgtccgcgcgctgtttcgcacagtatcgcgtgtcgtcgtgcgtcattcgcgtgagtcgcgcgttgttcacgcgcgccgttcgcacgtgttgctctcatcgtcgtcacgtctgtttcgcgcgtgtcacgcgtgctgtttcgcgtatcgttcgcgcgtatcgcgcgtgctatttcgcgtatcgtt

SEQ ID NO: 82293 - DNA, 565 bp, Zea Mays
ttgttcttgatagtaacctcattcaaggctcggtaatcgatgcacatcctcttcatgccatccttgttctccacaaacagcactggggctgcccaaggagaggtactcggtctgatgtagcctttctccgacaactcatcaatctgcttcttgagttccaccaactctggtccgaacattcgataggctctcttggagataggggtggcgcctggtagaagctctatggcaaattcaaccttcctttcaggtggcataccggataactcctcgggaaacacatctgggaattctgatactacattgatagcctctgatggtttaatctcctcaatatgggtggtgacttggtgacaacttccttttcttggtccagacaagaccaactccactaacacttcttctcctgataacgacactaacttcactgttctcttatcacagctaagactggcttgatacttggttagccaattcatccctaggatgacatctatagttgtatcatggttacccataactattagatcagcgaggaactctatcccccttatttgaacttttg

SEQ ID NO: 82294 - DNA, 771 bp, Zea Mays
cagaccagatgctgtctctgtcaacaacggctttgcttaacaaacacttatttctatttctaatcaactagcgcgcccaccagttggtatatactttattttgtgtgtgtacatatattcaacctctacatatacttcatcatggattttcaggttcatttcacttaccaagtccctcattagcagaagaaggttgagataaatatattcaaacttgagttctatgttactgacttctgcaataatgtatatcatgcaattgcccaccggtaagattatatctagaagttcacccatatggtcacccaaaacacaactgcacttcgtagagtagagtttgaatatgagtataagaatgggtactctactgaagatagcctaacaacataaattggtagattcttgaaccaggtttgaaggaccttttctcctatatcgtccttggaaaatcattaatccacctgattggttactcgcaccattccattcagaatcatcgcgtgcgttgactttggttaagcatctgtttggttgtctgtacacgaggaacggtgactgcatgagtggatgcaaaataatttattctgagactatttatctacatctgcacatacgccagaaatggccatatctggccggccaaactcgcgtgggacaaagtgtgtggacgcagtaaactaatctgacgcattgttaccaaatcctagtgaatgcaatgttagcgatgatagcgattatctaggcggctaagcctattgggcaatgatagcg

SEQ ID NO: 82295 - DNA, 889 bp, Zea Mays
gtgaagtagtggtttctaagagttttatgaaggctgggcttcgttttcccttgcacaggatgttggttgaagtgttaaagacttttgagatataccttcatcagcttactcctgaatatttaatcaaagtgggggtttttatttgggccatgaggagccaagggctggagccaaatgccaagtgtttctgcaacattcatgaattatcctaccagacaaaagcaattgggaaggagtagtatcacaacaacttcgggtgctacagctttgaaccccgcttggatgcgaggtatcccgtgccaatgttccgaaagaaatggctgggttcttggatgaaacaatcgttttatgtcaaaaatgatttgagcaatagggaagatgggaggggtataatctagcaccctgtacggtcacgcttcggcatcaggaggcagtcaactgcaagggggaatgaagtgcaagcgtgtttgatggctttcaacactgtgtgtacttacatcagtaccaaggatttggttcaggagcatattgcttacaaggtgtggccgctcattaatgactaggagatgctgaaggagactgctgccggttctagcataggtggtttggtttacctaagatacacttatcgttacagaagtcagtttgataagtcgaatgaagactggcttgaggctgtcgaagctaccagtgacgagctgttgggagcttagacgaaggcagaggatgaagccatgaccattgccttcggcgctcgcggaaataggaggttgaatagagtttttgatgtgattggattttttatcctgattactgctttcctgtccaaaaacaagggtctaaagaaaaatggcaactttatcttcttccaccgcgcctaagccgaaga

SEQ ID NO: 82296 - DNA, 446 bp, Zea Mays
tggggctcaaatacagagaagaacaggggctacgatgcaaatatttctaagactcagagagtcccttgcgtggacgtcgggttgttttcaataaaactgaggttcctaggtgcaaaactgcgcccgcgaagagataacgcctgatccgaaccgtcagatctaaaccgacggcccagattagacttctcacactttgaaccgatacacagcaatagccatacgatctgtgatcaacggaccgtgttcaacataaccgagatcaacgtgccaccctcggatcatggatccacagtcgtgctcgctcggctgaaacggtacgcacggcttctaatctccaccgtcggtaaacggatcaacggcgtgacacccttctactaccgccaggagcgcagcacggcgacacagggccaactgcggtggtccatcgccgggaaatctcgatccca

SEQ ID NO: 82297 - DNA, 809 bp, Zea Mays
ttgatcattgaataacttcaattgacacttatgttgcttagtgcctcatatactatcaattaatgtctctcttgatatgcactaagtcaaaaggagaaatcagaataaatttatgcaatttgtgatctacttgatatatgacaaaatgacttagaaaaggatcacttgttgtagaactctctcttgtgcaaaatatttccatacattgtcttgaatataggtcttaagtaaccaagactaaggacaaagcacaatgaagagagtgtctttatgtaaaggtacaaaagggtaaactacttcctatcatttatacatgtacctaaatcttcctcttatatacattctttgcatatcttttataaaaggaagagaaagcatgtctatgcatatacctgcttcacacctagtttaaccactcaaaaatttcattcctgcattgatgcattttttgttaaaactggattaagtgattttcttgtcaaagagcttaaagcttaaccttgtaacgaggataggctacctttgtctcaaaggtggaagttccttaagtctctttgaaacctcaagggtaaatgcatcaaatatctataacatgctttcattagtgcatagtttgtcacgagcatcacacttatattatgacacaatgcacttcacattgtctatgatatagatatgttctcattaacctcattatgtgcatttggcatttaaggccaaaatatgtaatcctctcaaggcacatatttagggggaacaatctatattatatagaactatgataaagcttaattgacatatcttttgat

SEQ ID NO: 82298 - DNA, 464 bp, Zea Mays
tacctgatcccaatacatgatgactaatgtgatcgctagagaggagtgacacgatcggtggctcggggaaaggtgtgtgtggtcgatgttagacgatagagtttggggttagggtccagatcagcattgagacacacaacctatacggatcaagaacccaaagaaatgcattccatttgatgtttctatctctctgactaggcgattgaaattgtatgtatggaattaaaagataaacaatttgtaaggcacaatgtgtatggcacatatctagattaaacaaaatatttcttgttaaattaagccataaacactaattcacattgattttatcttcaaactagtgtttccttggcctataatatattgtgtttgttatggaaaaatattacataggaatccgaagacaacccctactaaatccttaatctataaaccctaaacatttgactaatcatttccct

SEQ ID NO: 82299 - DNA, 305 bp, Zea Mays
caatggcgtattgggagaggtgattgaatttattgagatactgcatcacagaatctcccccttgcttcagtcggatgaactcttccaatttcatttgtagcactcctttcggaacataatgttccctaaatgccagtttgaactcctcccaagtgacttgatgtcccacatgttggatggcagaaaagttctcccaccaagtgttagcggggcctcttaactgctgagcggcaaataggggcttctgtatctcggtgcatcggattagcccaaatttttgttccatcacccgcacccattcatca

SEQ ID NO: 82300 - DNA, 397 bp, Zea Mays
ttttattttctggatgattcacactagcgataatgtctcaaggctgtcactgagaaatccataattttcttgggcacttgctatatattttataaaatataagaaatgatattttctagatgaccgtgacttgaacgtagaaaaagtcaacaactagaacgcttcagcagcctggatataatatttttttaaaagaaccacctgcactgatggcatttgtaaactgtctcaggaacatgctaaatcattttgtaagaaataccgggcaatcgtatggatcagtctatgttagcttcaatttgttgacttttgttctttttttttcattaactggcaacaccttttgtctgtctgcactatggtctatggctcatgctgcccttctttgcacctcaac

SEQ ID NO: 82301 - DNA, 583 bp, Zea Mays
tttccatttcctgacataaggtggtgtcaggtaatcccatagtgagacaatgacaaaaggctttatgactcaaggcatcagctaccacattagccttccatgggtgataatgaatttctaggtcatagtccttgatcagctcgagccatcttctctgtctcatgtttaactccgactaggtgaaaatgtattttaaactcttgtgatcggtatacatatgacatacatttccagtagataatgacaccaaattttaagggcgtgaactattgcgactagttccaaatcgtgtgatgggtaatgttcctcatgccggcacagctaccttgaggcatacgctattactcgtccttattgcatcagaacacatacaagctcaatgcctgatgcgtcacaatatacatcaaatggcttctcaacatccggttgagccaaaaccgatgcagtagtcagtaaggttttcaattgttgaaaggcctcattgcacttgggagaccagtcaaacttaacatcattcttcagtagctcagtaataggtttaacgatcttggagaaatctgggataaacctgcggtaatatcca

SEQ ID NO: 82302 - DNA, 300 bp, Zea Mays
aattcctcaccggagtgcgactctggggcggaactaccccttcgcgtggacggctcgcttgcgctggtgattcctggtatggagcgctcacctgtgttcgccttcattactacaacaagtaggaccattgaattgaagtttggtgtgcctatgcctaggattagcctcgccggcgatggcttcaccgccgtcctatattttgggggaaaatggtcggggggaggaagacgggtgttggacggtcgatgggtagatcgacagtcctgggcgtgttactgcaaggatgatgtctggcccact

SEQ ID NO: 82303 - DNA, 410 bp, Zea Mays
aaataattcatattgtatctttgtcaattttttctgtaaaataaagaatcaatcaaattttggatcagatgcgggtcgcctatgggatggaatagaaacacgcacctatgaaacttttggtcacatacgattgcacccacagatcaaaatcatcacccataccattcctgttgagtatccgtcagatttcaggtatgcggtcctgttcgcgagaccattaacctgtggttccgtgggttgcgagatctcactcgatcggatggcgagttggaaacctcagggtagcccacgagtgttgaaaaccacaaaacgagcagttggtagcggattattgttctgatcagccttgatgggttgtacttgtcatactgtaactgcatcacaatgaagtaaggtgccgtgtaggggac

SEQ ID NO: 82304 - DNA, 336 bp, Zea Mays
gcttccatggcagtgtcatgtccttattcatatagtgaatgcgatcgagggccacaactagagataagggttgcacctccaatttgggcacatattagttagaaagatagactcgaacatggtctccttaattgagttagcgaacatgtccaataagtctgtcttgcttcatgtaaattgggcgctaccatttcctatgaacctccaccaactacgtcattgtgatttatatgttttttaaagtgatccttttggacttgacttatcaggcttttagaaaataacctacaccaaatgacttatgtaaatttattgtttcaataagtaccaccaaat

SEQ ID NO: 82305 - DNA, 618 bp, Zea Mays
ccagttatccctcaaaattagagggacaagagaggacgccagaagacgttcttgtcatgtccgttcctggccagctgtctcgcaactaaacacattcttagttttctcatagaacatgattgtctgaccgtagtacatggtgttaagaacaaggagccaactagatagggcgaatagtcatttctaaactctaattgtgatgactgatcgaaacaaatgcgaaattaaaccaaacaatctactcttgattacatccctctatcatgagcaccttataaaggatactatatgatataattaggtgacagctagagtaagcttacatacacaatcctagttaacaaggtcatgcaaacctatacaactagtcaactaagcataaagcgagccactccacgtactagtaagcaaaacgcacaaaccacgagcattactaattaacacttctcactagaggctatgtaaggacacctagaaacctataccaccgcttagctacacaatactaagaaaggatacttaactacacaagctaagagaactagttaattacacatgctaactagctccacaagagcaacaacgccagcataagtaatgaacaagtaaaacaagcta

SEQ ID NO: 82306 - DNA, 429 bp, Zea Mays
gtgtcccatgagggagatcagagtgaaataactgagatagcacccatatcagaaatgatgaggcaatcagggctggttatgcaagagggagctattgtcgaaggtacctttaatgccaaagctgaacaagctatggccgaagttgagagtgataacgaaagtgaagaggacgatagtattatgtgcccaactaagcctagtcatgttgaatttggaaaattcacagtaaaggcagaggatctggttgtgatgaagaaactaggttattttggagagaatgataatgaattgattcactttgctagagaagaaataattccagagccgaaggaagatgaagttgtggtattcaagagcttcttcagggcgaggcttcggttccccctttacgagatggtagaggaagttttaaagaagtttgagatctgt

SEQ ID NO: 82307 - DNA, 347 bp, Zea Mays
ggacctccgacctgtaaggtcgaagtgcagaagtttctcggcaaggtgaattatttacgaaggtttatttctaacctagccgggaagattgatgccttcacccctatccttcggcttaagaatgatgtcgaattcgcttggggggtagagcagtaggaagcatttgatctcattaaaaaatacttgtctttggccctcgtattaaaagcaccacaagcaggagtaccattcagattatacattgcagctgaagataaggtcattgggctattctgacacaagaaactaaaggaaaggagcatgtggtgacatatctaagtcgaaggttggtggatgctgaaacaagg

SEQ ID NO: 82308 - DNA, 294 bp, Zea Mays
ggcggctcatcaggggactcagtcaccaagcgtcccaactcccaacaactgtgttgtcaacttgtcatagacgatgaagcctcgaccctaaccaacgactttttgtgactctaatacccttgtcacgtggcttcgccactttggtacttgttagcaccaagaatgggtcgaaggaggaagggggactgggggaggtactggcatgggcagggagaaaggaagattcgaggtaggcgatgaaagcacgacaacgtctcagtatattggttcttagttcaataatgtctcccttat

SEQ ID NO: 82309 - DNA, 420 bp, Zea Mays
tggagggcgtccttgatggcgctatgtgatggtgacatgatgttctcggttcttcactgtggtagcattcaaacggacgacttggtgagcaaccagaggatcaaaagaggtcagaacaagaaccaagggggtatgaactaaccggagacggtctggttacagcgaggcgtaccacagcggcgcaaacaaccagttttggggaattgtggtggtcatgggctatggtggatgggaagggctggctgcgtgtgggttaggcacataatagagaggcggagcagggagagtcttcaatttaaagggatcggcctagctacttgtgaatttcggacaaaagtgtggatgccgacgacgagatatttctctgggacttgatcatcatggcgcgaggcagtagaaagcctcaggggcagtaactga

SEQ ID NO: 82310 - DNA, 496 bp, Zea Mays
atttcgaagaaggaagtatctgactcgatgaggtctttgagtgcgacccccaaggctaggagcgtccaggggaaggtaacgttaatgctacttcccccgtccactagtactttcttcacctggctttctcgaatcactggatcaacgaggagcgggtacttgccggggtggtcaaaattgagccattgatccgctcggctgaaggttattgcgtgctctgaccaccgataaggagccggggcactggtggttatcgcgcaggacctgtcggtcgttgaacttttgctgcctcttgttctcctgtgttccatgtcctccgaagatgacattgacctccctgtcaacgcgtgggaatgctccgccccctccccttcttgctgctaaggctgcctgggctcgccaggccctcctcgcgatgggggaggtggtagaggctggaacggtcggtcgtgcccgacggagtgcttgaaatccatgtagttccgcaaggtgtggc

SEQ ID NO: 82311 - DNA, 679 bp, Zea Mays
ctcactagaggattctagaaggttaaacatgacaaagatcttataagaacaagagatatggtcgagaataaaaaaaagtacgataatttcctaatagaaaaggaagatatacatgtcaattgatagaagtacaccttataacacagtttggggccaacttagtcatgactcatcttaggtagctgactcgatacctatattgtaaccaccaccattccttggaatataaaaggggggatggggagccttcgggctgatcgtatcatcatagaatacaacaccaacaacatacaggacgtaggaaattatctcacatcgagaactcgaacatgtataaatcttcatgtcttttgtgcatatacacaacctaccccatacattcactattgaaaaatcttagatagttggcacatctggtagggaaaatcacatagatcaatagaggattaatggcaaccatgggaataattcatctttagcaccctgagattcattgttgtttcgcttagaaatcctgagtccatccctcgcttttcagtgattttgatgtcccatgatcaagatcttgaagatccaacctctgtctaatcgaatcctagccaacctaattttatgatatcgacttggactcagactctacattaacattgattcaaacttggacttgagtctaactcag

SEQ ID NO: 82312 - DNA, 429 bp, Zea Mays
ggaaaatatagcatcgacctccacaaaaaccgttgaaacaatcatatcacctcttgcgaaggaactcgacaagggggacgtagacaaaattgtttcgcagaatgtcgacgcaaaaatcaaaaaggaagcaaagattgacaccaatgttgaagggccaactacttcaaagaaaattcatcggcgaatcaccactaacaatgtcaagaaaccgtcagaatcagtgacacgctacctgcaaaaattgcagagagttatgaaagatcaatcaaaagcggaatcagcatctcgaggagtacacacatagtcccaaattgacaatttcgaagtatgggaagaagatggaatgattcatactcgagaatcattacgtcttaaaatcaatatcccgatatacaagaaggaggatgttcctcctaaatttgtgaatgg

SEQ ID NO: 82313 - DNA, 529 bp, Zea Mays
gaaagctcgatgacccggacagagggcgcggaggggggagctgaagggcactcaacacctcaagcaggccctgacgaagaccttgcagcggcgtttgctctggcgcaggtggaagggtcgcgttagggttgttgggttttgggtttatttttgtgatactgaaggtcggttgcgcgcaagttccgacgtcccggcctacgcaagcagcccccgatgatgttgatactattatttttgcggctgcgagtgcaacgccttttaatggaaatgtgtctaagggttctgagactgagtcatggtcattgaacagggatgattttgggagccctttttcgtggattgaggagtcttttgaggaagatttagattacttcgctgcgttggatttggccgcatcgaagtccccaccgcaacctggtgcatgcgaagtgtctgcaccctggagagggtgatagccgaagacctgcgcaggcgaaaagtggtgtcaaaacagagcgttggtgggatgtcacgaagtgggagacgtcac

SEQ ID NO: 82314 - DNA, 282 bp, Zea Mays
gatcaattagccaacatttttacaaagccattggatgtaacgagattttgtactctaagaagtgaaatgaatgtgatcgatctctcaaatgtggcttgaagttgatcgcacatgtgtagtattgcatttcggctctaaatatgctctctacgctatttatttggtatttttgatgaattttcattttaaattgatccaagtagtttgatatgaaaatttgcattcctcaaatacataatgtgtatatgcatgcatactaacccttggattggtcgaaatgtc

SEQ ID NO: 82315 - DNA, 504 bp, Zea Mays
gtatggcaatggcgacttcgacgatagatggccacggtgcgagtgggatgaaggggagaagaggaggggatgcggccgggtcttatgtgcgcgcggaacgaaagctaacctctgaagccggaagacccgggaaggtggttgaggtcacggcggcgccgtctacgcggttcggttgagctcgcccgcgagtctcgcggggaagacggagtcgcgcgtctgagagtctatcgtgtgggcccacgatcacagtgcaaggccggttaacgcgggtgcggttgagcaacagacaagtgggatccaaatgtcggcgcggtgcactgagcggaggtgggcgcaattctggcgaagcgggcccacgcgccagcggcagaaggcgcgagtccgcgtgcagccgagcagttgacaagtggggcccgtgtggcagagagcgcaagcgcgcggtgggggagatgtctgggccgcgcgggtgtttctctgggtgggccgaaatgggtagcagccggc

SEQ ID NO: 82316 - DNA, 413 bp, Zea Mays
gtcaaaggatgtgctgggaaagaaaatcggcagagcagattaaagctctgaatctccacttcgacgctctcagatccgattatcgtacaagcaggtctaatcctcagaattatccatctccatcgttacctcttgggatcgatcgattattcagcgctgcctatatatatacatatttatccatatggaaacagaaacctcctagtcatgcacaatgggtcaatggttgcttgcgtcacttctctgacgggtcactcgctgctctgaagccaaggtggttgcattgcattgcatcactcaagaacggaacggatgatgagggttgtctctctcgaccctggaatcttggcgcggccgcaaagattggagtcgttctccgatccgatgatggtggagccgaggcgagaaagctg

SEQ ID NO: 82317 - DNA, 719 bp, Zea Mays
gtgctgaacacaacagaatgctgagcaaccgggttcacacctttccgcctgatgtacggatccgaggtaatgacaccgcaagagttaaagcatggatccccctgaacaaaccagttaaccgtccctgatatcgacgaatcaacctccaaagatcttattgacggagactgtgtcctcgccttgcaggccctaaacaagtatcaagctcagactaaggcatggcatgacaataatgtcatcccgagagaattcaatgaaggggacttagttctcacaaggaccaccagaacagagtcccggggcaagctagagccgaagtgggaagggccattcatagccatgacaaaggcattcccaaacgcttacaggctaacaacaccatatggccaagacttagagcattcgtggaacatagataacctctgtaaattcgttatttaagatccaaggcccaagcgcctttgtaattcttcaaacaatgttactcaggcccacactcctttccgcccgggggtgaggtttttaatgaggcggagccatgtaatatactgccaaaaagccccagcaaaaaaatccagccagcatcatggtcatgagtgtcaaaaagactgcatcgacggtcttcgacattcgacgcacaaaacagtcaccgcaagaggcagcctaggctaccctcgcgtgcgacacgtccgaagcaaaagccgcctaagggtgcagcc

SEQ ID NO: 82318 - DNA, 711 bp, Zea Mays
gagaggaagatacttccgcgacacgactcttgtgagggttggaggacacagcgctgctcctacacttgaagtaaatgaggtggttatttaccgaagatttttgaaagcagggcattgtttcctgttgagcagattcttggtcgaagtactgaagacgtttcaaatctttcttcatcaacttacccctgaaggtataatcaggatgggtttgtttatttgggctatgagaagccaaggattagaaccaagcgcaagatgtttttgcagcatgcatgaacttttgtacgagacgaaggctaccagcaaggagcagtacgacaacaacttcggctgttacaacttcattgctcaatccaatgcaagccatccagttcctacattctgaaaaagatggcctgaagcctagatggaagaatggttttatgttaagaatcatctgattgaaagagaggacattaaggaaatcatccaacgccccatctagtctcgattcggccttcggaggccaaaggtgacaatcgatcagaatgacaaagcatgcaaaaggctttttagcaacgtctgtgcctttattggcacaagggatatagttcaagagcacatagcatacagaatatggccacttgtagaaaactgggatatgccgaaggatactattgccgagtcaactgaaggtgggttggtctgattgaagtataccttgagatttag

SEQ ID NO: 82319 - DNA, 345 bp, Zea Mays
gcttgatacgttgtcatgcgtagggttgtatggacggtgtcgtcctgtctcctccgcctatcccataaggccttgataacgccacctgccttttgtgtggttcgttgtgcatcccctgcaactagtgctgacgatccatgtcagagggcagacgtcaggcaccgcctagacgcactcaaccacgtgtcggcatcggacctctgcccggtcaggggttggtatgggaacgtatggcggtgcggtatgttcggaccacatctaaccacggattcggaacatgcccgagggggtccgggccctagccacagcaacccggacacgcggtgccccggacctcacttggcc

SEQ ID NO: 82320 - DNA, 1256 bp, Zea Mays
cctcatgtaatttgtaaagtgtatataatcgttgtaataaaggagtgagccccaaaccacccctgccttgtaccatgaataaggaaataaagacatgtcgtgtttccttttccattacttgccctaggacttttaatctcgggacgagattcttttatggggggaaggatgtaacacctctggtgttactgttactaaaacttgagcatgacatcatcagcattagcatttcatatgtttgatacacctaggatgcattcactaggtaaaaatttcaaacaagttgtattgttatggcattttgcaaataagatcctagtataggatacttaaccctaaatagggatctgaagggtaaagcaagacccaaatggagaaaaccctaaagtttaaataaagtagtcataaaatattactaagaatggatctaagttacatttacacccctgagataccaaaaaccctaaaaaggaccctggaaaaccctaaatccaaaccctaggggttaagtgcaaaattagtccacttttagactaaagtgcaaaaagcatgtcaataaggtatcttaagtcatatggttcaccaacgtgtgaatttacaagctaagccttgaattattggacttatttgcaaaaagaccccataggtgttctagtgctaagtctgaaaaatcagtattttggctcaactttggagattcataactttcaaattagtgagaattcacctaagggcaccacatcaactttgtagttctatgaaaggggaacaattttgtttaagagtgtaagcaaggttgttatggagaaattggagataattaagtctaaagtctggctgtcaggctgttaaagtctgaatttcagactgacagtgcaaccacaaaaactttgggcatgaattcaagcttgattcaataggaatttggctactgctgctatggaaaaattatagctggtttgtagctctacaactttggtgcagagggatgataaagttgtcatgtgaaatctagagagaatttgccttgaagttgctctgtcaggttaactgaagtggaatgccatggtacagtaactgaagaagaatctcaggttcatcccctcgccgtcgacgaccctcgcgccacgattcccaccggtgaggtgattcgtgctcaccagtgcttggataacactcggggtcacgtaaatatcaccgccgttgataagtccggccagtaaacaactccggccaccgtataggttgccacggtc

SEQ ID NO: 82321 - DNA, 398 bp, Zea Mays
ccgtcaacgcatccacagcccgacgccgaaatcctcgctcgcccccaaatcctccgccaccgcgcccttccatcgacgacggactacccacgctttcgcatctcctgagctccgaggggcccccgccgcctccctcgctcatcgcccttccatcgacgcccttccaggtacgtgggcgcccccaagctcctcgcccttccaggtacggccccgccccgtatctccccttcatcggcgcccgtatctcctcgccctcccatccacagctactgcgctcgcccctttccatcgtcattgccctcttccatctgcagatcccctacgacctcgttagcggtgtgccctacatcgcactccccatcaccgccgtactctctatccacgccttgccccacccg

SEQ ID NO: 82322 - DNA, 626 bp, Zea Mays
gtctgtgtgtaccaaaaggggaggcacgagaagtcctgctcgaggaagctcacaactcagcctactccatccacctagggactaccaagatgtacctagacctcaaaactagatactggtggagagggatgaagaaagagatagcacagtatgtggcctggtgtgacacttgccaatgaacgaaggccgagcaccaaaagcctgcgaactattgcaacccctcccactgcctgaatggaagtggaaagaaataggcatggatttcgtaaccggactaccccggacacaaaaagggaataactctatctgggtgataatagaccatcttaccaaggtggcccattttatcccagtaaaaactacctttggaggagccacccttgcccgaatttatttcaaagagatagtcagactccatggcattccaagaaagatagtgtcagacagaggaacccagttcacctccaaattctggacaagccttcagaaagctatgggcaccaagctagacttcagcaccgcctatcaccctcaaacagacgggcagacagaaagggtcaacaaggtcctcgaagatctattaagagcctgtgtgttaacattcgatagaagatggaaatccagtt

SEQ ID NO: 82323 - DNA, 644 bp, Zea Mays
ctgagtttttgtagcttcgacttttgcttgcttagtttcagttttggcttgcgctttggcagcttcagcaactttctttgtaggagcagggctcaaggccttcgtagtctccagcacagcaccaagcacgttggccatcctcctcctcttgggagtcgcgacagaagccttttgaaccttaggcagttttgcctctgttggagggctcaaaatttctggcattttcatcattttttcaatctttggttctttagccctatcaaccttagtctcgactggctcaattgtaggcaccttcagcactacaatcggctctacagtattctgcacaagcggagtagctttcttggcctcgccaactgaagaggtccccgcaccaaatttaggcaccacagccggttcaatgtaacgcggtcgatgggttaggaccttcatctttttgcccttcggctcagctgcagtggccgaagcaacaatcttcctcttttttcgttgcccttgcagcggaaatcaataatcggggtatatgaagccgatcgcatcaaaaaccctattcagtcttttcttcccccgacctccgaaggctgcggacagagcattatcttcggccttggagtaagctccaagcagctcattgctggtag

SEQ ID NO: 82324 - DNA, 638 bp, Zea Mays
cgatgccctgggttataatcctagccgctcggtcgcagatctacgtttgggatcagtcgtgccaaaatagcatgccctctaatctcgatcgcacctggctagatcaacggcgccgcgcggttctccctcccagcaacaataggcgtggcggcgcacaggtctgacggcggagaactcaccggtgaacaccgttttcacgtcctactgtgcaattccgacgtggatgagtgctaacagaactatgggatccgcgcgaactgattaaggaagggcttaccggtattggaatggctcgaggtgttggccacgatgtcacgcggggttgcggcggagtagaggctccggcgagcaattgcttaaatcgtggtactcttctgctccaattgccgccaccccagcttccgctgcgccttggcgactgcttgagtaccgcgttgaggtgaaaagatggtggcgacagtggttctcccaattctatgggctttcggcggcggatctggttcctatggtatgtgcggctggcgagattcgctagttgctcaccggttttatgtatgggacgggaggagtccgagctgggtcgattgaagacccgacagagccctgcattcgaactttatcgcacgcggttgcaacaa

SEQ ID NO: 82325 - DNA, 764 bp, Zea Mays
ttcggtgttgcagctctacaagatcgtttaaggaaaggatttgacaatgatctaagcatcagatcctttttctgatactgttcaataggttgttgttccctactgctagttggggaataactaaccatgaggttcttttaactgaagaaatgggccgtttccatgagatggactggtgccagctcatatttaatgatttataccaagcggccaagaagtggcatactaggagcaataccaatgtgtctacaacaatttacggatgctccatcgtcattcttgtaagcatatcacctttttttttgtttgttttatgtagacaaattttggtatgcaaatatcatctgcattagattatgatttgttatgtgtcacaacgattcatgttatgcttttgtagctgtactatctggatcatcttcatgactcagctgcacctcagaataagcgtggaactccgcacataaaatattttgataggaatattattcaagcattgacaagagctgacaagggcaagatacgccaaggacaagaaccatttgggcattgttcggtaatttttttatgcgcatctattatattttttatctatttattttggcttatatatggtacatggatagaggtagtgtcgttttaatgtccaaatgaaactccattttatatgtgtgtatcagtttgtactccatcttacacgtctttttttagttccgaagcagcacagagacctgctacacagctgtaccacatgttcaaccaca

SEQ ID NO: 82326 - DNA, 648 bp, Zea Mays
tgcactttggccctactcgcgaaagtaacaagcaggttaccccgtcggtgttaccgcgtgtgtgagtgggtggctccaatccaaaccctgaccgggtgaattattcgtcaaaaataacatagaacggacaagctcctgtacacgttttgtcacgtctactactatactggcgaccgtggaacgcagctctattttgctgacttgtcctctgagtctgactcgtcagtcgtgactaggtctgccggtctgtagcataaactcctccagactagtacgtggtggtccacgcggatggatgcgaatcgtcgtcctgcatgtacacggaagacataccgaacccccggtagtgcacgatctgcaactcaacaggtcaaccccatgcacacgcagtgaagtgcgtatatatacggacctggttttcctcctcctacgtaccaaaggaaaccatagcactgcttccccaagcctcggctaactgcacgtacagcccgttcctaacaaataacaacagcaagctttgtttcatcagctgatcaattaatcgatctcatcctcttccagccacgctaatgatggcagccagcatctcttccagcccgatgagcctccccgtcggcgaccgttggctgtcggggaccctcttccaac

SEQ ID NO: 82327 - DNA, 605 bp, Zea Mays
cttgttgtataccctttgtatctcatgcagtgctcgagtgggtttgacctcgggttggcaagttacgaggaggtgaagttgggtctgtccgaccagacttttctggtggaaaatgggcgccaacacatgtcaaaccaattgggtttgctttcaaatttttccagagtgtcctaggggtctttaggcgccattttgttaattgggccatatggttttgaggtttggaaaaaggtgaacatgtttgatctttgaaagagggctggttttgaacttgagaaaaacctgatttttcttttatgttcttctctccagtgacctttttggggtttttctgaaatctttttggggtcactctctttctattttttgtagggtattaagtgtactacaacttttataattagcccaagtcatgacaatgtggtttacatagcctttttgctgaactcccctctagggctccatttgcctaagggagttgaattagggtttgagtcattctctcctctttaggtgcatggtaaggtccaagcatgacttctaagatgggttacacctacttaggatcttgacccccaagtttggtgtcttgtgctcaatttaac

SEQ ID NO: 82328 - DNA, 429 bp, Zea Mays
ctcttcggctgctgatgggagagacgggggccagaagaaacgacgcatgacgaatatactacaaacgattgagaaaaccctgccccggcttcgacaaacaaagctgccaaagcgatcgatgccgaagccactgctacagccgaagatgaaaacctcacaaccactctgtccgaaattgacagacttatatcagatgtggttgtggagaaggaggtggtcgcgacagttttagacaagggaaagaaaattgatgaaacctcttcagagggagcgaatttcgacctacgacacttggacagccaacaactctctgaagaggacaaatcggagttgaaagaatttacgatctccggtggttaccagtcggggtcaatggtctttggtggggtcgacgaagaagtcgtggatgcatccgggaccgtgctggtg

SEQ ID NO: 82329 - DNA, 370 bp, Zea Mays
gagtttccgcagaaatgggatgattgtctgcccttggcagaattttcgtacaataatagctaccaagcaagtattaagatggcaccatttgaagcattgtatgcacgacggtgccgtacccccttgaattggtctgaaccaggagaaaggtggtacttcagacctgatttagttaaagaaactgaagcaaagattcaacgaataaggcaccacttgaaagaagctcaagctcggcaaaaaagttatgcagacaaacgacgccaaatcttgtactttcaagtcagggattatgtgtacctgaaagtatcaccaatgaagggagtaaatcgtttcggtgtaaaaggaaagcttgcaccccgatacattgttc

SEQ ID NO: 82330 - DNA, 625 bp, Zea Mays
ctaccccattagaggtggccggtgaagttgaggtgttcgtgcggaacgtcgacggcgcaagaaggttgtccacgacgggcagcgatagtcccagcgacaaccggctccggcggtgctggggaacagcgataaactgcctctgtaacagtgggtggaggagacggtggtgtcaccaactcttacatccatcggcactgttggcgacgaatccgcctctcccatcggcaccgacggtgacgggaggacgatagggaggccgcattcaaccatcggcagcgcactaccgctatctatccagcatagatcgcgcaaaagtgcacgttctgcacttgaatacagcgtgtagggatggcgttcatcggtgggatgactgcatcttgtccaacggcgtacgcctccaacagcgcatcatcgacgacatgcatggagagcttcacgcgaagaggaacatttttgctccatacctttcttgtcgattttgagaccagggcctccgttcttctcaaaaacagcgagcaatcttcttcttctccatctgttctcgcgagcacgtgctcataacgtgttgtataatagtgaaaacaagtttaggagaaatgacagcaactgttgtattccaagaatt

SEQ ID NO: 82331 - DNA, 424 bp, Zea Mays
tcctgccccatcaaacacccagaatggccaagtagccctagcacaaataggaggtcgtgcatgcttctactgtggagaacagatcactaggcgaagaactgtcccaagaaagcagctcagcagccgcaagtagtcaatgccctagcaagacaaagagcgccacagcaagcaccaggagtccgtggtcaggcctacaattgcgaaaaggtgaaccacctggaggctgaagcaatccaggatgctcaggacgtggcggtaggttgtttccagtcgaatccaacccagcaaaagtactatttgatactagagccacacattcttttgtttctacatcttgggtagaatcacataacatccccatagaaccaatgatcccgcctttaagagttaattcagttgggggaaaagttcagtccgataggat

SEQ ID NO: 82332 - DNA, 426 bp, Zea Mays
ggaccgtgggttgattctatattaaaccagggactcatgtgaaaatagcgcgcatcgaaggggtatcacgaatcttgggccgttggatccttcctggacggcccggattagaccgaacgccatccggaatccatgagcaatgcggttccttggatctcgcatcaatggtgtatacttttaagtactcagattgtttgccacccgtttgattcgcagcggacggcggagatgaacccaggccgaaccggtatctgatgttctaatcaagaccctcccccacgagttcaagggcccacggccatcctatcctaggtgaggccggcggcgactcgatcttctcaaccgcggcggcgccattgccgcccctagttcgccggcaacatcaaggctaatctctaacaaaatcctacgaaaatcactactgag

SEQ ID NO: 82333 - DNA, 725 bp, Zea Mays
tggttactgagatgtggcttgaaggacagaggtaatgccgtgcttctatgaatgcagtgagttcatgtttttgattcggtagagctcgacgaatacggtccatgtttttttttcagccgaagggtgtactacagaactaaggcgaaagagcgtggtcgagctgtgctctcaggatacgtgttactccgaaacgtgtcttcaccactgtaaaacatgtaaagatgaaagaagtgtatcctgtgctctcagtcccagcagtgtcatctcaagaaaggaactgcaacaacgtcgtctcaacagttgacggcgaagggacaaggcaattttcttctcagctggtggtttaccatgatttattgtcgagtggtatatgaacccaaatctctgggctgagtgggctgcagattgccgattgtggatttgtaaaatcccgtgtgcctgcctgcctatccatgcattcctcgtgccgcagtcatgctaccagtgggctaacgtttacagtgaattcattatcgatgttctcacacacaaggcagcccctgcactatagaacttcaggaagacgccttttacgttgtctggttccctgttttacaatacgctgcctaatgcctatatagcataggcatggaggtggttgcggaagcaggaccgcgtgtacaacactactgtagttctctcagtgcctccttggtcattctccaacctccatgctcgtctcctgc

SEQ ID NO: 82334 - DNA, 472 bp, Zea Mays
atgatgtctagccatgtaaagagaatgagaattggccaatgtccataactcttccaagagtttagccagagggcagggggtgggggaggagttaaagagttcattgctggcaaaccatttagccttaggggctggtcattgctgctaatccccaccttaatttagtagtgttcatgttaattaggctacagatcctgcggcgaaggtctaacacaagtagtatctaggtatgaggagcagagttttgttagagaagtgagtgtcaaaatggcacattatttcatttttagtttcatggagatacccagtttgagcagtatctaggtatgaggagttacaaatttgtttatgttatgtattgtcctcttgcgtcatactgataagagaaccatgatgacaaaatccacctgttttggtgtttaccttgagccttttaaaggttttcattaacatttcatcatgcttcacaatc

SEQ ID NO: 82335 - DNA, 433 bp, Zea Mays
aatttgggatttcccccaaatcaacaaagaacaccgtgcagtgtgagctcaccatggccagtctgctccaggttgattcataaccctctgttgagtgttctagcatctctaggatctcctgttgcttgtaggctcgattgattgaactagaccgtaccgaatttcccggaacatcgtagcctcttctcgagttttaccgtcgtcgtgaacaggcatgctccggcccggattagtgcgattgattgaggggttagtgtcgccgagggtagaattcggtgccgactaagttaggggtccggtattggcatattccggccagtataggctcaccggagacgtgctcgtcgccgaccaccatcgcggacctggtgttgcgaaggaatagaacttcgggggtcttggtgcaaacgttagtgagacagataaatagtgc

SEQ ID NO: 82336 - DNA, 492 bp, Zea Mays
caggaaaaccggttgagtggcctactcagccgatttactcaacctgttttgagatattgcccggtaaggctttaactacaatcaatattagtgacatgagtaactttggcaataaaaataggatttcacatgtcattttgtgcataaagcaattttatatcaaacaatcatgattcaaattttagttttatgacacgtttcgagaatccaagatatttagttcactcctaagaaaacaaaacctagtctcatcaaggggttttgtgaagatatcgactagttgattttcagtgctcacatgaaacaatttgatatctcctttggcttcatggtctctcaagaaatgatgtctaatatcaatgtgtttggttctagagtgttgcacaggattgtttgcaagttttatggcactctcattgtcacacagtagtggaatcttattaaactcgcaaccaaaatctctaagggtttgcttcatccataacaaccgtg

SEQ ID NO: 82337 - DNA, 735 bp, Zea Mays
gaaaagtatggccccagtgaaatgcagtcgatttgagagcaccaaatctgagaatctgtacagaattgatccatgaaccctatagtaaacttaaagagtgttgtttggggaataagttttattaatggaggttaccctgttcttaacaagaatcaagagaaagagggggtgaaaggtgatcagcagaacaatgaagatcaatgaactagaaatatctgcagaaggaaaagatctttggttactgtggttttggatgtgtgcaggtgaagaggagataggaacgaccgcgacaagataactacgggctgattcacggtcccgcaaacctggccggagcctgaccggagcatggccagagatttttttgctgttgttcgccttggcgtggtattttgtcgccgtgtcactcgcgccaccaccttagctcattgtgcctcttccttacgtggtagccatgtgctagcaatgcatttcgtagccgctgatcgttagccggaccaccgtgcctataaatagcgccatggaccacagcgaggcactcacgacttcatcagtgagctcaattgaagccaaaattcgcactgccttctccacgtctccccaaattagttatgcacggtgaatccataaccctttgtgattgtatagccccaacatgacctcctaattccaccaaaactcgtcacaacgatgttttcccccttctcagacaccgacgagcacaaattcttcgcg

SEQ ID NO: 82338 - DNA, 956 bp, Zea Mays
gtgtcataactctctgtgtatgtatttattcatatttcatatacttatgactatgtgactaatacgtgctcacctcttctttcgtttcagtgatttcgcctgctcgcctgcacgtctcatgtcctgcctggttagggggaggagatgacgaggaccctccttgccccttcagacaggtcaagggcaagattgtctatcttgagcagcaagagggcataaagaagaggcgtctgtatagagctgctcgtgcagcgcttgcagcagcagcaaatcaggctaagcagggagggcagttgaggatttcctctgatcagatcgcctaccgagttcgtcgcctcgcgtctcggactcgctcctccactgctctctccacttcttctgacccagtctccactccacctcccacttcgacagctcctgccgctctcgagtcgtccaccactcccactgtttccaccacctccaccactcctgcttccactgctcccgctttcgctccacctattcctccacctcgcttccgggagcatgacaagaccgaggtgagaccgcttgctactgatccttgcctgcttgatcttcaacgagccatagttgcccaggtacgtcggttcagaaacgtacatgtggattcttggttgccagcttagagggacccaacagttgcgccactcttcagtactaggacccaggagtccttcttcagggtgcagttgtctgctcaaattgccctacgagcgcaccggtttttggatctctatgccttcctttcagtagccagtgtagagtcagagggtcatatctcatatctgccaggtttacactctcttctgacattcggtggcaaatatattgaggagtgggtcagagtcttctatgccacagtatggatatatccaaatcattagtggatgaggttcaggtttgagcgagaggatgtgactctgcatgaaact

SEQ ID NO: 82339 - DNA, 735 bp, Zea Mays
aattttctaggaattttacaagtttctgtaattaattttgtacaaaaaatcattctctaaattgatttctctgctttattaattgtttgaactgcgcgcacaataaacagaatcccgggggtctctgctcaaaaccttctagactcagcgcacagttactagggatggagggttgaatgtatgaaaacgtagggtctcttttagaaagtacacgcggcgaagaggtatcattaaacctgagccatccgatcaatactagacgcctcagattagatccatatttcatcgaaacggtattggatacggaccgtcagatcaccatccaagggtcggcatctatcgacactagcgctcccgctcacccacacacccgcagatctacggctctgatttgttttccccaaagcggtaagctacaattgatctaggccgctcatcaaaacatctaaagttctcattcgcttacccctagatctaatccccaccgcacaataatcaatcggacggtgcacggttcctcacctttctctggtcggcacaaggtggcggcacatgcctctacggcgccctagcccgccgccgtgcacggatttgaagacctagtgatctttatgtaccacgactcggtgcaagaggaaattgagacacaagcgaatcgattagggggtatcttacaggcggcggcgaaggattcgatgctgccctcggcaggatgcggcaacacggcggagatgg

SEQ ID NO: 82340 - DNA, 633 bp, Zea Mays
gtggaatctacagaacaaactcaaggcgaggaacagttgttcttgactctttcaactgctgcattgttgggcctttcgggatccaaatccttacagtttgatggcctccttaatgggtgacatatttagctgttggtgcattttgggagtactaattctttcatcagtaacactttggctgctcaattacctggtcttctgcccttacctgtgccagcgaccgtcaaagttgctaatggggccatgttactgtgcacgtcttatataccagattgatcttggttggttgcttcattcacctttcaacatgatttgaaggtgttggatctacctgttgttgacattgttttaggcatggactggttggaacttcacagcccaatgaaaatcaattggggacacaagtggatgtctttccctaacaaaggtcaaatcatttccttacatggagttgatacagtacccacaagcaacgtgtttgtgaagttaattactctctatcgagcacactgttgtttccccatatgctcaatctgaacaccctcctgacattgcttccttgtctaaatttgcacacttgtttcaggggcctagtgtccttcctccttctaggccttgttaccacaccattcc

SEQ ID NO: 82341 - DNA, 464 bp, Zea Mays
atggcacagattggtgacaagggtgttcaagtcattaaggaaatgctcgaacagaaggtggataagtacaaatgcttccgtcaggacagttctatggtttgaagaccgattggtggttcctaaaaatccagaactcaggaagaaaatattggatgaagctcatctttccaaattttccatgcaccccgatagtaacaagatgtatcatgatctcagatccttgtactggtggaccaggatgaagaggaaaattgctaagtatatatctgaatgcgacacttgccaaagagtcaaggctagtcatttgaaggtagcaggtaccttacagccccttcccataccatcttggaaatgggaggatgtttgcatggattttattgtgggattgcccaacacctcccgacaccatgattctatttgggtcattgtggatagattaaccaagacagctcatttcttgctag

SEQ ID NO: 82342 - DNA, 848 bp, Zea Mays
aattaacccgcgatttctcgccgcacttcaatctttgccgtcggattacccctagccgtgggcggagctctctacgccttgtttccaggtaagaaagtcctagaccaatccgccttggtctcagaaccatgtagtatgggagagcgttcgatatggggcatgggatcgccggaaggctgaatccggccatccctccgccgcgttactaggcggcgccaccatccggcgctggggggaggaagatgggcctctagccgtcgattctctgatggagggtggcgattagataaaaggtaatggtttggtctggggcgaagtgagccgttagatcatggatgagcgatcgcgatcaaagcaaggcttgggcctcgcgtgaaccgtggatttgggaggtaacggctatgattagatcacacgtaatatttcatccgaatcgatgcaggtcgtccgatctggatcctatgtatgaggatcgatctctgttatttttaagtatgggtgattgatcgtagatccgacaggtctgggagagtaccggttcacctaaaacccctatttaatctgggtcgttcggatttgatcgggcggctgttatgggtccataccctttcggtcgtgacaaattcttaaagagacctcgtaattttcttgaatagacccacgatccatctacattcataaaccaatacgaatgagtccttttattcacaaaatcaaccctgcatttgatagaaatagcgacaccgtccataataaagtcggttttcttttatagaatccaaaaatgatttttaggatgaaagttagtgcaataaaatttagaaaacccataactaaatcattttaac

SEQ ID NO: 82343 - DNA, 559 bp, Zea Mays
cctaagtaggagttatggcagtggccaatgctttccatgacatgcggtgcatcgatttgcaactcatcaactccgcaaatatagtcctcgtacccaagaaaggagcagaaaccgcgggagacgatttcagacccacaagtttaatccactctcttattgagatcattacaaagactcccacacttcgagtagcctcaacatgaatgagatagtctcaccttgccaaagtgccttcaccaagatgaggagtatccatgacaactacatggcagtgcgtagcatgtgattaggagatgtaatagaagcaaaattgccgccctcttccctaagctcgacattgccaaagcaattgactctgtcagatgggattaccttcttgcgctattacaacggcttgggtttctgacacgttggcgtgattggattgcaaccattctttcttcgtctgcctcacgggtgttcgtcaacagggtcccaaaccctcctctccggcatggaagaggccttcggcaaggcgacccgctctccccctcctcttcgtcactacgattgacctttt

SEQ ID NO: 82344 - DNA, 1474 bp, Zea Mays
ctccacagttggaggactttggagactctgagttctcgaaggaacaacttcccttcgaggataagaagtctccgccgccaattccttgaccatcctcgttcgagaatttggatgactccatgggcctctctcacatcaagagggcgtacatccggtctattaagcggctagactggagggctctgatgacttaggcgaggacttcgaggagagcatcgaggaagaggaggatcgggacgatgacaaggacgacgaggattgtggcggcggtgacggtggtggaaaaggtgatggcggtgagggcggtggtggcagtagcaagggcagcaaaagcggcagtggtggcagcaagggcagcgaaggcggcggtggcagcagcagcagtggcggtggcggcgacagttgaggcaaatgctacagcggcaatgggggtggcaacgctggtgggaaggcaccaccggcctaggtattagtattatggtggtagtgggtaggagtagtagtaggggtaggtgtatttttccaggactagttcataatcaactagttctactcttgtgatgacccctcctatgataaagttttcatcttgcatcccctgagtttttcttctatgctaccctatgctttgtttcatccctagcactaagtctgttcttcttacttagtgtccctgtgctttaactttgacaactaagctctcccgactgactctgcgtggaagcaggtttttcgtccgactttgctcatctgacttaactcgcccgacataacgtttcttccattcgatccaaaaaaattgtttccctcgtggtagtgttgtgataggtctagagcatatacatatatatatacattgcacaccattcgacttcttgaagaaaccctagttctgtttttcatcacgactccttgaaattctcttgcttctgtagcctgtgcctaattcctttctcacaagataccccatggctcccaagaagaagtagggagtttcagcagttgtcatccctcctattgaccccaacaaccaacttcctttatgtgataactacgcctctctcatttctgagtctgacttgttgtgtcttgtctggatgggtgttcttcccccaaaaatattaagctcatggtgggtttgggaggggattaccgtacccacataggacacccatgagtctatcgtctttgttctcttattgattcgaggtttgggtttacccatttccccctttttctatggccttctcgatttttattctcttaatctgactcacttgaatcccaattacattcttcaatttgccaacttcgtgaacctctatgaagccttgggattagcccacacttcagattgtggaaatatctctaccattggaagatggggatggtgggtggacaacattaggtagttggtggggccaacctagaacatcgtcggtaggaaggttgaatatctagatatccctctgaa

SEQ ID NO: 82345 - DNA, 482 bp, Zea Mays
tcaatgtagtgaccaccaaacgtcagcatagagtacatgcctggtaaatagaagcaggagcgatggaagctggtgtggtggaacctataggtgcagcgagggtggtggttagtactggagtggcgaaaactagtgtggtagtgaaagatggagtggtagtggtggctagagcaaaggggttgaatctagctagagtgtagtgtgcccgagacgagaggcgacatacacggaaggctatctggtcaaagccaatccgcatatgtcctccctgctctaccctctcaactactgctgctgctgctactactgctgctgctctagtagatctatccaatttttgcttcttctttcctcccgactgctctaggtagacctcctttcccttgtcctgtctaaatgggcgagggggatcctgatcatcgcccctcctactagagttatattcttggtcctcaccatactaactactggaactgcccacg

SEQ ID NO: 82346 - DNA, 420 bp, Zea Mays
ctaatgagtcggtcagctgcctcctctcccaaggtcccattccatgccactccccttttcctcaccattttgtgtgcaagctctatcggatgtactggttagagttgcagtaactgtggatctatcagatgtttcatgtttgcataaggaaataggatagtttccccctcacttgtttaggcattataaaatggattggattggtcgaaggactacaaaacacatgaacatcggctgtcgtatgtgtcccattcaattcgattcgcggtgtggcattatcccttcaagttctgatggcgagtttgagtttgcacttgcaattagtggttttagatctccgtttgttccaatcaacgaactaaatcacttcgtttctgcattcgggtggttgtaatcatggaggtctttttagattacttt

SEQ ID NO: 82347 - DNA, 437 bp, Zea Mays
ttataaaattaaatctactgcacggttcgccatcacgtcagatgtcagggcatctctcctccgaatacaagactcagcttcactacaaacgctctccttggtgtataaatagggcagtggtccctccattgacaacaacaacaacgcacgtagacgagttcttgctttctcgctctgtcttagatattgacacttgtctcaatcatctatagggacttggggacttcccttctcccgctgtgcttgtaaacccccactataggcaccacggtgcgagtaatataagcatcatcccccctgctgtaagtagggcctcgagaagcccgaaccaggataaacgcttgtgtcatctcgcacaccatctagagccggccacgcgacattctactcattggttaagaactcgtagtccaaacaccgacagttggcgtgccagg

SEQ ID NO: 82348 - DNA, 455 bp, Zea Mays
aaactaagaaaaatcatttcttagcgctgaatcggaccgatggaccagtctgacgaccccttatctaacttaggaacaattccttcattccaaatgatgacccattttctgtaggcatcaaatcatctaaaagtactatgctcttttactgtgctcttatacattcattggactatgcattttgttctgacaatgcaacattagatgatccaacgatggtccgaggcttgtattggcttctttttcttccactgcgcacgaggcctttagcttaattctttcttttccccttcatcttgcttgcgcttgagcgccacatctatgcttgccaagcttcccgaccgcgtgccctcaccatactccatgccgccttagataccacgagtgctgctctacacctcttatcgacataccctcacccttcgtagcttctaggttttttcatcccctagcca

SEQ ID NO: 82349 - DNA, 526 bp, Zea Mays
aattaatgttataattatcaagaattctagagtgtatgtcccattctatagaagcttgtggacttatgtgttaaaaataggacctatatgtattgttctttgaactatgtgggacgacgggtttatttagaaaaagacagtgcctctttatgaaagtagccatagcgaaggggtatccttacttctcagacacccgattgcacacctacaactaagattagatcttggctactcatgaaccggtatccgatactgaccacacgatcaaacccatgcccttagatcccaatctggcagtcctagtttaatgagccaaaacggtgtaaacactcctaatctcacacgtccgctcaagatccaacagtcacgattcaatctggtcgaaagggtacctgcagctgtttatcagccgatcgacgaccacccacacatattctctccccccgagctctgatcagtggcgcgccctgggcagacgacaacgccattatcggacgccccaatctcttaatcccgtgcaagaaac

SEQ ID NO: 82350 - DNA, 512 bp, Zea Mays
tcggatgttggactgcaggggagtacgggaatcgcggtcgcaaggaggaggatagcttgaagcttcgtccaaggaggtccgaggagtctgtttggcttttggccaaggtccctcctttcggccattgctttccttttccccccaattttgatctttagtattttttgaggagatatgatctttagtattttctaaacttgaaaaacttgtctggctcttagggttgatgcatatacatgtgttgctattacttgcttgctccttgtcgacgatggtatagatagcagtagcactgtacacaagcagcaagcaacaccccacctccttgcattgactgttgcattttttatgaaacctaaagttgtgtttccatctgattgtaggcccatttgactctagtctccggtctctatctccactccaactacagccggcccgcgtctcctcgaccatcaccaccttgacggtctccgtgaaggtatttttcttctttctttgatgcatattattag

SEQ ID NO: 82351 - DNA, 929 bp, Zea Mays
gggagagttcctccaccaggaccgcgtgaaacctcgtatctggaattctttgagacgcgtcctccactttttgttaaagcagaagaccctcttgaagctgatgagtggataaggataatggagcaaaagttcggattagtccgttgcacagaaacacagaagtcgttatttgctgcccaacaactgagaggcccttctagtacctggtgggtgaattttgtagcagttcaaccagccggacattaggtcacttgggatgaattcaagctagcatcccttgaacactatgttctagagggagtgcttcacacgaaacaagaggagtttattcgactaaagaaagggggagatactgtaatgcagtatctcaataagtttaaccatttataccaatatgctatagaccaagtgaacactgacctgaagaaaataattgcttcatgaggggactcaacgactggctccaacggaaaatgaccacctgcctagatcttacttacaatagagatgtcagcacggcgctggcagtagaagccaagaacataggctagggaaaatcaaagggatttggaggtgacaggtctaatcagggacctgagaagcgaaccgggttggtaatccgaccttttaatcagaatcgttgttcgcctcgtccaccgtcctatccgttcaaaaagcctgctttcatttgtcctaccactgcccccacttctacaaatcagccgagtgcccctggtgctcatttccctgctctccctagttcttctactcgctgcttcaactgtggaaagtctggtcattttataaaggactgtccatacccgaagtagaataaattcaacactcagcagaactctgggatctccaatcaaggtaaagggaacatggctactaaattagcgagcaaaaatgtcaagaagtctgggcga

SEQ ID NO: 82352 - DNA, 433 bp, Zea Mays
gtggatccgcttgtgaacagctcggattagatcatgccataccgtttcgccatgattcgttcgggtccgttgatctggttcgggcggtagatcgacgaccgacgatgtatctggatctcatagaaacctagccgtcgatctcagatcctgcgatcctggttgtgtaccgatttacagcagcgctgggttaatctggttcgcccacgtctaatccaacgacccgcagtgcacggtaccccttcgccgagccattcttgcataagaggccctgtagaatcaagaaaccaacctgccgtccatgcggctgtagctctgagtctaggaaatttttatatcccagcccctgtattttccagaattcatgcgcgcagttcagggatcagaagaagttgataattaataacagaaattgatttagagtggaaaaataaat

SEQ ID NO: 82353 - DNA, 1187 bp, Zea Mays
tgccttcgctcgcatgccgacgagataggatgaagacatggcttggcagagaatccatacggtgaccaagtgaagatcatggacaacaagattaatagttccactatcctcttgctatatagccgaggcacgtctgtcttggttcctcagcacccaagtgtgtgccctcccttggctaaaaagggagagcacacacgctacttagagaaggggggacgacacactgactccactgggacgactgtactcgagctccccgttcaggggagcagggtcgaacaaactcgcttgaatctcatactttctgaagcttctagcaatacaactcacattagagtaaggtattacgctccggtggcctgatccactctaaaactttgcgtgttcttgtgttcattcgtctcaggagacaaaccctaggttgtctccctgttcttaggattaggcgagtgcactccgccagcccgccggggttttctctccgacaaatatgaataaacatacacaacaaatcaaaccctccaccaaccgctctccctaagttcagtttagtctgtcttcggtagatcgtgtaaaataggggatgtgacactgtagataacactatttgcaaagtgaaatttgaaatagagggtgaggtatggaagttgttgggatgaccttataaggatatgacatgttactaagttaggggctatttggaaaagctccaatatcagctgaagagaacctaaaggttttaagatccatacgtttttttattaattagcatataatacgtgctaacgtataatcccgataagggagagtcggcggagggagagggagatggacgatccatataatattgttctttagatttgaatgagtaagtgagagatgttatctaacaaattgaaccgttagttttgatggtgcgttaagtttgattacaatttgtctgatgaatttagtagaggttatggttgtggggtgattttgttggatggatttgcaaagtttaaagtgatggattatatagtgctataaattatttatttaacaatatctcttttatgattataaagtgactattattagatattatgtttagttatgaatctaaatgtgacatgatcgcattatagtagttaaatactgttagccaaagaccgtaaaaaatgaatcttgatacgtgtgcttgcctt

SEQ ID NO: 82354 - DNA, 396 bp, Zea Mays
attcatcggctacaggttgtcacgatcagtcacaacccctttatgggatgacgatagacatgtaccttgggcaacaacagcctcccacacgcatcggcgataaatttgccaatctgcgcatgtccggaccgtccgcacgtgagcgcggaccgtccgggccagcggcgaccgatcccatttttagaagcgaattaccgaggcctgcacccaagccgccacataccgtgcaaaccctagataacccattcggaccgtccgcgtatgacgcaaggcaatccgaatataatgtcggacggtccggccacatagccggacagtccgcgcacggagtcggacggtccgcgtatttaactagatggtctgacacaaagttttttgagaaggatggatatccaa

SEQ ID NO: 82355 - DNA, 309 bp, Zea Mays
aacaagtgcggaaaaaccagagtctatcgcgaagactatccgcgcagaagtcgcctaagggtgcagccggactagcacaacaagtgcggaaaaaccaaagtctatcgcgaagactatccgcgcagaagtcgcctaagggtgcagccggactagcacaacaagtgcgaaaaaacgaaagtccatcgcgaagactatccgcgcagaagtcgcctacgggtgcagccggaccttagtgacagggaacgcggaacgacgccgcgtaccgcgttccgggaacttcgtcccgaaacgaggaacgggaacgtcgcg

SEQ ID NO: 82356 - DNA, 771 bp, Zea Mays
atttttatcatagagctttaccaaactattcatttcactatcgctatgtttcaaaggtatctgtgttgtctgacagactattcttgttcagactgatgctgccaaatagagagcattaaccatggatgtgtaagcatatacgtccttctgtgctacccctctcattcttttaatcatgggcagtgacattcttgatatccatttcagaggaggatcttatcctaaaacccagccttacaaacggaaccataaaaaagaagattttgcatcaaagttgataatagggattaataggacatgttggaaatataccatgggacgtaacaagtacgtatgttggaaatctactatggggtataatagctgacgatatgaaaaagctcttctctgattgcaaaatgtttgttcatccgatctggaactgacaagaagatagacgaaccaaacggttgtgtggatgttgatttttttcctgatggcacatctcttgatgttcatcttatatggatatttggcaccttggccgttgttgttggagttagaacatttgtaaagggtcctttgtgcatatagcatatatggaagaggtacacatgaaaattgaccccccaaatcacaatatggtatcgcgtgctagggtttggcctcacaaccgctgcccgtaggcactgcagccagccatgcactgtcgatccatcaacgccgggtctgtgcgtctggccgccgcctgcgtggggctgctctcacgccgcatccgcgttgttgggggac

SEQ ID NO: 82357 - DNA, 888 bp, Zea Mays
ttcagcggggtagctgatggccttgacctgaagtactaccctcaccgttcgaccagcagtgctggaggtgtgattgtctcaccagttggtgatggcaatcccaggctgaacagcatggtcaacttgggctgccatgctcaacacagagttggaccacgcccttgacgagttgggcaaggttcgggcggaggttgcggaattgcgtgctgagtgcgcagcacgccactatttggatggtggttctcccgcccctgtcgggattcagcaccttaccgttcaccgccccgtggtcgcttcgactatggtaccccagactgcaggacccgcatagatttggatccttagatcgacagagtcggagtctgtaataatgcttagttcagtgtcttatcctaagtcaattttggttagagttagtttgcttaacttatgttggatgcttgttatgatggacatgtactgaagttggatctttataatgattgtcaccaaggtgtggatatcccctgcaacttggtgtagttattaataaagtctgttatttagttgggtaatcccgttatttcccctttcctctttatatgagaagctgtcagtgaagatggtcatgcgtttagtgctatggagattttctatacatcttttcttatgctgaaagattgcagagtcagatctgatatgtgtgtgattcctacagatgtctgagaacaggcgtagaggtgcgaggcgtgcatagccaaagcagtaggcaccccaagaggaggcagctccgcagcagcatttgccatcgccacccccgatgaccattgagcagatgttcttgatgcagacccaagcagttcaggcaattggtcagacattagcagcaatgcagcaagttcagcagca
